United States Patent Application Publication US 2007/0067865 A1 - sequence listing, part 15

SEQ ID NO: 94779 - DNA, 319 bp, Glycine max
ttgggggggggggggggggggggggggggggggggggggggggggggggggggggggggggggggggggggggaataacaattaaagggggaaagaacaaggaagtgccctggggaaaaaactgggccccgcagaataacggtttaacccgaaaaaaaatcccggtatggccaaggtaagggtaactggcaaaaaaattgcccataaagggtaccttgataactggaaattgaaaatgtagggaataacaaggtttatgtaaatcagactaggcccgctatggctaagttggccttatacagtactatatggggggtta

SEQ ID NO: 94780 - DNA, 406 bp, Glycine max
cacaacaaaccctgaggggacatcgaaaggtatttaggggttgtaagggatctgaccgatgacggcataagtaggcagctattattaaagcacacgcacatgctggtgcggggagagtatttaagctaatatgtgtggtgaaggtttagtgatacggacttttaaagtgccccggacccgggttgtgctcgtcagcctggtcaaggtcagtcatcctcatcttcggatccccgtcccatgcgctagaaatcatcgcggaacccatcatcactgctcggttaggtgcccctcacgccacactcacaaccataaccaaatcggtcccggccgtgctaactcagcctggtccggctacactatccaaaccaacaaatgtcttctatcgctcccgttttatagctgttca

SEQ ID NO: 94781 - DNA, 407 bp, Glycine max
catcaaatatacaaaggcacgccttatcaataaagtttatataggaacatttaactatgaagccaatcttttaaaataattagagtatcaaagaagcacaacaggctcattaacgctaccataaaaattaatcttgcagcattcaggaaaatggaaaccagcctcatctaggccagcctttgtaatatgcgggcatgacctcacatccaagtattgcagagacgtgcatttacccacaatgatgcctatacctgccactgtgatctttggacaattactaatcttcaaaatcttcaaactcaatccaggctcctcattgcttaatagctgaaaagcagcatcagtcaactcttcacagcaaccaatgtccagtgcctcaaggtttctgcattgacttaaaacacagc

SEQ ID NO: 94782 - DNA, 459 bp, Glycine max
acaactgatttgtggatgtggtaacacgcgcgacgccaagaatgaacggggataactcgcttgctaatgcgcctgggaatagacgcgccgggcgaagggcgggggccgcgctagatgcgccgggcgacggggcctgaagcaaagaagtatagccgggggggggaaaaaaaaaaaaaaaaaaaaaaaaaaaaaaaaaaaaaaaaaaaaaaaaaaaaaaaaaccctccttcttcatgacgcactgtcgtcatttcccaaggaaggttccattccgattgctacctcgattactgggtttgagacgcacgtcgaggaaactggcctcgaagtagccgtagactgcgggttgcgcgcaaaggcggagttcggtataaggttatataatagatcacttccaactagaaacgcgaaacttgccccgcttgaagcacgcactgaatgtataggaaggctcggctct

SEQ ID NO: 94783 - DNA, 447 bp, Glycine max
cggcggggtggcgcagaaacggggcggggaggcccgcagtgttgtgctgcgttcagatagacagcataaggggaagggcaggccgcggggcaaggcgggcagttatatttatgggggtagggttcggcaggtaggaggggcaggcggtagtcaagggtaagagtgcgactgcccaacaccccggaacagacccagtcagagcaagagcagccggcccagggcaaaggcaaagccgtgaacgcggggtcaggagcgatatgtgccaaggtagaaggatgctcttaggggataggggtaggccggaataagtttgggggggggggccctgatgcgagaggaataccaccaaggcttaattaaaagattttggggagctatcggcagggcagtgtggaaaacagggagcagaacacagaaaggaatgagaaaatcctcagaagagacgtg

SEQ ID NO: 94784 - DNA, 245 bp, Glycine max
caaccttattttttttttaaagggggaaacctaaattgggggaaaacaaacccctaactttgaaaagacgagcccaaggggaccctttaaaagcccaccaaaattaagacccggtcaaaaaattcgccccccccccacgcggtgtcacaaaaatgggaggccccctgacccaatatcaactttaaaaaacccaaccaaagaccccccccccccccctttaaaagaaaacccccccccgggggggg

SEQ ID NO: 94785 - DNA, 429 bp, Glycine max
gtatattcagtcataggagactttcagtatctgttggaattgcaacagctgcttttgcacttgcaattcttgaaggaagcacgcagcccggagtttggtttcctgaagaggtatgtgttgagtacaagtgtgaggtaaagtctcacatcggataaaagtggaaaggttgagcaccatataagtgaggagaagacccataaacctgagccttaaggttttgggttagagtgtggtgtcaggtctcctcatgtggtgactcgtggtccacaggtgtacccctcgaatctgcccaacaattggtatcagagccgatggttcaagttggtgaccggctcagacgagtatgcaaagacttctccttggggggaaggctagcgggcatggcaagaaccgcaggtggacatggctatactcgtggatgataaagac

SEQ ID NO: 94786 - DNA, 159 bp, Glycine max
gttctagatcgcgagcggccgccctttttttttttttttttttttttttttttttttttttttttttttttttttttttgggaattggccccttctggataaagttcggctaatctgaattatgaatccctgcttataatattaaatacctttacccgg

SEQ ID NO: 94787 - DNA, 439 bp, Glycine max
gcccaacaccaaaaggtaacactaactttattccgtcttcttacggtgttattttccaacagagctggctgccaattgtgaattcgatgtcaatgggcacatacatacaactgcactagcaacaccacttgcaccaacgagtgccccagcaagtgccacaacaagtacaacaccaaatggtgaacaaaaaaccaatataaccacggaggcacaggcaaaagttgaatggccgaaacttaaacactggcaaactgacacagcggcagcggccaaaaataatacaatgggtaacctcgcaaacacaccacagacacaaatacacactttagcactctgagagcacctgctaacactaaccaaaaatacagtaactaaacaaccagggacaatcgggactgtggagatcgtactaaacccaacagctgctgaaaaactcaca

SEQ ID NO: 94788 - DNA, 438 bp, Glycine max
ttgggggggggggggggggggggggggggggggggggggggggggggggaaactaaaaagggtgaggggagggataagcaaaacaataagttagaaaaaagggtgagcccctgagagagctgatgctgtgtgatagttgataaacagcgcacaggaaatgaaaagggttaccgtaaacaagcaaatagtgtaggtgacttttagggaaatagggtagagaagtgcaagcgtaaaacgtaaagctaattggcggattatggttaagttgggcggacaaaagcggtgcgggtgcgggtgccggtgggtgcgggtacggttagttgttttaaagctacagctaattagtccgtgtggtggggctgctaaagtgaccagatcagtggtaatgcgagtgtgtatccggaattcgaaaatacgtataccatcacgtgctttaag

SEQ ID NO: 94789 - DNA, 411 bp, Glycine max
acgtggattgtggcctagccttaggtaaagcgtggtggggcgtgggcgggtgtggataaggggaggggctggtgtggttggccacaacacggggcttgggtaaataataaaccaccatatacaaactactaagtggtagtaagagatgtagtggccgtattgtactgtatgttggttggtagtgggtgctactgtggtgcttaaaccgtttaaaacaaaactagtaggacaacgccgatataaatagcccttagctgtttaatgcaagaagtagcagcctaaactaaacgtgaaaatattatatacgcacaggtgcaattaacataaacaaacccagaacgataggaatgcaaccagtgtaaacaatggcccttaacagacgacgcgcacgcaaggccatgtacggatatg

SEQ ID NO: 94790 - DNA, 363 bp, Glycine max
tgaacactgtaggtaacagccaatatttatggcacaccacctacctgcaactagtgtccagtacccacaacgagtttcaaacaaggttactgaggctgcaaaccctacataacacgcatcggttgcaaaggcagaacaaaaacgtgtgccgtttgctgcaggacatgcggccttacgaagcgcgagcgccgctccaacacaagtaactgcacgtttcacaaccttagtggtagggagccgaacaagaggggcttattaatgctcctaagcagcgtgctaaggcagcaccaaaatatccagcaacagccagtgtgagatagcatggatacgccacacaatatagggccctggctcggtgcaaag

SEQ ID NO: 94791 - DNA, 470 bp, Glycine max
acgagagggatgaaaatcgccgacggtagtacaaaactatgggcacaaaggcagtaataggggccaataagaggagtagtttgtaaagcccccgtccgccattgagctaggccactccgggggcgggtagggccgcgggtaagggtaaaactcgtgatacaagcaatacggccctagaaagaagactacatttattcaatactagtggccccaaggacacacccggggtgggcggaaggtacgctgaaacggaaggcattcgccgtaagatactaacaagcaatagtgtgtgcacatacggctgctactaatggtgagatgcgttgagcgacaatttgtaggccggtgcttagggcgcctagtgtccgggtcaagcctttggcacatcagcatgcttatgtattacggcaaaaggcttcggagcgtacgcctagggcgtccctcggtatgaggggagatagtgcgagtac

SEQ ID NO: 94792 - DNA, 383 bp, Glycine max
ctgtcacccgacacagggagccaatgctcgcagaaaaacctagagtgcacatactagcctccctggggcggggtaaccctgcaattgacctataactaacaaaggcgcacctgctgtaaacaccaaccccaacgccgccttagcatgccccagccgcggaagcagctgttgcttggcaactggctacataggccgaggctaagccctaggctacccatacaccgcctaaaccaactggtacagagccgcggcctacagcagaaggggacggtaaggcggctgctgcggccgcacccgacagtgagtgataagaagagcaacctggggagtaccgagagcagtgtggttaagaggcctcaccgtctggtgagagggggaatact

SEQ ID NO: 94793 - DNA, 509 bp, Glycine max
tgtccaaggtcctgtcactcctcttaatatcatcgtcgtgaccggtgttggtggtaattctgtttgtattatctgttctaatcaattattcttctacaacttcttctactgccattcggtctgtatcaactgtcgtcaagttccctctcctcctcctcctcctcctactcgtcgtaactcttgtgctactggtggtcaagttctaaaattggttgtgttccaaaaataataaaagttaaactgtaaatttgtcaaaggaagtcaaaatgtaaatgttcaggttctcgtcaaagtctgtcaggtcttcctcagttcaggattcccaattcaccagtccagtcgcggcgatggtatgactggctcgccaaggtcaacaattgatcaacaggctgatctccgctccagcagagggtccccagggacccgggcccggcatcactctcatagggtcagccatctcaagcgattcgaccacggcagcactctcggcgggccacacaagaataaga

SEQ ID NO: 94794 - DNA, 419 bp, Glycine max
gcaaacttcaagaagagcaacaattaggacaccgaatcaagccattctcattgcactccaaacacctcttcaacaaaaccacacctaaacttgtgcacatcctatatatgcaaaaataaccaccacaaaaacctacacacagttcctcacatgctttcaatgtcattctccaatcaaaattgaagtttcactctgacaacctgcgttgatcttcaatgcaaacctctattacatactggaaccaattctgattagataacagaaccgaatacacacaagaccgaagcttcacaacaataatccatgttgatcttcaatgcaaaccttcaccccacacgtgaaactccaattctgattagataacaacaccaaaaacacacgaaattggagcttcactatgtaatccatgttgatcttca

SEQ ID NO: 94795 - DNA, 478 bp, Glycine max
cgccaaaggcgtgccgaccttatgttggcaagagagcgacggcgccggctagagaaagctggcggggttgggaggcgtgcaataggatgcggcctataatacgccctgcaggaatagggggaggggaggggagggagggaggggtggagcggcgggggggatggttgggaaagggggggagggacaggcggcggtgtttacctagatgtggggaagaaacctaataccaacctaacaagtagggaataaggaatatgtatggggggaatgaatgatgaatgacaactagggaaggaagacccgcgatggaagcggttggaagtaagatttgtcacatatgcaggaataacatttgggagccagactgggagcaagagacacaatagcacacaaacgcataaaatgaaacccacacagagggcagtgcaaactacgactgaaaatggcgagccaaggcaagccagcagttcacagtgga

SEQ ID NO: 94796 - DNA, 457 bp, Glycine max
ccagctgtcggcctttcgtttttttttttaagatataatacattgattaaactgaccacgttaaactcaaccacataaagtataagatagtcaaatgcatcaatatacttgatacgtataatggaaaggaggggttcgaactcatccaaaataaaagtagtacgttttgaagacttttatgataattttttttccacttttatatacatcctctggtcagctcaataatttcaaagataagcgagcaggagagaagcagaattctccacgtaatagtggttacaattcttcattgaagccatgcacaaaaaaaagcctgcaaaattctgctcaaagtgccatctcagcctgcaaagctgccaattcatcttcttccggagttcgctttgcgggaactgggcgagtaggttgctgcccagctgggacctgcactggggccgcaagagctgtagttgct

SEQ ID NO: 94797 - DNA, 153 bp, Glycine max
acaaaaagccttttcaagtccaaatccgatttagtaaaaaaaaaaaaaccaatttaatggggaggggtggtatttctcccccgggggagtccccacaacttttttatcaggtttccccagaatttgggattggtccggaaacataggggattg

SEQ ID NO: 94798 - DNA, 151 bp, Glycine max
aatccaaatcgatatttgattggatttgcatggatactaactgaagctacataccaattggcactgacatcccaacgtgtcaaacatgacctcaataattacacatacatatgtacatgttctgctgcaaaagtaggtataccaaagaaag

SEQ ID NO: 94799 - DNA, 421 bp, Glycine max
ctgccttatcaatggctttcactctctttcttacagtagctccaggtttcctggatcgaagttgaaatcgcttctcatgcctggaagcaaaatgcacataaatatgatcaaatacatatatcattctaataatatttccagggataaaatgcattattgctggaagtcaaccaatgtggtaacaaatacagattcaaatgtcaacactgacaatactgaaacggagattttaacaggcatgtgatcactggacggcatggtaacatgactcggacaaaacaggcgggctaaagtgaggcacttagcacacagaactcacaattgagactttttctgttctctgtctacacttgatatgacatttcctccacatgtgtgcaatcttcaattcaacttaactacctgaataagccttcctttc

SEQ ID NO: 94800 - DNA, 363 bp, Glycine max
aagccataattagaaacatttcatttcaccgaagttttcaagtacttgattacaatcagcaaatgaatggtcaagaatgaaacagatcaaacaattctgctcggaattcttctagtacgaatacatacagtatatatacagagtacatatatccttcacatcataagtctctctagagtacagccttgtttgaggttcccctttatgagacagcttatgatacaaaagcgtgaacagaagtactatggttacacagattctgctggtctatccttggctacagacgaaggttcagcatgcagatcgccaatgctcacaggtggaccaatgctgcatcgagctgtgttatgtatctacatggca

SEQ ID NO: 94801 - DNA, 203 bp, Glycine max
ggcaaagtacgtagtttctattaaataacaaaaagaatttttctattgcttcttctcacatcatcagtctattttacatgcacactgatcaagtggttgatacaaaaagagaccaatcataaaatgaaaagctattcaacgattacaaatcacatcctcaaaccagttgcagggatcgattagctatgtcactgcattgaaat

SEQ ID NO: 94802 - DNA, 255 bp, Glycine max
aaaacattaaacccaatttcaatttggcgaatttattaaaaaaaaccaattaacttttaggacaccgggggacttaaatacccgggaaaatttaatccactaccaaatttcccatacccatttaattcctcccccctatagattccaaatatcaaggaaacagccaaatattagggggcaatctttacaaactccaaaaaagggccctttcactggaatttgccacgaaaaattcaatggcgccctggggcttaa

SEQ ID NO: 94803 - DNA, 438 bp, Glycine max
ggcaaaaatcaaataatttgcataaaatttatatgtaccattctatataaacaaataccacatttgttctttaatggtacatggtaagaagtttatctggcatgcatcattccaactacagtgcatagtcctccgaagagaatacaaatgcctgtgacaaacaactaaaaagaatccagcctatgctaacttataataaatattaaaataccatgagactttgacaatgtcacatgccaataaacactgcattgacataggacctaaaactttattaccaccaaccatcatatgtatatattccacacttctcaaaaagtaactgacgcatgaataaatccaatgaatgtattaagtttgcaagggagaaaaaaaaagggttggtttgaacaaacctattctcaataccccaactatataattgctctcttttaaaaa

SEQ ID NO: 94804 - DNA, 123 bp, Glycine max
tcggcctgtcgtctcttttttttaagatataatacattgattaaactgaccacgttaaactcaaccacataacggataagatagccaaatgcatcaatatactcgatccgcataatggaaagg

SEQ ID NO: 94805 - DNA, 235 bp, Glycine max
ataaaacacgaatctttgcttcaaagcaaaaaaggaaggggggttcaaacactctggacccatggcttaaaaatggagggaaaatggctgctatcagaatcaatccagcccgagtacatctgcaagtctttaagaacccacaaaactccatccgctacccacaataggcaacccaaaagagcttactgctcgtaccagggttacaacactggttccggaaaccgatgtattcata

SEQ ID NO: 94806 - DNA, 445 bp, Glycine max
atcaccaattctaattacatatggacaaactgtatacaaaggaatagttcccaataatagaagtaaataatggtaattacgaaaagcctaatggaccataacatgattaccctactacgtacttgaacattataccacacaaacttgtaagaactaatcccaatatctatcatgtgacttgcctcacataacgaaacaccataaatgcaccacaaataaacgaatcttgatggcataatttacgagatatgaaccacatatatgtgtatatatgtacacacataacacatctttaattatagcaataccatattattgttattattatcaacctcgaatcttattgcgtccaagtttgaagccacgccatcctctaggctattttcggttagatccatgtcccataagaaaccatatccgtcatcacctttggcaccaatttgag

SEQ ID NO: 94807 - DNA, 469 bp, Glycine max
  unsure (1)..(469): unsure at all n locations
ctggaagttataagttatggagagaattcttgcacattgttcagagaaatttctccagatttaaggtttcagaggttaggaagatgtatgcacatgcaattgaagctctatctgcttcatgcagcaagcactctaggcaggttcttcaagctgccaatccttcttcaccagatcctgtatttgttcagttagaacttggtcttgtggatatatttcttagtctttgcagatttgagtggcagactggttatagagaattggccactgctttatttcaggctgaaatagagtttagtttattttgtcctcctttgctgctcactgagcagagtaaacacagactgtttgagcatttttggaacagtggtggtgctagnagttggngaagaaggggctcttgcttggtccacatggttggagaaagaggaggaaactaggcaacgggttatgaatgaggagctctcacgtg

SEQ ID NO: 94808 - DNA, 339 bp, Glycine max
aaaaattaattctttattatacaatgaaattctctgcacaactgccaaacccattgtctagttttatgaggggcgaaaacaagatgaaactgtctatgctgaacaactaacgtatttgcttaactatgattcgatcctataaagcccacttatttctcaaagagttgaccagatgcaactaactcgacactatactgatgaacccacataatcgcagggttcacatgcaatctaaatttgcagttactgcaagtatgatatcctttgagaattcattcctgcatgatacaccttgaggtggattattgccctggagaccaattcctttatatgcggagg

SEQ ID NO: 94809 - DNA, 340 bp, Glycine max
gggggaacccaaaataattttatttagggtacttgcaaaaactattgaaaaccggggggaaaatttggagctaaactaacttgcataaaaaattaccgcataaaagcctaaacaagggcttaacaggttccccccccataaaattttaccacagggaaattatttacatacaccctatactggggcccctaccctggttaggcatccctccctaaatttaaagggtaaaaacaagttttggcgctcccgttgaaaccattggggcccccccaaaaacattgggacccctggaaaaattggaaaaacctttttttgcccaagatttcccccaagaattttt

SEQ ID NO: 94810 - DNA, 377 bp, Glycine max
gggacttcatagcttatagccaaacaataataaaaactacccaggctttgttcaattcctgcacataaaaccgttcctgttgctgtaaaagtgcaaactcaaaatgatgttaaaagaattatgtcaaggggtaatgccatgcagctgtgcaaatgataccttatagggcaaaagagttacgtgagacatatagctaattactagccagttcttgaaccaacaaataaaagtgaaaaccgttgtgagacatatcgatgtatctaggccattgcattggcatttttcacttactccaaattactctttacattttcattactaagaagcacaccttaagtcagcaattgggtctgtatttgctacttccatattttacc

SEQ ID NO: 94811 - DNA, 435 bp, Glycine max
ggtaaattccctattgaatctctcacaatctcagaataaatctttaagggatggacttaagttagctgccaagggactcatcctgcctttccttccaagcaagcactggtccagcgtgatatcaacattctcccagaccgagacagacattctttcactgaatcctatatgctcaggaacagaatttgaaagacgaaacagaaatggatatatggatccaattagcgccatgacggctacagtggttccggtgcaaagtccaagtacacccagccacaatgttattgaaagaagagatcctagaacctggggggcaggtgcaagttcacatattgaagtggaaggtaaatggctaaaggggcacaacaaggctgggcttaaaaaagagctaaagatgttaagggagcttgcaaaagctagcttctctggggacac

SEQ ID NO: 94812 - DNA, 340 bp, Glycine max
aaagcaaagccctttttacatttcaaggcctaattacaagctttccaataattgggcaagcaaatacaaacttgaaaaaaaaaccgggttttccttacgtacatgtggcccaaattcatgaataaaccccgaccccctcccagttggggaacgatttctgggctaattcacaagaggcccatgtaattgttttgaaataaaccgaaaaaaaaatttttttttaaaagggggatttgatttatgataaaaaaccccatttgactgacaaatgagagaaatttgggggacggcttcggggagcaaataaagaagggttatgagaacccatctattttttttt

SEQ ID NO: 94813 - DNA, 442 bp, Glycine max
gaaaaacattatagcttccgagttaattttctaagttaatctggttgattgctgaaatggaatgcctatatcttagagctcaaaatttgttgggactttgtgtctttgaggttcctttgattaatttcaatttactacgagtgaagtagttctgttagtatgaaatttcaccttatgccgaaggagagggtagtttcctttcgtttgaggctcagtgcatgtttggatttgccttgttatttgtttgaaaatagcttatcaccaaaatggtgttaagcaaaacttattttggatcaatgcaatgctgctgtccctgatcttacattttgggtaatgctttctttctatcttcagatgcaagtcatgcaaccatgtcactaccactgatgatgtcgaggattgggtgtaccaccaattagagaacacgactcatcttttacat

SEQ ID NO: 94814 - DNA, 166 bp, Glycine max
ggcgactctcttatttacaaaattatggggtggtggacatgcgtatggcgcctaccgactgtgacatgctgggattgtcggttttgacaccctattatacagaagaagagggatggtccttgcctgaattggatacacagaatgaggatgggggatcattactgtt

SEQ ID NO: 94815 - DNA, 390 bp, Glycine max
agtaaactcagcacgaagttgcacacctaaatgaaaataattgtttctacataggtggtgggttacaacataaaaattctttcaccaaaaaagaatagaaaatttcataaaaatataaaataagcaacgctatttgtaccaaaaaaaacatatcatccaagttgcgctcctccaagtaagagattcttgccgaacccaccagattgtaacctctgaacctgatctgaattttgcataacaagctgtgatcataattttattccataccccagaaaagggagaataaaaattcaatgcccaattaagagatgtgagatctaataaattgacaagatgttgataattaattaatagtctctcaaaagggtggaaaagagagaaactttgatt

SEQ ID NO: 94816 - DNA, 268 bp, Glycine max
gaacaaatgtaactgaaagtcagcgacattaattttccattcaatagattcatgttacaaattctaatctgaaacaaaaacctggtattttccaaaagtttattgaatctttcaataatctacacgtttgttccttaccaatcccaatgcttactctgtcttcacaacaagtgactcaaatccatcgttattggtgcccttttggtggagattatttccaaaagccattcctccatacccatattgttgaacaactagcaaagatgaa

SEQ ID NO: 94817 - DNA, 377 bp, Glycine max
gtgtccattacatatttgataatttatagtcactcaaaacggccactatttgttttaaaatccagtagttcttcaccaaacttcttcttcttccttcaatcttcatcttccaaaacagatctcaatttttttttttaaaaggaaacagatctctgttcactcattaacatttaacaccacacctcaatggtacccgaaaacccgaagccgttctgattgttgagccacatatcctgaatcgcagatctagcgaaggatttgggtaagccaccggtgaggttgttgtaagagagacgaagctcctgcaaactcacgaacttgtcgaatacatcaggcaaggtaccgatgaggtttgcgtttccaagttcgagtttgac

SEQ ID NO: 94818 - DNA, 290 bp, Glycine max
tccttttttttgtttttttgaaaggaggattcgctgagaaattaacttttgaaatcacacgggctacaacgtgcaaataattcgaaagagtttgacgatctttgatgggggagggcgggtacctggagagccaggactgccaagagtcaaagtgcaatgattttgatgacactctaatttggtttggggagattggagtcaatgactatgcctacactcttggatctaccgtctcagatgaaaccataaggaagcttgcaatcagcagtgtctcaggagctttacagaca

SEQ ID NO: 94819 - DNA, 316 bp, Glycine max
aacacatgaaaatatttggacatttatccattttgtgatcaattaaaatgcataaagactattttttttacataaacgacttaacaacccaaactaaaagcctctaaagaaagccacaatgaaagcattcgtaagcaaagaaagttgaatgcataccggaggaacatcaaaagcttggactccatgatccacacttaaactcttttttcgcaagagaatctgcgacctgattaaattctttcagcacatgatcacaagcccaaagatcaattccctctgccatgtctacaacctcattggataaatgttgccactt

SEQ ID NO: 94820 - DNA, 396 bp, Glycine max
agaaaatctagagggttctcctgcggatcaggtttgattgcatttgacattaaggttgcagaacttgacagtacaatcataatgcaccagactgaataattttagtttaacttttgaatgcattaatctggtaattgtcaatgtgaggtgacactatatgtgtgtgagaaattttcctgatctttcattaaccctgtctcatccttaggttagttatcctatgataaaaagagtaataccctgtcatgtttcttgatgcagtgaaatgccctacctctaaataacatgtgaataatgaatatattattgcaagaaaaatcaattttttttgctattaatatgtttacctgtacttgcaagcactggtagaaaaacaactaataatgactatttttc

SEQ ID NO: 94821 - DNA, 288 bp, Glycine max
ggggaaaaaaagatattttttttgaaaaacgaaaccccccaaccaaacggggggggctcatgtgcacttgcgcattgcccttttcctcctccaaagcgggccccaccactccttatattctttgggcctaaaccttattgggttccttacttaatttgctacaagaccccattccataacaaaaatccaactccatcatcaattttattaccctcagataacaacaccttaacaacttttgatccttcactagggccctacaactacatccttttaattttttttttg

SEQ ID NO: 94822 - DNA, 407 bp, Glycine max
gctccaaccatgttgaataaaattcatttgtgtagtgtaacaaagttttaagcccttactctaattttctatgcatcagatattaggaatatacaactagaatatttcagaggatggatacaaaaatattcaagaaagccttcattttgcaaccatagcagtgactatagtaaaatgcatctgtggaagtacggaaatcaaacaagtcctagaaacaggtgtaaaagcaccatctggccaggaaaactccctaaaaaaaccttctccaaatcatgatcatcaatgtggtatcattctttttcattcatctgaatcactattgaagttaatatcttcagttttctccgtatcctgctcctttgtctcatcgcctgcttcagaaaactcttcatcttctttgatatatg

SEQ ID NO: 94823 - DNA, 489 bp, Glycine max
ctttcccttattaccaacaaaaggaaaaaaaaatccccttccactttgaacttttcaatactgtgtcgctttcgctttagccaatttcaacgtttgagtttttcaggcattaattcattagtttcataattagggcattcaacaagtgtgcgtatggtggtgtttgctagaagatttttatgaacctacctattcggttgtttgaatataattctaggtgttccttactttcagtcaatttggatttggatcaattaattgcgttgcgctggatttgttgactttgattttgggattacgaataatagcgccatcgcattcattgcacgtaggttggttgttttaaaggacgagagattttaagtgtcaagtttataagataggaaaattgagtctcagttgaggttttttggatcaagttgtttaataccatatatcattttgtttattagttggaagcgtattttgcgggtagctgcagaaagttta

SEQ ID NO: 94824 - DNA, 306 bp, Glycine max
ttttttttttttttttttttttttttttttttttttttttttttttttttttttttttttttttttttttcccaaaaaaagaataaaacccttccccatgggaaaagaaaattggtcccggaaccattgtttggttggtttttaagagaaaaaaaaatttttggcaagaaaggggacttataagttataagcttaaaaaagggggggggaattgttatttccgcccccgggaagcaacttggttggggctccatggtctttccggggccataaatttttttagaaatcaaaaaatttggcggttac

SEQ ID NO: 94825 - DNA, 373 bp, Glycine max
aaatattaaggacgcttgatattaaagtaatagtttttaaaagaatcccacatattgtgtggcaaaaatacaaagcaacatgtcaaagaatgagcatgcatgcatgttcatcatcatcatcacaagtggcacaattaagcagaggttgataagtttagttatcgcgaataaacacttgatcctccactgctgcttgtttggtcaaaagggtgaccactatcctcatcagacccaatgctggttgcacggtctaaaatattcatgctctcatcctctgtccttctgctgccataggggtccgagcgataacttccttgtgatagcctcatgctgctacgctctgaccgaaccccttcatcctctgatcccacac

SEQ ID NO: 94826 - DNA, 267 bp, Glycine max
ccgggcccccccacctgtatcgataagctggctcgagatagtggtggaagcttccttttttgcaataatatatttgatttgatgtttcaatcctggggtattctttaatctaccaagaattaaatgccagcttgttcttgtgcatgacctcatgcaatctccgtcttttaatttggaaaaatggatccagggtctcttgcttcctggattacagattggcacaagtttgaaaaaagtggtgcttgactcttatgaatgctgacctgc

SEQ ID NO: 94827 - DNA, 317 bp, Glycine max
attgggaaagggccccaaggatttgccccttaggaaaattattccccggttttttttggtataaaaaaatttgtttcaacccccagaaatttttggaaaaaaaaagtcccctttctttttccaccttttgggggggcaaaaccccccttaagggcaaaaaaattttattttttttttgaaaaaaaaatttgcccaaaaaattgtccaagggacccttttttgaaagacttaaaaagggtgaaaaaatttgggggtgaaaattttttaaattggggttgaaaaaaaaggttaaaaaaaaaaaaccccccccctttttt

SEQ ID NO: 94828 - DNA, 157 bp, Glycine max
ggaggtcgtagatcttttagctatgagttctttccaaaggaagggcaacctagtgacaaacccatatttttcccattcctctatgaaacctcagacattgatgaaaacaatctttacccttttgtccacctttctagtgatggcaatctcttcatct

SEQ ID NO: 94829 - DNA, 444 bp, Glycine max
caaccacagtggcgaaagagcttcttcctctgctgctgctccaacaacggtgtcgttttgcacttcctctgccaatgtcgaagctcgcattctcagattcgtctattccctctaccttttgaatcccttctatctcctcaacttcttctttgcccgtctcatgagagggaagtctcttgctgattgatgacatggagcagtatgaaatacttgagcaaattggaaaaggtgctttcggttctgctcttcttgtgaagcataagcacgagaagaaaaaatatgtgctgaagaagattcgccttgcccgccaaactgagcgctgtcgtaggtctgcacacctggagatggagctcctctccaaattaagaaatccatttcttgcggagtataaagattcatgggtagaaaaaggttgctatgtgttcattattataggctattgtg

SEQ ID NO: 94830 - DNA, 122 bp, Glycine max
tttttttttttttttttacaaggtaactaaccatattataattcaacttgtattaaagttttctcccgatacatcattcgtaaccatcctttccttttaaatggtcccactccccactgact

SEQ ID NO: 94831 - DNA, 392 bp, Glycine max
ggacaaggggtcaatttttatcatatctaatgtttatacaatggatcactacacatatgacataattatctcatgcaatataatatatttttccatgccataccaaacattgcataatatattgatgttatcatcttatacaattaggtctcaaagttaataagtcttatctaacttgcgtaccaaagaggctcttaaagaaccctaccactccaatacttttcaagcctacaatgttgtaacgtgtgataaaaatctcactctaccttaacctgttttctgtacgaaggctttgatgtcaaatgcatcaccagcagatgtcttcgtaatgacacccttctcagtgatgatccccgatattagattagcaggagtaacatcaaaagctgggt

SEQ ID NO: 94832 - DNA, 149 bp, Glycine max
gaaaaatatgattaaaatattttcataaggtattttagaaagcttataagataaatccaaatatactgcaaattagttctgccaaaaacatcctaaaagttatgatcttcatcataaaatgaaagagggaggtgggggcgtggagggtg

SEQ ID NO: 94833 - DNA, 430 bp, Glycine max
aagattggatgagcattttatatattgtcttctcattgttcaattcctcaggccaaaaaaatacagatactaaataggaatattcggaaagcatgggtatataatctttaacagtggtggaacaagaagtagctaatgtaaccataataattgagaatcagctataagttccatttgtaggcaattttaagcattctgcaactttgaatctatgaattataggtgaatgatcttggttgagttctaagatgtaggaaaaggcacataggattgaacactaagataataacttctcttgtaatacaaaagggtggacttctagttcctagtacggaagattttcttattgcaacaaagaaatactactgaacttgtaaatagtcccgttgaaattcacattggtggtggcagccatgttatcataatgggg

SEQ ID NO: 94834 - DNA, 285 bp, Glycine max
gttaaaagctttttttttttttttggaacgggggcaaaacactttttaacaaattagtattaacttaaacaaaggcgggtttaaacttaacaggggtaaatattgggcccccacccgcacaacaaattactttttggtttggaaattacgctatcattgggcacttccggcaacataaggggaccggattactatggaaattttcttttctataaggcaacacaaaggggttggtatttattatttgggaagggaattggaagccgcattgtttctgtttctttt

SEQ ID NO: 94835 - DNA, 396 bp, Glycine max
aaaaccttaaattaaataataaaacctaaatattaaacagtacaatttacatcaggagctttgcacaaatgggtgaacttgctacaaaaagccaagtccttttcccgcacttaataatgaacaaaagatgatacatattaactcgtcactctttactatgatttcttctagtggcatttaatctaaatctaaagatgatattcacattaaggaagcactttacgacacctaatttaagtggataagatgctgtcatttcttcaaggcccatctcttatcaatattagagtaaacaatctcctgacaacgtacaagtccacaagctcctccaaagcacaaccatctttcactacctttgttcatgttccatctcactctgtgcaatgcggctacttt

SEQ ID NO: 94836 - DNA, 294 bp, Glycine max
aaaccaaattggaattcattttactgggaggggggaattggaacataaagggggagaacaaccaaacttttaagcaaaaggccaagtggttttaatttttctaggcaaaaatttttggggccccaacgtttggttcccgggatttccaataaccggggttccgataactaaactcaaaagccacgtggttaaaacattagaaaaaaatttggttttgaaaaaaaaagccttaaacactggaattggttttttccaaactggggggaacttctcgcccaaaaataaaaagcaggg

SEQ ID NO: 94837 - DNA, 441 bp, Glycine max
cacaacactgggaaactgaaagtcatatgatacacgatgacaggttttaaatgataacttgacaagtttagccaaagaaacgaactacaattcttactcaaaaaaataagaaaatatccggaagaccgagcttcattactcagttttaactaacttacactgatacaagggattggcattgccgattcctaaggattttgggccaccatcctcttcaaatccttattttctttgctgagaacgtcgacgcgagactggagaatggtaatcattgcttgtgtgctcatcatctcaaacctgatcgtgtccttttcaactgaaagcttctgcatctcactcttcattaccttgatgaactttgcgcagcttggaggcatggatgactcaagattttccacgtcaaaatccggtgtcttaattgaagcaaggctgtcctttgat

SEQ ID NO: 94838 - DNA, 321 bp, Glycine max
gggtaaatggaaaaacgttgttacctataaaaatcagctgtctaaatgtaagtgtgagaagaaacaccgaactctacaaacatgactatatgagatgttacagcaatttaggtggggtggattgatcccggctgaaagtgttctcttttaaactcttgctcaaccaaatagcagctgccctcggggaagctatccctggcccaaacggatttaataaaactgcaaggtgtccatacctttcctgctgtagtaatcttgcactaaattcaagcgaaccttctaagggctcagtcctttgtcggaatgatgatgtatcaaact

SEQ ID NO: 94839 - DNA, 125 bp, Glycine max
aacgcctccattatcagtcctttatcaggcgtgggtattacctaaccctgcgattggccgatccttccagttggggtattacgctttcagcgaatagcggtgaatatagaaaccctattccccct

SEQ ID NO: 94840 - DNA, 374 bp, Glycine max
agtcaaagaagcaatagattttattctaatcaagggggcataggggtacaccattttaagggggggcacaatagaatacatatattccaaggcacacagatacagaagaaactggctaagtacatataatatagagcttaagggaaatgaactagtattatacatacgacaccacctttagatgttgggagttcttcattctggtttagatgcttattctcgtaacataaagaaaggggcctttattatatgccttggcatgtaaactgtgaagatccattgacagaagagagggagcatgccggtgaacacattggattcatctaatatggaaggagttgtagccagaattctttgcaatgttcatctgaatt

SEQ ID NO: 94841 - DNA, 296 bp, Glycine max
gggggaagaaaaccaaaatttcataatacaaagcattatatggtttattacgaccaaagctaaccgggttttgccccataacaaaaaggttactttacccgcaattttggggatttcactgaaaattgcctaaaacccctcactttggcctaagtttcctaaaacaacttacacgtgcccccaaaacatgggtttattcccgcccaaggcaagggacttgccccataattcacctatagtttctgggcacgggggaatccctgcagctctaaacctacttgacaagattctggggc

SEQ ID NO: 94842 - DNA, 221 bp, Glycine max
gaaactggcaaacaattacaagctggtcagtttttcatgtttaaagaatacaagatttgatttagatccctgtttactatttgagtttcacaaaaatttaaagggacccactttcaagtcccactttatcaattcttaatgctaatcttgggtccttcattggccccaggcagatattttcagtggccaatgttactttttccaagctttttttttttcaa

SEQ ID NO: 94843 - DNA, 292 bp, Glycine max
ggggccaaaaaaaaaactaatcagcccataaaaaaaatatcttttgaaacccttatttaaattatccaaagggggaaaaaaaccttaaacaaaacgttcgatagttcccccaaatttattttaaaaagaacccgaaacgatctgaaaaaagaccaaagaaaaagagagaaagagagtaacaaagccttcctccttaatcgagaggggccttaacattcccatggggaatctcctggtgaaagtccttgggaacctttccattaacggggcatccgacggaaacccccgtccc

SEQ ID NO: 94844 - DNA, 331 bp, Glycine max
actttcaactttgcagagagctttatgagcttgtagtagcagagtggggaggtaccaaacagagcaattgaagttgaacattattaggtgttctagatcctagggtggcatctggaatcacactcttcaatcaacaatgaaattctgggacctattcttcgtggctctcatgccagtcttggagaccctcttgattactctccttggtttattaattgcaacccaacgatttaatctcctgcgaagcgttgaagcaaggaattatttaaataatcttgtgttttacatcttcactccggcgctccttgttgctgatttggccgagacaatc

SEQ ID NO: 94845 - DNA, 472 bp, Glycine max
tcctttttttttttttttgaaaaataatgacaagacactcttacaaatgttctccaaattggtatggggcaattacaaatcattttttttatatttcaaaacaatttgatcttacatacatactggatatgatccccgtttggcaaaagaaacccatgattaattttagtctatacctgcaacatgcacatgaagaaggtgcaccaaagagcgagactaaatgtcgcaatgaaatatgtccatatcatgataagagaacattcactctcaccattcccgagcatgtacaattgctgcaggtggaagcgcatattgaagcataagaacatattgatataacgaatacgatccattgaatcccctataatatgctgctttaacaatcaaaatacccaagataggtgaaattatgaaccgcactaccataatccctataatcaagaaaatgcttattgctgacttctttaaacca

SEQ ID NO: 94846 - DNA, 455 bp, Glycine max
gccattcttagtacagcggttatatttgggatgttgatagcactaccaattactctactctactacatattacttggtttgtaaaatatctatgcagtagtagccaacataccaggacagaatgaaatgaatgaatgaccctttgaaccttttttatactttgggagttagcatgcatgcctggtggtgaccacagtggattgattatgctgttattaacaacaggggatttggattttttctgagggggagaacaacaaaaactagtagtatccttaaaagagaggagagatccttgcttgcttgagagtttccaaaaattttggaatttcagaaaaaaaaattgacccaattggtccaaatccccacaattctaatccccctatcaaaagtccaaaatacacgcaattttcaagagcagagagagacgaacaagtacatgaaatgggagacat

SEQ ID NO: 94847 - DNA, 351 bp, Glycine max
aaaaaaaaaaaaaaaaacggtcttttgcttatattccaatttcatatttcccctaccaaattgctaagctgtctttgttacttgatgacccaaacatgacttttctaattaataaaaatttacaatgcaaatacggggggaaccatttctagatttcattgggagccttgcccctgtttttcctctgctatggctcccatttcatgtacttgttcgtctttctctgcttttgaaaattgcgtgtattttggacttttgatagggggattagaattggggggatttggaccaattgggtcaatttttttttctgaaattccaaaatttttggaaactctcaagcaagcaagg

SEQ ID NO: 94848 - DNA, 422 bp, Glycine max
ctgttacaagaatataaagggcacactaataaggttagtctgcagatgcctgaaactgattttagcacttcctactttttaatgttctgcatatagccttgtttaaagatacaggaccaggtgcaagttcccaaagaatttgggatacaagttgagattcactgtcacttatatatcttcatttctggactattatttagcggttcctgcaattgttcattcttaaagcattttcttgtgtgatttaacttttaagtaactttacatgttacaaactttttaaatattcgtcgtcttcttctttttttttttaatatttgaccatttctatccctcagtcttacaaattggattgctgccttaccaatacggatgctcatgtaactggtggctctgaggatggcttcatctatttttgggat

SEQ ID NO: 94849 - DNA, 376 bp, Glycine max
atcaatcaaccgtaaaaaattaattaaaccaaggattaatgaaataaacagtccaaaacgtctacctcaatcaataatttgaacaaaagggttttcttttcccaaacgatggggcccacaaattcgaaaaagtttgagctgggttagatcaatggaaaaaccccagccacggattgaatgaatcacagcaaagatttggagctacataagagcattgcaggaactagttttccaactattccagttgactcccagatcaaaaactccatataacggatgcaatacaaactcattttcacaacataacggattgtttacaaaacattttccttttatggacacctgggaataattcaataccctatccctttcggag

SEQ ID NO: 94850 - DNA, 315 bp, Glycine max
catcattgtcccaactctctcttataagttctaatacacatttaatttcctaaggtgcttcctttccctctaaggtttaattattcgttttggacctaccaacaaacaaacagtgaagcctttgtttttattaccttacttacacctctctatggtctagaccaaataaaaataaatgtctggaagtgcagatctgcagctacaagtgtgcttaagctgacactctccgagtggagaacattcacaagtgagtgaggctaatggatcttgaatccagcaagtgttgggacacatcaaaggactcttggaagacaa

SEQ ID NO: 94851 - DNA, 183 bp, Glycine max
gattggagtacgaatgacccgatataagggtaataccctacattacattcttatactgcacatggaaagagatcatctttgggaacttacaaagggggaactgagataaatgaggaaggcaataacacatatgtgcggtattcagccaaagcccacattggaaaaatatgtccatcgaatgag

SEQ ID NO: 94852 - DNA, 552 bp, Glycine max
ctatgacgttgcatgcacgcgtccagtcggcggccgccctttttttttttttttacattaagaatattaaattacacaacatgaaatttttacaatacaagctgtaaatgctgaatattcctctattcctacccaacttttcccacccacacccataccgacagctccaaccaccaccccctccagcggtgttactcccacccaactttcctattccccgatttacccctacagaatccgaatattccataccagtccccgccacattgtgaaactcccaatttaccccttctttgctcgaaccaacaccatcacactcacacgtacatgctccttcctctatttctgtttctgttcccgttgtcgttggttttccgttggactcaatttccctcaccactatccaaccctgcgtttcccaatttaccctcgactctgtcgcaaatttactaattctattgttaataactgatttttcttcgctgttggtaaattttataaacacgtcttcttgatgatcacggtcgttacaatctgactcggagttgagct

SEQ ID NO: 94853 - DNA, 275 bp, Glycine max
tttttttttttttttttttttttttttttttttttttttttttttttttttttttttttttttttttttttttgcaaaaataggccatgcaacgcccctttttattaaatcgggcatcatatttacataccaaaaatcagggggaactccacacaattttaaaattttcactttacaaaaagggcagtaatttttaaacacgtaaaccattggattggatccataataccggaatgaaggaaatttacccccttctaaattttccgggtgacttg

SEQ ID NO: 94854 - DNA, 409 bp, Glycine max
gaaaaccaaaatctatttttttattaattgatcttatatcattgctatcagtaaataataaataaatatgatcttgtggaatcagagtgcaaaatgtaagccaattcacaagtcttttgcaaactacatgttaggtgccaaaagtttgagctctcacatcgaaaaggaaattacaaagtcatttacagatactcttccttggtaagatgtagcaaaacaaagcctttttgttaatttcactgaaaaccagaaggcactcttaacgtaagactagtttgaataaccacattgtttccttataatttacagttgtgcaactattatgcggaaacctcagttactgcaagagcaagagtctctggcacagtcatggatggttcagccactactggaggtgcaacacaagact

SEQ ID NO: 94855 - DNA, 245 bp, Glycine max
aaaaataggggattgaaaaccgggcccttttttattcaaaaaaaatcaattcttgacttgacccaaatataggaacattgatacctttgacaggggggccattcaatggggcaccaaactttttatcccaacctggtggcccccccctttttttagggttaaaactggccgggttcttttgaccaggatttaccccaaaaacttgaccgggggaatttcccggtgttgtacccggattgggggaa

SEQ ID NO: 94856 - DNA, 519 bp, Glycine max
aaatcaattactattatattaaataatttatgtcttggaaattaaataatttttgaaacagtttgaaggctgggaacggagaaacaaacatgctgtcaacgttcagcccaaagctacaatatagttgcttttttgttttgtcccttggaatgtatgaatgtccattttggaagctcctaatggtaatccaaacacacactatagtttacatcatcggtggcaagtgataaaatcagaatgagttatagaaatatccgttcagctttacttggtgtgtcaaaattaaattacttttttgaaagggagcttgggactctcatgtgtcgcgcacatgcgttgcactatagcacgggcctggcacaccctttttgtaagtcctttaatgagtgcgtcattcaacatttcaactccaactcgtcatgttatactggaggaattacctcagagacacagttaaaagttatattcacgaaatatctgacttcaactttaatctatacaattcctcatcttgaatca

SEQ ID NO: 94857 - DNA, 352 bp, Glycine max
acactatttgcaaattggagtcctgtatatttatctgcttctaaagatgagtcggaatccaaagacacagagccagccttttggactggtggtcaggtaacagaagaaggcctaaagtggttactggataaaggatataaaactattatagatctcagagcagagactgtaaaagataacttctgtcaagcggctctgcaagatgctatttcatctggaagaattgaattggtaaaaatcccggttgaagttaggactgcacctacaatggaacaggttgtgaagtttgcatcttatgtttcagattgcagcaaaaggcctatctatcttcacagcaaggaaggagttttgc

SEQ ID NO: 94858 - DNA, 120 bp, Glycine max
aagattaaaaaaaattactaccttttataaagggttttccaacagcattttgccattttgacatggtgaaaaaacattgggaaaccctatttttacaaggggagccaatggaataaaggg

SEQ ID NO: 94859 - DNA, 507 bp, Glycine max
agcttattaatttctcatatctatgctagtaatcaccattgctgctcatgatcgtgacatctggacaactactcgagaaagctggtatcacattcggaccagcatccttctaaacattgttatgcaagttttttcacctattctgctttaagatatcattcatctcatttgtaacctttaggttaccttgcttagaatgtaaccaacatttgagggattcaaggtttacactagcaacccaatcaacaaataggtaagtaactatcctttccactgacaaatcaaggaacatgtaagggaacaacgtcagagatcagaagataacacttctgatgtagttctttcgcacctatcctttgaggaagcccaacaatatagcattattccactagtggatccaactaaaaagaagataatcgttgcggtggagtactcttgacagctcctattctttgaggaggccacacaacatgggtaacccttccccgaattagggccaaaggaatt

SEQ ID NO: 94860 - DNA, 285 bp, Glycine max
gggagaaagataaattaaacattggtaattgccaatttggttattgtcattactggacattggccaaattttagatcaatgaatcaagaaattcaaagatacattggggttagctaccgaatgtcatttgaaagccacctatgggaggaccactcggaacaattttgggacatgttatgggtaaaactctttatggtgaagcttagacttaaaagccaaactggttgaaattgctgtaatcaagtttattcaaccgtatggcacataataaatgctttggcaagt

SEQ ID NO: 94861 - DNA, 491 bp, Glycine max
cacactaaattagtattatatcttctaaatacatccctcaatcgtcattccttaataaaaaagttggtttattgggaacaggttttataaaagatattggtttcttcacctttgcgtggattgttgacaaaatgttaacatcaaatccattgagttgataatctggaataaactcagcttccaacctaagtactgctttgtctttatctctaaacaattcttcaaagtgctgcctcgtaccacttaaactccattcgtatctacctcaaaggcttaaagcctttatcatgcatcctccaacctcccattccctactccctactcttcaaatagtatttattcaaataacagcagcaaatagtaacagtttaacccataaccacataaaaattcagtgaactggactccaaataatctaaaaaagcataaacagataaattaaaataaataaacagaagaaagccttgttctttctttaaccaaagaaagag

SEQ ID NO: 94862 - DNA, 300 bp, Glycine max
aaaaaaattgtcatagattgttgacattaaaggcatggcacaaacacctgcaccagacaattcaattctttaatcatcattcacaacctatctaaaagcatggggcttctgtggctgcacataacataccctatctgaggagagactttttctgagcatggggtatcataaaaggtgatgattagggtagtgggtcagttttctgccgccatgaactatattcagatgtttaactccaaaaacagccacatgggccagcaaagcagctatagtgggggtgtacaatgtgtttcggactga

SEQ ID NO: 94863 - DNA, 452 bp, Glycine max
gaacgataaaaagtcactctttcataggaattctacaatatttcgtttaattataggtgcaaatagcaaactactcgaaaagtggcagaatgtttgagaacagaataacaaagcagttagttgtaccaccatgctttgccagcttcagtaaaatgacaaacatcagatctattctctatactaatctgctcaagacaaggaaaaaaaacacttctcaactggatccatcatccaataccagatccaaatctgttcgatacatgaaatgacctggcaaaatgagttacaaattaggggtgattcagttttgcattcaatcaaagctacagatgaaaagtgggcaaaaagaaaatacataccacaagtcaccgtatttcaactatccacgttaactaaaaatattgctcgatatccaaaatcccaggaatcatcaaaatagcatatgttagcat

SEQ ID NO: 94864 - DNA, 292 bp, Glycine max
gtcaatactcattggattagtaaatgcttagaatcaagacattatacaaaacaacccaaaagaaacagaaaaaaggtatctcactaaatgagtaacatggctgcgccttatgtattcatacaaatcattagctgttatacaacacaattcattgggtgaaacaataacaatcaggtgagttctaattctcccttttgctttatgtctaagccaattatcactacttataactcttacttccaaccattgtgcagaatcaaactatagaagttacaactacaagtcatgaaag

SEQ ID NO: 94865 - DNA, 189 bp, Glycine max
agctcaaaatgactttttgcattccaagcagcacagcgctagtatagcaaacattgctaaacgtttatcatgttatcatgaccaaaaatgctacgatattctccacggaggtataagctcatatagctaaccacctcaaaaagccaaaaactcatttcttataatgaatggagtaaactcctactcagt

SEQ ID NO: 94866 - DNA, 334 bp, Glycine max
cctaataagaaaacaaataattccaattcatatatgaacatttttgcctccttatttcttgaaaatgtggaattggaattccccgaggaattccgatctcatttcctttggcttcaggataggcctaataagaaaacaaataattccaattcatatatgaacatttttgcctccttatttcttgaaaatgtggaattggaattccccgaggaattccgatctcatttcctttggcttcaggataggcctaataagaaaacaaataattccaattcatatatgaacatttttgcctccttatttcttgaaaatgtggaattggaattccccgagg

SEQ ID NO: 94867 - DNA, 468 bp, Glycine max
aagttataaaatttaactcaacagaaccactaaacaggattgagttctggtaacaggtaagattcttctcctaacaagacgaaacgtattttacgcaacacataaaaataaataagaaaattgttttagtgatctatgtcgccattattatccatagctagctagctagctaaagggaatttatgtgggcgttgactgtgccaacagggatcatagggtgagggtctcgctcatccaatcattcctttgttatctgcactagtgagtgtcgtcttctgataaaacgacgtcgtcgtcacacagccttggttagaagaagaagaagaagaaggtatgggagacatattctacggcaacgatgaccaccgagaaatgaatgattgtatgtataaggaggatgtgatagaaagcatgagaaagcaaagggaaatcaaagaactcaagcgcagacaaaacaacaacaactac

SEQ ID NO: 94868 - DNA, 266 bp, Glycine max
ggaaattaaacaaattggttacattttaaaaacattcacattaggggatcaattcccgcttttttttaccaccagcaaaattccccaacattttcaaatacgacaattatcaaataaaaattttaaaaaaccccgagaaaaaaaaaaagggatttcacttcgaatcccccttgaaaaaaaaccctaaactctttttttttttttaattaacccacattaaagctttaacgggaacccaaaaaccaaacttaaaaccaagggaacaa

SEQ ID NO: 94869 - DNA, 402 bp, Glycine max
agaaatttcccttcttagacaacctccacattttctcctttgtaaaaagacacttgttagcattgccacatctcttaggcttgagtttattcctcaagtaaaggagttgttggatgagggtttggttcgcaagagattaaatctctgtgctttgttggtgcccaaaataggtattattaggcgccaaatcccaaaaataggtggtgcgatgaatgccttgggtggtgcaacactcttttgtaaaatcactcgtgcacccaacatcttcatgattcgtgtacatagggactcgttaggtaggtttgatcttattgatagtttcaatacaaacttaggcactcatatgggacaccttaggttcgtcatatgcattggtaggaataatcatcatgaaaattctga

SEQ ID NO: 94870 - DNA, 204 bp, Glycine max
agccccaaaaaggggaaaatattatggggaaggggagtttgcatttggcatgccagggacaaaaaacaggtttggtttcctaacccggaccggaattggccaaggaatctgcaaaagcttacccatttccttggtcttttaaaaagtaaaccccacgaaaacctcccaagagcaaaagtttgccaaaaccatccctttggattg

SEQ ID NO: 94871 - DNA, 496 bp, Glycine max
aaaaacatgaagaactgaatttatattttcatgacggcatgagaattaaagatttaattaaattaataattcacaactgtattctatcctaaatgagcaaagaaattcatgatttgatcaaagctccaccttcataggttaatagcgtgtttgaatttctatttatacaactcacgtgaatcacaaatataacttttaattgcttttagtctatcttaatgtgaaaatttaaattacaaattttaatctaaaaccacactaatttcttgtgttaggtcgtagataaatatcataattaattgtgcattccttcatttttcaatttcaacttaatttatcacgtgattggtcctgtgcaccacagcactgatgtcttgtccgtagtcaagtcatgaatttatatcaatatagaaattttttgtttttcttaagatcaccatgttcgtttgatttttattgaaaaacatattcggctaggcaatatatggctcactag

SEQ ID NO: 94872 - DNA, 393 bp, Glycine max
cctcggggaattccaattccacattttcaagaaataaggaggcaaaaatgttcatatatgaattggaattatttgttttcttattaggcctatcctgaagccaaaggaaatgagatcggaattcctcggggaattccaattccacattttcaagaaataaggaggcaaaaatgttcatatatgaattggaattatttgttttcttattaggcctatcctgaagccaaaggaaatgagatcggaattcctcggggaattccaattccacattttcaagaaataaggaggcaaaaatgttcatatatgaattggaattatttgttttcttattaggcctatcctgaagccaaaggaaatgagatcggaattcctcgggggtaccgagctcgaatt

SEQ ID NO: 94873 - DNA, 115 bp, Glycine max
aagtaacaatctcattcttgctttattgaggcctgtcatgcgattcacaatgcttcaactgttgaagaatttgagatctcattcccaaggaagggcgatcagtgacgctgatatc

SEQ ID NO: 94874 - DNA, 461 bp, Glycine max
ccttcggcttcaggtattcggcggccgccctttttttttttttttttctaaaatgttactatcatataaagttgcaaagtaacgacatcattctttcagaaagtaaaaagggatggaccgtgaagaagttccccacttgtcaaccattacctgcccttggacgaaaatttatgatcggaaaatacagaaaacaaacttatttacactgatagttttttatgaccattaataagacagtcaaaaacatatattgtgacctgagaataaacactacattagtgtgccaggcgctgcttcatgtatatacggatgaaatataaggagaggaaaaaaaagaatgagccatctcagcctttgctgcaccctacgcacatccttccttacaattctgaataaaaaggaggatttcccatgaaaatctggcttaaggaagttcagtcctcatcactatcatacacaac

SEQ ID NO: 94875 - DNA, 462 bp, Glycine max
attaatcagaataaatcttgatatcaaaaaaatgaaatttacagaagatatcaaaaaattgtaagttatatgtttttttgatgatttgataatctccgtataagtacttacgttttctatgtttatatagtaaaagaagaaaagagaaaacttcaaggcaattgccaaatgcgatcctcaaaatgctttgctttgtcaaaatatcttcagcagttatcagtttcctcatcagtagcagttgaactgatccccacctgcaaccatggcgaagaactgccaccagctttcatgtcctttagctcactcagtttcgccaacttgatcttactatcagcttcattatccatgttttgcattgagttgttgttgttgttgtttttgtcctcatcattgtcaacatcaacattgttattagggttatggagactttgacaatggctattattggtatcatctttagca

SEQ ID NO: 94876 - DNA, 216 bp, Glycine max
ttttttttttttttttttttttttttttttttttttttttttttttttttttttttttttttttttttttttttttttttaggaaaggaaaataattcattcaaaattgaacgggacaattaccatttaaaggtgccaaaagttttccacgggggaaaagccaaaaacccttcggggcaacccattatttcacaaaatggttatacaagggctgtt

SEQ ID NO: 94877 - DNA, 288 bp, Glycine max
atgaaaaaagttcatgtaaagcagtggattagatgaggaaataaaaaatttcatgatcgagttttgtacgatcaatgaaatacacaagaaattgattaagataagacgaatagtagcttagctagtcacaaggagatgaaaggatgatcgatcagaagttgatgaaagcacggagaagcgtgagaaagtcatcaaagcatcgaaggaagtacaagtagcagcagcagtagttgttgatgatttgtctgcgcttgagttctttgatttccctttgctttctcatgcttt

SEQ ID NO: 94878 - DNA, 175 bp, Glycine max
gaccatctgcagtcaattgtctgtgcataaaattagattgaagttgttggtgcatcattttacatgctaatgtatacaaaaattaaaataataataataataattcagcacagcaaatggtggagatgctcatttataaagtttcttcgtcagcttgaaaaggatcattcttagt

SEQ ID NO: 94879 - DNA, 361 bp, Glycine max
ccggctcgacgagctcactgcggccgcccttttttttttttttttttttttttttttttttttttttttttttttttttttttttttgttttttttttttttttttttttttttttttaacaaacaaacatttttcttaaaaaaaatggccaaaaattagaatttcggggagcgccataaggggaaaccccattggccgaaccctaaaagggccccccccagggggacatttttgcccgggctaaaccgggaaaaagccaaagggggccccagccaaagcccccgcttttaccaaccggttcccccgggcgggttatctgggggaaacaaaaaacccccccccgggaaaaaaacctcccgg

SEQ ID NO: 94880 - DNA, 301 bp, Glycine max
gcaaggcccaataagtccgggctttttaactttgaaaaaatcaataacaaacccccgaacttggccatattaaattattcttggacaacattttgctaccaaaaatccccaagggaaactaggaataataacaaactttcccggggatttccggggggtccttattggccacttttaaatcactaggccccggattagcaggatttatccctccaagggaaccctgggaaaaaaaacgggtttaacgggtaaacccggccccaatcccaatagccccccccactttaacccttttccaggg

SEQ ID NO: 94881 - DNA, 185 bp, Glycine max
atatgattccacattggttggtgaagcagatactaattggtgtagcaaaagttcttcctaaaactaagttagttccacaaaaggaagaggttaaagataatatatttagagatgtgaacaagagaaaactggtgagtgtatcacatcgtgctggaattatattgaagttaaatagaggaaataat

SEQ ID NO: 94882 - DNA, 412 bp, Glycine max
atcgtaattcaatgttgcaattgaggtgcctagcttggataagcaaggctatcataatcacaaacacaaccacatgctctgtaaagatcatagacagagaataattgttgcccacaacgccaacacgcttgagaaagattcggggcacattaaccatcaaaatgggttacatagtcaagtgcatgcatacagacatagtaatagtagtattaaagtagataatgaaaacgaacatacaaacatatgtatgcatatgtaactatgtatactaaaatattcaattttgacagtgtaaacaatagcggccaaaatagttcatgaacatactcaacatagcgggttgaaattataaaatgaaagggtgtgaggaataataataacaactttacatagataattatgcatgcccatg

SEQ ID NO: 94883 - DNA, 347 bp, Glycine max
gaaattgaattttcgggaactgtttgtatggttgttagttatgctgttaagtaaccgaagcctctgactgtctaaagggacattggctccccacggatgtgcccagagcaagattgttgcacctactgtaagcacaaatcaaatgccatccctaaaaatgaagagcaaagtaagcgtgagctgtttaacagaaacaaaggatcttcatgtgtgtccgaaatcaaaaataatttccaaaagcccgtgttctaaaatcatgatttctacacaaaaggctgaaatagacaccactgttcaaaattgcctagatgtttcctcaaggacgcagcccaaagacattgcatggg

SEQ ID NO: 94884 - DNA, 330 bp, Glycine max
catcttaaaagacttcatggttgattttgttcatgtggattacaatctttaaattcaaaataactgtttatagtaatatctaatctatgttaccacactatatatacgcctctaaccaactttatcattggagatgaaaacaagagcatattgtacaaaactagtcatgcacctattcagcagtcttaaaccacaaaagaacccatatatctgcccccattcaaatcaagggctttttatttccacatcttttcctaacaaaattgtttaaaacttgtgtccttgagaggccatgccttgaccttggtcaatctgcatgattgttcaaca

SEQ ID NO: 94885 - DNA, 284 bp, Glycine max
gggggccgggggaaacttttttttaaaaaaaaaaaacatggggttatcctcccccccaaaacaaggggggaatcctggcggtggattgaaccggacatatcctttattgcccctagggggaagaaaaataataagctaaaaagcggggccccgcccaaaatttttttttttgcaacaggggacaaacatatttccaaacgggtcccatattatgggggggccaaaaaaaatttttttttcccccaaaaaggccctaagcggggaaacttggaaacaagcaaaag

SEQ ID NO: 94886 - DNA, 344 bp, Glycine max
ggagggcgacccaaaaaaggtaaaaaatataatagtttagttaattgggacatttacattattcccccaaaccaattttagatggcggggtggccagaccagaccagaccaaaaaactcttaacaaggcatctaggttttttaaacgaaatagggagcttttttatttaactgggaaaacaacaccggttcaagagttcgaaaaaattggcatataaaaaaatgttgaggggggactttattttttccaagctgggggaacatattttactaatataagggtaccaacatgggaagggcttcaagaaaggtgcattatatacataaccatgcaggggtacttga

SEQ ID NO: 94887 - DNA, 475 bp, Glycine max
aacacggataatttattttagcatttcgtgtaccggtagtcgaagaaggtatcgtgcccttaagcattctcgttataatatacaatacaatgatgagcagctagcagcactaaatggctgatccagagagcaagatggctgaagcattcgccttagcaatcttgagtgtttttggatttagaaatggtatcagtctcctgtaagcatgtacacatccatccatgttagatgaacaaagaacctggaaaggataagccttctaaaaaattgctattaattatggcattactggctgatacaatcaaggcggtgcaccaagcgattcaacagatattttgactcacggtgtctaccttttccgagtaaagatttaaaaacacgaaggtaggcaaaacgggactgcggacttcccttactccatgccttcaggaattttacagcatctactacggacccaaactttgaaatatactac

SEQ ID NO: 94888 - DNA, 444 bp, Glycine max
gaagacttaataataaaacactccagagtttcatattactcatcccattcttagggaagttctggagtatatgtcaacattgttaaagaccaagaatgtataaaaataagaagaagaattttaagttatatatatatttggctaatccctacttgataatgaaagcttcattatttgagtcaaactttgatgccttcattttgtttgagtggaaacataggttctgagagatggtgactgagtgagaacatcaggtgcaatagtagtgttctgtgctccactcttctgctgcattctcctcctagcaaggtaccctctcacccaaggcgtaacatcctcgttgactttgatcatgatgaagaaaatgatgcggtagatcacaatcatgctgaagatcacactcaggtttatccactttgatctgttgacatcaatttggaatac

SEQ ID NO: 94889 - DNA, 264 bp, Glycine max
gtggttattgttgtgtttagttttttttggaaccgcaaagtagggaggacattgaaaacgcaagccaactacggaggggaaaacccctaaaacatggtgggcttagaaaaagggggagcgggggtggtcaaaagcccagcccattaaaccagaatggtaaaaggggttttggccccgggtgtcaaaaacccaattatgggaacaaaatttgggaaatgatgggggggactttaaactttggccgaaaaacaagctccctaaaaa

SEQ ID NO: 94890 - DNA, 441 bp, Glycine max
aattcatcaacatcaaatcaatcactacttcactatataattggtatttgtagcactaatggcaatgcaatacttcaagaattgtggaagaaaaatccccttctttttatacattaatcgtttccttcattgtctcaaatcttcaaatccattaacttgacatcacatcaataactcctttgtgagatattcatcgagctgagagcatagaaatggaagcagtagcattagatgtggaggaaccagttgaggtagaggtttctgcccgagtccttaagttagtttctacaaaaacaggcatagaaggccttatttgccccagtgagttcttgcttttgagaaaagctactatttcagacattgttggccttgcagcagctgatgcttgagtgcaaagcaaagcaatctctatgattttcttcacttcttctgcatcatagt

SEQ ID NO: 94891 - DNA, 421 bp, Glycine max
caaagcagtgtgtgtaggcctactttatatatgcaacatcaacaaactaagctaagaaactgcccttttttccttctctctttatctcccaaaaaaaaaaaccaattaaagaatatcttagggtacttaaaatacaattcagcacatatttctgcattagtctctttttatgtttcaatgcttaatgacataagcattgctttcttcgtcccatatttctccatttggcaaccactttgtgtgctttcaaatatagaaccctgctccccctccgtgtcacaaggcaagaattgcagggcaacaatatgcatcattgccaatagtatatctctgcttaaacttcagcaagagatactacattttggcttcaccttctctttgctaactggaatgccctcttcaagaaatgatttgcagctct

SEQ ID NO: 94892 - DNA, 307 bp, Glycine max
ttggtttttttattttattgttctttttttattttttttttttgacacgataagccagcttcaactagattagagggcaacagaaagttggccaatacaattcccaaaggggctgcacagccagaattagaccgagaaattcagggtccaaaaaaatcaaatccatgccaaacttgtaacaacccgacctttacagggtcttaggcagtttttgccaaggacaattaatgtgactaccaggtaaacacctattattgcctaataacctataggcttcaacaaatagaaaacttagtgacaaaacacc

SEQ ID NO: 94893 - DNA, 479 bp, Glycine max
ccaaatgtaattgaaacacatcctattcatattgattttattttgttacaaaatacaattgaaactcactgaacttttagcagatggtttccacctttgcatttgatcacagtggcttcaccagtctggaagaacgtattgaacctgtaacattctaagggattgcgcttatactatccctcagagtgctgtttgcagccctttggtccataatgcttagtgccacgcctgacaatcgctttgcataagtagcagtaatggcgttggcatgcccagcaaaacaagtgattattatttccaatctttggattatattgacgacaactaggacacgccaagccatgttgaggaaagagctcagcctgtagttgtcctaccgcctggcgatgattaatgcgctcttcccaggaatcaaccatttctcgtgggaacaattcacatgaaccatccctgaaatgtccatatggatctgatgcatc

SEQ ID NO: 94894 - DNA, 253 bp, Glycine max
aaaaaaaaaaaacacccccccggggggcttaaaaaaattatccccccccggctaaaaagaggggttaccggggggggaaaattctaccccccggatgataaagggccaaattctgggggcaggcatttatgcctcggggaccctttttatgggttcagggaccgcttttatgccttcccgacaaggggggggccttcacctttaaaaaccttgggccaaaaaaaaagggccccccccccaaaagagggggggg

SEQ ID NO: 94895 - DNA, 360 bp, Glycine max
ggaaccaattaaaaacttaacaaaatttaaaaaaaaaaggggaccgttttaaaaaacagctttggtgccccccgggaaataaaagcatttttcaactggagcaatattgcaagggctgaaatagcctacacaaaaggggagccacacatataaggatgctttctcaaacacaactgggagcacattaccatccaaggccaacaaaatcttcccattctcacgtaaaacccctttatgggcacaattaaacgtccaaaaggggcatacatctgttggacaccaccctatataatatgaacctttgattggtgtctcagtaattctaaagtaatcatccctgcctgatgcagcaatgagcct

SEQ ID NO: 94896 - DNA, 373 bp, Glycine max
tttttttttttttttttttttttttttttttttttttttttttttttttttttttttttttttttttttttttttttgaaacaaaggaaggatcatttttaaaaaatttttttttgacaatttacaacaatttgattctgatataatttttcaagaaaaggggggtgcaaatgagccagaattgcaacattgccttaagcaacgggaacccacctgttttttttggggccatttgcccatcaatttgggaacaaggggggcttaagccagaaatgtatggatctttcatgtaatatgcccatgcttctggtttaaaaatgaattgacggggttccaaaatttaatgccaaaaacttgctataaggggttcctg

SEQ ID NO: 94897 - DNA, 253 bp, Glycine max
ggggatcaaaaccccatattttggggcaaaaaggaaaccggaaacaacaaaagcccccaagggaaaactaaaatcaggtttaaaactgggcccacaggaaaaaggggccaaaagggggcccaacaacctatttccctaacattaggggcaaaaattaaccagagaaaaaccagggggcaaaataaaccctacctgaaaccccgccaaaaaagaaacctttgggccaaataaacctggccaaaaccccgggggg

SEQ ID NO: 94898 - DNA, 420 bp, Glycine max
tttttttttttttttttttttttttttgggttttttttttttttttttttttttttttttttttttttttttttttttttttttttttttttttttttttttttttttttaaaaacccggaaaagggggggggggaaaaaaaaagggttaaaaaaggggaagggggttccggggggtacaaaaggggggggggcgaaaaaacaaggggggggacccccctttgggggcaaaaaggggcaaaaaaaaaaaaaaagggggccccggcccctaaaaaagggggggaaaaatcccaaaaaaagggcccccccaaaagatttttgggggggaaaaagggccccaaaaaagggggccccttttttttttaaaaaaaagggaaaggggggaaaaaattcttttttaaaaaaaaaaaaatgcccccgg

SEQ ID NO: 94899 - DNA, 283 bp, Glycine max
atcaaataggcaacacctccaaaaaagggcccccacaaaaattaataaataaaactgatttacaaaattccaaagatttttcctcaatttcctccaaattacaattacaacgggaggaccttaatgactgacacataacaattgtaagactttacgaacctaacaagacagttgctcattttccccctgccatgttttcttttattgatcaaaaggcaaaaccacaaaaaaaaaaaaaaaatcctgcccatttgaaattttacataacaccaaactcaaaaac

SEQ ID NO: 94900 - DNA, 262 bp, Glycine max
accaaaggaaaaggaaggaaaccttcaaataaaaatttatgggaaattggaataaaaaaagaataggaaaggggtgtcccattatggcccccccccggaaacatgaaaaatgaacccgcgctaattaattaacccctcgtctaaatctcaagagggaacaattttggaccccccacgggggggccctgatgaagatcccaaaaaaaaaatcttttaactggagaaaggggggggcttaggcatatccttgacaattccccaa

SEQ ID NO: 94901 - DNA, 400 bp, Glycine max
atcccatctcctgcaatccaaataatcgtcaactagtttgagtttaaatccccttacatttgaaaagaaagacaaaacaatgataacttctgagagttttctttgacaagaacagataaagatagcaacgtttgattttgggtgtgtgtgggtggtggggggagagcatttaaaaattatattaaagtgataccaaagctcaacaaaaatgatggcacaggaaacatgtacaaaaaaaaaagcattgtagttagatataaatacgtcaaccaaaagtgacaccccccacccaacttggcaatattaaccatttagcgtgttctcttgacttgccgccaattattcatttctttccttacagcttcctagcagctgggtttgagtatgacaatattagctc

SEQ ID NO: 94902 - DNA, 93 bp, Glycine max
gtaaaatcatttcagtgtacagttttcaccatcaactttgcccatcgatttactctttctttatgataattgttcttgttatggtgagcaagc

SEQ ID NO: 94903 - DNA, 93 bp, Glycine max
gcttgctcaccataacaagaacaattatcataaagaaagagtaaatcgatgggcaaagttgatggtgaaaactgtacactgaaatgattttac

SEQ ID NO: 94904 - DNA, 510 bp, Glycine max
aaaaataatatcgaaataaactatacaagtgaagagtaattttcaccttactgtacaaaatcataaaatcatttgaccattttttttacatgtacaacataataatctgtctaaagaagacttttttttttattttatatatattaactttctgtcaaaaaatcactgttctccatattacgaatctttgattatttctaaactgtgaaataaaaaattatatgaatggatttagctacaaactagatttaggcaaaatacgaactagtcctcgaacaactgctcccatggctgtgtagaaaatgtgtagaatttgccttgcccttgtctcccttttaacaactcctattgcaaaagaatgatctatagaaagttatttgttttgttatattcctaatcacggtcttgaaagctcccaagtgaacaacaaacatgtaaatatgtagatgagaaaattgatggacaaagcattagatttggactccataaccatttctgggactgggagat

SEQ ID NO: 94905 - DNA, 482 bp, Glycine max
ttgggggggggggggggatgaaacacgaagaagttagaaagtatggggtaggcaaaatagggtataaatagtgtgtaggggggggagagagtgtgtgggtggggataggagaaagttgaggagatgggggtggggtggggggtgggtgtgtgacaccgaccaagcgaccagaatagagcaaagcggcagtaaataggggttaggagacagtcatactcaacaataaacgatggtagaaattgggaacagcgggcacctgggcgtactgcaacgtaacgaataggtatagtgagcaataaactaaatataacccgagagagaacctgacctttaagactgggggctatgcaagagcgagccgaatttagctttacgatcggttatatttgtgggaggggcatatatgtcgctaggagaagtggagctgaaggagatagaggagtagctataaagctaactggagaggagagagtgaaggccta

SEQ ID NO: 94906 - DNA, 458 bp, Glycine max
ttggggggggggggggggaaggggaaactaagagaggctggcagggtaggattggggaagaggtaagactaactaaagaaaggtggataaaccaaaaatgaagtactgaggttaatctgaagaaaagtaaaaggaaacaaagtgtaaaaagactggttgagacttaaaagggataatggctggtgttatgaaaggtaatacaaaaagaatttgacaaaaatagggtattagagagagggtaaattgagggcaccaagttgtgccgccagagctatagccacgacggctgcgatagtggcacctatgttatgttagtaaaatcacgtgaccgaaggagacgcatcggggtgcggcaatgtgaataactgattagaccggtccgtactaagatttataaagacacttgtgcgcgttccctgaaaccagagcttactaagtgtcttaaagacagtgagtgt

SEQ ID NO: 94907 - DNA, 341 bp, Glycine max
ctgcttggggggggggggggggggcaaatattgcttagagctattggggaggagaaaagaacgggaaaaaaggcgtgtacttgattaataaaagcgaagttggacgaacggggcggggcggggaaaggggcggccgacctgcacataaaatagaatggatgaaccaggatagagcctagggggggttgtgattggcaaggaaaagcggtagcttgagaatggctgtaggggtgggcaaaagcgtgaggggagaatggagtgttttgtggaaaagatatgtaggggtgattattacttgggtgactaccaccactacgcgttgtcgtagtacatgccagagt

SEQ ID NO: 94908 - DNA, 416 bp, Glycine max
ttgggggggggggggggggggggggattctaacaaactcgcggaaaggaaggaaagtaaatgccgaacaaaaacaaatgaaaaggcagaaaaatagggagccaagggaaacaaatactaggctactgcttaaaaaactacagcatttgccagtaaaatgtgacttacaaaagacggaactaccaggtcagtacgagcgaagcactgggtgtatatgcaaccgtgtgcatagatacaaaatacggcttactggagaaaacttagtattacccagcgcaacactgtaaaattcattatgggcccaaacgcttattttaagttatcttgtacagactggcgcagacagcctagccggctgataagtttgctatgtaaagagagaagacccagcacccgtggcccgggaggggggtcaac

SEQ ID NO: 94909 - DNA, 355 bp, Glycine max
gttcatgctcttggatgtttaacgaaatgtgacaaattaagggagtaataaacgaaggaaaggagatgtacagtgtacagatgtgaaatgtagcccaaaattccaaaattcttgcatgggtaaactaagactttacaaacttaagctgtgacctgaacagactttgtgcggggggaaaaagaatatactaaaacgtgtataagctatacactaagcttgaaattttaatatgcaacgtgtctaatctactcaagttggccttattttttttggaagctgggtccccatattcgaatgggataatcatcacttgcagatgccaacatttgtgggattttggggttccaacttacac

SEQ ID NO: 94910 - DNA, 370 bp, Glycine max
tggggggggggggggggatcgaaggaaaacgcctaggagccaagaagaagagtgaccacaaaacataaatgaatagagcgagaaaatgactaaagctaaccaacggataaaatatgatatttcctgaaaaggctaggaaggtacgtacttgaaaaataacgataaatggtgcaagaataacaaaggaaagcattgaaaaaagctattgatacacgttagatagaggtgccgctagtgggttggggtttacttaagcgatcagataaagatagtggtgtgattggtgctttagtggttacatgataagtggtggctgtcggggtaggcaacagtgttataggtaattggcctagtggtggcctgactaatg

SEQ ID NO: 94911 - DNA, 368 bp, Glycine max
ttgggggggggggggggcgtgtaaaacgagaaagaaaacgaagaagaggtgagggttataagggaggcagagtaagagctgaaaataggcatgagcgacaaaataacaagggatatcggcatttaacgtggggcgggatattgctcgtggctagctccaccgtgcgcccgtttatagccttcctaacaccgatggttggttcggtttcctcttcgatcaaggcgactgtctttttcgtcgtggcgttattacaatttcatttccagaattgccagagcttttctgtttcaaaagttttcgctaccttcaaatacttggtaatcctcttcgcccagcatttgcagacaattttgtcggcaatcccggtc

SEQ ID NO: 94912 - DNA, 449 bp, Glycine max
ttgggggggggggggggggggggcaagaaaatgttgaataagggcgaggaagcaaaagatgggataagggtactatagagatatgcttagcaagagaaggggctatctgagaaggagtgggtcttataaataagccacgacgctgtaataaactataaattaataagaagaatacggggacggctaggaagggatataacaaacgaaaggaatcgaagacctaatatagcgcgcgtatcggtagcaccagtaggggagaagcagagctaataggcaaggaaagaggtgtagctaagccagtaggtgccaccaaccttggcacccaaatcgtgcagagtacgctaagaaggcgaaagtagcgaaggtggggctatttaatccagtgggcttgcttttcgcctcgttacgcaggccttacgccaacaacaacgggcccaaggcaacgggtg

SEQ ID NO: 94913 - DNA, 353 bp, Glycine max
tggggggggggggggggggggggggggggggggggggggggggggggggggggggggggggggggggggggggggggggggggggggggggggacccgaaaaattcacaaaaaattgggggggggggaaatttcgggattagagcaaaccccttttaattgggagggggttttttggttccaacccaaaaattggaaaaagtggggttcccattgggaggggccggttaaaggttgaaagccggggccaaaaagggaaaacccctaaagggcagaccaaaaaccccccttttttccaaaaccaagggggggaaaattgaaaacccttttgggggccatagtttggttaaattt

SEQ ID NO: 94914 - DNA, 368 bp, Glycine max
tgggggggggggggggggcctgtgctgataataagaaacggtgatgagaagcaaatacaccagggacacataaaacgcgaccgagaggacaaaattagtgtaaaattcgctagcatggtaacggtacacaggtataagatttaggactaccttaaagagagagcatagggggccaataattttaggggtaactaggcagataagatacacgaaacaaaacccaaaacaaaaaacaaaaaaggaaccccaggcagtagagcagtagcagtagcgccgccacgtgaaaagcattggcctgggcttataagccgccaagctggcacgagcgctaactgaaaggctttgttgggtgtatgacgcgtaagtgc

SEQ ID NO: 94915 - DNA, 520 bp, Glycine max
aaaataaaaagataacataaattaaaaggtatactaactttcatcacccccgtataacaataaataccttattcgtgtgttttgacacaactattagttatgctattctatttcctgggttaaaacatggtagaaaataaattacaaagaccaacttgccaattacaaacagcaggtgatatactcagtggtagaaaatgtacttgaccacagagaaggcaatggagatgtcctgggacagctgaatgtcacacacaacatgttcattcccatttccatgattacaaaattgttgtaggagaaaatctctcattctcgaagaacttgaaaaaagttcattattttctgattcaagaattatttttcagaaactcatggttcctattctcacatttacgtcatgaatctcactgagaggtgcacaactatgatttaagattattttcagaaaaacaagaagtaaaatatagtaataaaaactttagcttagataattattggagattattttagacaattg

SEQ ID NO: 94916 - DNA, 492 bp, Glycine max
ttgggggggggggggggggaatgtgagtacaagagggggaggggccacgctggatagtgggagggaagaagtggtcggccaacacgataagtaggaaggaggggaggggagggggggtactacgacggatcatggggccaggggatagagactatggccttataatatatacaccaggtggtggagctgcgcgaatgttgcctaatatggtacgagtaagcgtggttgggggtaggttggcgcctaaggtttacgtaaaccaagaaacaacaggactaacgagaacagttaagctactaaagcttagaggtagattaccctataagtgatcattactattcaagccaagaaatgtaaaagtggcgttagaaacagtgagcgtctaagggaaaaattgtgtaccgagaaatgtggtgccagtgggttaacttggaccagtgtgagcaaggctttagctaggtatagagaagaagcgtggcctgccaagggtcg

SEQ ID NO: 94917 - DNA, 312 bp, Glycine max
ttgggggggggggggggggggggggggggggggggggggggggggggggggggggggagtaaagccagtctggtagttgtctaataaccgaaatgtcttctgggggttagggggtggttgtttggccacaataggataaggcaactacaaaaggaaaataggcagctgagccagcggataacccgtgagtatgaaaggcataaggttaaaggcaagaaaaataagcccaatgcaagttagggaatgtaccctaaatcataaacctataaattacaggatggcttatgtggcagactaaaggggcccttaaat

SEQ ID NO: 94918 - DNA, 437 bp, Glycine max
ggggggggggggggggcttaaaggggccgagtaagcgtcgtagagctgcgatgttaatagtatatccagttggaggtgtaagtgaaccgcgatagcgatagtgtaaggtgtaaaaatgtgagggataaatgcgccaaaagacaaggaggttggcgacaaaagggtgcggagcgaggctaagcggtatagaaggagttgatacgaaaagatgcagtggttggtctgcgtaaagccaggtaaagttagagacttacggtgagggagaagttggtgtgtaacgccaggagctacgctaatcccggttgggcatgagggggactgtaggagcgagcgtggatatcctcttggcggcgtcgaaacctgcactggtactagcaatgataggaggggctgccgttacgcctagcgaggcgcatagcagacttagcagtgtacac

SEQ ID NO: 94919 - DNA, 427 bp, Glycine max
ggaaaataaatggcaatttcatttcattatcatgtccagtaaaaccattccaacaaaccaaatgcaactgtaatgacttttacaacatctttaattcaagtgcgtaggtgactcaccagcactcaaacatatactaaagtggacatatgtgatacaactatataaaccactgctcccgaacttactattttaactaagagtttaacattgtttccctctaatagtaactgagtccatttactttaaattattatgcagtttttaatcccccctctccctttcctctcttcgaactatacatgatttccttacacggtgccgacacccatttatcatgggacaagaatatcacctgttgcagttataacattacatggggattcaacgaaaagtaccttgctcttcacaaaaaccagtgctatgattt

SEQ ID NO: 94920 - DNA, 424 bp, Glycine max
gcttgggggggggggggggcagtggcactgaggaattaagtggcggataacgttagctgtgaaaaaggtagaggcgactaaggattgggcgcaacaagtacaccggaaaagcacgcacccctagcttattgggcggcctaagttggcgaggagacctagaacgatgaagaaaaccagcgagtacgcggtaattattgggttgtaaaggccagccttgaatggtgctaccctgaaagcagttgtgtttaatattgtcaccctgggcagggttgtgcacagcctggagttcaccctgcgagatgggagtgcgcacttggccatggcggaatgtggcccagaccgggccacgccagggtagtattgggccatgctaaatatcgtgaattgtattttcctggtcacgaaggaggttagtgaaaattgt

SEQ ID NO: 94921 - DNA, 465 bp, Glycine max
ttggggggggggggggggggggggggggggggggggggggggcaaacgaaagttgttagggaggtaaagctaaaacggctaaatggctgataggcctaacgcaaagggtgggtgaggcagagtttataatgggaattccagacaaacgaaaagttgttagggaggtaaagctaaaacggctaaatggctgataggcctaacccaaagggtgggtgaggcagagtgagacggggggccacctggcctggcccaaccccagcggtgagcaggacgggtacggatgtttctacgttcgtgggaattaaggtggtgaacttgggtggtacgtgggtgctcctactgtgctacgtaggtgttcgtaacttgttaaagcaaaggtgaacaggctgcccataattatagctggggttgcccaggatgctaattttagctggcggactgacttactcaataatagtaaaagta

SEQ ID NO: 94922 - DNA, 425 bp, Glycine max
ttggggggggggggggggggggggggggctaaaataattacttagcaatggaagtgtaaatcacacgaaaacgtaagagacgtacacgagggcaatagttaaatgtgcaaagtaactaaactaaccgataagggaaataactagaggagaccgcgagcagatagcaaaagggacaaatagtaccacctagaaaaggcatgatcctatgaagtaggtagtagttttagccgcatcctgttggtgtgggttgcagggaggcatagtttgatttggttggcaagtaggagagttatggcaagtacgcgtacagcagcagcacctttgtggcggtgggtctggcgcttggtgaagcaaagtggtacaccaagtaccagtgcagacatcctggtgttggtgttgtggtgttggttgatgtgggtgagctt

SEQ ID NO: 94923 - DNA, 426 bp, Glycine max
tgggggggggggggggggggtatgaaaacattaaccaagaaggacggtgatgtaggtatagttagagtggaccacaagttagagtatataagcctggggtaacgaaatgaacagctagcgtaaagagtagtataagaggtagtagtgggaaaaaaagcaccacgcctacaaacgcaacacataggaataggataatttgggggggccagaaaaggataacataaatgaacaaccggtacggttatgatacttgacgactaccatggcttatgaaggcataggggaaccggccaggtaaaaattagtaaagaaaaagcgaccaacaacaaaccgtaaccatgatgatagtatgcggagattatttaaatttggccttggttgttgattttgggggggcgtcgggttggggaagtaatagggtggtag

SEQ ID NO: 94924 - DNA, 411 bp, Glycine max
gcttgggggggggggggggcaaaaactgagtattgagtcgagagagcgagtgagagtgagagaaagcgtagagggcataggcaaagggaaaccatacagacaaagagaaccgtaacaaccacggaaaaaaaaacaaaaacaaaccaggaaagagaaccgtaacaaccacgaaaaacaaaaaacaaaaacaaaccggggaaatccagcggcagagagcgcatagtacatgatgctactgtggttcgggaacggacacactgcaaacttatggccgggtaaagtggcagtattagttgtagtagggggatgtggctaacactacgactaactagataagagaactgcaagaactttacacaggctgttcagattaggctgcagtaccatagaaaccgtaaagcccgccagcac

SEQ ID NO: 94925 - DNA, 474 bp, Glycine max
ttgggggggggggggggtgggtgtcatcccaaatggccctggttagcgacgtgtttccgaccatgtcctaaggggagtagtgggactgagtaacagcggcgtaaataagagattagtggctaggcgttaaagtgtaagattaagactactaagacctgtaaaagtaccggggggaagggtaaacgacgtacccgggccaagcgttgcacctggttaaaggtttggagaactaccaggggtaaggacgcccctagcttaggggttgggcgaactgccaggttgtggtaggccttgtggttatgtattataattccccctgctggtataggggcccggtgtaagtgggcccctggtttaggtattagttgttgtagtcgtttaagtggtgccggggcggcttgtgccagtagtgagtgttgtaacggtaggcgtttagttggtaacgggtgtactggtggtagtaataagggttaa

SEQ ID NO: 94926 - DNA, 408 bp, Glycine max
ttgggggggggggggggacgaacgcaggcgtagaaaagggggggagtagcgatggtcataaaactgcaggaggtattggttggagggtttggcgatcgcgggagtacggctcgtgcgatagtagcacaaatgccgaaagcggttggcgaggttagccgcaaggtattgggctttgcgcgtaggcactcaacactgcgacacgagttaaatagaggcggaacacccatagcactacgaagaatacaagtagtgttggttgcagtagggttaataagtatattggggtgtggcggcagcgtattactaatactgtttgcaaaggtgcggccgatgggtactgtaataactagaataccggtgaagagaattccgtgccaactgctagaatatgcgtgaaaactagacaga

SEQ ID NO: 94927 - DNA, 192 bp, Glycine max
ttgggggggggggggggggggggggggggggggccaataaccctctagaagggaggaaacttatcaaacacaaaataatagacgcaacgtgtggatagcatggcggcatatatactgcaaataatagaaacgcaactgacgcttttgagggcaatctagtggaggatagagacagacagaccactaactgac

SEQ ID NO: 94928 - DNA, 308 bp, Glycine max
ttatattttgagcgaactcactttaaacagtggcaaagagtttagggccacgaggaaaggtctcgttgtgaaaatcttttcatgatatcctaaatgttgacattttgagagcttcgttagattacacactaagtgataacgtacaaggtttgattattgcgaagtgcatctcagaaattttaccactaaatgcatatgatcagattcgaacttctatgccttacttgaacaaatgctcttttaccgattgaataggcacctttttactgtgaaaaatgccatcagcaagtgctgctgatgcatttgtt

SEQ ID NO: 94929 - DNA, 132 bp, Glycine max
tgggggtgggggggggggggggggggaaaaaagtacccacgtgtgcccggaggaaggctgtcgtattagaaagaaaatggcaacggtagagccaaacgatagagcgtactgtattcagggttggttggttgg

SEQ ID NO: 94930 - DNA, 401 bp, Glycine max
ttggggggggggggggggtacggcaaatgaaggcagggagaagaggttcgtatacggattcggtagcagaaaacgagaacaaaagagatgaaagctagctgaccagatggtagcacacgacaagaggtgagagaagaagctatactgttcagcaggaggggataggcactcgagtgcgctgtcaatcgagaggatcctggatgtgagaagctatataatgttctgtcacttcaaggttcactggatcgatctcgctagctcatcgtagactgtggtgagacgcgtattgaaaggtaaggtatgccttcgtcggggataatcgtcgcatgcccaaaatttgcctcggatttaatggaagtcttggctactatagtttttgggtcttactgcctcgaagactc

SEQ ID NO: 94931 - DNA, 363 bp, Glycine max
ttggggggggggggggggtacgggaaataaaccagcgcgccgcgagggaaataacataggctaacagtaaaggatagcacggtgaatacggcgaggggcgggaacactccaactagacagcagcaagcaagagtagttgtggaatgacaagtgattcactcgagactgtacggaggcaacttgtaggggtgcaggtggcactgcagggaaggagtcaggtatggcagttgcgggtttggcacggcgatgtttagcatgctagcgtgccaacatggttacggtgatgcggtagagaaaagctaccgggcctcccaaggcccacatggacacaagactgagggactagcactagaagccgactta

SEQ ID NO: 94932 - DNA, 274 bp, Glycine max
ttttttttttttttttttttttttttttttttttttttttttttttttttttttttttttttttttttttttttttataaaaaaaattgcccccctacaaacaataaatctcaatttcatttggaaagggcccctaggaattgccccttaggacatttattcccaggtctatattggttttaaaaattttggtttaacgccttgaaatttttggaaaaaaaaggccccctttcctttttcaccttttggggacgcataatcccctttaatggcc

SEQ ID NO: 94933 - DNA, 408 bp, Glycine max
tgggggggggggggggggtagatggtcaatgaaaacaatgcaaagggcaacacaaaaaacaagaagcactaaagatctaaaagatgtataatgtatgtataagttgtgagggagacgaactaagatattgggtacaaatgcaaaaagatcagcttatgaaccagaaattatgggagcgtggatctaaagagaagcacttgcgtcacaagagtaatgcggggggatgcctaaaagatatctgacacaagtaaaaataaaatgtacttaaatgacccctatcgcatacgaagagaatgaagcaaggtagtatgatataatcggaataccggctagcccccttagttgggcacggggctattgcggatatgcgacgtggcaactagaaggagcaggcggctaagggcacta

SEQ ID NO: 94934 - DNA, 93 bp, Glycine max
tgggggggggggggggggggggggggggggggggggggggggggggggggagactgaaggactgaaagagttaggcaatatgcctagtaagtt

SEQ ID NO: 94935 - DNA, 403 bp, Glycine max
ttggggggggggggggggaggggggggggggggcctatcacagaattatgggggactgattggtaggggtgggaggaaggccagtgcactgtatacggccaacaggttggtgcgatgctgcacatcgtaagtgttgggttaagccgcggggttgtggctggataataaagtgcggtattttgggctctagacctaggaggcaaccaaaagtggtcgtgccaagtgcatgcactgtacaaagagttggaagtgcgctcatctcatccaattagtgtgtacttgggcttgttgtgcatagcgttaaaccagtgcccgttggtatgcttcattttggtaaatgtgggttgcgttatgtgctgtgattatgtgccggtgtacagctgccattgccccagcaatgggt

SEQ ID NO: 94936 - DNA, 417 bp, Glycine max
aaaaaataaactacctcttcaactttaaaaattaaaagccatttctggtagcaacattttttgaccatttacatgaacacgcttttatttgctacttacaacctacacaatcaatcacacaatggatgtcaacccatgatgatgacaaaatttgacacttatgccatcctttgaaacaagaacattctttaaaggcttatgaggggggggggaggataccactgatgagcatataaggtcaaactcttaagggttatatgaacctcctcttaaaattacgaatagttgctcggtatgagcgtactaacaagctaacccctataccaactactacaaagatgccaagcccaattccatcaccaactgtaaccccagcattaaaccatgattgttcaccatcttccccatctacatata

SEQ ID NO: 94937 - DNA, 474 bp, Glycine max
aagacttctttctcataatctgtttttagtgcagaaaattaaaatacgttttagatgtttttgttttctttaacgttttaataaattttctattttcacttcaaactaccacgaccacggccactgccaccatcaccacccctgctgctagagtgccttcaagctttcacaacttattctcaaaacaaaattcatcaagcagatccagatatttctgaatgactagagaccatacatgccatgcaattatctttcctcaaacaacttatttcttactatgagcttcagtagttaagttaacattaacaacatactaagaacggctttcataacttcaaactaaaaaggtgtagttgggcaaggtacttaacaataaccataagtatggaatatcagaatcaaataatgcaacacgcctttacctgctcaagatgatatattataggcaaagagtggcacctgcaatacacgaca

SEQ ID NO: 94938 - DNA, 332 bp, Glycine max
ccagggcattgatcctttgattttaattctcaagtatgctgggaacatcttcatattgactcgtttattatcgacatttaaaaaaaatcatttgtcatgaaaaatggaaatcacccacaaaatgtcatacccatcatagacataaatcccaacaaaactccgcatgaattgagtccgcaaaattcttgacaaaaacagggctctcttatgaatagagaccgctaatgggattacattagtttatgggcaaattctacaacatgcagggccaccaggcacgcacagacatggctctccaatattcaccattaaggcctaaggggctgcaaaaa

SEQ ID NO: 94939 - DNA, 427 bp, Glycine max
ttggggggggggggggggggccaaatctaaaactttagtaggcgacggcaataggactaaacaaagatgcgtttagaatgaaagagtaaaaaaacaaaaatagattacgatacagaaattgctgatccctttaaaccttgtgtaaagcataggagaggcgaatgctgaccaaggcgcgttatagagccattatacattacattacaataaataggaacttatccaacatatgaagagataatccatcactaaagcaacaacgttaggtcaagcaaacccccaaacagaagttagttaatgacccccgccccaagtgacacggggtggtgctatgtcacaaagggggtatggctagtaatttaacagcacgtaccatctactaccttaccatagaccggtaaaaacgcagagtagcaaaggttttagg

SEQ ID NO: 94940 - DNA, 379 bp, Glycine max
ttggggggggggggggggggaacgttatagaaaggtaggaaacataggccaaatattaaaatccgagtactaatgcacctgagttaaacttacacagttaaaaggataaacctaaaagcagaaaagatccaagtaacaactaagaaaaggtgattagtacagcaagtaaaaggtaaaagtacgtgatttcggcagtaatgttgctagagcgcccaaatcacggctaagaaaaggtgatgattagtacagcaagaaaaagttaaaagtacgtgatgccggcagtactggtgctcgagctacgggtaaacgctctggctgtgctggtggcgattgttggtgtacggggttgctttggtgggcagggcgacgagatatgtag

SEQ ID NO: 94941 - DNA, 431 bp, Glycine max
ttgggggggggggggggcgcggtttatgagaggggtggggtgggaggaacgaaacagagaaataggagagcggagggatagactggagtcaaaaaaaaaagaccggtgggatagaaaaataaccggagcgtgacgaatgcatggaacggctaaataatacataacggtaaaagggcagatgtgacggatggggagccaaataagactaatgggtgaggggttaggctgcaaaataactgcaagcaagaggtagtggggcaagttacacactaaaaagaaggaagtccgaggaacaccaacaggcaggcgcgcgtaactgcgctgtagtgacttaacagagcagcgtattaaaaatggcacggaggagggtagtacctgtatttgtaacaacgctagcagacctagttggcgaaactgcaactggtggcgtg

SEQ ID NO: 94942 - DNA, 258 bp, Glycine max
ggggggggggggggggggggggggggggggggggggggggggggggggggggggccccggcaaactacactgaaagggatgccagaaagggaagtaaccttagaaatagcaccgggaaccctttaccaaatgcacttcccccagtacatgaagcccctatctcgaggtaggcccagtggagcacccaaaaagagggcagatgactggagaacccagatacggatacatataccaacccgggaaatgggaattgaaagg

SEQ ID NO: 94943 - DNA, 329 bp, Glycine max
ttgggggggggggggggggggggggggggggggggggggggggggggggaaatcccaaatcactaggataaggtagttagtcctgaataagtggagagaatgaagtgagagggaaattgacacaaacgaatgtggtgccttaaggttaattataggcctcggggggtggtaaaaggtgggcccaaaaaaagttccaggttaaacaattattagaagaggaaggaaaatggatcggattaattaattaattcacacccggtgatggatattaagtagttaaccccttatatgtatgggtaatttattaaaaggtggggggttgcccttta

SEQ ID NO: 94944 - DNA, 123 bp, Glycine max
acgaaaccgtgacattgaaatccacttgtggtactatgtttatggttgctaccataaggtgcttattgtatgattgattcatcatttaccatatactatattcctaccattatttattatcat

SEQ ID NO: 94945 - DNA, 180 bp, Glycine max
ttgggggggggggggggggcactaacaaagaggtaaaggacgagtatgcgtagggaaaggcggtggcgttgcctataacgaggtacaaagggacaaggccaaaaccgtcaacgtttaacaagggactacagccgtacaggttataatagtagttcagcggaaagggtaagcacgcaaaag

SEQ ID NO: 94946 - DNA, 130 bp, Glycine max
ttggggggggggggggggatggcaaaatgtaagaaaagggcaggtagggagtagattagtggcaacagagggaacttgaaaagggcaggatgtggaataaaacatagagaacagtgaaccagcacaaata

SEQ ID NO: 94947 - DNA, 351 bp, Glycine max
ttggggggggggggggggggggaactaataataggtacaacgtgtgtggagggacgttatcacaggccagagcccagcacaacagcagggggtaattagtaataaacaaacgggataggagtaaagaaatgcactgatgaaccacttgcaaacagtactggagattaaagtgcaagtggaatataaccgtaaatacttagcagatacatggaccaaccctaggtgtatctagataaagtgagcttttaaaatatactgccggcaggccggtcagaggggtgagtgagatggttaagcactgttagcgttgtgggacataatgtaaaagtcaaaattgcaaacggtgtgggt

SEQ ID NO: 94948 - DNA, 440 bp, Glycine max
ctttgcttttgttttgccaattctgctgctgtaactgctaatgaagactctacagctggaactgaggtgaacattgatggcaagcctttacatacaaagccatttccaatagaggaaaagacacttccaataccgttgtttaagccctctaccaaaattggttccaattgttacacctataccaaatcctctgcctatcccagttttccaaaagcctataccaaagtggattccagatattaagcctataccaaatccaattccaattccagtattcccaatcccagtgtttaagaagccaattccagatgttatgccaataccaaagccatctcccatagtggaaaaaccaaagccaaagccttgcccagtagccaagaaacctattcctactccggtgattaagaagcctataccaaagccatcttccatagtggaaa

SEQ ID NO: 94949 - DNA, 357 bp, Glycine max
ttgggggggggggggggggggggggggacgaaattaaaattacaggtgatatagtaggttggcaggacgacagtagtaagtcacggataagactcctaatagggcctacgggtagacacctaaaaaaatggggataggttaaggtaatggttaacagaaagataagaccagatagctaaatttcgatactaggcagtgtcacatatacctcgtctttgcgaaagaggcgatgccagagtgttgggtaaaggccacgccagaatggtagaactagaacaaaagagagctaagaaacaacgccgaggtacccaataagaacgggggcaacaaacctggagagacctgggaataaagcaa

SEQ ID NO: 94950 - DNA, 389 bp, Glycine max
ttggggggggggggggggggggggggggggggggggggggggattcgtaacttattaaggggaattaggactgagcataaccgataaaaccaagggagggagaagatatacgacactggtaaagtagaatggggtgagtagccataggagacaccaatgcgcagatagcacgaaagcgattaaaaacaagcaacaaatgacccttaagcatggttacacgttacaaagcagcaattgtgaaaacctattaaacaaaaaagaatttgcaaagactaagctttggcgtagcctatgagcgggtaacaagtaacagcaatagggggccgacacttgcttgcttgcaacaggagtacataaagcaagaacaaaaagtaaagtataaaggcaag

SEQ ID NO: 94951 - DNA, 318 bp, Glycine max
cttgggggggggggggggggggggggcaaaaaaacaaggaagaagggctagaaaacaaaaatacagcacagtatgagaagggtaggggggtcacattgcgatgaatgggatgggcccgtaaagggatataaaacgttgtcgtaatagaacacatgttcgtaaacattataatctaaagcggcctgggtagacgggtaggtttgtggggggttcgttatcaattcaattgtcggtctagttcttcggattcgtatcagttcatccgtagtgaatcgtttttcgtaccgggttcaaatcatcatcgtcaggatgtaatgt

SEQ ID NO: 94952 - DNA, 333 bp, Glycine max
ttgggggggggggggggaaaagatagaaagatttcggtaaaagaagataggacagaaaacaggaggccaaagaacgctaacgttgggaaatatcagtttagaagatagacacgaagcatacgagaggggaacacagggcaaccgtaaactcaagggagtgctgggtattatgaaggtcggggagacggaaaaacaacaaaaaaatgttgggatattgtggaaagcaacctaaaataaaggggtaccaggaaaaaaaaaaaactagttacaatagcgctaatgtactactattagaggtagacggtaacttggccatgtttagccggccgattg

SEQ ID NO: 94953 - DNA, 433 bp, Glycine max
aaaaaattcaagatccaaatgttcttcttaaacttttaatttttatttaatcggcaaataatatatatatatatatatatatatatatatatatatatatattatagaaggagtaccagaattatttgaaggaaaagtttaaagctcaaataaaaagttactgaattcttaaacatatagttagagattctttgttgttattgaataatagttagttagaggtttaatcttcatgattgtatgtatgaaaaaagatatgtagtgagactttcggttctatgaataaatttttatactttgaaggattagtcttttagtcttactcaaaagatatcttaaattgaaaaaaaaagtgattatttatcatgcacacactataattacattaaataaaatattattcaattcttggacaagatagttcttatttgac

SEQ ID NO: 94954 - DNA, 393 bp, Glycine max
ttgggggggggggggggacaagaagacaatactcaagagggtaagtagtgcgcgacgacgaagaagaaggtggttcttccgtacaaaacgactaaaataagggataaacatacggaaaaacacacctaatggaattatattgaaaacaaaacgggctagatcggaacggttataaagggatacttacttgtcaagggcgggtactgagtggataagaggatacgaatttagtgatgagtggtgcaagttggacgcccatgatatgggagtactaagaactagcgttggagagagacggcgcggctggctgactgcggttatagacggacccataaaagaagagaagcgtgattgtggctcgggccatgggaaacaacgaattcaggcacacgg

SEQ ID NO: 94955 - DNA, 362 bp, Glycine max
cgtcctccttgctttgggggggggggggggggggggggggggggggggggtaactcacctagaatgtgcgttgtacgggagagagagagagagagagagagccgtgtcgcacgtagttcagtagatgggtttgggtaggggagacgatagagaagtagagattagcgggccaaagccaaaaaaaagaaacaaaagtacaacttgaaaaggtaaaggggataaaacggagacgaaacataaagttacgaagccatagtaaaacatacgactgcccaataacgttgtaaggtggcccctgcctgaggccgaaagaaaaacacaacttaaagttataaaacttgcagagttagcatgttgctggt

SEQ ID NO: 94956 - DNA, 287 bp, Glycine max
ttgggggggggggggggggggggggggggggggggggggggggcagcatgaaacataacagggcgtagggaataacatacaagaaggttgataccgaaaccctagaataaggcacgagattagtgaagaagcaaaagaatctagagaatagaagctggaaactaatcggtagagtacaacccaaaaagacgggcaagtttaggtaataaaaagtagctcaggaaaagttaaggaaaaaactagaaacgaaaagaacgggggaaaataccgagtgccaccaaactaat

SEQ ID NO: 94957 - DNA, 313 bp, Glycine max
ttgggggggggggggggggggggggggggggggggggggggctactacaagaggcagagaggagagagctgccctagacgaagggcaaccaagaattaggtttaagcagagtgaaaagtgacaggatacgaggagccagatccaacatatgaaaaggatctgcaattagtgggaacggagggaatggggtaatgttaaatataccgtagctattgataccggtacgcctgggtggtacttagctaggggtaatggtagttaaagagccccttacaagaggttgatagcgcctcgcagaccacggtacttaagg

SEQ ID NO: 94958 - DNA, 479 bp, Glycine max
cgtcaatcaatcgtgagtctgagactgagttctcatctctcaatttaaaaccctactcgccgttgccgcccaaccaccttctgtccaccgtcgccgtcgtcgcctttgcagtcggaaggttgcaccacgtcaccagcacatcaagcccgtcgcgttggaaggtctcaagttaataagtgacccattggttcgactattgatccaatgccttgactgggtcaatcaccatttggcttttaaaactatgcttcgtagttcctaggccaatgtttgcatttgcttccttatacactctctggaactgtcacaggattttgagacagctgacaagagacaacaagatatggcagagaggagcaaagagcttctcaagtttgagcataatggcacacccctttcttccttagaatccactcttcttgtttgtgataataaaaaagaatcagacagtcaaactaggagactcccccctgatggca

SEQ ID NO: 94959 - DNA, 260 bp, Glycine max
tgggggggggggggggggggggccaacaatttgactggcagtgttagtaaggaaagggtaaaggatagggggtgtgtagtcaatccaaacagtcacacaaacaaggagatgaggagtataataagtgctcaaaggacccgggtggattcacacgctgtggcggaggcgctagttaaatgggcacaatcgggtctggtataggcagtgtactatacaatgcggttatactacaggtagtcccgggtgccaggtgttatttg

SEQ ID NO: 94960 - DNA, 529 bp, Glycine max
taggaatacagaatttttttcaaacacaaatgcctactcactcttttagtcttaggactagtaattataaaatgaaaaacaaaatcattaaaggtactattacttggaaagcattattactttattgataaaaataagtcaaacaactcttcagggacttctgctctgactcgacttatttattaaaaatattaatttgttttttttaattaatcaaattgatcagatttaattttgtaaaaagactattaaatttgataagttggtatttttatataattatacatacaatatttatatttaatatacatttactaatattaacattaataatatgtttgatagacctgtttgtttatttaagttggatggcttacttaggcatacagatttattcacttgtctatgagtcttttataaaagaaatcatataaatatgctttaagttagattaaaattttaaataaatcatgctaaaacttaaaaaacaatttgtaataaataaataagtcaggttgagataatatag

SEQ ID NO: 94961 - DNA, 448 bp, Glycine max
aaatcatgccagcttaagtttattcatggaatgccaaacttaaaaggaaggctacagaaacagcattatgctctttttgttgtctctgaggatcagtcacaatactgtagtgatggaaaaccaggtttactatcattttataaccgtccatacagaagagatagtaagatcctcttaccaaattcagagagaagtcaaaacagcatattgtggtttttgggccctgcagtcctcgttgcgtccttcatttttccttcactctatttacgcaaagtgctatccatcatttttgaggactctttgttaactgatttcctcatattattcttcacagaagcaattttctattgtggtgttggggtattcctttatctactagaccatgtaagaagacccttgctagtggatatcgctgcaaacaatagtgatactctacccccacaattgg

SEQ ID NO: 94962 - DNA, 507 bp, Glycine max
ttgggggggggggggggcaataaccaccaaagttgggtcgagctaaaccaactcaaggagagagtacgacaacggtgatttagatagataagtggctggtaaacgatattagactggtttcagagcgaataaagtgtgaaacttaatgtgataactactgtaaaaaataaaacaccaaaaggaaaaagcgaactaataacaaatagcaaggaataaagttattttctggcgtgaacgggctcgtgagagaccactggataaagtagtactaagtaagctaggtggtagcaactgatgagcctgctgctgcttttggggcggcctaagggcgtataaagaagtgggtagcggcccgggttaaaaggcaagaaacgctcccgcatgggcttagtgtagcgggtccacttggtggcaatacgaccaacatttttggtgtgcagaaagcggcccggcacaaatggccttataaaactttataagggagagatagctgtaaaagggcgtaca

SEQ ID NO: 94963 - DNA, 205 bp, Glycine max
ttgggggggggggggggaggatggaattggtggaacgattattatgaactactaaaggggagagagtgtagtaaaaatgtcatgtatttaaagggaatggtgtcaacctaataataaacgaacaaatgggtcataagaaatagacgggctagtaaagagtacatttgtagactaaacagaaaatatgttatgttatatgccataa

SEQ ID NO: 94964 - DNA, 215 bp, Glycine max
gggggggggccaaaagtaacacccaagtttgtgcataaaagggtagggatatgacaagaccttatatacggcaacaaacgaaagagataagaacgggactagcaaaaagagatagcgcaagggtagcagcagtggtagaggcatgtcgcgcatatgctgcagaatgcacgactgccataagtgtaagacggggaatcagaggaggtaacgatgat

SEQ ID NO: 94965 - DNA, 415 bp, Glycine max
ggggggggggggggggcgaaatgtaaaaggaagggtggaagacaagccagcgcaaagtaaagacatatagaataaagagaagacgacgaagctgaggagaggtggggatgaaatatagctctagtaccgatggcggatatgttgtttaaactaaatagccgcgagacgaaaaagagggaactagggctaaggccattaaaagggcagctgggaaaactggtaaagtggcctgttggccttgccaatggtaatggactagacactggtagcgacgtggtaaatataaagggacccgacactgcctggggtgttgagcttgtgggcgttaataaggtgccactacccgacagcatactagtatgcttacccggagacaagcacctgagccataggtgccgtttagtacgggcgctga

SEQ ID NO: 94966 - DNA, 407 bp, Glycine max
actgcggggcatggttgcaccacaggctgaaacaaggatggaagacccatagattattgccaaatattcgggttaacagtattaactgattggtgggctaacagcagcccttgttaacgcagggtgagccaacggtgtgcatacacagacaacgacttcaacaccggtgatggtgaccccaccggggacggtgaccccaccggttctggtgacccattccacaccggggaaagttgtatcccctgcccagcgccaacatgttccgcagcatgggccgcagtaagttacgaccacaccgccgacaaaggggaaaatgcctaatactgccgtgtcactactaccgaaaactacgcctcagcaggcctgaaggccaacgccgacatcagtaactaccttggtagtagtac

SEQ ID NO: 94967 - DNA, 424 bp, Glycine max
ttgggggggggggggggggggggggggggggggggggggggagtttaagggacacaggggaaggcaaacaaacaaacaaaaaagcgaagccaaccatcgacataagcgtttaggaagggcgtgcgggcgattggaaatccggagcaaatagggggtgtgagatagagctgaaggaacacagaataaaggtaaggggccagcggagaagttcaaaagttaccgctagctaacgctaatatggggggagggccccggcagaggaggcaggggacgccacgccacaagtaacattagtggcacaacaaacgcaagccaccccggcagcttgtgcgcaacccaaacagcctagtggttgcaaacacccgtggggggtaactgcggcgagccggtgtggcctagaaacgcgtgcaaataagccccagct

SEQ ID NO: 94968 - DNA, 421 bp, Glycine max
ctgggccgtgtgactgaggaagaggacgaggaagaggacctatccgggcatgatgaagaaaaccaattagtcaggtcgcgtactttcgcacctacttaacgggtacagccacatcacttactgggggaagcggtggcttagggggtggtgtgtccatttggggctgcggcgcaagctaaatgtgcaaccgcagctgtgcggtctcggtacaacactgcgcaaacatttaaagaatcggtgacacactgcccagttaatgggccgccagttggcgatagccggttagaggattgcgcagcagcagaactcacggatttcatgacattgtccatatctaaaatgcgtgccttagggccggttacactgacccacctgttagtcttggtacggttgacaatgcgataacaagcagggcagcccg

SEQ ID NO: 94969 - DNA, 126 bp, Glycine max
gtaaaccacactgtaaagtgtatgccagaacagtaacaacacgagcatttgccgactaacggggtgcacaaagtaacaccagtatgaaatagaaaaggagcactataacaaaatgacaaaccatta

SEQ ID NO: 94970 - DNA, 488 bp, Glycine max
  unsure (1)..(488): unsure at all n locations
taaacctggtactggtgcggtttagcctcggcgtatgcactgtgcggattaataataataacttggtagttcaacttggtggtaccttatgattttgatcttaattaaacaccatttgtggtattatcaacctacgcgtaaatgttaacttgtaaagtaagctagtgggcaaccacaacctacggcttccatgtatactactggtgcgcatactagtgagccgccggttccaccgcctgtagctgctgccagagcacggtgttttggtttgaaacaatgggtgatgtactagtgggctgccgccccggcggtgactacttagagggccacttcggaggccccgggttaatgggcagttccggaacacaatggaaagtagctagctgttaagctggggtaggggtgtgtgtgtgngggtatgtggtggtgactggtggcaggtagctaacggagagctaatgccggtgcggagagctagatgagtgaga

SEQ ID NO: 94971 - DNA, 411 bp, Glycine max
gggggttgtacgcagagcagggcagggttattggtatgtaacggtgtgggtggtgggtttggttgggtagggagggaggggcttgagcgggtgggaaaggggaagggagacggggagattagcggagcggaagcgtagagcgctcagggggtggagaggggcgataacagggcagcaggtaaggagtgcacaaggttaacgatgggcggcaggcgcagggcgcaactaacgggtaaggcccaggtgcagcgacctgggccaccggtggtgatggtttaccagctgggtaagggagtaaggagattatattatacaccaggttacgcaggcacgcacgccagagcaagagccaaccattggagcaggcagtagctaagccacaactgccgaataaaacttggtacagtagga

SEQ ID NO: 94972 - DNA, 317 bp, Glycine max
ttggggggggggggggggggggggggggggggggggggggggagtaaacgaataaaacccaggcagggcaggaataacttaacatttaggaccataaacagcacgggtagtaaggagactaatggaaaatgcataacagggaggaaagatagagagtagaatggataaggccggataaaaccccattaaggagtgggaacagcaccatggctgaactgtggtagtaaggcttggtgttacttagcatgtactagtggttagtaggttaccctgaacttgtattagcaccagctaaaaggtacgggtaggaactgggt

SEQ ID NO: 94973 - DNA, 326 bp, Glycine max
ttggggggggggggggggggggggggggggggggggggggggacccaagaggtacaagggctatgatggcagaagaagtggcagcaacgcgaggtattaaaataaaagagggggaagagtaaagagaaggcgcggagggcaaaggtagaagtcaagataagtgtgaccgtggtgccggcaataacacaaagctcgaacacagggtgttaggaggaaaatagcatggtaaggcagggagtatccaagatagagtgcgtgagattagaattgtagcaggggttgggggcagcgtggaggtaatcggggtggtaaatgccagacatgga

SEQ ID NO: 94974 - DNA, 382 bp, Glycine max
cttgggggggggggggggggtaagcagaaaagcaggcgtgagaagaggcgatagaggtgggacacggcagttgatgccgaaaagggataatgaagcttagtaagagggaagaggcaattgggcgaacgcagaaaatcgtaggacgcataggccttctactgcaaaaggcacgactagcataagggtaagacatatgctctgattggcaattcatgtgccactggatcgatctcgctagctcatcgtagactgtggtgagacgcgtattgaaaggtaaggtatgccttcgtcggggataatcgtcgcatgcccaaaatttgcctcggatttaatggaagtcttggctactatagtttttgggtcttactgcctcgaagactca

SEQ ID NO: 94975 - DNA, 340 bp, Glycine max
ttggagcgggagtagcaagaagtgatagctcaagggtaccggctgtggtagaggcatggcaagcaaaggctgtagtatatctaaatgtaagatttaaaaaaaagacactcactcactcatggaatttaaaaccaacctaatcctcctaatcaaaaggcatagtattaggataggataaataaggcacgcactaaagccaaggctgagtattaaccctacaagtaaaattagtggggtatgccgacgtgatgtccggcgaagggctgcgaacagtccatatgcctagtccgggctgctagtagtaggggggtacaaagagcaagtacaaagtgaaggcagc

SEQ ID NO: 94976 - DNA, 418 bp, Glycine max
aaaaacgacttatgcttttaatcagtttagggtttggcatggtgtgatcgcaactgttggcggggctagaccactgacggcaaagcgttcacccaaagctacccaaaccaaacaaaagtcttagtaggccgcgtgtaattggaggcggccgcctgagccggcgcctccgtataaggccccgtaagtgtaagcacaagccggttaataagcagagacaccataataacaaacagtagcggctggtggttagaaaacttcgttaaatttgggcgtagtttatacaggagcacaaacaagctcaccaaacttggagactgcccctgccaaagattatacagttaaaacaatggagtaaaaggggtggtaatagtattaggataaaaaggccgcagaaatgtaaacaaatgaagaggggcta

SEQ ID NO: 94977 - DNA, 391 bp, Glycine max
gagtataagcggtaaatgcaccaaatatgcaagatacattgcttgataagtttaggaagtataaggtgaaacacgatgcagaatggggtacaactagtgaacggaccccaaccgccagagcctttgcgggataacccaaggtgattacagccaacataaaggctacgtaacacatgtgtataactggtgccgtaacctgtacaacacggtaacaagcaacgcagcgggagacttaaaggctaatagtctaattggcgaacatggggcctcgctgctggccacccatagcaaaacagatggcgagagcacgagggcgtcaagctaacgtgtcatgggtattgcgggccgagcggtggacggactggctggtaggcatggcgcggtagcgccg

SEQ ID NO: 94978 - DNA, 244 bp, Glycine max
cttcattccaattcattttggcaccacattaactctaaacacaccatgccaaccctcaatgatgtcctcacattctcattcttccttctcctctcttgctattgccacctcctcaatggccaacaggactactcatttggccatgccatcgacagacaattgcatacgctcttgaatcctataatactatcactcttgcagatctgaaggactcacatattgatggatctagatccctatttca

SEQ ID NO: 94979 - DNA, 426 bp, Glycine max
actgggcgcctcctaacctaaagtgctaggctcagcctcttgttcaactgtggtcgtgggctctgggtgcgaatttgaaggggtcttagtcggccccttcaacttcagagggttagtcaaccaactatgttacacttgcagattgttcttagtaccagttaaggacagtaatgtaaggttaacagttaaaggtgtcacgtgtaaagtactcaaaacggccaacaacgcaacaacaaccatcaaaggagactacaaaaacaaaacgttaggcaacagaaagtaaggattagataagttggctacaagcacaggctggtgtgttacaaaaaacccgtatgccagctgcaccactagcggccaaacctgtagctatcgctgccgcaatgatacaactaccgccataactggaaaacccaatgacaaata

SEQ ID NO: 94980 - DNA, 388 bp, Glycine max
ttgggggggggggggggaaattgaagaaggcgatgagaggggcagcagagcggtggttaagccggctaatggtatgaagaaaagtggccttagggttggggcagggattgaatagtgggaggcttatataacatttctgatttaaggggtttggcaatatacacttagagttgttggtatttaatggcgtgggaaaattgttgcttagtggtggaatggttggcgagcaagagtgaagacctagtaacggaggggccgtgacagaaggggtaagatgggtaaataggcataaagcgtgggggtgttagggatatcgcaaaagtataagaaatacgcatatgcggaataaaaggggttagctttagaatagacgcaaaaggagcacaag

SEQ ID NO: 94981 - DNA, 402 bp, Glycine max
  unsure (1)..(402): unsure at all n locations
aagttaactttatggccaaggctttttagcgtacgttgcgcctgccgtttataatgacgttgcagcccttgcgcgcacctaggtaagcgcaggccataaaggcacggtggtaatacctaaggtttgcagtagagcacaactaggcttaagctaggcggtgtggctgtggggctgcccctgactgagcggactacgctatgacgtattatgcggtagtagcgtatgacaatatagacttatttacaggccggcataaagcagagaaagctgccaacctggcaggagggggatgaggcncgactaccaatgccacgttgtaatggccgggaggggtgcaggcgcctgtaaacagagtaggataacccaacgccgcattgttaacagaagctgtaacagcgccac

SEQ ID NO: 94982 - DNA, 334 bp, Glycine max
aaacaggtggtggtagtcgtgagcggggttgctagaggtacggggaaccggtaactagtggtggcaaatgtggtgtaactgtcatcccaagggtgtactggggtgtgtcggattgtatttagtaaacggggttgtggtgcccgcggacgggagtccagttcccctaggctaacagggcagtagggtatcaagtagagtaggagtaaatatgtttaggggtgcccgatggaaggcccagcccggcttgtccagggtctatgtgtagggtgacccgggagcgtccggctcgggccgccagattttgggcatgttcaagcactggcattatcaaaac

SEQ ID NO: 94983 - DNA, 397 bp, Glycine max
tttattaggcccggcttgattgctgctaaccatgagagggccgggttagcacaagccggcgcgtgtaacaagtaatatgcagctgtaaccagggaataacaactgtaatgtactgctacctacgtggtaaaactaatggttgccgtggaacaggctaaggggtcatagggataacttgtgtgagcattggcggtaagttttggtaaaagtgccggggcgccacctaaatacaccggctgcgccgattcccatgcgacacataatagttggcggcgcgaaggtaaaagtgttaccaatggcggtgaagcttatatacgagcgcggggcgcatacgcgttagttggtatacctgctgaaattacggtgactgcagctaggaaggtgataacctagagtg

SEQ ID NO: 94984 - DNA, 403 bp, Glycine max
tggggggggggggggggggggggggggttaagaaagggagggggcgaggagaagaccaataggaacaatagtgagataacttaatagcaaagaaaatggggattaagagggtgaccaaagaaatagagaccaagcccacaaaaggcaggaactggcaggatataatggccgccagggagggctttgaagtgctaggaaaagcttgggctaggggcgctgtatattgggtgaaaggaaatggtactgcaacctaagccaatttcttgatcagaggtagctgcactttataggccagaaagagtgtgcgataggccagaagctaatagctaagggggtagcaagatgatgctcagggttgctgccccttaagtatttgtggttaatgcacaaggaagcactaatg

SEQ ID NO: 94985 - DNA, 269 bp, Glycine max
ttgggggggggggggggggaatagactaaatgaaataggggaggagaggatgggacgagaataacggcgtgtcagggtcacaaggcaaaagagaatagtgagggtaaaatagacgaagataaaggggcgtctttgtaagacaaatgtggcctgtaacggccaagatgaacgagcaaacggtgaggcggtgctggccaaccctggcgagggtggcagatgaattcaaaccttggccagccaatttgtaacgcacagaagacaaagcagta

SEQ ID NO: 94986 - DNA, 470 bp, Glycine max
cggcgtctgagcgagcatcagccacagagggcaggcaacggaggtattaaaagggctagaaccccaaaatgaacctgaccgggccctgaagcccccttgtaactgttaaaagccagcagcagcagaacctatgttactgggcttcgcaaaccaacaaagggcggaactaactatggcagccctcggctgtggggctactggtgtagcgggtagagcgttacgtatggaaaacgataccaatactgggcacaaaaggtggccaattgcaacttttaaggcaagtggttggacatatggttattaagcttatattacactacttatggcataaaatttgcgtttacggtgtatgagtggtagtgcgcgtttcatctatgcagctactgcaaataggggtgttaatgtttgtgttgctgactgtgacgaacggttaactatagtagagcaaagggactacgacggtggtgaaa

SEQ ID NO: 94987 - DNA, 399 bp, Glycine max
aaacggccgcgcctgcgaaagactaaaaagtaacaagttaaactaatggttattaggattaggaacccgggtagcacttggtgaagcaaaacgcgacagcacaagccgcagccgactaacacacggagggtgtgcccgagcccgcatttaatgtgtattatggaggggtttagtgtaaagcgactgcaaaaactgcggctgcaactatggtacgtatataccgggtcgcctgagctgtttatgctaccgtggttataccttaccaggctaaggctgcaagattgcgtgtcgcattggttggattaaggagtaacgcagcagcgggatagtatggcgccagctatataacttaggcagcgggtacgcctcagctggctgtcttttccgctaaatagtagg

SEQ ID NO: 94988 - DNA, 461 bp, Glycine max
ttggggggggggggggggggggggggagtgaaaaacgtgcaacgcgagtaaaaggaaagacatagaaacactacgacgcataaagcgacttaggaataaaatgaacaagataattagtgctataagggctactgtagatggtaagtttagaagtacatggtaatacgcccttcactgaaaaaaggcggtccgtggtgagactgcctcacacccgctgctgaagaatgtgaagcccatggaataagagtaggcataaggggggggacaaaagcaaagagcgacttgcaacaatgcaagaattaaatataataaatgataaatccgtggtcagcatctatggtgagtggttagaaccagcagagtcattacggttgctattattcgagtttttgtgacgtttagaaaaccacttgttactactccttttagagttctttttgaactgcctagtagactgctgc

SEQ ID NO: 94989 - DNA, 399 bp, Glycine max
tgtttgtgtgtgtaaaagtcggtgtggtcaggggacccggggcggggctgctgcttgttcggttttttggtgtagaaataatctcggggtgtggtgctggtcgagtgaggtgggctggggccggggccggcaggtaaccttggtatactaggtcggctcctaggggaagtcagggagttaactaccatgcaagcaatgaagccacgtgaaaccgcccaaaaacaacgtgacgacgacgacgacgaaagtaggcggtgatcaactgttttgtccagatactaggcaacatcggacattaaatccgccaagtaacaaaggtacagtgctgctggatgttaatgctctgtctaaattggttgcagagttagttacaggcagacggtaggctagctaattaga

SEQ ID NO: 94990 - DNA, 401 bp, Glycine max
aacgctggcggggcgggcggctgatacggggccgactagagcaagcttagcctgtacatgattacaacggtttgtgttaaagcaaaatgcccgggccgccctaagatactaagcaccgcctagcgcttacggccacctggcctcgccaactaaataatcgacgtaacgcctaaatgcggttgctactggctccacacgatagactgcatgatcggtgaccacattaagagacagtacaggttaaaatacggaattaataactggagggtgagctgaaagtttgtaaatgtattaataaacagcgtgggcgtggccatcggcatcatatgatgtgtgtgaagtgttacgaggggctgaattagccagggccgcgccaattatataagatcatcctcgggaac

SEQ ID NO: 94991 - DNA, 474 bp, Glycine max
ttgggggggggggggggacgagtagtgaagaatagtaagaggaaggcgagcttatgagaaagatggggaactaaataaggtgcagggcgagatattagataagcgtatatgtatttgggaacatttcgaagtgtgtgggggaggggggtggggagtatggtatatgatgtagtagataaataggggtatgggggcgacgaggtgggggggggtgtggccgagtgacagcagtataacaaagagtgattaaataggggttggcgataaaataagttatcacctatgttggtaaatggcggttagctaataaatgatgcaccaatatttatatggttacacattaaacagaaaaagacccaaggaaggtggaaagaattaaacggtcaaggaagcaaaggcaatattgatttccttattagtagggggggatagggtatgtgcggtgggctgtgaaaaaaacttagggcaagaaac

SEQ ID NO: 94992 - DNA, 334 bp, Glycine max
ttggggggggggggggggaatgcaaagaaaaagtacacaaggtagtggccgaggaggaaaaagagacagattcgacgaaggatagttagggggaaagggtaaagggtgtttataagagtctcggaggcaccccacacgtacacttagcaatgggccatgtacagtgatgtaaaacagctttcagctacatcaaagctgatgtgaacaagattaatatggcttggtcacaaaagaagcgaaactggttagaggcaaagaagcgagtgcgtacggataatacagtggtacaaccccaattaaagtggcggtagttactatttgatgcttagcatgc

SEQ ID NO: 94993 - DNA, 432 bp, Glycine max
gtgtggttgtacggcgcgcgagctataacatatgataatttggcgcttgctaagtagaatggggccgcaggtgctgcgccagcgacccaataagcatgagtggtttatttggggtaacctgcaggatttgttggagcccacccatgggcggaattattaattgatgcccaccggggctaagcctaaaggactgatgcagggtatgctgcatataggcccgggtaacattgagctgttactagagtggactttatagctagtacccaaaaattgttggaggccactaaatgggctggtactgctagtgccggagcagcaaaagctgctgatgggcaagtatctcaggttcggcgtttaatacggcacggagggtaaccaagattaacctaactgccttaaccgactgcctacgaaaaaactacttgtaagtag

SEQ ID NO: 94994 - DNA, 453 bp, Glycine max
caccacacccggtttgggttacgcatacctaagactgctaactaatgtaagtgtacactggaactaagcctcctcaacaactagcatcttccacatattaaaaacacaaactcatgtaagatgcaaatgtatcaactgtttaacctggtcaactgtcggcttgtaaacaactataaattacatgttcggctgaaacataataacaataacaacatcctgttgtggattccttcacaatcgtcgtggtaggttaaccaatgactacagctgacaaaaaacaacacaaactcatagggtatgtggcactaacactggctatcgtgagcccaaaacagcacatcgtagcacaggctgaaacaccatacactgaactgacgcatgcaactgggctaaaacagcaaccccaacaggttacacaggctccctgtgtatagtgtagtgtccaggtggtac

SEQ ID NO: 94995 - DNA, 227 bp, Glycine max
tgggggggggggggggcgaatactgaatcattaacgtagatgtaataacgatgaaagcaattaagtggggggaataattaaaatgcgcgtaaggcaagaagacgtattcaaaagggtggtacataaaaaagattaaaacaggccgtcctggaaagactgagtacggggaatggagcctgacacaagatataatgaattaataatcgcgataatattaagcccagcat

SEQ ID NO: 94996 - DNA, 268 bp, Glycine max
gcggagggagggaggcggaaaggatttgcggatacaggtgatactggcacacaacaggataacattaagggtaccgtacagttatcggacaaaacctatggccaggtacagtggtattgtgtcggaaggtaaagcacagcagcagatttaacttacttatacaaggaaggacccaaaggctacgcggacacggccaacggcgcgagggccactaatagtggtgtgttggcgattcgaaactggggcagtaataaggagtggtgcgagt

SEQ ID NO: 94997 - DNA, 402 bp, Glycine max
taaggcttgtggtgtggtgtttacaagtccgtatgaagttcagagtagcaactgtcagatcatgacgtgtcaagtcgggtttatatgcaggctattgtaaaatcatcgtcttccacaatgtgttcttctgttcggtgggcattggttcaaggttaagcatggtcagcccggtggcaaacatctgaggtacagccgcaactttctcaacccgatgataatgtggctggggagagggaaacacccgcggagccgactgctgcaggtgtcactgactagcccaccagagagagtcgtctacgtgcgcaacaaaaggagtcaaagtaagttcgagagctggcccataagcctgccgccgctgctgcaggcttacggggcctataccaagtgtcccaggaacgcgtc

SEQ ID NO: 94998 - DNA, 434 bp, Glycine max
tggggggggggggggggggggggggggggggggggggggggggggggggggggggggggggcttaaggctgaaactaaaactgaaaacgggagggaagaagtgtggggagaatagaaggaggaaagtagtaaggaagaagctagaatagaaataggccttgtaataaggctaggtttacttggcacagtaaattaagcccgttgacttgtactagatttgggactaaattgcaaaaccttatgtttggtaagtatacctagggtttgtattggccccaaaatttaaggttgttttaagggccccagcccctgcttaggcgatggtttggtaagcaaactaaaaggtaggcttaacaacattaagtgtatgtgcccacctaaaaatcgaaaaattggcccaggggtttataactggccaatggaaggtgcccttt

SEQ ID NO: 94999 - DNA, 489 bp, Glycine max
cctaatggtacataagcggcgaacactgccttgtatgtttaactatacacagcgatacatgtgggcggttagctgtatagataaatacccggtgttacacagttgctcgccacggttgagaaagtaagagcgaaataaagatagtttattagggcaccaagggcacaggcaggcggcgaggtggttgtaaccccaaaaccgacgcggtttactacggttaccgttggttagtgggggccgtatacggccccaaccaagcagcatgatacaagtattaaaacccgagttaagtatgcaaccctagcggtgggggcgactccttaatatgcacagaatgcgggtgacgctattgtacggctagtgcggtaacatgccccggaatacgacaggtgggtaacaggttgaaccgaaggaagaatagctgggggcacacttaagtagctacggagcgcggatacgatagcgaggactactaagacgcgatagctc

SEQ ID NO: 95000 - DNA, 396 bp, Glycine max
cacacaactcgtggcaagaaatctgtggtgtgcaaaaattgcagggtggtgtggtggtgtggtgtgggtcgggtcagtggtcagtgtgcaaaagcacacacgctagggtaagttatagtccgtaccttccgaggtaccgtccaaatcttgctgcccactgtgatgcttgtcaatatcctaggtacttgcagccctacagcttaacgcagaacatgcggccgccaccgcagcagctgggtaatattggtggtacgcaaatgcccctgccaaactatcgcttgtcgctcagggggcgacagtgtcacttgatgcgcaggcagcaacggaccatgcccatagattcttaatgagggtagttgcactactgtaggactccaaaccaacagctgctaaata

SEQ ID NO: 95001 - DNA, 392 bp, Glycine max
cacatgcacgcgtctagattcagtcaggttaaattcttggttgatcttttcatttttagactagactcctttatgatgacaatttaaattgtacagattaatcgatgaaatgttgctgggtttttggtatcacttccatttcctaacttccctttagattttttatacggaatttttgaatttcctttctttttctatatcagggctaaaatcaccttttgagaccccggctcccccacaaatggtacttctgtattattaatctggacccaaatattttccttacttcactttctttgtactgattattttcttcttcgatgtggatctcttgtaattttcttaatttaacatttttttttgaatccatattcaagtgcttttatgattta

SEQ ID NO: 95002 - DNA, 493 bp, Glycine max
ttgggggggggggggggcccgcaaaggcgcaagatgaaggttgcggacaagtatatataatcatgtgcatatgattaccggattcgatactagtaaaatatacaacaaaagaaacaagcgcacccgacgaaaatttgggtgtataccaacgttagtaagaagtgttaattatgcttggttatacttactaaatagttagggctggagtggtttgggaatttttttatccccaacgtatatacaagagaaaaaatctgtagcagaaatagtaaaacaaatcaaaacaaaagagaacaaggtaaaaattaacacacatatcttaaattagctagcacttgtaagctagtataaaattagggtaaataggataggctacaaactaaaccgaggtaggctggagcgggtctaagtagcgttacagcaaaaagaagatacacaaaggaaggcagtgagactgcggccttaggtgaaggtctgcgagtaacaagtatac

SEQ ID NO: 95003 - DNA, 145 bp, Glycine max
tgggggggggggggggcggggggggggggggggggagatttggatgaggtggggtatgcgtgccgctgatagaagtcggggtaagagtgggggtgtccaggcacagacagcaggtaacagggtcggcagtaccccaggtgctggg

SEQ ID NO: 95004 - DNA, 364 bp, Glycine max
ttgggggggggggggggggggggggactgacgaaaggcaatgtagagaggcaggataggatggttagctgaaagagaaagaggttagaaaccaattatatcgagagcgagcacgatgagccggcctatggcatataataaaattgaactaaacagtcatccaaagcatagaagataggataaacagagatgatgaggggggggctggaggggtaagacctcagaagaaaggaaatgtgaaaagccggcgaacagaaatcatatcaatagaaattataaggagggttgcatataaccgtcggcatgacccgaagttaaacaaatcacaacaaaggttagagctagctagcggtagagtaaccccg

SEQ ID NO: 95005 - DNA, 432 bp, Glycine max
tgctgagggtgggccctggcagtgagcgcccggtggctaagcaacaaaggctgtaactaaggagagagatatgaagccattccactcacgtacacggcccacacttttggatatcatggggattgtgtccgtgcccgtggtgagagtggccaaactaccatacgcggcacctaatgcttcaacgggtaaacatgggtaagcaaaaaaggacaaacgatgcgcatagcatatgtggagtagcgcttgagctgccaatgccaaagcggtgtaaccggtaaaagtgcggcccgtaggcggtataatagtggcagaaaccgcaaatgtattaaccgttgctgcgctggccaaggctgagccgactgagcctgcaacaaggcccatggcacagcctaaggtcagtaggacaatagcggtgataagagccacactaca

SEQ ID NO: 95006 - DNA, 426 bp, Glycine max
  unsure (1)..(426): unsure at all n locations
ggtgggttgaaagtttatgatgatgtatatgtatgctacagtgtaagttagcctgattaggcggactagtaacctttcttacagtgggcatacgtcgcctaagttaattcgtcaccgccagggcatagctgttcagccgatggggctgacactgctgcggttaacgccgctagttatgcccagggagcacctttggcaaggcacacagccaccagtgcatgattggccaaacccgcgagtaaacctgcggcataagcgcaatattaggaggcttttgctgggccggcctaagcatttaatgtactacatgctgaggcataatggaagccggtaataatggcagccaatgcggaatcaagccncggccgctaactaaaactggccactaaagcttagaggcctacgcgtgtggctacgtgctaaact

SEQ ID NO: 95007 - DNA, 415 bp, Glycine max
ggggttagggatatgtatgtatctatcactggtaaaattaaaattaaatgtgcggtgaattgttaaatggggagcttaggtagcatgtagaatagtagacaaaaacaacaatgatgtatcaattctcattattattcataagaaaaccataataatcgtacgcgggaaaactagcaaaagctgcttattgtttattcttccaccgcttgtttatactcctcttccgcattctattcgccgccgccctagcaacagccatgtgtatactattcacggctgtatggccctgtgcggtaaacgcctgtactttccgcagcggcgctggctgtggtagcggtggcccaagcagcaaaggcgcaagtcacaacccaaagttgtcggcggggtatggcgtaaactagggcatgtgaggtgg

SEQ ID NO: 95008 - DNA, 392 bp, Glycine max
ggccgctacgccggccgactactaggctgtaggcttggcggcccgccgctataactgcggctaagagcgaatagacatgtaacgtaaggaaatggcgcgtcgctgctacggatgccgtaaaatttgttattattccagcacaaagcggcgctacggcggtcttaacttaagggctcggcttgtgctacggataacgtgatttgattggtagggccaagaaattttaaaaagctgggccttggcttgccgaaagcgccgtgctaagccttgttgaaggcggcaccgaagtagggcgactggtaagatatgggcaatagaggaaggatgggtaccccgcgggagcaacaacggaggaaagccgttgccatgattatggggtgggcagagtcagg

SEQ ID NO: 95009 - DNA, 278 bp, Glycine max
ttggggggggggggggggggggggggggggggggggggggggggggggggggggggggggggggaaccaccaggcgtaggttatggcccagtacttttatagcgctagggggcagggatagggttaatagccgagtaaattattccttattaggggttaaagcatgccgaccacgacgaaaaagctgacgagctgattcatggggatttggggaatatgaaaaccggaagagatatggcaactagaccgagaccttgaaaaggccaaaaaaaggaaat

SEQ ID NO: 95010 - DNA, 393 bp, Glycine max
ttggggggggggggggggggctgtagccaaggcttcgccgcctgggagggtacagcggagggagagaagagagacagagagagagagatataaactgctagcacgacaacagtagctacacagtgaaggaggcaacgcctcttctcgcacgtgtactgagttgaacatgaagcccttaagaaagaaagaaagagaaaataggaaggcctggagggataagagggtggactagacaaagccaaaaggacaaaaaagagagaccgccacaaacggcgtagaggcacaaagacgcaaaagcaaacaaccagtaatcctgccaccccgcaatctttatacgtggtaaccgcgcactccggtcaccacgccgcaaaccaggacccgcccaacccgtcg

SEQ ID NO: 95011 - DNA, 440 bp, Glycine max
gtggggggtagggctactagtaaaagcacgccgactaatcagccgactcctactgccactgtgaccgggggcaaccgcctgacgctactgcttctgatacttcttcggcttcctccgggagagcttaggtgggtagttgtaattgtgctgactgtgcacagccaacgcttcgggcctactctatcctcgcacactaaacaatcgcatcagccgcctgttcccgtgtagttgtctcacccgcttattatccgtacgtcggccaacaaattgcacaggccggcccgcaactgcaatcgccagccggtatctcatttagataaaacggttgttctgccggcgccgccgcggtgcacccatctagtactaaacgcctgttcgcctgggctgaaaaaatgcaatttgatggagctacgctattacatacacggacaacttaggtg

SEQ ID NO: 95012 - DNA, 402 bp, Glycine max
gtgtaaatcggcgctggctgctgctgctagacggcagtcaaactagcataatagtaggcgttactagttggggtaacccaaggctactgtcggtgggtattcttttgtgaatgaccgttgcggagtagccaagcacagatgggctgatgcgagtaaagcagttgcatatatagcagcatggtaacttactgaagaaatggcacaaggttaatagggtgggcctgcagcggaggcactaccagcgtaaccagaagttgcggagcagggatagcaaaccgcgcttgcaggggttatacgcgccagggacggtgtggctacggacacgcggataataagagcagcggttgggaacgctgacaaataggggccaccagttgcaatgcaaaaagctgcgaaaactgg

SEQ ID NO: 95013 - DNA, 412 bp, Glycine max
ttggggggggggggggggctatatgagggagaaggtagtaaaggggtagaaaaacgaaaaggcggtggtaagaggaacgtgttgaacgttgaaggaagaagaataggagacgaagaacgaagcgtgaatagtagtcaacaatttcattaataatgtagtaattatcatgctattattttgtacaataattaccaaaaggataaggagaattttgttcgtaatcatgataagggtaatattcaatgtattcggttccgctcaagatgtgtatgtgatgttatttggggtaggggtctacggaaggaggacggaagggaattaaacggctgagggggagacctccaccaccaacggctccatggccaagccggcgtgtcgggtcgtcaacaggtgaagggtgtccaagaggtgt

SEQ ID NO: 95014 - DNA, 338 bp, Glycine max
ttgggggggggggggggtagtgttctgccgcacagatacatgggcttatagcgagtattgctcacatgtcactagcgctttgaggtggtgtactggttactaatttaacgtcgggtcgggtactactacggtcgggggccgcaaggctactatcgatatatgtgggagagggcggggtgtcacttagttggtgtagtaagcgtgcacatcattgggtgtgagcacaactttggtgggcttgcacacttggcacaagaactagttgaggacttgtgcttgctgcaatatctcaggtaatggggcggttaacttgtagctcggtaggtgtagactctagg

SEQ ID NO: 95015 - DNA, 483 bp, Glycine max
ccaaatacacgggcaccatggctgcttacgcagcctacaaaactgccagcgccacgttgggcgtgtgcaatgagcgccaccgggtaactggtgagtccatttccaaatgccgggcagtatcactcacacgtgaaccataaaggtactgtggtgccctagccaacccagcactaaccaccagctacacctgagccggacataaccgcagtggcagccacagccaaactggaagcaaatgcaaggggctagttgtagccgcacctggactttgccaagcagccaacagctgcacgtagcctgccacaacctaaggcagcaacactggactaacgttgtagtggacacagaaggccgttttggggcgaattaaggcgaacggagcagagagcgagggaagaaagtggcgtacggtgaacggctgagaaggcagcaaatgtagtgggcgttgaagcccgtggcctggcggaagtaaagtaagggtgg

SEQ ID NO: 95016 - DNA, 378 bp, Glycine max
gtaaatgttgttagaggttatctttaaagtggggaaagaaaggggtgttaaagattaggtatataataatagtcagggcgaagattagcaacgggggggtactaagacacgggtgaacggtagggtggcgctgcagcggtggtgatttgggggcttatgtatgtcataatattagaattagaaattattttaggacacatcctcatcggggccgtgttaatccgggaccaaatgggctctgtccgggtggtactttctcaaatgttataaattcggatcggcccagggccgataataaaagtgtccaataaatccggcgcgcccggcttaatacacatatgttgtggaatcatatggttccgcggtgtaaaagaacta

SEQ ID NO: 95017 - DNA, 472 bp, Glycine max
tggggggggggggggggggcactgaaaaggagtatactagtataggaggctaactgttggagacgaaataagcgggggcacaaaggtggtgtacatgaaaggagaaataaaatctagggaggggaaagtaggcctagggtgcaaaggttaaaaaaagaaagaaaattgattgaagtagtgcgaggagcagaagcgggttgtactactaggagggggaggaggagagtgatacagccatgcagacttacagtagttgacgaggataaaaagttactacgcatataggataaaagtaatggttggcgtttgccggcactagcaacaatgcgaataaataacgtttgacaccaagtggacggttttaatgtgagacgggtcttgcgcaagataacaaccggttaaccagactaagcctcctattaacactaggcagcccggcaatgccgcgcgccaacagaagaagccaacatat

SEQ ID NO: 95018 - DNA, 250 bp, Glycine max
ttggggggggggggggggggggggacggggaacagataatgggggtagtggggaggtgccctattacaatagaggatatgtaagtaaaggcacaggaaccaggcaaatgactattaacgaaggaaacgaaaatcataaaccagagtgacttggataaaggataacctagacgggttggcataagtaacccaaccaccaccctatatataaataattgtgtagttgaaatttagtgagaaaaataggtata

SEQ ID NO: 95019 - DNA, 461 bp, Glycine max
cctgccgctaccgccgccaagaggctgtaaagtagaatggagttgtggtaaatccgaaatatctcttactaaatgcacacaatatgtaacaccaataactaaacgggctttgttaatgtaattatgctgttgcctatgtggtggtacagtgggtaccgtaggccaatgcacccggccccgccatgtgagacgccttgtaacttggtgtggtggccaatgctgctggtgtaccaagggatgatgagggtgagtaacgggggaacaataacctacggcttaggctactgctatccagccgcaaaccctcgccacagccgatgcggcccagcgggccggcctggcggcgcctgcttaggctgcccgttggcaagcgcggcggtataaatttaagagcccggggccgcatgtccagctacatgtagatgtaactataaaccaaaagtagccatcaaaacaaacaa

SEQ ID NO: 95020 - DNA, 459 bp, Glycine max
  unsure (1)..(459): unsure at all n locations
tgtgtgtgtgtagccacgtagcaaggtaccgtggcagtggtgtgttatgccccggtttgttcgggtggcacttttggggggtggggttcccttgggcttaaggtgtaagccaccggttacaaagccaacctaacatgcaaacgtagagcatagtactactacttgggcgccaacccccccggtaacaactggcgcagcagctggctactagagcttggcaccagggggctaaaacgcagttgcttatgcgtatgaaggctaactagcacggttattgctacgctaggtggcaagcctatcggggaagaggggggtagcgcgcgtgggtataaaataaacagagggacgcggagggggattgtgagcggcgtagacccgaagagagggggccggtaaggccggttgcgagaggaaaagccgggtgtagcaaaacggacaatgncaacgtgaagaaagcta

SEQ ID NO: 95021 - DNA, 345 bp, Glycine max
ttgggggggggggggggggggggggggggctcgtaaactttaatggggagggccggtggaatggaggaggtatttgataagagcgaattatcggagggtcgcaggacaggccgataaatggagggctatgcggtactaagaggtgatagacgcgaataaacataggaggtatagagctggattataaatatcttaattgtagagtgtaagtagagctacaaagggctagaactggctgaaacggcacaacattaacaagggcaagtaatttaaggagagctcagaccctgtaaaaagctagtaccaagattaaaccaatgcattaacctaacgctcgcgccgtca

SEQ ID NO: 95022 - DNA, 368 bp, Glycine max
agcctgagctggtggtgtaggttatgcggttgagtagttaggggatgaggtttaagagtaactctaataatcggtgtattttaatttccaagtgctgatccttactgtccacataattggttattcatctcacaagtgcgtgtttgtagaattgttcgttagctcaactctcgcaactgtgatcatctcaatttagttagttgttatctctggtaacatatctcttgctaacgggttagtagccgttttaatcattgtagtggcaatagtgttatcaattaaatttgcgttcattacgcccgtgttcataatcgtcgatttgattatttttctatttgtagttctgattgttgtcgtcctaatcaacg

SEQ ID NO: 95023 - DNA, 415 bp, Glycine max
acccaccacgttaacgcgcgcccacataaacacacatagcctgaacgccgcgagcggccgcggccggtggctgtgcctgcgcctgataacgcttacacagcggtttaagtttaaccagctgccgtgtaagcattacaacaatggtagtactgagccgccacggccgcctgaggtgccaaggccaactaagccatgattggggccaccgcgtccaagaccgccgccgaggcctccgccgccatggccgcctccttgtcctcctattattcccagaccgcccggcccaccaggtccaccgtttaggccgcctccgccgcggccgccgccgactagattgtagctgattttggcagagcaatagctagctagagccaagggtggtgtcgggtgggccaggatttgacgtaatcattgg

SEQ ID NO: 95024 - DNA, 498 bp, Glycine max
ttgggggggggggggggccaagcaatcgaatggtcgggtagatgtaatgcaaaggcctcagaaatgtacgtgcataggagcaagcggttgtgccatggaccatagtcaagcaaaattagcattaagagaaatgtagcgaagaggtacaggtatttatttaacgtcgactaaattgccgcagcacgaatgctatgaaagagaacccgaaagagataaaagctattaattaatagaccctggctaaggctagctacctgttgtgaggtaggcacaaacagctgggtagtcctaaaaagcctaagtggagagggtaacctagcaatgcaattaaagtgcacagtttagcaaaactgtaaatacagctaaccggcgcggccgcaaacaatacttttaaacgagcaatgtacgtagtaaccgaagaagaacatttcctacatggggcggtgtgcgttggccggcaagtaacgggcggcagttggccctcaaaaggacggcccg

SEQ ID NO: 95025 - DNA, 478 bp, Glycine max
ttggggggggggggggggccaaaaacggatgcaggcttacacctgtggtaggagcggataaccgagataagtgatcccgggtattaccaaaaacaaaagagacaataatatgcaggcttggggttaggattggccgaaaagcggacacatgcggataggaggaagccaaacaggtggccaatgggggcagcgacacctagttgtgaaccgtaggtggttcatgcaaaagctgcctgccggaccggggccaacccctaggggagtatggctgactaggataataatacgccatagacggccgtgagtgctgctagtggtggcaatatatagtacattaagcgcgagctatggtataatggtatgtgtgagctaacaggttggtactatgccagttaagacggttaaataggggttgctatattagaggggttaactagagaaacgaacatgggccttataggtgcagacagacaaatta

SEQ ID NO: 95026 - DNA, 270 bp, Glycine max
cctcggggaattccaattccacattttcaagaaataaggaggcaaaaatgttcatatatgaattggaattatttgttttcttattaggcctatcctgaagccaaaggaaatgagatcggaattcctcggggaattccaattccacattttcaagaaataaggaggcaaaaatgttcatatatgaattggaattatttgttttcttattaggcctatcctgaagccaaaggaaatgagatcggaattcctcgggggtaccgagctcgaatt

SEQ ID NO: 95027 - DNA, 394 bp, Glycine max
tttttcgcctttttttttttttttttaaaaaggaaaagtccgaacatatatggacagatgagctgacataatttattgtcagtttaattgacataatttacaaggttggtgtaggtgaaaaggaaatacatggaagtatcgtctacatacaagctatctgcaaactaattggggttaaataacaaaaatccttcttaatatgacatgattttctatgctaactttccttaatccaattctaaacaaatatcggatgaatgactatgtatgtatatataagacttggttgatgtcatattttaatgagtcatttccctgaggagtctttcttaaggtctcagcatgtggctttgagttagagccaattaaaatgttcccattccaattcccacaa

SEQ ID NO: 95028 - DNA, 373 bp, Glycine max
ttggggggggcgggggggggtattgtgaaagagacgcaaatagaaaggaaagaaatagacgcatcaccagagatacaggaggttaagttattagcgagaactaaaggaaggaacaatatatggaaagcaactagcgtgtgtcgactgtaaagactggccttacaaggataccagtcaccactgttgcaaacatttgacacttgggctgctggccctttgtaatatccatgccaccaacaagctactaccactactattcagcaacccgttaatttagaacagttatgccgtagtttaacttggtagcggcggcaagagcatactacctttaacctggtgactgcccggcagctatacgcttccgcagacccag

SEQ ID NO: 95029 - DNA, 280 bp, Glycine max
ctagttggagcttgggcatctttatcccatctgtcgggatttttcgtctttcaaacgtatttccaaacacaaagtaagcagcctgtgttacattgtttctcctatgtacagattcaccctctactgaaaatagtaatatttagccctatactcactgcaatatgttcctgcctcacagtcagcgtagcaacccaaataatgttctgagcacaacctagaatgtattatagccagcttctcctttttccaagagagtagagtactactgggtattttccaa

SEQ ID NO: 95030 - DNA, 392 bp, Glycine max
gcacacacaaaaaaaacatcttattttatagaaaggaataacttaaaagtacaattttttatttgccgaataacttaataccatccagaaaatctagttcaaagaagttacataaggacatctttcagctacagaaacagattacatcaaataagtttgtctaaactacctcactctctttgaatttcatcacattactcgtccttttactgcttggacgtaatatctttaagcttttccttcaaatcacccgtctgatgcatattaagaacaatatctgatccaccgataaactctcccttaatgaaaacttgtggaaatgttggccagttactgcagagaaagaacacacgagagaacagtgggacatcacaaaaagtatatttgacttt

SEQ ID NO: 95031 - DNA, 481 bp, Glycine max
tgggggggggggggggccgggggggggggggggggagatttggatgaggtggggtatgcgtgcagttgatagaagtcggggtaagagtgggggtggccgggcacagacagcaggtaacagggtcggcagtacccgaggtgctggggctttcagggtcacgtgtgaatgttaaggtaacacaggtaggggggggtgggtgacgaagcggtgggggaggggtatgaataggggcagggataggacaacaaaaaaaaacgaagggcaggccgagaattgctcacggattttgagagctcgtagaaaagagtataaaggggcaaaacaattaaaaggtgccaggtcagagccaatcagggacgagggtgtgaggcaggtttagttaagtaaaagatgggtgagatagagggggggttagagtgacaagtctagtggttcagagagaaggtggcagaaacacaggagtgagcagagttaagaaggt

SEQ ID NO: 95032 - DNA, 430 bp, Glycine max
ttgggggggggggggggggggggggggggggggggggggggggggaataacaaaaatataaaagtaatgcgggactgagtgtgccgggtggccggttaaaatgcgaaggggcaaaagaagaggacaacggtagggatacaaaagaaggggtttaatatctggatgagcacatggggaaaaatggaagaatgcaagcgagaaaatgaagctagccttgatcgatcatggggagggggactttgaggcggatagggcaaagtgtcgagtaataacaaatagcttaagggaaagttttatataaaagggaagggctacataatccagtgagaaggcctccgtaaatatttgcagtagggattttcaaaataaaggatggaaattcactgtactagcacaaggaaggcaacgaagtgtattgatgagggtaggg

SEQ ID NO: 95033 - DNA, 431 bp, Glycine max
ttgggggggggggggggggggggggggggggggactggccaaaaagtaaaggaaatactgcaatataagaacaatcgaaatctagatagcggataagacattccgaatatgtttgcgcggctaaaaggctgctaggggcaaaagagctaaaacgccagtagggtagtaacgaagcgtaggcgggtggagcccgcgtaaaaggatgataccactgggtgtagtaaagggacctgcgcttggggaatgtacaaagcaactggtcaggtgcttggtagcgtagaatggcctgatgcagagtccccactaaattgcgttagggcacagagacgggttggtgttaggtatcataaggaggccgggctggccgtaggacctgggcccgggggcacaaggttaggcgtaaggaaacctgcgactgtggggggaataac

SEQ ID NO: 95034 - DNA, 416 bp, Glycine max
ttgggggggggggggggggggggggggggggggggggggggggtaatattcgaaacatggggagtgggtcaagtaagtccgagagtagccggagatagcattacacggtgtcgctaacaagagctgtataagtaagacaaaggaaaaatgcgtcactgaaaccaggtgtgcagtagtgggtgagttaaatcaacaaagcaggggaaaaagaagggtggtgataggggcatataagggtaaagataggggaatgaatgatgcggtaaatatggccaataaaacaaaaaactagtatgattccccggtgaatgtggtttgcgaagtgccaggtgttggtaaaaggatcaaattggtaacaaggccgcagaccccaagcgagggggttcggcttactgtactttgcgttttactactta

SEQ ID NO: 95035 - DNA, 206 bp, Glycine max
gcggccgccctttttttttttttttttttttttttttttttttttttttttttttttaagagcaacaacgttttacggaaacatgaaatccaatttaccagatgggcaaaaataaaaataaaaagccagccaattttagaacaaaccgattggggccgcataacatgtacccaaaggtcccaaactccacttttactaccattaaa

SEQ ID NO: 95036 - DNA, 452 bp, Glycine max
tgggggggggggggggggggggtacacagagcaaaaaatcgggttaaagttagggaaaatgtgaaaacgggattaactaagggtcaagaaagcggtataatggtatagaaactgttaaaacgattccaataacctaacggttatcaaaacaatgattagatatacactatcaccaaaaaaaaaataatatacataaacgaatagaatacgctaaatggtgaagtaagaagtggtgttggtagtattagtggtggtacggcttgtgctattcatggttgtagaagtgggtgttaccctactaacagtggtatcacttgtacacaatgtgtttgtggttagatttgtattaatagattaagcaataaaactttgtggcctagatagcaccgtaaagggcgccgtcagctcacacaacattgtaataatatgccgccaaggccacagtagctata

SEQ ID NO: 95037 - DNA, 378 bp, Glycine max
ttggggggggggggggggggggtattgaaagggcaaggcctggtgaggaggaggaggagtgagtgagtgagagcggataaagacatagtttaaattagctcgatgcctgggcaaatcaaaatacgctagaagatgccgaagggcggagaacaaacgcagggacaaatccagctaaccaaaatacatagggttgagcaactctgtttgaagttagcagtgggtagggctactgggtgttacgagtagagtgcatcaagtttaggaaggtgccgttgggaacgtggcccggaggtggcaaatgggtggcccacaatggccaaaaacacttcgagcgtcccaaacgattatagacagtaggcgggcagaccgtgaacagtg

SEQ ID NO: 95038 - DNA, 409 bp, Glycine max
tggggggggggggggggggggggggggggggggggggggggggggtacacgttaaaaattacataggggaggagttagaggataccgggacatagagatacccaaaacactgagcagagagtggtaaagtttgtgctaatagcaaatatggggtttcgatatagtgctgagtaaatggcgccataggatagatgcaggaaaagaaatgctattcggaggtcacacagagtaaagctgcgtggaaaaggaagtggtacccggaagcaaattttgcaatctaagaggcaatatgaacccctggcgaagcattagcacgttctcattggtaggcatgccggaatgatatgcgaaaaagcaaataggagtgtctaaaaggaagaggaggaaaatgctaaaacgaaggaccccg

SEQ ID NO: 95039 - DNA, 451 bp, Glycine max
ttggggggggggggggggggaaaactattcgcagacgtaccaatagagatggtgtgatgcgatacaaagaatgtaatagagggagggcgggaagaagatggggacaactactggaaaaactacggcctaataaaataggatggcacgagttggttaaggtgcttggtgagataaaccgcgcattgggggggttacaataaaaccataacaacacctgtggcactaccgaaccacgccgaattaacgcgtagccttatactaatagggtatggagtactaggcaggtgaaagagttgcattggcgctagcgcccccaatgggctaataattactataagtatgctaatacgcggcaagaacaataggccaggtgcagacgtgcggcgcgcgcacctgagtaacgatactattaaaccaataatgcgcacaaatggttgcggatcacgaactg

SEQ ID NO: 95040 - DNA, 452 bp, Glycine max
gcaccgtgttcaagcgattagggtttcctcccatcgaacttgataaccctcacgtgcccctccctcgccgccacgtggatcgccgtcctcccctcggagtacaccgcatccacttccaactcctcgccgtcgttgccgtagcgctccaactgaaacttcatcgtgtcgattcggtccattgccgcggcctcgtgaagaaccgattcgtcgattttgcagccggaggcttccagaagcttcaccgcttggaggctcccaaccctaattgcgagcggcatgagggattccgccgtcgcgcagcaaatccgcgacgacgtcggcgctgccgcattccatggcgacgtgggggccgacgagggagacgtgggggccgggtttggagaatagttggcggaggtgttcgacggtggcctttcgggtggggagcatggtggctcggtcggttatggcgt

SEQ ID NO: 95041 - DNA, 421 bp, Glycine max
ttgggggggggggggggaaaagaaagaaatgggcaggagggcgtatggaacgggggccaatgggatgagtggagccgaatggtacctaccaggtacgcgcactagagcctgaggaaagagaacgagaaaagggagggacactaacagacgctaaaagagacagctgcctaatcgtaccggggggtaggggttggtgtgacaatagtgggttaagattagttgcttgaccaatacaggtaggcatagttaggtcggcttaaggtttaataaaacaacttaatgcagtcattggcgtagataagttgaccaccttatttcgagcgagcaacaccagtgggtgttgggtttatggtgggccaggggtacatagagtgggtactaggctagaactacttggattatgcgagatgcccgtaacaat

SEQ ID NO: 95042 - DNA, 463 bp, Glycine max
ttggggggggggggggggcgagaagttgagtcacaacaagagcgaggaatagccaagaaaaggcaagatacctggttgcaaatctactaacgctgctaggctaaaattaacggcagaggattgggtaaatgggtaggtcaatcaatcaatgttaagaaaaacaacataacaaaaagtaaggaaaaaaaagcccgcaaagtacatgtccagctataggctgccttacctgtttagaaaacggagcttattcatcgagcgactacgaagctcgtactgggtgggtttcgggcactaagttaaaggtggcggctgcaacctttctactacgtaacgagttataccctactaaaggttgtacaaagatgaaaagtagtgtacggggcggtccaagcgcggcacatggctatattgagtatgggccgcgtagctgggtgtggctggtgatgctcttcccagtgcccgc

SEQ ID NO: 95043 - DNA, 437 bp, Glycine max
ttgggggggggggggggccaacgaataagagctagatgtggaggaatcacagggatacgggggcgggagataaaaagagatggacactacgcgacggagataatggcaacgaaaagccccggaattgtattttgggaggaggtggcagggggatagtagccggtgaaatgccagaagagctcaaagcgtagagataagaggggcttaaattggaggaggcgggccaggtagcagatgagactagtagataagactagatacctgggttatagagatgagttaaaacttggccttggtaatcactggtaagtagacggagatggatagtagggatgcaagaaaggttggtatgccggcaaccagggcaatgtgtagaaggacggggtggaaaaataaagctgccggcggggccagtaccaacacggcacgtaggattt

SEQ ID NO: 95044 - DNA, 370 bp, Glycine max
ttgggggggggggggggggggcagcaaagaactaatcgggtgtgaggaggagaaaagccgggataaatcacgggagtgcaaagggtgtaacagtgaaaagatagacactatacggggggggggttaaatgaaacaaaaatactaaatggggccagtatgtgtatcagcgcgacggcgatggcgatataagaagaagggtgaataatagaaagaagcatcacgtgggagcgcataacacagagcttggcgacaaggaagctagtactgacaatggccggactactggcgcaaccagccatatgcgtttaaaatatagatgcgcgcctaggacaataacggttgccgcaggggccaggatataataaccagc

SEQ ID NO: 95045 - DNA, 430 bp, Glycine max
ttgggggggggggggggcacttatgaaacagagggatacgcggcgtatatgctaagaggcgagggtctgcgattcgggtgatgggcgataaaaaacaaggagatagacagtaaataaagctgtggggtggcttatacgaacaacgaatctgctaaacgaagtagggcattagagttggacagagcaccgagtcaaaacaaaacggcgcgccaagttaggtgagctgtggctcccaggggctaactgcatagggtggaatatgtgggtgtacccaggtcccgacgcaggtgaccagtagagttagcatattaggcccctataaattgcacgttggccgcaagcatgtaataactgggccgaacacgaggggggccgttggctcgagcttgaacggactgtcaagagaggtcgctgggctaatggtgactgt

SEQ ID NO: 95046 - DNA, 249 bp, Glycine max
aggaaaaggtttggggatcccccctaaaattgggagtaaacttcaaggtttaaagctaaaattcaaaacttttaaaggttaagaacggactggcttagctctgggaatcagaactaaaaaatttttggccggggccttataccaagactattggtctaaccattgccttattgggcccaactaaaaccccgcctccaaaactcattggtcaaactcgggggggtctcccgggtttttccccttgaaaac

SEQ ID NO: 95047 - DNA, 421 bp, Glycine max
ttgggggggggggggggggggggggggggggatcgtaaaagagggcgacggacggataggagaaaggcagcgagaaaaaaacgacctagataaggcaaaaactggggagcagagagaactaaaagagaacataagttaatgtgagaagctatggggttgtgagagagaaaagcgcgggtaaggaggtgtctagcgatatgaggctgctgaagatagcgatgccaatatagaatgctagcaggcctgtgtaaaaactagcggaggaaggattggaccaagtggcaaacaagtgatgcggaattttacgttgcaatacagctaatgcaccgctatgacaaatacggagtgtacgcggccttctgataaaaacaatagctttggtacgcaggccagatttggggccgcaggtgcgacgtagtag

SEQ ID NO: 95048 - DNA, 297 bp, Glycine max
ccccgaaaaaaacccaccctttttttttttttaaaaaaggggttccaaaagggtttatttgaaatttctcaagacctaaaaaaaatagggccccgttttttttttcaacctaaaaaaaaacccccaacttttgaatccctttcccgagggggggggggcccaaaaaaattttacccccaaaataacccccagtttttttgggacaaaaaaaatcccctggaaaaaaaaggcctcacctaaaacttggttagccccccgggaaggggggaccctggcccaaaacacatactggggggg

SEQ ID NO: 95049 - DNA, 162 bp, Glycine max
acgagtcccaataaacaactttctattcttaggtccttaattagggtaatacggacactagttagcatttgctaaagaaatagcatgcccaacagggacaaacaagtctatgacatgctccattaagggagaaaaaacaagggcataaatttcactttgaat

SEQ ID NO: 95050 - DNA, 193 bp, Glycine max
gtggagcccggcaccctttaagccaagaggaatcaaacaaaggttcggttgtaaggagcggtttttcttcctccatctttctctaaaacattaatggaactctccattccttagatttcaccaacgagctcaccaccacacagacaaagcaatggcaaagactgagttagaggtgactgttgagagcaagaac

SEQ ID NO: 95051 - DNA, 237 bp, Glycine max
ttgttttttttttttttaaatcttataataagttttttttttttatgggaaaaatatgggggggctttggtgggaaaaattctccattactttgtttaacccgttaaaaagataacaccttaacatgacataattgcttttttgaataaataggtttgtagtgtgaattctaacatttaggtgctagaattctttcgacaaatacaaatcattcctttgaatcgagcattttgttta

SEQ ID NO: 95052 - DNA, 253 bp, Glycine max
aaaaagggaatctggccaaaaatttaacttaaaaacgaatgtttttttacgggaaccaataacccccatgcttttaggggggggggttactccaattttactgattaaattggggccttttataaaatgacttgccaggggggggggttttatacccgaaaggccgcccttttcctttattttttttttcaaaggccaaaagaaaaaccctttaaatgttccaatttgggggccccccttcccctgtttttta

SEQ ID NO: 95053 - DNA, 369 bp, Glycine max
ggaatgtcatatttcttgtgtttttgtagctagttcttttcttgttaatacaatattttgctaataaaagattaaaatatattttggattcctaaaattatgataagtgatgtgaccaaaaaatatgataactggaaaaaattaggcaaagcaatatgataaataaaataaaataaaaataataaattaaaattttgaatgtaaattgatgtgtgtgtaggtgaaaagtatgctattgtacaagtcaactcatgaattgtactcaccaaaaaatctcaacgtgaattctggaccatacaaagtatatcctatggtatcagttttcttttcttttattttaaatcttaattagtacatcaatattaatgt

SEQ ID NO: 95054 - DNA, 310 bp, Glycine max
aagagaaagacagaatcgttaaacatttaatattggaggactataactcacagcatcttgaatatgatccgaatttctccacacactatatagcaagttgggtgacagacagtgtgagagacaactgtgcttcttgtacctaccagtacgactttgtcaacctaacgtatctaaggtaatatgtagcataatagatgccaaaagtactcatgcagcctttaatgccccaccttattaatttctctagctagcaatgcagactttagcatacaaaagccatcttggtcttggtcacactgtatgtacacct

SEQ ID NO: 95055 - DNA, 252 bp, Glycine max
ggaacaaacctaaaacctttttacttttgggaagttaaaatcttttgggggattgaaaacgggggctttttttatccagacataatcaacttttggcttgccctaaatataggaacattgatcccttgggcagggggggtcattcaaggggacaactttttatcccaaccgggggggccccccctttttttaggttaaaaactggtcgggcttttttgaccaggatttaccccataaccttgacggggggaa

SEQ ID NO: 95056 - DNA, 489 bp, Glycine max
ggcttacagtttggtctgtttctgggtgtcgcttgatgtcaacaatccgacaaataggtgtaaactttatgctattgaggtggggtcttcagagagaattctatcgttctcatttgggaaatgctgtcttagcagaggtgtttcaggcactacatacatccggcaagtgatttatggggaagaccgtttactcattgtgcagtcagaagagactgatgaactcaaaatgctacatcttaagcttccagtttcttatatttcccaaaactggcctgttcaacatgtggcagctagccaggatggcatgtacttagctgttgctggtcttcatggtttgatattgtatgatatacgattgaaaagatggagagtatttggagatgttactcaggagcaaaagattcagtgtaaaggtttgttatggctggggaagattgtcgttgtctgcaactatgttgattcatcaaatacgtatgaattgctctttta

SEQ ID NO: 95057 - DNA, 421 bp, Glycine max
cttaattatcgttctttctcctctgtgttgcgccattcctttgttctcagcttcttctgcttcgccggaacacttctccgaacgatcaattttccggcattctctccggcgattcttctccgattattcctcactcagatccatagctctcacaatctccgaaccactttttttcctcttccagatccgaatcccggcgcgaaaatccgggaagaacgaacgaaccgttcaccgttgatacatggattagcatcacctcgatgaaaacctcttccacaagcgtctcacgaaacgattcgttttcctcttccacaaaatcaccaccatcaccatcaccatcaccatcatcgttcagtcctagggttagggttttttgctcagtacgacagaatgttcaagaaaatcatgaaaggcgggcaca

SEQ ID NO: 95058 - DNA, 353 bp, Glycine max
gtataaattatagattatgatgtaaaagtacaattaagtacagctgattatagtattaattcactcgcatttaacatcacaaacataattgaaaagaaaaatgaaaggatttcattattgcttcatagcaactttctaggccactcaaccacgtgagacagatcagatcagtgagctaggaattcaatttcagaacatacattgaagaaaattaagggcttgacccaacaaaaaggaagaaagaaatgctttacactgaatcaacaccttggacctgctgttgagccaagtatctttctcttctttctttccattcatctataacaaggccctccccagcaacacaaggacct

SEQ ID NO: 95059 - DNA, 533 bp, Glycine max
ctctctttctctgtctctcccaacataaccattgggagagagaatcagagaaaccatcatggatccatcccatgatgaaagaggacccccaaatgaatcattaacccaccagtcctcttcccgtaggcatggggatgcaccaccaccgacggtggcaccaccgcaaatgatgtattattacccgcaagggtatgccccacaacccatgcctcaccaaggttacccaccaggttatgccccataccctaatgagtaccatcaacaaccataccattaccccgcaggtccctactttagcactccaccgacctatcacaatggtggcggaagcaaagccttcattcgtggcttcataatgtgttcatgtttaatattcacatgcctctttgttgccacccttattatggcgctagtgttgcacccccaattacccgtttatacgattaattccttgtctgtggcaaatttcaacaccactcaattgttaaccgcaaattggaacactagcatcatgatccataacatcaacaata

SEQ ID NO: 95060 - DNA, 401 bp, Glycine max
catgacgatcttattaggagaggaaatataaagggaaataaagagagtaagaaagacaatcaacaaaatcataagaaaggcttcactttctccctcacatcacaattggaaaatcataagacatcgttacatgataatattagttaggtgattacatatggtcgtgaagcttcaaaagcaaaatctcctccgactctgaatttcaacgtgtatgcaacaagaagttgctgaggaggtaactacaagcaacaccacttaagcaatttaactcacccccctacccattgactaatactatacatacaggggataaattgcccaacacattcaatctcataataatgaagaaatacatttgaaaagacaagaaaaaaaaaaatctttgatgagaagcacatggg

SEQ ID NO: 95061 - DNA, 345 bp, Glycine max
aaaataatccaattcaaacacgtataattaaaaactcaatttagaccataagagtaacaagtgtgtcactcttctgacttatacaaatgcaaggaatagaaattgacaaaagagataaaaggatgaagaccaggaaaatatcaacaacgtcataactcataactcgtgtaacgccaaaaaaaaaaaaaaagcaggattttatttttatcatcattatcattgaggcactgatagttattgattatccaaagaaggctagtgtttgctcaaagccatgctgggtttttcaggggattaacaacagccttcacttgcaagtagtttttgagactatactctcctttt

SEQ ID NO: 95062 - DNA, 246 bp, Glycine max
gcccccaacttcaaaataaacagatggttaattgccaaattttgcttgtttagaaggaaggtccataaaactaaagcagagggggaacattggggaggggaagagttttacaaatccaaactgcacccccattacaagaatggggtccatctgaattttccctacaaaattttcaattgacatccgcctcctgttcatacatgcatgagtgggggccaaacgaaacacccaaacaattttggcaat

SEQ ID NO: 95063 - DNA, 350 bp, Glycine max
aggtgacgctcatgtctataatctttcaggatatcttccaatatccatttcttttttattgattgtctttcaatcatgatgcaatgcttctttaaaaattgatgcatttattattttggcttcctctcacaacccaattctgattatcctcttgcgtgtggaatagattgatctcccctttatcctgttctttggttcccaacaagtcaaagtcttcttcagcttctttgtggcgaaaaacaacacaaaggggattcaatttcaaattcaagttctgattcctgtgttgagtgccttacacaggtctaggtttggctttggcatcttaaaagggacataaagcataccat

SEQ ID NO: 95064 - DNA, 324 bp, Glycine max
gccaccaaaactttatgatagatatgaaggtgaacaaatttcaccgtgaaaagtaaacaggatcgattacacatgatacaatcaaacattttcaaagaattttaataacaattttccagtttaagcatggaagaatcaactttgggaagacagacaccatagatcagctgagatcagaaaaaataacagagcagtttgccaattctggaggtctgcccatgataacagatatccaagaaggtaccatgtcagtatatgctcagcagtgcatcgcaaccccaagactttgatgaatcaaacagtttatacaatactcatattcac

SEQ ID NO: 95065 - DNA, 298 bp, Glycine max
atgacaaaatactcctataattttatcgggtttagatagaccactaaaaagtctataaacccaaggggaagctaaattaaacccaagaagaaaaaaaacttattaaaaaaaggccaacaacggtttacccctccaaacttgggcacttaaacaaaaatctaaaaatgaaaaagaaagaaaaaatcccaaatttttggggttttgggggcttttatactaggcggggcaacctacaggggggccacccacttacgtcacgagtcacgagccgcattgatcaaaacgacatgatcgattc

SEQ ID NO: 95066 - DNA, 393 bp, Glycine max
ttgggggggggggggggcactgaaaggcgtcgggtggatgaactaagggctgggcgcggtaacagaataaacaaatacggatttagtgggacagcagcccaagccccaaacctagaaggatgatttagcggtaaacgcatagatgacgaagaggacaatgatacaagccgacaggttaatttagctacggaacaaaatagggcccgcgccagtgtagtaagaacttgaaaggatataaataaggatagaaatgctaagcgaacggattagctattgggaaaaagagaaccgaaggactggtgctgctgctgttgtacgttgtactagtgttaacgacaaatgcacagcacggtgggtggtgcttactagacaataacgcagcaaactgggtgt

SEQ ID NO: 95067 - DNA, 216 bp, Glycine max
tggggggggggggggggggggggggggggggggggggggggggggggggggggggggggggggggggggccccaaaaaagtgcctgggatgggggttagattaccccttttgcatgccgattgtactgaagtctgggtaaagggttaagagggtattttaaggggcccagaaagctttttaaagaaaaaaggaaaaacaattttcccttgggattg

SEQ ID NO: 95068 - DNA, 180 bp, Glycine max
gggggggggggggggggcaatacacaaaacgcaatagggaggtatagagggtatgatagacactgcatgttagaaagcgaaagagacaggatagctgtaagaggctccacaccgattaatacatgaggatgggaagataccccgcgacttattgatccaggaaatgccttgaacatagca

SEQ ID NO: 95069 - DNA, 440 bp, Glycine max
ttgggggggggggggggggtgctgtggcaaaatgtaggtggtgttggttagcgcaaagaaggtaaatgacagataaaggcggctgtaataataataaaggagggcaggcgggacggggcggagccggcgtattgaagatgaaggaaccaccggggcagaatagcaaggtgaagggaggcttgagagtaccgactgaaagggaaagcggtaagagggggtaccaatagtagaaataggcggtataatagtacactagcaataaagatagggggaggttggcacttatgttataaatggcggaaaaggtgtagaccaggcgtttttggtgctaagcggatggacaattagggttggtacgggggcacattgggtttggagcggtgtagtgttaaccagggccgtgatgggtggtgggagtgtttaatcgcagagtactttgg

SEQ ID NO: 95070 - DNA, 319 bp, Glycine max
atgaatgcgaattatgcatttgctatcaatgtggggtctttgtacaaacaatgaatgtagccgcagaaattttccacagcaaaatgctacttaatctcgatattcctatctctatcctcagaagctaattcagcgagcaagagaaaactaatccaaggtacaattaaaaaaatctatctacacaatgtatggggggaaataaccagctgggctgcttctgccttaatgctggcctgtgactccagaaagccaagaactataaagatgatagtgtccgtgtgaaccattctgataggcgtttgatttttgctgacagcac

SEQ ID NO: 95071 - DNA, 182 bp, Glycine max
gtgtataggaaaaaatgcccctcgtttccctcgggagattttttgcatttccatttttggaataaaaaacagggagtcttttgtttgggacccacaatcacaccctcctacatcactccaactaattactttgcctactttttcaacaaaaattgaatccaaagatttgaccctgatgcttt

SEQ ID NO: 95072 - DNA, 312 bp, Glycine max
tgggggggggggggggctgtaaaagcagagctgaggcgggaggaacgaacttttagacccatagggacgagagagtcgtatagtagaaaaacaaaaacaaaaacaagtggataaaactgcctagacgctaaatgcttgtttgggatttaatcaggctgcacgaaactaatctgacgctctatggaaagcaatgggtaatgaaaatgacaactacaaaacaccaacaccgaaacgagttatgataaaaataacgggccaacaaactgggattgagatggcataatgagccatggcagggccgctggtgagtgt

SEQ ID NO: 95073 - DNA, 128 bp, Glycine max
gggcccttcaacgaaaaaaaggcctttttttgttaagccctttacgttcacactgaatttacaaaagcaaaatttcgtttttagttacaggcaattttgttttccgcactctgtatactaatataact

SEQ ID NO: 95074 - DNA, 356 bp, Glycine max
caatgcaacaaagtctacaatttgttcctcagcagttcaatacatcaatattttgtatataggttttttttttcctcttcaatattgggccatcaacagatgttctgtttaaacaataagaaagaaaaactacaatcatagcacccccgaaaatgttaattgagcaccaatggctgaactccgttaatcagtagttatccctcaatttcgctgctaacatctaaaagaatgaacagataatacctagatctataaaggaattatattgctattgtctacaaagctctcaaggcagtatgcaactgaaaagagtgaacataatattcaactgatactgatcttcaaacaaatttatg

SEQ ID NO: 95075 - DNA, 488 bp, Glycine max
ttggggggggggggggggggggaccagaatcagcaggacagggaaggagaaaaagaaaataataaatagacaacagcacaggatggggaaggaaaagaaaatacttattagaaaaaagcaggataacgtctctaaacccatatatatgcttatgattacttagtaatatttgcgattgtataggtagtgtgtgtaccaatttaagctaggcagcattatatcagatggggcagctacatacagaatatgaagacgaagagaagatatagaatacacaaacggatgattctatgcaagaatttgaaggaaacgaaaagttgtaccaagcagtaatctacaaatagcgggctccgccttagaagtccggcgagtccagcaccaagtgcttaccctggcaccacaccagtgccaagtgtcccaagtgtaatccagaatttggtcattgtggtactcagtgtaaccagccacggtaacaactctaagtcagt

SEQ ID NO: 95076 - DNA, 406 bp, Glycine max
ttgggggggggggggggggggggggggggggggggggatgtttaaaagaaagaaggaaaagaaaagcaaacatcggacagcccggggcggatatggaatgaagttgctgagggctacggtaaaaaaaaaaaaaaaacaggcaataaaatggggagatggggagataggatatataactcaggcttttgttggtaataggtgattaaccataatggaaggctggcacggcagcacataataaaaatgtggttgacggacctcacatggagacacccagaagtactaattgttaggttaaagcttgcgcgacttgttcagcaatgaaatacaagatggtgcatagggggtaggtgatgggtggtagggtggcaacgcgaccgaccgcaatacacgaatggtgcaaggt

SEQ ID NO: 95077 - DNA, 354 bp, Glycine max
aataaatgttaaattaataaattaagtcttgtaattaaagacagtgggagtacatcttagttctactattttctttgcctcagatccctcaaatcatataatccaagggaaaaggaagaacaaagcgaggaaaaggaattaaaaaaccacggaagcattcacttcgggtttgatatgtacacgacttatttatgttacaaccacaaacgaagctctttatttggttcaacacgacttgtttacttcacattttagaggacctgcaaagcgagtgagactcgatacggctttcccaggctttgctatgatttctgccttgggattttttgctacgtttttcccagactgaacaaa

SEQ ID NO: 95078 - DNA, 129 bp, Glycine max
aaaaaccggggtaagggatatgccaatatatcatatcagttcaacacactactaaaacagggaacagaaacacccaaaacgggtgagtaaaaagaatatgccacacaactgattctagcacaaaagagt

SEQ ID NO: 95079 - DNA, 419 bp, Glycine max
ttgggggggggggggggggtacaactaaaagtaagcatgaacagctaggatggcaccgggaagactataagacgagggtcctcgaaaataaaaacgacgaactacgaatacaatgaaatttgaactaaggtcttggccagtgtaaaacctaaacaagagtctaataagcggtaagggaatagaggataataaaaaaccttcaattaattgcacaacaagttattccatatactcggtcgttacagtttcctcgggatatctctctcatccttcctctcctcctgcaactcctcctcttattcaccaatcacaccaagttccactgcggtccagtttgtcacttcaaggttcactggatcgatctcgctagctcatcgtagactgtggtgagacgcgtattgaaaggtaaggtatgcctt

SEQ ID NO: 95080 - DNA, 437 bp, Glycine max
tcaccgccattgtgcctgtgtgtgtgtgtgtgcgtgtgctcagccacgggtctcgggttcgtagggccacttggtgttgtaggcgtgtgggaggtgtgttgcaaagtaacccgcacctggtgccggttcgtggtggtcgtcagactgttacgaagtaaggttggtctctgacagtagttaatcagcactaattggtaagcggctggtaacaacggccgctgctgcgcgtacgtggctggccggggctattgttggttattggggtgctgcttactgtagttaacggcaagcaccggtgaaggttgaatttaggtaacaccttttcgctgcgcgggggctgccaacgaaagccaagtaagctgtggccaaaaaggcgttaccagaagttaagcggtactaaggtaggggccacgataaaggtacagaaacggcctagg

SEQ ID NO: 95081 - DNA, 277 bp, Glycine max
cataacgagaggacacatatttgcattgtgtgtcttccttgtgccttgtttaacaatttctagggaggaatttgactacaagttcaatgccagaacagaagtgttctgtcttattccctaaggattatgaaagcacacaaagacaaaaaagattaaattaaggtacttaatttcaatctggtgggtacatatataaatacatggagtggtggtagcaactagcaagggcattaagagacttaataggtaaaatttaaagtttcaggggcattttggt

SEQ ID NO: 95082 - DNA, 260 bp, Glycine max
ggaatatggaatatacgatatagctagagagacactaatatagggtaaccaaataggtgttaaattagatgcagtgtttaaaagaaatgccaacagcaggaatggaaacatatatagagagagagaacttaaaactagagagagagagaacataacgtcaaccaagagctgtagaaggccggctggagctggtacttaaacacagccgcctgctggtgggttagcactggttgtagtggctgatgggctggttgggggtg

SEQ ID NO: 95083 - DNA, 385 bp, Glycine max
ggggggggggggggggggggggggggggggggggggggggggggggggggagaacaatacggcgacgaagggagggactcgactcgacctttaagtagagaccatgatagggatgagagtatcagtctcagaataaataataaaggcagatagcaaatccattcagcacggaatgaaccagcccatatatgccgtgaatgctaaagagatagagagggggttaacagagggcacgggctagcgaagccgcactgacgaataaccgggcacccctggtttccacacataagtcggcgacataaaccaccacctggtcacagcagtaaaaccacacttaaccccaagtggcttataaacagcccgagcatgtaaagttaacccttta

SEQ ID NO: 95084 - DNA, 388 bp, Glycine max
ttgtttgtgggtgactgagggtttgtgtggaatataaggaataaacagagagtagagtagagtaatgttaaagcagcaaaaagaggcccggcgggtggtggcgccgccgcctgatggggcgccgcctacttatactgccgactggggattaacatgggcaaagaatagccccgccgcactcgcttaaaagtgagcaaaagccaaagtggtgtatttgtgtttgacatacacttgtgcctgtgcctgggtcggttaaaaaacaagatggcggtccaaaaaggcatagctactgtaactgtcgcttgccgaatgtgctgccaatacgtatgcttgaggagggagtggtgtgccccttgatgtagcatcaaagacatggtcacgggggccc

SEQ ID NO: 95085 - DNA, 405 bp, Glycine max
cagaatacacaattgcatacctgcaatatatataggggtacaaatcaaatcaggaggcaggaatcctatcacagcaggattaaaaaacgaaaaccacactaagattgttttctactcgctaattgctaatataacgaagcacatgcgatttagatgcactttctataaataatatcatactataacaatggaaatacaaacctacaacattcggcaacagttgactaggttgttaaaaaagcacactatgtaaccaacccactattgttttttttaaatagaaaatcaatcttatcggttgatatgtcattcccaatgagacttctctgaattatgttgtctcaaacccaccacctatctgcatatgcagccacccaggatgtgatgatccctgagcataccccc

SEQ ID NO: 95086 - DNA, 243 bp, Glycine max
agttaattaattgagaatgaaaaccattcttcaaaaaacaagattattttccccattcctgtttacagtgcaaacattttattaaaaaaatgctcctagcataataaattcccattagctctaaaacctttttttttttttctcaacaacagagctggtaattaagtaaggtaagaaaattaatgtgatggatggataggaagctatgcgcatgcagggggcattagcaagcctccaaagaga

SEQ ID NO: 95087 - DNA, 412 bp, Glycine max
ttggggggggggggggggggggggggggggggggggggaacaatataatggagggcagtgtggaaaggagggcaactagaggaggatggctaaaagggttaactagatagaacaaaaaataaaataagaaggtagtaatggggtggggtggggaaggggttacgcacaatgtcaaagttcaatttataatgagtgcggaccttaagccgtactacaacaattagggtaatgtgcaagtggaacggttggtggcgatttttatggagggaagtcgggtgggctgccagggattgtgggaggttaagtacgctcaacgccaagttagaagaaaagaacccgtgctaataggcggtttttcagtagcttacattagaggtttgccatattgaccttcaatcgcaactttaaaata

SEQ ID NO: 95088 - DNA, 426 bp, Glycine max
cacttgtcgggttttttgcggggtgcaggaatgtgggatatcagtggagtgatcaagaagaaaaaaggaaggttgtaaggcaggtgggcgcctccgcggtcagtccgattgctagtgtggtggggttaccgggccacaagcacggtgcgctaaccattacggcgcgctttggtgcgttcgcttaaataacgacccggtgctactaggttaagcaggcccctacgcaaaagcaatcggacatctagttcaacgcaaggggccccgtgtaagcctcttaacctgaaatttccggggtgggtggcttagagaaatatctcaaacgctaacatgcgctaggcgatggggaatgtatttgttaagcatacgccaacgattctgcataagggtaagcaaaaacagcaacaggagcggagggtgacgcgaagg

SEQ ID NO: 95089 - DNA, 394 bp, Glycine max
gaggaggtaagaggggccggcccggcaagtttccccggcaactcggctacatagtatcctgaggtgaacactcgtgtctgtttgtaggtagcgttcagtgcgatcatccaccatcccgacggctcgaatgcttcggaatttggtcttctatccgcccgcgccactgggcttggtgcaacctccgactttggtacatggctgtggttgtctgccgccgccggttggtgacgggtggtatgtggggtaggatggggacttgctagacggggaaagatcaaataggaaatactcatgggcgcatgacggaacagtattcgcgtggtggtggtggtggtggtggtggtggtgatgatgatgatgatgatgggggtgttatagaagcagctgtacaagt

SEQ ID NO: 95090 - DNA, 360 bp, Glycine max
gccgtttaacaacacccgtaggataggctcgtaagtttgttggaactacatggtgtcgcggctgtggcaccacagtaaatgtaacgggagtcagattgtggtaaacgggccctagccgtctggttacattatataccacaactacaacggtgggccatcttgtaaactagaaggagcggaaggccagccaaagctgccaaggtgagggccggcttagtatggagaaatgggcgacgccgggtgcaggggcagaggaagccaggtggtcccgacgcacggggggggtggttgaaccgcccttaattggggcgggtacccaacatgcagtcggcagggtaaaggggcgggagcacgggagtg

SEQ ID NO: 95091 - DNA, 455 bp, Glycine max
cactacaaataaaacgcctacgaggaccgcctagtattcaacgctacccactgcttaatactcgtcacagtaataagtgtctgtctgggctgcgacaccaataaaataaaacacacaaggtacggtgccacgggcgcacccgcaggacgctaaactactaacgccggctgccacgcaaggatgatagaataggccaactaaaacagccgcacaggaaaaagcacgagaaactcaaccgggcccacacccaagtttaacacggctgacaaggtaacttaataggaccgctaccacctagtagtcagcgcttgcccctgcttaatactagtcacagtcattagtgtctgtctgggctgcgacaccaataaaataaaacacacaaggtccggtgccacggccgcaaccgcaggacgctaaacaaataacgccggctgccaagcaaggatgatagaata

SEQ ID NO: 95092 - DNA, 413 bp, Glycine max
tggcaggagcgagtagcgcaacaagacggagcgagtagaagcagtagcaagaagagaatacgggcgtcgtacgatcacggaggcgagacgaaggaagaactgaccgggaaacggcgggttgggccgctagccagggagtaggaagcacagtaagcgcaacgggcgggaaaaaaaaaaaaaaaaccctccttcttcatgacgcactgtcgtcatttcccaaggaaggttccattccgattgctacctcgattactgggtttgagacgcacgtcgaggacactggcctcgaagtagccgtagactgcgggttgcgcgcaaaggcggagttctgtataaggttatataatagatcacttccaactagaaacgcgaaacttgccccgcttgaagcacgcactgaatgtataggaagg

SEQ ID NO: 95093 - DNA, 375 bp, Glycine max
gctcagcaaaaatagataatatattaattgagtaccagaggtactaaatatacaaacggggcattataagaccacagaccaatggttccattgtcagactaatgtagtcttgatggaaaccagagcctagattacatgtgaccagtattttgcacctatacattgtactgtcgacaactaatacacaaaccctgatctaagattgctggaccaatgattgtagctgatgctgaaatccttctctaagtgccgaagccacgtccacaataaaaaagatgcatcttccatgattttattagcatcaaatgattagaccaattctctaagctactgcaatactaagcatgaccttccaacataattagaccaatggga

SEQ ID NO: 95094 - DNA, 361 bp, Glycine max
cacctccggcacaacggcactcaggcaaaaacagcgcatgcaaggaaggcctaaaatgttaggccgagagtgtaattctagtcgccagcctgcgcggcttaaacggctgctcaactgacaaagcagccaattggctgttacgcgtaaacataccagacccgagactagcaggcgacagctgcaccacaaaccatgtagtatattcccgcaaacgcgttgtaggcacttgatgacgccaaatatgcctagaccgggcctaggtagcctactgctgaacccggagaaatggaggagaattagcttggtggtcagcacgtgtcaaacaacaattaggtggtcactggggccactgcacggacgt

SEQ ID NO: 95095 - DNA, 468 bp, Glycine max
tgctcatggacggtagtttggtgtaacttattcaacttgtatgggggcaaaggatggctagacagacagaagtagcctgagcagcaaatcgctgctggttgtgctctggtctgtgtggaggcttgtagttgttattggtattacaaattggtagcttgtaccgcaaaacaacaacaggccccccgcggtgataaacccaagcaagagctgaaaggcaagttaaaggggcggccagcgcggcaaccgctaggcccaagatcgcacgcctgccaagtatacccgtagtacgataggcgtatgcagcataaacaaccattgcaggtgcaatggcacaaatataggttacagctatagcgtagtagagtgatgttaggttattttcttgagcgtattctacaaacaaggaacaaacttaaaaagggccactgctggggcatgctgcctaggccggtgcagtagcggcagtgt

SEQ ID NO: 95096 - DNA, 314 bp, Glycine max
ctgtacactaaggagagacagagatgctataacacacagtttttaacagagccaaaaaagtagatagaagtaccaaaataggtgacttgaaggattgagaggagcgataaagaagaaaaccacagagggatactaagaaaaaaagaggtggatagtagcgtacttgagagtaagtcgccccgcaattgccgcggcaatttagcacaaagaaaaattgacacaaatacgatttgtataaacaccacgggcgataaggcagtttgcaaaggcatacaccaaacctgcagcaacgcaagcctatgcctactcacggg

SEQ ID NO: 95097 - DNA, 414 bp, Glycine max
ggcagccttactactactattagtgcaagcatggcactgcggatagatacttgtcttttccgcttacggtgcgcacgacagtgccgtccgttaacatttgaatgttagtaaagtgccaacactgtggggtgctgcacagggtgggcgtgttttccgaggtgcagttactacttccggtgcgcggggttttgatgtataaagtactgcggtgtaagtacgggtaatactgttaaacgagcggagtattgagaaagatgaagggctgcgtgttgaacaagcggcactagttgtgggggtacctggtggggccgcgtgtgttggtgccaaccagcgtattaacaacgcggcaattaagtgtgttaagcacgctgtcgggagtgctagggctgtactcacacaaatactactaatact

SEQ ID NO: 95098 - DNA, 418 bp, Glycine max
tggggggggggggggggcggaaaagcaaatgctgcaaactaggtgtaacaagtaaaagctctatatatatatatactaaatgggtgagtgtagtaagctagctaggggataaccataatatgagagaggagctcggctgcataagccgctaggagttagccgacgacgagatcataggctgactgactaggtaggtgtcactgcatgcgaaggttttgtcacttcaaggttcactggatcgatctcgctagctcatcggtagatctgtggtgagacgcgtattgaaaggtaaggtatgccttcgtcggggataatcgtcacatgcccaaaatttgcctcggatttaatggaagtcttggctactatagtttttgggtcttactgcctcgaagactcaacacctttctattcagtcttt

SEQ ID NO: 95099 - DNA, 424 bp, Glycine max
aagcctcgtcgccgctccgctgtccactggttacaggttcctcagccaacatactctatgctctaattcgctggtaggccttcttccacgacccgcgggcgtccgccttcctattgttggtgcctctgttgtggtcgtattcaactctgtgggcttaggtatagctggcactagggtggttcagatgtcgaggaaccaaacgcggtaaatgcaaccgctattgctcctgggcccattagaggtgtaactaagtaaagttaataattggagggggcgcgtgccgcggtggccttggcggtttcacatacccaacggtcgagtgcagcagcggcaacattaaatgcaatactggtggaaaaatagcccccaaaggtggaaacttccgccgctgactgatgtcgttcggcggaacataataaggagc

SEQ ID NO: 95100 - DNA, 363 bp, Glycine max
cctgtcacaacaacccaaccggcaaccgccgcaacaaaatattattcgtatttgaattggtcggaaggagatattattattattattgggccgggcgacacagtcaaagaagtaataataaccagggaaaaaattagtcctaattcgcagggcacggagaatagtaagcaggggtaatgcgttgtaattataaggcaaagtatagtccaggctagggcggtcgaagggagtatcagaggaagtaatttagttaaattcggagctaatgcgaattcagtaataaccgaacacacccccaaagcacccgagggaaaacacttacgccacttagtaaccataccaatactagagcccggctcaaag

SEQ ID NO: 95101 - DNA, 431 bp, Glycine max
  unsure (1)..(431): unsure at all n locations
ctgtcaccgttccgtgggctcgggcctatacctgctctacgcgggcaatcggcaaccacactcgacacctacgccggggtgggggggcagggtgtgggcgacaagtcaagtcacggaagggggcagtcgcgcacgcgttcagtggcaaagttataataataagccgcacaccaggctgtaataactgtcgtgtgtctgtttgtgtccgtcttccaaaagcctactataagtaatgttcttcttgtaatagttatcacgattacccgctgcaaggcagcactaaatatccacgtaatcggttcacacctcgcctgcgggttgtgcggcaacaccttacaaaccgtagtaaccattggggtttgaagcaaaagcacggccgccggaacacgtaaaggggacttcctccatcaacgggcccaatgngtaaaact

SEQ ID NO: 95102 - DNA, 356 bp, Glycine max
cacacacacacccacaaacacaaccacagtctatggaatatagtatatactaacacaaacacgaagacaagtcgccggtcgggctacaacaacaccggaacacaaccacgcattcaactcaacagcggattaatactggttaaaccatcggtggtggtggttgttgttgttgttgtggttgtgtcattgaataagtttagctgctggtttgattgttctacaagtagtaacgcctaataaagccagaggcaagagatgggggcctaaagctggtagtgagcgatagtattcaaacggcgtgagtactagatgaaagagtataaataaattaacaagtaagccctatcgcagcattt

SEQ ID NO: 95103 - DNA, 380 bp, Glycine max
caacaactccaacgtgcatggccatcggcatggtcacctgcagggtacccaggggaaacatcaggtgcagagtcatcatcatcatcatcagtattaacgtaactttgggctgggtcttcttgtggtgtcgtgcgtgatcctactcaaagtgcgcctaggttaaccgtccctgcacagagtgctaaagacaaacaccaacaagtacgagaccccaagttcgtaatcgtttggcccgcaacaagcccgtatctgcgacaggtccccagttaacaaacccccggtcgcgtgcctggccaattggtaatatgctgcaacaactgctaacactggagcagctgcaactatccaccaggtcgcctaacaaacttaaccgcaagggg

SEQ ID NO: 95104 - DNA, 434 bp, Glycine max
gggtaccgggtccaacacaccgctgtgcaaataacagggggaaaacgccgaagcttgttgaacctagtcccaagtgtttgatccccaccaaccacgatacctaaaccacttacctgcctgtggttacaattaattagcaacaaagtagtgattgtggtgcccgtattaatttacctgcccgtagtgatttacaaaattaagggacaacccgtagtaatttacaggcttgtaagtaaattgcacttagttatgtaccaagtgtttaaattcctaattcttaaataaatagtccttcatgagctggccttaaggcaaatttggtacctttggtaacatagcccgtgcattaaagggttaaaaagaagtaaaaaagtggccctacataggcttgtacaagtgcagcagcaagtgcaagtaaagggataaataagcag

SEQ ID NO: 95105 - DNA, 390 bp, Glycine max
tcactccttctttggggggggggggggcgatttggggggtacacggtatagggggggccttgggccaataggaagcgcaagcgtgagactgatagcgagtcacaagggggagagaacaggcgtacggtctatgtaaaaaaaaaaaaaaaaccctccttcttcatgacgcactgtcgtcatttcccaaggaaggttccattccgattgctacctcgattactgggtttgagacgcacgtcgaggacactggcctcgaagtagccgtagactgcgggttgcgcgcaaaggcggagttctgtataaggttatataatagatcacttccaactagaaacgcgaaacttgccccgcttgaagcacgcactgaatgtataggaaggctcggctctg

SEQ ID NO: 95106 - DNA, 420 bp, Glycine max
ggccagggtctatcgactgactgatacaacataaaccacttggcacgtgtcacagtggcgtacagtccaatctaattctaatgcttattcacaggctgggcgcgcggagcccaacccaacggatgcctagataccggagccaaaacaacttaaagccgcttagactcctggtaaagcctacgggaacgcagacaagctcgcgggtgtttaaaaggctactaagccggtaactaagccagtagcacagaaaccaagtgctgcaactgaaggtcgggcacaaatagtatcacaccaaacagacgggcacgcttaaaaatataaaaggaaagctgcctggcttacaacaacacaagcacaaagtgcagtaccggttaacttttgtgctgttatacttagtgcagtaccggatgcaaaactagc

SEQ ID NO: 95107 - DNA, 199 bp, Glycine max
ttaacccgcgaccctagaggcactgcgagcagcgtagcgtgcgatttagcctaagactatgggtcccttaattgcggtggccgtaattacgcagccgcaacttagtacaactacaaaacaagcacccgtacgatataatagtgctactgaagccatgtatgccatggagacctttggaggtgcccccactaacaaactg

SEQ ID NO: 95108 - DNA, 413 bp, Glycine max
gtaatattagtgtaggtggggttggggtgtgtagagcatagcaagtagtgttcaacctatacgaagcagacgtatcgtgtattggttcacatttggggtggcaaccaaatgtgaagttattaaaagtggcttggggtggccgcaacaataataacaacaagaagattaagaagaataataataagaagaagaaagagaggaggcggcggaagaggcggaggaaaaagagcatccaacgctggtacggcttggtagttgtaactgcggtctcgtcgttagcgccgacgtgtatatttaagcagcccgtctatttaagggtttggaggaatctgttgtttatgcgccaacagtaaacccgccaaaggcaacaacaacaacacaaacaaacccaaacccacaaccagtactgggtg

SEQ ID NO: 95109 - DNA, 89 bp, Glycine max
ggcaaaggaactaatttatccatttgaacgagataaaatagccacaatttgcaggattgaacatgccacttaaacaaataatagaagac

SEQ ID NO: 95110 - DNA, 466 bp, Glycine max
  unsure (1)..(466): unsure at all n locations
cactaaaaacggtgcggtgggggtttatttaaggtacggggtgtaaagcctgtcgatcaactaaatcctgtctaacgttattcctcctaacctcttatcgaactactgccttattaacctcctgtcgaacgtgctgttcctgattcctcctcgcaacaacttctatacaggttcgttcccaattcgactctgttctcacagttccaacgattacaacactatccaatggtgcagttccaactgtttcggttactcaggccgttcgcacagtctctaccatggtaacattcattggtcagggtacactgttcttcgtgttctttgttaccaacttcttcaccttgatggccggccgtgtggtcaacatattaagtgtgctctgaggtatcttaactcgcgtatgagtagctttaaccagaggtaatgtctgacctcgnaggaccctcactctctggaaagtgaagga

SEQ ID NO: 95111 - DNA, 381 bp, Glycine max
cgtacacaggctatcggtccgcggggcgggagcgttgtgccccgcccttttagccacgttcacctgccgtcacgttcgtcttggcccggctcgcttacggcgtagactccatccgaggtccggcttcgggcgtgttctccgcaacgccgtccacagagtccgcatccgcctccacaaacatcgccccacctgcctgcacagatgccactctcgcctcctcataaattgcactataaggtaaaccaattgcgcccatttactaatcaccaccctttgatggggtaatacttaccgttaccgaccccagcttatcgcctaccgttgcaacctgggcacgcaaaactggcagacagttggtacaactgtcacccgggtatctta

SEQ ID NO: 95112 - DNA, 423 bp, Glycine max
tggtactgtgaagcctcatcgctttgctcaaggttggtaatggtaatattatttgtgctctcgctatttttccgtatcgctgttactatcgcaccaatatcgctcgctgtgatcaccccaaggtaataagttgtattcatattcctcgtcatgatgatctctgcactggttttcacatctgtggtctcggtcatacaagtaacaacggtatctacgtctacctccgcggtggccaacttatctgtcggagctggtgtgtcgcctggtgcggtgctcgcgggtgcaacgctatcaactgtccgcagccaaccaatcgggccggtaaaagtaacgccgccagtacgaccggccagagggctggtcttataacctatgcctgccagcagtacaaacgccgtatgaaatctaaaatacaatggccgc

SEQ ID NO: 95113 - DNA, 452 bp, Glycine max
aaaaagttatccagtattcagtattcagttagtggggggcgtatgtctatatatttgggtgggttcggtgtaaatgtatgtatatgtgtgtgatgctgacaggtcatcaggtttcaacgcttggttgttgttgttgttggtggttttgtgaagtccagttaaagttaaagttaaagttacggtaaacaacagctaagataacaattgcccctcagtgccttgcaaccgcacttactgtgttgatcctctcgcccgcactggtcccaattactgccatcgcaaccacctcaacctttgttgatacgctgcttctcattatcctcgtaatggtggtcataatcttcaccgtgatcttaatccttctcttcaccaaagtagcccttagcttagttcccactgtcctgccaactctgttcatagtcgtcgtgttattaacagtggtgcccctccct

SEQ ID NO: 95114 - DNA, 484 bp, Glycine max
acaactactggtccgggggccacaacgggtagccatgtgcatgtaactgtacgggaagtgttaaaatttagggtaccaatgcgcggcgagggtttacccggcatgttaaccaggctagtgggtagtttggcacgcgcagtggggcgatggaagggagaggagtgactagggtagggagggggtccgatatgcacaggaggccggatgaaatgcgccctaaccggctggcgacaacacacacgagggcgatggtgggaaaaggcgattaagccaatattaggggccgtaacctatgctacaattgctagtgcaagttgggcagaacctgacccggggaaagcgcaacttaggaacaatgtggcggttgcgcggtttggtattagtgaagttgctggtagtggtaatgttataaccgccgcttttggggcgcgcgcgggtgttggtgcctttgggtttggtacccggctatttggtgagttgggtg

SEQ ID NO: 95115 - DNA, 461 bp, Glycine max
caccaacaaagccaaatcctaagactataactagacaggcaaggcaagtatacaacaaacaaacaaacaaagtttatcatcgtaagagtacaccacacaaacggcaacacaaaatgcatatatcaacgcacaaaaggaaatatatatcttatcttagtattattctttttaggctttagtgttcctaaatctaatttaaaaattgaatgaatccgtatatgcggttggttggtcggcaggtaaggtaattgtgtgtgtgttaaggtggtagtaatagtggtaattcaaggtttgggttcagcacaggcagggcaagtcacggggctggggttcaaggctctcctcaggtgcacagcaaaagcttcttcaacttcaattaccgcctgcgcacacattgtcgtcaccaacttaaaaaatcgagtcgtagttgtcgtcgagctcgtcgtccctgtgttgagtgt

SEQ ID NO: 95116 - DNA, 349 bp, Glycine max
atctaatcatcccaaatattttaataattcagcgaaacacatttattagtcacatactgtattttatgggtaaaagaacacatttcattttaatccgctttttgaagattgaaacaagccttaaaaaagcagtgaaaagtttcacatgactggatttgcattaatgttttttaattttttcaatatacaaattttcccagaccatgttagcattcattgaccgaggaagggagagacatgactgcaatcagcttaactgttccgaaccccattgattttttaatataagattggttttacaattaaagcattcagaatctggttttcatgttttttcccgccctaagtt

SEQ ID NO: 95117 - DNA, 381 bp, Glycine max
  unsure (1)..(381): unsure at all n locations
gaaacaagacgacaagacgagatccgcggccggactggtcagacaggaagtaatatacaccacgcactcaaatgacaagttcaaaaataagcctcctccactgacatacttatcttcgcctggttcagagcagtcatggttgtaatctggtgttcatcctgggttatcttcgtcatcacctaaacacctcgggctcaactctccccgattattaatgtgtccacacccaattcgccaaatggtaattccctaataacgatggtggtattacaaattatgttattagtcgtcttggtcttagtcctaaaaacgagcgggtgccaaagccaggttatagaagtccnctgtatatccagacgttggcgtgtaaatgtaacttgc

SEQ ID NO: 95118 - DNA, 361 bp, Glycine max
cacaaaacccgggtatatgggcgttaagtgggtatatgcaatgtggtaaggggtaaggtgtgggggtagctattatgtggtgggggtggtacatattggtagtagtgctagattctggactgttaaaaatgatatatataacaaggtgcgggtgggtgcggcagggcagccagttctacagtgaagccgggtatatatgggtggtatgatccagtaggcgtggtggtagtgcccctattttaagactggtggtgaagtcagacgtaaaggggcggccggacaccgccagtagtggtcgtcggcgccgcatgacgcaccacgctaccatgagatggagtgagagacgcgagcaaaaggtgcc

SEQ ID NO: 95119 - DNA, 318 bp, Glycine max
ggggggggccctgattatatatttatatgccggggtggggaaacaatttattccccaattttctatcccccatttgttaacccggcccacttatttttttgccccccaaggaaatggcccttcaaattcgaaaaaccaaaaaacaatccctggaaaaggggggggtccttaaacttttatttttgaaaccaattaaacgggttcaaattcaacaaagcaggggccttacataattagagggccctctaaaactttatttgcccatattcattggccctaaaattggaaaaatcaaaggccccattgacccccccccct

SEQ ID NO: 95120 - DNA, 388 bp, Glycine max
ggtgttataagagggagcgaggggtcgaataaattaaatttaataaaaatggtggtatgtggacgggtgtagcctagtagtgtacaatcgacttactaggcacttagccagctggtctttattgcgtattcaggtagcctgtctacacggtggtctgtctcatcttcagatttgaattaccctgtggtacaacgtgtgtgttcctctgcggtgcttctaccataattattgggtgttcgggtgctattactttcttcttcttcttcttatttttattcgcgttacttgtgttcctgttcagtaccacgtcctcttctcttcttcgctcctcttgttctttgtgcccaacagtgttaacaccaacgtctctcttgtcaactctgtctac

SEQ ID NO: 95121 - DNA, 388 bp, Glycine max
gcaacaaccaagactgaccactttaattagaatttggggtcccaacctaattcgtaccaataatatagtgataaagaaaatctaataaaaaattaacatgcaagtaccggtgtaatccaagacccatacaaattctcattatggaagagatgcaacaaccaaacaaacttaataatttcttgcaaattatcttttacgagtaagacctgcgtaatcagcgtggccatatggttcaaacaactccgaaaaaaggccattcttccttctagggtcatgcttcatgtctttgcacaattgatcatgataccatatgccacaatgagcaatgcatgttttccaataatatttcccaccatattgcttcaaattgtcttcccacaatttcacg

SEQ ID NO: 95122 - DNA, 285 bp, Glycine max
ggggaaaaaaaaagatcctgccctttaaaaaatcaagacagaataattcctcccaacaaaggggaaaacaatgggtttttccctctaatgaaaaaaagccaatggccttatgggtaaaggaacgtttatttaacccgggcaaaacaatttgtttcccctcccacaaaaatcataaaaggtaaaattcaataaaaaagcctcaaataagttttaaacaaaaaaaggggggaaagccccccccccttttggcccctttctcaatcttggggcccgccccccttcccc

SEQ ID NO: 95123 - DNA, 363 bp, Glycine max
agtcactacttcctctgagtctagcgcgtgtatgccccccgaacatgaagagaatgcgcgaaatggaccagctcaaaacagtggtaggaatgacaaggagcatgagcatcccttggcctcagagacaagagttgagaagttgaatgagatggaacaagatgcatatgagagactggagaggagttcatcctatgtgtcctccaaaattgggagtccagtaaatggtcatacctctattacaagtactccaaatcatagatcagcaacaaccccaaagcaggctgcttctttgaatgctgattcttcgtccccaatcttggaggaaaattctaagagcaggtccataagcagtgatgatgaaaa

SEQ ID NO: 95124 - DNA, 321 bp, Glycine max
aaaaaaaaagaaaacccctttttttacccaaaaaaaactaattttgataagcccttacgggtcccgggtttaaaacagcctgggggggttctttttcaaatcccaatcccccctttttcttgggacccaaaaaacaggggggggggggggcccaagtttttgcaaaaaggggaaaaccgggttcccccccttatgggtaccttggggggggccttaaaggcttaggggcggggcaacccccaaattttgtttttttttggggggagaccattcaccccccccttttttttttttccaaaaaaaaaaaaaaggggggggggg

SEQ ID NO: 95125 - DNA, 437 bp, Glycine max
caaattaacctgatcaggtgaatacagtaacagatgattcctatcatgttcaaccaaaattccagatggttgttgcacaatttcagcagcagcactagcatcattctttatctcagaatcaacatcaagaggttgctgcttaattttatccagagaattgttatcacccgaatcgtcttctgattttttgtcgttcaaaattgcagacttgtttttatcctctacttgttccactttaacagcttgtccacaattctgtttatcaccttcaacagaggtaccagagtccctcttttgcattgaagatgcaggaagcaaatctgctccctgagtctcattgtcatcaaacatgacatccaatcgggaaaagttttttatcaaggttgatgtcatttcaatctcaagtctcttgtcaattcttttatctgatagtggag

SEQ ID NO: 95126 - DNA, 225 bp, Glycine max
ccccccaaaaaagttcccgggtatttcccaatattttaccccccgggggggaatgttaggaaacccaatttgttgttcccgaagggcccaaaaagaaaatttttggcgctttttcccggcttcccccctaggggggggttaaaaatgatttggggggccccctttgggaatgtcccccttgggggggggggcccttttttccataacttggttaaaaaggggaaa

SEQ ID NO: 95127 - DNA, 315 bp, Glycine max
ataaaaagcaacaccatcgtatatatgtatctatatctatagtaaatgtcatatttgacattgaaatttaaaggacagatagaaatataaggtcaagaaggagttaaaaaaaaagaaaaagaaaggattaaatataaggtcaagaaggagtaaaaagaaaaaagaaaaagaaaggttttaaacggatgttgatatatgtgacatcagactactgcagctcttccgtttaagttagagagctgaaagccacttggtttcaaatcttgatcaccatcctcatcatttttactcttgcaagagcagtagcaagcatac

SEQ ID NO: 95128 - DNA, 366 bp, Glycine max
caaacaaagggagataaattcttttttttttattccgtttttttttttcatattattttctctggggccctaaccctaactttattaccttggcacccacaatacatcactcaactggggctcagctgctcagggggttaattccaaatctccatcacgtttttgtttcagttattctcttcgttcgcgacgccattttgtttcgctgaaaagggcggtatcctttgtagtcacgggtttcgttttctctgttcgatttttatatttgttttgttgggtttccaacttctgcctttcatttttctgcttctgaataggacgctatttcgtttcgtctagttaggggattgggaatttttctgataa

SEQ ID NO: 95129 - DNA, 344 bp, Glycine max
gccgcgtgtgaatgaaccatccggacggacagccgaaattttacatgtggcgttcaaaatctgatgcaatagtagtgaaccaattgtatctgtaaacatggctgataacgaagattcggtgttcgatcctagccttctgaaaaagaagaagaagaagaagaccacagcatttgatatggatgcggctatggctgaaggttctcctgcggatgcatccgacaacactgacaaagagaacacggaacccgcatcaaacgtggataatatggacatggatgatttagaaagttttggaaaaaagaagaaaaagaagaagaaggctttcaatttggaagaattagaca

SEQ ID NO: 95130 - DNA, 487 bp, Glycine max
gaatagtctaatatttattttcctcttccaaatactttgaatgaggccactatgggaacaacgatactctttgctatgcatgctaggttgaacttcatctgccatgtaaattcatatttgaacaaagctaaatactaaatagtgttaacaagggttattttggttctcttttctggccaagtgagatcacttttacttctggaatacattcaaaaatcaaaatcatagtggtgatctgaggatgcaaaagtttctgtttatgactaaagcacacaattgcataggtctatttcaacttttagttaaaactttttgcagattgaaataattctcaatctgtttattcatgagactcacagtatataaagtactaaacttttcagtgtattatatatagattggttatttattctaactgaaaatgtcttctacttttttctcagcaaagtcatcttagaaggttcaacaagattttatcagtgagcac

SEQ ID NO: 95131 - DNA, 165 bp, Glycine max
ccagaattcacatgtgcttgtgtcaccaacaacatctcagaattcacatatgttcatgtcaccaacatctcaacccataacccgaaaaaattcaaatggaaggttgaactgtctatgctcacccaccacacatgctggttcctttagatgtcgacaccatcgatc

SEQ ID NO: 95132 - DNA, 297 bp, Glycine max
cgagtcactcggtgaggcttcttttcttctttatcaaggatcatctctctgtgtcaggatggggggagcgtgttctaggaagcaagagcgggacaacaaagatagtcctaccagaggactatcacgaagatattgcaaaagcgggactttgaaatggtggacatcctctttttcttatccatctgtagattttcacctacgaaaaggagaatgtccaccactgttggacttgtgcatacagaaaataaatgaggatattgataaatataacacattttctatgctaccacgagatat

SEQ ID NO: 95133 - DNA, 468 bp, Glycine max
catcacacccctcgtcacaacttatgaccatcttatgctatttcctctcaatttcatcttggcacactcatttcatcatttttcatttgggtccgataaaatggtgtaaaaattgaacctttattttttaatttgtttgcctctctctctctctctctctctctctctctctctctctagaattttggcttttgagtttctctctctctttgatattgtatcatctgtcagatattaatgggcactgcagattcctgtggtttgcaacttgggttggggctttttcaaccccagctgtccctatttgtagcaaagcagttgttgggatgggaccaaattgacccatcatgaacctctctgtggtttttcaagacaaccatcaatctcatttatgatttgtgtgtgagttctacccttgaaattttcaccaaatattagggttttaacttaaacctgaatttattatct

SEQ ID NO: 95134 - DNA, 321 bp, Glycine max
aaggacctaaaaatcaagtttaccatgttcaaagatcgaactatagtttggtttatagaacaaatgcctttggtcaccatgcccaaaagtttgtttattgggttatagtccttgagaccaaacttttgaaatgaacagccatagtatgacttttaaggtcccaaaatgcaaaactccctttagaaaaaaaaaaaaaaaaacattcttttggacacgttaaatgtgattaattattgaaccagaacaaataccttccgctgtcatgtccaaaagttcgtttattatgttatgggccttcagaccaaacttttgaaatgaaca

SEQ ID NO: 95135 - DNA, 478 bp, Glycine max
tgggggggggggggggtagcgaacagtgggtagcgagagtagaagccgaacgacggcacgataaaaaccccggccacaaacctaggaggcaaaaacgaacaaccgagataggagggtgttgtaaactcttctactatacatgtactcaacagggcggctgggttggtgtgcgctgggccatgaccctcacaagatggtacagagttagtttaaccaattgggggaactttactgtcagcgcacaggagcgtgtgaatttgtgtgctaaaggtaagcccgcgtgttttgcctggtaaaggggcgcctgttaacgattaaatagtataaatgatactttaacagcgtaggaaggctaacacagcacggcgcaagcaggctgggtcatgaggttaaaaactagtgatcaaaaggggcggcgatggcaggctcatgccctaaaggcgctacttaacggtaaatctatttggtggcaatagca

SEQ ID NO: 95136 - DNA, 362 bp, Glycine max
cactgtatgacgtcctccttctcttctttgggggggggggggggaggaaactgaaagagtaggaaatattgggtaaacgtggaacatagaatgcgttgactgtgcgcaagtacaatgtaaaccaggcctttccgtgggagtagattaacatgaagcggttaatgagtaatggacagagtatattcaaaattctctatttaaagtgtaagctgtaaatgtcgcgccagtgttaccggggggttatggcaaaatgggacgacccggtaatcccccgatccaacggactgttcctcgatatgctggtactattaactgttgatgtaaggtgtaacactgccggagagggactaacatctgtacat

SEQ ID NO: 95137 - DNA, 364 bp, Glycine max
ttgggggggggggggggggggggggggcgaccgaaacaggctaatacagagaagaaggaaggaaggccagagtttaggagatacgagttgggttaaaagagtagcacatagaaaaagaaaaaataaacaacttgccgtgtgcggtagataataggagagtatacaggcttaagtaggggagaaatgaccctcaggtggaagggactataaacaaagcataggtaaactttattgttagcacaccaacaagattatttagtaaattgagaagccagagtaccctgtagtgactgccgttgccatagtacaacgttaaacccgcacccggcgtgtggaaaactgctaggagcactcgctgcgtggg

SEQ ID NO: 95138 - DNA, 466 bp, Glycine max
ttggggggggggggggggggggggggggggggggggggggaaattccccacaaggcaaaggcacagtaaaggtttaaccaagtccgaagggactgacaagaacgtgctgctaaggatgacttactagccccaaatgaataacgctcgcaacaaaaccaaaatgcaaggaataaagcacgattatgccagtagtatggggttgggttggaaatatgcttacatagagagagaatagcgtaaaaacctgtgcacagcagcatccactcactagctacccagagagcctgatagacgtgaggaccgaaccatggagaaaaaaacattagcaaagcaaagtacagcaaggaactgcggcccaagcctactctaagaacgcccttaacccaagaccctattttacatttggccagttaacaagtatctgtacgtcaaggactcagtgcaaacaagggcttgcccgacgagg

SEQ ID NO: 95139 - DNA, 401 bp, Glycine max
ttggggggggggggggggaatcaaagaggggcagagcgacaggaaagaaatatatcaacgataaagaaataggccgtgtgtgaagtataaaccacaggaacgttaggcgccgcgcttggtagcatgcaaggagattaaacgatgatttggaatagatgtacgaaaacttacactaagtaaatttaatagactaaagtgtttaggttatacggtgctagtgcaccatagcaatttgggccatggacatgttatctgcatattggccaacacgccaagtaaccaactaacccgaaccattatatggcgttttaacaattagcccagcttattaggccagagggcggtgaatatattggctttgggcctgatggttatgcttaggctacttataaatttaagta

SEQ ID NO: 95140 - DNA, 437 bp, Glycine max
ttgggggggggggggggaccaatccttgcgccacccctattcaagtgaagttgcttaaaaggactgaataaggcgtgtgatagagattaatcgaacgatcgaatttacaaaagattgtttaaggaaagaccgtgaaacatttgtgatttttgtattaaagagtttggggtgagtatgataaaatgctgcctgctgggggactgtgtgcaaatacttaaaaaatacaggaagggggggagcaaaccaatagggagtaaatataacaaggctagggataagtaagggtttgtaaggaactgtggtaattgaggatccctggtggtacatacatgctaacggggcaagtggtcttgggccccgccatagcaggtaataagctgggtaagccctcataacgagatcataagtatacgcacaggagtgcagcgagggaactc

SEQ ID NO: 95141 - DNA, 461 bp, Glycine max
ttggggggggggggggggggggggggggggggggggacattcagaaaatgagggggaagaaaggccttagtagcatgggtggatgatgtctagtgaacgggagcgatgagcattataatgtgactggataacgggagcagaagaagataaaacaggagttggatgaagtaacagacaagttaaagaatagataaggacttggtagaagtgtttgcactaaagggcggtgtgccagacaaaatactgatgatggcagggttagtaaaggggtctttagggaagttactatccctggggcgactattagtaagagtaatcgatgttaaaaatattgggttaatgttgctcctaccggtattagtacctccgccgtcgcccagtattataggtattaaacgattgctagaaacgcaaaataaaaaatacgcaaagagctaaagaaaggggtagacatagctaag

SEQ ID NO: 95142 - DNA, 400 bp, Glycine max
tggggggggggggggggggaccaaaaacaataatcgtataaagcgggaaggggcttcccagggttatcggtggccaatgactcaaataaaagggcgtgttagttatagctagaagttagtaaaagggtgaaagcgttatcaagatagaaaaacaaactacatgtgtcaaaggacagcaagggttagccgcgggagcagggctgcgtgagagggagccctgcactagttggtcatctgccgggatgaggcgtaacacaagtgactggcgctacgggcagcaatagagggttagaaaaggggcttgtgggtggcgacgatgttggtagtggggttggtaaacgtatcgatgtaactggcatagtttgcggcggaccggtaactgtaacactgggtggaagag

SEQ ID NO: 95143 - DNA, 194 bp, Glycine max
gggggggggggcgggcaggggggggttaagaaagaaggaaagatgtaggctgatcacaacgttagggagcaaagataccaggtaacagaagttatggttattaaaaaggttattgagagcaagttacaagttctggctgcgagcatatggtagcgttgaacagaagtggaggtgttgaaagatagaggcaaaca

SEQ ID NO: 95144 - DNA, 470 bp, Glycine max
ttgggggggggggggggggggggggggataaaccaagatgataagatgggagcatagggatagaaaaatatgatggctgacaacaaggtaagtaattaggtatgccgataaaataagcccctagatctccaaaatgattggcggataagaaagtcataaggcaacaaaatgatgattgtagtaaacgggttgcaaggagcttaataatgatcaattaaactagttaagcttcgaagggaaagggaagtaaaatgcgccacattaaaccacttcaaataacagcagatgagtggtaaatcgcgtatgcgtcttaaaattgatcataattagattaaacggtaaatttggggcggctaaataattggaaggtaataatgatttggtagttacactaactcgaggcgaatggcgattattggctcggggtgaatatacgaaagtatacgggtgggtttgcctaaggaaacccc

SEQ ID NO: 95145 - DNA, 457 bp, Glycine max
ggggggggggggggggggggggttggtaccgaatggtctacttaattaagttgttaggttggggatgatatggtgggttggcggcgtggtttaaaaaagggtattaaaacaagagcgattggatcaaaggaaagattgagtgtaataacagagcgaaacccgtaaggggcatgacatgataactgcagttactgctagggctgtaacttacctgttgaaaatacaagccgtaagccaggtaagggcccaagggcaaggtccgttagtactacagctacgacctagaccacagctaaatggtgtgggcagtagtgtaccgccccatgttggtattacacaggccatttaacacacagtacctgtggttttaggcggtggctctgtaaatcaccagcagtggtctagtgcatcattaacccacgtgttagggatgcattaagtactgggtttaagacca

SEQ ID NO: 95146 - DNA, 425 bp, Glycine max
ttggggggggggggggggggggggggggggggggttgcaagagggcggactggcggggaaaatataagaagtaaggacgccgttgggcaccggcgcctagtaaaacaaccaaatcgtatacgggagaccgatatggataaagcgcaatagagggatgggcataaaataattgcagcatattgcagcaggagcactgcagacgtatatgggagaagcagaatgtggccacaataaacatagataacggtacggcagaaaagcctacctgactgggataaacggcgttggacaaaggcgattattaaagaaagaatgcttaccacgacgctaagtgccgagctagttgcggcaaaatgcgtcgtttgtgccaacaatggccggccagtattgcaaccagtgccagatagtgttaacggtgtgggggg

SEQ ID NO: 95147 - DNA, 356 bp, Glycine max
ttgggggggggggggggaaaagaatagggggggggaggagagagggatgtatgggatagcacagaaagtgagggattgtaggaggtatgacaggttgaggattattagtaataaccgctttatcgccttattgatgagaaaaaggtgccactaactagcaaaacgctaagagctatatgggtgaaagaaatggatgccagaaagagaattttaaaaggagtggcaggaattgcgacggctagagccgccaaatattggtgcaagaaaggttaccaactcagctcaagacaatcgatccgttatactgcacagacataagcaagtaaatgcaacacagggagaactagcggtaagtt

SEQ ID NO: 95148 - DNA, 377 bp, Glycine max
ttgggggggggggggggggaggcaaggagaaaaggagaaaggaagaagagcctgcctgttgctgaacaagcttagtagtgcagaaagatagtgtttatataagatataatgaatgtgtaactatgtggagtaacaataatagaataaatgttaggaccaagaccacgccaaagactggggggaggggtatgacagagaagcggaaagaagaacatattcaatgagaaaagatatacctgatagttcgcactaagaagaagaagggaacgagagatgatgatgacgtatgatgaactggcctatagctaagtaccactgccagatcgagagaggcaggcagggcctggttgtacttggacggttttggcgtgaggggc

SEQ ID NO: 95149 - DNA, 363 bp, Glycine max
gtcattccaaggaagatgacatgtcttcgaagaaaaaatcaagaaaaagggcaagagagagagttaaacggagtaagaagaagtcaagtgacagcggttctcctgaatgtgaagttcttactgaggaatatgtctgtgtaagtttgacttctgaaacctgcagcagcaatgatgtggctaaggagggcgtgggagaattttcaacttctgatgatcggttagtaaaatctgattgtgaatggaatggcggcatcaaagtgatgcaagcacctaatagatgcaactcttatcttgatcgggaggccaattcaaaagctactgcgcctattgctcaaagttctgctggagaatgcaccacatttg

SEQ ID NO: 95150 - DNA, 405 bp, Glycine max
tgggggggggggggggggggaagaaacatacgcttatggaggggtagggagaagacacctaaagagaaccgagatagacagcacttactgactgaagaacatagacctaatgcaatataatatagcagagttttataaaccagaaagtagaacatcgataaaactataaaccgaaccatgaggaggaaggtagcctttggaaaaaagatgaaaaatattaaccccctagctaaagcagatagagcgaaggaggaggaaggaactaacaagtgttggtaaacctggccttgtaacggggcttggtgcagtaacggtggctaaagctggggtaggtgtaaccgttgctaaagctggggttggacttactggtggtagttggctaagtgtaagcgttggctgtagtgg

SEQ ID NO: 95151 - DNA, 418 bp, Glycine max
ttggggggggggggggggacaaccaccaacttttaaaattaacagaggggagataaaagcggcctgaagcaataaagcatggctgagggcccgtaaaaatgataggttaggtggtatggctataaaaaggagtaaacgaccacatagtataacacccaaaccgccccagcaagcagcgcgagcccaatagtgaggtcctgggatgccaggggtgtggtaggtcctgaaaaccgttaatgcggtcagttagaagcgatagcgaaagcagtgcctgttaacagtgcgaccatctgaaaggagtagaaaatgtgccactaagtgttggtattggcgcaactggcaggttaccaaggtggcccaaagtagcctgtcacttcaaggttcactggatcgatctcgctagctcatcgtagactgt

SEQ ID NO: 95152 - DNA, 488 bp, Glycine max
ttgggggggggggggggggaaaccaaccaaggtaggtttgcggaggcaaaactaaatggcctgaagagagacttggatagtacaagaaacaaaatgcaaaaagaaaatgctgtatctagatagcatttatgagggttgaagaagcgctgacatagaggtaaaaatagaatgctgttgaaaaagagccaattagaactgtatgaataaagttgtttggaaatgcaagctgagagctaaggacgggagagtacatgtgcaatataggttgacgcattgctcgactgggaacaaacgagtaactggcacgccgggccgtagaagagtacttatggcggtggcgcgtttataagctagtagtggcagacggttccttgggcgaacagtgtcaaccaaagcgaagtccatcgtaagagcgggataatcattagctagtatgccaggtggtcaaactggaagactacaatgatgagtataatcaaggatacgac

SEQ ID NO: 95153 - DNA, 449 bp, Glycine max
ttgggggggggggggggggaaaagcggaaggttgttgtttttaaaaaagagacagacctagggacgggccgatagttgacgcggcggttaagggcagactgataatgataaccacctagagcaggcgaaaactgaaaatcccaacgattaaaagattaaggcgttcgggagagtgcattagcataacccaaataaatacaatacaataattgccgaggggggtaagttgaaaattaaataaaatacaataaaaagatgcataatataagagatataaaaggaatacaaatataaacacctgactaataggagggtagggccatacgaaggggtaccataggtaaaagaatagcaagcacagaacggtaactcgtcgtccgccggggccgagtactactcatacctatcgtcgtactccaactggtcccaatcgtcgtcctccgccgggg

SEQ ID NO: 95154 - DNA, 317 bp, Glycine max
gatatatttcgtgtttggtgttctaatttttatttctctggtttggcattcttatttactgtgatattctgtttgttctattagtattacttggttgttcatcctctgcctttttaaagttcctgtattctcccttttgctttatcttgtttatttttgatagcgggagaaacatggtattttgagcacttctacagtcctgctttgtggatggttctttttagttcttcattggctcattatgtagccctggagtttgttgtaggttggtgtaggtttaagatgatgaatttagtgcttctcatccctgttggggc

SEQ ID NO: 95155 - DNA, 429 bp, Glycine max
ggggggggggggggggggggggggaacaaaggaaaagtgagagggagagagaggtatatatagaaagcaacgataggattacgcgagaaggttaacggtcatggacgaataaaagtaccataaatgcgggtccccatcaacaaaatagtaaagagagccctgggggtattatgtgaactaccaaggttttaggtaggaatctggagtagtggcctgtgggcgtacgggtgctacgggcagcctagaaatgaaggcgcatttaatgctccacagccaccacaataacgaaggagttgaaattaagtagagaaaacgtaacaaaggaaacgatacgtaactaaagggtgggccctatagagggtacaaacgaaatgaccacaactaaaagtgagcaggtgcacgaaacagggggactttgagagcatgcag

SEQ ID NO: 95156 - DNA, 403 bp, Glycine max
ttggggggggggggggggggggaggggcaattcggggtatgaagcaaacccgtgataatgggcagagggtgcttgggttccaacgcaacaatcggaaacagtgagatcgacataggaaggagcagagtaagagtagaaggcagaggcacaaagaggaaaaccctagaagagcagaccaagacacccgctatatcctaacaccaagggggggaaaatggaaagcgacttaggtggcagtagttaggttaaatgttaagcaggaggcatcggtggcacgcgttaagaatattatttaaagcggctgtctttaaaaatagtgaaggtacttggcataaagtgggcagaagttgggggccgacttttggtaattggttatgtactacgttaggtatttatcaaacgc

SEQ ID NO: 95157 - DNA, 453 bp, Glycine max
taaaaatattcattcaagctgaccctgcttgagcctaaaaggattttcttgtcaagagtcaagtataatttgaactagtcaattattattccaacttttgtatttgtgtaatggagtcttctaactagcttgttgatttataattctttttttacttatctgcataatcaaagtccaaatatgtaagttttaaattatttttttatttattcttcataaaaaaattatttaatttttttccttaaaataataatttatttaatttataaaaaaaatataagctatattaaaatatttaaaacttattaaaaaatataagttctaaatatgcaactcctttaaatatttagaagaaaaactttatgattcataatgattttatttcacttaaataaaagtatctcctataaaaaaatatatttgatctctacaaaaagatatttgattaataat

SEQ ID NO: 95158 - DNA, 392 bp, Glycine max
ttgggggggggggggggcgtttgtgaggagaaatagctttgattgtattttgagccacaagcagtgtaaaacttgtactaatagtggtataagacacagactgttgtataggacatttagttttagcaaggccaacacgttggttgggtagccttaacactaacaatgggccaagtaatggtgtaccaaatgcaggacctttagaaataggcggtttgtgtcgtcggagaattcctaaattagatcagtgattagatcttagcataactagggtactattactggggcgcctacaagagccaggccgaccgaataaggcacaacttgtagccgggttaattatactagttgtagtgcgtgtattagaaattgtagtacgctgtatagcaagc

SEQ ID NO: 95159 - DNA, 431 bp, Glycine max
gggggggggggggggacatagctaagtattataagtatagggacggggccagggaagcgaatggcggaaaaaacgtacacatatgatggagtatataaagggagaaacaagcataaccggaactataaacgtactagtagcagtaggagatatcgaagggtggtgggtggtggcggtggcgataacaagcggcttgttaagggcgaatagggcgttgtaattataataacttcagggggcgctacttgcgttacttttgttgcatgccgtggccagcaggggcaggcggcagcctgtgcttggccgcgtacgcgtacttacttgggcggggagagtgtggctgaggcacaacaaaatggttgttatcgggacagggcgtgggctatgacgggtaaacaagggcagtttagatgtagtacttacgctggcct

SEQ ID NO: 95160 - DNA, 392 bp, Glycine max
ttgggggggggggggggggggggggggggggggagatcacggcgtcagaggagaaagcgcgaagctacaggtaaccgcaagctagttaacaggacactagaaaacctcacatggtgtaaccctcaaagtgcctgcgttaccataaatgggggaacggcttttttgactcgattggagggactggatgccttaaaagtattaaccccgcttggctttgccttacttgtaaacggcaaaagtactagacttaatagactaagttgactagctggaagtgcacttaagggtacgtgtgtgactggcgtgctagttccaagcgaaatcttagttggcagactgttactaaagtttaaacccgtaaacaaggggttggtacccgacttggcggtatt

SEQ ID NO: 95161 - DNA, 436 bp, Glycine max
ttgggggggggggggggggggggcagcaatgaacaaggctaggtaggaacattagataagataagtaaaaagtagcgaaaaggtacggaaaacaacaagcagtacacgaataaaagaatttacgaataatgcacgcgcgatccgatacgatactgttgtgacgcaaacgcataggggcacgcacaataacagtaaaggggggtgagtttctataagatagggagtacaaggctaaaataaagatatacaaatgaaatagatatatacgaggttacgaggcatatagtgtgaatacgacagctacgactgactaaccgcaggcaacaattgcagagggacggagagacttacaggctggtaaactgtaaaggtggtagtttgaactctaagtgtcctacttgtggtggttgtggtcgtcactataaacgatgtaggt

SEQ ID NO: 95162 - DNA, 404 bp, Glycine max
ttgggggggggggggggggggacccatagaaccaagaatggtagggagcgggaaggaagcgggcaaagatgataaatatatcagctggaggaatagtatacgtgggagagctatacgcttagtcatatgtgatagacgatagatataaaaaacaatacatgacttttacacttgaatttaatatataaaaaggccttagggcgctaagggcacctttggcaattagcgcgcgggagactgggcaacggcctaaatttaccctggggctaggaataagctggccctagctactgccgccgtcactaggtgtaggcaccaagccggttattggaggcctagtaaattaaatgcccgatttgggaattggttttactatcgggacactgctgacgcgacttaggttt

SEQ ID NO: 95163 - DNA, 392 bp, Glycine max
ttgggggggggggggggggagcaggcatataaatcttggtaaatcctaaataagggggtaggaacaaaatagtggggtcagggtagggcttggagaataaataaatggcgcagtaaccaggtgtttgggagagttaagttacgtaaagagttgttagttataataaagagctaacgatgataaacagccccttaaaaccctgatcaaggtactgaactgatagcgaacacaccaaacattacctagtaaaagctcatggtagctaaccaagcgatgcttggttggtagggctgatttacggaaaaatctgagatatggtagataatcgagggagggggactattgtgcgttactggtgggctagttgtagcaaagagaaacttaaggcgcgt

SEQ ID NO: 95164 - DNA, 418 bp, Glycine max
tggggggggggggggggggggattgaggtaaagtcgtagaagtattaggctaatggagggaggatacgataatgataacaacactgagcctaaaggaaaacaaataataaaagatcgggggaaataaaaaacttggttactagttaggaatgtccataacgtgttaaaatgacacagcgtatcgggaatgggaaagtcaaagtggttaagcgctttacaaatgggagtggataggcagtggtggctaacctttgttatgcgtaggtgaccaatgaatgcctaaaaagggtaaggaaataatgcggtgttatgggtagtactgaagcagtagtggagggaaaaatgtcctggctgtcccaaaagatgttcgtaaggtagttgggcgtatttacataaaagttgtataggggttcagcgt

SEQ ID NO: 95165 - DNA, 382 bp, Glycine max
ggggggggggggggggggggggggggggggggggggggggggggggggggggggggggggggtttgcaacaaacaacaaaataattgggtaattggggatgcccaataagatttagaatatgggataaaaaggccctgggggaagttttgggaccagttaataagccctttagcagcacccctgtagggggttaatgtacaccaagaggggaccttggataatagcccgcaaaaagacctagatgccccagctacgtaatgaaaacactgcattccctaattgtttgcagtaacgaggcccgcccttagggaacccccagacggaatcatgcaaaaacttaccgttactgtcacaaacaactgttgggttactagttggatt

SEQ ID NO: 95166 - DNA, 348 bp, Glycine max
ttggggggggggggggggcaaaaataaagaactggatcgtatatgtaaggtagtggaaaataacatgataacaataaatacaagcatggcctaagttagccgcggtattagaggtattaagcgctatagccactagatggagggagcagaacggaggaggagcctgacaaaatacagacaaaaacataaatggaactagaattattggaggaatgattagctagtataggaagtagctagcacggaatgtagccgctactgccgctgccaatatggttattatgcttcccaagcccaattgtagaattacccgggcccataaaacgcgtagtattattaccaatagaa

SEQ ID NO: 95167 - DNA, 433 bp, Glycine max
ttggggggggggggggggggggggggggggggggggggcaaaccaaagataaagaggagggaaattaaaaagacacaaggacggtgaggtggccaagaagatagataaagtaagggataatcctaagctgcacaacaggaggcacctaaagcaatgctagagaggtgaagataagctataacacgatcagaccagggtgatacaaattttcggcagcggggacaataaatcgactgagaggccaaagacaagcccagaatcggtgaacgataagaaggggagaccatatccttaaagtagtggagccacggcaaaggcgaccaaggcgaggcccaaggccaaaagcgacaacattcgctgggagtacagggcccgcaacgggaccaagaccggggtgcaacaaacgtgtgcctggaaaaaagcatgggcctgg

SEQ ID NO: 95168 - DNA, 289 bp, Glycine max
aaaggctctctctagtctcttgttcagatctcacctatgccacaattttcactcagtggtagcctctcaaaacgaatattctttgcttaaattttcataatatttttatagaatcactatctttttctttctccaaccgccactgcatccgatgctgtttccctcatcatcttgacggcaattttgctggttcctcaccaaaagttcaagacttcaagaaatggatcaacaagttgagaggcagaagcgtagcaaggagatgaagaggaagagtagtagtcaagtgaac

SEQ ID NO: 95169 - DNA, 375 bp, Glycine max
ttgggggggggggggggaacattggacaataatgttgttaaagggttaaaggcgggagttagaagcaaaacaagcagcgaaactgagcgatgacgaggatgagtattacaccaaacagaatacaattaaacgcacaatgcaattagggaggtagttggtgtaaaagggttgaaagtttgttagaacaagctggcacgtgaggaattaggggccggccgcgtattaagtaaacgctggctaagcagccgcctcagcgtgagcggtagttaactttaactatgctataatacccgaatagcgcataaatagctattgcttgagattgtccaatagctatcggctgctatcatacccctaatcataatagagtaggaa

SEQ ID NO: 95170 - DNA, 436 bp, Glycine max
ttgggggggggggggggccgagaagaggagataggcagagggacgcgttagccggtgtataaggatcacggatagacaatgggtatcaaaaaaaaaacccaaggatacaaaagtaataaacttggaaattggaggataatatcatggaggataatattatagccgcataaggggcgcaagggtaaaaagctttggggcatcaaaagagaagggagtacctaaattgcagggagtgaaaacaacagtatagacgggaataagccatgggttataaagtctgaacataacaggtatagctggggagaaagaataatgacaacagaagtcgcctggaaggaaaagtgtaacgccacgactgggacgtggcctgaagttaaaccgggtacgtagagtaagaccgggagggcagccagggaacaagcaaaaacaagcaaaa

SEQ ID NO: 95171 - DNA, 338 bp, Glycine max
tggggggggggggggggggggggggggcatctaaccgcacgccgaaaatgacttaattaaaaataaaggtaactagggagtggggaaacgaggggtcctattaaaaagataacactgccccaactggggtgtaatggttattgcggagaaaaatgggaacatgttctggaaatgatatgatgctgtagtaggtaggctgatctaacaatagtgtgacactgtcgtagcacaagtattagttgttgtcttgcagctattattattgcccctgttattgcagtgtgcagagatactatgcagcaggcccggctaaatactggctattgtgggcactggtg

SEQ ID NO: 95172 - DNA, 432 bp, Glycine max
ttgggggggggggggggggggggggggggtgtaaggccgctaggagaggacaagcgcgtaggggtccgggcataactggggaatgataagtaaaatatatatatagtcggacgtagtggcgaacgctcgcaaaagcggcctagtatcatatgtgtagcacggggttaacaacaggaaggaagacacaaatatgggctgggatgcgggggctagacgaatggggctatagacggtgtattcaggtccacaggttgtgggtggcggaataaagttataagggggtgggcggaaggtttcaactaagcggaaggttgtgattactaggccgtgcgggtttattggtctcggcgcgaaaatcttcatcacgccggttcaagaacgccacgacaaaattcctccgcgtggttcttcgctcctcttcttactcgtaga

SEQ ID NO: 95173 - DNA, 481 bp, Glycine max
ttggggggggggggggggagagacaaggggacaaggagggggggggagcaaagcacatgaaagggagagcaacataagaatgaaggggaagaggagggtgacgggtatgtactatgtgactaaacatttggttagtagcaggtagcccgaccttgaacaatggcgggtatagagtacatagcgggaccttgaagggtgaggttggtaacaagcaaattatatggttacagagcatggcggcgtgttagcatgggtagggctattgcgggggtggtggccttacaaggcaacaatgtgtttagtgtaagtgttaattatttagtatggtgtatgggaccaaaggcgaaggtggcgaactcagcaggcttggggaacggcccagttaaataaatagagggacgaggctgaggcttgctgaaaatattgatgcagaatatgcgaccagccgacgcaaagttatgcctaggcagtagtggcaata

SEQ ID NO: 95174 - DNA, 231 bp, Glycine max
gttttctctctcaatctctctctgtgtttgctgcgaaatacgaaattaaaaaaaaaaccggaagcttttgttcgctggttaatgattttaattttattggtctcagattaacctttctctttgcgaatcctattgattcaacgtcgattgtgaatctgagtgtttttactttgattcgattcgatatgaagcgagcgaggaaatccaacagggtttcgtgggctactggag

SEQ ID NO: 95175 - DNA, 426 bp, Glycine max
ttggggggggggggggggggggggggttggcacattgtaataggatgctatgagctggccgtaagacactagatagaaggaaagcgctaaacaagtacggagacaggggagagacggaagaacggcacataaggtaatagttgtacaataactatgtggttagggcccatgcaaagaaaatatgtttttatgtgtacaattaccaagaataaaacagaaaccaaatcccgcagccattagaattacagtgatggttagtaggttgacttttggaaagcggcaatggggcgccaatcgtaaacgtagtaaacgtagagtgggcgtgtgtgtggttacttggacataaagataatgcagtctagcaaagggcggtcgtgcgtctacgaacgggttggcacacgcttaggaggtgggccaggcagcaag

SEQ ID NO: 95176 - DNA, 418 bp, Glycine max
gagaaaactggcaagtctgcattgtctgcatcttcaaggaagggccttggatctgtggctgggaacaaagggaaggtaaatatgcgtagtgtttcacgaccgctatcggtatcatcatatgtttccacttccaactcttcccttcgtaaacaaaataatgctgcttctaagtccaacaaaagaggacatgatcatgaaggtgagaatgtgaagatggggtacaaaatcaggccaaaagtaagcacaaaagttggtgcagcaaataaatctgttcttgcagctcggaaattgaatttcaggagaggaaaagtgattgaacttcagcctcagagcaacgacgttccaaggagactcaaattcaggccggcacgcattcttggcgatgacatgaggagagacataaatagtgcaagaaaaa

SEQ ID NO: 95177 - DNA, 433 bp, Glycine max
tggtggttcacatcataattcaatgcaaaagagcaatggttataaagaggaatgggaatcatcagaagaggttgctgagcagattctaaaggaaccaaattctagattcttaacgtcaggccataatgatgaccaagcttgtgtctctgaaaaggccactggcaattctcagcagagtaatggatttggtcagactgagagggacaatttaggggaaatcagggtaattgcacctggaagtattctcccatcgacccctgacacaaaggacagtactgaacccaaccagggaaatggtgaaaactcatcgcgtgtgtttggacttagtcgtagattactaataaatagctttcagcggaaagtttcttttgatgaaaaatctgaacattataattctctgaaatctgttatattggaccagagtggacaaaat

SEQ ID NO: 95178 - DNA, 491 bp, Glycine max
ttgggggggggggggggggggggcaaagcaaatgctatgatatggaagaatacagaaataacagggaggtatatagcgcgatagataataaacttgtaactaatggtatggtaacacctgaaaaaatagaaaccatgatgtcgcgagcaaagaggggggggtgggaggaaaaaaaatagcgtagcgagtatgttacggagtagtagtggtattagtagtatgtctaataattgcatccaggctagggcttggtgttaaaaggctgcgaatgggcatcgggctgcgccaattacgccgagtagggcatgggttgcagatgcgcccttggaccggcaagcttgcaattaagaaagaaagcctaacgtaagctaaaacggcatgataaggaatagcagggaggggaagcggctgacaatagcggtgccaggcagggggcgtagtaagggcgaagggacaccatgaaggacagtgaaaaaaagaatgaacgaggg

SEQ ID NO: 95179 - DNA, 338 bp, Glycine max
ttggggggggggggggggcagttaaccgaccgagggcaaggagggcgggggtgggcgggtggcgaaaaataaaaataaccctagcgccgcgcaccagaaggaacctggcccgatcgatcgaccgcaggaggtaggcgtaaccgcagaggttggggggacttgggctgccaccttcgaagaattcaccgattatggcatcaatggttgcacattccgcctcacagtccgccgcccaggcgaacacaaagtttgcgaccttaactgcataggcctcgcgcgcaacccaatcgtcttcgggcagcctagtggaagcatcgctggtggccttggccgctgga

SEQ ID NO: 95180 - DNA, 339 bp, Glycine max
cgcagtttgcctcaccggtgtgtttttcctccgggagactccccccgacgtctccgccggtgatgacgacggcgaagaggtaaagtacttcggcttcttcaacgtggtggcggtggcggtggcgctttttctgttggcgtatgggttcatccccagccctagcatgttggtgtcaagattgtttgtggcggttttggtggtgatgctggcttcgccgttggggatcccggtgtactcgtacttgaagggacggctcggagggggaaatgacgtggagaggcagaggctgaaggagccgttgcttcagattccggagaaggagaatgaaggcgtggtggc

SEQ ID NO: 95181 - DNA, 456 bp, Glycine max
ttgggggggggggggggggggggggggggggggggaagaagaatatactcgcagaggggaagtgagtaaaaaatgtgtatcagatgaaagatatggaggggtagagccaataaaaacaaggtgtgtgcagtttatagtagaaaaaaaatgaagaagaatacgatagccaccttgaaagccaaggaaaaataaagcctttgttgggaggccaaaaagcacggggaatgagtacagaccataacgtattggctgcatccagatgcacagagtatggcactagaaacggtagtaagtttaccaagcgtagattaggtgcaagtatgcttgagggcagcggttgaaccagggtggccctggtggctgtcgccaaagtggccgcgaaagaggtggccggtgcaggcataatacaagcgtgaacaacaagttaataagctagctgttacgtagcataagaaa

SEQ ID NO: 95182 - DNA, 417 bp, Glycine max
ttgggggggggggggggccaacgccgataaacccgaaatgcgaaggtcgggaataagacacgcaacggataaggcgctagagagaagaattagacgatagaagtagtggtccgggtgtgggtgtttttatgagttcgtcgtgtgcgggcttgcggcccggcgcgatatggtgggtgatgggtaaactactaagacaaagataaagcaaagaaagtcaaaaggtaaaggagatacccaaaaaaagtacaaaagatgcaataacaaagtgataagggcgcttcttaacgtaaactaaaggagaatacttgatacacctgcgtaaggtaggtggctatcagttagagtgtgctagaggaggcattctatatgaacacagagagggcgtgtgagggggaaagctagagttatagacaagtg

SEQ ID NO: 95183 - DNA, 334 bp, Glycine max
tgggggggggggggggggggggggggggggggggggggggggggggggggggggggggggggggggggggggggggggggggggggggccccctaaaacccaaaggggaaaaaaccccaaaaagaaaaacccttttgcaatccccaaggggcgggaaatttttaactggcggttccaaacaatttttagacgccccccaaaaaaaatcccttaataaggaaccccccaaaaagggaaaaaaatggttttttaggcccccgggctaaatttaattgaataaatacccgcccttaaaaaagggtttgggggggccaaaaattccccccccgaaaaa

SEQ ID NO: 95184 - DNA, 342 bp, Glycine max
gggggggggggggggggggggggggggggggggcccaacaagtaggaggggtgtgccccattaggtagcgggataagttaccaaaagagaaaaaggaaaaaaaagcagtaacaaaaaaggggaaaaaaaaagaatgagtgaaaagggaaatacctatttcggttgacggttcaggggtgataggtataagcctatcacgagaggcaccgaaaacttttaaaacaagcgctgagagagaaatgtgacgaaaggccaatgcatttgaaacaagaggccgtagattatctctaaaagcataaaaggtaccctatgataaaattataatattaccaaataaataat

SEQ ID NO: 95185 - DNA, 426 bp, Glycine max
ttggggggggggggggggtaaaacagttaggctattcacagcacgttgagatctggatggcataagagataagataaaatacgagtaacacaagcagagtaaatgtaatcgcataaaagcctgggtcggatgggctgattgcgccaatagagaaaacgaaaacaatgagagaaaggaagttactgcaccaatttaaaaaggtacagtgcccttaaaataaagaccaaaaatgcacgaaaaaaaagtgtttgtagggctgaggatctgctgcgcctacaccgccccctgtggaatgtcaggggtgagttgggtgggttctaagatttaaatggaatagatggggcaatttgggaggggtgttataaaacaaaaggtcattacaattggaaacaaggagcggggaccgtggttggaggtggtaaggta

SEQ ID NO: 95186 - DNA, 416 bp, Glycine max
ttgggggggggggggggtacgaaagaaagaggagggacataggcccatatgggataggcaaaagagtggataaagtgaatcaacaaacttaggtaatgcctaaattaccatgtataacctgcaactataaaaaaagcgacgagcgtaaacgcgcatgggatatatataaaggtcctaataaaaccttatcgggtgggggggccgcaaaatcaaaccttatcgtcagaggacgtatgacataagacggatgtttgttttgggggtgaaggggcgcagcagatagggcgagtaggaaaaagagtggataaattgagcgtgtgatgacaacctaataaaagtatgctaagataataaggcgaagaacaagtactgcaaaaagataggcgctgtggtactgggtgaatagaaatgagggg

SEQ ID NO: 95187 - DNA, 439 bp, Glycine max
ttgggggggggggggggtataagatggggttagagacaatcaaaggatcagaggaaggacatatgatttgcatacctggtgaggtacaaacaaaacaaaaaaaaatttgcataactggtgaagaagcattatatgacggcaagttggcactttgattatagtctgaattagacaagacaagacaagaagagtaggaagtcggaaggggttattagctagtagaatagagaatatcaagaagcggaaacatcgacggtacggccggcaacaaccagcgcttatggaggcgaaagggggcatatgagggggcaggtggacccagtaaagaatatctagcagtctaagtaaggaaatttattatatgcccagcagcagcacaaagaacaaattttagtacagcgacaactgcgtttaggtcaagtacataatagggctgcag

SEQ ID NO: 95188 - DNA, 458 bp, Glycine max
ttgggggggggggggggggccaaacgcggaaaacacacgagtaaaggtgtgggaaataggctagtttcatggtaataggctgagattgggtgtaggccggctggtacataaaatgagaggaataaataacacatagttcaccgggaaaggcaattggacgttggaacaacgatatgaagttaataaggaggcgcagtagagaagtgatatagaaagtataaaccgaactatcacccagcccagtagacccaggacccaacaacaacgtagagataggggaacatttgccccaaaatggacgcctagacatttaactaggcggccttatacccggcgtgaccgccgttaaaaccggtgttaagccattggggttacgcataagactggcaataaacaagttaaatagacacaatagccttaattggttaggtggcagtgttggcatgggcactgtacta

SEQ ID NO: 95189 - DNA, 269 bp, Glycine max
gcaaggataacaaccttctattcattcataacttttttgctttactattaaactttatacacttgatcatcacatgacctacttcattaattcacacataaacccttgaaaccctcaccttgttgacagtaaaaaacccactttaattggccagaaccagaaaaattattaagttgtccaagatcattatgaaactcacttaacctctatatgacatattggagtattattaattggaaaaaaaacttgactatctgttacaaaaagat

SEQ ID NO: 95190 - DNA, 394 bp, Glycine max
ttttcgagactctgtttactgtcgttcagattcgcattgaagcaataagcaatggtaactgcagcatgtcagtcaggacgtgtgagtttcaaacatccttcttctcatttccacttacctcaatgtccatccttgttggacttgtgcatccgcaaaatcactcacactctgactcgggaggacatacataaatataacactttttctgcactcccaccggacttgagtcagcgaattttcaacaatatggtttactcctcctatctcacacctgcttccctccaaccctttcgagattctgccctccaggatatttgcttgggagaatatgaatatgcaaatggtggtggtgctgctgctgcaattgtggatgatgcctggatggatgtcatct

SEQ ID NO: 95191 - DNA, 197 bp, Glycine max
tcgcgagcggccgcccttttttttttttttttttgaagaaaaacaaaaactatttataaaaggtttcatacattacatagaacaaagaatgccgggatatacaatccaacaaaacctatgacaagttttcacctacaattgataaagaatctattgatatacaaccgtgaaaaaaaaaaataagaatacaatataag

SEQ ID NO: 95192 - DNA, 490 bp, Glycine max
acaataaaaaccacatttcttgcttaatatgaggttacataaaagtaatgtacctcagttctcatatggcacattctaagcacacaaaaaaaaggaactatgatcatttcaaactgcacaaaatgtttaagatacactcacaccagaaaatatgaccttggaagcaagcttgtaatttgagaggacaaaactctcaagaccaattctagcatagaaaatagattgtcctctaagcatgaagaagagtattagctagctagaaaaatttacaaagaaatactatataagcagcacattgtccactccagatccaaggccaagcaatctaacaggtcttattaccttaagaactttagaatccactgtcttaactgcaggtggcacggggaacgctaaagcacaatttggaagagggtgaattagcaccaccaccacattcttcacaatctcccttgaaatcattacatgatccatagcttaagagcttctt

SEQ ID NO: 95193 - DNA, 513 bp, Glycine max
gcaacacgtatcactgtgtttggaaagttgtaaggagcttttaggcaggcatcgtggagcccttttggctctcaatcatgttttgggcagaacaattcaagtagcaatccttttgctcttaagccatttggtagtacaactccatttggctcgccaattgattttggaggttcttccactggagttgctcaactgtcttctccattcgcttcaaatacagcattcagttcttcatcgtcaccagcttcagtagttcagttccctctttttggtcatcttcaactcctgattttggtagttcatcgtcatcatttggtggatcatcagtttttggtcagcagcctgcttttggaggctctgaatctacttctactcaaacaggaccatttggtgccacccagccatcacaactagcatttggaaacagcatatttggtttctcaacatcttttggtgcatcatctcaaccagcatttggggcttcaagaacattgcatttggcacttcaagcac

SEQ ID NO: 95194 - DNA, 382 bp, Glycine max
caggatacaaagcctacagtgtcaatgctgccccttcgtccagtgaatcctgttcaagcaaatgtgaacattttgaacaatctctctcaagcacgacaggtgatgaactctgctgccttaagtggtggaacctctatgggacttccgtcaatgggtcagactcctgttgccatgcacatgtcaaacatgatatctagtgggatgacatcttctgtacctgcggctcaaaatgtattttcatctggacagtcaggaataacatcaatgactagttctggacctcttactgttcctgcacaggttggacaaaattcaggtctcggatcattaacttcgaacacttctaatttgtcttcaagttcgaacattgggatttcacaac

SEQ ID NO: 95195 - DNA, 483 bp, Glycine max
caggttgcttatatatatatatgggtcacataaaaattcttttttgcctttcttggggtgattgttttgtattgtttctatgagttttaaactgtggaccattgttttgtattaggttgcatttactccgtttgtgtaaaacatgcaacatttacagcccttacatgcttttaaacaaagcaaaaagcaccgaataaagtaggttctgactctgcatgctttcttgctcttgggggtggtattaaaggcatacttttatagcatgtcattgtttgaacacaggaccagtgtgcgatgtggggctgctgctttattcatctttttttatttttatttatctcttattgatttttcggaaagggtcttctaccttcctagtttctagtggaagataaattttggtgtcttgggtttaaatcaattgccttttagttaaatagtcacggttgtagtgagttggctcctttatgataatgtgggctc

SEQ ID NO: 95196 - DNA, 255 bp, Glycine max
ataaaacacaaatgaaacacactattattccattttcagtacatatttaatttctttttacttcaaagaaggaaacctacacaaactttatcttttgtaaatggaagagatcaatacacaatgatatagtcaattaagtatgcatgaagaaacaccaacgaaacccacacggttgtcatatgatgaaatgaaacctaagcactgcacaatcatgcatctgcaaccaaccaaaaagccttgtctcaatcttaaata

SEQ ID NO: 95197 - DNA, 135 bp, Glycine max
agaaatccaccaatgtatggtggtaattctcagcaaggctaccaagctcgggcacccactagctggggtcccactgctgctcctatgccacaatccggttatggctatgcgcatacagcagcatactatggtcca

SEQ ID NO: 95198 - DNA, 383 bp, Glycine max
gctgaaaatatatttaaccttaacaaaatctttcttcttgcacattgggtctgagtttaaaaaggaacaatgggattaaaagttatagccaacaataaagtatcatgtttggttagtggcatccttgcttggcctgcatgccatcagtgcgtaaactacagtgtttttttgtcacttaaggaagaaatcatgaaactggtaatgaagtccaatcaaccctggtccaagaagtataacaagtgataacttgtttcaaattatgtacttgaaatcttagagaaagcctccctctgtccaagtgccatctgatttcccattatgaccaacacctttcttattagatgcaccttcataataattatcgaatccatcatctttggcat

SEQ ID NO: 95199 - DNA, 333 bp, Glycine max
agcaagaacccttcttacattaattgaattggaaaaagaggttgattggggttcacatgccttaaattacatcatatcatgtcccctttataaaaaaagttattccaaaaagagcgcgtaaagatcccatccccatacaaattctccaggctttcctccaatggagccatccccccttttttatttaaacatccttggcaatgagggcgcccctgatgaattctttttaggcagcaacgggccctcttaaaccccttaaaagcaagcgagaagcccaaggaacatcgatgatgacccccctcatgggggggtttttctcggccctgatcgcaa

SEQ ID NO: 95200 - DNA, 429 bp, Glycine max
tttggaagatagataaataaaataggcttgtcatcgtgaggaatcagggacaagtaattgaacagatgtgggtagaatagaatcacctaaattgataaagaaaaatcataaattcatgcatcctaggcaaacaaggcaggctaggtcccaaccttatcaaattttgattttattttatttttatcttctatttttatcttttaattttattatcttatcttttatcttctattttctttatcatatcttaatttaaatattttatcttccctatcttctatttttatctttaaatctcttatcctttcttttaaatctttatcttatctactatattttcttatctttattttaaattctttatctattgcttttaaattgggtttacattaatctaagtactaacaaagtctatgtggattcgacact

SEQ ID NO: 95201 - DNA, 646 bp, Glycine max
  unsure (1)..(646): unsure at all n locations
gattcatcgtgtccttaaaataaaacttttgaattcaaatgagatctaattagtaattaccttatatatatatatatatatatatattgaccaattaacaatctgccacttttaaccatgatcattatttatatatatacgtacaatagttttgggcactggcgatgggaataaagtagtggtccactgctacatgtatgaacttagagctatgattaatgtcaatgaagttattacttaaaaatgttaatacaaaattgaggcagacttcattccttttttttaataagaaaggggccattaggattttgaacttagaattttgttcaagctgctctttccatttaggtcgatcctagtgaatttcaaaacttatagctcatttctatatactgtctattatagtagacatacctgttttaccacacaatatttaattctaattctcttattccatgaacgaacacactataattaatacatgactntgagaaagagattatgtgttaaaattctcttactaaccagaattaaccattnnatattatcaatcanaagaagaaattanaaaaatcaacctcagaatcttcattgtaaatatttatatatatatagatatatatatatatatatatatatatatata

SEQ ID NO: 95202 - DNA, 364 bp, Glycine max
gttagaatatctaatacactaaactaaacattaatttgaagcaaaagtattactcatcattttcaacaattataaaatcatttaattatataatacaaaaattaacataattaatgagagtctacaaattttctctaaatttacattactataaaattgagaattcttgaacttataagcaatttaaaagtatgaagggaggaaaaaaaaagactaactagtagcagcatcaacaaattttccatcaaataagagttgggatgtgttctactttaactagtggtttaattggttcttcaatggcagcagcagtgctgaatttactgagccctgcaccaagagcaccacttccacttgaatatca

SEQ ID NO: 95203 - DNA, 485 bp, Glycine max
gcaacttgcatcatcagcgtcttctctttttctcagtttctcctttttttttaaaggtgctgcaagcatacgtgtgattttctggcacaagaaggaaaaagaaaaaaaaaaacaacgtggaatcgcaacgagataaggtgaaacaccaacgttgtgaggtgtgaacaaagtgggctctgttatcaatatcatcgggtaattgaaactttttagtggggtttattggtctgaagcttgttggagttgggagtagttgaagatgagaaacgtgcttcgttctctgcgacatttgcgaccagcctttcagaggcaagattgtgtattgatcagtgttaatgttgcagaagaacctccatgtcacattggaaagagctgtcatatccatagttcagcttcagagttgttgatcatgctgagaccaactttaaaaaccatttgtttacaacaaccacgaaacctctctcaaatgatgctgcaaaactcac

SEQ ID NO: 95204 - DNA, 420 bp, Glycine max
gaatgctgattctccaaaggcacctggctgccaggatcttggcaatatgggaaatacaaattcgtctggtcagaagcctgctctgcatggcgacatctcagagtctaagaaattgacaagtgacttgagagcaccttctgcaagtgctgttggagttgcacattcaaatgaaaagcttagaactgtgagttattctacgaagaaccaaaacggatttactctcccaaggatcttagatgaaagctcaggcagagaaggcaacaactgtgataacaataaggttaaaaggactagtaagggtgtcaaatctatcagtgctgaagtttctgggaaaggaaatgattttattaaagaagatgagccaattagtttattgcctcaaaagaggataaatgaagcttcttttactaaattaaaatc

SEQ ID NO: 95205 - DNA, 199 bp, Glycine max
attcaaaggttgggttttatttgaaataaaagggggggcaagccaagagaggatacaccaaagggggcatacaaagccaaaaaactaaagtgtaattgtttctagttccaaatacaattatattgccccaaaaaggattcttttcaaaaaaaaatcccggggcaaagccattcatcgaatcaaaattggggaaggcccc

SEQ ID NO: 95206 - DNA, 363 bp, Glycine max
cggccaaaaatttcattagggatagtaaaaagcatcccattcaatacaaaataataaaaaagctgacagaagctaaggggggacaaagcaaaattaaattaatattgtcaaaactacaaaaacgatgaatccgagatccaaaatcacaacttgaattcgcaaaaaccctcagacagagcagagccttttccctttgcaaaatcatttttgggaagcttccatagggcttgcttaaactcctttccattaaaaccctggggggttaattgtgcaaaacctcttctgctaaaaaatagagtcttggacaaaccattgaaagctctcattggtgaaaccattttatccatattcccaaaatatggg

SEQ ID NO: 95207 - DNA, 249 bp, Glycine max
aaaggaaaatttaatgttataaatctccgatgttgatggacaaaccccgcagtgcaggtgccaaaaataataaaagaacaaaatcatgacaaatcaaagcacacggagaacttttgtctctaaatttgcaatacacgccttcctgaaagaaacgaaaaaggtaaaacaaatgtgtaacttattgttttcaaagttcactgaatagggaaaatccagaatttaattttcttcaacatgggggcatgtctg

SEQ ID NO: 95208 - DNA, 164 bp, Glycine max
gataggaggggaaaaagcttttcgactaacaaaggctaacaatttgtaacaaggatagacgatggtatgaccattacataagcaaagaggctcacgttttacaagccatcaatgattgcaccttgaatactcacacgcctaaacactaatccattatgtttact

SEQ ID NO: 95209 - DNA, 407 bp, Glycine max
acatgctagcaccaaactttgatgcaaagccattggccatggctttaattgctgtaaaagttatgttgtacagagcaaaggttgagaacgatgtatataggacgacattacttttaaattgctagactcgttattgacatttttcctgcccttttgctgtcatcaacatcatgatgattgtagtgtgaattagagtaaaatgaatagcgacaaaatctaatctaacttcccagcattgtctactttagcaaaatgcaacgtatgatagctttgttgcacctaagaaaatagacaacacaaaattaatgcatccttacgatgaagcttgattcagcagtcaatttggctttacaaatttttacgaagattgggaggtgctcaaaaccaagcttttgaggtccagcatt

SEQ ID NO: 95210 - DNA, 407 bp, Glycine max
ttctgatttctgaaacttactccatacatgatcggcgacaacatccttctcagtactcactactcaggtcagatttcaattctcccttctatttgtctctcttcattaatatcctttgactttgttccatggcaaataaagcttccatcttcggcacaccctactcgattcctcagatgggtttatctctcttcaagctgtattgcagatatttcagaaacccctggaattcttaagcccaaggattcatctgaattcgaccaaaacctcaactttttgaaaaataagcttgccccagataacttaatccgggttctggaccgtacaagcgatttgaactcggcagtgaggatattcaaatgggcttcaaggcagaagagttttcaccacacttacaacacttattt

SEQ ID NO: 95211 - DNA, 250 bp, Glycine max
aggaagggttctaaaccggggattttttattcacttcaattcaacatatatgtaaagggcaccctcccagattaaatggcaaacatttaactttaaaggaagacattacaaaggggagggtacaaaaagattgggaagacaatgaaacccaaaaagggggcctgggtccttaataatgactgttgattttccacaaagcttactgtaacaaaaagtgtgttaacggaaaaatttcctccatttacttccc

SEQ ID NO: 95212 - DNA, 456 bp, Glycine max
gaaattgcaataacactatagcactgtggaatttaccatgtaaatttccaccccatcaaaattctatttgtatcactttgttggattgtaggttacaatgaaatcttggaccacaggagcagacatgtcctgatttttttccccttttttggaagggaggtgggggtgaacatgttgaaaaaatatatatacttacgtaaaaaaactatatacctacctatgtctatgtacaacagacataacattatttttccccgctctctgtatagcatgctatatatagggttgattgatgattcaaaggcccgttgatcattgacgtgcaagatcttaaagttgcaacattttccgactctgacttttcaatgcgatgctacatatctcacagttttcctgctaatcaggctagctcctataagcttcatccgtgcaagagcagatgcctcccttgaaatg

SEQ ID NO: 95213 - DNA, 384 bp, Glycine max
gttagccacatggggatggtagatcggcaagagcaacatattcagttcctccttaacattcttcatcccacccaaatccctaaaaattgtcacatccttccccttaacctcaacaccaccacagactgaacccttccgaagctgaaccagaagggcctcctccactcgacgccgccggagcactggccttctcccgttcctactgaacccagcaatgagacccagctgtgcctgagcctgtcccacaaaaacaattaccaaaaaactaggctagagaaaaaaaaaaagataacttctcaatctgtttttctaaactgtttttattttaaaaaatatattttctcttgagaaacaaatcttattgaatacacttatcttaaaatt

SEQ ID NO: 95214 - DNA, 127 bp, Glycine max
caaaaccatggccagaagagtctctcctaccgttgccggtctcctctactttctcttcctgctcaccctcacacgcgcccgcgatgttccgaaccccttgtccgaacccaaacctgactccgaacct

SEQ ID NO: 95215 - DNA, 218 bp, Glycine max
ggggggcaatcaaaactcaaaaagattaagggccgggcagtacattttgattttttaaaccccagccccgcctgcgagattttgttttaagatattttttcaaccgtttcctatgaaatctgtttgactcaaattgaaaaggtctccccctccaaaacaaataaccaaagcctaatacttgtggggccggtcttgtacacatattttccttttcaaaa

SEQ ID NO: 95216 - DNA, 304 bp, Glycine max
ggaaaattggaaagcctttggttcatttcccccattttttattggaaattgggggtcccgagcaggttccaaagttggggaaccccccccccccacccaaaaaaaacaaagatcccgaagatcccggggttctaagcaataaacaagttagacccccttcctgttgatttaaatttgcaacaatttaccttttttttttttttttggggctaaagaaaaccctgcccgggggggccatgacccctaagtaattttcccattgaattaggagcggggaacaaaggggttggaaactttaaaaaca

SEQ ID NO: 95217 - DNA, 425 bp, Glycine max
aaaccaaaacaaaaaaggcaaagccatacataaacacacacaaacatagtgagagtgagtgagtgtagtgtagtattgttttgtagctaagcaaaaatgagtttcaccttcaccaccatgaccttgaacttggtcctcttaatggccatggtggccaccaacatcctctccctctaccacctctcctccaccctccaatcccccaaatcccccaaaccacccccacctgtccccgaccaactcctccaccagctccacaccatacgcgccaccatcaaccacctcacgctcctccagaacactaacaacccaactaaaaaatccaccatcccctcagatctactcttatactcccacctctccccaatagcctcctcctgccacaaccaccccgaactccttcacatgtacatgacttacacacc

SEQ ID NO: 95218 - DNA, 180 bp, Glycine max
gcgatctgaaacagctgctggatcgggagatccaaatcagtcttatacgaattgaacctcgaaatatcacgagaaggttggaagccgaggttagggttttgtttattcaagcaatcgaacgatttgcattggtaatgatcccaaattacagcgttgtcagggagggaggaagggaagggg

SEQ ID NO: 95219 - DNA, 351 bp, Glycine max
ttgggggggggggggggggggggggggggggggggggggggggggggggccaaaaccaaccacatgggtagagagggagggagcgcagaggcagagacaaaagcaagaccaaacccggcgatagtacgcattatttaccaaatagcacaaagcaatgacactgaaggaaggaattttgtcgtgtaagtgtagcagccaataaggggccactggtcatcgccgcctatgcggcaggagtctacaagaaaaagtgtggaatgccacgaaccccctcctggacctagagttggcattaggttccaaataactgcccgtgtgcccacccgcgatgtagtttgaacccattgcggc

SEQ ID NO: 95220 - DNA, 404 bp, Glycine max
ttgggggggggggggggcaaaaaaaaagagtatgcaacgcatacagaaggttctaaagtactaaccaacgctagcatatagaccggtaagttacagtgaagaacggagaggggaataacacagaacaccgggatttagaaataaaggcacgactggaccagacattgcccattggcgagacataagatgaaggcgagtgaatgggcaatgatgcctacttacagcaaaagcaccaatactactactacatacaaggcatgaacacgagtatggcacagcaacttgtgtaggggcaggggcacgcactggaccagacattgcccattggcgactcataagatgaaggcgagtgaatgggtaatgatgcctacttacagcaaaagcacgtaggggcaggggcacgc

SEQ ID NO: 95221 - DNA, 372 bp, Glycine max
cacctcacccgctcatgagcattgctcatggtcagtgttcctaagttctcctcaccggtcgttacgaaaatcctcttcgagactcccagtgctcatctgccctccacgcctaagccaccctcacaatctcactaataaccgcagtcaaggcagcaatcacagacttactagtgttcaggataccttgttccgcaacaactacgatgctaatggcctctccacctgcaactggtgcagtttcagcggtcaccacaggacccatagcaataaacatctctggtttcagaatatggctaatcttcgttgtcttggtaaccaactgtgtcaagttctgagccaatgttgtacaggtccaactcaccctactaactg

SEQ ID NO: 95222 - DNA, 350 bp, Glycine max
  unsure (1)..(350): unsure at all n locations
ttcgtgcagggttcctccaccagcctggtgttcctcatgcgctatcctcctgcacatgtttctcaaaaacttaaattgtgagtcaagcggagtcctctgccatagtattccaactattcgcgtctanatcggccattaagagagaagccaacctaaacgtagtaaaaaattacaatgtcactccgctcgtcactactgttcaaacgagtcttcaggttactatctatgtcacagaagacaagccagccacagaacaaaacggaagggggttgccacgaatgagctgcgctaaggacagtggcgcgttaaaattaaccccgccagctgctccacaaggggggtctccgtgg

SEQ ID NO: 95223 - DNA, 463 bp, Glycine max
gatgattgtaattttctcttaaattataaacgattatgcagaatttgttccttatcttaggaaaaccaagttaacagtcaaatcacttgcttcacattaattgcacctacatgctacacacaattgtttttccatgatatctagtaatctagttctcctgcgcatggtagacttgagaatcttccttcattcctggatcaatttcaggagacgatttggatgcagtaatgcaacttttaatccaggaatcatcaaaattgttagccttgagaatcttggacaactcatcaacaccatccacatccgtctcttcttcatagtacttgagaaaagccccaacaacttgtggtgaaggacgccatttatcacccttgacttctgaaagcgctgcctccaagtgcctcacagcagcatccaactcatgtttcttcaagaaaaacttcatgaactcttcccgaaccct

SEQ ID NO: 95224 - DNA, 443 bp, Glycine max
gaaactgagaaaaaacacatgaccaactaaatgtgttaagatgtaatgtgggctgcgtagcggctgccaaagcggcagcaataagaggccacactagaggtagcactaccgcaggcagatgccaaggaggttgaggtgacgaaaaaggcgcaacaaaaacgtgcagggcttgcgcacccactccagagggtgttgatgacagcttatataaatagtttggccgccgctagtgccaaacgggttatacgaggagaagctagaggagcagggccgcacgctgccacgctacgggctgtaacccagtaacgccgttaagtaaagaagttgacggtataattgacgaccatgacgaagcgattaaatacacactaacttgcattgaaatagcaactacggctgtacttactacacgtttacatgcgtttgcaagtgactaggaggta

SEQ ID NO: 95225 - DNA, 435 bp, Glycine max
tgcacaaaaaaaaccaaatttggtggactggactggtggtggtgttcagtaatacgtcttgttgtgttgttggaggggctcgtcttgtcttccaaacatgtaaaatacacacacacacacacacacacaacccgttcgagaaaggacccgggtgggtattgaatacacttagtcaattgacttgtggggggtggttgtgggtctacactcactcatgtctcaaaagaacagttgctgttgcagtgaccgtctaaaagtctacaagtaggtcaggggctcaggtacagttgcagggggatgattggcttgcgcaccaatcagcgggccggtcaatttggggccctacgtcgtcgtcactttgggtcctgtgtaagtccggggtccatacattaaggtcacgactaagaagttggggcttttgaacttagggccgac

SEQ ID NO: 95226 - DNA, 209 bp, Glycine max
ttgttcggtgtatgggtgtttggtggtaagcttatgtggtggttgggtgtgggtttatgcacacacatgctaaatgaagggtgacgaggttcatttcacatcttcgtttcccgtctcatttccctactaggctttacaacaactcttctcatcttgtccttcaccaccaccaagttctgaaccctcttgttattattaagcttcgcaag

SEQ ID NO: 95227 - DNA, 255 bp, Glycine max
aggagtgatcggaacctgccgcgtgagcatcacgatagcattcggtttaacacggtaaacaataggtgtagcgatgcgcagcctttgctgaacattagtagtattccgtctatcaatggtcgtgagccgcgtaacattagctaaatgcatatgggtcttaatatgctacaacccggtaggcttaagctaagcataggttacaatgtgcttgcgctgcagccatattaagttcggctaggtagcagttagccacat

SEQ ID NO: 95228 - DNA, 418 bp, Glycine max
cctgaccgtagcggggtaaacatttgcagaccgagcagtttcagtcagggctgcgccccacccaacaccataaccgcctaccgctaggtgtagatagggtagggccaccccctacatagccagcttggccccacttagggctagagtgctacagaaaactaagagccatgtagtgctggaccaaggggcactgccacggccgcgtattggggttacacagtcaggccaagcttagccggcgcccacgcaaccccaaacgcagccgttcagagaactccaaccactgggtacggaagtaagaccattatagaaggtacgcgtgcctagcaggcgaggggaactacggaggccgacgtggggtgccggtactggtgcgtaaacggtcggcgggagggcctaagcaagagtgacaagtggc

SEQ ID NO: 95229 - DNA, 403 bp, Glycine max
gggggggggggggggcctctagatagcatatgaagttagtcgtagaaggtattaaaactaggcaaacaaaagtagataacaagagctaataaagacaaagagcaatcctctgatgtatgaacgagaatcatatggaaacaagtagaataaaaagtagcaaaggggcaaagaacaggacagacctacgacgagtggctcttctagaggaccggacggcgtcaatccatgcacagtggtataggaactacagcatcataccggagacgtactgcgctaattagtactacacccatagcgtgtaactgggcctggtcacgagagcgtcctacaaggactactgagtacgcttgttatgaagcaaggcttggcaagggggactactaagacagcgatagataccaaa

SEQ ID NO: 95230 - DNA, 417 bp, Glycine max
cgtgaacctcgttgaaacttgtagggccagcagaaccggaggcgagtagccaagccatgcctaagtgtagtggggctgaccctggtgaacaggtgtaacccgcaacggcaacccattaaaggtgatgggttgcgtcggcctatgcaactaaaccccgatggcacaaggctacaaaaactactaggtgggagggccaaatactgggataagcgccaaatgtatacctgatattagacgggtacataggtgttcgtgaaactgttgctgggtggccagcaggagctggggtgcagggtgccaggctgccagtgtgagcaagggccgccgccaaggaatgcctggtgagcccttaggcaaggctaccaaatttaccagcttggcgggtggcagaccataccaacgccagagggtaagaag

SEQ ID NO: 95231 - DNA, 394 bp, Glycine max
tggtacgtgttgttgaggagttcttattcgacttcttcttcaatccagtcatcagcaacatcattggtgcagttcgtaacgccgcttccagctccaccattattattgctgtaatctccactattatggtgttcttggtaacataaacggtcctaacattgatcttatctaccaccactatcattattctggttcgagtggtaacaataatggctgttctcttaacgtatattacaaaggccagtttgttcttcgttatcctcgtattaccggtgttcagtgtatgttcgtccacgggtcttcttacggttgtccttgcaacttctgttcgtggtttgtgcatctgtacaactgtatcagttgattcattaatcattgcttgattcagggtcag

SEQ ID NO: 95232 - DNA, 494 bp, Glycine max
gggccccaatgtgcgaggcaggatatcttaggcaagtgtgaaggtcaaggtgagtctacatttggggtcgggcgttgtgtaaacgggtcggtggggcctttccaaggcagagaggtacgctaaaaggggtgggggcttgcagaagagagcgaaatacgagagctatagatagctttgaggggccgcgggcggggaccgcgcttaagccaccctaaaagtggccaggtgtccaagtacctctagcggcgccaaaagggagtgctaacccgggtgacggctgtttggcctcataacagagttgaggttcaggtgttgtgccagcagcaccgccggccgagcaccaacaaggtgcggatgaaacacgaggcgcaggtgggggttatgcagactatgcaaccctaggcgagaaaggtggtgacaggagagttgcaaggattgcaaaaataaagccaaaacaagaatcaccatagccacgtggtactgaagtggtacaa

SEQ ID NO: 95233 - DNA, 420 bp, Glycine max
gcgccctgtgggcaccatgtgaatggcgcgcttaggtatcttaactcgcgcatgaggagctttaaccagaggtactgcctaacaaccaggtcgccgcactcgctggcacggccgctcggtgcgcgggcgcaacagccaggcggccgcctgctccagccgcggggcggatgaacggggtgggggcggcaacttgagaccggaggacccaaaaagaccgcgggatggccgacgtagaggaaggcgtaggcctaaagatgcttgaacatatgcgcaaccgtgccggcggacaaagggcctagcgagggcagggggggccagttgggagggtgtcggggagggtgccggcgctacttatgggcccaaggcgaggccataatgggtgcggcttagtgaagtgacggcaactgactggagtcgcgt

SEQ ID NO: 95234 - DNA, 298 bp, Glycine max
gttcgcccacacgagcgcaagctttgtgccggcagccgcgataaggtaaaccacagccggagataatggcgcaactaacgccatggccctcggctaacagaaagaagccaactgcggcctagcagctgtaaaagccatagctaggggtgctggcgggccagaagccaccccgtaaagcttacgcgtttatacccgggacaccgcagccgcgaaaaaaggcgtaacagagacagcaagctaaacacaacaacctggcgtacgctttgcatgcgactgctaacaagatggccccaactga

SEQ ID NO: 95235 - DNA, 479 bp, Glycine max
ttggggggggggggggggggcaatgcaagattttgataaaaaccagagaagagagcactaagaaaaacaagatagcttggttaccagctaaaactggggaccgaataacatttgaggggtgaacctgctgtggaatacaccatctgataaatgacaagaaactgatacaaagcggaatggaccaattagagtgcctttaaggaggagatggcgtatttgtgaaatatacgaatagcagccaatgagctgcaaatgccaagtatggcgactgagcacaataacaatgatagcctgactggggtgacgaaccggtggagtaaaatttaatcaaagaataagcaaagaaacacgcagtgagcgactttctagtaaaaagctagaagtgggcagggtgaaaatagcaaattctgtaagatggggaactacggggtggcgggcctgtaaacatagatggcagtacgcaggttggcagccaaaca

SEQ ID NO: 95236 - DNA, 316 bp, Glycine max
gataagaacaaaaacagtagtttcaagaaatcaggaaaacaaaaataccataatcagttataacatttgcaactgaaacttacaaacctcaggtcatggcacataatctgagaacataattacaagtaatttataaactgaagcagatgtggcttcacttattctctcccatctccacactaccaagactaaatgagaaatcaccaattcctcacagcttaaataataccaactccaaatttagacagaaatgaaaagaaaagctaaaagagatcctgttgtcaagagatcagtcactaaaatcaaagcttccact

SEQ ID NO: 95237 - DNA, 403 bp, Glycine max
ctgtgcaccaaaaaactgaaacaaaagttgcgggtttcagaaaaattttcgttcgatagccgtgccgtatctccagtcccggcaggcacagctatattctcactaccactaatcctcctcctcctcctcgctgcctcgtctccatcacggtttcgtccgcatccacatccgcaatcccgtctataacggtcgcagaaacccagatgtctgcctcaaccccagtccacgtccaaaatatagtctcactcacatcggtatccgaccacccgattacgccctcagagatggtgatttgcatcctaacaatttacaccataatgttcttgatcgtgttcgtggtagtctctgtcttgttcacctattcatcgttctctttgcgggcactgtatctgctgtcattaca

SEQ ID NO: 95238 - DNA, 285 bp, Glycine max
ccaaaaaaaaaacagtttttataagacataatttttttacaaggggggcagtatctcacccttcgttctttacattggtggcatttctaaccttttgccagtccgcacaatgggttaattttacccctgcaggagcttttaatctaccatttaggcctaacaaacaaaggatggggtcccttaccttgtcaggttttttgccctggactcctataattgttgttaacaccatcagaaaggggaacccataagctttgacttttttcaacaccattttcccaggtt

SEQ ID NO: 95239 - DNA, 339 bp, Glycine max
tcaaatcttacacttaatgtctttcgcaatataaaatgctatcttaatttggaatccgatccgcgcggtaactggtaggatactattggtcgtcgtagtggtttgtggtacaataatgttggtcggtgctgctctagggttggtgtcgacaagtagtagtaacttaacaagcccgttagagttcctttacctttactttaaccaccttaactgtgccccgcctaccggtcaccaccctcgaattcatcggcgacacaccggtattcacgtcagtgttggtcataactactgtgataaataacatagtagcccaactacactatatctgataagctgtct

SEQ ID NO: 95240 - DNA, 424 bp, Glycine max
acgccaacaaaaacaggaccacacgcaaataacaacaacaacaacaacaacaacaacaacaacaaggcacaacagccgcgggcaccaaatgcactgcacctgcccatgcccatgagcgtgtttgccaaagccagttatgctaataatgcaactgctgctgctccaaggaccacgcaccaacacacccggtgtgcacatgcaaatgcagcaaatacttattcggcagggcagctggaattgtgtatttaccaactgctgctgctgcagccgctacagttatcgcacaacttaaacatggtcttcaagcacaacatttggtgctggtttcagtttcttaacttgttgcttaacctctaacgccgcccagccgtatttcgcaacgtgggttccaacaatagcggtctactttaaaacactactcctc

SEQ ID NO: 95241 - DNA, 411 bp, Glycine max
ttgggggtgacagcttactgattggagcgggccccacgaacaaaggtactgacaaaaatgcataccttagcgaagagctgagcagggcagggcgcatgaaggggcagggggggttggtgggcggcgggttggggaaaaaccgactgcatacctgacgaaaaccaacgacaaagaaatgcgtgtgcagtaaaaggagcggcgggcccaacgaacaaaggtacagccaagaatgcatccctgggcgcagagctgagcagggcagtgggcatggagggcaggggggttggtgggcggcgggttgggaaaaatagcgtatgaccgcaggtgccgcgcaaccccactgggctaatgtcgcgactgcccgtggtgcagtgggatacgcgcaataagtcgaccttagagtagccgagg

SEQ ID NO: 95242 - DNA, 418 bp, Glycine max
ggggtaaatttcatacccaactgggccgatccaaacgaaaacaaatagataagcaaagatgtcccactaatgcaaacgcggaccaaagctgcacagctgcggcatatcaaagacgtagagtggctgctggttgaggcaacagcgtagtagctggtaggggcgtcttagaactggtgcattagatgggagtttaacgaagcgaagagcggtgcaaaaaaggcgagtgggggagagagtggcagttatggggaacataagtgtagggttgtaaggagagcgacgccggcatgataaccagaacaaaaactaaggcacggtaggcactgcaaggtaagcatgggcaaacaagagggtagcaaaaaaaaaaaaaaaaaaaccctccttcttcatgacgcactgtcgtcatttcccaaggaag

SEQ ID NO: 95243 - DNA, 209 bp, Glycine max
atgggggaaaaaaaccctgcgactttattttataaaactggagatccactaaacttacttttaggtcccgggctttgaaaccgcataaaggtaaattccataatcaatacctaacaacccaaggggaaaatactaaagactgggtagctaaaaactcagttggatgccccccaggcctgatgggcctagcaaattttttttttatgata

SEQ ID NO: 95244 - DNA, 271 bp, Glycine max
gaaatgagtcaactgggccggatggggtgtgcgagaacacggaaaattatacgggggtaatcgggggaaatttttagtaacggcaaaatgtaacgtgaccaggggccggagaatacgcaggtaaagggtaaattagctgcgcaaggtggggattttgctacgcgaggtaacgggttaatggctggtaggtggggttaaccgacggccaggcacgcatggctgggtagttgcctgccgacagccgctagcgcagaaagggcacccataaagc

SEQ ID NO: 95245 - DNA, 213 bp, Glycine max
agatcatcatcacacctttaggctaacagcagaaacataattagcaaagtgaaaatatgtatatgcacacacatatgtacatgctaatgaaataagggctttcttcccaggatcttatatttccctttggaaacacattgatcttattcctaattactacaatgacaagtatgaccacatcctactaatatataccctaacaccacatacaca

SEQ ID NO: 95246 - DNA, 351 bp, Glycine max
gggcggtaatgtaaagttgtaagtctgtctcagggtggtggtgccaaggtgtaaccagtgtcagaaagcctaattatgcttgcgggtagtaggcggactacaaagcataggttgagagagcaactgcaacggccacgactgctgaaaacccaccaggtgctgtactgctagtaagggagttggtagctgctgtgtcagaggcggtaccattggctagccatgatgactctgagcgatggcaaagtacgacataccgggaagcaatggcgccgcgtacgcgagcggatactgccgtagatttcagggagcggctgatagcatggttcgaagcagcagccgagtaacactggt

SEQ ID NO: 95247 - DNA, 162 bp, Glycine max
aaatagctcgtcaacaatcgccttcattagcaaaaacaggcaccacctgctaatgactgaggtacattatagacagcagcaaatctactcttgccgccaaatcatggaaataaagaaaaagaaatacagcttttcaaatgtaatcaagaacgaacaaggtta

SEQ ID NO: 95248 - DNA, 434 bp, Glycine max
ttggggggggggggggggggggggggggggggggggggggggggggagccccaaatgtgcaagttgggtagctatgagcataaacgggagaataggaaattagctaggagcttctagcaggacaggaaaaatgaaaaaaaaaccaacaggaggttaaattaaagcatgataccttacctccgggaaagacaccaataccaggcaaaagctttgtgatcgtgagcccgaaggtaaccatatcctgaaccctgctgccacggcagcgtggctttggttaacgcggaaattagccattgttgttaatggtgacgctgcttagcggatggcaaatcgttaagagcagtggttttggctgcttagtagagtggtcggtttatagccccaaggggacagggttaaactagcgagtgggatagctacccctaaacttactg

SEQ ID NO: 95249 - DNA, 372 bp, Glycine max
ttgggggggggggggggggggggggggggggggggggggggccagagcaactgtggatgtgagggaggatatatatataaaatgtggtaagcaaccaaagagacttgtggcccacagggtaggtaaaatatagtagtgactatggtatatccagctaaatagccttgtcacttcaaggttcactggatcgatttcgctagctcatcgtagacctgtggtgagacgcgtattgaaaggtaaggtatgccttcgtcggggataatcgtctcatgcccaaaatttgcctcgggtttaatggaagtcttggctaccatagtttttgggtcttactggctcgaagactgaagacctttctattcggtctttggttta

SEQ ID NO: 95250 - DNA, 395 bp, Glycine max
aggccaaacaatggcaattgctttgagatttagtaaaatttgggcataaagatccccgggccgttcccgtacttatgcgatgtttcccgaaaccatttcgaagttgggagatgccacgtaggcataactaaactaagcaccgttaaggcgagcttagattgcaaagtaaagttcatttagggggaacaaaagcccgtaacttgaaccttgggaatttcaggcgccgtctccagtatactagcaagctgacgcggggttctcatttagttattctagccgccactaaacagccataggccaccagcgacaggcctccgacaacaaaacagacaccaagccatgagggagagaccaacgaaccaggggcacaacgccagttaacttaactatttcag

SEQ ID NO: 95251 - DNA, 447 bp, Glycine max
gttgcgtcgagaatgttcgaggccggaagagggtgttgatagaggtatagataaaacggttggggccgagacctttagttggggttggtattacggcacaatatcgcagcaaactcccaacagcatcagcgaggtagcaagagtgaataggtcaactctgcagtagatagatggggcagaattagatgtcgtagcaaatgcacgagatgagttaaatgcaagtgacactgttttaaataaaatgttaaatagctgtgaacgccgaacacgaggtccacaaggctggattgctaagggctagcggagattttcggctatgagttcaggtttatagggctgttaataggttgggagaaagcgctgaattagagcttttggctagtcggtccctagcgatgtaggtggccatggtgttaaaccctaggtggcatacgatatagaagcagc

SEQ ID NO: 95252 - DNA, 143 bp, Glycine max
cagaaaaggtgaaaatatcattaatagatgaaactggtagtgaagacttgccaaagtttaattacataccatgtaatataatatatcaaagtactattgtaaatatttctttggctcggatttcggatgatcagggttgctgt

SEQ ID NO: 95253 - DNA, 366 bp, Glycine max
ggggctggggcgcacacacaggtcaaaaaagcaaccgggccacagccggcagcacgggcgccgggcgccccggacgcggccgcttgcgcgtaagaagcccgtcaggtcgccgccacaacaatacttgcacacgcatagtcttccacaaaagaacacccatatatcatacgcttaggcctaatggtccaagattgtaagatccgccgactagcctacccaatcgttgggatttgaaccagaataaaaaaccggctaaacacgggcagcatgggcccagggttggtaaagtagtttttccgctgtggtttattaggcggtgatgtcagtctccaacggctggtgggctgggcaaccgtgccaagcttt

SEQ ID NO: 95254 - DNA, 419 bp, Glycine max
acttaaacttaaacctaatctacttggtgttgttccccatgagttgcttcttagttattatggtgttcagcttagtctttgcctgtttgttaattagcgttgtgaggttaattcagttcttctagatcttgtttgtaaaaatgatctacagctaggactccagcttaaaaacatacggcaatgtaactttcatgccgttaacccggatacttcgtgtccgcttctctagtggccttgggtttaagatcagcagctgaggggcctggataaaaccccgtgtcaaagtcatttgtataatcacttttggaacgtgccgggcctacagctctacaaccttggccttctccttgttaccttgtcttttgtccttgtgaattttggtccgcagctgggtgtgcccttgcacagcgccctttcgt

SEQ ID NO: 95255 - DNA, 410 bp, Glycine max
caaaagccggctgctaatgctactacggcttaaacggctgctgctgctgctgctgctagtaatgttggaggtggtagatagcgttatgcgcctgcggatattaagcctgtaagtgtagtctagcaaaaacctgttggtaaagtgcccccagcagttgggaaaaagcgtacggagctactcgtactaaatgaagccgctatgtacgcggctgccgccgtgggtaaagcgtaaaaggggcacgaaagtgaaccgggtgtcccaaagccatcctttgcaaacgacccggcgctacgtggtgcgataaggattgcggcctaagccgccaactaggcataaagtaacgagcactacgctttaaagtgtacctgtactaaagccaacctgacgtgtaactgggctggtgaaatact

SEQ ID NO: 95256 - DNA, 391 bp, Glycine max
aggcacgcacacgcacctttggagggagtgtgtgttcttaaaggtgccggcccaggccggtggtggttatggttaatcttagcttgtgggggccaaggggttacagatttgtagggagccatagaagtatgcattgtcttagcggtaggatgttctgagccaggctccggagtcgtcctcgtcgtcgccctgccctcgccaactttaaagcccttgggtattttaaacatctgtggtgtaacgggtctgtgttgtctttgtttaagttttaaaatcatattctggggattgatgttcgtattacggatggtctctcgcacaaacatgtcacgcccacgttgcgccgcatgcaacatcagggctgctagtgcgccaacggccggcaacaaaa

SEQ ID NO: 95257 - DNA, 371 bp, Glycine max
aaaacacctgaaaaacgttagttgaactatgctacccacgccaaaaggtactacgcattccataaggctgtaagagcttaaccaaagggccaatagacaacacgcttctcgcttagaagggtgctgccagcgcgcgtgtggctatgtaacggatgcgagagactattaatacaagcagaacgaaaaacaacgcaagaagaaaaagcaaaaagaagggtgcaaaacacaaacgcaaccacaggggactgggtgagaagaggcactggcgtagagaacagggtactgcgaggtggagaggaaggctgggtgtaattagtgctggtgcatacagacactgggtgagagctaaagaaagtgagacgggtagaggt

SEQ ID NO: 95258 - DNA, 160 bp, Glycine max
ctagaacatgattttattcaactgaaccataatatgtaccacattagttcattacaaagatgaaaaaataatactcaaatttggaaggccgagtaaattgacattaattaaaaaacagaatatgaaactatagatttatttgcttatagaaagctctatc

SEQ ID NO: 95259 - DNA, 428 bp, Glycine max
ttgggggggggggggggggggggggcacgacaaccaacgtcgtggaggtgcgagtggggattagaccgactagatataatacaagacaagcaacgtgaggaggtgcgagtggggattaacggcggcagtagcgggattaaaccaacacggtttgggcttagaagtgtgatttgacagcgaggacaactagaacaaaagacacacacgttaaaaaagaacactgtagcaacaaatacgtggcagcagaacaagttagcttacgaagcaccggttacagtaaaaaatctagtaaaaaagtgtgggcgcttgccgaaagtaactggcacgaacagcgttagattagaatacaacaatgtttgggcgtcttgttgggccagaccttagaaagtgggttatatggcgctacagagggtagtgttgcaaaaatt

SEQ ID NO: 95260 - DNA, 465 bp, Glycine max
tggggggggggggggggggaaacgtataaactgcgtaggagtaggaaagattggaggagcggtagtatggtgcgtagaataggagtaaacgggtacaggtgttcgaaggtagagttttgagtagtgctttatattataaatggttgtgtgattagggaaaaaccagctatattgtacggagtaaccactagtatgcagcagccagtaagttaaaggagggagtaataaagcaacaggtgctaacagtaagcctatcactaacactgctactgggcggtgtctatgtgtgggcggtagtactaccagtatgcgtacttataaggtttctgttacttgccacagccctaatttaggtgtgctcggacggtggagttggcgaccacgataggcacgtagaatcactagggcgacccaaaatgagccgttgtacactaaccctgagcgttagagtcttaggcaagcaga

SEQ ID NO: 95261 - DNA, 355 bp, Glycine max
tccccaactaagttaaacttacaaacttccaccgcggtcccaaccctaaccgtattttgatgtacagtctgggtagtcgtcattcagattgtgctcataataatggtgtggttatgtcagttattggtacaaatcaacttgtggtttgtagtgtttaggtatttaggtagcacctattaaacatgggcggcataggcccccacagctgccagcacgagagtgctggcaaccactacaaacgcagcggccagtaccaatccctgcggcgacaataacacaacaattcccggtacagctgcggctaacctagctagaagcgaagcatgctggataagctgacgccaaagtgtttgct

SEQ ID NO: 95262 - DNA, 445 bp, Glycine max
accacacatggtaacgcacccgcacacgctgtaaagtgacacacactatgacgatgtgaaaacgtgaggagaggtggtaaaagagcattagctagtctcacgtggccctggggcgtggtcctcggagccctaatagtagtgctgggccacgcggttggctgttaggcttaattggggattaaagtgataacaacaaagttatgcaaccgggttacgtatggttggagcggcggctatgcggtacgctaagctgggccagggatgagctgggtcgcaaaacccaaatgctttgttggtgtaggattaggaatatagggccaagccggcgccacgtaagggattgggtgagtggttgaagggagcttttaaccaacttaacctggataattagcaactggtggtgtggatgcaacgcgggccaggtccgcttagctggtgagtaatg

SEQ ID NO: 95263 - DNA, 417 bp, Glycine max
  unsure (1)..(417): unsure at all n locations
actaaaataattaattttcattactcgaacattaattacgtatacaagggaaaagtgaattaaaatgagtttgactgggggatacactgagaaaagagaatatactacgttacacgtagtagtacaatatgagagtgatatgggccaaattagagaggctaattnttgcgcccaacagatacagcttcctgatcagagcaatttaatatttacctttttcttttttattacgtatcacttataccaaagactacgtactattcttgcattgtagatatgagcgatattagatgtgacctcactcagtaaagtaattgaacgtttaattaggttattttctttttttaacttttcttgtcattgatcccttgtttctccacattcatataatctcaatgacgaaatcatatcagactt

SEQ ID NO: 95264 - DNA, 373 bp, Glycine max
ggttttgagtataatgttggtatggtttgaaggttttatatataggtggcgggtgtgcagcatttataatatagttcgggtacgtaataatagaatgaaggaaccggtaggttatgtgtaaatctggaagctttttgtggctagtgatctaggtggaaggggactgggcatggctgggctggactggacggaagggttcacgcacacaaaccccgaatcctgatcggtttttctaggcaaaggccggatggcatgactcggagacgaagtagtgcggggcgtaaattgggtatatgcatgtaatatgtgatttggaggggcgtggggtgcagggtttgactaggctaacggagctcgcgaacagaacacgacg

SEQ ID NO: 95265 - DNA, 376 bp, Glycine max
cgggtgtcaaggggcccattgtctgcgaagcgggcctgggaggcgccatggcgggtggggtgctggtttataaggaagaggaattcagacggccgcaaacggcacacatgaaaaaaaaaaaaaaaaaaaaaaaaaaccctccttcttcatgacgcactgtcgtcatttcccaaggaaggttccattccgattgctacctcgattactgggtttgagacgcacgtcgaggacactggcctcgaagtagccgtagactgcgggttgcgcgcaaaggcggagttctgtataaggttatataatagatcacttccaactagaaacgcgaaacttgccccgcttgaagcacgcactgaatgtataggaaggctcggctctg

SEQ ID NO: 95266 - DNA, 379 bp, Glycine max
gggctaaccataagtctaaatgtatgtacatgtcatcatcatcatcatcattataagcctacgcattgaaaagttttgttcaacaaatttcaggttcgagttatttttacgttgattctctctcctcgtaaacaccagggtgttcactgtattaaagttggggtttcttactgtgcccctcgtcttgttggttgtcttttcttctttcagttttgagtgcaaaagtttcgtcttcagtttaagtttaggtttattcatcaacaacaacaacatcgaaggctaccgagttcaaatcagggtctccacaggacgcgtaacggtaacaatcccagtggtaaaagtgttccgaagaacatccgagttcaaggtattaacagtc

SEQ ID NO: 95267 - DNA, 353 bp, Glycine max
cacgctcggttcacgggctttatctaaatcgagtcacttacttgtgtaactgacccggtggtattctctgttaattggtggtgtgtgtttggtcgttttgttaaggccaagcgcaggcgcatggtatagctgccgactgcataggggcaaaggcgaatgcgccgcccactaagaggagagaggggctcatagtagccacagatacatggcgcctaccttcaggcatgttggctgacacaaacgctgggcgagcaagaggtgtgtcgtgcaggatggtaaccactgtgagtcaggcaaaatcgagtatcaacggaggcagcaacagtgataagtaacggcagtatcgccactta

SEQ ID NO: 95268 - DNA, 229 bp, Glycine max
gctgcgtccggtttgggcgggggtagccgggtactgggaacagacattcgaaaacttggtgtgactagcacggggggagggtataacggcggaaaccacaataggacgtggatgcgaagtagatgagtttggccaaggggcttcgattaaaaaaaaaaagaaaagaaaaaaaaaaaaaaaaaaaaaaaaaaaaaaaaaaaaaaaaaaaaaaaaaaaaaaccctccttct

SEQ ID NO: 95269 - DNA, 166 bp, Glycine max
ggggccgggaaaattccaaggggttgtttgattaccggaagactaatggtctcctttaacaacctgggaaaaaaaaaacccatgctagagaagggttttacgggctattttaaagctgaaaccctgaaaaacaaagggaaccccccgcccccccattaaaaagggg

SEQ ID NO: 95270 - DNA, 400 bp, Glycine max
ttgggggggggggggggggggggggggggggggggggggggttatggggtaggaatcaactaaatgtatgttgataactaataaaggcccataacaaggatacgcggggtcaaatatagaaaagagttgcggatattaaaactattgaaatattcagggataatatgaaaggaaagagccaaaagaaaaaacgaagtgaactgggtggaccacagggccgacttggccagccacagggaccggttggccaactttgtgtacgtggtggacctaataaaatacccggcagcgggccaactatcttattagcgctaaggcgtatgttactaactaagggttttaatgtggtagtcggttgaatgcttaaaactatcgcgtgcccaagaagttgcggtggtgg

SEQ ID NO: 95271 - DNA, 440 bp, Glycine max
tggttgaaacaaaaaaaaaaaaacaaaaaccaaccacagaccaaacccggaaggcaagttaaaaaaaacaacacaaaaataaaagccctacccgggccatggcacagactagcggctgggcttgcagcatagtagccggtccctcaccatttggatagggatgatatagccaatcgcattgatcctattaggcttttaggcccgcgtttttaatacccgagttgtagtaagccgtacgggtttccttttcaaagtaatgttattactaataataatcgccgtagtaagcgtggtaataattgtcagcacttgtgtggcggtatagcctagcgcgcgttaatacaccaacaatgtggcctaacagcctatacgcccgctttacgctttgagtcttttagctattaatgatattgattctgggtaccggaacccagtaaagg

SEQ ID NO: 95272 - DNA, 349 bp, Glycine max
acacactgtaatacctggccagaagagtgggtcagtaggcaccacgccatcgtagccatattctggcaatggcgccacgcagaagaattactaaactatgcccgtaaagatgcctctgcgattatacccttggcaccacggctggcgtgtgtaaggcacctcattgatgctgcacaacgtagtgcagaagaggagactacagctaccgttgtagaagaaacggcaccgtacttaaagctagacggtgccaccggtaacctggcaaaggttacggcaaatgaagctaaggtaccaaccgccgaagcgctggttgatagtaaggcagaatatgcctaataagctgcagact

SEQ ID NO: 95273 - DNA, 451 bp, Glycine max
tggggtggttgacggaaatgctgaaataaccggatgtgaagtgaagtttgaaatgagaggttgggggtaatggtggtggtggggtacatctaagtaatctaagccaggccctggggcgctagaaaattgcgcagaacgccctggcgatcaataggccggaggtgccgtagttcggaaaactgctgggctggaggaaggagcatttcatgccattagtgtcaggaggagtgattaggctgcactaacaacccagcacacttaagtttaggcaaggcacgtatgggcgccatggtagtaaataaaagaaatgttacatacactgtggtaggaggcccgttaagtacgatggcagtatcgtaaggtagcacaatgccgggacgctaaccgcgagaaatatagtaaacttgctgccgcaaccgctgaggcggagataaatactactggagagtgg

SEQ ID NO: 95274 - DNA, 273 bp, Glycine max
agagagatatcttagaccttatctcctttatttatattatagccgatctaagatatgctcgcttgtgacaggaagagatggcaagttaaacaggaataagtgaataacattccatctcccatgcaattagtcgacccctttggaccgtttggcccacacaagctctccacagaaaatttaacaaagatcgaaagcagatctatcaactcatctatttcaaaacgtatatcatacataatggcaggacctgtaatgattctaccaccaagatac

SEQ ID NO: 95275 - DNA, 466 bp, Glycine max
gtaaagtattaacaagacggcaaaagcccctgcgtgggtatcaactgcggtacttcctgtgggctcaacaaccacagctcgaggtggagccgcccgtgtcatcttcttccgaacattattaggtgtgataaatgtaactgaccacacagtcgtataattaggtttattaggcccgggaagcggcaaatgcgccaagataacaatagtactggtatgcgtgcccagcggccgccttaccataacagttcgttgtgcgccacatatgatggttaaaagatttaagcctggagtgggcgccggcagactaagcattcccagtcgcgccggcaactgacccagcactgctataccagcggcaagcaacagcacggcacacagctgcgctggtgacgggggctaaataactaacagtggttaaagctgagcaagctgctgcaaagaatgcagaactggccgtggtaggtgt

SEQ ID NO: 95276 - DNA, 420 bp, Glycine max
  unsure (1)..(420): unsure at all n locations
accacgtgttgtaactgagtatcaacgtactccagcctgtaggtgtgggaaacattaataaaccgatacgccatccgggtgtatagaggagcgggctgataccatctacattgaagatgtacaatggaacttgccacgtgcggccgcgcaaatgactgaaacagccactgagacaccggcagcaagatgtgtaaatagtacgggtggtaagggccctacggccacagcggataaataccagaaagtgtattttacggctgggcagccacccaccactaggacgaaaaatctgcgggtaccagaatttaataaaattgcaggagacactgcggttggtgctgcgaggggtgtaattattaaggccataacggccgtggatgcaccaatanctgcgataataagagccacagaggcatagtg

SEQ ID NO: 95277 - DNA, 287 bp, Glycine max
caaccaaatgggtaacacgacctggtagctgtaagtgtcaatgcaatgcttgtaacttccaagaagagggccagtataattcggtaacccagagctgtaaccagtataaagcccagcctgctagagctacagacatccgccagggcacagactagtagagggtagcccacaggtagacccaagcatacagtaagtaggcgccagccggggataggcaaaaccacaaaacgtatggccctgccagccggactagccgtgctgtgagcaataattgacgtaaggcagct

SEQ ID NO: 95278 - DNA, 396 bp, Glycine max
cgtcaccgggaaggatagaagaagaagaataagccgggtgaggtctgaaaatgtactcgtataggtatttctataataaacgataatatacgctacccctgtaaggagccacaaactaaggtaaacatacacacggtgctggcaatagtggtaatttagggtggtaacggtaaagggggttgtgtaaatttagtaagtgatccagtgtgtactggtaggagcggggctgcccaaggtggtctagccgtaaataccgccagtacagcagcatcgccgcaggcgactgctagagtcgatgcttagtgctaaactacactcgccccctgggaaccagatttggttacagcattggtggcttatacggtgcaacctgcgaagacacaaaataaagcgcca

SEQ ID NO: 95279 - DNA, 446 bp, Glycine max
gtttgtggcatggtgaacccatgggcttataacacacggtaagctcgggtgcgcctgagcgtgtcggctgcgtattatttggggctgtacaacatgtggtaagtgtgggacctgcgcctagacccttaaaattaggttgcccttatttgtgtttgtgggtgggccatatgctaactggggggtttcctaaaagggtattggtatgcatcgcggcgtacaagtttagtaaaacgagccattgaggcggaactgcgccggaccgttgatgtactgcggccgcgttcggatccagttactatgaaggtaacacagctggagaaaccttaaccagaacggcttggggattccaaaacgcgggtagtggcttgggccccaagtaacttgtgggcttttggttgggcaaaaccgctaaaacacaacccaatgaggcctaaagcaaggatagc

SEQ ID NO: 95280 - DNA, 382 bp, Glycine max
acctgttggggggggggcgttggggcacgctagcagaggtgtgggcaacaagcaaaatgacgcactcaggagagcgccgacagggcaaggggctaaccagtgaggaaggaggcagaaggggatggcgaagagcagggcgggccagcacaccacacaaaagccacaccacagcaaagagccagaagaagctaggggtggggcggtacgcgaaaaacgggtataaacgtaattaagtaaaaagagcagggggaaaagaaggaggcgaaaacgtaataaatgagcgggctaagaacagcagaagcgaaaaaggtgggataggcggcagctagagacgagggagggaaggtaaagagcatagggggggacgatataggcggggtaa

SEQ ID NO: 95281 - DNA, 428 bp, Glycine max
gttttgtggttttgcgcaagtatcgggacggtctgataccggggaaaaaagcctgcagctgcaccataggtaattgtggcggcggcagaagccaatgccaagccgtaacctcccggggctaccgcagcatctgttgaaccttcgcggttttacgaggaggccctcattatcttagattccgcgaagccggcccagcccgtacaaccagctggatcgcccgcagcaactgtaagtaaaaaccccgagatgtattggcaacgagttgagacactagcctagacgtactaatgcccagcagagccacaacagggcctagtatataggggataagcactggtcgcggcttttgcaacaatatttgcgatggtggattcacctattttgtaagtttaaccttaatacacacaacagcatttagaggagcgggc

SEQ ID NO: 95282 - DNA, 419 bp, Glycine max
cctcgcgcccacggcggcaagtcccaactaaaaaaaagcacaagttagtatagactagcttgttaacataaggaggttgagtgcagtcgacatcacactatcaaccaacttctcctccgccatttccgtcaattccacaaccggtggcaacggcttactgtctatccttgtatgtgtaaaggtcgttgtattatttattagtatgcccagtagctgccgccaaatcatacagaactactgccgcttaccaagtaaacgtgagccgccggttaggcaaaatcgtaacccggctatgcataaacggcaaaatccgcagaaccgtgtgtggccactgcaaagtatgagaggcctttggtatatgttggcttatatataaccgtagagaacggatgagcggatgcctaaacaccagcactaat

SEQ ID NO: 95283 - DNA, 327 bp, Glycine max
cacacggtaaaaatacgcgatgaaaaacaaaaacaaaaaaaagagcaacggtctgagaagtataagaggcggtgtgggagggtggtggcatgggccggggctataatacccccagtggcatagagtaacagggccaccaaaattaaagatagagagaccttacctgggtggaacgcttgccatgtaactagcgctagtattaatgctgcgtaaaaggcgcaggttactgcctatagattaaagcccgctacggcagcgtaaaccgttggctaacctgttgaggcaccggtaacggcagccaataaggtaactattgctaaatttaat

SEQ ID NO: 95284 - DNA, 320 bp, Glycine max
ggttttggtgtgtgtgtgtgtgtgtgtggttaattggggtgtgcgggtggtgaaaacgtgtactgtactagaatagaatttggtggtagtggtggtggagcgcaggcatggcgcgttattatccgcatttagggtgcgagtggtgccgcaaaactgaaggccggtatgtgaagaccgcgatacgctgaaacccgaaatgggcaaattgactggttgacggcaagtagtacaactggagaacgtcaagttagagtgagtgccatcgggacatgtgtgggcagggtttgcccaaagcagcagcagctggcaacagagcccag

SEQ ID NO: 95285 - DNA, 422 bp, Glycine max
ggactacaaaaccagcaggcccggttgtcaatgcggctgttaggtagagccaggaattaacaagagccaaatcacacagttatggtaaggcagattaagaagtaattggtgccgccacgccaactgacgggccaccggccgctaactatggtaacgaagcagttacactatagatagtaaaagttacacacgatgcaagtgacgtaacaactaatgaccatagtagtacaggtgtgacaatggttaggaacggttgtgaaggtacgaatatgacaaactacttcgcacggccaacaatacaagatattaggcggacacaagcataaattgtaaaaaattactcagaggaaacaagggaccatagtaggcagatacaagcataaatgatggcaaatgaagcaataaaagagacacaagaaggt

SEQ ID NO: 95286 - DNA, 335 bp, Glycine max
cctcaaatataagagtgagcatgaatgatgaatctatagaactcaatattaaatgaattttctaacgtaccctgtggcaatggcaaaattacaagaagattatctagttccatttcaatttttgatcctatgagcacccagaaaatataaaactcatttattgcaacaataaggataccccacattctgctgttctatggatagtacttgtctttcacatatcaacagatcataaactacacagatacattctgtcatttacctggtttatatttcttatggtcctcgcatcttctcaacaatgtgcctgctcttttcttcaatgtgacgccttt

SEQ ID NO: 95287 - DNA, 376 bp, Glycine max
tcactgaaccgcaaaaaccacacagcctactgctaatagtgacgctgcgcggaaatcccgggccagtgtatggtggcgcgccaccaaacaccacttagctttggtggctgctgactaggccacccaaacggccgctggtgcggacgttgaaaacacggaggcgcctacggctgctgctattaaacaacgtagccagttttctgcgaaaaccgccgcccacgggtagacatttacaagcctggcagcctgtctgattaccgcatgagccggggcatttatgagcatgaccaaaccatttcctaggttgcaaagccgagacacaactgcaatgtaggtagccaacgccctaagcctgctacggcgacctagtggtagg

SEQ ID NO: 95288 - DNA, 333 bp, Glycine max
aaccacataatcaaacctgctgaagaatatatagagtagtatacatccacgatggagctcaacaaaatacaatgcataaatagttaacagtttctgatatgccttctttcttggaaaacttttgaataatgataagcctattgaaagaatagggtacatttaaatatggaagaaactattgagaaaattgataatctaatatcaaaagaagtgtatgccagctttgttaaacagagaaagcaggtataggaattcctgcaatgtgagcttggatgaccttttctttttaaaatctccctttttcagaacacccaaaaccttgtccttgaattc

SEQ ID NO: 95289 - DNA, 116 bp, Glycine max
aaatgtgaattcttagctttcaaagccaataaaattgtcacaattcatgacatttattgactgatcaaggaggagtaggtcataataattttgattcttctcttgctgccactggc

SEQ ID NO: 95290 - DNA, 369 bp, Glycine max
ctcgagccgaatcggctcgaggttactgccagtaactggaggtcaataatcaggctttgcacttgagattatgtgcaaaaggtgtttgtcatgagtcatgactcatgactactttcttttcttacaggttgaggtggatgtaatgaactcaatttaactaaaggtattattgccagaaagatgaacctggatttgttgatgaggatttgtttcttttcatttgatctaatgtggctggatcatactgtataataagtagcaatttttttgctacaataaatgactttttttttttccttggcaggaatctatggcatctaagtggaggatggtgtacaaccctgccatctgtggcctacctgtcctcat

SEQ ID NO: 95291 - DNA, 157 bp, Glycine max
ggggacaatttactggtttctcggtgaacgatcatagaagctttttttaccgttatcttgcttttgtacaaatcgtttagctttatctcaaaagatcatacaagatctgtgctttcccactttattttaatttacagattttttttttcttttattt

SEQ ID NO: 95292 - DNA, 395 bp, Glycine max
gaatcctacatattctttctgtaattagattgaatcaggtcagatacaagattgttaaacctagttcacgagccgactcaatcagatatatacaaattcaacccaatcaaaccttttgttttttcccttgaatcagggagttgcttcggtaatatataccttgatcaccactactttgtattatcatttcttattattctgctagccgtggcaaaggttcccagactgaaatactttgacaacatccagcatataaaggctaggcatataaatgtgtccatgaactgaaatagataccctaacgaaaggtagctactgccctatttctcattattattctatttcattcccaagatgatagttggtcattttcattcaccaactccatccccaaa

SEQ ID NO: 95293 - DNA, 114 bp, Glycine max
cttcgatccaacgatgatgaatctggcgaagagagtaactcttacgaaggagatgggtatgacatctcaaaagtggatgatctacaggtcaagatggatctttacagatgactt

SEQ ID NO: 95294 - DNA, 292 bp, Glycine max
ggataaataatataattgatttaattttttatggtattaggtttacaacccccgcaaacgcagctgggtgaaaacttcatgatcatgccgcgagggcgccgggctttacaactgtttaaatacaccgattttcttttacatatgaaaatagacatgatacccttccctttcatagaaaattataatgatttaacattttttttataaaagacaaaacgccgaaactttgcttccaatttttctttttcgggcatcgggaagggcttcttcttccttttttatcggtttcttt

SEQ ID NO: 95295 - DNA, 443 bp, Glycine max
cggctcgagtgaaaccgtattttcccattttaattttactatttaatactgtaattcccttgggcactatataggctgtaggtaacaatcagaagtatagatattatgttgtatgttaaaacttttggttactcatgtagaagatgaccacttaagctctttctctcattgcataacttaattcccacacatcaatttaaagacacttgactgtgtatttttgaaatgattgataaaaagataatgtgtgccacaaatatttgaagactctagattcatgtcaattttctgactttcttactgtgatacgtccaagttcctcatatgcctcaccttgaggattttcttaataatttaagtttgtgatttaaatattgattgtggtttctactttacaaacaagagtttggcatgtgctctaactagatctttacggcttattt

SEQ ID NO: 95296 - DNA, 389 bp, Glycine max
ctctgctgctcaaaagaatttgatatgggaggatacttaggctgaatctgatatccctgaagcatctgatctgaggacaaaaaagaaaatacttcagactgtaggggagcggtggagacaatttaaagtctattttgacgtcgaaatgagcacttgcaactgacaaggaaagtgtcgatgacattgtatgcgaaaagtacgacattagcaaggagaagtgggcccaactttgtcagacccgcagagacccttcgtgggaggatgtgcgaaaaaagacacaggccatccagaaacaaaacattgtccctcacatgttgtctcgtgtgggttatgaatatctagaaaacaagttgataaatgagaagaaacaaaaaaaagtggaggaaact

SEQ ID NO: 95297 - DNA, 240 bp, Glycine max
acaccatattcctcttattccttttggcgcaacaccattcttaaaagcgggcaacgaaattttagaccaaatttacacaacgactgagattcataggaatttctggcggtgacataatttggaaagaaaagaaaaaacagattcaaaggatcatgagaaggccaaccatcccacagatttatccacattcaggggaagcttaagtgccacaaccttttttagagaaacaatgaaaatttt

SEQ ID NO: 95298 - DNA, 420 bp, Glycine max
gacaaagaatgtaacacatttgtactttcaagcctgagaaggaaataacaagggaaatctctgaataagataaaagttgatgagaaaacaaactatccagaagaatttgatagtggtaactagatgatttgagcttgaggaggttcacatacttgtagagatgaagctttctcccttaatatttctcccgaaggacgtgcaacaggaagttgtgatttgtctacattcttctgatcatcaattgaaatttgttttaactttgattctatgtttgatagcctgcgatttctatgttctttgtctcggaacctgtcatcaacaacttcaatttttataggacttttggtcaggccggcattcctagaatacttttgcgtatatctaggacttctgctttcatcatataaaaatctgagattc

SEQ ID NO: 95299 - DNA, 441 bp, Glycine max
cacaattcaacgaattttaattcccacaaatctaaatcaaagccatcgcactaccctgatgcaccctctcccaaattattttttaaatgtattccatctcattctgtgtaccttccacaaccccactatataacagaccctccatattcaaaatggtgcctttcactcccagcaacaaattgcaacaatcaacaagtagtccaacccgaataaacatgatgggaaaatgtagtaagtcccttatggcgttcccaatcctcctcctacgcaccctatgcttccttttgttctcacaacccctcctttctcaggagaacaattttgttcgtcagccagctgctcaactcatcatcactccccaccatcgctcccattcagacccccaacaggtgacttgggacaaacagaatggactgcatcaaccttaaaacacattgatag

SEQ ID NO: 95300 - DNA, 505 bp, Glycine max
ttcagaaaacgcagattttctctgctaaaaaccctactgggtcaattagaacaaagaaaaaaaaacttgattcatcccctgtttcgaagaaaggggggatttttctagggacccagttttcgtttcagtgccgcaacacaatcgagtttctgttggcttttctaaatgcatgagttcgatttgattttcccctgctcctgccactccgttttttgtttctgttcaaacactcactgatagaaaaaaagattcgagaattggttttgttttcattggtgagttggaagtgagagtggcattgctgaagtgtaattccattgaaatgagggaaattttaatgagagggcaatgaaaggggcgtctgagattttagagataataagatgagtggtggatcattgggtattcgttctgggagttatgggtctttggagaagcagcagcagcagctacagaacaatggtgtgtcgcttattcaatcagcacgcaaacccaccaagacgct

SEQ ID NO: 95301 - DNA, 320 bp, Glycine max
aaaaaaaaatttccctgttgccttcatcattagaaacgaagatccaaactaaacatattcctacgggtacgggtcagcacatagaacaatcaggtatgtgcctattctcatctaaaaaggtattaaatcttatttggaaagaccaatccatcaaagggtttgtccaaaaaacctagcctacatatactttatacacaaaagcacaagttacatcacatcatagtatttccttgggggatatgaccaatgaccatcaactttgttctttataagggggccagaacagttgggtaacataaacctgcaggccccctttgcca

SEQ ID NO: 95302 - DNA, 470 bp, Glycine max
ctcatacatacccctccgtttttggttggattctcggctttttagattccgtttctggtttttcccaattccaaagtagtctgttatcatcgtcatccctttataggacagacaaagctgattcacttaggagcctcaagagctatgtctacatcttctcgtgctcttcccactcccttggaaaacaagtatatgaaacccccagattcttttcagctttcacccgtcagagatctgactgcaaattctgcctcatcaaattcaatcagaagtgctgggaagatgttgtcttcaccttctgaatgtcccgatgatatccctttttcctttgtttctcagacatcaggtgacaatgtgtcttccgaaattcattcaacagcattgatttctcaccctcaagaataatgaagatctttcctggggaccagatccatttcaggatattcttggctttcctgaaaatgtttctg

SEQ ID NO: 95303 - DNA, 207 bp, Glycine max
ggcccttaaaacccaagcttaaccaaacgggaaaaaaggccgggttaaaaaaccccggcttttttttaccaataaaaaaacaacctttagaaaacaaaaccccaaaaagcaaaaggggcccaaaaaaaaaaaaaaaaccccccggaccccaaaggtttaaaatagcccccctttaatccccaaggtttaatttgcccccaaaatttc

SEQ ID NO: 95304 - DNA, 326 bp, Glycine max
aataaaaaaaaaggcaacgaaaaaccattcattaaactgattcacataataatcacaataacaatttataaatttccaacccaaattaaaaaaaaggcataaaaatttaaaaattattcattaaaaatcagaaaaagaaaaaggatcacccaaaaattcatctttccggttacaaattccccgggtttccacccacgcgcctagacccgttttgaagaaaagaccccacgcgagtgattaataattaattaatcaatcacctaaccgcgatcgagtggaaacgtcgtccttttgtgttatcccctttttgccccttctttttctaa

SEQ ID NO: 95305 - DNA, 245 bp, Glycine max
aggtattcccaaattcgggccccaaaactgggtatgaaaacccattggaagcccctaatcggggcccaagtcggataaaaactaaatttgccccaaagggtggggcttgggcctccggcttaatcaaaaaaacttctggtttttaaaaagattggtgggctttttggggaacaaaggcactacccttttccgcatgatttactaaaacagggggcccaatatggggtattttagcaaaaccgccc

SEQ ID NO: 95306 - DNA, 377 bp, Glycine max
gcgaacttgtatgttttatataaaaattctcgatacatgtagctattgacattcacattaatgttccaaaggccaaaaaagtgttaactctgcaaaagggttctaaatgaataataacgcgaacccactcctttgctacatacaaacctacttactaagacagaagaatcccaagatgaaaaatgcttctcaacaattttgtgcccaccacattcatagggatggcacacaatatatgactcatcaagctttgcgtatataccctccaatcctataccacctcttatccatgacaacatagtttgtacgacatgacgcagacaccaaaaaagccatggcaaaaacataactcaccattaaagcatttattttggact

SEQ ID NO: 95307 - DNA, 372 bp, Glycine max
aggagaaatatgcagaatctcgtagcaatactatgaggtttagttacccaatatctacaagtagaatctttttttgtacgagtaagttattctagaagattttacaacctaaaataaatggctcgcctatgcaaattacaatgatttagcagcaccttctatgtaagcgatggcttccacctctgaaagctgttctccatcaaccaacccttttattaagggggtggcatatgctttattaggggcacgtaagggtagcttcccagatttgaaatttccaatatcaagaagggaacacgttatgggaactactggaatatcctgctccttttctaaggagacaacattggcataccaagcacccttgacaac

SEQ ID NO: 95308 - DNA, 409 bp, Glycine max
aagattacaaagacagagaacacggcagagcttatactactcctatctatctagaaatttcaaacgggttaatcacaaaaaattatgtctttccttttcacagaatcttgagatctttattgaatcgaagatcagattcatattaagaccatggaatccccaattgaaagccaaaaacaaacttttgatattgtattcaattgtcctcacagcagtaaagaacatctaattgtaaaatgaagaaattagaaagaaaaaagaataccaagggtaaaactagtcacaacatacttgaattaactaacctaaatgagatcaaaatcggaatgaaaataaccgtacatgaccaaaagcatatatagttacaaactctgactttacctgtacaaccaggtatgaacagaaaact

SEQ ID NO: 95309 - DNA, 556 bp, Glycine max
ggcaactctttataatttatgacatgaatatattcactgaaattcatcagttcctaaaaaccatactcctaaaaacacaaggaaatctccgagagactgcaaataatacaaccaagcatgaaactatgcttctaaccttccgttaaaaagctacatctttgtgttttccacttatcttaagacatgtctgtgttaagcaaaagagtaaacaaatgttgggaaaatctgcatggtgcaaaatagtctaaggactataactgtgctaagaggcaaaggtgacgactgattaaataatctgaaaatcttccataggcactgaaagtcaaaagggccttaattaattaatccgagacatggccacaggttgtcctcacataaggactcaaagggctcaatgcgaatggtgaaagacttcctcttttcttcacaaaactgctctcggagtcagagacatggccgcttgatttctttcttctcatataggggcttaatgccaacgatgacaacctaccttttgtcatctttaaaccgttatccaaatctgagacatgataac

SEQ ID NO: 95310 - DNA, 203 bp, Glycine max
aattgaaactgatgcttgaagtgaaaactaaagcaccaccctcctgttgcttctttctttcaggggtggaaaaggattaaggatagaggggcatatattgaagtgcccccaccatggaaaaataaaaataaaaattacagagtcaaagtagaaaagaaaagataaattttttttttttttgtgactttggaaagtggattgct

SEQ ID NO: 95311 - DNA, 93 bp, Glycine max
atacattaaaggaggacaattttggtattataattttaaaccattaataagacagttgcatcacttcatttgtggaaaagtagccaaagcctt

SEQ ID NO: 95312 - DNA, 330 bp, Glycine max
gacgaaaataacagtactgtctcatcagaaacaagaaacaatgttgcatgcatgcacacacagagttgttaatcaacgcgtgtggttaataatagtaataataaggacctattgttctctagatctcacccactgtctctctcacacgacaatttacatcttgtgattgttaacaatgccgtccatgacggcgaggcaattgccgctcaactggaacagcttggggttatcttcagggaagggcatgtcgaccccgggagactctttgaaagcatccttgcatgcttctttgtacgaaaggacagagctgaacctgtaccaagcattcac

SEQ ID NO: 95313 - DNA, 456 bp, Glycine max
gcaagagcaaaaacatgcagccacacgttaacattaatatgtacaagttctgtacaactgagttttctcagctaatcattattaggctttatggacagaggaaccaaagaaacatactgtaattagatctcacactaaaaagaaacttgggagggaaactggcacccaggtcaacctaatatgggatgttagcatgaaatccacttttgccaactgtagaatgtgttgggctaagtttattataaaaccccagctaaagcagtcgatattgtgggtgtatgccatcggtgtcaacctgtcagtaagtcagaatgctttacagaggttagtcttcatgttagatgaaccttgctgatcaagtggacttgtggttgagggaccccacaacttggtcctctttgtttcggatatcctcacacgtgaaactgcagtggaaagtgcatcaatccacacaca

SEQ ID NO: 95314 - DNA, 293 bp, Glycine max
ctgaattaaattacattgccctgaatattgggtcagacaacattcccctttgaataagggtaaggttaaggcaccagatgagagatggtgcatatttcacaaggggaaaaaaatggtttgaaactgtacacatttaaaaaaaatgaaaaaagggtgaaaaggggtcaagactccactatcatagggaaaggaacagcctttgatgaatacaacagtttccggaagctcttgttcagatgatgaacccttgagttgaaaaaagaaaaattccttattgaaggatttaagaagca

SEQ ID NO: 95315 - DNA, 345 bp, Glycine max
aaaacccataaaaaatcccggaaaagggggccaaaaattaccggttttaaaaccccaccggctaaaggggaaaccagaccaaaagggcaaaaaacccaataatgggccaaaccccaaaggggcccaaaaaaaaataaagggccaggcaaaaactttgggccaaaaacaattaaccttaaaaaaaacccgaaacgataaatccccaacaaggccccggtttaaaacaaacaaaacgaaagtggagccccacaatttccccccccaaatttaccgggacttttttttaggccccaaaggggtaccatgaccccccttttttttacgggggttcacacccccaggggg

SEQ ID NO: 95316 - DNA, 426 bp, Glycine max
caatataaatatatatgcctctgaaaagggtaaatttaagagagaaaagaggagcaaaacaaaactgatacctacatgatcctatatcctagctcttctacatcataatgatcatattctgttttgctaaatagtgatacaacaagcaaaacttacagtaaccctactgtccacttcgatcgacggagaaagtacaaaaataaaatacaaaaatctctttacaaacttgtaactttctactttcaaaatcaaccttgtacaccgtacctatagtctataaatctaaaattcacatcataactgatgcctgcctctaggttccaaatgagaaatttacaagatactcagaattgaagcctttaatgttcctaagtttcacctttcgtttatgcccctcgattactgtcttctcattctttactcccc

SEQ ID NO: 95317 - DNA, 440 bp, Glycine max
caatcaagaaactcattagagatctcttgctatacaaatgaaagaaataattggtctatggccgctaaagatattaactagacaagagcatacccatagttaggacatgcatgtgataatttacagagaaatatatgatttgataaatttccttgcttttcaaattttgtgcattgatataatcatgaaccagcatgtaacaatgagaacttagcccataaacatatcttacccttatccaagaccaagcttgccccagtgaccaaccaatggccaggactatcttgtggacctttacacaactgtgacgtttctacaaatttcaacagcttttgtgtttgcacaggcactggaggtcctgttggaaacacacttgaatccaaaaccacaactggttttttctggttctggtctttaccagaaattgatgtgcttattac

SEQ ID NO: 95318 - DNA, 391 bp, Glycine max
atgtaataatggtacaagatgaattctcattttacagtactctcaggattttaataaatacaaggattatttccagaaccttgtttaaacgataatacagtctgttagtagaaaaaggaacttattatcttcaatcagtaagagttatgttgatctattccgcttcatattctgttgatcagatcttcagcaactacaagaattatgcacatgcaatgaaagaataatgagtccaattttcagtttttcaattcctttcacctgcacccaacagttgcatcactatctcacaagttcccagtcctcttttgacatgtcataaatttcaacacaaccatcctcaaacatgatcgagtgttttcgggaatatttatcaaatcgtttaataatt

SEQ ID NO: 95319 - DNA, 362 bp, Glycine max
gtattattgagcgagagagaaaggtaaaaaaaaaaaaaagattggaagagtatgagcgatttcggggaagggaatgagcttttataaatgtctggtgctgttgaggaatcgatccactctccttccttgccttccttccttcccctttcaacgatgttgattgcagcgtttctaaaactcgccattaccattagacaagactgcagtgtgctgtttcgggttgcggtaacacgcgacttccgattggtgagaatagactagggtttcattataagtgaggaacataacaaaacataacacacaatgcccagcttaaacaaaagattttgattttaggttattggtacttactgcacaatgcc

SEQ ID NO: 95320 - DNA, 342 bp, Glycine max
aaaaagcggaaaaaaccccggaaattttggccccacccatagaaggaatggccccacttataaaattttatttaggaggggggaactttatcagcccatttaccccctcacccctttggtcccgggccttcccaggaaccctttttaaacctcatttaaaaaaaaccccctttgggggaaaaaacccccttccaaagggggttaaacttaaaacccctggggttcaaaaaaccctttattccccaagggaggaaccccttggcccgccctaaaaggggggggtggacaaaccccattttccgggtttatttaaacccccccgtttaggggggggccaaaagg

SEQ ID NO: 95321 - DNA, 260 bp, Glycine max
aaaaactaatgacctcaattaagagaaacaggccacgggaaccaaaccctatgtaatgtaactagattatcgcgctttacacaaagacactgtttacagggggaaaagataatgtttactgtgaactgaattatataaaacacctacctagtaactaacatataggtcacaccgaacaaagcataagatgatggggcaaactggtacaaaacattgaagacccaccaaatcgcttcttctggtgaccatattcttagacc

SEQ ID NO: 95322 - DNA, 329 bp, Glycine max
tttttttttttttttttttttttttttttttttttttttttttttttttttttttttttttttttttttttttttttttacctaaaacctttcatttcattcaaaaaaaaaatccccggaaaaaaactgggggaccccccaaaagccggtttaacccccgaaccaaaaaaaggggccccaagccgtttatttgcccccccaaaccgggcccccggaaagggggtgggaaaaaccccaaaggctaacccaagcccttggcccaacccccccttttcaaaaaagccccccaagcccggaccgggggtattcaacaggcaaccctttccccc

SEQ ID NO: 95323 - DNA, 436 bp, Glycine max
gcatatatcacatgtcctctttctcattaattatatcatcacacatatcattacactctactagaaagccacacagctctggtaaagctatgttcttaattcctatcacaaatcatatatagatccttaaaggatcataacactagtttggtccccaacttcccataacctataatagctagaagtacaaagtacatcaagaatatctactaccttttgaacaccatctacctcacaatttcccttgtggcctccaaaggaaaaactcacgagaggaagagatttaatcaaacacacttatccttattgttcaaccatgccaaaccctaagaaaaccaaaggaaacaaatctcattatgagacaattaaggttaaaataaagttaattttatttactgctgcaaccttttcttcttcatcttcttcaggaatcacc

SEQ ID NO: 95324 - DNA, 291 bp, Glycine max
cttcctcttcacaggattaaaggaactccaaatggggaggaaagggggttggttttctgcagtgaagagagtttttgtttctgattccaaaaaggaacagaaacaccatcatcatcatcatcatcataagtcaaagttaggatgttttgggactcatcactatgaggatctagaaggagcaccaattgccgttgttccttcacttccaccaagaaaagatcccaaaccaataagtgaggcagagaataatgaacagagcaggcaagccttttctttggttttggctactgc

SEQ ID NO: 95325 - DNA, 497 bp, Glycine max
gaataattgataaatactttacaaacagaataattaatgagtaattacataaagaatatatattgtcatcaaactagtatcacccccaaaaccaatcttgttataacatcacaaatagcactactataaccagttaagaagtaaaagaagaagttgcctacattgattatgaagacaactgtaggaataaaatgattacttgatcagccaaattttattccatttcctcccccatggcaccaacagtatggcttgtgaagaaaagttgatagagacaactataaaaagatgataccatcttttatttgattcatcttcattcatatttctattctaagtacaccaatggcacgcatgagcatgatgcatccctacctgctccctccatttctcattctcactttctcctcagggatggtagcattagcaacactcttgttggaagccacatttcccggtctagttgaaacagcataccttcttgtaccggctggaga

SEQ ID NO: 95326 - DNA, 310 bp, Glycine max
acattaaatgccctggacggatttgcattaaaaccaagttccggaagggaacttcaactaattctaggcttacaacaattaccattaggaagggaaaaaaagagagtttcaaaaaccatcgagtattggggatcaaaaaaaaaaccaagggaaaaaccgtaaagggcaacccggggggggggggggttccctggtaaatataccggataaaaaattaacccaccttcaacatgcaaaagcatttcaaattttcaccccaattttggaacattaactttatacccaaattgggatttaaaaggttcatatt

SEQ ID NO: 95327 - DNA, 417 bp, Glycine max
acaacaattaattgtttttttttttgtacaaacaattatttatagctatacatacaggatattcttcatgtcacaatgaaaaagtacaggatatgtaatcaattaatattggtataatcctatctactatctataatcgaatcatcgatcggatccagctatagctccttcgttccgtcgacaaaaggaatgcagacagtggacaagggaagacgaaagtacagcaatttgtgtaccctcgaaagcacccaacacaaactacatgacaatttcattttcctatattttatcaacaacttgttatccattttttggaaatcaattccgccccacaacacaacacatccgttttgtttcataaacctgcatcaaagggtacgccactcccaggaatccacgagcccccagccaagaaac

SEQ ID NO: 95328 - DNA, 233 bp, Glycine max
gatgtaaactatgacgaccccacaaacttggaaaaggtacatgatcactggctcgaaaatgttgagtccaacggaagaatgaaatggctacgttatacagtactcacaagagaaacgcttttcggcaagaacaataaataatggatgttacactttaagcacctacctaatccaggacatggtacacaccagaaaaatgtgattttttctggtaaactatgtgctgcttgaag

SEQ ID NO: 95329 - DNA, 326 bp, Glycine max
aggtaaatatgattcaatgaaggctcttttcatcatttttcaacctaaaagaaaaagaaaaaaaatgctatctttctgggtgctaatccttacctagtgaaaaggttcatgtgggtaccatgtagcccattcatcttggagatatttcacccttttttttcatttttattttctccctaacctttttttcttcttttctttatgggactcgtataattggtggctttttatcactgaaattgaagatattgggggctcatgagtggctgcttgaacctgaaggtcccttggggattctgggtctggaggttggtgttggggaaatt

SEQ ID NO: 95330 - DNA, 428 bp, Glycine max
acgattgaaacaccattgtattaggttccaaactggtgaagaaaaatccagtagtacaacttgaaatgaccaaaagtaaaaagaaaaggaaaaacttacaactgaaacaacaaacaaaatttgtgaaagaaatttgactgaatattctttgcatggtttatactattgtatagcattaaagctatcaaactggattgttcttcaccaggtgtatattgcaatatgtgttatgtttcaatctctataataacttaaaattcattgtaattcctctgaaggacattggatcaactctaatatgttgattaccttagccatatcaggacggtttgagggcacttgtgatgcacaaaccaaccccaattttatcacaggaattgctttatctgcagcaaaattacccttaagcttctaatcaacacattgct

SEQ ID NO: 95331 - DNA, 337 bp, Glycine max
ataaattatgtttatttaattatagtaaaattagtattattgggaacataattttaaaatgcattggttaagcatatatataagtatagcgacacaaaagagcatatataattatgatattatcaaataaaaaactttagaaaaatatataaatttaaataaatcacaaatgaattcagtaaaaataaattaggcccatagaggaatataaacacatacaactttgattgacattaattctctgagcaacaatgtcaaatagtcaatattaaagctagtagtagatgcaaattatgcaatgtaaattatcattgtttagaaacatattatcattagt

SEQ ID NO: 95332 - DNA, 496 bp, Glycine max
aattgaaccagcgagaaattaacccttttatcatagtctgcatttataccaaatttaatcaacaaattacatggcacaataaactgcaagttacacgaagaattacactcttcaataagttctccattccgtgcgctattataatatcccacttacataatcaacgtcactcgatcaccttcacttcacttcacttcacttggtataccaattcacaaagatattagccttgaaatggaaaaaaaagggtattaagtattaacccataaaggaggaggacatagaaaaataaaatacagaataaacaactttagagagaaagatgatgatgaagatgattaatatctctctctaagtagtagagttagttgttgtctttggcatgatcttttgcaatattatcgttttcaacttctcctccttccgtggtaatagcagaagaaacgtagctcagcaccaaagaattatcgtcggggctggtggtggttgcatttcg

SEQ ID NO: 95333 - DNA, 376 bp, Glycine max
attcaggaaaagtacttactacataatcaaattgttcattacatttatctttaccacaagtagcatcacttgctgctctttgcttaattttaaccgcacaaggcagcttgcaaagatgggatccatgcttacacgaataatgaaaacagagaagttgaacagagttctgcaaaatactgaaaacaaaagttttcataccttttcttcattttggcacaatagcattccgttgatctgagtcattaaccagtaagtttaatttgttcaagtggcaaagtaatcccatcccaatatagatagcggaagttataaaataactgctgaataggtttcaaacaaataagataagatcgttgtgtagtccccagattgaaat

SEQ ID NO: 95334 - DNA, 353 bp, Glycine max
gtaaagctagaagaatttattactgtcgaaatctcaccataacttacaaagaagccctatggtgaggatcaccttagaacgttcaacaggatctaatgtgctcttaacttaattcattttccacatataattgcttagctttgtcaacttctgagaacttctggaaagttatacaattatttctctaacttcaatctttacaaaacatgttataccccaattatttgatgcaactagaacggtttatcacatcatattttctcaagcgatcaagtccatccaacttgttctacagttgctttcacgttccattctatctatgcagccgaaaacactctttcttgatataggga

SEQ ID NO: 95335 - DNA, 319 bp, Glycine max
aaaaaagggccctttaaaatccccggggcttgttcccaaaaaaaattggggcgggtttatcatccatggaaaaacggggattacttcctgaatttacattaaaggcctttaaaccttaaaaagggttttggccattgaatcttcaatttttgcctgacaataaaaggagcccttttacaaggttttaccaacataaaccctcccacctaaaaccttttaagggttacaacttagttaaaaagggttgccaatggttttccaagggttggaaacatagagggggtccaacacttttcacttgggggggaaagccccaaaa

SEQ ID NO: 95336 - DNA, 274 bp, Glycine max
aaaaaaaaaaaatagggcctttaacgggggggccccccaggaccagggggccccctctggagaatcccaaagccctagcccccaaggaattaaaagggtttaggacccggacccggacccggaaccccacccgccccccccccccgaaagcccgggaccccaccgggcctgacaaagggcatcccccccaccaccggggggggaaaccttagcccccaaaccggaaacctgaaaacccaagggggaacccctttgtccaaaaaaaacccccccc

SEQ ID NO: 95337 - DNA, 185 bp, Glycine max
gaaccatcctatcattatatttataagccacatgatgggatttaatattatttacattcgcacatattaccaattattatgaatcttaaccacggctaaaccactacagcaaactgtaacgcatacaaaaattggtgagttcaaaatgttcgacaaatgaaaacagccccttcacttgcagatac

SEQ ID NO: 95338 - DNA, 479 bp, Glycine max
ggtaccaccatgcttttgtattatgacaaacatcagatattctctatactaatcatgctcaagacaagggaaaaaaaaaacttttcaacgggatccatcatccatcaccagacccaaatctacttcatttgatttagaaaattcctgttaggcacatttgcttctgcacatcggtgcatcgtaaatgacctaagggagggagcttacctgtttcatacctgaaatgacctggcaaaatgagttacaaataagggtgattcagctgcagcattcaattaaagctacagaccaaaagtgcgctaaaagaaaatacataccacacgtcaccgtatttcaattatccacgttaactcaaaatattgcttgatttccaaaatcccagggatcatcaaaatggcatatgttagcatttcattcttcctttttttattgaactgcctaaatacaatacaaaactaacatctaataaaagaaatcca

SEQ ID NO: 95339 - DNA, 258 bp, Glycine max
aaggaaaaagggcccaaaatttataaaaccccccaaagaaaaaccccccaagggaaacccctaaaaaaaattggggccccccaaaggaaaccacaaaaagggaaactggggccccaatttaaaccccttttaaacccaaaaaaaaaaaaggagccacccaaaatgtggaaaggggaaggaacccccgaaaggaaccccggggattaagaacctaaaagggcccgttttcccccttggggcccccaaagaaaacccccc

SEQ ID NO: 95340 - DNA, 485 bp, Glycine max
gttggcaattttgaatgaataactcgagtaatgtgcatgattttacaactaagaactttttttaatcttgaacatttgaggaataagaagatcggatatataataaatacactccatatatatataatggcatgcatgtaactgtacaaaatcgatcgcagagattatcggaagaaaggtctgagtgaatgaaattcaggggacacgctccaatactcgttgtaatgccctcctgataccttcctgatcaagggatgtagtgagatgtatctcctgcacctgcaccacgggacaaaacatttgagacattttttaaatgtgtatatctaggttaaagtggcccattccattgggttaattatttaaggaaatttgtcacctgtcttccagcccgggcaagtagagtaaacctttggttcgtgggaggtgcattagaaagccaaagctgcaagacttgcgagaccactcttttttcaaacccttga

SEQ ID NO: 95341 - DNA, 231 bp, Glycine max
ggaatgcttattttatatctatgcgtttcactactcgtgcgagaattatacgcaaaaagtgagcaacgaaatagtatactcgagacataatagttatgcacgggacataacaaagaaattttgtatcccagtcactgctcgactgtagtcagacaaacaactttatacagattactactcaattccacctatggcgttcaaggccgtacaatttgaattccaaaaaacatg

SEQ ID NO: 95342 - DNA, 348 bp, Glycine max
aaaagggaaccaaattttctgcagtttttatcttcttttttggcaactctgcagtttttatcaaaaaaaaaaaactgcactgttaggaaataaaaccgaccttttaccaaggggtataaccataacaaattggaaagggccactcagtgagggtaactgacaaatctagtcaacaaaaaaaatgctgctgctatcagcaactaacctgaaaaacaaaaaatcccatagcaaccctgcaaaaaacaggcaatcgacatgagaaccactattatagatatgggggaatgcccacttggcaaaaatgtggctgctggcttgctgcttttttactaacattatccaaaactg

SEQ ID NO: 95343 - DNA, 268 bp, Glycine max
cacaagcatgtgcacaatgatgatgtattactatttgtaataataatatatcgtacatacataaataagacagaacgatatatcatcaatcagcttgttatcaatatgattccatgccatttcatttgacaccttctcccattccaccagcccaactcaataaaaaaatttcccatattggtggtgcttacaaacaactttgaaacctttttctcattcctatgatgatcgtttatacaatgcagcatgcattaggattttcatcact

SEQ ID NO: 95344 - DNA, 279 bp, Glycine max
ttttttttttttttttttttttttttttttttttttttttttttttttgtttttttttttttttttttttttttttttaaaaaaaaattgtgggaaattttttttaaagtaaaaatttggggccccctttaaccttggccctaaaatttgaaaaaagggttttttcacattaccccaggcccttcccgggttcccccggccccaatgggcccggcccgggggccccccgaatcaccctttttggggaaaattcgggcttgcaccgaccccccttttgtt

SEQ ID NO: 95345 - DNA, 266 bp, Glycine max
aaacaaaaaggcggggatattaaaattacctcatagtcaaacccggggaaaaataaaaacccccccagttttcgacggaataatttattggggccaaaattatacccaaaacggggcttattttaaccttccccacaaatcctttttaaagttttccctatatcccccgggaaacccccctaccctttttttgaaattgatttgctttataggcaaaaaacatgagggggcccccccggttttccattaaaaactttagggccctt

SEQ ID NO: 95346 - DNA, 393 bp, Glycine max
tttttttttttttttttttttttttttttttttttttttttttttttttttttttttttttttttttttttttttttttttttttttttttttttgggccggaaaaccaaaagggccccccggggcccccaaaaaagggccccaggggacccgaaatccaaaggggaacccaaaataattttttaaaaaaaaaaacacaaaaccccaagtggggggccggaagaggggaaggaaaaaaggggcccccaaaaaaccattgggggggccccggggcccctttgggcctgggaaaccctttaaaaggaaatttggcaaaaagcccaaagaaaagggcccctgggcccaacccagtaaaaatttttgggaagggaaaaaaaaagggggcccatttac

SEQ ID NO: 95347 - DNA, 462 bp, Glycine max
aaaccaaaattaaatttcaaataataaaaagtacaggatcatcacaacgttcttccaccgaaatttcccacaataataatccaaatgtcccccaaaaaatacaagcggcaataataacaaatccgtgtcttttaaaaaacaaaaagcggttcgatctatttcggatcgatttttatcaacgaaccgcgcatccgtgacgcgtgaacccgatccgcgaccggtccaaatcgaactcaaacaagtacccctgctgcatcagattcccaatcaccgaaaaccccgaatccggtcgaaccggctgaaccgcaagacacttaactccctccgccggttcaataaaataattacccaccggcggcgacagaaccgctttcccggcgagccggaatctcagccgcggcagcttcggcctcgccacgccggaaacattaacacaaaggtcgaaccccagcgcggcagcgc

SEQ ID NO: 95348 - DNA, 299 bp, Glycine max
aacacgacgataaataattaatttattcgcatcaagctcaccattcaaggaattatgttacaacaaaataaattaaatgccatctttcgatacaataatatcattcagttaagggcttaacatgggaataagcaacacaaagaacgttaatatttttccaattagcacagtaaaagctgaaaaaagatcctgggcaccccttggatatacagttccagtcttggtatccttcagtttgatgctggaagagcaattgtaatcaggccatccaatgctcatattggcaagatcatatttga

SEQ ID NO: 95349 - DNA, 510 bp, Glycine max
  unsure (1)..(510): unsure at all n locations
cttttatgtgcctggattatgctgtgtggcctcttccaagttggcaataaccataattattgctctggagacaactttatttgcctttacatgaactctaccaattttcatcttaaatagggttattgctatttgtatgcacatttttgcttcattaacatatctttgctttgttcttgttggatttttaggtttcttaaccttcccaaggtttctgaattttgatatgtattaatttttgctgtagtttatttttctgcaaatagaaggcaatgttagccgcaaaagcctctcttcgaaatctctgaccccaaataaagctattttagctatataaaatattgtattcaacattctttgttaacttgaattccacctgttattttgtataattgaaggacccttacagaagaaagggcaaagctgatatatgattgtgtaagtatgtgatatctacacanattttcttgtatttattttctccagctcatgtatgaatgtgatggtatc

SEQ ID NO: 95350 - DNA, 483 bp, Glycine max
aaacctatcaacaccatgccaaactccagattattccattaactggaacccaacccataaaaatgaagccatatatcctccatattctattatagtagcacaataacaataataataattataaatgtcttgctgatcaattcacaccatctctgcaaaaggaaagtggaatttcaagggaccaaaattacaggggagaaggggaaggtgctgatgcaataataatgtcctctgacacgccagaaacagggccaggggcagctccagagctcaccagctcaaccatggcacgacgagggttggtcttgtgcttctcacacagttctggcaaaaacacccctgcatcacatcaaagcatgcttagttattatctatgctaattagtaattatcgtaacaagaaaaatgtaaaatttgataactatgtactattgaaatggccattaaaatagttttataatataaaatttaattattatgctca

SEQ ID NO: 95351 - DNA, 458 bp, Glycine max
aaagtagaaaaaaaaaattctttcaactatccatcctttgtataaacactgtacattcttttttttgtttatttcctacacttatccacgcattttgaatcaaagctcagggaaacaacactccacgttgttccctcttcctatctctcccaccaccatatattcaaattctatttagtagtaaccacaaaaatttcaacaagccccaccccatttcctaaaacaaaggaaagaaaaaacaaattccgaacttcatcccaatcttccatgtacaagttttcccatccttcagcacaccatcacaatggctgtgtttataaaattaagccataaaaaaccccaattccagggaacttcggtcagccatttgaccgtggcgaggcattttaaccagtcaactccaagacctttgacaagggtttcaaatttcacgcatttttttcctggatgttatgagc

SEQ ID NO: 95352 - DNA, 431 bp, Glycine max
tgcaaactcactggaaaaagtcctgaaagaagagatgggttcagaggaaaccaattttccaagcaaaccttcaagaagggtctctcatcatgttcagtctgatgctacaagggaaacaacaactcatgcttggccacaacataggtcaccatcaccaccaccaccatgtgttaaaggtaacaacaacaacaactccaacaatgaaattgatgtgtccatgtcttcaggtgcacaatattgttactacatgttggaggctatgcctcagccagggccaacatggtccacaacaggaccttgtgtattggctgagccaacaccaacaccatccccatcagcactcattgaagattcttcatgtacttggtggctgggataccttgaaggcttagatggcaatttgaccactttgaaattggatcccccatttg

SEQ ID NO: 95353 - DNA, 305 bp, Glycine max
ggtgaaacaaaaaaaggaaactagaatttaaaccttcggggccaaatttacacattaaatgtcaccaaagttgcctaacaaagaactgggaccttccagtaaaatacaagaacctccccacataacggggccccccccctaaaagaagtgccctgaataaaatttaaaactcccttttccccagcccattggaagctttgggtgctccatactggatccagttttttgcacatacaagggcccccactgtttttggccgcagggaacttttatactgaaccatttttttgacttttgtttcaaaa

SEQ ID NO: 95354 - DNA, 118 bp, Glycine max
gctaaagagcttatttattaattagcattctgaacatcacccatgttactaaatcttaccctaaatacaatattactcaaacaaacacaattactaaacatcaccctaaaataaacat

SEQ ID NO: 95355 - DNA, 345 bp, Glycine max
gggaagaaaaagggacttctctggggctattggcttaaaatatgacgaaacctgaagaacaactatgaccacttcaggaatcataaagataaagtctactgcaaagtaaaaaaaaaaaaaaaaacttaaatacaaattactttagtcccaaccggtaaattaatttagctaccccattcccagttcccaccaactggaagaaaagtcaacatttattaactaacataatccataaccccaaaaaattttaaaactaatataaccaccaagaaggaatttatcttctcttcctagtttcacacttccagacaccttataacatactttacacaaagcaaaatcagc

SEQ ID NO: 95356 - DNA, 288 bp, Glycine max
ggttaaaatgaaataatgacggctgaacatggatggtacaaattacttctataatcttatcgagcttagatagaccactaacaagtctataaacacacggtgaagctaaattaaacccaagaagaagaaaaacttattaaaaaaagtacatcaacggattacacctccaaacttggtcacttaaacaaaaatctaaaaacgaaaaggcaagactaaatacaaaatatctgtgtctcagttgtcttttatactagccgtggcaacctacaggggtgccacccacttacg

SEQ ID NO: 95357 - DNA, 220 bp, Glycine max
aatcgtaatatggaactccttccatattgatattttatagcaaaatatattaaagaagctgattgggcagtacctaaggcaacgagcaagcagctccgtaacttaagagcacccattatctttttgggggctcaatctctaataaaaaaaatcttgattaaatccaatcattgaacctaagaagcaggaccacatatccaatttgcagaccaaacacagg

SEQ ID NO: 95358 - DNA, 71 bp, Glycine max
ctactcgtcgggcgtcctttttttttttttttttatccacaattcaaatcatctatttcatataaaatggg

SEQ ID NO: 95359 - DNA, 302 bp, Glycine max
cacatcctctctttcacagcactatatatatttatatacatatttgcgtttttctgcgtttgcatagctgcattctgagctccttcactctgtttgggtttcgcttccattctccgctatctattcgagatgagcatgcttagtcctgaaggtgaactgaaaataagttttggctatcaatgcaatagtgatagagctatatcttgtaatgaaatccaaagaacaagcagtttctcttggctgtctggtgctgccttaagtgcaaatgctacacttgccaacacaaacatctgcaatggtgt

SEQ ID NO: 95360 - DNA, 276 bp, Glycine max
ctaattgcatgattcaatcttttatttcttatatgatatctcaagagattgctcgacagagcctcacatctaacatgtcacatgtctaataaacccctacttgcctcctcgaggggagattaatggatctctgtaagcccaaatgttgcaggaataatactaactcctgcggtgacaacatatttcaaaactcggtcttactgactaaagactcaaacataacgaaaaggattgccatgctggaagaaggaaccacattcaagagcgaggaagccc

SEQ ID NO: 95361 - DNA, 159 bp, Glycine max
cgtagactctttggatttcacgagctatggaaaaggtggtgcggtccctaacatcacgttcacgaattactgcgttcacatgaacaaccctacggaaacgtctcagagctacgctgacggaacggttgttggaacgcagagtatttccatctacataga

SEQ ID NO: 95362 - DNA, 220 bp, Glycine max
caaagggccccaacccctaaggttttaagcgggggacccaaattaaaaacaggggccaaccctgggcccaaaacattcaattttaaaaatctggcaaaaaaaaaaaaaccttttacaaagccccaaaaccaagggcccctgggaattaaaccgggggggccaaaaacttattttttttccccagcctgggcaaattcggaagcccggggcttttttaccc

SEQ ID NO: 95363 - DNA, 123 bp, Glycine max
aatcaatcaatacaaagcactatctaccacacgactcacgacccagtaaccgggttctgcaaatttggccagcttgcagaggaaaaggtccagaactttccactccaatccccggataaatcc

SEQ ID NO: 95364 - DNA, 465 bp, Glycine max
caaattcagatccttcatttaaattagttttgatatattctttgtaatacaatttttcagcacttgaataaataacatcaggatattggtgaattgagatgactaacattcacgttttctaaattacttcactaaaacagaaaaactttgcaaatgaagaacactttaaactaaaagtgagaatattaaacattttaacttatggcaataaagaggacacatgcacttagagccaatgttgttgatttaactgcaacagatattggtaatcttcccttgtcttttcttaggtcgaggccttggtacacaggtacattgataagaaccaaaactccacttagtagaacttgcaatgccattgtttcataaattctgagacccccttcacttatgaatacttgctttagtaacattccaagaagacaaaacaaattgagcaatgcaagtgctgcaagtaaagtgagc

SEQ ID NO: 95365 - DNA, 252 bp, Glycine max
gggtgccaaacctgaaggtaataatggggttccaaaccccaaccaaaaaaaactttgagggccacacaaactaacccacttaaaaacccaacctaaaaagcaggattacccgggcaaaaataaacggaagaaatcaaaaaccaaaggctttccaaaaaaaataaaattccgattgggccaaccaagtaaatggaaaattaaaaaaactttactgaatggcccccccaaaacccttgggtgaaagccaacccc

SEQ ID NO: 95366 - DNA, 186 bp, Glycine max
aaaacaatggcgaagctgttagcgttgagttgctggcgaagcctctcgccgcgaccattaaatcagttatagctcgaatgtcccaagggcgagagtgtcgccaccgtccaagagctctctgagtccaccgctgttctctccgtcgtcggaatgagctgcgctgcctgcgccggatccgtggagaag

SEQ ID NO: 95367 - DNA, 445 bp, Glycine max
cttaattcatcaaaatcttgtctttttacccactccattgatgaagatgagccatgatagcaaggccttcctaccattccaagccccttctttctaactatagcatgccagacatctgactcacttggtggaggatttccttgcgcaaatgcacttttggtcaattgttccaatgttcgtgcaaattcctcattgacatgttgtgatctcctatccacctatagctgagtatatgggtcagttcggtccattttggtcttcaattaaatgaactacaccaagctgacccacattaaatggaccacatttttacctagactgcatccagcccacttatctcacaggctaatggactgatttgctggcccaataataaaaaaaaattgaaaattgaaaacactagtcaactttttgaaaaatgataaaaaaatttgaaatatctcta

SEQ ID NO: 95368 - DNA, 356 bp, Glycine max
gataaaaaaatgttgttgattttgaagtattatgagtggcatgcatgacaaaatcacatgacaccaaggattaatttgtctggatggaaattaaatcattgaatgtgcacactccaacgagatcctagtccaattaagaggatctagatccatgagaaaacattcaagcataatgacttaaaagcattggaaacttggttgaatggcatagtagttgctgctccaccatggcatcaaagactttgtcataagcaacagacgaagcagacctgacatggttcccatgaacaagcggagcctgtctctggaaaatcaaaatagatgtttgagccgcagagttcaaatcggtcaaagca

SEQ ID NO: 95369 - DNA, 458 bp, Glycine max
agataacaagatattggaatttataaacttgtaaatattatataaaccgatgaacagaaaagatatatcatcaaccataagagcctgattttctggatcaatattctctagaaaaacccttatgtgcaattttttctgctctacttgaggatttttggccaaaaccttgcgcatataagctataatactattaatcttgttaacatccaagtgactgatagcaaggtgagtcttgatgccccaatgagatttcttactaagattcctcacaacatttacactcaaattgtgattaggaatatgaactgcttcacaatcagaaactctcactattgttggtgaccaccagcttacatgctatacaaaatataaaatttgattacaatgaaaatttttaaagatatatacttggggaaaatatcacttataataaaaatcacttacactgaataacatta

SEQ ID NO: 95370 - DNA, 303 bp, Glycine max
tttgtgattttttttttttttttttttttttttttttttttttttttttttttttattttttggtttttgacataaaaaaacttgatttgaccttcatagatcaaaatttcaaacttacatacgggggaacattacccgggggaacctgattggggcccaatcctttacctaaaaactggccccacccccttttagatttgaaaaacttggttccatccaattccaaaacttaagcattcctaagaaaattttgcccccctaaatttgcccgtttatttggcaatgaaaggtcccttggaagg

SEQ ID NO: 95371 - DNA, 211 bp, Glycine max
cccataaaagaaaataaaggttatttttaaccgaagtcgggcaaagggttgggtaaaaccggcgtctccggtacatttttttttttttttaaaccccgtttccatacgggctaattcatctcctttttattcaggaccatgactttttggcccaatgggtggggggggctaaaacgggaacgggaacggggggaagccaaaggcattccct

SEQ ID NO: 95372 - DNA, 379 bp, Glycine max
gcaggaacaatgagacaatttatcctttaaaaccaaaaggtacacaggagagaagaggcaaatagaccaattagtctaaaaactcacttttgattcttgtttctcttttctgtctgggttgataaactgtgtataacaactaagtagaactacaaacataacatccaagctaaaaatcttcactttgaactttaatccagctaagattaacaattatacactaccctcctcacttctggccttcaaactcaagttatccatcacgggggaatttgaaacagccttgtagttatacaactctgcaattacgattataccacttcatctgtgcatgctttctctgggtaatgctccagctgtacaatgacttcaaattata

SEQ ID NO: 95373 - DNA, 402 bp, Glycine max
ataaaaatctaaagaaagatactttcatttctgtattcttaagagttctaggttcaacatattttttactacaagcacattacctttttcccatgcatattaaaatgaagcaaaacaagatagggaaaactctttgacatacgctaggcatcagatatctatataacaaataacaacgaaactgttaaattacaacctcaaatgtatcacaaccttcacgtgaaatgtacagtgcagttaaattaaactttgtcctcatgcaaaattggggttacaatctgcaacctttatcaaaatgctccgtgtggactttagccagccggaccagtaaaaagtccaaagtaagcttgctagctctgtgtaatcgaagttcacaacaagtgcagcatatgatattgtgat

SEQ ID NO: 95374 - DNA, 407 bp, Glycine max
aacaaaattgatgcttcaacattaaagaaaaatgtaatcaagtacaactagaatgagactattacacaattatttaatttacaaagcatcctgtattcttttcccagataccttgtcactctaatctttttttaaaaaaagaaaaaaaaaagaaaagaaatgtgaaagagtacaaaataacaatggtacaaaggtcaaaatgctggtttccctttagctttatcaaggcattgctcctaccaatcatgatcaaaagtggaaacttagccaatgtccacatcaatggccattgatttctcctctgaaacaaagttactttctggagcggctgcaggctccgcaaactgcgccgaagtggactctgattctgtggctgcaaatggactcctcgtgtgaggagcaatact

SEQ ID NO: 95375 - DNA, 175 bp, Glycine max
atcagtctctgaaaagagcaaagccggacaggatccccattttgtgaatcaagagggtgatatagagagattcagtgctccatctaagaggcatcacctctccccaaatgaggtatctgttacctcatgtgcgcaggcttcaacaagagcatatcttttgcatgatcaacgccca

SEQ ID NO: 95376 - DNA, 262 bp, Glycine max
ggacgaggaagatagtggagatcttggggagcagggctttgagggatttcaagtttagcaactggttcggggagcgagactttaggttcattggccttgctttgccacttcaccagaccgacttccctagtatgtcgtatttctattgctggacagtgagctccatatggcactaccatggaggctgccactatgatgagcatttttacttcagggtcgaggatggagaggacgacagtagcgatgccagggtcaaaacaat

SEQ ID NO: 95377 - DNA, 278 bp, Glycine max
tttttgctttttcttaagaccaaatatgtggatatcataagcacttatccaaatgtggaaaaacataaatccaaccatatgttcaatatgcgggatagaaaaacccaaatataatgacatggcatccttccactgcacccctaatattcttcaggtctttcttgcagctacagggattgcctcctttatagctggagcaaaaggtgcaatcctgtatgtgaaaaaacctactatcatgggtatcaagcctaagcgcatatacccaaagcctggaacca

SEQ ID NO: 95378 - DNA, 314 bp, Glycine max
cacattcaaatggccctgagactggaccaagttccacaatagtggagattaacaagagggggtatacagctacatattcactgaagaaacagtgggggtgaaagtttgaaaatgttggttaccacctctggcaggtcaactgacagaaatagaataagattccggcaatgaccaccaggtgcacattaaatggtaataataagtaaatcgaaaccggaaagactaagagagggctgaaatcagcaaagctggcaggcagagagagggcatatgatggaaatctctgcacaatcccatgcatgggaagggaagga

SEQ ID NO: 95379 - DNA, 413 bp, Glycine max
ctcctaaaaccaaaatacttaacaaacattctccctctttgccattctcatcatcaccgctgttaacaaccatggttatgcgggagaaaaccaaattggggttttctcaatgggaataacaacagcaaaaacccaagaggaacataagctcttcctgcctccatggttttgtcggcactatttgggtgcaaatcagttcatatcagacagcaatcacaaacatatcaattttgtgcgatagcggtttggtgggtgtgcgatgggatcgtcaggatttggtgggtgcacgacgagggtcgttggggcttgatggggtgtgtgactgaaacaccatttggtgggtgaggtgatgggcttgtcggtgacaaagtcaatgtgaaaagagtgaaaaaaattgaaatgccactgctggc

SEQ ID NO: 95380 - DNA, 534 bp, Glycine max
acatagaagtaattagatgcattgatatcccattttgagtagcataatcatatcaataatgaatggtaagattgatgatttcaacataatttttagctactaaacaaaacattttgtacagaaaagaaagaaacaagaaaacttggaagaatatttaaaagctgaatttgggccaaccatagaaattccgaaattccattactagtaaacaaaagtgacatttagattgaagtcaaggaaggaagactcctgtcaacaatcatccactcaatcccaaatgtcaaacaaaaacaatcaacaactcaacaccataactcaaccattcctgcctgactaaccacaacacaacaaaaacaagacacacaactgagcttagtaactcaaccttgactcacagatacgatgcttgtgaatcatgactatacattgtttattattattattattattattattattattatcaattattaatcaataagtctccattttagttgcattctaatatttatcctacaatacttcaatataact

SEQ ID NO: 95381 - DNA, 264 bp, Glycine max
cgccattctcatttctctttccagaagataaaaaacccttttatatttttatatttttatcactagaaaaatcaaacaaataaaattttcattttcattttcttttcttttctcgctcttgttttttcggggaaattgatttcaccgtaataggagccaagaaaaacaaaacagaaaaattccgaacccgagaactcttttacctgctacaaatgcatttctctctcttttctcacactttttctctgctaaactcgcaaacac

SEQ ID NO: 95382 - DNA, 377 bp, Glycine max
aacagctaaatctacagtcacataaatagggttattgtgtggttaataattgctgtagtactagaagtaatatacagtggttgattaagtctgccatggattggagaggtaagtgatacccaccaacatttccacaaatgatctgagaccgatcaaatactcatatccttaacacaagaagatgctacaacttttaaaagagctaattcacaaaacaaaggaaacgaaattaattcaactcacagcacatttcaaaagcctctatagattacaacaaagcaaggcaatatagctttagggttgaacacaagcaactcatccaaattagaataagctacaacagcaccggcgacaacaacagaatcatactcctccat

SEQ ID NO: 95383 - DNA, 343 bp, Glycine max
  unsure (1)..(343): unsure at all n locations
catctttcttcttcttttccttcaaacaatcaaatccacccacggcaccctctcacataaaaaaaaatctcagatttcttcattccttccattcaattccaatccaaaatggatcaacaccacttnctccaccaccaccactatcaccacccccaagaacaccgcaatcgatacacctccctcacacctcaatcccaccttcacagtcaccaccacaataatcttcctccaccaccgccaaatccttctccgcctctttcctaccaccgcacaccgnaaccctacacccctcctacaccccaaccccaacatcaacaacaacaattcccttatacacccctcc

SEQ ID NO: 95384 - DNA, 392 bp, Glycine max
acagcgcatgagaattgatatttattgtcgaaaagttgcaaaacgtgagacgatgataaaatttgtactaaattacatttttaaacttgcaaattgtactatatttatttagatatacccccttccccccaaaaaaactgagagaaaaaggtcttcttcactattttattaattaatacgagagggaaaaatgcttccatatatgtagcttttagtaatgtacagcagcaatttcctctcacttccaactgcagtctttcaagtcttaagataggttggtataggtacaccagactgttctgtcaactttttataagcagcttgcaaccttctagtgactggtcctacttctccattgccaattatgcgaccatcaaccttcactacggggc

SEQ ID NO: 95385 - DNA, 335 bp, Glycine max
aaaacaacagtatctcaatcttcatcctcattgttttttcttcaaacttgatatcttcacagcatggaatgattacagaagttgtgctcccccaccttgctggtatctatgtcaggagcacaatacatttgaagataatacgaatggggagagatgaataaattttgggcaatcaaatactctgaatttacaggcctctttctcagcctaaaatcttaaaaagaggcaataaagcaagaggccaatccaattgttttacaatgaaatgagagataaaatcaccgtgtagaaagcactttcaatggtttggacaagtgatgatggctagttgtatg

SEQ ID NO: 95386 - DNA, 344 bp, Glycine max
ggaaaacaaaccccccggctaatatatttatgatcagcatatcaaactctaaaaaatttacaactaaataacgggggcccttagtgggggaagggaagcccacatagaataaaactggtaaacttttgtcattgtaaacaaaacaagcatcatttgtactttaacaaaaagcagttgcaacgggcttcttatttacttattgggacttgggggcccttatttgagtatcctcactccccatgaaaggttttaacactggaaaagtcaggcctgatcaaagagaaatgttttgctaccaaatttgctttaaaaaaaagcctacaagtccccaggattttttactt

SEQ ID NO: 95387 - DNA, 433 bp, Glycine max
atcagacaaattagccactatacacaactttataaagctagcaagaaatctaacaaatatttaaagtagttgttctgcatgcggtgcgacatacacaattaattaacataacctactacttattcagtcatcggtgtagctgagacttgagagtcaactttgttgtagcataccaacaaagcacagatagattggattggatgtgttcatggttctgatcccaagaacatatccactttctcccaatccaaaaaagggtcatcgttgttgtcaacatccatttgagtagcttcctcaccgtgaagagggggttggtcatggtctccggaggaagagctctctgctggtgaacacgttgcacttctctccaccattttatgatgataatcatcatatgatgttgaacccttttgttgctcttctacattttgag

SEQ ID NO: 95388 - DNA, 333 bp, Glycine max
caggttccacgtggcttattgaacctttgccattaataccaatttccataaccaaatgcttggtaggaaacaccaaaaggatacatagcccgcgaaaaataaagtgcctctcagctacaaatggaaaaaatttgtacaataatacactaggaaaccaaaagtgaacaactttttagtcaaatcaattacttccgtaaaattttgcttttcctcactgaattgcatttagaacccttatttgcttccatgtatgccacagatatgtatatatggggtagtaattcacaattttgaccttgcctgtttccctttccgcaccttttttacctgcgc

SEQ ID NO: 95389 - DNA, 301 bp, Glycine max
cgggaaagcccaacttttatttgggtctaaacttattattcaccctacaatatgtaaccacgttatttcgggattagatggggacaaacttattggcactgttcagcaatattctacatagggtaacaaaaacattattcacatttgtttaccaaaaacacgccaaccttatatttaaatcatatgcaaaaatttgcataagcttgctaaagtggagaagaccaagaatttgaatcaccccaattttttgcgatggggctcaaaaatgctttgggaataccaaaggaactgcccaaggcaa

SEQ ID NO: 95390 - DNA, 180 bp, Glycine max
aaaccaaatttcatcaatttcattactgaaaaatataatagaacgtcctttgataaagcccccaaagctagtaaacaaattttttaatttatttacctgaataaaatcatgggaaagaattttttaacccaacctgggggaatttaaactgcgatcatgaatataaaagttggtcactgg

SEQ ID NO: 95391 - DNA, 101 bp, Glycine max
ctcatgttccttatgcttcgggctccactgaacttcacttagggtttgcctatcaatctcttttgattcctcgctctctactcgtttatgctccttgcatt

SEQ ID NO: 95392 - DNA, 281 bp, Glycine max
ttttttttttttttttttttttttttttttttttttttttttttttttttttttttttttttttaaaagccgagaaagggttaaaatattttccttccggaaatcacccccgaacatatttcttacattcccaacactcctttggtggctgaccatccctcaaagggttaacccaaaaatcaatacactttaaacttcaatttttctataaacataggacttaaaaacatcccaacctcaggaacattaatcagggcatgaagggctctaattctgggatt

SEQ ID NO: 95393 - DNA, 321 bp, Glycine max
acccattcaaaatttttatttttaattttaaaaaaagcaggggaatggaagtgcccccccttattccttgagagaaaagggatatattcactcatacctgttatatagggacattaccatagaacatacctgcgttgttcctataaaaatataaacaagctgcctggttcaaaaatccaactggaaaatggggggggcaaagtccaaagttggcaactcaaacgcaacccactgaaactgttttccaaagaggaccttttaatgctgagtttcttttttttgatttggacaaaaagagggtaaaccccccctgggaaactt

SEQ ID NO: 95394 - DNA, 205 bp, Glycine max
aaaaagaaaaattggactttttcaattataacatctgcgaacattcattccaattcaaaatattgcgcctcactgaatttaagcaacatcccatatattccttttcgcctagttttagcggcttcttcagccattcccttgagatattgcttaaattcagggaggcccaatattttgaattataacatctgcgaacattcattcc

SEQ ID NO: 95395 - DNA, 288 bp, Glycine max
caagggacaccctgtttgggctcatctttttatttttcttaccaaaccaaaaggggggcaaattataatcccaacattggcttggtttatttgggtattggaaaattcattctcaatggcactctgggttggtgcacttttttggagaccccccctagagttgtaaactccacttgggcccttagacaacaaacacaaatgggtccctttttttaccaccctccctttggtcaacacaacaattccatgacaattctttatagggctcaacctatgagccaccaccac

SEQ ID NO: 95396 - DNA, 259 bp, Glycine max
attatctaattttaacatgtattataaaattaaataattacttgacaatatatagttaaattctcataccagaacaaaactgtgaagtaactgactctactatttcttctcaactgattgtccatccattaagcacctaacagcccctcggcaggatggggattgctcaagacacaatttccatgaaaaatgattatggtgaacttaccatccaatgaaagaagggggctcaataattttttcaattactcgtactcac

SEQ ID NO: 95397 - DNA, 476 bp, Glycine max
acttgcttcacttaagtgttctgaaattaggtactacatagatgtgtggtcaattttatagtctttgtgcattccttaggtttgttaggtgcccggtacgagtatgatagtcatcagttttaaagtgtccatgcctctattaatcaggaaacatcgcctacgaggatatttgaagttacatgcctggcctccattccatgttttcatcacttaagattctcaatttctttgttaatttactttttgggggtctgatatgcaggaccaacttaaagcttccttggaggcctctaatttcaatcgatggaagcacagcttatgaattaaatgaagattacaaaattgttagacatgttgagagttggaacatttctgcagttgaagcagttttgcagattttctcctttaagtctaaaaatccaggtggttgagacatcgagtgtcatgaaattatccatgtgtcactctctgttggc

SEQ ID NO: 95398 - DNA, 451 bp, Glycine max
ctcgagccgctcgagccgattcggctcgaggattgctattgcccattggtgggtcagcgctcctctctctctctctctctctctcctcgaactccgacgcacccttccatctctccctttcactccaacccaaacctgaatctctgatcccttctccctctcctttctctttcctctcctccctttgctgtactacatcccagccacatttccttttcactccgattttcacccccaattttcaccagggaatccaccgttaattttcgcttaactgttgaactaggtttttgtttattgttcttgttgggtcaatcgagaatgcctcgggggtgattccgattcgtgtcttagatctcgttactgttgcgtccgtggattgaatttggggggagtttatcgatcccttagcggtgtttatacaatgtggttggagaagtatttatgagtt

SEQ ID NO: 95399 - DNA, 190 bp, Glycine max
ataaaaacaaaagttcaaattttttcttctatttttggtttttcaattcaaatattagggggatttgcaagaaggaagagatgaaagacgcagggaccgtgaaaattacattttctttcctatcatattgtcgtcctttgagacattctccttttaaaaggacgtttttcaagcctgatttttacataac

SEQ ID NO: 95400 - DNA, 287 bp, Glycine max
cagaaaaggggttaagcgaggaagactgtgtagaaactagaaaccctagagagagagagagatgagaagaactcttctgagaaatgctactctctacactcgcaaccttctccatcactcggcccctgcattcgacgcttcaactcgtccccaactcagactcttctgctccaatgaaacccccccaccggttccccaaatcgacgacgttgaccacaaagagctgaaagcgcagatcgagagctacttcaagggcgacgagcaggtgcttccgtcgatcatggaga

SEQ ID NO: 95401 - DNA, 411 bp, Glycine max
aagaaagataagccagaagaaattaaacattccatatcacaaaggtcacccaatttgagctattttagtcccaggatctatttagacaaaagaataagcagtgtttcaaacaaagtgaaccagactccaaaagtagctcaagaatggaagtcacaaagaaagcctcttcaatgtcatatcaacttggtccatgagcaagatatgatggagttaaaaaagaacagagtggaaaaggtagcatccttcccatcactaatgaactcaggagggaaccataaatcagtgactgtttctgctgcaaaaagcattgatgatgtgcctatttgtggacagatttcaaataagtgcactaaaacttctcagcatactagtagagaacaaaagaggagctgggacatggttgtagacact

SEQ ID NO: 95402 - DNA, 251 bp, Glycine max
gaaaactgaaaaatgagaatattattattacagttaagaaactaatcatggaaagtaatgagcttcaaaccagcttttgatggcaatccacaatatttctcccttaaaactaaatcatcttggcaagaccaagtcagtcctcgaggagagctctttggccacatgaacctctcagagaaggggttcactaaactctgccgaaattgttgcactgtctcacatagcaacccctttgccatggattttatttt

SEQ ID NO: 95403 - DNA, 202 bp, Glycine max
caaacaatattattaatcaataattatatacacataacgtaaatgaaaaaatggcacaagcaaagaaaatcaaggaggggagtataagtcctggtacaaaaccctttattagcaaaaaaattgcacccaaatttcttcaccatcagaacctagtacttacagcttttactgagtccttaaccatgcactcatagtctctcta

SEQ ID NO: 95404 - DNA, 214 bp, Glycine max
gctgaatgaccattttttcatattacaatattacttgattctaacatgtttctcttgggacaggcacccttttttgaacaaaagattcttccaggatgcaaaatacatttttattaagaataccacgagaatgacctcctcatgaggacaagtgaaccgcctttacactgcttttccccggaagctcattacacctaaaatgccctatttaaaa

SEQ ID NO: 95405 - DNA, 111 bp, Glycine max
gcactaaaattatgtactttccaaaaaagacacacaatcttacaaattatactcaaaagtctatctacaaatcaaatcgacaggtatatataatcttagcgttgtactcca

SEQ ID NO: 95406 - DNA, 344 bp, Glycine max
gagaaaaatcaatggttcaaattaattattcagtaaaattgaaaaatgctttgtcgtatgaaaattatctgaattgttttgtgtacaagctagattctcaaacgatatacttaaattgttttaatgtaaaaatctcacctcatcttatcataatctatagaataccaagctaattcagtatgtggcacgggcaacaaggtggtcctaagtttgctcaatctcattggtatatttcttgtgtaaaaaataggaaaagtgaactaatacaaacatcttaaaataattaaataatatgaatgtataataagagagaatgatactttcatcatataagtgatgatttt

SEQ ID NO: 95407 - DNA, 448 bp, Glycine max
aaaataaccaaaagggtaaaatggtaattgtgtatatttttctattgaaatttaaaatccggtccgccaaagcaaacatgcaaggcaatgttattttcggggggtggtgtgttctaaaaagtagaaacccgccattactagggcaccatcccccaacaagccaaaggcaacactgctccctactttatccataaaaagtctagagaaaatatgcaatagatcaaacagcaataagcttcccactaatttgtaaaatgctaaatctggtacttgctctgttctatcattattaagatgagggatgcactcctgctttaatctttatcttcgtccatgtcatctgcaacagacctgctcgtttgtgcagttaaatcagagttctttgaactagccatgtcatcatcatgatccgaatcaaaatcttcaccactccatatacgacgttttg

SEQ ID NO: 95408 - DNA, 262 bp, Glycine max
gggtaactagaaaacttataaatggggacccaaaaaaaaagaaacccttttacccaaattggtaagggaaaaaaaacccgaactttaacactggggggccctattccaactgggggggccccaacaaattaccctccccccctccaaattaacttttaagaaaaagaaccctttttttatccctttgaagggggctcatggggccctccaaattaaaattcccacgggcccattcccgttcccaaggggcacccatgctttt

SEQ ID NO: 95409 - DNA, 275 bp, Glycine max
ggaaacaaaaggaattgtttttcataaaaagcgggctcctaaaaaaaggggggggttttccccccttttttttatgggtaaaaaaaccccccggacaagaatggctccccccatttaaattcccgatcgtaagttttggcccacaaaccagtttttccactaattaaacaatgggccgtccaaaattttttcggggccccaaaagctttgggggtttgacccccaaggcaaaatttggggctttttttccctaagggtgacccccctgaccaagg

SEQ ID NO: 95410 - DNA, 433 bp, Glycine max
  unsure (1)..(433): unsure at all n locations
aaaaatgtcaaggaaaaatgtaaatcactaattggtaaaaaaaatgtttgggagtatgtcttggatgcctggagaaatctggtagatagtccttcggaacaacagtttgatgaatgccttaagaagtttgaaattgtttgttcaccttggccaatgtgtgttgcctatgctaacgaaacatggataattccccacaaggaaaaatttgttacaacctagacanataaggtgatgcacttaggaaacacaacaacaaacagggttgaatatgctcattgggctttaaaaagagtattacagaatagccttggagacttatgtagtgtttgggatgccatggacaacacgatctcgctacagcacactgaaattaaagcatcctttgaaacaagtacacatgttgttagacatgtttttaaagttaccttataca

SEQ ID NO: 95411 - DNA, 405 bp, Glycine max
agaagctacatgttcagtcttcatttatgtcaacatagtctgttttcaacatcataaagcttctgtactactggattctactaatgtatgaaattggccactgctttgcttgaggatgacaattcctagaccataacaatgttaggggtggtaaaggacaactggcttttaaataaacctcttgtacatgcacaaacaatattatgttcacaggacacaagtgattgcataaatttaaaaataagactatttatcttcaatgtacctaaacaaaatgattgccatagacgtgatcgatacaaattatgcaatgcacagaaaaatctggtggtggtttgacttctaagaggaaagaacgccatactttgttgtcgggacaacgatacaaggattacattatacctt

SEQ ID NO: 95412 - DNA, 336 bp, Glycine max
ggcaaattaaactatgacacatgaatgctttatttatttatttactatttctgatttatatataggctagttagtggtgtaaaaagatatctcctgtcattgtttaatttaaaaacttgataacaatcatataaagcaattaaaaaagataagatttactgctcactcttaagtatatattcttttgatggctttaagtaaagcctctttgttgatgggtttgattaagtgatcgtccattccagcttcaatggacaatattgcctctttccctgtattagctgttaatgcaaagataggaatgtgaacaccatgagacttctcaatctcccttat

SEQ ID NO: 95413 - DNA, 360 bp, Glycine max
tctttctgtatgcgtaacacttgcaacacacatgggtacaatcaccaacactttcatattcaaaccccccatctctcatcacccaaagcagctgctttattcccaccgctcttctctacgctttctcgccatatttaaaacgcggtacggagcgaaatctacgcggctggttccgaaagccacggaggctaccggggccaataagacatagaagccgtacgagagagctcagcaagtcgacagctagccatattcatagtcggcgctcgaatgcgccaaagacaggcttgtggaggcggaatacgctgccagcgacagcgaggagagcagccagatataccctgtcatggtggagctgac

SEQ ID NO: 95414 - DNA, 415 bp, Glycine max
aacaaaaaatttggaacaatattattggataaagtgaaccataaattataaccatttgccaaaaattatgtcctgactgcaggaaacatgtacatctcattacaaaagcaaatactctaaatacttgacgctcatataaatgatttctttcaccccattctttaaaggaatgtcgacacctgctaaaataacaaagtgaatgtcatgctgctcatgctgctttaaagccctctgacaaatgctgataatactgcttttgcctgtctgacacagacggagacactttactcagtgctacctcaaaatggtgcctcttgatggtcctcttgatggtcaatgtatcacaagttgtctcaatagaggtcaatctctcttcaagagcagccattgctgcttcattcatcaatgcagcaag

SEQ ID NO: 95415 - DNA, 71 bp, Glycine max
attttgagtgattatttcaataatgggtggtactcttatccctgttgaaactttgagttcagtgcttgact

SEQ ID NO: 95416 - DNA, 71 bp, Glycine max
agtcaagcactgaactcaaagtttcaacagggataagagtaccacccattattgaaataatcactcaaaat

SEQ ID NO: 95417 - DNA, 421 bp, Glycine max
agcaaagtgattgagagatctttgcaaagttcagaagatggtggaaaggtgtaaatatttttcagaaggcttatgttttgattccaatacacgaggagtaagttttcttgttagcattgaactattgtttgtaaatgataattcttgtaaatggtgagaagttcttttttgtgctttcctttgaattaggtcattatctgaagaaactactattcacttgacaaaagggactgttgtgaagaatcatttatcaatgtttagatatttgagctaaaatgttacctccttatttcatgtgaactaaatgagcacacttgattataagtagtgggactattattcaagaaaggacaattattgttggaggtatacacaatcggttgtagacagaaggttcaccttatgatattgtatgcttttt

SEQ ID NO: 95418 - DNA, 590 bp, Glycine max
tgcaaaggctgaaaaggatgaagttgctgaaaaaacaacacagacaagctcttcttcttgataatttcttgggtgttgatgggcttgcccctgggcattcacttcatgatagaaaacctgttacctacgctttaaataccaatgcgccccccatacaaccatatttgtaattgtactgtcctatacattgatagtgatgactgatgaacagtggtaacaaaatctggacatgggtaagttgttgttttggattgtttgattttttttagggttgctgatctgagacgaggatgaggagtataacagaagatgggttgttgacaggagaaaaatctgagttggtggtgacttgtggtggtttgacaaaggtcgagtagggttcatgttcgttgtgaatggtattacttgtagtttcgtattcatcgattgggtctgatggtgttgttcattgcctttgcgagaagtcggctgttcaactacaatcgtgaaccaacaagcatctaaacaagttattttggtgatgtgctgagtgggatgaagttaagaactgtagatttgggtttgggatgatgatttgaagaaatgattga

SEQ ID NO: 95419 - DNA, 464 bp, Glycine max
aaaaacaaaaaggttcataaggatttaaaacagcatgtcatcacaattggtgatgcttcactatagaccacattatcatacctactagaacactacttcattgcaaatgcaatggtaacaacactcaataaatctcaaaggaacactacaatgcatcctaaaaccttgatcatctttcgttcagggttaatcttgggatgttattttgccattttttttctcagttcagcaacaacttcaaaatttgtctgagtttgatgttcttctatagccaacatcttcttcaactccatgatttgttcctcataccaacaaattcttcatttgttgtaaccttcagctttagcttcttcatttgggtgacaacaaatgattcaaatccacattacttctacaacccacattacttcccacgccaccattattttcagagtcttggttcaatcatttcttcaaatcatcat

SEQ ID NO: 95420 - DNA, 126 bp, Glycine max
gatgatgcatacgagtcaccattgattgtcatcaatcttgatgacattgaaagattatagaagtatgtgcgcattggtcatcaagtttcaaacgtgatttctcaaactctgctggtgctgctcaaa

SEQ ID NO: 95421 - DNA, 399 bp, Glycine max
ataaaaatccattttttgtatttgttacaaatataccagaaattgcatcatcctctgaaacattacaactaccaaaagaaaagtatcttttgccaaccaacaccagcatcctagaacaaccgaaaacattatttaaaatttgcatccctgattctttagttgagtcatcaacaactaaaaatgaaagtcttaccatttctcctttgcttgtagcttgcataatttctgatgatatatttgcagcaacttgattgagttttccagggagggtttggcagcatcttttcttccttctgctgagattcttcctttgcttctttttccttgattttttccttcattttgttcaattgccaaaaacttgtgcttctaagctgacaaatttccgctatgcatcat

SEQ ID NO: 95422 - DNA, 330 bp, Glycine max
ctacaaatattgatattgatttctttcttgatttcaataaaagacaaaggtatgctgatcatttttggtcgtaacattcagatattttacacttaataaagcaaatagcctgctttaatacttcggaatggtgatgagaatgataataatttacatgtcgcagaagtgatgcagcagttcaatttcaaataacacatccttcatcttgtccaagcagagagagagaaaacggggcaatggccacattgaatgatcgtgagcctactctttcaaaatggatcatctgataatcaccttccattctaccatttggtgtgttcagtgggcatg

SEQ ID NO: 95423 - DNA, 449 bp, Glycine max
ttgttttttttttttggacgtaaatatcatttttttttttaagagatattgaaaatggtttaggggggggtgacaaaatgattttagatcacaggagcacgaagatactagattgattcatttcacagattagtaatgagatttttcaataactcaagtgtgaatttttagtaaagagcattttccctcaatctactcataactatggtacaaccaaaagccgtcatgccaacattgccttgctccaattatatcacatgtgacgtaagcatcgtgtcaacattgtcattttcaacagaattcacaacgcagaaggtcttgggaagagaaaggaaggaggctttacttgggttgaagttgaagtgcttcaccacacgctatgtcccaaatcccaggaaactagctgcatcttgttatcactgctcaacagatttatgaaacttttactt

SEQ ID NO: 95424 - DNA, 363 bp, Glycine max
ggacgtaaatatcatttattaaaataagaaatctagtcaatggcatcggggtcattcacaacatgattttagatcacagtagcacgaagatactagattgatacatttcacagattagtaatgagatttttcaataactcaagtatgaatttttagtaaagagcattttccctcaatctactcataactatggtacaaccaaaagccgccatgccaacattgccttgctccaattatatcacatgtcacgtaagcatcgtgtcaacattgtcattttcaacagaattcacaacgcagcaggtcttgggaagagaaaggaaggaggctttacttgggttgaagttgaagtgcttcaccacacgc

SEQ ID NO: 95425 - DNA, 456 bp, Glycine max
gctccaaataaaattgtataattcaatgttctctgatatcaaaatgtaatatacaggtgagaatttagaacggaaaaattggtaaatctcacctaccaattcttggcttagtatattatcactaggaattaccaaggttcttatatagcaacaactaaatgttctctcgggtgaaagaggtgagggataaataaattggaggctcaaaaatagaaggaaaaaaatagagaaaaagaaaacctgcaactagcacccttcaaaatcgttagcaccaaatatctccaccaaaaacagttaataattttctttctctcattctttggccacatttttatttacacttcagatcaggccagtgttcatacttcctgcatctgagcacaccatgtgtgcatatgaacattatcgcaccaagaaaatgttttccagcctaaaaattagagttccaattgatct

SEQ ID NO: 95426 - DNA, 364 bp, Glycine max
caaagaatacagaaatatgatatttaatttctagttctgtccgagtatcaaatcagagtattgtacaatgaggaggttttatggtactaaacaaggtacactacttttgtaccttgtctaaaatgggtgactggggtagtgaacaaattaaatgaattgaaagcaagaatcgaggtgggaaagagatgatgttgggggacaaatatagatcatcattctagcaaagacgctgtagttgaaatagccaagccagaaaggtgatagaaaatatcagagaattcttctctgtactttggaccaaattatcagtactattcatttagcttacagtttcaaagatagggatgattgtacttgacatact

SEQ ID NO: 95427 - DNA, 371 bp, Glycine max
cggaggaagcaactttcaactgtttaaagaatcgatgaaaaaaaatgaagtctcactgttacctggggtttggtgtttgtacatattcttaacttaatcgtgcatcatgaatatgaggctagcatactaacactgattcttttttcacacccatttatctgaaccttatacattttcacctctgtgaatccgttcacacaattgcctcccttcacatccttccagaacaacaacatggtagatttccagagctacttttataacgagtagcattgactgggcttccatcagacgtgctaagtaacaaatgtgatgctggcactgttgacacagccttaacgcatgatgacactttcacatgcgcaaaacat

SEQ ID NO: 95428 - DNA, 225 bp, Glycine max
ggatctcttccccgaattcccggatcatggaatccattaggatcggggatttgtatcctactcaccttgttgacctgtaattagcacctgccgacccttccgtattatatcacctacacagtgggctccagatgcaccttagcgcgtacaaccacctccgtgccagttatgcatgcaacgtaccttactctagtgtgtggaacccctcatcttgtgggtttgact

SEQ ID NO: 95429 - DNA, 273 bp, Glycine max
agggggcctgaaaataaatcttttaaaaaacccctataaaaggagggggcccccccaaaaccccgacccgggaaaaccccaagaaagaatcctttgaatcgggcccaaacttgggaaacttaagccaaaagaaaccccatgcccctggaaatggaaaaacccccaagggggggccgccgcccattttcgcgggaaaataatgggccccccaaacctgaaaaaaaaaacccttccacaactttcccaaagacctggttttttcaggcccctttt

SEQ ID NO: 95430 - DNA, 181 bp, Glycine max
ctctcaaccctttatccatctagaggtgcagcggctctcttctctgcacactccgaatgcagtccacactcttcaaccccacccattcccttatccacacttcaccacactctatcagacccaatcctggtcatgctgctctctccgatcgcgccttcatcgccgtggaaacccccacgga

SEQ ID NO: 95431 - DNA, 210 bp, Glycine max
agattacttaatgtactcacggttgtcacataacgtgtggtagaaccaacattatcatcgttaaaatcaagctagtcatcggcaaggcactatgcatgcgagtcctaagcctacttttgcagtggccatttcggtgaatccttagtgtctactgttgctaactaacaatggcagctatgcctgacactagaaacagggtagctctagaaa

SEQ ID NO: 95432 - DNA, 176 bp, Glycine max
tttttttttttttttttttcaattttgtatgaagagggatgttcgcatgaattgccatatcaagttgacatatgcacgtgtcttgatcaaaaatcattcctcaaccaaatctctgaaagtatagtgtaacctacgtggagatcgcacaccccactttctcccagaaaaggggggct

SEQ ID NO: 95433 - DNA, 375 bp, Glycine max
ctgtaagtgggcatgtgatcgtgaacttattgagctacattaattaaccaatgtgaaagactcttgtgcatgttgcgatattcatcattatatctcagtttgtctcattaaaaatggaaataatatgctaagttgctaactgctttatgtcatctcagtgtatgttagtttagtccaactgtgcaagttttcatttcgaccagtggttcgagttagattttgattcttcatgctatctttgtagtgggatgagtgcagaagtactcttgtgaaggttggaaaaacgagatctcaattcgatgtatggtatgccaagatggtatcctactgttgattatagattttatttgaatttgatattgatgttcaatgatt

SEQ ID NO: 95434 - DNA, 344 bp, Glycine max
acaatctggcaataccgatatttgacactataattacaaatttacatgaagtatttgtagacaatgttctctcgtttgggaatgtaatgactctatgaaagaagtaaaagcctagcaaggctggtattaatattattacacatgaaaaatgaaattttctgaagctagagcgggaagagcacctcgggtcgaattagaagcttactagacatgtatatagatttggataccctttgtacccaccacatattaaatatatatacttatctttgctgatttaaaaaaaaaaaaagcttactaaacactaattctgcaatggaaaattaaatccgaaaggaatgcct

SEQ ID NO: 95435 - DNA, 323 bp, Glycine max
cagccaattctcgatccatggccctggcttttcttcatgttgatttcagtttctatatgcaaaatgggggagaccgaatgatgcaaaatatttataatgtagatacgtcactaaccacctaagccatgaacacaaccttgttctcgtcggagactactgcgaattggtgcatttgttcaaccctctaggccctgggcggatctgcctttggcgtgcaagagttggggcaaaagggctgtacttagatggtattgacaggcttcaagtgtgagccacatgaagaactggaaacggcacaagcaaatttgcaacagtggcaacaa

SEQ ID NO: 95436 - DNA, 306 bp, Glycine max
gggtagctgccgtaaatattcaacagggcggatcatccttaattattcccttaaaaagaaacaacttcaaccattggcaacagtaaaacattgacttgggttaacttagggaacttcaaaaaaatcttttaaaacaaacgcaggctaataaggggttttggtccattttaaaccaaactagcttgcttgatagggaactcaaaaatcaagtgaaatatccaggggaaaaattctgaaacggggccgttttggaagaaaaattgataacctcgacaggatttttctcctactattggatttcaaccc

SEQ ID NO: 95437 - DNA, 178 bp, Glycine max
gcaatgtaaactttgggatctataaacatgttaaagcaaggagggatccgattcagaagcagtccctttcttatatctaacgtgcacacttatgcacatactcaatgatacagatataaacacagacaaccataactacggagaaccaccaacaggcccatgaattgcattcaataaa

SEQ ID NO: 95438 - DNA, 340 bp, Glycine max
gtactacggttggaaatgatttatcgtacttttgaagatctactgctctctgaggagaaccatatagacacaagaaattctttgttataagatgcttataacaataggatcaatgacacttatcaacatagtagacacccgacattcattaactaatacattggttaaactattgaaagaaaattgggataagacagaccacctatgagcaaatgagttaatgaacttgatatagaaccatgtttaagccactgttcccagtccccatggttcatatgcattcttcaacgcaatcagtaaagcgtactgtgaatgagtgcgcaaaatcagtgattgccct

SEQ ID NO: 95439 - DNA, 102 bp, Glycine max
gttctagatcgtgatctagagctagaccggagttgggatttataggaaccctcctatgcgttcatttatcgatccacgtccatccacatctttcttctccta

SEQ ID NO: 95440 - DNA, 390 bp, Glycine max
gcccatcaccacttgacaatgccaattacgcactatccatcgggaactaaagatagtcaacaaaacaagagtttttcgaatatgggcctcccaataatttccccccccggaatttggatcttcacaatatgaaacgatttcagacagacattgggcactcccctttgcttgggtatctataacaggggcccaacatatttgaacataatatgactgggggtgagatgaataaatttggggcaatcagactaaaatttacaggcctttttttctcaagcctaaaatcttaaaacaaggcaatgaaccaagaggtcaatccaattgtatttcaatgaaataaagatcaaatcaccgggtaaaagctctggaatctctttttaggggctgggc

SEQ ID NO: 95441 - DNA, 130 bp, Glycine max
ggcgcacgcaacgtgccttttcccatacgaaggacaccatcacgccgttttctagtgcccggggttttggatccattgaaactgataccgtatccttctgccattagtttagccgagaatgaatcccaag

SEQ ID NO: 95442 - DNA, 280 bp, Glycine max
gcaaaacatgtttatcttctcttttgttcacctgagtgaaggaagacataggcataccttgtcgctattgctgtacatgtcgccattgcaatagtaattgttattgttattgggggtgatcgatgagaaattatatggagcccttactcctacttccttcagcttcatcatccacccctttacctttcttaatctcaaacacactttcttgccatccaaaacccaaactttctaccatactcagttgcaccctacaaaagtcccaagcttggtgcacaaa

SEQ ID NO: 95443 - DNA, 282 bp, Glycine max
cctactagtacgtgtatactctcacttcttcgtcctacatctcttgtggattgcctgaggtctacaaaagttctcttattcttctactcctattgaactttggtcataacacgagacaacccacgtctggaccttccggtgcaatggccattagaggcccctgtgaaatgtccaaatcgagcagctgtatagtgttgaagggagtgaaatatggaccccagatagctacttgactagataggccataggttgaaccctctttctctgcagatttacctggga

SEQ ID NO: 95444 - DNA, 328 bp, Glycine max
agttaattaacttttttaattcttaaattttaaaggggtttcataaaatatttaaatctccttaaaatacattttaacccggcaatcttaaatatatccattcctgttctttatatgggggcattgcacaattgacagataaaaaaaatgccatgaaacaaattgataagctattaacaactattataatcgaggggggaaatatgccacagaccacggctaccaaaagaatgtgtaacagaatgcacctcaaggtagcttcacctcttggtcttggaacactctgcaccgaagggggctttataactaacctgctgcctatagcccc

SEQ ID NO: 95445 - DNA, 527 bp, Glycine max
gctccaaatgacaatgtattcaaagacataatacaaatggttatataataatatagagacccttgggctcataatgaaactgccaaaggccaaagcaggataaaccgttcttacattctcaagcatgaagtgctgagcattactaaaccacatatgacaagtgccagtagtttctttcttacccatttccaaaaggagattagccaatcccctgccaagacaatgagtaaccgttgcaaatcaattattctctcttcaaaaccaaggacacctacgggacaaaacttatatgcagtttcttggatgcgtttggttttttcctccaatcagatttgaagttttatgctggtaatccacataataatgatagaaaaactccaattctgataggagaacaacaccaagagcacctatgcaactatatataactttcatccctacctaccaatgcacctccatcaaaccatcaatgacagcaaaaccacaggaagctccactcaaatccccttcatccatgagtgttaaca

SEQ ID NO: 95446 - DNA, 140 bp, Glycine max
gcacaaaacggagagcacatagctgcatttattttaaaacctgtccaaggtgaagctggggtgatattccctccaaatggttatttaaaagctgatagagatcttagctccaaatatactgtcttgatgattgctgatga

SEQ ID NO: 95447 - DNA, 239 bp, Glycine max
gccggcaatgcatgacaccctctgctttgggtttttctccactactaattgggctaaaaaagacataataagggcgtgatcaccatgcttaatacagggggaaaaacactaaaaaaaagaaagttgctttaaagttcagaccttggcgaaaactgcataaggagaacaatatgctctacaaacataaatactaactttacgtctgaacacaccttcagaaatgtccctgaactaattga

SEQ ID NO: 95448 - DNA, 207 bp, Glycine max
atcaaattcattttggaccaactttcctaattgcttgggcgcggtatatttttgcgaacgtgtacatattcttattgagactggaatctccattagaacatcaatgcctgtcatccatttgggatgctctccctttaaaaggaaaaaaatgatgttacattacttctaccagataatgaaacaaattaatttcttgcactttaagct

SEQ ID NO: 95449 - DNA, 503 bp, Glycine max
aaatacttccagctctgttgtatctacttctaactcacaacctgtggctgtgcctccagtggtcccaacattgccagctgtggagagtttgccggtagtggtacagcaagttaaagagataaccccacccgccaaacgtggtcgtggaagacctaaaagaataacttcagataagtcaccagctgtggtgatctctccagtaacttctggaactgttgaagtagacacgcagttacagaaaggaattgggtctggacatttagcatcatcaactcctgattctgttgctcattctgctgaagttgtaggtgtgaatgcacccgtgcaacagtctgatccgggagtttctcctaactcacagcctgtcattcctatgccttctattccaccaaattctcaggtagctgctgttcctgtttctgtacctattcaagcaagaggacaagggaggaaaagtcatggtggtgaaggaattagacgtagagggaagaagcaggtcatga

SEQ ID NO: 95450 - DNA, 528 bp, Glycine max
tgttttcggacggtataatgagttttttttttatccttgagagctttggtatagtaccctgtcagtgtttcatagatatgtaagaacctggttgcactacacgaacatgagtgaattgcaaaagaagtctctctaggcgtttcagtgaagactggtggcttacagttaatttgtaagagctggttatgagttttgtaaatttatttttgctcatggactgatttaatgcactgtttaattcatttagcatcacctcaagcactgtgattctctgcatctgcactcaatttcttctttgtgttggacaggaacccctcactaaaatttcagaaactagaaatgaagacattagggatgataaatttattagtcctgcaattgatgcacaagatgatgtctctcctaatcgttcaagttctgagactcgagatggaaagcatgctcaagctcgtacagatggtgtgggcaatggttatttggatcctaaatcttccaaaggggataagtggcagaatggggaacttggac

SEQ ID NO: 95451 - DNA, 281 bp, Glycine max
aaggggaaattatggtctcctttattcattatgcgcgagaatgggtgtcgttaattgtataagaatcaagatgaccaatactacatttgtgtagcttaacataaaccacttgatcaatgaaagaaagattagattggcttcattatgtaacaagttgcacaaaaatgtgattagtgtctgattcttaattatctatggctaaaaaggcaagtgtctggatcaacactagtcggttttgaattaagaagtgggtgaagagctttgacaacaatacgcatgtt

SEQ ID NO: 95452 - DNA, 505 bp, Glycine max
  unsure (1)..(505): unsure at all n locations
ccaaacacgtacccttgattctagtcttatacattctttaccaaagtcttacagtgtggcttgtgagctcaatccttgtgtagtttgcacaattttttgtacatccccttttattcttataaataggtatcaaattgttcctgttctgctcatctagtggtttcttgatctctgtctcattgaacaagttactaagctatgttatacccttcccccttaaaaattcaagtttgaataagaatattatctggttcaattgttttaccattgtttatctttctctagcctgttcttttcttgaaattcttgaattctgtgtaaaatgtataattatgactatgttctttagtgaatagtgattaactctcaatatttgttattgtcgcatccccttcattgagtagcttgtagaaataagtcatccattttttcatgatatcttgcataattaccaaagctttntacaccttctcttcttttntaatgagtttcacttgacctactt

SEQ ID NO: 95453 - DNA, 305 bp, Glycine max
agcaaatgagggattcggatttgcttcattaatggcatgcagtaacctctcttccaaatgttgtttagatggatactgcttgccattcatgaaccaaatgagggattcggatttggttgacaagtttttttttttttcttttttctttttgggggggttggggaggaaacaaactgtattacatttttaggttagaagctatttaaaagctttttactgggggttgacaagatttaacattatatcatgttaatatgttgtacagttctatatttgcaatgggaaatgccttcggcggtttttca

SEQ ID NO: 95454 - DNA, 380 bp, Glycine max
attataggtggcagttaggtactcacaagctacaactgctaatcactcactgaaatgcttttactggtacatggtcaatatcaagtacttaaatagtgaatctagtgacagtccccctaattatatatggagataccttatatcaagctttattaggttgcaacttctatcttcatttgctactggatccttttgttatactgtacaacttaattcgctatgtcataattatagcgccaattcttgttctctgatgatgctcttaaagaaatgcctagcatgatgggtgccacctattgggagttcgatagtgattcttgtcatatcaaaatgctgggatcaacaccagagccacctaaaggatcttaaagcagcattga

SEQ ID NO: 95455 - DNA, 402 bp, Glycine max
tataaaaacaatatattcatggggatcattcgttcggatttcatagagacatactagccaaacactaactaaaataaaaaagcaaatctaaagagaaaaatctacaaaccaataactagagaacatctaaacttattcatcttcactacttaacctaagaagaagccataattatctaacatcacggatggtgaaatattattctctaaacacaggttcaattcaaacttaatcaacccttctggggaggactcgccttgtcccaaaacttcaagtgcacagctctttcctccagcatttgctcaacttcttccattggaactcccttggttactggcacgaaaatgagaacgaagaagatgccaatgagagcaacagatccaaacaacatgaatgtccatg

SEQ ID NO: 95456 - DNA, 396 bp, Glycine max
gaagtacgtttaccgacataaggaaactctctctctttttcgccagttttggactttgatccccgcacaatattgtgtaatcagactagtcactaatctctttgggtgacaataatagtcaaaataccagtgattgttgcacagaaaatttgcccatgtatttatacctcagcccaccatgaaattaggtaacaaactgtgcattttatggtacctgcaattggttgttttactatttccagctgacttttgtatttgttctttgctttgaaatgggttggactagtatatatttgtttggccatctggggtaacaagattgtgacacctgaaatggggatcatcgtatacatatattataaaattttttaggccgtggttgtcagttctagttga

SEQ ID NO: 95457 - DNA, 235 bp, Glycine max
  unsure (1)..(235): unsure at all n locations
gattagttaacaagttcccattttagggtttttctctctctgnctctctgactcttgtcttctgcacacaaccacatgccctggggggaaatccccaataatggacgaaggtgagggaggcgatcccatggatcagttccaccgtaacgaggctatatccgctgtagctgacgacggtttcttgggcgaggaggacgacgattacgaggatctttacaacgatgttaatgtcggc

SEQ ID NO: 95458 - DNA, 510 bp, Glycine max
cttttaattagaaaactatcattttgttttcatatctaaaagttgttttcactagtttctatacaaatctttgaaaactggaaataaattgaaaacaaggtaacaattttataattaaaagtaaaaaccaaaaaacattttgtcaaagtaaacggaccctacgctttaaacttgtttgttctgttttgaagtctagccatagtattagtaggtccttcatttctcttgtacatgcctagaggttgctgttttatcaaaacgctgaaaaatattactcttttgattgtgttctatttagtcttctcgtagaagaattcagaattgcagcctgatacagtcgcaacaagctgcatataatggtttccaaagatgaagatgcaagactcttgtttttaaccgtttttgtttggttttgttaaagtagaatttgaatatagtttttgtttgattatggtaactatgtatatgaatttcatacattgaaaactgatgtcctttagcaaaacacat

SEQ ID NO: 95459 - DNA, 402 bp, Glycine max
ctattgcacttctcctatatcattgatggatattaatttaatgatcttgtgatggtcaccatggtcctaaggtatggaatgcaggccaagttatctcaaatggctttccttttgtccttgatttgacgaatcagataatttcaagttatctcaaagtacctttactgttctaggctagccaggtttctcagacctagaagattgcagagaaggtccattcatgttcttgatgctcgctctatgggtgaagttagcaggaaacaatccaacttgtgtagcatcatcttggatggcctagacatgtacagggaaagtcatggaagacactagtaaagaaaactagattgcatggttttcatcttggtgaaaaggagcacagggagatcaagaagtacttgagca

SEQ ID NO: 95460 - DNA, 332 bp, Glycine max
  unsure (1)..(332): unsure at all n locations
aacnaacaccttatattttttattaggaaaaaaagcccccttttattagaataaggatcattttcagttcaattaaacacccctattcttacaaaaggggaaaaaaagaaaacaatataaagtttataacccaaaaattagttaatctttttctaaagagaaaaaaaattgacacccccaagagccttggaacgggttttccttgggtctactacccgcctttgacttttccaagcccaaggggtctatttacatttctaccaccaacaaaaacgggtatcaccattcaccaccactggttgaataaaatactattctcccaccactctcac

SEQ ID NO: 95461 - DNA, 438 bp, Glycine max
  unsure (1)..(438): unsure at all n locations
gagagatactatcatttgttnatgaaccaaggaaaggatgtacatataattacaaggatggtaatctgaatgcaaaagtggaaaagccttaccagacctaaacccgtcttaaatttgatcaactttcttcctttcttccttccaaacccaggcaattacattaaagcatgcatatttattggatgcatctctctaaaacctcacaacctatgacaatccatactgaaaggcccctgaatgcctgtgagcagcaacagctactgcagcagcatcgacagcaccaaattgagattgtgcctgcagcagtttcgcatcaatggaagcaacaggatcatttaagtgatcgctcttcccctgcatgctacactgctgggatgggagtggatgtttgtcttgttgtgaaatacccttatatgtttctgaggtagtttttatgtt

SEQ ID NO: 95462 - DNA, 446 bp, Glycine max
  unsure (1)..(446): unsure at all n locations
ggcttttaggtcgttgtgggtggcttcaactcggatcacatccctgcttgcgtcgttcctttctgtctctaccttttcggtctctctctctctctctctttccaagacgcagagctgaattaatcggcattcatcacatcacagcgacaccagccctgatttatctttttctgcctttgtacctgtataatatgcacagagacagaaagaagggcagtaagtatcctcccggngagtcttctaatcctcaatcatcagaaaaagatgatcacaataatgatacaaatcttgctgaaggatctagtaaaccagagctgagtaacaagaatactccacaatcactgaaggccaaatctaaaattgttaagaaatccaacggtggtaagttcaagaccataataaataaaggttctcaacagattgngggaaagagaagacttagaaag

SEQ ID NO: 95463 - DNA, 407 bp, Glycine max
caaacgcactcagagagagagagagtgagatcgaccaccccaagaggaaaccaccacccacagcctaacggtgagcgaagaagacaatggccaccgccacagccaccagcagcggcaccggaagcggcagcggcaccgacagcaggtagccgcaaattacaatggataccgacagtaccacccgacaacgccagctcgttcgtcgtcgtcggcgtcgttcaaaggatgctgttgctgtctgttccttctattctcgttcctggcgctgttggtgctagcggtggtgctggtaataatcctagcggtgaagccgaagaagccgcagttcgatcttgagcaagtcggggtgcagtacatgggcatcacacccaattccccctccaccgcttccctgtctctcaccattc

SEQ ID NO: 95464 - DNA, 135 bp, Glycine max
gtgattcatcacagcatattgactctgatatacatttttgacatcagcactggtgcgtaggaacatcggcatccactactacaagtctgcttcttcttggactatgttgtctcgccattcctcaatcctcaaccc

SEQ ID NO: 95465 - DNA, 425 bp, Glycine max
gtcagagaacttgttaattaagaaaagcccatgaggataccttacccactcattggatgtactttacagtttacacgttgttccgcagatttctgtcttccaagagaagtaacctattccaaataaaattttggcaaaattctttgagaaaaatgttaaatgtccctaatttgatatctattccaaaacctttttcctcaactttgcagtttaacaatttgttgtgactcctccaataaccattctaaattccctctaacaccccatccccacccaaattttctctcactcctttcccttctcatttcttccttaaattagtcgaataaaccgagggtcaagtgagaaattgagtggaagataaggacattgatactgccaccaagaatgatatcatcaaacagtcaatccatcgaacccacact

SEQ ID NO: 95466 - DNA, 433 bp, Glycine max
tcggcggccgccctttttttttttttttttaatcaaaacttttattattcgcactagtgtttgtatacatacactaaagacaccttttctttcctatttttttatatatcttctggcaaaatgttctaccatgccccaagtacaaaattttatagatctgagcaatcctactagaccatgatctcaaccctggattttacaaaaaaaaaaaaaaaaagaataaacaaatgaagatatcatagctaaaagaaatcacaagaaacaaataggtaagtgttgtcgtaaccctgaaagcatgttaattccaatcttgactgcttctttaaagacactactgtacaatgaaaatcctgcaccatcaaacatgcataaaatgtggctgtttcaggaagctccagcaggtcttaactgatatgcctgatgactccctttt

SEQ ID NO: 95467 - DNA, 427 bp, Glycine max
tcggcggccgcccttttttttttttttttaataaattatttttattttttatatcttttaagtgctttgggggtctgattaaccacaacaagtgcacaacgcctatgccaaaaacacgaatcacacgtacaagaacaccctcaattaattaattaaccctacaaatatatattatagcgtggatcatatcatatcgagatctaaaatcccgctctgcaaaggagttaaagaacagaaaggagcacgagcaagagaaagaccgtggatccaatgatggagaggaccaaagctgcagtgacgcggcgacaataggcatcaaagacgtagcacactttcatccattgcacgcgcgagccccccttctgtgctatcactcccactgcacaagctgaaccattggccgagaacaacaaagccatcatcacaa

SEQ ID NO: 95468 - DNA, 238 bp, Glycine max
aaaaaaaaaaagggccccttttttttatttataaaagagggaaatataagggtttcatagaggagcccctttgttaataaaaaattggcaactgaacacaaaacatgatttccccccaaggggtaaattttaagacgtccaaaagcccaagggggggggctttttttaatttagggcccttaaaaaaaactaaaaacaccgggggggggggcgaaagaaccatatgggatttttttta

SEQ ID NO: 95469 - DNA, 366 bp, Glycine max
gaaataacacacacacatatatggataagggggcactagcagaagtaattgaaagcaacgaatacaaccagcattacagcatgcttaaatttcattccaaacaagaaaagagcagagaggctctgcttacgaatagcagataaagtacacacagagaactacttacttattcacggatccaaaaaaacagtagactagctcttctatttgtcaaaagcataacgggcttggaaactgcacacccttaactagtgcaatcatgcaaaaaatgcatgatgcctcatcatgattgagagcactcacggattaactggaactggacctggaactccaccaccactcccagggtttggaacctcaaaacca

SEQ ID NO: 95470 - DNA, 267 bp, Glycine max
ggaacaagagctcataatttatgaaagccctgaaaagggaaaacaacattgttcagggcccccccctgactaagtaataatacccaggaccttattttataaaaattaaggggccccttaaaggcttgatttgagagcttaatctttatccaagggattaggccgcttaaaaggcctagcccctttgttgcttcccaggagggccctcccttgggccccaacggttccaaagatttcggatccctccttttccagcttttttttttt

SEQ ID NO: 95471 - DNA, 510 bp, Glycine max
tcggcggccgccctttttttttttttttttttttttccatttaatttttttctttcaatttgtcgcccccaagggattgagaaacatttgaaatacaaagtaatacaactatctatacaaatagcatcctacaagattcagaacaaatgcttagaaggcaactgtattgctagtttgttctctcttatcagagcaatctaagcaaagcaataatgaacttaaacttccagattaagcatcgatttcacagcttcagtatattcacttgtattgcttcatctgttcctcaattccttggtttgtatttggacttgctctatcagcaaaacaaatttgcatcatcattttttggcgtcattttcccatacattgtcccaagaaccacttggagcaggctttgttccctcaatgaagttctgatttacagaggaattgtgttgcccaggtagtggaagtccatctggacctggagggttaatcttctttggtttagttctgattccaagcaac

SEQ ID NO: 95472 - DNA, 413 bp, Glycine max
gtcattttgatctttagctattgtgttggtccattcatttatactttaaattttaattttaatggccatcgtgtctcattctatttgttcaaacctttgggcattttcagtcttattttattattcaatattaggatgaaatttatgtacgaaatcatcagacttaatcttcccagctaaatattattccaagtctttactatttcttggagcatgaacaatttcagttcttgatgagacactaccctggcctgaatcagttctcttttctgtccttgtttttggcactatattaattcaaatttcctttaatcattaaaatccctgactaagtcctaaccatactttataaacactattgatagtatgatatttaccttccgagtaattggggctaacaagttatagaaaat

SEQ ID NO: 95473 - DNA, 369 bp, Glycine max
caacttaaatagcaatccccgcggaaaggaccaggaacatagtcacttctctagcgattaccagtgttatgaagagaacgaaaggaaaaagatacaggctttctacaaaaatttcaatctataaagcgatgtggaaataggagttcctctatgaataatgagctaaaaatgcaatttcagttatctacgtcctccattttggtgtacttggcttttgcagctttcaccatagatttaatgctcatctacttcgacagtatctgaaaaacgaaacatcccctaatgactccattgattgatcataaatggctatagcccaagtttagataggagctgacgccatcttggagtttcttcatcaaaaatata

SEQ ID NO: 95474 - DNA, 144 bp, Glycine max
ctcaagttcgacacaaagtgcagaaatggagaaaaaggaaatatgtgtcttcctttcctgggagtgatagggcttatcgccatggtgtttcaattcaaaagtctgaagtttctttgtctttgatttcatgaagatgacatataa

SEQ ID NO: 95475 - DNA, 122 bp, Glycine max
  unsure (1)..(122): unsure at all n locations
caaagttaaagaaactncaaacttttgaagggaaacaccatggcgataaaccctatcactcccaggaaaggaagacacatatttcctttttctccatttctgcactttggggcgaacttgag

SEQ ID NO: 95476 - DNA, 448 bp, Glycine max
  unsure (1)..(448): unsure at all n locations
tttnttttttttttttttgaattaattttttacgtttgtaggcactttattcatgggggggccacacgggtggacaaatgcaggtgaaagcgaagttaaaaatgtttgacattgtctggtctgttggacattagaagtaaaaacatcctattactagcaagaaaaataagagatacaaaggttcgtttattacaacgccaagttaaagttcaccacatgtgcaacttctgcaaataaggaccctttctcctattttcctacaactcatattcagtcacaataaagcttaattcttttttaatcaacgtgtatttgaggaatagatgaacactgtgctgaggtatttatctacttggatcttttcaagcccagcatgtgcagtaatagtccaaagtagttcagcctgtatgccaatctgataaactcgagcttgaacttactccaagga

SEQ ID NO: 95477 - DNA, 178 bp, Glycine max
tgccttttcaatacaaattttagtattcaataaagcaaaaagaaacacaaattttagtgtttaataaagcaaaatgcacacataccccaaacaaaacaagccttattcaatactaaaatttgtgcttctttctgccttttcaatacatcaaagaaaataaaaaaattcctacccatct

SEQ ID NO: 95478 - DNA, 370 bp, Glycine max
aaacattaattttcttatcaagaatttacttgacattctaaaacaagttgctctcacttttagaaccttccagaagaactactaacggggattcattggttcaaatatatgtacacatcgaattaaggggaataagcaacttcaaacaaacatcacctcactgcacatggaacggttttctcggggtagtagatgctcgattttccattgattgcaatctctgtttgagatgaaaaacttcatactgtagttggaatgctcttgctctttctcctgcaataactcctcttgttgagtgcaactccttctgtgtatcatctaaaacagccttgaggaaggccacattatgctcaagccgtacattgtcaga

SEQ ID NO: 95479 - DNA, 315 bp, Glycine max
cccaaggcccccacttttttttaaaaatcccccggggaaaagccccccccctaatgttttgtttttttttttttccaccacgggtcccccctttgggatttaaaaaaaaccaccgggccccaacacacaaaggatttcttttttgcgggggaacccccggcacccccaaaaaaaaaaaggcctcccttttaattcctgggggccatcccccccccaaggaaaaaaaaaaattcccaggtttaaaaccccatgcccaaaaagccttttttaacccaggggcaaatttccccccccccccgaggggaaaaaacccaa

SEQ ID NO: 95480 - DNA, 452 bp, Glycine max
gcacttagaaaacaaccattttaattatggaatactgaatcaaatcattacatcacctttctccagattagaaatgcatttgcaaatgacatcgtattgatgtaaaataaatgctgcaatatgtgtgctcccccaatcacgtcccgcatcaaatgggcaaaagacttaaccaagaactcaaaatgtgttaggctaacgtcaattcccttattgatgtctctccaaaaacttctctattacgactgagaatgccgcaaagccagcacaaccagcacacgctgcttttgggccacctagaaccatgtgacaacaggggaaacatcgatggacatcatggagaaaaaacaaaggcggagaaagattcataaaaaggagtaacattgtggatttcaattcattatcattctattatacctcctcaacctcttcccatgtatcattttttttttcat

SEQ ID NO: 95481 - DNA, 370 bp, Glycine max
aatattttatttcactttgtatgagggctcaaagtttaacctcaggcaacagatctctaactactgataccctttaattactttttggtacttttatttattgacccaagtactaactaattattaaagccaatcccgtaattatcccacttcccacaagtatttacatatacactcgcacatactcactcataaggactgagaaactaattcacactcacataagctagcactattgtagtattatctaataccactagagtttcaatttcgctacatgaattaatgcacacatagtttataacaatttaatagggtcgctctccgacataattgcccacgggatcataattacaagtcatgaacacat

SEQ ID NO: 95482 - DNA, 335 bp, Glycine max
atcaataactttaaaattacattatttgcattagggaacaaggttaactaacttaacaaaattaccagactcccacagaagcacaagaccaaacccaagaaagaaagaaaaatctagcacattgactgaggagatgatcagtgatcaagcgcattaggtccagtacagtaattgagaacgtgactccacagccactgaacaaggaatttccgtctgatcccattcatgttataggtggcgccatctcgagcgtcgaaaacctgaccggtgtaggatccaccgccaccggtgccgtaaatcccctcacagagatcggcaatctcgacggggaaaga

SEQ ID NO: 95483 - DNA, 199 bp, Glycine max
ataatggaaaatttgacataagggaaacaggtaatgttcaatgaaatgggactagtaaaattttcccatcacacactcaactacatcgttgaactccttgatggttctctcatctgtgccatcatgcatcaacggtggaaagaagagccacgcggcggtgactatcacaaacgccaccgtaatgggcccacacaaggcc

SEQ ID NO: 95484 - DNA, 149 bp, Glycine max
tcctttttttttttttttgatttaaattttttctatagaattatttttgaactgcaaatagggacgcaccaattacatcaacaatgcatccaatcagttttatgtgggatttacaaccatttcagtcccaacaaaaataaatttatgaa

SEQ ID NO: 95485 - DNA, 126 bp, Glycine max
ctggtgcatggtgcgaccacactgtttaaggtttccagggagcacagaggcaggggcagggctgggaggtcataggctgcaatattgtacagatctaccagttactgggatgagtacgtttgggga

SEQ ID NO: 95486 - DNA, 285 bp, Glycine max
cttctactttcacctaaaccaagcacttgttgatgtagcttcggagcccactactgagaagccgattctcgttcttggtatcaatcacttaagttattttgggatcatgttggagcatgttttggctaaaatcatttcacgcaacaacagactgatatatctctaagaaggaacttagcaaaacaaaatgcataaatgtttaattttttcttaggataaattacgctgacacttcctgagatttttttaaattgcacataatctccctgcttttttaatttttac

SEQ ID NO: 95487 - DNA, 194 bp, Glycine max
aactacgtatcacattttcaagtgggttaatgacttaacgataagcatcaatcgacattctacaagataaaatcatttcctggcctccacactcgaacaagtttggcgtagaatgagcaagtagccaccagtggctcggtattctcacctatgcgaattgcttatcctttctgccaaactgctccataggcaag

SEQ ID NO: 95488 - DNA, 143 bp, Glycine max
ggttgaatagatctcggttcatatgtttctcatttttctctggtttttggcaaaattggtcggatggattcaatttctctctgtgtaaatacttcaacttttccaattctcaccttcgcatgttgattcgtagtcagattttt

SEQ ID NO: 95489 - DNA, 290 bp, Glycine max
atgcaagtatataataattaattaaaacccatgatctggggaacaagagctaaccaaaacaattacagatatttttgtcgttttctttttgtcagaaaaaaaagaagaaactcgttattataacacatttaaacaaataatgcaaaccaaagttaaaaaaaaaaaaccataatacgtacccttttgacggtgtggcaagaagcagcacacaccttattgggtaatgaaccctagaggcccgggttcaataataataatatataagtgtatagcttacagaaaaatttaat

SEQ ID NO: 95490 - DNA, 458 bp, Glycine max
gttcaggagaaatgcatcatccttgctctctttgtaatccattatcttcttaattaatttcatcttttatcagataataataataatcaaaataataacaaaaaatatctaaattgtagccagatgacaacagatagttggccacaacattttacacaatacttaacatacagtgatttacaactttatttataaagagtgtaattactaattacaagatactaaaaatatttaaacaaaatccaggaagaagagattatggcatatatacggaagaagccaaatctgtcattcacagctcttgatcatttctaaacagctagacaagtccatccataatcaatttgtatttgacagaaaatgcaccataacaggtttccatgcataatcgtgtgatctcatgatttgtatcacatggaaacacttgagatcattaaagcaaaaactgtgaggaaact

SEQ ID NO: 95491 - DNA, 229 bp, Glycine max
ttttttttttttttttttttttttttttttttttttttttttttttttttttggttttttttttttttgaaaaggagggaaaggttaaattatccattttataattataagggttttacaaaattttttaataggtaatttaaccctggggtaataaaatcataaaatggccttgaaatacatagggttggataaattgcaaaattggttgacagctgagaggaaccgc

SEQ ID NO: 95492 - DNA, 257 bp, Glycine max
ggggtgaacgaattttttgcaaaaaattttaagtttttcaaacagccgcgttcggacttcaaactccaaaagggctacaaatttaagagccttccagaaaaaatggctttcaaccttagataccaaataagtaaccttggattcttccaattatgggatgattaataagaaacaaatgcttcaaaaccaagcctaaatggctaatttcttgacttcctaatactcgggctcgggagcctgtttaccaccctgagaac

SEQ ID NO: 95493 - DNA, 471 bp, Glycine max
gagctgtgtttaaatcttttaacggctttgtattttagttagttcaagattaaaatcttgacctgctatttcaaacaatcaaataattttgttccaacggcctcatcactgagaatgttgagtaccgaagaaaaaaaatattaaaccagatacactagcgggagctgcccaattcacagaacaatgtacattgtgctgaacaagagcaaatgcaattctcttacaacagacctaataaactcccatccattgagtaccttaggctctgagaagccaaacttttcgtcaatagccactgcattaggattgaatagaagcactttctacttctgggcattgctcttctggtcttcaccatcaaaataataggcatccacaaattttcctggctaactaatttgtctgcattgatttcagacagatcccacagggatcatctttagagctgctgcaattggcatgccaaggact

SEQ ID NO: 95494 - DNA, 240 bp, Glycine max
aaaaacagaaaaaggcaattaaattacattaaaaaaggcccgggtttaattcccggtgggtctaggttttgcaacccaatcaaaggggccgggacaagtttcccccaggggaagcgttcgttttgtaaaaaaccgcattcgggggggaaggggctccaaagggaccggaaaactttggggcgggggccttccaaatttcatttttggcaaaggggaatttcccagggcccggtaaatggt

SEQ ID NO: 95495 - DNA, 378 bp, Glycine max
ggttacatatttattattattattgtgagacattaatatttgtagcatttaacctaaagttcctatagctaacaacagctacactaactagctaactacagcttcttcagaagacagaggaaccagacaagggatcattcaccaaattgaatatgttattccagcaatgcttattattctcatcgaggctgttcacgttgcagaggcttccgcccccgttgattattgccaggttgtctgcttcctccgtgcccaagtcatcgttcgagtcatacacaaccaaagcagccttactatgatcatcattgtcgttattgagtccttcaaggatgacactggtggagagtgagggaggaacaacaacattgggattattat

SEQ ID NO: 95496 - DNA, 300 bp, Glycine max
gaacttcaaagcagtcaaaagggagtcacgaaagccaaaacagcacaaatacagacacttcacacacatccacgattatcagtaaggcacgtatcatatcaccctgtattaatatgccttctttttcttcacacatgctaacagctcaagtatctgtactaccgggccatcgaaacacagacacttcaaacaccaacagtaatgatggaactttgaagacacagctacaagttctactgagactgcccaaacacggaaaatcctgcatttacatcagtgtaccctccatctatcacaaga

SEQ ID NO: 95497 - DNA, 269 bp, Glycine max
cctctatatggggatccatagtggatatgatttacaaacgaatccaatgaacgcctcacacagttatatatcaactgcatcaactgggagggaaactggcctgtgcacagagtgtcgatacactgagcccgcgtaatacctctttgctggtaccataccttctccaggggatgaaatcgccacacaatggtgggcccttcggttgtccgaattggggctgctttcacggacatgatggtgcctcctgtaatgacaattccacttggccg

SEQ ID NO: 95498 - DNA, 501 bp, Glycine max
  unsure (1)..(501): unsure at all n locations
tcagaagcttcattatggctactcaaccgttacccttctcatcagcttcttctatagtaccaagtagtaacaatcctcacaatgatgagctacgcttcttgagcgacccgaaattcgagcgccatggcgaaatcttgttgctggtttttgttcttcttttcagtgtctttcttctggtaattgctatgttgatgtacttgaagagaattcggagtaacctccaacagaatgaagggtccaaattggaggcttagctggtgtatatcatcttatggtagatactgcagtctccaactgggatagaagttgcaagctattcaactctcactgaattgctgggttggtgctccaacactcgattgatttctaagagaaatgtaatttaatacaattctattagatattttatttcattgtgtgattagttttgttttaaatttaattttgatttacttttatttaaagcaactttaatagtaactntatctgcataggggcact

SEQ ID NO: 95499 - DNA, 146 bp, Glycine max
ctagagcaaaatctgtgttatagtctattaggaggcaagcatcatctttaagaaaaaaagagtgaatccgtattcacaaggggaaggttgtcagtgtgacattgacataactttatacaccattcacggcatcaactgatgatgaa

SEQ ID NO: 95500 - DNA, 391 bp, Glycine max
aaaaaataatatttttttgaaaaaaaaaattctcaaaagttcttctcttggattccaacctccagcatggagaacttttaagcaagaatagcgatagatatgataaacaaagattcttgagttcaaaaaccccattaaagaagctctaacatcattccacttctttagtttagctcttccttgcctactttgttatacgtaaaaatgcaagatttataaccaattcggccaaaacgattctacacttggacactgctcttctcattgcacagaaaaatatgttgagagacggattggtctcatgtttctccttgccccccgaaagagacgagctgcagcacagggatacgaaattgattcatatttcgcattttctgcgaaaaaagaacaa

SEQ ID NO: 95501 - DNA, 167 bp, Glycine max
gggttggaaaaaattacctggacatttttattggattccacttttccttttttggttttgtgaccaccgtattaccggatgcagaactgtcatgccgggaaaaggatcagagacaaatcaagggaaactgggaggaaaaaattttccttttttatttgaacctccaa

SEQ ID NO: 95502 - DNA, 238 bp, Glycine max
cacaccaaaggatctgatccattaaaagcaattaattcttgaaaaccacacaccattcactcggcatttttggaacacttccctaatccatattgcattacttagtgggggggcattgattactcatatttaaggcacaaacataacaagggcaggatggaaaaccccaaaattataaacgagcatcatatagctgttaataataacaacaacacatgcaacataaaaaccacatgca

SEQ ID NO: 95503 - DNA, 493 bp, Glycine max
tttttctttttttttttcataaaatatttatcagaattaaatataaccgtactgaattacaatgacctcctaacaaaattgacacacatttgactagcccctctccctcctcaaaataacaatccaaaatccagaacaagtaactaaagcgaggggctcaacaaaatctatgtgctcaaaaatggcactcagccatctaggcgtataaggtaaaaaggcatatcatcctacatcttgactactacctgttcagccgaacttttcttcacaaatcctctggagcacaactcattcaacaactccaaagcttgctcggctaatccttcatcagcaatgccttctataagaatggcatatgtagcttcggtaggtctgcatcctttttctaccatataagccagaaaatcaattgcacgactagtctgctgagccttacaaagtcccaacatgattgcattgcaagtgacaacactgggcttaatacttaatcctt

SEQ ID NO: 95504 - DNA, 162 bp, Glycine max
aacactcttgatcattgatcgcaagaatagttagagtgcttactagcactgccctaaaacatatcacaaggacaaacagtttgcaccaaactaccaatgaacagattgataagctacaactcagtatatgccatcttaaaattaattgaaattcataaatat

SEQ ID NO: 95505 - DNA, 493 bp, Glycine max
gcaatttctgcggcacctgtgacagaagcctgcaagacccataccacttctgctccctctcttgcaagatcaattatctcgaacgagacagcggtccttcttctaccgctgagcctcaatataaatcatttgtgctgtgaatttgcttttcttcgccataacgagcgagatctagtcccaaattttggaaccctaaaatgggaattggggatctgcacgccgagctcgtcttttgtgtgtgctgtgtttggtttgtgaggaaatgtagggatcgtaatggcgttcagatcgcggggtttacgttttgcggcgattagatcgagcaagttccgatcttttttcactcgggaacggcgaatctggacttgtttgagcctgatttgagaatttgggttcgggaatcttagacattttcaatttttgctgaatttgtgattttggtatttttctcatttttcaattaaattgcatggtgttttgtctatctggaatt

SEQ ID NO: 95506 - DNA, 369 bp, Glycine max
caaggtttgctcgtaaattgctgtcgctgatgcagcattcgtatcattgaaaggctatgcagctgcaagctctttggcctttcttctcttatcattctctgcaaggaaaaaaaaacttagatatagacattttacctatgttctcctatcaaaatcttagattgattgcattttacccatgttattggtttatagaaaccattattgcatgaatcatcgaggtgggatatccaattctgattagagaataataccgaaagtacatacgatattgcatctaagttttgtactttttgaaaattccaaggactcacgttaagcaaattatgaaacatatttcaattctcactggtacaagattgaattgat

SEQ ID NO: 95507 - DNA, 171 bp, Glycine max
aatgatgagcgtatattaataagattttatcaacaaaaaaaattacacttttcattgcataatcattaattgctccgaaaatacaagtcacattcgaagtttctttcctaataaaatttgtattctcacttaggacttacactctcttcatgctcatccaccaaggctaga

SEQ ID NO: 95508 - DNA, 282 bp, Glycine max
gggaggatgctgatgattccactaagctttcgcaaaactccctgtgtctctgtcacacacacacatatgtgttcttcaaaaatcatggtgggtggtggttgctaatgatgcttaccattccgtcttttctatttaatatgcatgatatgggatctacaacagtgtggccttacggcaacgttcaaggatcactatctaaaggagtgcaagcgatccagagcaggcgtccatactgcatgtcctggcatgggtcttacagatctgctcataagtggctcaacg

SEQ ID NO: 95509 - DNA, 490 bp, Glycine max
taagaattaagaaaataagatgaaagactaaaaatgttttttagtcttattttttatgtaggagtttgaaagtgaaataaaattaaattaaatggacaaattttcaaagtaaatattatctttaattatttggactttagaaaaagatgggagtaataaaatgagtttaatacatgaatttttaatattttcttatacatttttagggcattatgtggtttgttaatttttttaaacagtaaccctctttttttcttagtctaaatgattttttaatttttaccaaattatattattttcattttgattatttttttcatatttctgataatttttttggttgcattttagcctttatgtttagtgatgacgttattaataaaaattaaacaaaaaacctaatatttcttaaatagggaaactaaatgtaaaattttcaaaacaagagttatttttggtcctattaaattaatattttttcatttctgat

SEQ ID NO: 95510 - DNA, 279 bp, Glycine max
  unsure (1)..(279): unsure at all n locations
cgccctatttttttttttttattttttttttatttttttttnttgcaaaaaaaataacacccatggggagggatttttccaaagataatttgttaaatattttacaactaacaagaccctttcagaattcaattcacttttccttaaagaaaaaaaagaatttcaaaattacatcttttgtactttgccttttccctctttattggggggcaacactaccaaacttaactgaataacattgtccataaaatgcccaaaccgaaaatatctctttggcca

SEQ ID NO: 95511 - DNA, 292 bp, Glycine max
accagaaattataaactttaatttagaagtcctaaacattgcccatttgaagggggggagaaaaaaaaaagttctgttgaagattcacaagtccattctattttgccctgaaaactggttttgtgtcaggggatggttgggtccttcgagggtatttgagtagcaacccttttgaaaaaagacctggtcccttcaaatttttgatataggggtgcaaaattttccattcccattttggcctttttttgaaaaaaatggaaaaaccctcggttggagggggagggaaaaaccc

SEQ ID NO: 95512 - DNA, 384 bp, Glycine max
ttttctgggttttctctgttgcttcatctttttgttcttttgggttgcttaaattttgaaactttttgcactttcgatttccatatgcatctggggcatcactattcactacatatttatgtttttcttctttctagatggtaatggtatcgaggggatttattcttgacaggcattgtttttgttgaattgatagcaggatgatcagagactgtgcataagaattatagctaattgtttatgcaatgaaatgcttttactattcactaaattgttgcgcttttcttctttctaggtggcaaggatattatgggttttattcttgacagacattttttatttgtgatttgttgaattgataacaggctgatcagagactgtgca

SEQ ID NO: 95513 - DNA, 376 bp, Glycine max
gttagggttgtgagtcttcctttaaaggggcatcgagactcaatctctttctctctctttctttgccctctctttctctctctagaattctcagatttgcggggcgagatgatgcagcagccaggacccggcatggcacctcccaccatgggccagcagccgccgcaacagtaccagcagcctccgccgcagcagcagcaaccctacgtcatgatgccgccgcaggcccaggccccgcaggccatgtgggccccctccgcccagcctccgcctcagcagcagcccgccagcgccgacgaggtccgaaccctctgggatcggggatctgcagtactggatggacgagaactatctctatacctgctttgctcacacc

SEQ ID NO: 95514 - DNA, 240 bp, Glycine max
aaaatgtaatgaacacatgagattttaataaattcttaagcattttaatggagcattcatattaattttaattcaataattgaattctcatatttttcatatatacatatacctctttattaactgacaagctaaattcttcttctaaattcttgtaggatggaactagtcttcgggtcacgtctgtgtcaacagggaaatatctatgtgccaagcctggagggggaaatgtcctacttg

SEQ ID NO: 95515 - DNA, 432 bp, Glycine max
gcgaaagggtgttgaaacttcaaacacagaacactcaagtggacaaggttataaaagaaacaaacaaaaagttgcagtaaacatcacatttcattttcacaagctactaatcattattgtaccaaaaaacgttgctgtcactcgccatcaaggtgtaataatataataataagccatgagaaaacaaatacaaaataataataataatctaagttggtttaagatcctcaaacaatgtaggccacattgcataatcatcatcataatcagcagcatcagctctgaccttattgtagggactataacccattgggctctcagtcctatcatctaaaggcctagttaaccttgggcttctactattaaccatgggtggtcttgcatcaagtggcccagaaagcctagggctttttactgagcccatgaacctac

SEQ ID NO: 95516 - DNA, 263 bp, Glycine max
tgctttttttttttttttcactacggagttgagattttagcgcatcatacacaagattgggtccgggtacctaagtaataacaagtgatattgtgaaattatcgtaatcagacccaagttgaaatgagatcagaacaaaacttaaatatatctatcaactgccttgatttgcccaaaaaagaacgagatgggctgagacctgtgatggtgatagccgtcaaaaaaattgctttaacacagaagggcctgagggcctagatgga

SEQ ID NO: 95517 - DNA, 393 bp, Glycine max
cctcggggaattccaattccacattttcaagaaataaggatgcaaaaatgttcatatatgaattggaattatttgttttcttattaggcctatcctgaagccaaaggaaatgagatcggaattcctcggggaattccaattccacattttcaagaaataaggaggcaaaaatgttcatatatgaattggaattatttgttttcttattaggcctatcctgaagccaaaggaaatgagatcggaattcctcggggaattccaattccacattttcaagaaataaggaggcaaaaatgttcatatatgaattggaattatttgttttcttattaggcctatcctgaagccaaaggaaatgagatcggaattcctcgggggtaccgagctcgaatt

SEQ ID NO: 95518 - DNA, 107 bp, Glycine max
aaacgaaaaaaaatttttaatttttattaaaaaatttatccggggacccccaaagataaatgccaagaaaaacaaattggtacccgggttttgacccttaaccttgg

SEQ ID NO: 95519 - DNA, 252 bp, Glycine max
aaagggatccggaaaaaaaaagggtaaccgcaaaaaagtcccatggggaaagactaaaaaaattgggcaaaaaaataattttggtggtaaaaaaaataatatttttcggggtaaagggggggaaaacaatattttaattatttcaggggattaaatccaacccatattttttttggtccactaaaatccccctgggaaaatttcttttttttcttgtaaagggcccgaattttttcccccttaaaaatgggg

SEQ ID NO: 95520 - DNA, 303 bp, Glycine max
cccataatgagtggttgccaactgttcagtcagagcctgatgtgatctcaatgtcgttcattccaattacgtgtgttttgaatggagtgccagggagtggattcttgagccatgccataaacctttattagcgatataaaccaccgatcgtagagctccaccaattcttggaattccagctgccaaggcagtgggcacctgtattcagtgacctttctcttggtccccaactaaagcaccggagttctgcatctgtacagtttagcttgatgggcccaaagctttatgttaactccacacagg

SEQ ID NO: 95521 - DNA, 212 bp, Glycine max
aagacaattaaatctattacatataataggaatataaacaatccaagacaccagagtgataagttgtggcaaactgatgaaggaaacggaaaacaaggtatatctaaccacatacgagaaacaacagattgaaagaaatcgagaaatgtcacccataaactgaatagaggtgaaagaagcacaatccaagacataaaacaagaataaaatac

SEQ ID NO: 95522 - DNA, 490 bp, Glycine max
catcatcactcacacctcgttgactgaattgcgatggacaacaaaaagtcaaaatggagttggagttcagcaataatcggagcagcatccgcagtggcagcatcagccctaatatccgcgaaacccaaggacccaacatttcacctcatttacataaacttcacctctttaaaactcaatttccctctcttagacgcagaggttctcctcacggtccacgtcaccaaccctaatatcgcccccatccactactcctccacttccatgtccatcttctaccaaggttctcttctcggctcggctcaggttcaagccggctcccagccgccccgctcctgccagctcctccgcctacccgcacgcctccacgcgctcgagctcgctcaccacgccacgcgcttactccacgacgtcgcgcgccgcgagatgttcctcgacgccgcgtgttgatatcgccggcaccgccagggtcatgtggtgggaccataac

SEQ ID NO: 95523 - DNA, 385 bp, Glycine max
tgttttttttttctttttttttttgcttttttttttctcgttttttttttttggtgaaaccggggcaaacaaaaccaaaaataattaaaccccccgaaaaaaccacaggccgagccctgggtcaaaacgggagcccaaataataccaaaaagaccggtttttttttatgcaagttttcccccacaattggggatttctagccttaaaccgggttaccccggggaaaaagaccccaaaagggatggccgaaataccacctttgcattttacccttgacccttcaagaacacaagagcccccaggacccacttttggtattccccacatttgaaaaccattggaggattatgcaaccccccacccccctgggggggggtgggtaacc

SEQ ID NO: 95524 - DNA, 503 bp, Glycine max
ctaacttctgattttcacattagttgcaggtaaagaacgtaactgatacaacaatacatatgtttttgtgtgactgctacaaccaaaaccaaaatagagaacatgcaatgctgaaatgttcaatcttctagcttctttgcagttgaaactttgtcagctgatatacctgtatgtgctcaactacttgttttggcatcagttactgaagcccctgagccagcattttgctttacttctggttgaggacccttgtgagcaagcttctccagcttcttttgccatcatcgagcacgaacctctactgatgtagataaacagtaccaacaaaagctagcatctctctctacagtaattgagagaattggcaaaaaaatatggatgtatactgtcttttatagtttcatcaacagtacaagaagatatcgaagttaaacaacaatctatttactaagtaagtgaggtagactaaaattgaagattaacagagctcaacagtgaaaaat

SEQ ID NO: 95525 - DNA, 227 bp, Glycine max
gggtcttgggtttttttttaaaaaaaaaccgggccccttattttcatttataaaaaaggcaaatataagggatacataaaaaaccccgcttgctaataacacctaggcaactgaacccaacacatgaaatccccacaaagggtaaaacataaaacgtacaaaagcccaaagggaaggacttttattaaatcatggcccttaaaaaaaactaaaaacccccagggggc

SEQ ID NO: 95526 - DNA, 320 bp, Glycine max
aaaaaccccaaattttttcccaaaaataaaaggccccccccccaatcaaaaaaataaagggggaaaagggggacccccccaattggggggaccccacccataaccaaaacccccccttcccaagaaaaacccccccgaaaaaggggctttcaaaatttttgcccccccccattttctaatcaaaccgcccccttgaaccccggggacaaaaacaacaaaacacctttgaaccccgggggaaggaaatatgaaccctttcggggcctccccctattgtcttgaattccaaagggggggtctccaaagccttcccccctttt

SEQ ID NO: 95527 - DNA, 300 bp, Glycine max
atgatcacattaaaaaatctggagagacgggtcaattacaatacccaacaatcaccgataactttagcagagggctagttttacatgtcctattgataacggatgtcagagccatggctatcctacgccttcaactaagaactcattaacacgaatactttgggcacctaattaaagcggaagggaagaaatgacagcgtgcgtgtattaataattacatttggtcgtagcatcactttgcttacgagaacgtatagaccacatggggacgaagaatctgcctgaagccataacgcgaag

SEQ ID NO: 95528 - DNA, 477 bp, Glycine max
ggttaccgatatctctttatattctatttatttatacatatgtggggatagagggtgtcacagcaccaatgtagaaagcactgctttctacatcgttgctggcgtaagcacgacttcatttgtcacgtgttctacgacggtccttttacgaccgatgtagaaagctttgttaactgcagcagcactagatgatatccccacccaattgctccctcgtggtatagtcgtgcttgttcttcctgactcccttcatcaattgaccaccaacctaataatctagaaccatgatgcaagaacccaaagcaatcatgagctcttgaagaaaatataaaatatattcctccaccaactccacttcgtagcagtaaaagtgaaagagaatcaccttgattaatgcctaacatgcaatctgcaaatccttcaattagctgattacttaattcaattgactattgtatgtataatgagactagatac

SEQ ID NO: 95529 - DNA, 386 bp, Glycine max
tatttggatgctcttgatgctcatttcagtgtcaattttattgaggaggtagaaaatcagccaagaagtgagaagaatcgcggaaaaggcacgggtggtgttaagaatcgtctgaaggaggctagaagtggcctatctacatcaaagaagcttctaaaggtgctaaatcaaatgtgccttagagagcagcaaacatcaagcatgcctcttgtcttggctctggggagtgagcttgatcgagtgtgccaccaaattgatcagctgatccacgaacagcgctcgaaccagaacgatgttgagtttgtcatgaagcattttgcagaagagaaggctgcttggaaaagaagagaacgagaaaggattcatgatgccatataacacgtggc

SEQ ID NO: 95530 - DNA, 416 bp, Glycine max
taatgattggggaccgtagacaactacctatttggcctaaacgccttatctggtctggatatgaccatacgaggcattttttcattttcatcaacatggttttatatctggtgtgtcattgatatatgtaagaaatcttgacctgcatgtgcacttgcacacacattaaatcttaggatctaagaaaccaaagtctggctaagtatataatgtagacaggaaatccttagaatagaggtgcatactatcccagctttctttcacaagcagaatgatggatatgttggtttggaagtttaccttcttgaactaccttgtctgctagcgttctctagtgttttgattccgcacacatgggttgcttaaacattgtttgctctcatttgattattggtttcttggatataagagatact

SEQ ID NO: 95531 - DNA, 396 bp, Glycine max
taaaggccttattctcatcttggatgtactattttacaatgatttaatggatagatactcaacttacacaaaaagttgtgaatagttttgttcaaatacctctaaaagtctccaatgtttaatgatcaagcaattggaagagattgaaccggaatccacattccatcttaataatttgtataataattatctttattaatgatttattaactttgtttaaaagcctctcatttttggacatggcctcaatttactcatacaatagctgttggaatgacatgcttcactgcaaaagtaaatgcattgccaaatacagaagcctgtgtcgcacattaaaatttaatgttttccatccatttttgaagttctatgagctattctcattttcagcatgaa

SEQ ID NO: 95532 - DNA, 507 bp, Glycine max
atttgaaaacaaaacctaacagtaacactcttgtagagcttgttttccattccatctgcaccgaactgcggtgtagtgtttgttggtgtcttgagcatggcgacgcaactgagcgatgcggaactcataaccagcttgcaagccagggtcaaggaattagaaactgagaatgcaaagttattgtcccaacttgctgattgccgcagtcacgagatggagaaaaaagtatatgtccctgatgagagaggcgggaaatcaaaaaaaggcaacaggaaatctgaagagaagatagagaaaatgccaggctataacacaaggtttatgagtcatcatagcaggagatatgtagctttaaaagtcatgtactttggaaaaaggttttatggttttgcttcagaggcacaaatggaaccaactgttgagtctgaactttttaaagcttttgagaaaacaaggctattggttggcaataagaaggaatcacagtattcaagatgtggtagaaca

SEQ ID NO: 95533 - DNA, 278 bp, Glycine max
cagtacactgatatgattcactctaagcctcacacatccatccatccatccatcactaacacattcatatggccccaccaaattacagtcaaacactatactagcttggtaaatggtaaatagaacttttaaggtcaaaccaccatccgttttttgttttttttttaaaataaaataaaaaacttttggctctacaacctatcattacattattgaacaactgctgctagtattgacatcactgaacatgtgagctgcagagtgatgatcatcacctc

SEQ ID NO: 95534 - DNA, 95 bp, Glycine max
cttatcatctgacgagggcttttaaatgactgttttaatacctaagaaagtttcaactattaaaatgtatttcaatctcatctccatattttggt

SEQ ID NO: 95535 - DNA, 501 bp, Glycine max
cattggcattgcctgggagtgactgattagtaagtggcgcttcccttccattccaacacgttcgttcgttcgttcactgccttctcctccttaggctacgttcgccgccgcagcccggaaaggattcaaccttctgtcatgtcaatggagtatgatatacctgattctgaaatacaacaaaatagcaggagaagaaagaaatctactgtctgggaacacttcactgtgaaaatggatggacctggatgtgccagggcttactgtaaaagatgccaaaaatcatttgcttatctaaaagattcaaaacaatctggcaccagtcatctcaagagacacattactttgggaatctgtcagaaaaatcaacgaataccatgttccaaaaccgatgccaatccaccaaagaaacgagcaagagcaaaaccttgttttgctgctatctcatttgatcaggagcgttgcaacagtaagattgctaaaatgattattttacatgactat

SEQ ID NO: 95536 - DNA, 488 bp, Glycine max
  unsure (1)..(488): unsure at all n locations
cggctcgagtttagaataaaaaattttttatattttaggttgatttcagttttttaagaaaataaatcaaaatgatgttgtattaagaattttttgttgactcgctataaattgtttttttttctctcgatttttttatttggtttctcggtttttcagttcattgacctttcttcaggccaattttgtgtcttatttgaaccgatcacctgaccgattttccagtccaaccggccagttcggtctgattttggaacacaagtatattgcattatagaggatcatgtgagcttactcatcctcttgaaggacttggtctgagggattttagatcatggttttacttctttacttggctattattattgtgatggactgtgtgccctaaacataagataaccatagtattaatttgttattctatcaattgatggntctgcttttatgtattggttttcaggatttgcattttagacacgttctggact

SEQ ID NO: 95537 - DNA, 167 bp, Glycine max
tttcaaggtttcgtcttttttggtatttttcttttcacggttggattctttcatagctcacccatcttcgattttcttttctcaacctatatcctcttatgtttcaatagggtttctatattatttcttccccccccccccccccagaaattcataaattcgtggaa

SEQ ID NO: 95538 - DNA, 145 bp, Glycine max
tttcaaggactcgtctcttttggtatttttcttttcacggctggattctttcatagctcacccatcttcgattttcttttctcaacctatatcctctcatgtctcaatagggtcactatatcattggttcccccccccccccccc

SEQ ID NO: 95539 - DNA, 170 bp, Glycine max
ataaaatcctcttaacaagttgttgctgctgcgttgagcatcagtttacagctatcgaagatggctcctcccagaggtcgtggtggtggaagtggtggtggccatggtggctatgttccctaagaactactcttcaatgcacaatagatgtgcaagtgtcccctttcgcg

SEQ ID NO: 95540 - DNA, 160 bp, Glycine max
atgagaataggtttaccccaagggttgactttttatatggcacatcctagagccagtgcctcattgaattcttttttcaaatgatatagtgatagttgatgaatcaagagaaggactaaattccaaagttaattgtggagagaagcttaccaatggtttt

SEQ ID NO: 95541 - DNA, 171 bp, Glycine max
tgttagcctgttttcagcagcatcttcttctgatgggagcagtactaatggtggaggacgacacggtcctaatattaacaaacctgagaatgttcaactggttgatctgcgcatagcatataattgtgaaataatgctctctaaaatcaaaattcctttgccagatatgct

SEQ ID NO: 95542 - DNA, 131 bp, Glycine max
atcaaacatggttcgtgattcttcaaaatctttgactcggacgtcaaaggttatgaaactggctgagggagggagcacccctatctctgcacggatttcggatatgcctgtgaccaatggatcatctcata

SEQ ID NO: 95543 - DNA, 185 bp, Glycine max
gcggcgcacagaacccgttgaaggcttgaagtctcaccccgacgccgtcgaaggtaagttaccttctttattgttttccaaacgtttttccgaagtcttctagcactggtagaagagataaaaacaagtgttctgcgtttgcgttgcttaaaccttagaaagagtttgattttgacgttctcgac

SEQ ID NO: 95544 - DNA, 166 bp, Glycine max
gctagcttcttcgctctccttcctccattcttgcacatccccctcttcctcttccttattgtcaatttcacctccaaaccccaaaccctctcacttcctacctttcgtggtcgaagccaaagacaggacccgcagggaagacaggaccgctcgccacactcgcatc

SEQ ID NO: 95545 - DNA, 162 bp, Glycine max
cacctttccttttttcccacagaaaaaaacaccacctttctttttccgactaaaggttcgccggaaaatgcctctatcctcctcttcctcctccgccgtagactccgccgtctccggcgagatcatgctctttggcgttagagtcgtggtggactccatgcg

SEQ ID NO: 95546 - DNA, 161 bp, Glycine max
agagaatgaaaaaattatctactcatttccttgaatgtactatgcccacaatcccaaaggattaatcaataatcagttaatcaccaccatttatcatgacatctgaagcatatgtgcctaaaagatatgagtctctagagaacccttttgctcataaaccg

SEQ ID NO: 95547 - DNA, 491 bp, Glycine max
  unsure (1)..(491): unsure at all n locations
cgctcccctcattcttctttcgttgctacttctactgtttcttcctccgatccctcattgccgcaaatgactcctcctgctagtgttaggtgaattccctcgcttcacatgcatgatcgcaccttcaactctcttcttcttcttcttctccatggctttttttcaaggtacgttgagttaacctctgcttgctctgtgtgattaagtattctcggcaacccattaggagaacggaaattggagtatagtggcagagatagtaattctgaagtgttgttgtgatatatacactaattgtagttctttccgcgtttgaaaggttttggcgccgtggagttcgttttgtagcatcaccgtatcatcagcttcagcttgctttcaccaaaacggctntactatttggtgtgttccatgtcacaaaaaacgaaaggagatattccttttacccactcctcgtcagggaagatctgaagcagcgctagcagcacacg

SEQ ID NO: 95548 - DNA, 293 bp, Glycine max
ggaaatactaagaaacactctacttacggtgaaggggaactaacttttacaccatacacatttgtttcccactatccaaaaaaaaaaacacccccccaacccgaaaaaagaaaagaatgaatttctacccctactttaccccttatcttaacccctttaaaagtagaaaaattttaaaaactacttaaattcaagcccaatgaccaccccggggaactgaaacaccagggggttttgttctttacacaactatggcttcttttatcattggcaggttttggagaacctttttc

SEQ ID NO: 95549 - DNA, 116 bp, Glycine max
agcaataaatttcatttcatttcatccaaataatggggaccttacaaagctttcttatttcccaaattatgctcacattaagaaccgaacattttaatagcatttttcttaaattc

SEQ ID NO: 95550 - DNA, 502 bp, Glycine max
agaagtcattatacaataagatgaacagaaaatacatagaagtcatataatcatcaatcatcaattttacacacaggaaattgaagatcatttctcaataacgaaatgaacataaaagatgccacaaccaatatggctaaacctacaaacaaaatctaaaactctcctttaacactatgaaaaggcctttgtgacatacctgcaattactctaaatatgtgctaagactgaattctactgtcaggaataaaattggagtaaaattgtgttacctgatttacaagctctaaataaagtttccattttcaacaatctacgatgaagccaagctgttgaaagacagacattgaaacatttttggtaaagatatctatcaacgcgttgcataagctttactttctcaaagcttgttgatcaattgtcttttctctttaaactcttttctgaatatcaaattcagatgaatgagttcttaattcctcatttcaagatccatatgcat

SEQ ID NO: 95551 - DNA, 99 bp, Glycine max
ggagactagagtacgtactacctagtccactactgcttaattatgtacgtacgtgtctgttatttcacttttataagtaatgaatatgaatattatgtt

SEQ ID NO: 95552 - DNA, 99 bp, Glycine max
aacataatattcatattcattacttataaaagtgaaataacagtcacgtacgtacataattaagcagtagtggactaggtagtacgtactctagtctcc

SEQ ID NO: 95553 - DNA, 544 bp, Glycine max
gtttgacttattatatttggaaaattatatcaaacccgaaaccgattcggttttccgctggacagacaaagatcgctctcatctctgttcaaatttcaatttcaaacttagtattactccaaatttcaatctctccccattttcacttctaattttcaattcccacttatttcggaatcacgctcactcactctagactagtattaccccaaatttcaattcccactcatccacctagggttttctttcccacttcgaagctatgctcaatttcaattcttctctcgctccgcgtttcggcgaacgaatgacgccgttctggtgagctttggattcgtttcctttcgttccccaacgcggattcgttgctctcgtttctcacgcgattgttggaggagtcgtatcgtgttgcgtttgttgaccgaggaggttcaattagggtttctcgattcggttttgtgatggggatttaggttttgcgaacgttggtgttgttgtttttgtggagtgggaattcgtgaagctaaagggatgttttactcac

SEQ ID NO: 95554 - DNA, 432 bp, Glycine max
atataatccactagttggctattgccgacttatatgtgtaaagtattccttactacaagctctctcgacagagtaaaacgaacatggaacagttagaaaaatttacaatttactctttattcaacattatgccacatagttgccacaattcttgttacaaaaacaagatacaagaattctcttggcgtacctatcacaaaaacataagtgtgtatacaatcacaactagcctctagtagccatagggacagctatacaaggccagcagcaattaatgcaagctattttaggaggaggcagttttaacagctttgaatattcatcactcagcctctggtgcgcttttgcttcccaaaattgatatcccattttcagagcgatcatggacctcaaagtcatgcctggccacacctgcttagacaagcaattcct

SEQ ID NO: 95555 - DNA, 494 bp, Glycine max
attttctctccctcaaaaaacccttcactcctttccctctcttttctaattttttttttagattcacccaaaacccgacaacccacacatggggaagtacatgaagaagtccaaaatcgccggggacgtcgcccccgtgatcatggaggctccgccgccgcactcccacctcggcgtccgcacccgcgccaagactctcgccctccagaatacctccccggactcctccgcctacctccagctccgcagccgccgcctcctcaagctcccccctaccccgccggaaaatccccgccgctccgccgccgaaaccgccgccaattcccgcctcgccaaaacgacgtcgtcccgtaacgccgaaaagttcgcatctttcgatgacgacaacaataccgaatgctctttcggcgaaaatttcttagacgccgaacccagggaggaaaggagcaccagggaaagcaccccttgtagttttataagggactcaaatgcca

SEQ ID NO: 95556 - DNA, 222 bp, Glycine max
aaaaagaacaggacggactaatttaactaaacatttgggggggcttaatagccaaaaaaacacccttttttcataacagatggtccaaaaataaaatcttttttccacttcgcccaattcaatcaacagatggaaaataaacatgagccttctttaaaacgaaaaactcaaacttaaaacccaactttttttttgagtttttcccaccttgcttttacccct

SEQ ID NO: 95557 - DNA, 370 bp, Glycine max
gatatgattcaagaaacaacttttaaacttaaattggtgatcacaatcattccacatacaacaaaagattacaaaggttcaacccattataataaccatccataattgaaattctaagggccctaacaaagataagcttgttctacaaatggagaccaatatgatctaaaagagtagtttaatggccgcaattgacataaactacattctattgggaagaaacttgctgggaaaaatattgaagatcttcaaaaggtttatcaaaatcatcaaaccttttgccagccctttgaaaccccttacgtacaatatttgttacccggctgaatccatcttgtaaaccttgcgtgctagagaaaattcaaattaa

SEQ ID NO: 95558 - DNA, 367 bp, Glycine max
aaaaaagagttcactacatgcattaaaagaggcaaagactttaaacattttttgggggcagtttcctccaaacctttagctgatacaatgaactagcataaagaagaaaaacttataagtttctagtttacaatataattatggacaaactgactcttttttatagaaaaaaataaaataaaatatggacaaactgactcttttttatataaaaaataaaataaaatatggacaatttaacataaaataaatccacataacatacgacaatattcatcatgtttgagtgtaaaaccatttgccatcattttaaattcacctttgcctaaagaatacattgcgcttttgcttccctactcaatcttca

SEQ ID NO: 95559 - DNA, 488 bp, Glycine max
cttctcgtgtcttctctctctttgcagtgcaaacgtggggcgggatcccgtttcaaaccccgtttttgatccgactccgatcccatttgaagaaataacttgattaccttgcttttctccctctcctggagatgcataaaaggaaaagctttagtttccccttttggtcacgggacacaccgtttacggcatgcctaggaactaaaggcacattgattcagaaattgtatccaagttgaacagcatgctagattagcataacacatgcaaaatcctttcgaatggctagagatagatttaaagatggatttgtgcatgatcttaaattgaagttgatcttggatagagttaaggatgatagaatatataacatgtctcaagtttatgaagtagctgcacttattgaaggtgacgcggacagagtataaaaaagatacataatcttggaatcacaaaatggacaactccaaagactagatgattttcat

SEQ ID NO: 95560 - DNA, 327 bp, Glycine max
aaagatcctcaaaactttttcaagatgatcaacaactttcaaatggatcaactcaagaaagccaaccctttggtttgggacttacatgtaaatgtcacaaatcaatgtcacaaacaaatcaagaaagccaacactaccacaaatcaccatcccattaaaggccaattgattcatatttctacaacctcaaacaagtgtggaagggaatatgactctttttccactgtttgaaccttggctttgggcattggtagttgatcgatgccggttgcagaatttgtcaacctgtaactttaatggagtgatcctaataaaaaaaagtctttt

SEQ ID NO: 95561 - DNA, 179 bp, Glycine max
gcgccctacggctttgagaaaaccacattgtccgagggccattgagcatacgcaggggagatatagagaaaaatgcggtgcataataatcataagctgttagagaggaagaatggactcgacaccacccacgagaagaagaataggaagctcgccattctgagcgtgtcttccctcctc

SEQ ID NO: 95562 - DNA, 514 bp, Glycine max
gaaacaatacatgtttgtttctttagtgctgcagatattgttttgtagaattcagaatataatctgattaaaaagaaaagaaaatgtcatccaaccaaatatctgcagcactaaagaaacaatacatgtttgttttctgatttaaatgccatttaattatgtattttttattatttctattatcttcaacatttagtggaactttcgcagtgatttatgatgtcaacttgcatttttctctaattttacctaagaaatcaaggttctgatatatataacacaatattattatagggctctactagtttttagagtctaagatagaccattaataactaatcactcctcaccaaactgtataaatttgatctaggtatccttataaccaaaaatcatgaaagtaactttcactaaagtaggttttgcatgataatttcgtttagtgttccaaaaaccatgcatctatgttttcagcagccttgtattgcaccttacttgtccctctatcatgcat

SEQ ID NO: 95563 - DNA, 447 bp, Glycine max
ataagttcaagaaagctcaattcatgtggtaaaaaatggcgcatggaattagctcttcacaaaaaggccaaatcaatgtacaaaccataatcaatcaatagacagaactaaaagttcccttcccacactctccaactgagatttggagtatttctttgccagcttggctttgtcggcaacagagacgtcgtggaacctgatgccaattcttgctcaaaggttgcactgctacccggatctctcccacattgcgcagaggggggaggagaggaaagcataaaattctctttttgaaatcatctttatctctaccccgaacatatgaaccccaagaagcattaccctctcttccagtatctttcaagaagaatcgagtgggccctttacaaacagatttgtatggttccctggcatcgaaatcaaattcatttgtttgactaataccat

SEQ ID NO: 95564 - DNA, 283 bp, Glycine max
aaaaaaaggccttcccatttttgctttataataaattaaggggaggggcccaggggggggggggtgttttgtaaaacctttccattaaaaaaaaacctaaattcaacccaaaaccggggtttctccgctctgattttaaaaaaaaccccctcctttttttccaaacaaaaagccaaccccttttaaagctttgggggaggaccaacccaaatggaaaagaaaaacccccgggaaaaaaaaatcctttttgacaattggcaccccgttttttattccccctttt

SEQ ID NO: 95565 - DNA, 128 bp, Glycine max
gctttttgtaactggagccttgaagatcaatggggttcctttctgaagggtgagccaataacctgtcattggtacatacacagaggtggacatctttggcgttaatgttgataaattagatgacaagt

SEQ ID NO: 95566 - DNA, 117 bp, Glycine max
gcgaacatctgaagtcatggtccttttttgattgcttacacactatcatcatcatgggaagtcatttgaaaatacacttatcacataatttttgggtctgcacaggattaaaccttc

SEQ ID NO: 95567 - DNA, 297 bp, Glycine max
gtaaaagggtagtcatgaaatggattgtgattgcaatgataggcccaatgtgaggtatgatcgtggcattagtgcaatcctttatcgggaattctttttacatgttgacattggggcatttcttttattgagcccctgaaagaaaacaaggacactaagaaggtcattgcctgtgatttgtacatttttttaaaaaaaaaatattcctcccaaaaaaaaaaaaaaaaaaaaaaaaaaaaaaaaaaaaaaaaaaaaaaaaaaaaaaaaaaaaaaaaaaaaaaaaaaaaaaaaataaaa

SEQ ID NO: 95568 - DNA, 375 bp, Glycine max
gaagagagaaagagacacctgttattaatcagaagagttatgtttacatggatacagatttcaacagaggtctcttagaaatcaaattctcaccattcatgttactttcttttccctaaacatcgaaggttctccctccctctctgttgtctctacccaaagaatttgtactagtggcttttctgtacctagaatgactctagagtgtatgattgctttcgaacccattcatcataatcttgcatcgtctgctgaagtaggaatggctccagcttgtccaccaaagcttgcatcattatatttccaggaccctcaacagctgaagtaggcatcatggtaaatggttgtgtgtagatctgcaggcagagatctttc

SEQ ID NO: 95569 - DNA, 474 bp, Glycine max
cggctcgagttgccctaaatcaccaccacatagctcgagccacctagaaccaccacaccatcaacatgccacccaaaaacaccaccaccaaccaaatcaccaaccactgcgccacccatctgcctcatcagctccgacgtcgtttacctgaagggatttctcaatctatgggtaaattacacaacttatggcattctcaggattaataagagctaggaaggtgttgagcaatgttctcttgttattattcccaatatttgatattggattattcatagcataattaaaccctacctattcattgttgtttagttatttgtcggcatgagttactacctagatcaaggttctgatggatggaagaattaaaaaaaattatattaattgtagaattttctcaaaaaaaaaaaaaaataataaaaactacaaaaaaaaaataaataaaaaaaaaaaaaaaaagggcggccgccgact

SEQ ID NO: 95570 - DNA, 379 bp, Glycine max
ctcccctgaagaagaaaaaataaaataaaataaagaaagcaagcttcaaagtttcaaactttgcaccaccccacctccaatttcaaggaccagaactcatttttccccaatttaaatcctttttcgctacccattttgggttttggttcgtgtaacttctacttctggaactaaagttgagctttttaccttatttgggttctttgtgtttagcttttttttttttttccttctttttcatggcgattgggcttcttctgtggctgttactggccaagggtcttgccatggagggtgccgtgggggtcacattttcttctaggctcattcaccgtttctctgaagaggctaaggctcatttggcttaaggggcagcgac

SEQ ID NO: 95571 - DNA, 460 bp, Glycine max
  unsure (1)..(460): unsure at all n locations
aaaagagtcaagagtatctcggatactgtgtttttgtttattctctttttcttagatgaaaagaaaccattcctcagtctatattgattccagcagtgttatcaatggcggaaggcctaaattctgtcatataaacacgtcagggcggcctatggtgccaccatagtgggcttccctttacaaaatgcctatggcagttggcaaaaaatctgccacaccattccgccatggcagctatggcacctacatttaactacggatttgggagaaaaattctaggacaaatctgctggtaaaattctcttttgaagtatttccattgtggtcagtttaattgccaaattttgggtttgtgaaaggtttcttaatttcctcctcatttccaaccaaaatgaatattttggtaactcaaatggattaatntaatcatatttgattttcccccctatgttttttaaat

SEQ ID NO: 95572 - DNA, 234 bp, Glycine max
acaaaatccttgcattaatgggcaaaataaaaccgaatttcaaaatagctaactttagctgaaaaaaaaaaaatcttttcccactaattttccggtttttttaaaaaaatcctccccccattaagggtggcccccagaaaaaaaaattttacccatgacccttcattttggaaccccccagcccaatttacccccgtaatcctatggggggaaaaacaaactgggccaatcccc

SEQ ID NO: 95573 - DNA, 268 bp, Glycine max
acaaaaaccttgcataaatgggaaaaataaaactgaatttcaaaataaccaactttagctgaaaaaaaaaaaatcttttaccactaattttctggtttttttaaaaaaattctccccaaataaaggggggacccaagaaaaaaaaataataacaatgacccttcactttggaacgccccaacccaatttacccccgtaatcctatggggggaaaaacatactgggccaatcccacgggttggaagccccttataacaaggggggattg

SEQ ID NO: 95574 - DNA, 357 bp, Glycine max
ctcttcaccatttggcggcgcctttctgctttaattagcattgttattgcctttctctactctgctctcatgagggcaggagactttaatctcactttgctcggaactgcgagaaaacctgcttccgcaaggattgacgacccgcgacgaataccaaagactatcaacctcagggctctcgaccttagcgtagaatatctttattgtggattttgtcttctgcggcatacatcagcatcgatacctcgaaacagcgacctcataatctaatgcgatcaatattcggtatgcgcaatctttccctacatctactggccggtcttacagatcgaggcccatcatccattacctgaccgg

SEQ ID NO: 95575 - DNA, 163 bp, Glycine max
gtactcatatatcaaatctgatgatcatggcatgatggtcatcatcacccctatctgatcgtctatttctgaggaagtatttcacatcctttgttgctaggaaggtttcatggtcactctatgttggcttatcgtgagaacaagtctgagattaactggagct

SEQ ID NO: 95576 - DNA, 371 bp, Glycine max
actaactataaaacatccaaatccatgagtaattagtttcacaatgaaatcctactttattacacttctgaaagacatgctttatatataaaatggatatcaacttatcatgcatcaggggaaatcataaactcccaaagcatactgctcacgctttctagcatcactcatgaaatttgagagtgctgagttatagaaagttcccttaattgctgaatactcattccaccaacacatgtagctgctttgcgccaagaaaatctctggagatactgcatagttcttgaccaacccataaacgtactcctcaaatataaccaatttcttcaatgtctcttccttctctctaacaacgttcaactacttgcatg

SEQ ID NO: 95577 - DNA, 135 bp, Glycine max
acagagaggatgcggactctgaccatagtctgcaagagatagaacacacagtgccagagtattgaagctataccaagtcaccagtaaccctaactgcacctcccttgcgattgaatgagaaagaacatgaaatgg

SEQ ID NO: 95578 - DNA, 128 bp, Glycine max
ggaaattggaatatcacctttatatatcatgaacacgaattgaatgcacgactgtcataccttagacatggcactagatgaaatgtcggagtgacaaatgtttgacgaagcctgatttatagagcctg

SEQ ID NO: 95579 - DNA, 466 bp, Glycine max
gaaacctgcaaacaaatcaaaccctattatcatggaggatgtgactttttctgatgtcttttttcaagttttctctttctgcgtaacagttatattaatatttatgattataattaaattttaaaaatcataaaaacgatatcgtttcaaagatgcaccaagcaacacagctgataaaggaaagatacagcagagaagtcaaactccaccaggaacaggtcgaatctagcgcagaaggattagtctcccacaacatagagaatcaaagttcaaattccccatgggagaagtgttgatatttagtgttcaatcataccccaaacaaagattatctcccaagaaacacacttgaaggaagaaaaaaaaaaaccctatacatgatcaaattttacacacgacgtaccgtcgtagacgtgaaagcaacaagcacatgagagaagaaaagagaagaagattgatttaagag

SEQ ID NO: 95580 - DNA, 174 bp, Glycine max
agcccaactaaacctaaacgggataaaacaggaaaccccatttaccatgggcttacatatgccatttgaggaggaaaaaaacattccttaaaggtccacaatcaacaatgctaaaaactaatattaaccccatcaaatcattcagatttcggtaaacccctcttttcttccccc

SEQ ID NO: 95581 - DNA, 228 bp, Glycine max
aaaaaaacgaaaacccttcaaaagggccagcaggcctttaggcttttacagaattggtgaacaatgggggattcctttcaccctatggggatactttaagcctaactggggccccccaaaactttccaaaaagaaagaaaaaggttagccccttttcattaggggtctgggctatttgaaaacggggcaggccttaaccccaattccgggggcagttgggcaaggggc

SEQ ID NO: 95582 - DNA, 56 bp, Glycine max
aagaatttaagtcagaggtttgagatgacacccagtgcagatactgaagagtcaga

SEQ ID NO: 95583 - DNA, 135 bp, Glycine max
gggcaaaggacaagcatatcccataaagaattggctatctgatctaacagtccatagggggaaaaaacataatggatataccacatgataatattggaagaaaattctaacctttaaaactccaaattgctcctt

SEQ ID NO: 95584 - DNA, 410 bp, Glycine max
atcttcatctttatgtttcttctcttccttactttttgtatgctctttctcaactgatttattcttcagttccgcttctaccttaatcttctcttccttactttttgtatgctctttctcaactgatttatgcttcagttccgcttctgccttaatcttctcttcctttacatcacctagcttgtcatccttgatcttgatgtcatgggagatttccatatctatattatcttcacacagtgatgatgcaaaaaccttaactaaatctgacaggtccctgaaacatgcacatgtgacagtaaagtcaagccattaatttaaataaattgcttgatacaattacttgcaagacattagttaaactccaacatacttgattaacagtttaatgcaccttcctcaaaatcaat

SEQ ID NO: 95585 - DNA, 468 bp, Glycine max
gaaaataaaatttgtcaaatctggatataaaataaaacaaaagttatgtatttctacatagattataaataatgaacatgcatgaaagtgttctaggagtttaggtttgatacaaattgtacagtcttaaggagaatttggcaaatctaaaccgcgttaaatatacattaattatgcacggtggctatcgcttataaaataatataaactatatacatacatacatacataatatataactatatatcactaaatgaatgatatatataacacttagctcaactgctcaaggtcaaggtagataattacctgctaccaagtagtatggtacccatgcatgaatactagattcgcttctcgagacaatagatggctaaaagggacttgctgctaaaaaaaaaaaatgctgccacttgggggttactcgctcagagtatgcagaaaacaaagatgcatgcatgcccatgc

SEQ ID NO: 95586 - DNA, 197 bp, Glycine max
ggacaaaaggaaaaggcaccaaattcaatttaagtggacactttaactcaaaattatagaggaagacagtccaatatgaaaaatatagtaaaatcatctcaaacttggcatcttctctttgcacctaagacattgagaattctaagaatgttacacgcaagtcccatcacaacttctagcacttggatcagcacaac

SEQ ID NO: 95587 - DNA, 64 bp, Glycine max
tttctttatgtatggttttccttaataaaaacggccgctttgatttggcgatcaaaggaagaaa

SEQ ID NO: 95588 - DNA, 290 bp, Glycine max
tcctttttttttttttttttttttttttttttttttttttttttttttttttttgttttttggtttttaaaaaaaatattggctctttattacccgggtcaagacattaaatgggatttaaggggaaaataaaatttttggggcccctaactaaatgggtttatttaaatggaactggtaccggaaagttcggcacaacatttccatagttttttaagatattttcccccagccaaaaaaaaggggtacatgccaaccattttggagcctaccgggggtttaaccctggg

SEQ ID NO: 95589 - DNA, 261 bp, Glycine max
gatgcctacgtcttacaatcacggcaactgcagcaggaactggacattctgaaaagaagaaatcgtagaggcgattcaggcttttccttcacttttgccgtgtttgtgggtctcattggattattgtgtggtttgcttttaaaactttcattgtcttcaccacctacagaatgatttcacactgatcaaaacctttgcatgcagacccttccgtgctattaagtgtaaagaattattttctattgaatgggatttttattc

SEQ ID NO: 95590 - DNA, 155 bp, Glycine max
cttttcttttctgtttgatgcattgtttcatgtctttaatggcatgtctattccttgattatcgctctaggaactcgatcgttggagatggtaatgttggacccttcaatctaaaaggctgatattctaagcattatatgtttccatcaattgaa

SEQ ID NO: 95591 - DNA, 257 bp, Glycine max
aaaattaaaggggcccctttaaccaaaaattttaggggaaaaccgcccaatttgaaaaatttggaaaaatcttctaaaactgggaatttttttttggccccaaaaacattggaaattttaaaaaggttccccccaagtcccataaaaatttttaaccctgggatcaccaaaacctttgggaacaaaaatttttccttgccaagtttgttttgcccccaattaaaaatgggaaaaaagtcccccggtaaaaaacaccc

SEQ ID NO: 95592 - DNA, 272 bp, Glycine max
ttttttttttttttttttttttttttttttttttttttttttttttttttttttttttgtttttttttttaaaaaatacccttttaatcaatttttgggcgatattcatgaatttcagtccccccaaaatttattattggctgcaaataatggtaaactttgaaaatttttccttaaacaccgtttgaacaaacaatttccttttttttcacatgatacgttaacccaagggaaagagtaaaaatggtttgctgctgggaatgggaatcatc

SEQ ID NO: 95593 - DNA, 51 bp, Glycine max
gcagcaaatagactactttttatttaaaattaaaatgtttcccttggaaat

SEQ ID NO: 95594 - DNA, 99 bp, Glycine max
acagggataggccatatcatcaagaaggagttacattatatgtacgacaggatattatggcattgtttgattcatgtaccttatcccacttggtgggag

SEQ ID NO: 95595 - DNA, 471 bp, Glycine max
gctgtgctaattgtcatttctccttgaatttgataaaataattattgattcttacagcgtccaatccttagcctcttctattgttcctacctcatcctttgagagacgttgatcatctttaaattgatcctgattctgtccattgatagaaataccctactcagaactcatcctaaagaccaaacctcattcgcccttgaggatagttcaaccctacttcgtcgatactgtttggatatacatcgcatccatgcgcttcatattattgtaatttctatacgatcccatgattcgggcgcaagctgcaagtcatttctaccaacgtccaatgcaagtccaatccgggagtaggtactttcgcctcggcgaaccagcactaaaaagtttcctccgaggaacagcagtaaagcattgtgaggtagatacggtgttcgatatagagcatccggcaagaattcgatcatgtctttc

SEQ ID NO: 95596 - DNA, 120 bp, Glycine max
aaaacaaaatacgagttcgaatatgcaacaatggatcgtgcctaaccagcatgatcatataggcatatactaaccatgctagtcgctaagtctagctctattacatgcatttttaccgaa

SEQ ID NO: 95597 - DNA, 133 bp, Glycine max
gaattcgtaaattagccgcccttggatgtaccaaatttcatgctttttgtaggagtgcgtaggttttaaaaattttctgatgtatctttcatgtgtttgttggttttgtttaatataggaaatattctgttac

SEQ ID NO: 95598 - DNA, 129 bp, Glycine max
gaaaggtgaaagcatgtatgtattctattctatcgcctttcaaaattgaagacctttacagaaaaagcaaagatagtagcaaatagcaatgcaaacccaacaactacacctgcagcaactcctacaaaa

SEQ ID NO: 95599 - DNA, 304 bp, Glycine max
aagagacaaaaattaagggcttagggcattacaaacttgcagtttgctacccataagcatgatgcaagcaatacaattaactaaaccttttatttaaaggggaaaactgaattctgcaaaaatgagaggataacagttacatgggggtctcgacattctttaccctttttaacaatggtaccctattcagcatagccccaccgataaaaacaccaatggggcatttggctatggggcccaaagctaaatatattgcttgaaatatagagttgacagaacattcaatcatccactgatttctggg

SEQ ID NO: 95600 - DNA, 385 bp, Glycine max
cttttgttttgaggaagatgattgtaacagaggcttcaaagatcacacaagatgtgagtacaagtgggaagcatgctggtccaagcacagatgaggaaaacatcgctcgtatgccaggagcaactgagggatcagttgttttgagatcaccgtcaaaaagtttgaagatggtaggctcgccacatacttcttcacttgagtgcagggtagctggaggactgctgcttaataaacttgaagaagtcaataaatcagtgaagagacttgagttgcttatcgagaagttgcatgcttcttcctccatcaactgaaggtaccatagtttagcactgcaagaattgaaatgaaaggacgttccaaatttatagtaccttatgtttcacta

SEQ ID NO: 95601 - DNA, 482 bp, Glycine max
aaatagctcgccgacgcgcggccagactcgcgccggcgttgttttgaatactttcatcaaccaatccttagtctctactcttcttcctcccgcagccattgggagacgttgatcatctttaaattgttcctgattctgtccatagatagaaataccctactcagaactcatcctaaagaccaaacctcattcgcccttgaggatagttcaaccctacttcgtcgatactgtttggatatacatcgcatccatgcgcttcatattattgtaatttctatacgatcccatgattcgggcgcaagctgcaagtcatttctaccaacgtccaatgcaagtccaatccgggagtaggtactttcgcctcggcgaaccagcactaaaaagtttcctccgaggaacagcagtaaagcattgtgaggtagatacggtgttcgatatagagcatccggcaagaatcgtatcatgtctttcacttctttcgc

SEQ ID NO: 95602 - DNA, 410 bp, Glycine max
ggcggtcatgtctctggcatatcttcaagccgaaacgtctcaacgacacggcgacgacatctgggcgctgagatggacacacaccaaccacatcctcaccggcgccgccgatggccatgtgcgtatattcgacgcgggcgagccttccgtggcgctacacgacctcgctgcgcatccgctggcagagacgtcgatgagtgtgagcaaggaccggcggaaggccgtgagtgcaagttgggacgggacggtcgtgttggttcatccgagtgaaggcatggtgttggggaggttggcgaccggtagagaagaagtctgagcatacgcgtgcgccctgcatcctgaagcaacctcctacgcctggtctggccggtccagcaaagtcgtcatccgacccttgggcctagtggacg

SEQ ID NO: 95603 - DNA, 424 bp, Glycine max
aattgtagatgtgcgcgaatgcatgctgaatgagaatttctacctttctatacattccttgccatgtcctctcgtgacaaccgtctcggttgtgtcccagttttcgcgccgtcctcagatactgcccgcttggcgatacagcaacacggccttttcatccccacccaccgcaaactgcttgctgggcccaagcgagcctatctgcacatctgcaggctgccagtcgaatgcccaggcgggcgcggcgagggtggtcgtgtacacggcggaccgctgggcgatgtcccatagtttgacattcttgtccgcacccgtagacccgagcaatcgtccgtctgcagagaggtccaatacccaactctggtggccctgcataattgccacggcgccttcgcctggtcgggagcccgagccggatcggatg

SEQ ID NO: 95604 - DNA, 477 bp, Glycine max
gtagaaaatggtaaattggatgaaaggaaactcgccaaatcagttatttcaaggaccaattacaaattttggaaacgctttgcaaaagagtttgaagggattgatcatatgtggaaggaaaagaaaatacataagttagctgaatgtctaacaaatattttagtgcactatgacttctcgtggcagatatcccacaatgagtataaaaggacaacaatgatttcaatgccacgtgatcctattagtgtggccaaaaggagaaggataagtgcacaaaaaagggaagaaaggcgtaagaacgatgaagaacctcccgaacgcacagcattactcatagcaactaaaactggaattgtagaaattgttgaaaaattccttgatgtgaatcccgaggctattttccatgtcactgagaataaccagaatatattgaccatggctgttaagtatcgccaaaagaaaattgttcgaatcata

SEQ ID NO: 95605 - DNA, 418 bp, Glycine max
aagagattttgcttctgtcttgagttaaattgctcaaatgttttgatgactcaaaacccttctttgttggatgggttgtgaacagtggctcactccttatgcttttaattgctaaaggaagttttgtactatttctatggtcttggtcaaagcagcccttctttttatccttcttctccaatatgatttacagctaataccttcatttcttctggaagttctgcacaactagtgtgaaagttataatgtactggattttgtgtgctcaaccttgaaagacaagaaggattaaaaaagtgaaacttttctttttcctgttctattcttatccttgttcctcttaaaaagggtcagtttgtatttgatgtagtggttgtatgcagcctacataccttgtcataagttgacaacattccac

SEQ ID NO: 95606 - DNA, 362 bp, Glycine max
gtgatgaagagcgtgctgagcatgaaattccagggcatcgcctgtcaagaaaacagcgggaagacatgtcctcagatgatgaacagcaagattctcgcagaggacgctctaaattggaacgctggacaagccataaggaaagagatttcagtgtcaacaagtcctcttcttccttgaagtataaagacattgataaggataataacgatgggtcttctgaagctgggaagcctgcggatgaacctgctaaaactgttgatgttgataatcaacatctcttgttagctgaagcaagggattctgcagatatggaaaatagggatgctgatacaaaagaattgggagatcggcaccttgacacg

SEQ ID NO: 95607 - DNA, 51 bp, Glycine max
atttccaagggaaacattttaattttaaataaaaagtagtctatttgctgc

SEQ ID NO: 95608 - DNA, 170 bp, Glycine max
ggacaattgattagaagagcatgtgcaacaaggcaattgagtagaagttattattggttttactgggatagaataagaaagataattcagatcttgctcatttaactttcctttatgtatgacatgaaacttgggatttgtttgtcaaattgaaactgaaaaatttagtt

SEQ ID NO: 95609 - DNA, 210 bp, Glycine max
gaaagacttctcgtcaccgtttgaggcctcttcaggacgagaacgcgaccgaacagagcgggtgcactcgaggttacttgcttcaagaagtgttgatgccgctggtactcgagtgtctttcatgtacggatctactacgccttcagtcaagaatcaaactggtgccaagctatctagtggaatcatgtcaccggttagaggacatagtga

SEQ ID NO: 95610 - DNA, 360 bp, Glycine max
tagggctgaaccaattgtggaggctgaggttcaagtggagggtgaggttctagtggaggctgaggttcaagtggaaggtgagattgaagtggaggctgaggttgaagtggagggtcaggttgatgtggagggtcaggttcaggttgatgatgaaggtttgataaggttgaggtgcatgttgaaaaggaggctggtggtgtgggtgacatggaggttgttgctgactgtttggatgatattcatgttggggttgacacagttgatgatgatgtggggtctggcgaaagtgatgaggattatgttggggatgaggaagatgatgatgattgcagcgactgtactgaagattcaattagtgat

SEQ ID NO: 95611 - DNA, 398 bp, Glycine max
cttgacaaaagataaactctaatcctgctctccactatcaggattaattgctatattttcctttccatttatctgttgggtagaatattaggcgtaataacaaagttgtcttagtggtattcttctagtattatattagcaagccttctttttgttgtgggctaatattggactccatacaggttagagaaattgttgccattttggatcttgatgttcttttctatccttgtccaagaaatggcccaaatttccgtcaaaaggttctagagatgggtggcaaactgcagttcccctacatggttgacccaaacacaggcgcttcaatgtatgaatcagatgacataattcggtatttggttgacaaatatggtctgtgtcttcgtatatattctcta

SEQ ID NO: 95612 - DNA, 497 bp, Glycine max
  unsure (1)..(497): unsure at all n locations
aacaataagttttttttggctttataaataactttaaataaattagtatacatttccaattttgtctaaaaacaacacttgagaaaataaagatggcattgcacctgagctgtagtccttccccacccccacccttaaaaaaacaataacattgctaaggcatataataagttccaaagaaaaagaaagatctctagtttcttctgctcttcatatctgcctgtctataaataaaaaactagtaacctacatctatcaatatatgctaaccaatcccaccacagttctgaaatgaatagctgcagccccgagttgtgagtctcaaggtcaagaatgaaccatccatcataaaaggaaatgaggctagaaatacataggatacaggttcctcaataagttatctcctactggtggcagcagtcttgcctttgcttaaatcagctagttcctcaataagttttctctcttctttgctcagnttttttggggatttcaac

SEQ ID NO: 95613 - DNA, 158 bp, Glycine max
cttcgctgtagtctctatgctcactccaccgtcgtatcgacacttccatcctacgtgattgtatggctgtgaaaccgtcgatcttatgctcatccaacacgcgcgggggctgtatctgcaccggcgtaatgtgccagtccatgtgtgcccacatgatg

SEQ ID NO: 95614 - DNA, 170 bp, Glycine max
accatatgtaaatatttctagcatacaattgggtaacattggcatcatctttctttgaacaaattctcttgtcagcttcatttcacatgatctgataaaattgcaacaaaaatactgatggacataactgggcaaaaatgaatgaatgcgctttgggcaggaaccataac

SEQ ID NO: 95615 - DNA, 497 bp, Glycine max
gaaacacacactcaacaaaaaagaaatagaaaaaaagaaaacacaccattcttggtttgctaattaatgattttgggagtgcttggatttgtgttgcattatttaaaatcatgtttaactattaaaactatagggactaaaaatgtaagaatcatgccaaatgaataatttaacctaaaatttatttttaaccaaaatctattttactaaaccaatataatttaaaataaaatttgcaagacactcacttacttacagtttgccttgttcggagtttaaatttcgatttagacttaattttttacaatagaggttctattttgattcatataagatttttatattatatggtcatatattttatgatatattatctatttttttaaacatcttttcctttctcattattattgcttatttctcttaattatagaaattaattatacatatataaattatcatataataatattcactactattctaaaaatctaaac

SEQ ID NO: 95616 - DNA, 398 bp, Glycine max
ttttttttttttttttttttttttttttttttttttttttttttttttaggcaaaaatttgggtttaaaaagaacttaaaaaatgggctcaatccataatacatttgttctaattttattaggccatctagattgggttatttaattccatttctacttaggggatgttagacccccccttataaaattaaaaataatttagtaaattttggactacttcctaatttggggaaagctaaaattgaatgaagagagattctaaccctttttttttacatttgcttccaatacattgggcttatactcattgggaaaagtagcccagctgaatcaaatttggaatcaaggtttaatcattcggctttcttttctttttttttttttaccgctccattagt

SEQ ID NO: 95617 - DNA, 474 bp, Glycine max
ctcgagccgcacaccctaccatatcatatgaatcggcactctctttgaaaactgttatgcgttcaccggcgtcggaaaggtcgtccggttagggttccggccatcgctaagggcacggatcgtaaaatcttgtcgaagcttatatgctattactcatgttgagagggttattctctcgttgcaggagttattaggcaccatttttaccacttgaagtcagtcagcaacaatttttctgtggatttttcaggaatattttcacctgcaaaagttgaagcaaatgtctctgcagaacaaggtattttggatggtgaagggttctggacaaattaatgacagagagacaatatttgataatcctaccaaaattgaaccaaaacgacctcatcaatggtttgttgacactgctgaagtagattttcttccagacaagaaacaagctgtagaagatgcagatgaaaaatctagtcctgg

SEQ ID NO: 95618 - DNA, 487 bp, Glycine max
ctattatatattcttcagatgaaatctcggcaccagcttgtgaggtgttggaccaccattccatgatttcttcctcaagaaaatcatgattggatatatactgactttcgaccatacacttgatactccccactttcactgagagagattttcttgtattctgctctgaacactgtctctgggactgggtctttcaagatgtcggtgcgggacaattgaagcttttttactgcttcaaatatttcctttggcacctgtgaaatctgcctttcagccaatttggatggagataatgtaggattttctctgaatttgttttcctctgaactcaaaccacggtatttcttgaatgatgcattgcaccctaccttatgggttataatttcatttgatttccacttcaaattaatattttgacctgctcgttgatctgtttcatcattaatagaacctccagataaaactcggtcatcctcatcagtcagca

SEQ ID NO: 95619 - DNA, 439 bp, Glycine max
ggagagagattctgtcctctggttttatttaaacataaaaaaagacaagactacaaaatgaatatctaaagctactactacattcacgattcatccagcatcaacctaacactgataaacttaaaatcacaggagaaaaaaaaaaacagtggcagaatcaaagcaatatctaaacaaacaacaataccagaatcttacttactgagaccttaacaaaggttaaggctgttgtggcgacgacacagtcttggccttcttcttcttttccgaaatggccttggcaaatgcctccacaatccgctgttgcgattctagaatcatctcagtgcgcttcatctccatctccatccgcatggtctcaatctccctcgccatctccatcttcatctgttccgttctcacaaacccatctcccaaaaccttaatcgcagccactaac

SEQ ID NO: 95620 - DNA, 272 bp, Glycine max
agaacccccaaaattaaaatttttttatttttttccccaaaaaatttttggggccccattctttaaccaattcaacttttaccccaaaaaaataaataaaaaaaggggcttttttaaaaaaaaattggaattaagaaaaaccggggggacccctttaaatttcattttttgggacccggccttctttactggggggcaaatttacccaaaaggcctcggtaaaaaaaatttttcccaacgggaaagggggcctttggggccccttttttttt

SEQ ID NO: 95621 - DNA, 453 bp, Glycine max
ttaggctgcagagctgttgtacaagaggactgtgccagaagcggtgtcgttggtgagttgggttctgtggatactgtctttcagattggggacactgttgctctgtggaagactttccttggactggaagtggcctttcattcgcaagttctctgagatttccttggagaagagagaacaaattttcaggaactggaccagggaaaagagttgggtagccttacgggtagtgtttgtgctcatcaaactcttgtgcttctataatttcttctcaagggtaaggttcttcatcatttttagcaagcttgaattcagtatatggttgagttcaaattgcagaggagtactattttttgcatgtttcaattttatagtaggcattgctgtatatcatatatgtactattgttgttcttatcaagctatctaccacatttaataatcgaacttgttt

SEQ ID NO: 95622 - DNA, 361 bp, Glycine max
actacaacgagaaagacagaatctgttgtaacataacaaatgccaacttggtttggtagtggcactgccaccactgcagccacaacaacttcaacagtgtctacacacatttactatgagaaaaggtaccaccaccaccaagtgtgcaccaaaagttgctaacttttgttgtaccaataaagtttccttctctctccccacgtacacactgatttgggttctgtttgttgaggcttcaggacttgtcttgcaccttgcactcaccgtttcttagccaaagtttaaatttctatcagtaatgcttggtgggatggcttgcgtgacttgtagttgagctgagcaaaattttattttttttggc

SEQ ID NO: 95623 - DNA, 500 bp, Glycine max
agcgtgggatttagaaccttggtattataaaggaaagcttgcgttcccccagtattacatctcccatttcgagtctatcatcttccttctcgtcattcttcgtttcaacctcgcaaaatgagcacatttgctacaagatcccttgtttctgtagaatcaacaacaacaattgaaggaactgaagctgacaatgtggatagtgactcactgttccgagggtgcgtgttggaagggagatgggacttcgctcttacagcatatagaaatgacagtaactatcacaaaataaaaatcaacgaaagcagaggcacagcactacacgtggcagtgaatgatggcaaagtggaacttgttaacacccttgttgttgcaatcttaaaccacgaagggagggaagtgctgagggatgatagtgcactgaaaacaaccaatgagagaggggacacccctttgcaccttgcatcctcaagagggttcattggaatgtgtaagtgcatcat

SEQ ID NO: 95624 - DNA, 431 bp, Glycine max
agggggataatgagaataaattaatggaaaagtagactagtttacattcatggaaggaagcaatacaacaaaataatttttttaagaaaatagtaagatcgataattaatatgtaaatgataaaaaaaaaagtcaatttaaattggacttaaattttaagagattttttacgtatgaaacattttttaagggaataattataagagaattttgtcgaggaaactaaagcaagtgtttctgtgtttggaatattactttagggttgagccacccctgaaatttaattccatttttgtaaaaaacagaagaagaaaaatcttatgagctcagccaccacgcacgcaacacttaccataataaagaattttcttccaccatgggagattgattccactcctgaaggccgaaggcttacaggcaagaactttgag

SEQ ID NO: 95625 - DNA, 386 bp, Glycine max
ggaccgtaacaatggaaatcttataagaatcgaagaaaagatttaggcttacacatgaaatgttgattcccgttcatttgggtctagtgcccactctctagggatccgaaatcaaataaaataaatcctaatcccaccccccacgagcatgctgtccattttctcatcctatattttactctgggctctcattgctcttccaataataataacaatcgcacttcccatgttttttttccaatgaaaggaacggcagcaaagtttagagagacagttctctccactcattaacataattactcatcacacagcatctgcaagaatgaagggagggagaggcatcgatgaacactatcaattcagcttttacattttttcatttcttc

SEQ ID NO: 95626 - DNA, 403 bp, Glycine max
tcgagtggggttataatgttacaccactagtcagtcttccccgactgactagcgatgcagtgaaacctgagaatctgaactgagaagaagccatggcagtgagagtaaacagttccattcagaacaccctttgcctactgaccgatcatggtgaccaatgcaagccaactatagtaatgccagattttgcacaagtctatagcttcattggcactgtatttgatccaaatgcaattaatcatctacagaggctgaaacagatggacccaatacatgtaaaaactatattgctattgatgagaaacctctccaccaatttaaggagtcctgaatttgagaatgaaagatggatgctgtcattgtactatgctaacatggagaaggaaaaatccagtagtcatcg

SEQ ID NO: 95627 - DNA, 469 bp, Glycine max
aatcacaatttatatatgctctttattgcttttggtttatatacaacacaggtagcacctcctaaatcatagcaccgctcttgtatactaaattgtagaaaaaaccatcacaacattacacacagacgctctcaatattctgtacagtacagcctccaggttaccttaacaggactctggactcattatcctgcattcctatgacaaccatcttcataagatacacacataagcctaaaggacagtaaactacatacacgtgcacgcatgcacacatgcaagtatctgcaacctacaagctgttagtaaaacctgtaatcctttcccctcttgtgccccatatttcaccatttggagttagtggtagctgagaggaaagcttattgtgtttttggaagatatttaaaaactatgttcctgataaaccattggtaacaccttaagcagataagacaacactctctgatct

SEQ ID NO: 95628 - DNA, 382 bp, Glycine max
agagaaaactaaccagtttatataaatccaaacatgcataatccactggaatatgaaaaataaatgtctagcaaagtttttggctgattgagcctagcatttaaatatttaattatccaaactctggtggctatcaaaaagatcgggactcatgaaacgtgaagtaacaaaaaacataagcaaaaatgtattaaattccgggatcatgatgctggttaaaaattgggttacctatgggtaaaaaggacctaccaaaagaaagatgacttttatgcaagctttgggatttcacatagaggccactaactattagggttgctaaggcaataaatatctgggattgaattgctctattatgaatgaggggcaattgcactttaac

SEQ ID NO: 95629 - DNA, 433 bp, Glycine max
gcaaaaaaataccttattattgccaaaggtaaagctggtgtttgaacaaattagtccccacacaaagcaaagaagtcaacgattatatatactcagaaaagagacaacaaagacaagtataggtgaattaattgaactaatgtggctttgtacactcgtttaagggtcaagattttggaagtagtctaatatttttttcttatttttggtgaggtatcaaacgcttccaaaatcatcaaataacgaaggatatgtaaatgtatacatatatacccaaaagaaaacatcatcataggattaacaaaacattcttcataacataaccaataacaattaatatatggtttgtcaccgaataaactgaataatccacatagtaataaaacattgatgaaaaaaattcaacacctgttctcgattctcaatccacccg

SEQ ID NO: 95630 - DNA, 181 bp, Glycine max
agagaaatgagcattaatgaaattgctcaaggaacatacaattccgcagaagggtttgggtttttgagtaaattgttaattttaatcagtacagggtccgggctgtaataaaattggaaatttatgctgctcacgtcatcgacacttgggtgatgcttgtaaattttcagtattaagttca

SEQ ID NO: 95631 - DNA, 262 bp, Glycine max
aaaccataagggccccaacggtttcaacccaaaaaaggaaaaatttcccgcccttggcccttttccccttttaaaaaaaccccccttaaaaaagggggggccgtgggcccaaaactttgcccctagttcatttcacaggggggaaccttaaaaggggggggggaaaaccgggcccatttttctccccaaaaaatggaaaatttggccgctgggccttgccaaaaggtcccaaatttttaaattttgcaattcccaaaaaggg

SEQ ID NO: 95632 - DNA, 360 bp, Glycine max
agaacaatggttcaaccagaccatggccaaggcctccaagtccgaagagccccgccacattcaatgggccgacagcattgctgaggaggaagacgacgacgacgagatcgactcggactctgagaacgaagacgactttgacatgatcccactgcctcgacgcatcgctcagataccagttcagatcagcgcaatggaggtcgacgacgacgaggatgaggacgaattctacgacgacatggaggacgactcggagctcgctcttactcaagtgtcatcgcatctacagtcaccagacgagctcacctacgaacaagagtccgatgacgagtcaccacctacatcgtcccaacaagcgtc

SEQ ID NO: 95633 - DNA, 227 bp, Glycine max
attaataattaatttatgaagttgataaattttcagatatttagaatagattcaattgtctacgtcagcgtggaaatcctcatattaaaggaaggcaccaattactcaattggttattgctgttgcgcgagagaagagaggaacgaagactgagaaatggcgtcatggaattcatttccgcttgaagttacctacgaggctctgggttggctcgccttcgatacctg

SEQ ID NO: 95634 - DNA, 503 bp, Glycine max
caaatgttcttcctagtcaagtccaaatggtttatctcagaggagtggatctgagaacacaaggctggtttgcactgctatattatgatcgattggtataaggtgaatttactttgtgttctcaggtcacccctttgagccaacctgttgacatataccaaaacatgaatatatccttctcatcttttttatcaccacatcttgttataatgttttcagatttcaggaaatgttgcaggcaggatttgtggatagtatagaaatcaatgctgttatttttacacttcattttctatatttttaatttcctctacacctctcttttattggagaaaaaagagaatagaaaaaaaagtggatttctctacttcttttcaatcaaagggagttgtaggggaaaagtttagaaaatggcgtgtaagaataacatcattgtgtaaatataagtggatgcagaaatttgcagtttcaagttgaagagaaaatgacaactagtgcttata

SEQ ID NO: 95635 - DNA, 295 bp, Glycine max
atcagggtctcagtgatgacttaatttttgtgcatgcatgtgttcaattgttttaagtgagatatgatttttatcatagtttggctccatgttgatgtttgcatgacattggggaatcgaatttcttcatggcagcctgaaaaggtctagaaagtttcaacctgaagataggctcttctcattatcttccgtgacctcggcagcggcagaagatcttgcagctggacgaaatggtgagttcatataggcaaagtgttctattactttattggtatgaattttggtgttcattcat

SEQ ID NO: 95636 - DNA, 390 bp, Glycine max
ggaacaaaaattagttgaatttattttcttgttctgtacagcattgccactacactatcaaatcatgctagaaaaaacaagtttaatacaacacccgtgccgtgccttaaaaacaagtttaatacaacacccgtgccgagccgcaaagtaacatttaccgtatctcctgactgccttgcaataatacaacaggtcacccgtgccgtgccttataatacaacagaaggttggagcggcattttcaatcacaaggtcaggtcaggatcatcttcataatcaaaatcttgttcacttgaagcccttgctctcttggcatctcttgccccacctctacctttctttggtttaccctgtccattagcataaattcctccaccttttgaacgacca

SEQ ID NO: 95637 - DNA, 272 bp, Glycine max
ttttttttttttttttttttttttttttttttttttttttttttttttttttttttttttttacaaattcaggatctaaccctgggcaaactttaatcatatatctgttgaaagggccaatacattttttacatacaaaaactttttaacaaacaatgaccagggacttacttcaataccctgtaataataattaacaagcaaaagaatcattatttttttaagcaggaaaacggtttacaccatttccaaaacacaaccctttcagtttac

SEQ ID NO: 95638 - DNA, 252 bp, Glycine max
ctcggtattcatctcgagcttttgcagatatttgatgcttagaaatataaggagagctgcccagtctgtttgtagaatcaatagcagatacctggaagtgagtaaaaatgggccagttgtctcagttggaccgaatatccaccactgccggttgtacatgcaatataagtttccaagtgaagcatgccgatcattgttgcggcatgggacaagggaaggctttcgtaaacgtggttctttcaggaacttttc

SEQ ID NO: 95639 - DNA, 439 bp, Glycine max
gttagttttgaggaaataatttgttatgaaataaatgatttacattgctcagaggcctcaagcaggatatctctttgcttggaagcttacactgatgttccagcttctcccacccttctgttcctctacaaactatggttaagtatttagttgtttgaactatggtgttttcctttgctatacctttcctttaaaaatgtgagatttaaaatctcagacactttgaatttgactgtattgtatcattgacgttgatcatcacaattaatccttggaaacggaaagtgctatcacatacttgttgcaacaaataaattataaaaaccacaataaaaaaaatcttctaatgagatttccaaaaatggaaaactgggagcagttctactttctaggtgctacctactttcaatttacagttcctcttgctcatattacttga

SEQ ID NO: 95640 - DNA, 363 bp, Glycine max
atctaaaattctcgttatttgattactagtactaattcaagaacgagagccattagcccacttatatagaaagaaatagaaaataaaggagtaaaagaaaaccctcagaaactccaattatatctccctaaactgaatcttttactagggcctaaaaacatccaagacatcccgttggtgtccacacaagacctcaaaagcaactttcttcagcttccatcaaatcctcagattgctccagctgaaaatttcagtcctctgaaactgaaaggcttgtggtttctggtggtgctctctttacatcatagcgctgatttccagatgaaaacggtaaatatttgtatttaatcatatgagatatct

SEQ ID NO: 95641 - DNA, 313 bp, Glycine max
cgcccgaccagtcccacccatccctgtcgcgctcttcgtcgccatggctgctctgcgctcctctgctcgcctcgccgcgccgctgccgcgcgctgcgctgcgcctgccggcccgtcgtgcctacgccacaagcccggcgcctggcgcccacccgccgccgcagcagggtggctcgcgctcccagggcacgagcaagacgctaatcggctccgtcgcgctgctcgcggctgccggtggcgcgttcctgctcttcggcccggagaacaagcgcgccgaccttggcgtcggcccggacggcagcaacaagctgagc

SEQ ID NO: 95642 - DNA, 490 bp, Glycine max
gttcttaccaagtgaatcaaattacatatggaacctaataagtaataaataatggacagcctctatcagtcagaaccttgcatctagtattactattgaaagtatgagctaataatatatattacgaatcttatcgaagacagtattactattactctatctgtaggcactctaaaaatgttgtataagttacgatgaagaatgtatagatcagtttgaccaaggtaccatataaaaaatctacaaagtcacgggatcctagtcattcaatgagtaccaccaaacactaaattatacttaactgactgctgcttattctctagtagccgccaaccacaggtagtcatttaccagtatacatgatgcttccgatcttgcaactcagtgaaagaataagaactgagaaaccagtcaggaaaatccagccatgtgacagcacaaatgcagtcttgccagaaacaggcatcaaagcagccgaattaacatcgga

SEQ ID NO: 95643 - DNA, 264 bp, Glycine max
attgtgatcaagctctctctttctctttgccctcttgcctcaatatcaaatctctgctctgcaactactccaaattgattgaatgctgcaaattccatccacacacacaccttcaaaaatcttattgattaattacccttacctagcaacctcgtagctccccccttcccttcacaaaaactcaccacacagctctcttcaatccttgaaatttttcatactatatatacacacacacacacacacacaattgcacaagaaaag

SEQ ID NO: 95644 - DNA, 236 bp, Glycine max
gcagtaagtttgtatattatttattttctgatgaagctaacttgaaaatcctcaaaatgggggtgaaccaattcttacaattttaaatgccacattttcttattacggaaactttgattccatttttaacccgggttctgcaaaggcttggtaataaaaggttggtttcctaaaaaacaaaccctaccataatgttatgggaaccggccaaaaaaggggggggaactttgaaatgg

SEQ ID NO: 95645 - DNA, 489 bp, Glycine max
ccagaacttgaatggcatataacgtcattgctgacagaatcatctttagtagctgagttatccttttgttgttgttgctcacttaatttaatttcaggagttctgtgtagatcaaatgaacagctgaaaggtgaggtaaaacctatatcagaaggaagtaaggattgccttaaggtggttgccgttcatgatactcctagtacagaaagtgaatttaacaagcaatccgcagctgatgctgaaccggtccaaagctaaatttgcaatatttttgaaagggtcacctagttacagaagagtataaatatttgacaattacataggctttacagatatactgtgggattataattcctatttctactctaaccttcactttactcttcttctagctctctccttgtctttgggcaggttgactaaatatgcaaattacaattaatactacattggaggatatcataactcttataccattattatttgagt

SEQ ID NO: 95646 - DNA, 461 bp, Glycine max
agcacagagaagaataatggaaatagaattacatttcaagtgttttggcctccaagtacccaatagtggggatttagcctctcatgatcatgagagactttacactccaggggttaatgaaagaaggtgataaatgaataatacaagaagaggggaacaactaaggaagagaggtttctcctaagggagagactcaagttttggatttctgcattggaaagctttgagagtcaatgtgtcttttccgtcagctttctactccttttataggcttaaggtaatttacttttcacgctgactgtatgctgagcgtgcatctgtgcgctaagcgtgtactggacttttctttgtaggccttctcgcgctaagccagatctgcgccctaagcgagtacacgtgctaagcaagacctacgcgccaagtgagatgtgtgttgggcctacagtgtgcgttaagcaaac

SEQ ID NO: 95647 - DNA, 354 bp, Glycine max
aacaaaaaaaacgggacccaagaaacgggaaggacccaaaaacataagccaaaaggggtaaaatcccgggatcctgaggccggttaaaaaaggggtcccccagggggaaaaagggccccccaaaagaaagaggaccctcatgccagcctggggatttcacaaagggggccccaaccttaaggttagccaaggaaaaaaaaatccgggattgatttgccattttatgaaaggggggcaattgccctctaaccccaaaaactgggctcttttcaagggggggccggaaaaccaaaggatcggggtataaaaaaaacccttatttatccaacttttccatttccaaccccaaaaggc

SEQ ID NO: 95648 - DNA, 120 bp, Glycine max
atgaatgtgtatcgtaaaacggatgggattgttgggtgctggttctgtaaatgtggcatgggccattactgtaatttgtcaccctcctttcctatattattataataataatattgacct

SEQ ID NO: 95649 - DNA, 120 bp, Glycine max
aggtcaatattattattataataatataggaaaggagggtgacaaattacagtaatggcccatgccacatttacagaaccagcacccaacaatcccatccgttttacgatacacattcat

SEQ ID NO: 95650 - DNA, 460 bp, Glycine max
gaagctacaaaatctttatttctgtacttacagataaatcttgaacaaataaaagtgggtttatacgctgaatctataacactcatttaactaataatgcaactttccccccacattcacaggcatacatcgttacattgtaacttagaaaaaaaaaatgttaacacactattttcgatttcttcccatgttacactttcttggcctctacaaacttttgcttttacaacaggacactagacatgggattccagatattactatataaaaaaaaattatcaatgagactaaatgtttgctcagtaacttattttcttccattcatacaaaatctgaggtcatgctctccctttccttttgtcatccaatgccttactctggaagagtcgcatggttaacacaagtgtgtctcgcattctgacgctatatgtgcttagaggatgagaagacccatttgagc

SEQ ID NO: 95651 - DNA, 480 bp, Glycine max
gcaacagacatcttaactccctctatcgacggctcaccacaacttttctttcacctacctactgacaccacttcaaccactcaacacaatgggacttttcggatcttcagaccccgccgtccagcaggagaagctgatcaacaaggaggcgaagaacgaggagaagtcgctcaagcaggcgatcaaggacgtctcgtccgccgagaaggaggaggccaaggccgccaaggccgaatcccactcgcatgcgtcgtttgagaaagcccacaaggtcgaggcgaagctcgccaacaagctcaaccaggcgacggctaagcacgaccaggccgtgagcaaggaggtcgcggcgcagaacgaggccaaggcgaaggaggacgcccaccagcgtgccgcggctgccttgcaggagaagaaggccaagcttgaccagctgcagcacgcccatcacgaaaacgacgctgttcgggctgagaagctcga

SEQ ID NO: 95652 - DNA, 275 bp, Glycine max
ggaacaatagaccagtcaagagaaacatatcggagttgcacaaaaatgaagatctacctgaaacttcagaggctgaagatattcagaaacaatgttgtagtgcacggccttgttgtgtgccaggtttaggagtaagtagtaacaatttagggctgagttctctttctacagccaagtccttacggtccttgtctttcagctcttctgccccatctcttaattccagtcttttcatatgggaaacagagagcagctcatgcaatgttggatctaca

SEQ ID NO: 95653 - DNA, 467 bp, Glycine max
ggagctgcaacaatatacgttgcattaatataattgctattaaactgatttggagcatctgttcaagtataagacgaaacgataagggggttccttcctagtcaaggcaaaatttgcattcttaatttgctatacaagtatttaccaactctgtctacctcccgacaaaagaagcacactaagagcagctggaatttgacgtctcacatttgataacccgggtattgtaagagccacaaaatccacatttgtggtacaaccagtggaagcgtgaagtgcccttccgatcacagtcatggcagagtatgtcctgacaccggtccttgtactcttcaggaagttcctcagcagccaatagggcatcaagcataccaaagtaaaccgccatatctcccaatgacttgctgcagattggacatgtgtagtgactacacgtgtatgcctggaagcaagcagaatgcatatag

SEQ ID NO: 95654 - DNA, 131 bp, Glycine max
ggctcgagacaactacaaaggttgctgtatgagataagatcttgaagtaatgctaagtgcctaacacctgcagtgaacaatggcctctgcataagcatcctttctaaagccttcacttgctctagacaagt

SEQ ID NO: 95655 - DNA, 447 bp, Glycine max
ggtggaaatatctaaatatttcataagtgtaaagtgctccattacaattaccaaggatcacttcatacttttaacataactctctctttctctcagattgcaaaaacatacaaatcaattagatttcatatatttaccaagaaaatataatatgttgatttggatctcatcacaagagctctgataggaaggccatgcttttttccctcgccccttcctttttgttgcattctgtctttcttgtctccttgtgttctttagctccttttacttttcttttttctcttttgttttctttttagctttctctttctctgattttctcagcgggttccggattctcattccagcgctctaccctctttcagcttcatagaagctaatgaataatatatattcagagggggatcgagatctcaaattaaagtggctggcccaagctgaatt

SEQ ID NO: 95656 - DNA, 352 bp, Glycine max
attagttacacccaaagctatgtcatttctaaacaaatttttgaacttttttatttttatttttataccttttcttcattaacagttttagtcttcgttttcaagtaatattgaaaatttagtgacttatcgtaagagtctaacaacataattatgtgtgttttttttaaaactttgtttcttagaattattcgttttaaaagatatgaatttaagcattttattgaattaattaagtcaaggtcgatcttaaatgagcttggatgtgagaacctagaaacggaaaaacataagcatccattcccgcgaaaacacaagtttagtattcagcagaaaaaacaatgcgttattt

SEQ ID NO: 95657 - DNA, 409 bp, Glycine max
acaatagtaagcaatgaagatttataataactaccaacttcatcctatgttgcttctaggcaaatcactagaaaactaactagtacattaatggagatattagatatccttctcgaatcagtgatttcaggggagtctgtcttctacgcttggtcataaagtgcacgtataagagtgtatttataggactcaaatagaaacaataatatgatcatgattcacttctattcaaggataaaaatacccttaatcgtgcacgttatacctaaaacaattttccttagcaatgagtgcgttaggagtttggtcattcctcaagcaggagtccaagaagaaacagcaaaaagaattcgccctttccatccttgcaaaacccacttgccatccttaccaactacaaaatctttat

SEQ ID NO: 95658 - DNA, 107 bp, Glycine max
gtgttggtgtatcatttctgctccttcaacggcggcatttgcagcggcgcccggtggcttctcgggattccgcgtgccggcacaaattcagggcgaggaggagcatg

SEQ ID NO: 95659 - DNA, 481 bp, Glycine max
ggctcatagagacccacctagcctgccaagcacaagatctttagaggatatatatgtaaggcaagttatctcatacaatgattcatgttgacatatatcattattcccctttctctagtaaagagacattatcaagatgttctagtatgtcaataccacaattacgtgcacttcacgatttgcgaggataagtcaatccatttctttttttacacagttgtttttgcaagtaacaatttagactccttaatgataaaaccacttatgcgattattgctaaataatgagacaccttcatacatctgttatcacattgtttgcttgaggagttgctcttcaagctccccaatcttactctagagtctagatgcttatagacaaggttcttacctcatttttttcctattaagattaactgcaaaaacattactggttctctttaacctcaagcacattccaaataacttagttccaaatatat

SEQ ID NO: 95660 - DNA, 293 bp, Glycine max
ggctatatatttatgaagtcacttttctttctttgtctcttcaataaccaagttacaatttaacaaacactattaacacacaaacatgtaaatgaaagtaaataaacacatttagtacctaagaagttattttgttattacattataagctttactataatcgtgtaatattaaaatcacacaatgaagagcctactaatttatttcatattggcactttacgtagaatgatatgagcaccatactgtggctgagtagtaattgacatagtcggagcatgagcatatgctgga

SEQ ID NO: 95661 - DNA, 367 bp, Glycine max
gggggtaatccggtgctaccggtgaacagacgcaaaatttacaccaacaaattcatacaaaaaaatatgaaagtaaagagacacaacatcaaacaattatagcggggggggctttactaaagatcatttttttcctttgaccgaacagattacaattttttttgtcaccatgggattagtggggaacatttatcaattttggtgataactaaactccatcgaaaaacttgattgatattttctccaaaacacattttttttttatccacaagacttaccgagactttgcttaaagagaccgaatccagtaccattcaaactttgttgatgactaaacttattacatggtttggtattttaaataaaa

SEQ ID NO: 95662 - DNA, 388 bp, Glycine max
aaccaaaagatgttaattagctatgcaagcaacaagacagtgaagcacctttgatagaaaaggaaggtgaagtgatgattaaagtacttgtgaagctccagtttcagtttgcatagcaaaggaaaatagtgaatacttaacatgcaaatatattttggcatcctgaacatgcaaccttgctccggatacaacccaatgtccgggagtatctaccggtcctcgcataatttccgttgtgtcaacaaaccttagaagcttaggcgtgcgcactggtgcaaggcgtgcagcagaatatatactggaaccaatggttacatcacccggctttggatgatccctttgttccgctttggaaataaatgttgttaagatgccccaagtcttgatg

SEQ ID NO: 95663 - DNA, 494 bp, Glycine max
acgttgtgtaacttagagattaacttcatctcatggagataaataacccatatatacacttagtgcaatgtacccaagtaacattctgacataaaatggtttttcgacgcgagggggataatgtcccaatttaagcaataatctcttaatctactagattttcttttctgaatactttctgcaagcccgcattacgagtgaaccagcctgattgggttttctgtcaattttctccaaaccatcctcccacaatgaatcaaggtcaagattgcaaccaaataaagaagaggaatgccaacagcacaaccgccaggggccaaattcaccagagtcaccattccagcgacaacgtgaacaatgggaacaaaatattgatccactttgttcccctctgagtacccattaaatgcgatgaccattgagaaagtgtggattgtgacaaatgcaagagcaataatcgcagaaagaaggaaaaatggaacttttgaacacct

SEQ ID NO: 95664 - DNA, 368 bp, Glycine max
tactagtcggcggccgccctttttttttttttttttttttttttttttttttttttttttttttttttttttttttttaaaggaggggataaaataaagttattttccacaataaaatgctagattcatttaatttcaaagaattatttttggaactgtatattattattctttaatagacctttacgcaaaaagaatgctaaggaatgatggtacaaagcgtaccgtatgggtcccaaacgaaatcctatacccttcgtatccgtatacccgcgggcgtattaaaaacgccccccttgtacaaaacttccaaacacccaaaaaaaaaaaacccgtcctacaaaatctcacacgtgcaatccaaaccc

SEQ ID NO: 95665 - DNA, 152 bp, Glycine max
cattcgaattcattttatttatatattaatattatattcaaatgaaataaaaagatattaaaagatactaattataagaatttgaaagtgaaattataaagttattaaatgattaatcaatttttttctacctgttcctgtagtaaaaagag

SEQ ID NO: 95666 - DNA, 364 bp, Glycine max
cctcaatgaattaaatatataaaattagggtttactcctttatgtatatggctatgaccacatgatcaatatggctgcatggcatatagaaactgtaactggagactcgttcaaagaccacaagcaatcctgtacaatggttttgcttctatgtgataagtgggagaatgcccacccaagagtgtaaagacatgtacttatagattgaacccacagaaaaggaaattattaatgctagacatttagatgcttgtcatgtcagtttctattttgacctcacagggaatgaatgtgttttatcttctgaatagcttgcttaacttttgtagatggctcttcgtacaaaatgttagggttatcaaac

SEQ ID NO: 95667 - DNA, 330 bp, Glycine max
caaggaaaacccccgggggaaaaaaagggcaaaaaaaaaaaccggacttgctgtttatccatatgggcccttcaaaaccccccccgggttttattcatgaaaaatgtttttttgaaaagccccttttgtttcccctgatagctggggcctccccccattaaaaaagaaactttttttattggaactcaaaaaaagttgcctttacgggtttccccctcctgaaaggccccccccaacccccccaaagccgggggtgttgaaccccccccccaacccagggttgttgaaccccccccccaaccccgggttggggaaccccccccccccaaa

SEQ ID NO: 95668 - DNA, 142 bp, Glycine max
gtacataactatttatcgtaggctacaatgatcgcactctatagtgatcgatgatggccagagatccagtgacgagcttgttctcgagtcgggaaccgtcagggatggtgatcttgttaccgccggtagcaatgatgatgac

SEQ ID NO: 95669 - DNA, 189 bp, Glycine max
gaaatgaatttttccctttgagatattggttttttttttaaagttgattgtgaacaaaccaaattcggtttggtttacattttacaagcaattttaattactacgtggtgtgattgcgagggagagagcgtaaaaacggtttgatatgcgtggttttggtgtctgagctcgaaaggcaagacttggagt

SEQ ID NO: 95670 - DNA, 143 bp, Glycine max
aaaaaaaaagggggttttgtttttaaatcaagtgggagggaggctgttacatgaaaactttttattggctcataagatgataattggtttccccccgcatttaattaacccccttccctttttaaatttcacaaaccttaaat

SEQ ID NO: 95671 - DNA, 189 bp, Glycine max
attgctggatgtatggaatgaggcattaattgtgtactatatgataattttgtacgtaattagctaagagggaagtacaaaagagactaattttaatgagctgttgattatactcaccatttttatgtcaattcctcaaatcaagagttaatatagataaactatactgccaagtcatgctgaagctgt

SEQ ID NO: 95672 - DNA, 130 bp, Glycine max
aatatattctgagtgcatctcattccttgaacatctgtctccttccaatactgctacagcgtctaaatcaaagtacattttaataaattcatatatttatttggtttcactaaaggcaagctatcaatac

SEQ ID NO: 95673 - DNA, 126 bp, Glycine max
aaaaataatttaaccaccattgaagatgattgtttttgattgagagaaaacactactattcaaaagcgatggcatgacgcacaaagggacactgcccctaccagccatgaacaccctgtacctgac

SEQ ID NO: 95674 - DNA, 202 bp, Glycine max
aatatgttagagtcattttaagatttcaaatttatggtcgcagttacatttttgtcgcattgacattgaggaaaattataaacaaatgcagccgatacagtcataacaatatcaaggcttttgaggtgttatgatcacaaacgcgattactgttatgactgtatcggctgcattgacattgaggaaaattataaacaaatgc

SEQ ID NO: 95675 - DNA, 193 bp, Glycine max
gattcaaatgaccaacatgtgagaccatattcatttattaattagatgccaatggagagctggcataacaggctaccgaagctaaactaagaccctggagccatgacgataaatgacatgcaatatatacaatgatttcagcgaaaaatgaaactacataatgaaaacccttaaatttctgtgctgaggatag

SEQ ID NO: 95676 - DNA, 377 bp, Glycine max
aatcgtacaattgctagtccttcataaaattttaaaaatctgaaaaggacagcaatacaatttacactggcacgggcaagctttgcatagatacagggcgtctgagccaagaagcaacttagcaccagccatcccaattttaaaatattaagcccaatttagataattttaacaataaaaaagagaagaaatagagatattgaatcaaatttctactaaaagttaaaattaaattacgcacatcagtttccgaaaaaaattaaatgaaagaacttaaaagactgatgtacataaattaattttaattcggaagagaaatttgatttattttcttctccaataaaactatcgttgagaagtttatctaaggtggagct

SEQ ID NO: 95677 - DNA, 301 bp, Glycine max
atccaaaaagaattcaaagaatcaattgatgtgtggatctttttacagcaaaaaattttgtattaataaattgacctatccaaatattaaaaattaagaataaatgaatctagttgcccttcatcacaaaataaaatggcttcttaagatgcttgaaatccaatgatgatgagtcacgtgcactccgctttgttcctgtaaccattcaacagtttcaacaaccgggtaacattctccttggggctctcatgacacccaacctgtagaataaccaaaagctttttaaaaaccccaacttgaa

SEQ ID NO: 95678 - DNA, 339 bp, Glycine max
  unsure (1)..(339): unsure at all n locations
cacgccagcgttgtttcgccatggcgacgcatccgcaaactccaacctcgtcgaacgcgttctcgttcatctccaagggctggcgcgaggttcgcgactcggccgacgcggatctccgtctgatgcgggaccgagcgaactcgttcaaggacctagcgacttcgtttgatcgcgagctcgagaacttcttcaattccgccacgccgncgttctccgtgccggcgatgcgctctccgacgcccaaggagatcgagttcgtcaagagtctgcgccccaagctgtcggagattcggcgcgcgtactcgtaccccgacttcagtaagaaggttctggagaagt

SEQ ID NO: 95679 - DNA, 121 bp, Glycine max
gatggctatagttccaaaagctcaagagtggagtcattcatgttaaagtgaattgctgaaggctcgaagcttaattcttaacaaattcactatcaggttgttcctcctgctctttgttcta

SEQ ID NO: 95680 - DNA, 450 bp, Glycine max
aagaaattattaaaaaaaacatttaaaaaaagtcatacaaattttatgttccaaagttggacatcaaacacataatagttaaaagttttataaaaacaatacaactagaatgatttccatgatcttcttcagatgatagtagcttgagggtgatcaactgaatcattaccattaccttcaaaaaaacgagatgacggaacatatagtctgaatcagagtgagcaaaaggagtagaactgcagcagatgtagatgcttttttccatggagtgttgaagtactcatgataaaagatagccttgtacttgttgcgaggattttcatagaatttaaccaagttatcacagagagaaaaacactcttcactgataaatggcagaccaacatttgaacaaagactgttaaacattttagccacagcattggcatcacccaaccaattgataaaaat

SEQ ID NO: 95681 - DNA, 487 bp, Glycine max
cactctttcagtgaagcaatatgcagaacgatgctgcaaaatcaacttcctgataataaattgagctcacaaaggatgacccaacataactccagtgttcaatacacgaagtcagcaaatgtttttagagggaaactattttgtttctcaaatttatatcctgaagaaaaggtaagtcattaggatcttaataggtttaatataattttgctgtagaattgtgagttagggatcaatgcccaggaagtttgaaagacagaagtaggataagaggaatcttgaatgttctgattgataaaaaactgtttagttggtgaactttgggattgatatagacttcatctcaaaattatttcaaaatagaaaaatcaccggcatacatggacaaagtatatttaagtttttagacatcaatatgccacaaccttattctatcaaaaccttggaacttaatcagtattagagatgtaatataaaaatcattcat

SEQ ID NO: 95682 - DNA, 413 bp, Glycine max
ggctcgagcggctcgagcggctcgagggggtaaacatgttgatgacagtggatttgatgaggacatactgtttgattcacacaattctgaaacttttggtgatgaaacttttggtggtgtgtttggttcggtcgttaagaggcctggtgaaataagtggtggaaaaggaaatgatggagctcgaacattggcaaattcttcctccatggatcacacacaatcatgtcaatcaaatacctgtgtggatttaagccgctctggttcttatgatcatgcgaagcagttagcatcggaactccctgccaaaagctactccacatcagatggggaaagcaggtgtttttgttgcccttttctcttctgtatctacttgctttctctgtaatgacttgtatgtatttcaacatatgtca

SEQ ID NO: 95683 - DNA, 378 bp, Glycine max
catctgaaactagcgatatataatggatttagtgttagttatgaccatcatggaatatgaacagagttttattgataaaactccatgtaggacatcttacatctatgttgaccgaaaaaatgtataccagaattcttagtaggtcatgaaacaagatgttatgagaacttccggatgaagaaagatgtatttatgaatttttgtgaaactttaaaggaagttggtaatttatgtgatggtaagaaagtcaacatagaggaagcggttgcaatgttcttaattataatatgtcataacttgtgtcatcgggtagttgctgaacggtttcaacattcattgcgtcatcgggttccgaattatcctaaaagcagtttacaa

SEQ ID NO: 95684 - DNA, 251 bp, Glycine max
gataaataacgattaaatcatgaagctcaagtatctcaggtaccaaaataaaaatgataataatcacctgttacttttacactgctgcctacagtccaaaataaaaatgataataatcacctagcagcagttgaaatctgaaataaggtaatgttcgattgaagactgacaaaattctgtgtatggactggatgccgtggcacctgcagagggttggcccggatgatgagatatacacaacctgatacggt

SEQ ID NO: 95685 - DNA, 230 bp, Glycine max
ccagctaatataatagtttcaatacctctttttgggaataaagggtacattattttccagtcaacacaaaaagactgcaaatcagccgcgagacattgttttttgaatgaagagagaaaaaggaaaaaaagaaattttttgccaaaaattgaaggaaaaataaaagccccctttcacaaggatggtacaacactgaaccagtcccttaatttttttgaaggaaatttggg

SEQ ID NO: 95686 - DNA, 405 bp, Glycine max
gctgtgaaaaagtgcatcaattagatcatttccatcgattgaagttaacaccattagcattatagatttcgacggttttcctttgcaattagtagtgtttttagccactgctacatttataattattatgtacaaactcatcccctctccttcgtcggacctggtcgatggtcgtgttccttcaacgccaccagaaaataacaaacgttcgcatctatgatgcaaaccaagatttgtatcatcatcatcctcgagattggttcctccagcgtcactgcctcctcattgtcagaatctgaatcaataacgaggttctgaccaccgcccccctacctcactcatcctccccatcgtcgagtcactctccaatgcccttgtcgcttacaacctccaacagtggcaatg

SEQ ID NO: 95687 - DNA, 209 bp, Glycine max
ggggggctaacctgggcatatttcaattgccagaatgtgataagggacaaaattccaaagtcaagacttccggaataactttttttgtaacaaaagttgaaaaaaaatgatttaaagaagacaaactagccttaagcttagccaggtcatacattcaatccttttctttcaaatgcttgaaagcggattgggctcggggcttttgcaaa

SEQ ID NO: 95688 - DNA, 431 bp, Glycine max
  unsure (1)..(431): unsure at all n locations
ccgtagagagcagaccgaccgtctttacttgtcgtgctgagtataagcactcctaacagacattcccgctacaaacaacaccgccgctagacattcccgccacaaacaacaccgccgccagacattcccgccacaaacaacaccgccgccactcgccccctaaactacaatctccggatatcgccttcacgatacactcatctaaggagttagcgaagtgcctttgatgaccaaaacctgcttgtcgaacagcgccttgcagttgggtcccagcttgccagtcattccagcgttgtccgacacatcgaggatatccaggttcaaggcacagagctcctcgggcacgttgccagtcagctggttgcccgagaagagaatctccttccattccttgttgnttccaaagctggcagggatctcgccagtgagct

SEQ ID NO: 95689 - DNA, 432 bp, Glycine max
ctgatggttgagactgttgctactctgtcgtggtgcttgacaatgtattttctaattgtgaagcaaactggaattgaaaaatcaatcatatttgcattgtcacagtctgcatatggagcttgcttatttcttggttattggggctatcttttgctttcccaaaaatttagggtttcttacctttttccattcagagaaggaaaagtgattgattttgaccggcagttgtccaagatgtgtatgctgtttacctttcaatcctttcgaaaattgatccttcaggaaggagaaaagatagtacttgtatggttggatacaccatataatcaagcagtatatggccttgtggacaagtttggttggtatttggtttgggtagcttagtggtgagacttgtctttttaccttttgaagaaagttcatatgcaacat

SEQ ID NO: 95690 - DNA, 420 bp, Glycine max
atggaaagattgggggttcactagagatgatggatctcaaaattctttaaaaaaatcagaggaatttttcttatttcagatgagaaggatgttaagattgcttaccttggtgagtaggttgatggggtatggttgaagtgaaagtttaaatggaggagggttctttttcacttagaaagaacacattttgtcaaggtgatgaatttattgaattatatatgatgctgagttttggtcaataagatgtttggaaatggagtttaaacaaatctaattcttattcttttaactccccttatttaaatttgcttcaacaagttatgaagctatttctatgatgttctataactctgtaaatcctatgaaggttttagagctatcttgccaacaaaaggtagtttattcaataggaatattctc

SEQ ID NO: 95691 - DNA, 440 bp, Glycine max
cagacatcgtcttttattcagatagtaacgcacttctacatacaaagaacctttttaaaaaatagaatagaaatctatctattatttataatttatttttctttttaattttaaccgacaacagattacggtgttggtctaccacggtaggcttgcttgcaaacagagctaggtttctgtgcgggcgagcacagctgcgacgaccctggacacgcatgcagacaattgtcccccaagctgccggaaaccgccgtgccggcctccattagccccgctggcggctttccgacgaaaaagttgccgtcgaggaacagcctcttcatggacttgatctgcccgtactccagcgggattgcgccacgcagcgcgttgtagcgaatcgacaggaacgacagcgcgggatacgcgccgagattcgcgggcgcgtagcctcggattct

SEQ ID NO: 95692 - DNA, 518 bp, Glycine max
ctggcattgaaaagtgtatctgtgcaatcttgaggaaaaaattcatggacacttcccttggtgtctacatcaagaaagagaggagagataagtgattggtgatgaatatggtagaccaaagagataaagaaaaattgagagtgccatttaggtattttaactgtttaagtgttcataaatcaacatcaagaaaaaagagctatggacctctattggtgtctacaccaagaaagagataggaagagatgagagataggtgatgtgaagtgatagaagagagatagagaaattgggagtatcaatcaggcgtttagactgtataggtgtttaaaaatcagaacttcttaaggaaaaaaaattcatggacaccaagagagagagagaggaagagaggagatatagtgattgatataattaatgatataatgtgatagaagagagataaaaagaatttgcgagtgtcaaaatcaggtatttggattgtttaggcgttcacaaataagcactccaatcttata

SEQ ID NO: 95693 - DNA, 458 bp, Glycine max
agcattggccaatacatagcatttttaaaaatatacaacatctattattatacaactcaatacatcgcactcttctacacatattaaataaatgccacagttatacgtattaaataaatcaaaactgcaactcaatacatcgcactcttctacacataaaaaacaaaaaagaacacacaaaaaagcaaaagtacaacacattcatattacagcaaaactttgaaccagatctcccatgcaatgcagtgtgatcaagttcttgcccttaagttttgttttcaaagatggcaggtatgtaacaagacattctccagtcatgccatatatcaactaattcattctgctaccattttcattagatctcatccttgtcttccttttcacctttttattgagttgacctccaaccattctcacaagccattgaggctttcctattaacagtacacaacatccca

SEQ ID NO: 95694 - DNA, 338 bp, Glycine max
gtacatgtaaaatagcccatttcaaaatcatgtgaaagtgtttttggcattttcctttcatcacttttctacatgcattctttaccaagtcacttctatccattgtatttcgttaagtccattacaagcttgcatgacatatcacatatataaaactgaacaccccaaactagttggctggtgaaacagacgtttttatgcagactccatcagcctcagggagatttctaaccttattaagaagcctagtgagatcttttgtcagttctttccgaacatagttagatcgcttctctgtaattgatgattcttgaaataaagtttcagcgagggactga

SEQ ID NO: 95695 - DNA, 256 bp, Glycine max
gaaggtttgtatgagttcaatcaaattgttcttgtaagataaaaatacttgcatgcttctttttatttttatttttatttattttttttatttttaagtagcattcgttaccgtctgtgttttggtgttgggttcattatgtagaacaatgttcaaaatatcggtttggttatgaaattttgccaaaaaacacggttcctgtggttgaaccggtcaatatcaggatgtttgcaagaattcatttacagctttttaa

SEQ ID NO: 95696 - DNA, 62 bp, Glycine max
aaaaaaaaaaaaaaaaaaaaaattaaaaaaaaaaaaaaaaaaaaaaaaaaaaaaaaagaaaa

SEQ ID NO: 95697 - DNA, 62 bp, Glycine max
tttttttttttttttttttttttttttttttttttttttttttttttttttgggtttttttt

SEQ ID NO: 95698 - DNA, 504 bp, Glycine max
ttctgacttttataatatgtttcactgttgctaactggagaattttgtttccagcaaaataggttccagacaatgtccgactccattgttacaaagaatatccttttgttttggtttgcccttcaagttcttaaaatatgttaatggtaatttgtgtgtgtttttttttatcccctccaaaaataatatttgattaaaagtgttagtatggttggatgataggagatctaagggggtatttggtttgagaaaatgctttttgtttctattttccaaagtttgaataagaaacagtgaaaacaatttttaattgttttattttctattctcataatttcctgatcatatttttgaatacatgagacagagggaatataagatagatcttgtaactaaaagtgagaagaaaacctttcttaaaacaaaatgccctaagctcacttgcattctgttaacctgtattttacttaacggttgtgctaggaatcaatttggacatttagt

SEQ ID NO: 95699 - DNA, 288 bp, Glycine max
ttttttttttttttttttttttttttttttttttttttttttttttttttttttttttgtttttttttttagggggcctttaaaaaggccccctttattaatcaaaaatccgggaccacatttattgggaaacccaaaattttaaacccccttttggggcaaaggccccttttattcccccccccgcccaaaccaactaacccccccatacaaaataatttccaaaaaacattccgggacctttaagaggggaaaaacttaaaaaatggcccaggaaaggatttctgg

SEQ ID NO: 95700 - DNA, 464 bp, Glycine max
aacttataacgatatattttgattgcacaatgatcattattttcatttacacgcttacttcaaataaccaaatataataacagcgtttccaatatgaacataaaacaaaacctccatgcacggggataatggaaaattggagtaacattggcaccaactggctgtgttgaccacagccattattagtcgcttcccagaccaaatcaggatgctattttcttccacaaaaacataaatagcacgcctgagaatttgcacaattgatatatactagcctctttgggatatgatcaccaggctcactaaaacaatggtatgtgccacctgaagcagatcaagaaagttcaaatccggcatttgaactgatggcatatagaagctttgctctcaaagtgcctggacgtttgtatgttggaagcttaagggtattgtagcaggttgaagctgatggaagccgatctaca

SEQ ID NO: 95701 - DNA, 407 bp, Glycine max
ctcgagcatcctcatggaaatatggcaactggtccggctgattcttatactgaaaccaaatgtggtgtttgtcatgctggaacagatgagcatcttctactactttgtgatctatgtgatactgcttcgcacacatactgtgttggcctgggctatactgtttctgatggtgattggttttgtcacgattgtgctatttcccgggagaccaatatcaatgaagaatcagaccaacaaaaattttgcgccaacagctgagccaagtgtaaccatcaatatctttgatattgtgagggaaacaggcagccgggtggttaatagaccaagggcatctcctttacaacagaacctgtcatctcctgttattcctttacctgataggttaagttacttaagtagattaaaag

SEQ ID NO: 95702 - DNA, 236 bp, Glycine max
aaacaaaatactctaattttccatttatatcctcaactattcccttcaggtgaaaaataaatagattacattacactgctatcccctacctacgacataaattttacaatgcagttacctgggccacgaagtaacattttttacagagtaggtgcatgagaacaataatcacagcaagagaaatacatgatgcactctccaaagaaaaaaaaaattatgtagatcaagcgcaaccc

SEQ ID NO: 95703 - DNA, 495 bp, Glycine max
gattatggaagtcataattgaaagacgtttcttgagtacaatttggttttggaagcatacaatagaaacggcataaagctaaaatgtacaagccagagcctttcatttcaaaaacctatacatgatatatattatgatagatctttttgtacacctcaagtgcctgaaaaagcaacaagcatcaaattactcaccggtttcgaatatttcagcttcagattttgccacaatttgtaaaattgaaagaacactatgtcacaaggaagctctctttcatccaccttgcctgaagttgcaacccagcatctttgaaagcattccaagcagattggtacagcctctgatctagacttgttccttctgttttcatgtcctgtaagagtttcaccaattcatcaacctgaccgactttagagaacacaccaaccattatgcctgccagggccctatcaataagccccccattcattctatactcattgaaaagctttacac

SEQ ID NO: 95704 - DNA, 131 bp, Glycine max
gaaataatgattttttcttaaaattatattaatggctatatgtgctcttaaagacaaatactgcctgttatgggcaactttataaactcctatacatggacgagtggcaatctaatattgcctactaatac

SEQ ID NO: 95705 - DNA, 115 bp, Glycine max
aactacaaaggtcaaatatttatttaactagacagattgttgaaactggtgtaaatttggtcagtactattcatgaacagcataaaagccttcggattttgctcaggggtatgta

SEQ ID NO: 95706 - DNA, 221 bp, Glycine max
acttactctcctcaacttcaatttttctatctagctactagttcagcgttcatcataggggaaaggaaatgagaagaaccatgtcaaatgcatcagcatgcttctttttctttgcttttgtagtattagtagcacttgataatgctgaatgccgacctcttcggcctagtgtatctgatggggttgatgcagttcaattacctcaagagtcttcttatcta

SEQ ID NO: 95707 - DNA, 139 bp, Glycine max
gagagaatgtacgttgatcttctcatatatgatatttgcttaaacatgcaatcattatccatcttgttcgtgaccccaaggcctaaaatcataatcaacattcatatttcaaggaaagaattttattgcacaatgataa

SEQ ID NO: 95708 - DNA, 92 bp, Glycine max
catcaagcaacaaattatattattattttataggataataatacattagtagctacttgatgatctttcatttaattcttaattatgtcctt

SEQ ID NO: 95709 - DNA, 274 bp, Glycine max
cccacaacaatttcacccttttttattttttggccattaacattatggaactacatattatcattggctattcaaaccctggtacttaactttctataaaaaaggccatttaatcttaattaaacactactcctggacagagaaaaagtgaccatcactgaaaaaaaaattttcacctgaaaccttaaaactcccagagaaaaaaaaactcatgaacaaaaacctaaaatctacgccaaaatttttaaaccaattaaagggggaaaacaaaagg

SEQ ID NO: 95710 - DNA, 447 bp, Glycine max
ctcgagccgaatcggctcgagcggctcgaggtcaaagataaagaaaagcgtataacattggaagagataatatactgctcaattgtacataaatttttagagaacaacatttctatgatcccaaaaatatcagcaacatcagatcctactggtcgagtggatttatggccaaatcaagagctgaaactagaagcggttcattctccagaggcattggagatgattcagagtcacttatctctggtactaggagatcgccttgtgggtcctctccagacagttgttcaaattagtaaaattaaactgggaaagttgtatgctgcttctataatgtatggatactttcttaaacgagttgatgaacggcttcaacttgagaggtcaatgggaatactccccaaggattttggaaaagctaaaagttacgatgaaccatcaccgggtatc

SEQ ID NO: 95711 - DNA, 569 bp, Glycine max
  unsure (1)..(569): unsure at all n locations
gctaaaaataaagccaagatagagtatataagtgagggacaactctcactccatgagctagcttaagcgcaacgactatacatttgatgtgcagaaaaaatttatgcatcgttttctgctcaagcaatgtagttctgagctctgctcaaagtatcctagctttcacacgtgtttgctcttgaaaatactcatggatctgttcccaaacttgataggaatgaacacattcaattattcgagataggattgaaacgaaagagtcgattgaagccacaacagaaggatttgatcttgttgttcccaatcagaatatgctggattttcatttccagcttcacaatctgcctctgtgagaaagcgcattggaatctgaggattcatcacaaaacgctggagtttatgggacttgatcacaggttcaacttgttgcctccatagcaagaagttagaatcatctaacttctgagaaatcagatgaaaagtaggagtagcagaagtggaattttgatttgccgccattgatggatctcaagctttgataccatcatagattntgagagagaaaagag

SEQ ID NO: 95712 - DNA, 108 bp, Glycine max
agacgagaaaaccttcataatcaggtggataactcaaattggacatgacaacaggtctaaaaagtggtgcttgcacaccgtatattacaaatggaacagataaatcct

SEQ ID NO: 95713 - DNA, 423 bp, Glycine max
aagctgccaaaaaatgtatttagttgagcccaacgccaactagacgctcagtgttactgcgtcaagagctccattgtccagcttccagacgatgaaaatcctcgcaggcttgcaacctacaactcttcgtgtctggccgacataccagccaccgtggcaacaaacgtcttcatgtctccgcttggcaccgagaacggaatcgagccatcaatgagcttgtctaggaactccgagatggcactctcatcgttcgtgcctgacagggccgagtacttcatattgcgaccagcccttaggacaaccaccttcgcgttcttttcgccaacgtaagtggtcaaagcttgcaaaacctgcgcgtcaggcttgctgaacaagaaggtgaacggatcgcggcggtactttttggccagcgagcgcaccaat

SEQ ID NO: 95714 - DNA, 384 bp, Glycine max
ataactacattgtattcaaaaataaattttgctaaatacaatatgttggcatgctgcaggtccataatgagagttgaatagaagaaatctattagttacgtgcacaagccataatacttgcaaacagcatatatagtacgtaaatttattatacatatctaagagagaacaagcaaattagaaagattaaatttagaaggaaagctgcaatagcattacaaaactacatccctaaccacggcagctgcaacttcagtctgacgtaagaaaggaatcaaacaaattcaaagaaccaagtgctagccaattttcagagcatcgctgctttttccactgcttgctctgcaccttgagcagatagtatacaatttaatacgatttcac

SEQ ID NO: 95715 - DNA, 358 bp, Glycine max
ccgacgcattgcccatgcattcatttcacgtatgcgtaagggaaaaatcagattcatggctacactcgcttgacaaacgacagcgtcaagtcttcatcaattcttcctttcccatcctccctcccctcaacctgaagtcttctcaaacatcacgctccttgcagttcactttctgatccattgtccgtcacgaaaccatttttaagcttttcgattctgtccgttcatctccacgtcataagtgcctggtagttccggcggaggaggtccgtccttcttttccagtgcagcgagagccgtagcaggatctccgatacctgctcgcgtaccccatccagtcttgtggagcgtgaacaag

SEQ ID NO: 95716 - DNA, 365 bp, Glycine max
acaccgcaggatggtcggcggttaccatcccaagtcttcccatcacaagaaacctcccccctccgcctcccaccgcaaatcccgctgggaacccaactcctcctcctccgccaaatccccagccgatcccaagtcatccaccgccccttcccccaaacccaaccccaactccaaccctaaccctagccccaaacacctccccttccccttccccttcccggaccccgcccctgcccctctgggtactccccctcctcccgcctatggcttccacatgctcgaacgccgcaccatcgtcctcgccgacggcagtgtccgctcctacttcgccctcccttccgattaccaagacttcgcccctcgcc

SEQ ID NO: 95717 - DNA, 485 bp, Glycine max
cctataaaatcaaaatgacttttcatctcattatctttgaagagataatgccataagagtattccattatacagcagcctaaagcagagggaggttggctaactaagaaatattgggaaagccagaaaggtaactgactactaggtgttttccactgaaactgctctaaaaggccgactcagcaagcatgcaagaaagattttccttagctcattaagaccataaagatagacatcatagagaagatgataaagaatggagggtcacattatacctctaattttattatccatcattttgtttcccaaaccctccatacgaccatctctattttttccggtatttgtgttatgaatgatcaccaaaggtggccacatgatcagatcatcctgatttgctgctgcttcatcagcaggtaaaaactgatatgcctttgagttatcaggaggctttgagtagttccaacgcattaaaacacacagagc

SEQ ID NO: 95718 - DNA, 393 bp, Glycine max
cctcggggaattccaattccacattttcaagatataaggaggcaaaaatgttcatatatgaattggaattatttgttttcttattaggcctatcctgaagccaaaggaaatgagatcggaattcctcggggaattccaattccacattttcaagaaataaggaggcaaaaatgttcatatatgaattggaattatttgttttcttattaggcctatcctgaagccaaaggaaatgagatcggaattcctcggggaattccaattccacattttcaagaaataaggaggcaaaaatgttcatatatgaattggaattatttgatttcttattaggcctatcctgaagccaaaggaaatgagatcggaattcctcgggggtaccgagctcgaatt

SEQ ID NO: 95719 - DNA, 319 bp, Glycine max
agaaccaaaacctttgaaaaacattacaaatcctgatttcgaatttacatattggcataaaaaaaaagctttttctagcaatgatatgatgtaatgacctctcaaaattcagccggcattctcaaccaaaaccctgcctaatatagtataaacatcaacaattcaattaccatagtaactcaactgtgattaattcataacatgaaaaatcaatgaatcttttaaggggtacacaagcttgctagggcagatgctgctcaccttgccaaacaccgacaatattttttagagctgggcttaagtcttccttcaatatctt

SEQ ID NO: 95720 - DNA, 306 bp, Glycine max
aacaaaatatttgtacatatatcttttgtaaataataataaaaaataattagattcgctgaggaagacatcaaggttttgatcaaatattaggtattggtattggtatgtggaaacaaagccccatgttgactacagggcctcatcactatctgaatcattaagctcaagaccttctgctgccaagagccggctgaaagtcttcttttttttttcctcagcctttcttcgcataaaatctcttttcttcaatacaagggtgtgccttttaagggtattcgagtaatattcacccgaagcctttttt

SEQ ID NO: 95721 - DNA, 424 bp, Glycine max
attgcggcacagtctcaaatacattattaaatttcgtggccattcatattctttcttataaaaatcagtgtgagtggtcaacaagatgacatttatgtccaaattccaatgttcaataaaataaatcattaagcaaaaatttgctaaaaagatataaatgaatgaattactacaaacacctctgaccaataaaatgaattggagcctaagttcaacaagaacctccacaatcctccgacccaattgcgcaagaagatggaaaaatgtcaaggcttcgtgcagtatatacaacctgtgcctgctgaataatctatttattcccagagcaaaacaacgtgttcatccgccaggggaggacataatagagccgatccaatcattttttcagaaatggtttctggcaaacaagaagccgctggtcact

SEQ ID NO: 95722 - DNA, 299 bp, Glycine max
gattctcctactctggatggaggaagtggcctaaaagaagttgctacatgagatgcttatgcgaaaggggcaaatactgaaggttcaacttcaagctcaatattcaagagcccaagaagctgtgaagtaatgattgaggctgcaagtactggggaattggctaaaaacatgggaatcagttttgggaaggaagaatgaaatgttgtccagaatggttattttagatggaagagacaaatctgaacttgagaagccaggaaaaagggtgggtgatcaatgaaggtagttacctataatat

SEQ ID NO: 95723 - DNA, 434 bp, Glycine max
atcagcaaagataatagaatatatattaatgagaaagaagtaccagaggtactaagtacataggtaggttaccatacacatggttccatagaaaaactaatatagtttgtttaggaaccatattatggctacataagtaataaatctgctagaaatgcaatcgaaaccacccactactgatacaaaaaaccttgccggatttgactcgaccattgataaaaatgaatattaaaatctttctccaagtttcttagccacgaccagattaagaacatggcatcctctaacagcttgttgacattgaaggatgcattggagaatataatactatttcgcatctgccaaattgaccaaactacagccatctaccagcttcgccacctcttaatccttataccattcacctgtacatatgagtgttggaggaaatgatg

SEQ ID NO: 95724 - DNA, 443 bp, Glycine max
gacaagaaattatagtaaaacatgcttttatatacaagaatttgcaacaggccattatccatcagaaagatcatcaccataaaaaccaataccatcatcctcatcaaccaaatatttacttttggattttgatgatttgccagattttgtgggtttcttcattttttctgcctgcaactccaacaccttctctgaaggtttccactttcttttgatacgtgtccccccagcatcatcttccactggacttgagttatgattcatgggattttcatttggtccagcctcttctgaaagtggggatccagagttattgctgtccaccaactttgaagaactatttacgaacttgtctggctgttcaggagcatcacaactgggagttgctggcaggaaacataactcttcttcagacatatcagagtcactgaaagcaggatctt

SEQ ID NO: 95725 - DNA, 254 bp, Glycine max
acaaaaaatgcccattatgaaaacgaattaattcactaagcagaatatgaacttaatactatacaaattctaccagcataggagggcattcatggtccaactactgatatttgggactggaaacatgaaccttacaaaattcagggaactttatttatacaacttttaacggggtgggcacaagcaagatccaaacactaacatttgaagcattagccttccaaaattcaggattttggctttattttaataac

SEQ ID NO: 95726 - DNA, 244 bp, Glycine max
acaaaaacaagggccccataaaacattaaattaatagaggagcaaaaattattagcgatttagcatgaaataaaatttgtgttctgggctagaatccatccacaatagcttgaagcattactaatccccatttaaggggggaattttaatgggcactttggatgcattagaagggaaaacaggacctgccttgagggaattttttactgactccaatgctcgggaagtttgaaaagccatttta

SEQ ID NO: 95727 - DNA, 447 bp, Glycine max
gttgttcatctccgacagcaagagagtaaccacacagcatatacaaatacaaataaaaatatacagagttcagcaacctaactcttttgcttccctttctctgccttctgcgtttatctgtttcagactaaataagcaataagtggcccaatcccggaatatccacgtcaatgtgggacacgtatcccccatacgggtcccacttttgcttctcatgcccccgcgaagattctgctatttgtctacttaagtaaaatggccacaagcctttggattatggaccgggctgggtattttagtcaaattcaccacactccaattttcttaggagctaagttgtttactacattttaattttgtacattcaaaattccatgtatatatatatatatattatttaataaaatgtattggagtcgggaatttagtaatgagggtcctcacacg

SEQ ID NO: 95728 - DNA, 478 bp, Glycine max
gtcccaacattgataattcagatatggattttaaaaaaaaaaatcaggccaattaaaacaaatagatcacgaattgtccaaaacacaagtgcccaacctataatcatccttcaacatctacttccagaagcactacgcatgatgcatactcctcgatatacctatgcgggtattattctatgtgtgtctcaatatactttccttacctcacgttatatatacacttatatttcagcaaattcactaaaatataacgatgtattttaaaaacccacatcgattcatgtgtgactatatacattgaaatgttaaggaaaacactatcttctacttctggtggttgcttgcttctttggattggaaatggtgtcgctttccactggacatgccactatcactgacacttccttcacccataatatcatgaacatcagaaaattctgacattcgtgatctcaagggaacaagatcacaatca

SEQ ID NO: 95729 - DNA, 313 bp, Glycine max
ctcgagccgcgacatatgaaggcagcgaagccggctgctaagaaggccatgaagatggccaagaagcctgcggccaagaagattttagtcaagaaggttctggccaagaaaccgaagaccacgaagaaaaaagtggtgaagaagtcaacggcaaagaagaccaagcctgcgaagaagtaagcgtcacattcgaatgtctactaactagctcgtgtcgtctatgagactgtcgactgcctctttattattattcttccgtttggaatctagttcactgcttcaatacatcttttcaatgttctcatttgaaaaa

SEQ ID NO: 95730 - DNA, 103 bp, Glycine max
aaaataaagcttcaatgatcagcacatagccatcatttgtaaatatccaggatccagcattaaaaatgtatgagctgtgaccaaatagaaaattcctttccaa

SEQ ID NO: 95731 - DNA, 349 bp, Glycine max
atgcaattgcatgtacattagtggaaaaggtaatacgaaatatatttattagaatatacatatttttctttatttgcacagaactggattaacatctttgtttttccactctatcaaatgttgaaattcgactagaaaggatatcagaaattttctaagagctggctttggctctctttactggggcctgaagggaatttagataaatggcatcctttttgtccagtccatcaaacagataactatacggtggcattaggatgtatctcccagttccaggagtgacctttagttcattattttcccaaacaactcttcctcccacaatagtcacttcaatttttccctt

SEQ ID NO: 95732 - DNA, 507 bp, Glycine max
accgacattagtaattcccaaacatgctacaaatgatgtgtaaatatcgtggtccttgcttaatgcttataaatgatgatgtacataatgtcctatatgtacatacttgcacattcccatcaagtgaacatgtagatatcctttattattcaaattgaatctatgtttgtacttcttctggtgagaatttaactcaaaactcacacaacacaaggagtaagtcaggcatatctaccaaaaatatggggaagaagcattctttattgaatcattattaggaaacaattccagaaaacaaaataaaatatgaatagaactatcaaaccttgaattcatcaattgtcatctcgtggagtttggtctcaaacatttggagaaatgcctcgaccctttgctcaatgttaccaggagactggataagcaggtaaaggcttaagcttatgtcataaattaaaatttattttaaattagttctaacttccaaataggaaaatagtaataccttta

SEQ ID NO: 95733 - DNA, 478 bp, Glycine max
  unsure (1)..(478): unsure at all n locations
gattcaaaatattcatctcaattcccgaacgaacggaccttgtagattcaaactatcagataggccgtgaagagcttatgccttatagtctttgatgcccagaggagaacaaataaataataatatataatttaagtaaatacagtaaaatgaagcttcctgaagtgcggagacattagtgtaatccttgcattctacatgcctgggaaaaaggacaaggtagatatctaatccatctcaaatataccattgtgaagacttgatgctctacatatattgttgttcttggctcattttaccaaactagaatgggtgagtagaagagtggatgagaaacaataggtacagatacaacagttgagggactccaaaaatgagccaggggcgatcagaaaattctcgagtcaacgtactgtcagtactctactccaaaacataaatatgaaggatggaatagaaactntagcaatgttgggac

SEQ ID NO: 95734 - DNA, 194 bp, Glycine max
aggacaaaaggaaaaggcaccaaattcaatttaagtggacactttaactcaaaattatagaggaagacagtccaatatgaaaaatatagtaaaatcatctcaaacttggcatcttctctttgcacctaagacattgagaattctaagaatgttacacgcaagtcccatcacaacttctagcacttggatcagca

SEQ ID NO: 95735 - DNA, 120 bp, Glycine max
atcccactgagagcgcaatcgtatcacgctttcttctatcttcaggcaaatcaaattaaaatcacaacacccccaattcccgaaaccctaaccctacctcctcgcagccatggctaagaa

SEQ ID NO: 95736 - DNA, 274 bp, Glycine max
aaaaccggggcggttttaccccccattgggagccggctttttcattggcccgcttatcaggccggggaacaagaagattcccaaagaaggcccaatttaaaacaaatcgggggtggaaacatggccctttttaaaaaaaggggtttaaaaaagggggtttaaaatctcccggaataaaaatcattcctaaaaatcttggcggccttttaaaaaggggataaggcccccaacatccggaaacttgggggccaaaaaacctccccccggggaaaaa

SEQ ID NO: 95737 - DNA, 432 bp, Glycine max
gcattgtaggtggaattgatggcttcaggtttccaactcttcctcttctaataattctaatgttagctgtcatcttatccattgaatgctagggaaaactaaattttaaacaaatcataaatctacatacgttatttgtgcattattctttctcatttatattgctgcttgtgcatattttttgtggcttgtttcatgtctagcttacctagtggaataaagttttgatgttgttgtggtattaatttctgtatggttcttttttgagcaaactgtcaaaacctttttagcaactccttctatagctgcaatgagtcaatgactaacatgtggaagaagatatgaatgagtcatgaacacatttggtggatgtaacaggggtggtaactggaatactggtggtggttgtcacttggaaacattacctgattt

SEQ ID NO: 95738 - DNA, 156 bp, Glycine max
acaacaacaaaggtttttcccattgggggaaaacattttaagggatcaaacaagggcttttaaaatggttaaatcccaaagtttcaaaatttttatttacccaaaaatcccccttggggattccccccatttttttggggcccccttttttttttt

SEQ ID NO: 95739 - DNA, 431 bp, Glycine max
ctttcattgctttattactcaatttctgtaagcttattagaagaattcttaccgtcaatacggttttatataacgaagtcgccatgaacctagtattccaaaagcttaagttggatggaagtacaaggatggttttatatccaacacgtcccctcatgcaattcatattgtgttgacattcaactttttatttgaagaatgggagcagcaaagatcaaattctacaccacttgacaacattgatatgcatgtgaatccatgctgtaatctggttcactttttaaagaagtgtttaaactgacttatttttttgtgtaaagacgagactatttaaaataccatataaggcaattgacttggaattttgcataaggcaaagactgttaacttatatttgtaccatagtctgacttctatgacatactttaaat

SEQ ID NO: 95740 - DNA, 263 bp, Glycine max
catcaatcagggtttatttattttttaagaaaatcacttgttcctagtcatgtgtcttgaataggcggctatttgtgccaagtgagcgtgacaacaccaacacaaacaggaaagtatgagaaaacaaatcagactttgctacgcaaaactaatactaaaaacaaataacctatggaccacgggaactcaaaaataatgaaatatatgtatgactcaattactgcatggctggcaagaatgtctcttttccataaattcgagtt

SEQ ID NO: 95741 - DNA, 268 bp, Glycine max
aaaaaacaaaaaaaacccaaaaaagggaatcccacccccaaattaaggctaaaacccccctttattacccccaaaagggaaattggggaccccaaaaaaacccctggaccggggggtaaaaaacccccccaaagggggggacccaaaaaacatatttgggcaaaaaaaacccccaaaaataaaaaaaaacagggggccgccctgccaaaaaaaaaagcaaaaggggagggggcccccattaaaagggccccaaattttcttcccgggg

SEQ ID NO: 95742 - DNA, 442 bp, Glycine max
ctttttcttctctcgtttgtttcctcatcctccagtagtgtgcaagaatttttatccaaattaagatttattatctctttctcaagccaaaaatgataatacaaatgaaagttaattggattaaaaattaacttctcacatttccattaaaatataagattttcatcctttattgtggaaataaaaacaaatcgaaacacgacaatattacatttctcgaaatatttttaatagcttataacaaataaacacagatatagaggatcaaatatgtcgtcatgagttttgccaaatatagagttttgcctaattgaacagtttttaagagacaaataagaacaaattaaaaaaaccttaaaaataaaaatattcttagtcaataatagttgcaaaatagatcaaatactacttaatttgccaattttcatgacatttgatcaac

SEQ ID NO: 95743 - DNA, 328 bp, Glycine max
aactatcaaatcaaggctatctatattaacaagaaagtgaggatgtcaacatgttagtttattaaatacacgttctttcaaatatttgcagcatctaacaaaaaaaatgttgcatactcatctgtctgtatcacggggcagcattctattgagagagaacaatatttagggtttaaattaaatgccccatctaccctctcttattaaaaaaattacaaatctgcaaaatttattttcagcgattaaatacttccatcaaaaattgttcaaggatacaatcaacaaaacccaaatgggccaaacagaaatacccaggtgaacaaaatct

SEQ ID NO: 95744 - DNA, 425 bp, Glycine max
gatattaaaaaaatacataagcattatttaaaattaaaccctaatacacaactgtaaagaacagtgctaactaataactcagtaagattgagtttttaaaataacatgatattaggtacaatttctactactatactttcattgccataagccctaaataaagcataccttagccatgaaataaggcactcccctcccctcccctaaacttttactaataaaaaatgtatattgcagttgtcaatttggatggacagtaagagcagtcaaactgttcaactgcgccaccacctaagtaaatgaccttagagatcctgggagggacagtagacactaagatatgaagcaaggaaatacccacagaatttaactctcggccagaagaagtatgcacaagtatcaattggaagtggtctaaaactact

SEQ ID NO: 95745 - DNA, 511 bp, Glycine max
gctcgaattcggattcggctcgagggcagctgtgatgcatgcttacctgttaggtgacaaggcaatataagctgctaattccaccagaaaccgtggaatgaagaatgttgtcatatttgattccactgtatccatattccatactcatttgcagagttaatcttaaggacatacatttgaaccttatattgactatggtttttatttttatatgaatgtgagcatcttaaaaaatctgaacacaattctccaaaaaagtggtttgatataaaagcagcctaaattttatgctctcctgtataatgaatccacatcagattgttcagagagaaattagtgatagtgtaaaatgaatctaattcaactagaatccagacagttcagaagttgaggcttgttaaaatacaattatcactatgattgtagtttcaggttcaaattattttgtgtcaaacaggtgttcttcactttattatgataccagctattttgttagattacctatattttc

SEQ ID NO: 95746 - DNA, 438 bp, Glycine max
agatgacaatagcaaccactacaatatatgtaaagaataaccaatgacagaatcacattgaaaacatttaataatataattgaaccaactcaatttttttttttgagagggaaccaactcaatttattatatgcaaaatttagaatgtagcaacaagttaataacagcatattttaagggacatattttttagtttaatagacctactacagagttaattaatcagaaatcactttaacataatttttaaggtaattatttatcaagttaatactagtaataactattatacatggagatttatagttgaattaatgatagtaattgacggtttgtaattcgaaaatttcaaattaaaagagtcatgcaagactaacgcattgatcaataatgcctttataatggtggatactataagaatgggaaacttaccaaatg

SEQ ID NO: 95747 - DNA, 401 bp, Glycine max
aatggaactattataaaaaatctattgcaagaataggaaatgattaatcatcaatggttttacaattgccttcataactgtttttcaaccagaatagacagacaacaaaaactaggaaaaaaaaagagacaaatacaaggatgaaaaagctaagcacggtatcatacaagcagctagcagcttctcaatgcatttcagaatagatgactgtgccttgaagtgctcgatactctacctggcatcatcaattttcaactgggagaaaacagaatccacagcactatcggactcatcacccatcacaatggagtcatctgcttcacttagtgtggagagtgaaggaaggcgcctaacattgggcaattgaagtgatgcagaaacactactagaactatcctcgt

SEQ ID NO: 95748 - DNA, 339 bp, Glycine max
agcttttctacgaaaggtaaaggaaacatatagcgaaatacttggaagcagctaaaagagtgaggaattgatgcttagattctgttcacacaaaagagatctgtctttcagtattttattgaagatgcaaccttgtcgcaataagcttcctgaccatactttatcgcatgtgatgtaatctagcctgaaaataaatgtaactcttgtaataatcattctacttcaagtagatatcatttcttcaattatccctttgtggtttcaaagttaagaaaaaacatctaatgctagcatggatgacttcatgaatttgaaggaaaccttatcattatatatatt

SEQ ID NO: 95749 - DNA, 215 bp, Glycine max
aggcaacgagagaagagactcattaattcctgacacaataatccccaagcaaatcaagaaacagcattgctttaaacaagaattctccagtaacaaaaaacaaaagcttcctctaaagatagaggggagcatgctatccttattcacgtcatatacaattgaactcatttctcgatgtaagaaaagtatgcacaacataactacaatttacacat

SEQ ID NO: 95750 - DNA, 414 bp, Glycine max
cgctaaaaagtaatatctgaatacattaattaatgttcaatatgtcaacctttactatacacaattattatgcatgaacccagttgttcaaccgaagggaatgttttcatctctcttaagttatttttctggcttccctgaatgtactatatatttaatttaattttaatttccacagatctaagcaatcatggagcgggattaatttgtatttggtggtttgagtgtctctcaatgctcctctgtccctcacatcacatgtggtaaagattgaaaacacagatcagctggctgcctctgagatgctttgtaaagagggttgccatgttcttgacttagctgtggcactagaagcattattagtagatgctgtccttgacccgtgtctttcagctttggtttcctggttgtcct

SEQ ID NO: 95751 - DNA, 371 bp, Glycine max
cctgtggcagagccataatagaaacacattattctgaacaattgtatgcgtcaagttcatcacaaatattcctttttcataaattgacaaaaccgtatttcaattagtgtttatataagggtaatgtttctcaatttcatccattgaaatcagaaattccacatttgcattctatttctttgtatgtcactgtgtttgtgtctacattctcaagcatccactcattcttcatgtcttggcataaccacgagaaaacttttaatgcacagttggagtgcgcatgaacaggaactcgaatgatttccctgatcgttcaaattctagcatgcttagagcaacttgacaactttgtgagacatgaggctctggat

SEQ ID NO: 95752 - DNA, 278 bp, Glycine max
gacaatatgctaaaaaacaattcatctttttacagaacaccaaaaaaaataagttgtggaatcgggggtcaacatcgaaaattttacaaattaaacgaaaaatagtacaaaaactagaaacagtgaaaagtgacaaagttaacaaaatgagaggaaaaatcctgaaacccttgcgaaaatttctcgagctttctgtgcttttcatacctacccacctaatgacttgactttcactggaaaagtttagccaacgaccccttcaattttaatgatgcttg

SEQ ID NO: 95753 - DNA, 172 bp, Glycine max
cgaaggcttcaaagaatttgaatttattttgggagacacaccaatgtatagccagaaatcagtcacaccacacaaaacaagcatctaaatcacacaacataaaagcttaaaaatccttctctaagatgtccctttgacacacatgcataattgcatatgctttcccaaccaa

SEQ ID NO: 95754 - DNA, 99 bp, Glycine max
ggaattagccaacacaacactgatcattatcatgtctatggtttgttagcattggtatgattcaaaattgctcctggttattacaacatgcgttcttcc

SEQ ID NO: 95755 - DNA, 253 bp, Glycine max
agacatctcacaaatttaacggattttttaatattcaaaagattacctaacattatttttataatttttttcacttttaaaaccacttaaaaagggttatacttgaacaaccaaattgatggttacagaagcctccaaattgatgttcctgcgtttcaattattgggttttaaaaacccaaaggctttctgattaaaaattcaaaaatgtttgatttaagacggtttcaactttacgggcccccaattaagtt

SEQ ID NO: 95756 - DNA, 366 bp, Glycine max
ctaccaaaataaattcaataataatcaattcagtaaaatcaattttcccaccgtcaatccaaacaccctaaataaaaggccacttgatcctgggacagtcacatgacaatcaacttcttgtcaaagatttcataaaaatcaaatgtttacacaagtgaattcacattggaatgtgcaaaagcaataggaggaaggtagggatgtccatgtaaacgaaattacaagattttaaaaaaataaaaatgcccatctttggattttcctgttttgggggaaaaagcccttcaaatgttattaagccaccactacatggggctgaattttctaatctgatatgcctacgaaacttgtcctttgccaacctcc

SEQ ID NO: 95757 - DNA, 333 bp, Glycine max
aaaggcccccaaaaaaaataaaggggatcaaaattaaaaacattaacaaaaccctaaggctttgaaacctaaggcctaaaaaaaaaaagccaaagagcccaaatttccaaaaaaaccccccccggggaaaaataaaaccaaataatcccgtttaagggtcaagggccctggggaattggggggggtaattttggggaaaccccaaggggggggaacccttaacaaaagctgtttggattctccccggtttaagggggctttggaaaacaattttttccccccttaaaaattatcagctcagggaatttccccttaagtttttcccccaggggg

SEQ ID NO: 95758 - DNA, 377 bp, Glycine max
gatgagaagtgctttattggtcattttatacaagttgaatctgatcacctttgcggtggcggctgggtaggcggctgctgtggctggaacggcggaggctgcatccctggcggcagcatacctggagggaacatgccgggcggcatcccgaaaggcggcattcccattcccggcggcattgccatccctggcgggaaaggtccaggcctcatcccatggggcattccaccaggcgggaaaggaggacgacctccaggaggcatcatcatcggcattcccatattcggcggcattcccatcatcgtcatccccggcggcattcccatatttggtggcattcccggcggcattcccatatttggcggcattcccatgtt

SEQ ID NO: 95759 - DNA, 336 bp, Glycine max
ggggggcccaaaaaacccggaaatggggaaaagacccaaacccaaattggggtctttccccaaaaaggccccggatcccccccgggaaacaaaggaaaacactaaaccctttaccccccccgttacaaagaaccatttttcccgggaaaagggccccagggaccaaaaaaaccccgtttctggccaaaatggttgggaacaaccctaacccccgaaatttcccccaaaaaccccccccccggccccctttaaaagggcccccctaaaaaaccaaattttaaaaagctcccccccccaacgggggccaaaaaaaaaccccgaaagcccccccttaaa

SEQ ID NO: 95760 - DNA, 284 bp, Glycine max
ttttttttttttttttttttttttttttttttttttttttttttttttttttttttttttttttttttttttggggtcaaaaaacccgacccctttggttaacaaaagccttttttgacttctcaaaaaactcacccttttttaaaaacccccggaatggcaaaaaattggctccatgggggaaactgtttgagcttctaaaaattttaatccagggggacttttggccaacggaacatgtttgggcaacaatattgaccaaaaggttaaagggggtggagccc

SEQ ID NO: 95761 - DNA, 304 bp, Glycine max
agcaaaaaaggaagattgatatatacaacttttcttacaattttttgtttcatgaacataactggaactggtgatgagtaaaattcttacataaactctgcatgctttcaaaaaatagtagcatggtacgcaatatataagtaatatgtaattaaatgttcaaacaaacctacacgaaggaaccttaagaggaaataacgaatgaagaaattggaaaatagtagaaccttagacataaagaaaattacacaagataatgattataacaatatcactttggttctcgcatttgcatatcatcttc

SEQ ID NO: 95762 - DNA, 434 bp, Glycine max
tttgttcttttttttaaccatggcatacaaatgcatatttgtaatacacaaaccaatatatggatcgatcgtacaggacattccaaatcaaactattgatcctaaagaataacagacaatacagtcaactacatttgtgctcttgtgaggggaagagaaggaacaccaaaatattctcgttacataatccaaatacatgtgatatacaaagaaactttaaggccataaatttattgggaatgtaaatataaatcacatgctttggaaagcttatccttttaaagcaccgcatataatgcttgcatccttacagaagaagatcctttagcattttcagaactcaatcagttaggctagaaaggagctacacgagtgtttgactattacttctcatttccaatttggattttggctagataacagttaaatcaagg

SEQ ID NO: 95763 - DNA, 412 bp, Glycine max
gagagcatggaaaaagaatttttgcgtctaatagttaaatcaatttttttgaaaggataaaaataaaaataaaaataaaaataaataatattagggatgggcttttcgaaagccaaagaatatggaacaatatcaatgccacgtacatcctcagctgaaatttaaggatgactaatcaaaattctgatgcatatatatgtacatttctgtacacaacgatgaaacagctactctgctgctatacaatttttcacttctctggcttcttttaccttccactttgcatatatggggcaatcttcatgtcgccagtttacctttagagacttgagtatcatctgatgaatctagggattgagatctggctttgctcgtaattctattatatccatatccaaaagaagttccattt

SEQ ID NO: 95764 - DNA, 272 bp, Glycine max
tttttttttttttttttttttttttttttttttttttttttttttttttttttttttggttttttacttttttgtattgggaggttatttccgtattcgcgcagatattatatgtgatgttcaaaaggttctgtaatttacacaggtgatcaatggagggggacaacagcccgaatggaaaaagagaggggcccccaaaaaaaaaaaaaaaaaaaaaaaaaaaaaagtgccagcgaaaaccacagacaaggggaaaggaatggccccccccc

SEQ ID NO: 95765 - DNA, 436 bp, Glycine max
acgacttcaggcacgctttgcattcaatcctataatgtagtctttgtcgatagagacttactagcgaatgcgcaccaggtccaacgtgcatacgcaacgaaagcaacccccgcagcttatcacggaatcgtcgacggactcacacaagtggtcaggtacgtgtcggctagtcgttcaaattgcttgatcgacttccgtgatcgtagctgtatgaagacaaagattgactgatctgtgtaatgctttgttccggtaagcagaacggagggcgtgttggcactatacaaaggagctggagcgcgcgttgcattccatgccccatccaccgctatcacgatgtctcttttcgaaagctgccagcaggtctttgcttctctcatcgatgcgtaatgtagaaaacttacttcgtttctggctttgcccacgccatcttgac

SEQ ID NO: 95766 - DNA, 355 bp, Glycine max
agacaataacagtctcaactcaagaggacagatattctgtaatatttcacaacgatataagattttctgtgcatttatcatgctttatctttaacttccagcgatctggctaaatatcattgttaaatcacacacattcttcactaacattcatcaaatatctattggttgtttgagcattgagaaataaaaaatatatggaaacatgaccacttaaaaaattcaagatacataatattacagtcaacacgaaccatcttcagctcatagaaccgcaaacttacctctaactggcatactgcaagagcagcaacaaatttcaaagaagccctcttcttcttttgtaatcactgac

SEQ ID NO: 95767 - DNA, 341 bp, Glycine max
cgcgacatgaacaggggcaacaatattaaaggctgtaagctaaggctcaacgaaaagtccaaagttttttactggggacgcataattcaatttaagggcaggggaccaccggggaaatgggccactgggccctgggttatttaaattaggccctaaaaagggctttttttgggtgggatcctaaagctacttaagccaggggttattaaaaaaacctttcacaggggtggcccattcttaacttgtccaaaccgcaattatgcaggagggtaatggcccctttttaaagtaaaaggcctttctcctttctcggggcccttggaagatcaatcaaaacttaa

SEQ ID NO: 95768 - DNA, 436 bp, Glycine max
gtaatagttatacttcatggcattttcttcagtaactatcaatcgcgaaatcgttatcgttatccgtcaatctttttcaacacgccaatcttagttacaccagcacagtaaggaaatcataaaatgtattcatacacgaactcaaccaaagaccaaagctctgacttcaatgctctccctgccaggccagccttgctgtgtcctaggatcgacaaacgccgaatgaggcgtcctcgcgccatccttgctatcgtagcactgaagcagaatcctctcgtcatttttcatcccgctcaagtagtgccacttgccctctggcgagtatttgacaccggcagtttcgccagtgcggtgaggatagcgatgttgcacgccagcaagctggtcatctgggactgtgcgagaatcggcgtaggcgagcggtgatgctaccaca

SEQ ID NO: 95769 - DNA, 399 bp, Glycine max
gaacaacatatattttcttcaatcaaattctgaaaagtgataacaaaaccccatgattcttactagtattttttttatttaatagtaaatagtaatgcgcacggacgaggatgcttaatgtgagcgtgtgttcaaccgtagctaggaatcaaatcttaagtgaatgcactagcaaaaatgacatctttctaaggtcgaataattaaatgctgtgagtgatttttttttccaaaaaaaatatacggtattaaaatatttcgtcaagaaaaaaaatactatatttgacgttttgaacgagtgaagcataatttaataatcgaaaataagcagtaaaaatattatttagagatattaacctgctattctattataatttgtaaataacttatatttttaaaa

SEQ ID NO: 95770 - DNA, 250 bp, Glycine max
actcgctgtattgggagttcatctccgcattcgcgcaaatttcatatcgatgttcaaaggtacagtatttacacagctgatcaatgcagggcttcaacagcccgacttgccacgcggatgctcatgcctaacatttaagctcatccttggcgctcaacgtgccgtcgtttcccttagacaattggattgggctggcacacgttgtaatcaagggtttcatgatgaaattgcaagactttggagggtgttt

SEQ ID NO: 95771 - DNA, 447 bp, Glycine max
tttggaatgaacataacggcattctcagattggattggggattttgaatggggtttccgacctgaggatgttgagtttggggtggatgagacgcatgaaaagattggtgatcatgatcatcttcactttttgggtctgagttgggcttggaatggccctgagaatttacagcctcataaggttaatgctaaggggaatgatatgtcagtttctggtgatgttttaaatggatatcaaaattttgatgtggtgtttgatgagggcattgtggtcgatggaagcacaagggggtttctgagtgttagtcatggggactatagggttcaaagcagggaagtggaggaattgcgaaactgcactgaaattgaatgtgatgctgaaggaagtgttccacatgatgctttgttttttgtgttgggttatctaggtgtcagggaccttctctct

SEQ ID NO: 95772 - DNA, 248 bp, Glycine max
gaactaataaagctatccattctttctgttttggttgaatttccatccttttgcaacacataacatctcaaattgcccggttacttacaaaatcaaccatcatcatacaaaaaagattgattgatctctcccttagtgtatttaattaattaaaattcttgacctgctacagaagaatgatactataaagggtagggcatcatagagggcatcatagggcatcatagggtaggtagcattctaccaac

SEQ ID NO: 95773 - DNA, 327 bp, Glycine max
gaagaaaaatttgtaaatgcattcgcttatgaaatttacactgcggctcctttcaagcagagcctgcaacctaataagaatttacatttctcaccctcaacccctcacacaaggtacatcatatagggaaaaaatggaaagtgaaatcaaagtgaaaagagaagaataagaagaggaattacaaaatcataatcaatccctattctctcctactatgccaatccccagctaccctcggtgatttatattagatggaagccaaatgtgattgatcagtgtgatcttgctctaatcccagccaaaatgtcgcaaaaatatctcatttac

SEQ ID NO: 95774 - DNA, 411 bp, Glycine max
cggtcctgatactttattgaagagtgctgcgaggcttcaatacgacgctctcttttacttacatgaccgcacaaccaaaccgcgaatcttccaagccttttgcagtcgtgtcttccaaaccattgtctaaatgcttcatggcagatgcaacattggtttcaaaataaggataccacacgtggtcgtacaggaatcgtgccgtaaatgatacgtcatgcttgtacaccttagcaactttggtgccaccccagacacgggtcctctccacgatccatgggaccataacacgttttggtctagtcgcgcggaagatccgcggcatgacgtatcgatggaaagcttcctctgaaaatgcgagctcaatagcaggcaggaatgctacttcctctagtgctagcacattgaaaagca

SEQ ID NO: 95775 - DNA, 74 bp, Glycine max
gccacaaaataaaaaatgctggaatttaattagataagccttttttttatgaaaaccagataaaccttttcctt

SEQ ID NO: 95776 - DNA, 434 bp, Glycine max
caatgaacgacgatgccgtggttttcgattatcgcccctacaaatagttctgaatcaaccagccattttacgctcttcacaaactattttctaaattctaacataggtttccaatattgtaattatacaagcctgccgtataaatccaatgaacccacaaaccgaactggactaaccagttttttttttcagttcagtttttttttacaaaattaaaaataatttggtaacccaaaaaataattaaactaaaagtttggttcagttttagtgaaccatgtttctacagcaacatggttgaaccaaccccatccatgccgagtcctaatgactgtggattttgctgtctctgctgagagaaatgggggtgattctgttgtgtgttttgaagtgccaccaacccagattgtagattctgagcatttgccatgctac

SEQ ID NO: 95777 - DNA, 368 bp, Glycine max
ggaaaaattagaggattacactatttgacgtttttgtcacaaatttacctcaagtacataccagacgaacaagaaaaccatttacacgagaaatttttaattgcgcgagctatcagttgctgcaacacaatcgtcgttcttttttgccacattcttagttgtagaaaaacctgcctaagtttctcacgaggcttacgaaagcaaaacgcaagaaaaatttgggaaagaagccaactagaataatttcctcagcagcaactacaaggacatcaactgcaaatttatttatacttaccgcacaattacacaagcaactaccacctgtggagctgcagttaacttctttaaatggagaacagcatgaacag

SEQ ID NO: 95778 - DNA, 409 bp, Glycine max
aatctctcgaagatttaatttgtcattaaattggtctctcaaaaattggttaaaaagctgcagaggaaattgtaaatttaaacctctaaatgaactaacaaaaactaagatttttatgtatggctaaaagaataggtattatcaatccaagtcccaaatactcccttccctacgctgttcgtgttatgtactgaaatgattaaaaggcattggtgaattacctttcaaaagggaaaattgttatataaaaattctccggagttctagtaatcagaaattaagaatcaatcagagctactagtagtggtgcaaatatccacttgggttttggtaggactaaatatgaatggctttggtggaatttgcaactgatctatgcttccttctaacatttcaaccaccttactca

SEQ ID NO: 95779 - DNA, 181 bp, Glycine max
ggaaacccctccatatagcattttttcaatttttgatatacctttccaagaaaattttaagggggctcccaaaaacatatgaaaggcccccttttgatgttttgggaatttcacaaacgaaaatattttttccccgtgtatgtttttatgggtgctagggaccttgtcaacaaaaagaaaa

SEQ ID NO: 95780 - DNA, 265 bp, Glycine max
aaaaaaaaaacttatatttgccttttcatggggaaaaataagggacggggggaacaaacaaagcttcccgggggcaaactattttgggaggggcccccccccatctgggggttcccacaataaaccctcccatttaccccaaggccctttaaatgaacaatagggggggggggaaaaaacaaaacaaaccccgcctccggggtatttggggataaaatccaaccaccaaacccccggggggatcgggttaaagacaaaaaggggg

SEQ ID NO: 95781 - DNA, 198 bp, Glycine max
ttcgttttttttttttttttttttttttatttacaagttaattgaagaaaatcaattggtttaatgaaattccccaaccccctctttttttatttgttcactacgtattatatgcaatacaatattatatgggagaaatattctaagttggaaaaaattgaaactaagatttttgatttttcaggacggggttaaaaa

SEQ ID NO: 95782 - DNA, 152 bp, Glycine max
ataatatactgaataaagtgtcgaagaacaataattaaattaattcaaggaattaaattaaaacaataattatattgatcaactaaatctaccatatgaaaatttcattctttacttgtaaagagccgaaattatcttcaccttaataattg

SEQ ID NO: 95783 - DNA, 368 bp, Glycine max
tttcttttttttttttttttttttttttttttttttttttttttttttttttttttttttttttttttttttttttttttctttttttttttctccggggggtttagcacccccgccaaaaaggttcttttttttggggaaaaaacggggggggggggggcacctcttggaaacccaggggcaaagcccaaaatggttccctccccaatgggcacccccccagaattgggcccctctaaaattggcccaaaacaaaatttcccctgcaaaggggcccatttttttgggaacccccgccccccggggaaaaaaaaaaaaaaaacccccccgggggggaaccccaaagttggtatggggccccccccccc

SEQ ID NO: 95784 - DNA, 482 bp, Glycine max
gtagaattattatgttagattcagatcaccattatattctaaatagataatgaatacaatgaacacaatctaattttaatcatactaataaatataatttagaagattacttaaagataaaataaaagcatttatccttaatttttatgcagctaatcttctaattttgtaattaaggacatcgaagacacctttttgagatacaaaccaagctttccattcatcataagttaaggattctggatcatgtgcataattatccattatatccccaattagatcatcaaaagcgttatcaacttcgtcttcatcgatttgactgattttatcatttagattattcatagcaggatgttcaaatctggtggctctaaaaacttggaaaagacttcctagaactgtattgagatcctctctgtcaacttgcccatcatcgctttgatcgaataaactatagatgaactctaatctttcattattat

SEQ ID NO: 95785 - DNA, 416 bp, Glycine max
catgtaaaatcattgttcaacatcagagataatacaatttgacggttaagattgaatgtaggatggcataaccaatatgatttagatttcactcctacatatggtaaaatcaccataatgaacaactccctattccaatcttccttaatgttgctcaaaatgggaaaaagaatatagtcctgtcatttatagttctttggcctcaagccatttctgagtggtctccttacagccactttaagtgagttcaagttttcaagaatatatattagatatttcaaacacatgtagtgcagaacttcatgtaaaaaggatggttttccacaaatccttgttacaagttttaacgactaagaagctatcagtgacattaattgttgttccacttcttcccagttcttaactctggtcaccag

SEQ ID NO: 95786 - DNA, 362 bp, Glycine max
gaatattagcaagctgttagtatttaagttttgtgttgcacttaaactctatataaagagcttatgaataaaaacaataagttcctccgcatgatacatctcttctttcactattattttttctaagaaaagcatcttattacttcctcctatacaacaaatggtgctactaaatctcaggttcttactatcaatctacactttaatgtcctgaaaacgcgagatggatggaagtacccacaatttcagccaattactgcaagcaaactttgtctgactactggaattgagcacagtatagatccaaatatcccagtcagaccataagcaatggcacaaaatggaagagcctcacgttcctt

SEQ ID NO: 95787 - DNA, 373 bp, Glycine max
ggtcgccctttttttttttttttgatcccatttaatcttcctttcatgaaagaccaactgaaggaatatgctaaagtattacatcagatcaacactaggcaatgctcagtgcaacaaaagcttaaaaacattgacatgcaaggtactatttgaggtaaatgagaaaaaatgttctgaacattcaactggcaattgggaaaacattggggcttagatacactgtgatggaactagcctatatatgaagccacgtattacaaaactgtcctatcgaagtatgtagtataacctatagttatacactgaagaaaaatgaccaacaggaaaatgaatgccgggtgccaaaagcttttgaatgtgtaacctgcttgat

SEQ ID NO: 95788 - DNA, 184 bp, Glycine max
aaacatcaattatctttttttattcttactgtttccaaaatcccaaaaaggaacaatggggggaaagaatgtcctgcaaacttgttttgatccaataatggaatatattatgttattggactttgccggaagctgcaaattttttaaatgatgaaaatgcccccttgctttgccctttaatgac

SEQ ID NO: 95789 - DNA, 167 bp, Glycine max
acgagtgaccctgccattgcattgtgtttgtattgatttaatacttaacagtcaacattgtgaatattctgtcggtgaaattctcaaaccatataccctgcttttaattgtaataaataatcagggaaaaaaggacagggcttgcactatccactgtacatgccgac

SEQ ID NO: 95790 - DNA, 460 bp, Glycine max
gcaacggtggaaatccactcttcattacggatcatcatttctgactaaggactgatcgaggtcaatcaattcaattgtatccccacccatatacacccatgttttcttggctgagccagaggggaaacataaaagatggaaattaacgaaaataaatagaaagggtcttggctgagcaaattttctatcatttttcatctttagcagcaaaaaaggggaagaggaaatagagctgcgaatggaaaaagaaacagaggctttactttttcctttattcttttttaactcagcagaattcccaaagacccatctgcaatgcctgtttttagctcataccaaattgcatttagctttctttaactctggatagagctaaagcagtagccttttgccagtaaaatgattcctcagttgatcatttttaatgtagtaagatcaggaacaacacacccagatccat

SEQ ID NO: 95791 - DNA, 147 bp, Glycine max
aataatgcattcctctttatgttcagatgtactgatagtctagaatcgctacatttcctatgtatagctactcagaagatcttaatgctagtgatcatagctaagccaatatctctcataggataatataccctttcacttattcaa

SEQ ID NO: 95792 - DNA, 286 bp, Glycine max
ttttgcttgcagattctcttactccagctattaatactgaaacactctctccctcgccaaaaaggtgcttgctttgtcattgtctctcacttggggtgttctgttttccttcactgaactgaaaaaaaaacactgaagggaaaaacggcttgaacttgagaatggagcatgtgggtcggcgaggaattgttggtggtattgttcacttttggtggggtggtttcggatccaactgggtcttatgcttttgtgcttttgtttccctagaaaatccttatggggaaca

SEQ ID NO: 95793 - DNA, 491 bp, Glycine max
aaagttataaaaatgtccttttatataaaaatggtggtacacgacggaaaagttgtgatccatcctttttccacttttccttcatttacttttatcaattcattaagtgtatctctcaataaataaatagtagtaaaaagtcgaaaagtggtacttatatttataatgaaaataattattaaaaattcatattcctaacattgggtgtgatgtcagtgctgtatacagttattggtaattcccattgtgtctctcttcggatatcatgccatagccattagcgtgtactttctacatgaggccttcggtgaaagtacataaatatacatgtttatgtttgttatagtcaactacaatatctttcttgaattggcacaatgctaacccatctctgctattactgctgactggtgcaagaaaaattcattggacgatgaaactcattttaggtattacagctggagtaatgggaggaatcatgatatgcatca

SEQ ID NO: 95794 - DNA, 327 bp, Glycine max
tttttttttttttttttttttttttttttttttttttttttttttttttttttttttttttttttttttttttttttttttttttttttttggggggaaaaccaacaaaaaaccagggaacccctgggaaaaaacccccaaaggggaggagatccccaaattgccccgtccaaaaggcccgggcccaaaaacaaaaggcaaccaaaattcccaaaaatgggcaaaaaggccgccaataaaaaccccccaattagcatttaaaaccccttgacaggggacccccgggttttattaaaaaaaaaagggaccccaaaacttcccaccccc

SEQ ID NO: 95795 - DNA, 233 bp, Glycine max
caagaaaagaaaaaaagggagagaagcagaaagagagagagagagaactgaaaaaagaaaagaaaagataagactaattaacgtttttttggtttggttttcttcaacacgcaggagacacgaagtaaagagacaagttacatgagatggttaaaacttgttaaaagagtttgcgtatgtgtgtgaaagtagtttaaggttgtgggggtggttgaagaagtttttgtagcttt

SEQ ID NO: 95796 - DNA, 458 bp, Glycine max
cttgctgttggtgaatcatctatctttatacaaacaaggtcctaacattataaggaaatgtcaaaaatgtccctactttgctgaggtgtcgaaatattaagccatgtagttcccgcccaaaaacgtcaacatcacgctatgtagtttctttttattttgtcttcgggtttttattgcacttttgtttacaatgcgcttctatttccaatgcgcttctatgacagagaggatgtgggctcagaccataatttgcaagagatagaacacacaatgcaagtgttttgaagctaaaccaagtcaccagtaaccctaactgcacctcccttttgtttgaatgagaaagaagatgaaatggaagtggttggatggtgaataaagtcaccagcaacccgagtacaagtttgttttctttgcaggagaaagaagaaggtgaaataagtaacccacaaccctaagta

SEQ ID NO: 95797 - DNA, 315 bp, Glycine max
gaacaagatatttggtaaacatttgcaagttgaaactgccaactagcagtgacaaaaaatgattgctctcactgctaattacagctaaatgaagctgttacacttaacattgctatacatgtaattgattctttgatatcgtaactcaaatacaacctttagcgagtagcattggtttctgttgacttatactacatttcaactgtggaaaatgtaagtttaccaaaaaagggtgggacaaagaaggaaaagaagggtgttgaatgagccttatataaatgaattgtatcgacgctttttctgtggtgttgaatg

SEQ ID NO: 95798 - DNA, 225 bp, Glycine max
ataaacatgtcattttattggggacggaaaacacattggagcaaatgataagttagaaagtatagatatgacgtttcttacaagcctaacatattagtgatttgatttattgctctctttacatgcttcgttttggaacaccctatggacaatttagatgatatatctcggacttaaaaatagttttcatttatgtcacctcacttgatgttgaagtggtaaaaa

SEQ ID NO: 95799 - DNA, 299 bp, Glycine max
gattaatcgtgcagtacacagcacacaacttacataaaagtttcttatggcatagaaaacatgtagtcctcctattcgtacacagtcaagtttaactcaacaaacaaagaaactcaaagatgagagtataggaaatacaaatacaatactagagtcattctgtacaaaaggtttgggttcatcatgtaataagacaatacacatactaagacacgtaattccttcccgcccatctctcctcgtactttacaaatgagtaggtagttgaaggcatcccagtcaagtgaaaggggtcaggt

SEQ ID NO: 95800 - DNA, 422 bp, Glycine max
ctcactaacacatatagtagtggattaataaatgtggggaagagtgttagctcctcggtaacacatcttatagggggttcagatgaatcgtagttgctagggaggaatcatggtagcttgatgtcggctcattgagagaacaagtctgagataaaaaggagcttcaacttactctccaaatcaccaccgtctgcggccagaattagcttacaccgggcaccgaccaccgtaggcgccacaaccaccagcaaccctactttgatgcgtttcccacatacctaacacaaattattccactcttccattacgcctttggattctgttgcgtgatgaaacaactcaacaagccaaccatatcccttgcagcaaatattccagcaacataagaaacctgaagcagtataagtcaccggtgagaaagc

SEQ ID NO: 95801 - DNA, 371 bp, Glycine max
gagagtgtctcaactttgggggtttcattttgttgtggctatctttcttagctaatctaccgggattgattgattgacccttgcatattttcctcccagcaagctggatgttccgcaagctgatacggaacaatttctgatccatcaactccgactggtcgaatgatacccaagcatatctgatggtcgaccaatattgtacagcttggcgccaatggagataccgcgccgaggatatccctagcaagtgatgtgaaccagtgcctgacacaaaatcaagcatctggcataccggtcaggtaatggatgatgggccttgatctgtatgaccggccagtagatgtagggaaagattgcgcataccgaatatt

SEQ ID NO: 95802 - DNA, 271 bp, Glycine max
gggccctacaaaaaccttgcatagaggggaaaaaaaaaaccggatatcaaaaaagctaactttagctgaaaaaaaaaaaatctttacccccctgttttttgttttttttaaaaaaatcctcccccaataagggggggccccaagaaaaaaaaattataaccagggccctccactttggaaccccccaaccgaatttacccccggaatcctatggggggaaaaacaaacggggccaatcccccgggtgggaagcccctaaaaacaagggggg

SEQ ID NO: 95803 - DNA, 298 bp, Glycine max
atgatctagaagttcctttccgttaatcttataccacttcagccttttaagcacctcagatttaccttggtgaatcacctttcatccctgcatcttctaccattaaacccacatcaaacataaacatgctttattcacagtcaaggtagaagagagcaaatcagtagtgaatcgtaaaagagtgacactcaaatgatttaattgttccatgaagagtgtcactctcaaggaaaacaaactttccaagcaaaggtggaatgctccatcttgtgtctctaattaggatgaaagacccctt

SEQ ID NO: 95804 - DNA, 422 bp, Glycine max
gccccaacaatctcaaaccccagaatttagccacacccacttctcaaaatcgttcctttttgtaccacccatatgcctcaacaccacaaacttcacattttccactctaactgctgccatcactactattagttaccactgttactattaatgggcgtagagagaaaatggctcttcaccctcttcactgcagcatttctctccttcatcattctcatgttctcttccctctcttgcttcaattcccctgtgccctttccctctagtgtccactatgggcctcactaccctcctgcttttgcttacttcatatctggtggcaatagagacggtgaccgaatcttccggttgctgctggcggagtaccaccccacgaaccggtacttgctccaccttgggatggatgccagggatgaagagag

SEQ ID NO: 95805 - DNA, 486 bp, Glycine max
agagaatgaaatagccacttttgattccagcctattgcattgtgatgtggaccaatcccatcttgttgatacaggagttagttcatcatctgttagtgcaggtaacatggaaactaagttgacaacttctacagtatcagttgatgtcgagcctgtcaacaattcagcttcacaatatatattagaaaatattagttcgacatcctgtgagatagtggatgtttgtgttctctctcctagcagaattgtgtccacacatgaagttacagatcactgtgaagttcaaggagtgacgcctgttgggtctgcttctattgatgaaaaggaaaaggctgaagctaaaatagccaatgaagctaccatagtcaatgaagcaagctgtgaagctaaactagccaatgaagccagctctgaagctaaaatagtcaatgaagcaaactgtgaagctaaaatagagaatgaagcaggccctgaagctaaagtagt

SEQ ID NO: 95806 - DNA, 64 bp, Glycine max
tttctttatgtatggttttccttaataaaaacggccgctttgatttggcgaacaaaggaagaaa

SEQ ID NO: 95807 - DNA, 538 bp, Glycine max
caagagttcaatagttcaatttaaaaaccaaagatgaaattttgaaattagttaggtattttcttgacaccattgaactctttttgtatcctttccttgggtcggtccattgcctcataaatgaaacccatggctagtttctcatcccaatcaattattcgaagcacctacaatataggaaatgaaccccaaaaacaaatgatattattcttcaaaaagtccttgttcaaaaccacatcctctaccaatctcctaaacagtcggctattcttccatgtcacttgtaaacattctaatcaatggtcccttgttctcattaaggatccctagggttttaaatagcggcgtgtagcatagtgaagtcgttcctggccgatacaggaccactgcagcgcctatcatgggtgaaatagtggtcgcaaaggtcgaagtggcaggactatctcttgattaaaaaaaaaagcctctgaacactaacgttagggcttgtttggtgagggttatttttgagatttcaaatttcaaaacaatatttttc

SEQ ID NO: 95808 - DNA, 394 bp, Glycine max
cctcggggaattccaattccacaccctcaagacgtggtggtggagaaatgtctcatatatgaatgggaattgtttgttttcttattaggcctatcctgaagccaaaggaaatgagatcggaattcctcggggaattccaattccacattttcaagaaataaggaggcaaaaatgttcatatatgaattggaattatttgttttcttattaggcctatcctgaagccaaaggaaatgagatcggaattcctcggggaattccaattccacattttcaagaaataaggaggcaaaaatgttcatatatgaattggaattatttgttttcttattaggcctatcctgaagccaaaggaaatgagatcggaattcctcgggggtaccgagctcgaatt

SEQ ID NO: 95809 - DNA, 386 bp, Glycine max
ctcgagccgaatcggctcgagtcgggagtcaaaaccaatattgaactaaagcaacacctgtgggtggacactggacacaaacaagatatgttgtacttatagaatctattgtaaaagttggtagtatcttatcgttaggtggtgtgggcatgtgggtaagacttgtagaggtcccattaaggagagtaaatcagatggagggttgtacaataattaaagaacagggagaccaagacagggataggccatatcatcaagaaggatttacattatatttacgacaggatattatggcattgtttgattcatgtaccttatcccacttggtgggagaaggcttttgttcggttttttttaagcttgttgctctggtactaaacctgatg

SEQ ID NO: 95810 - DNA, 417 bp, Glycine max
aaccaactcaccagcacgtaccatctataactaccaccaaaaccaaacccggacaaatgacagacaaaatggctgaggaagtcaaggccaccgagaaccccgccgtcgaggcccctgctgctgaggagaagaagccagtcaccgagactgtcgctgagaccgccactgctgccaaggagaacgtgttctccatgtttggcggcggtgcgaagaaggaggccaagaaggacgacgacgaggagaacgaccgctctggctccgcaaaggcacataaggagaaggccgctgaaggctgtgatgatgatgacaaggtccaggaggaggaggccgatgtgcacttcgagcccgttgtgcacctcaccgagaaggtcgacactaagaccaacgaggaggccgaggagcagactttcaagatga

SEQ ID NO: 95811 - DNA, 83 bp, Glycine max
aaatgttaatacagtacattaaataacttggtaatttgtatttcaatagcaagtagaaacttggataaaataaacattataac

SEQ ID NO: 95812 - DNA, 473 bp, Glycine max
tttcatttggcatttacatttgcatttgatttccgcgttcgcaagttgtaatcaaaatcaagccatagcgaccgaggaaggcggtgatcggcaatgagcagcggcggcggaggcgaaggagaaggagaaggcgcgtgtgagtcgaacgtcgctgattctgtggcacgcgcaccaaaacgacgccgcggcggtgcggaagcttctggaggaggatccgtccctggtgaaggcgagggattacgatagccgcacgccgctgcacgtgaagtcactccacggatgggtcgaagtgtcgaagtgcttgatcgaattcgatgctgacgtcaacgctcaggatcgctggaaaaacactcctctggctgatgcagaaggagctaaaagaactgccatgattgagcttttgaagtcacatggtggcttgtcgtatctggtcaggacttcaggcatgaggttaatttactagtgaagctttc

SEQ ID NO: 95813 - DNA, 381 bp, Glycine max
gcatcaaattacaagtatttcctccttttcttggtatggacaccttagctcaaaaagttcttatttcaactgattagtgatcactcatgtgacttgaatggttttcataacatcttccatgttccaatttgcttaccataccttagcatgtgtgtaaatggtttgttctttgttcatatcttcattggatccataatattgaatggggttatctgctcttctgcaatcttaatttagtttttccttttaactacttaaataacaaaatgttaacatcctttactgctggctctctttgttgtgaccaaagaaccttttatcggtaataacttgaccacttgatctttacagtctacacttcacatctaaggcctggtttga

SEQ ID NO: 95814 - DNA, 408 bp, Glycine max
ataaaaatggtctaccgaaactaaaccggactatgtcaatcaaactgatcaatctacaacgcaggtcttgggcgtctacttaatttaacttgcaggattgaggaagccataattagaatgaacatgtgaaaactaaaagttattgggctaactattgtaccaatggttgatgaaaagttcttttctccttacgaatcaatgatattcactttatcatgaaggaacagtttcttgcagcttcattaccctccaatcatgtttctgtacaactcgtactcgtatatcttatgcttatgagaaaaatatgaatggaaaacgagatcaagaatatatatatatatatatatatatatatcatgcatatgcttgaagcccgaaggagttgaatttggtgggaacgaattatat

SEQ ID NO: 95815 - DNA, 487 bp, Glycine max
cggtcgcaccctgcgcccgcagccttaacgggaagatctcagaactataaacccacgtgatgggacccgcaccaatggagaacgtggctcacgtaagccaacatgatggttatgcttaatgcgtcggtcgacattagtgaactatctgagtgaccaatgctcgtggggctgctagctttcgtgattggagacttaaccaggacctaacacatgcacctgtacaacagactacgaattacaccgctaaatgtattcaccagccatccgaagaaaactgtacctacatgcatttaaatgatggcttttacagtactgcttgtcataatctggtgtgacaagttttccttcaaacatgcaaactagtcaacccattcaccagccatagataggattttctaccagtggaggcaagagatgaaggtctttacagtgctgcttatcatagtcacgtgtcccaggtattgctcctgtacataatctcagaaat

SEQ ID NO: 95816 - DNA, 388 bp, Glycine max
aaaaatgggagtgaaaaaattcagagcggagatttataagaattaacataaaaaaaattcttacattttcactcacattttaaagggatagtaaactcgaccttagtgaaaaatattgggaatgcagaaattcatccaccatagctctttatacatgaagtacaatgctagctcgtagaggatatcactcaaacccaaaccacgaccactgatcagtgccagtatttataacatgaatgatcatcactgttgagcacatcaaccttggactttattgcacaaaatgctgtgttacatgcacaaaatgcttagcttccctctccacctctttccaacacttgtgtgcactcttcccttctttcattttcttcacaaaccctacaaactt

SEQ ID NO: 95817 - DNA, 480 bp, Glycine max
ggaaatatatcttttttggggagggtcagatgaaagatccatacagcttgttcgtgaaacgaaaatttgggatatcctgctgccactatacgtgaacacgagacttgggcatctatgactacctcacttacacttgcaaggtgaactacttaatttaatgattgaaaacttatcaagcacctaacacaaacgactgtttaacaaactacaaattcaaccactaaatctattcaccagccatccgtaaatttttctacctacatgcatttaaatgatggcttttacagtactgcttgtcataatctggtgtgacaagttttccttcaaacatccaaactagtcaacccattcaccagccatagataggattttctaccagtggaggcaagagatgaaggtctttacagtgctgcttatcatagtcacgtgtcccaggtattgctcctgtacataatctcagaaattcattcccagtaagac

SEQ ID NO: 95818 - DNA, 110 bp, Glycine max
aacagaatgccggaggcgtggataaccttgataacacaaatgtattggtgagtcaaatacagacatactaaagaaaacacacacttaaggttctctaaacatttttgtaa

SEQ ID NO: 95819 - DNA, 182 bp, Glycine max
gtcgttttgttttttatttctgttatgacaccgtctcacaggacacgttgcattgcgcaggatggggagagacggtgagattgacggcggagtgcggcggagaggatgcacgttcaggcggaacgacttctttccggaggagtcgttcaagagttggggaaactacgctcgagcggtgctgg

SEQ ID NO: 95820 - DNA, 462 bp, Glycine max
  unsure (1)..(462): unsure at all n locations
aacggcacctacttacgcagtacggccttactctctcttgccttgctgtctttgccttcgttccacccacacacaagttcatctttggcttgcaagtactaccaagatgtctgctaataaccccacaatggcacctaccagagaaccgaaggcagcacatgcggccaccaacggcgacgcagagcaatacttgcaagctggtcagggaggcagtcccattggacgcggcatgtccatcaccctaacgccggaacaattcgagcagctgtacttgcagcctggaggtaaaggaggaaagggagatctttcgaagcgcttcggtaacccgactccgctcggaatcgctggcttcctgctgtcattgacgccattatcaatctacttgatgggattcggccagactgctgccactncggccacatcgcanattggcgcatactacgcccttggtggagtctgcat

SEQ ID NO: 95821 - DNA, 479 bp, Glycine max
aattaacagttattcttttttttttttttttttttttttttttttttttttttttttttttttttttttttttgggtaaaaaacttttaaaaggtttatggcccctggggttttaaggggaaaaaaaacccagggggaaaaaaaaaaccccggtaaaaaaaagaagcctttttaaaaaaattctcgccatttgaaaaaaggaccctaatgggaaacgatgccgggaactaaaaatggaggggggggatgcaaacttgcatatgggcacaacctgctctaaatggtcactcctcaactgtggttgtgtctccacagaggaatccataactttaccattgaaaggctggatctgcctttgattctgctctaatacttctgcaacagtttgaagatcactggctgggtttatgccagaaccttgagcaacatcttgcattgtgtatattactgtgtcgctgtcaaattcaagatatacgcct

SEQ ID NO: 95822 - DNA, 408 bp, Glycine max
gaccctatgtaacgtctaccatttgtattacaaatgaggaaaaaaatattacagctgggttccagatggcaaagtaatcgtcaatcacaggtatcaaggtgcaacaaattacttgcttttgttaggagcaggattgaaccccatgtatcttcagtaaaaaagcaattaaacctttgatacaacaattacaaggtttttaaatagaataatatgcctcgaaaaaagacagtttacacaacatctagctggaggaaggggaagtgttctttgattagggacccatcatatcccctgggttcaagaggttatgtattttggcctgtaatatgagtggactttaatctttttgttggtggagacatgaaaagctttctaatggaacctacaggatcatccaccttaacaatg

SEQ ID NO: 95823 - DNA, 464 bp, Glycine max
gcggccgcccttttttttttttttttagtttgaatgattcagtgttcgattaatctgactagatgctacaatggctaatcttaagagcctactggtctacaatttggctaaaacatgctgttcctgtacctcacaccttgggattacctggtcgatgatgcttatacgttcttcttggcgagatagccagatagatcacctaggggtacgctgaatggcataccggtgctttcaagcaccagcgccagcataatccaccagccacaaatgcatgtgacaaaggcgaaagccccttccgctcgtagaagcgaggtgggatcgcggccctctccaatgcggaagtatccagctgccaggaggaagaaagcaacgttcagggtgaagaagagaatcacaaaggtgacgttggtgcggagggatccgagcatgtagatgaagaccatgacgccccaaatcaagagata

SEQ ID NO: 95824 - DNA, 271 bp, Glycine max
acaagccgataatggaataaaaaaaccataaaaattaaaggggactatttaagcaagcgaatttgattttgggttttgaacaaaacccaaattttttaccccccaaaaatgttttttgattggctaaacaaaactgggtcacttggtttacacaaaaacattggacaaaagtttggaacttaatttccaatgataacgtaaaaaaaagaaaacctagaacaaactgaatgcatcatgaaatcaagccccaacaatttcagggggttccttt

SEQ ID NO: 95825 - DNA, 449 bp, Glycine max
gaaaaggttaaccatgctgattaatctttcaagcattcataaaaaaatcgcagtttatcagatgcaatgtatgcagcaagaataccacagcaagaggcccacattaatgaaagcacactgaattgtaacagctgggagaaataaactactacagaaactggagatggagatagcaccggcaacttaaaatcacattttgcccagggcacaagattactccgtcaatgcttcaaaaaacattctcccacaaacccgataaataatcttgtatgttttcatccgcatcctggtgagacaggataatctaacacgcccttccatcttcctatctttgagaagggtacacagcaccagttgccctgtcataaaataacagttagcacaacacatcctttcttcagtagatactcattctcatcatagacaaaccaaatcatagcagatattat

SEQ ID NO: 95826 - DNA, 296 bp, Glycine max
tttttttttttttttttttttttttttttttttttttttttttttttttttttttttttttttttttttttttttttttttagggaaacttttatttgcaaccctttttattgggaggaattccccccttacaattttataggccacgggtgcaattttgcctcccaggggatgccaaaaaaaccgggaatttgattcagggggaaaaaaatgaacctcaagggaaaacaattttacaacataaggacaaattttttcgggaaaaacatttaaccccccatttactggttaacagt

SEQ ID NO: 95827 - DNA, 400 bp, Glycine max
caagtctgtaatcacctttccatgctcgccggccaatttctccaaagcgctgactttgttctccatcgtgcaatcggtcaaaccaatttttaggagccaagaatcataatgggaaagaaaagatagattttattgaatagtaagaaaagaactaaatataggagagaaaactttgttccaaggatttccccttcacaaaggatttcttttttcacgaagaactaatgctcaattacaaattatccaaatctgaatctcccctatccttttatccctatttatatctaataaactcttctaactaactaactaacttattaatagtctaactatgttaactaacttttccttctccttatatcctaacagctaagttagcacatccactacagacgtgaca

SEQ ID NO: 95828 - DNA, 421 bp, Glycine max
gcaaagtcatggtggtattactattatattgcagtaccaaattgatcactgcaaattaaatatcagacaatacgtgctatatcaaattacaagggttctctcttggggaactacatttactttcatcgaacataactatacacatgaactccactgaacctttttttacgtacacccacgaaaccaacgtgacaggatttaacttgacgtgttaaaggcagatattatagtgccaagaaagagtcttcagcctcctaacggtgattaagtcagtgtgaaatattagctgagggactgtctggtggccaaagcactgcatgttagactgatactctctgggtctataatgccaactggatatgttctttcatagatattcctcacaacaggaacatgattgaatctgcgctccttcataatc

SEQ ID NO: 95829 - DNA, 396 bp, Glycine max
aaaagcctaagagtgatgatgagatatcaacaaccataagacagaagctactaaggcccttgttagctgtttacctaccttggaccttcaagatgcattcttttgattatctttacgaaatggccaaggaatttaaattctaaaatgctatgcatgatgcccataaatttaaggacagtatggtgcaaagaattgtggaggactggagtgaggcatataatagaaggggagggacagggaacagaacaatattcttataacataacaaaataaggttctctgctggcacaacaattagttcctttctacaaaaagatcttttgtggtggggcagatgacaactcataatccgcttgtcaataaaatgctttaaaatgtcatggaaatcagcatact

SEQ ID NO: 95830 - DNA, 302 bp, Glycine max
aggcggtgagggtggttggaggtgaacagctcttcagatctgttgagacttaagcaggaccgttgtctaggagagagaagccaaagcaacagctgggaaaaaaatagagtttctgttgaaaagttctagttattgatgttgaaagagagaaagttaagtacccaccccctataactaatgtacatgagggaaataaattattatgtttacaaatatatatgttattttcagtattaaccatatcttattacttcatgttatgttttgattaatggttcacaaataggtcctactgatttagg

SEQ ID NO: 95831 - DNA, 157 bp, Glycine max
ggaaaaaagcttagtctttaattaaacctattggaaaacaggggatacccctaaataggggcttaatgtcataaaagggaatgaaattgaccaggggggaaatatgcatttccccatgatgggaatggggagaggggatgggttaaaattccccgct

SEQ ID NO: 95832 - DNA, 399 bp, Glycine max
acagaaaaaagaatatatactactgcatctcatccgctttaattacaatattcccggcccaaaaatatcaaaacaaacaaaggcaaggaaaaccatcagaagaaactaatgaagcaagggatatataatctgctaaaataaaacgaactacagaagaagaagaaggaaactataatgaatggaataattaataataaatatcgtttaatttttaattacggtcgaaaaatcaaaagggacgcaaattccgaccaaggccattgacattagcaaaaagtccaaccaattctggcctgtaaggtaagaaggacttgctcttgcactgttccatatgttccgatccgttctgaggcttcgccgccactttgatcttcggaatctgaaacaccacttctttga

SEQ ID NO: 95833 - DNA, 488 bp, Glycine max
actaaaataattaattttcattactcgaacattaattacgtatacaagggaaaagtgaattaaaatgagtttgactgggggatacactgagaaaagagaatatactacgttacacgtagtagtacaatatgagagtgatatgggccaaattagagaggctaattcttgcgcccaacagttacagctacccgaacaggcaaatttaaaccacacctttacattaatcaaacgaaacacttataccaaagactacgtactattcttgcattgtagatatgagcgatattagatgtgacctcactcagtaaagtaattgaacgtttaattagattattttctttttttaacttttcttgtcattgatcccttgtttctccacattcatataatctcaatgacgaaatcatatcagactttgccaacagcaccaccgtgattcggttccattgttcctatcttcacaacgttaatgatgtgcccattcaatt

SEQ ID NO: 95834 - DNA, 350 bp, Glycine max
caaatacagtagaatctaatgctccgtcaggagcaaacctaaaatgccggaaaattctcgagggaaaaagaaagtaaaatttaacttacacacagcctaaaacaacaagagagaaatagtatgctatcatcttctgtcattctcctgctaccttaattaatgcaagcattcattatcttttttgttttcattctttggaaacaatcatagtgctcaagacatggtcagatagtaaacatggccatattttcctgttgacattcgaactttgattcaccatgttgtgagatactagtctcatctgctagacctaactctcgttcgaacaaacattcattatctgaatgtct

SEQ ID NO: 95835 - DNA, 197 bp, Glycine max
gtacattctccttgggaatatgaatgctatatgaatctagagtcacattgctggctagaggcgttgggaatgcagatcacggtcattgcagaaaacatcgtgtataggaacaatttttttttattaaatgtattgcacattcaaataagaggatcctcttggttaaattaagaaggaaatacatatttttttggttc

SEQ ID NO: 95836 - DNA, 368 bp, Glycine max
gtacagtacaacagttatagtaaaggccaaaggacgggtaacctatgttgttttaaactaagtggctatataaattataagttataatcgaactctgcttatttccaaaacatttccctccagaccttgaccgccattattaacagcttctctaggtgagggttgggtaaggaacaatggggaaaaagttacctatacaaaagttatgttttcttacttcttacatgttaacgatcagcaagcacaattaaatacagaattgctaaagcatcctgcttttgttgcaatcttcctcacacctgtttcattatgagagtatcctccaataacaggagataagtggattctgtccatgatattgattttag

SEQ ID NO: 95837 - DNA, 292 bp, Glycine max
cggggaccaatgatgattgtaactaaattaatggcaccaattcaatatgtagcttgccataaaaacacactcagatcagttacactgataccaatcaattttgttcaaggcatgtagcatcggagctgctgactaatattggggacaatgatggtaactttgtcatcacggggaccaatgatgattgtaactaaattaatggtaccaattcaatatgtagtttgccataaaaaaaacgtataaacgttacagaataaagaacaaaccaagctaatccaagtgaaaaaaagag

SEQ ID NO: 95838 - DNA, 367 bp, Glycine max
ggaaaaaaaaaacccaggttcccaattaaatttaaacccgggaaaaggtcacctgggaggctgggaccggtttgacccacaagggcagcttcggggaaaggaaaaaaaaaaaaagggttgaaacaaacgggggtcaaaagggcccccggggaaaaaagggtttggcccaaagggggtaacccccctggggggtaaccaaatcgggtggaccccggaagggccgagcatgcccaaggtccccccttacttcccccctgggggggcgctcatcgggttccaatttcaagcctttttgggggaaatttgaaaagactttccaacaatcgggggcaatttttccccgggaattcagaacaattttcccccc

SEQ ID NO: 95839 - DNA, 398 bp, Glycine max
atatgattgtttgagtccttgtgaaaaactcaaccaagctcccttgcagctgtgacaaaagctgcttcatctggtaactccacttcataagttgggagagtaaccctcagtatccattccaggcaaacatatctaaatcatagattcaaaggataacctatcatcttagttacaacatatgacaaaactatgaatttgaacaaaagatcagacatatatggaatcacaaaaatctttgagagttaccggactccacatcagaggacagaaatattgataaactatttaactaattatgaaaatcaatcaaaaataaaaataaaatagggatgagacctagttactcaaggcatgcccttctaacaagccaaatttcatgaagaacttcttcctattac

SEQ ID NO: 95840 - DNA, 246 bp, Glycine max
tacatatgtgagttttgcactgtacagaataagaacatttactgccaacaatttacctatgtgaaccttctcacttagaggctcctgagagaggccaagtttacttttatgcgtagcatatatgcaaacagaagaatcaatgacagaaggaaatatcagaacatgcttccactccctgaaaaatcttaacagcttgtaacttttggcagcaactatgaacacttaacatatttaagaagccaagtc

SEQ ID NO: 95841 - DNA, 351 bp, Glycine max
aacatcaacgtattcaagtaaaaaatattaacatataataatctaattacaaaaggatgaattatattaataataaattcatctgagctttcgtcaaagatgagctatcgtcgctatggagttccatcttcaagtacaggttgggaccagaatttgcaaactggaaagtctacataaatgatgtgaaaaccccaagcccaagaaaaatatatcatgtctttgggcacgcagttatatcaatatttctggcaaccattcgtcgttggtttgcatttggacatgcttccaagcaaggttccttcacgatagtatcatcccgtgggggaagaactccaaatttgaactgacagc

SEQ ID NO: 95842 - DNA, 184 bp, Glycine max
acaataaacaaattcgttaattataaaattttgcaggatgttttgacccccgatgggggcacgttaacccttaaaaacatcaattggggagctatacaattagacaaacgggacttgtattatgaaattcttaccacattttgtgtgaaactcctgtatgaactatttttaaccaatgaacaaa

SEQ ID NO: 95843 - DNA, 162 bp, Glycine max
gcttacaactggggatgaaataaagaattggcttcaaaacaaagaattttaagagggaagaaaactcaggcttgaagtactgagagggatgcttttagatgggatcattttttcttgggactggctctctatttataggggctgaaatgggcttacgggcct

SEQ ID NO: 95844 - DNA, 325 bp, Glycine max
attttggaccataaattatttctaattacagccttaaaccaatcttaatatacaacgcaatcaacttgacatgccaattgtgtcctttattcttacgagaagttgtgtgctttgcacgtcaattttcttcaaaaatgtcatgctttgtcgaaagtccacagactttcaacttccacaccaaactattgatatgcaactaattacttgaccaataaatagaagggaaaattgcaagctgtaagaggagaaacaatgcttctagacagataccgaaaatgataattgctttccattttccaaccattgtacttgaaccattatttga

SEQ ID NO: 95845 - DNA, 275 bp, Glycine max
agcgtagctcgcttcgtctctgctcttgcccgcaatgtcctcttcctttcttggagacatcctactaaggaagacgtcgacctcaatgtcttctaccagagctcgtagtaatggcttcatttccaatttgcctgattgtaaatatgctgcatcaaaccctaagattcgccaatttttatgcaatgaagctccgaagaagagcgggttttatcggagatgttgcgtgctttgtgtgtgattgaagctgcttcgcttaatttggttttcgacttact

SEQ ID NO: 95846 - DNA, 322 bp, Glycine max
gaaagcaccgtgacaatacaataagcatatcacatgtgcgtaaaacataaagcataataatagaaaaataagataataagaatcgtgaaaatgttgaacctatctctctatagagtgtagaataaacactatactttccttgtcaaagagctcgctctagaaactcaaatcatgacttcaacatcttatacgttgggcatgagacttcattctctatctttctaagggatctgtcattctcttcggatcactcctaaagtatcaaatagggaccccaacttgccagcttgagcaggactaatgcttgaattacatgcccatt

SEQ ID NO: 95847 - DNA, 288 bp, Glycine max
ttcgaggccaatccgaccttcagcgaggagcaactcatcgatgttggtccaggatctggtcacgagtggcaggctcctcgacagaatgacctccgtggcccatgtcctggcctgaacgcctttgtcaaccacggctttcttccacgaaacggatatgccacgatttctcaatttatcgatgccacgactaccgtcgtcggtatgggcccaattctcgctgccttcctcgccgtccttggtgcaagtatcgatggcgatggtttatcgtggtcgatccacggaacacca

SEQ ID NO: 95848 - DNA, 296 bp, Glycine max
ttattggagccgcttagaagttttcatcattcgtctctatctccgttcagaaacatcatgaatcctctacctcgtgatgccctccctggtgcttcgctgataacctgggaactgctgaaggagttgtgcgtccaaagcacgaagctgtgggcatgagagtgggccaagaaggttttgcagtgggctggtcagaccactgagggcaccgagaagatctggcttggcttgtgcggcgaattgataggcgaggcaggcaaagttgtttccctcgaggaggttctggccgttcatgacgc

SEQ ID NO: 95849 - DNA, 392 bp, Glycine max
tgtatataatatgatatgaaaattaagataaaaataaaataaaacaatagaaggctcttttgtatataattactctagtggtagactttaatgactcttgacaaattccaaataatatggatatccatggcatgggtatgcctacaagctgtaggataactcaagctaattaaacttatcagctttatgcctttatgcatgttgatgccacaagactttcattgtttccttagttggcaggggcaatagtaataaccgtttacaaaatatataatgcaaatgtgcatccatagctttgactttcacaacttctggtcaaaggggaaggggcgtatgaaagctgagttcaattgccaaatcttgagcgaggccttgatgtttatgtccgtcgc

SEQ ID NO: 95850 - DNA, 389 bp, Glycine max
tttcttttttttttttttttgaaggcaagccagttctcaaaacagcactttaattccagtcctcttcaatagagatgctgctccccttgaatgaaagtccagctctaaattatatacagaactcccccctagatcaaagaatttatcagcaattaatgaattcccaaagaatatctcactggacaatgatacagccatacgagtgacacacaaacacaatcatgacaacctcagttaaaaacctccgagagaggagagtcacttgagctgtacaagctacaaagcttagaaacaagccagcatctcaaatgacttcccagtatcatctctctctcttgcgatttcccggcaaaagaaatttatacttctcagaattttccagaagaaaa

SEQ ID NO: 95851 - DNA, 434 bp, Glycine max
aaggtctaattgtattaaactgtttttccttgaatgcgctacacattatcacaacaaatacttgttttctacttatgaaattctccaccaggacaaggccctacaccgaatgaaaaggacttcgaactgcccaacatactttgtcaaatttaggtgagactttatttttttgtatgttgtcaaatctaaatgattggaggtagtaggagtaaccgattgcagaattcgtcctaaacagtatttgtcaaaaaattgtcaccatctattgcaaaagaggacgcttcctacagcaaaaataatcatttcaaaatggaagctaggcaaaatgacgaacagttaactctctcacttctaccaactcaacctgttagtgaaaaacagatattcgcaattcccaacttctgaacttagaaaaacgccgctgattcaaaaac

SEQ ID NO: 95852 - DNA, 282 bp, Glycine max
gcttctgttacttacttttcattttcttcgactcacacgacttattctcacgttcgtagccaattgggatatttgtttcggcgaagtttggtacgacgcatgcctgacaggccccagccacccggaagcgacccatagttttgtttggctctttccttcgttggaccgaactacttcacgatcgctttgtccgcacagttctcacgagtcacgatacactagacgaacaccacgatgctctcattcagcatactggccctcctggcgctgccgctctttggc

SEQ ID NO: 95853 - DNA, 337 bp, Glycine max
aaatgcccaaagatgcataatgtacccaccaaagatcaaatcctcatatgccccatgtgtccctatgcccaaccatgtgttttcgctactccaatgcgccagccgatgtaatgtctctaccgttgtcgaaatgaatgtaatgttgggtatcgtaaggaacgtatgcatgactccatgtccatgccgtgtaatgctgtgatgctgaaaggagagtcgttatcattacgcttttcacctcttccttttcctcctcctcctcctcctaattcccacctcatccttagaccatcatagcaagcacacctcccatcgcagcgtatccctagcaaattggttt

SEQ ID NO: 95854 - DNA, 452 bp, Glycine max
cttggattgatcaattacaacataccaattgcctatttataggctcaagtcactaacctctcaatggtggtgaatgtttctacattactttaggtctttctagagttttcatgatagattagtatcatgatagttctagattcttctatcttatacatagacttatagttctagattgttctaccatattcatacacattatagttctagattgttctaccatattctatagttctaggatattctactatatacatattatatttaagaatattctagaaatttgtagcaatttcaacaacacacaacaaatccgacaatcagaatcaagaggcccaattttaattctagggcttgctccatgatcaaattagtaccaattattttttcatccgctattccttggctcatcctccatgatatttgaagctctctttctctagttgattgat

SEQ ID NO: 95855 - DNA, 291 bp, Glycine max
attgaatcttatttaatttacatgcttacatatattcttttttttttttatattcttttttttttttaaaacaaaaaaaaaccatgggcggcccgaattttttaaaccaccaaaagaaaaaaatgttttgacccccatggctaaaggggcaaccccccagccccttgctttatttattcccccccccccccccatttataacgccctccaaaaattgggaagaccgaaacactggggggggcaaaattttctggcctctccaatttttgagggggggggcccccccccccc

SEQ ID NO: 95856 - DNA, 270 bp, Glycine max
cttcggagtgaaaacagatattagcattgtaaaattctgaccccaacaagtacaataagagtgttgcagggcacagaccttggctacaacttgtctagactatatcaggctgtctcaacattcgatgatgcatattgtttgaaagtaaataatttgacaaaccttggctaagcatcaattggcattaagtgtaccccttcacctcttaatggcacaattcagccaacaatgtgacagtggacattatttaatgattccttgattgattat

SEQ ID NO: 95857 - DNA, 200 bp, Glycine max
gcacattcctggaaatgagggggaaaaaatcatttacatgtcataagcgtggagttgacgacatgcaataaaagacggctccttgagagatcaactccagctattgcaggcaagctacagttgatgatccagtatctgattgacttgctcaaagatggatcgcgtgtgcatcgcaatcggcgggtctgacgggtttatgg

SEQ ID NO: 95858 - DNA, 371 bp, Glycine max
tttttttttttttttttttttttttttttttttttttttttttttttaccaatttaaaagcaaaaatttccttttgaaaattaaaataatcaatagtcatttatttatgggaaccattttttattctgtactataacaatatgggaaataagaataaaaaagggggggggaaaggggcattggaaagaacagtatcctatttttataaaaattccaggggccactttctttacttttagttctacacactagagcgccaattagtaactttctaactgttgaatgaaatgacagaaatccacttgcccatgaaacgttaatggcttaaagggcattggaccacttagctggtttcctaataataatgagat

SEQ ID NO: 95859 - DNA, 322 bp, Glycine max
tgtcgtcctttttttttttttttttttttttttttttttttttttttttttttcccagaaaaaagtaattctgaaaattttgcggaaccctacccgttaaacaaaacagttcccgcaccaccccaaattacttttacattttttacccatgaataacccaaaaaaattaaaaattgcctctgaccctataaaaaattatttttatattccccctctaactaaactctcgcttttttttaaaacggaaagtaaaaaagggttgtccaaaaggctgtgcagtgtttttaacatactaaagcctttgcttcacccccctcccatt

SEQ ID NO: 95860 - DNA, 334 bp, Glycine max
tttcgtcctttttttttttttttttttttttttttgtttttatttgttttttcttgtttgcgcttacattttttcattctattcttgttttttacttatgaaatttttcacctggacggggccctacaccgaatgaaaaggacttcgaactgcccaacgtactttgaaaaataaagcgagactttattttttagaatgttgtcaaatctaaaagattggaggttgtatgagaaaccgattgctgaattcgtcctaaacagtatttgtcaaaaaattgtcaccctctattgcaaaagaggacgcttcctacagcaaaaataatcatttcaaaatg

SEQ ID NO: 95861 - DNA, 474 bp, Glycine max
gtcgcgtgagcgaatcgatacaccaccaagctatctctatacatttctagatcggagctccttgtgcagcgcccgacccccatcaccatgtcttacgacaagaacccatcgccggtgccgacgagcacgacgggcgatgaggagaagaaagtcaccggcggcggctacgacgtcggcgtctactctgcccacggacgagtcgaccacaatgcgcgtgcggttgacgggcacgacctcaacgactcgtacgacccgtccaaggagtcgctgctcacgcgattgggtctcaacatcgagagtttcaagcgggcacccggtaccacgcgcggtctcgtcgcccacggtgacatcccacccgagtacctgcaacacgacaacccgctgctgcagcagaagatgaagccgaggcatttgcagatgattgctgtcggtggatctatcggtactggtcttttcgtcggttccggagctttc

SEQ ID NO: 95862 - DNA, 145 bp, Glycine max
cagcgctacgccgtgcagtctcgtcgcgatgttttggccctacccatgaaggaatacgcctcgaggagtcagatcaagcacccgctatttaccatgtcggaaggcgacgaggatccgctgaacatcaccgcaagtggtgatctca

SEQ ID NO: 95863 - DNA, 424 bp, Glycine max
gcgttgagatatgtgtgatttctgattgcatagtgtcgctcgaagtcacagcatttgtgactcgacgtgcatcgtagagaccgcggaaagtcgatgagtcccgcggtaccacaaaataaagcaatctcgttggtatgagcagtaccaggtcatacaaactacaaggctctgtataaacattccttccgagcaccaggtagtgttgcctgagcaacgcagccgctgtaaggctgaagcaagcggtcggcaagactggcttagtacagacctgaatgtcgtctatttaagcttaaattgcgacgctgtaagatgctcatcattgatgccttgtaaagcccctcaggcttatctcagagagtatccctcgccgtccaatccttgtccacagccatgaacaggtccctcactgccacatgcctgttga

SEQ ID NO: 95864 - DNA, 378 bp, Glycine max
atggaacatcaaatgctacttatttcctttaagcaacagtttcacaatcaactgcaaccaattacaggctctacagactaaataacttcctcggcatatccacctaacttcctcttcacttctgaaatcaattaccaaatacagttacacctttcaagtttcaaaacttaaatctactcccctatttaacctaaaccagagttagttcccgatacagacctcaacaatggatgattggtagtgggctgcacattactaggggcattgaacatggcagttgaagaagctggttgtgattgttgtatcatagataggggcaatctttgccccaacccaaacattgaaggtcgtggggcaaaggacatatgtggatgaact

SEQ ID NO: 95865 - DNA, 394 bp, Glycine max
aaaagttgtaaaatataggccaaaacctgtttgaataacattcctaatgccaatgtacacaaagtatatgaccataaagcccacaatttaaacaaaacttagacccatgcatcaattctacaggtgataacatacataatctaaacacctacgaaagtaatccaggaaccaacgcatgttgccaagatatgcatgtccgattagtattaacatagccaaatgtatgtatatgatgatgccactgcattcattcacatgagcaaggatgctaatggcgatgacttgatgatcaatggatgcatgtgacagctgcaagatgcatcctattatgtagtaatatttgtcggagcataaagaacagagtacatccccttcaagctactgataagtcatt

SEQ ID NO: 95866 - DNA, 465 bp, Glycine max
ggcaccctaatctgataaagtgccaaagggaaaggactagaaggtttagacaatgggcctttacttctttgggccatgttttgcattttctcaagaccaaaagggttaaagacatcaatgaagaggacataaagtaccttcatggcttgtggaaggaacttgtgaagtcctcagggtttgacctggcttggctggagccatatgttcaattagcattgggttcgagggcatatatggaaagagcaaaccaattgaagaagctgaaggacaaggtggttgctttggagattaagatgaagcggctcaggggggaacttgctgctgctgaaggagagtttgaagtggcaaggagaggcttgtctgaagtaagaagaggcttcaatgagatggatttaaatgctgcaattggttatgctatgttctgatcatccaattattttgatgtatggtcctcaactagttttg

SEQ ID NO: 95867 - DNA, 154 bp, Glycine max
atatatatatatatgtatctatgtttatataaaaatttgtaatgctcaacactcgcaagacatgtttttccagcaaaaagtaatactgaagatattggggaaacctacacgttaaacagaacagtaacggcaacgacacaaattacatttacat

SEQ ID NO: 95868 - DNA, 119 bp, Glycine max
gacattgatcataactgcaattggtcctcgcgttgtacttactttaaaggaaagtgtgagaatacgatcgcttctatcccaaggaggcaaatgtggatatgtagctatctctttaccaa

SEQ ID NO: 95869 - DNA, 468 bp, Glycine max
ggtcgtccttttttttttttttttttttttttcagagacccaaactgagcgcagctttcacgtctagcctccatgcaaacccgccacagtccaatctccaaacatcacacggcaccatcttcgtgcacttctcgttccgccacgtgtactgcagcctcacaccgcaggtgaacgccgggtgagagtagcaccaccacgaagcgatggcactatccttcactttcaaccacaccacgatattctcaccctcaccctcacgcccctccagcatcatcctcttgtacgcgtcattcacccaccgtaccctaaggcttccgtcacagacaaaagcaggacacgtgtcagcttctaggctcttcaccttctccgcgtccgtacaatctaataacccttgccctccctctccgtctccctcccccatgcacgtgcctgtcacgctctccactgtcacccaagactccgtcacct

SEQ ID NO: 95870 - DNA, 416 bp, Glycine max
ggttgaaaaccaacttggaggagtatgttcatattcataattccgagtgcttcaatacattaaacctgtttgacagttaagaccaaaccgtttacaaagcactcagcaatccctagtaacaaggctcccataagaaacagtaacctaaattacatcctgtgaagcttcatattaccagaacttcaacttcagaaggtgtgaagtcagttttacaatatacaaaaacttcatatagcacaacaaaaattccataatcatcaaatactataaaatatctcgtacaccaaaagatactcagatccatgtgcacggcagagggtaaaaaaaggcatccgacttaataagaaatttacattttgaaaagaaaaaaaatatgaacggcatctaatcttccacagagggaggagtatatgaca

SEQ ID NO: 95871 - DNA, 416 bp, Glycine max
cagtgaatacatgaaaataattatagaattggaaaggcagcatgagatatgtctcaaggatcttgaggacaagcaattaacaacaaggctgacattccaagagatttcagcacctgatgaattgataaacccagttacttcaaacaaatctgggactaaggttgaccagacttgtgatcaagcccagcattctaatgctccgaaagaccttgtgtctgatcatgttgtcgaaggagagggtttcaatgatatagtggaaatcatgacaaggactggaactgggattggattatctgaagctcctgatgccaatgcctctgtagttgtaccatgcagtagcacagttgaactgcaaactcctctggtcaaacatgcttatgctaatgagatggacatagtggcttcaaaagatggac

SEQ ID NO: 95872 - DNA, 217 bp, Glycine max
aggaaaacaccttttattatttgaagccccaaagttcagcagaaccccaatgaaccccaggaaattttaattgattatctcaagggttttttttagtagggagacaatggaactcaaaattttaaagggtaacaatccaatttgaacaagataaattatttgattatttcaaggcatagcttcttttcaaggggaaaatgcttagggtctcaggggg

SEQ ID NO: 95873 - DNA, 495 bp, Glycine max
gaagaaatcacataactattacatacatcaaccagtcacattagttctgtacaacatcagtgaaatgtttttcatgcaaaagagcattttcctattaaaaaggcaagccaaataatggcttttcaaactaaacacacgcactaagaaacgaaattaggtgaaatctccctttctccatataacaaaaaagaagaaaaacaatgcttattcagactcaccacacacacacaccaaagaaaaaaaaaccaggtggtgtgctttccttcaactccttgcctctcactagtttacaaccctaaaacacacgctttggcgtatataggttattgagttttggggggaaatttcacaaccataagacacagacaacaataacaagaaaaaaaaatatagacatacaaatgaacctcctataattctataatttatgcaaggattcttgtaaaatgatctttgagttaaaaaaaaggaaaataaaattataatataactggc

SEQ ID NO: 95874 - DNA, 452 bp, Glycine max
caagacccacaaataatgaggatcatctgcaatgtctgctgaaggtatccactgctgaaatgaatgagctcaacactcctacttcctcggttcttccactctcaatgttgttgaccttttacttcagtaactttgctgcaacccgatcttcgctttggataggattccctattgtaaaaaaatacagtatttaatgtagtaaatctatttacatccatgtctctgcatttccattcagggcataacaaaattggagaatttaaagaaacatgaagcattcgtgttttgattacccaactgttactgcaagttttgtaacgatataagatcaaacactcaaacttcagttgaactaatgacctgatggcacacaaaagaaaggtaaaatgtcgaagaggatgtgaatacaatcatgcagcaaatctctcatatgatgtctcatattaagcatt

SEQ ID NO: 95875 - DNA, 485 bp, Glycine max
ctgctgcggctgcaaaagcagttgcggaggcagagactgcaattgcacaggctgaggcagcagctagggaggcagaggctgcagaagctgaggctgaggctgctcaagtgtttgcaaaagcagcaatgaaggcgctaaaatgcaaaatgcttcatatttggtagtttcctcaccaagaaatctaatttgattcctgtggatgaaaatatgagatggtcataactttatctaaattttattttcctgtttagaatgcttatcacatcataattattccgatagtatgctggttctctgcactcttcagtagtcactcctttagaatcttctcatccttatttattttgccttttgttcttggttactggattagaggctgatctgtctgtggttagacttttctccaagtggataatttgctcagaacatcttatagcacagttttttaccaaactgatcatgaatttctaacagtctctactatg

SEQ ID NO: 95876 - DNA, 410 bp, Glycine max
cgcagccttcacgcggatcaacttgatccgcaggaaactacgcggccaaaaacgcatgcggatctacttttccctactgtggatcatctacctcctaagttgactctactgcggataaccttaagcaatcaacaatggaagcaatggaagaaggaaccttacctcaatgaagaacgaaaagaatggagctcgctgaataagaagagacactcgtaagaagatagaggaagaagaaatggctagcgggagagcaccaacagcagccttgcgagggagaagaaccagcaacagctcgcacgaaagaagggagaagaacagtgctcgcggaagatggtactcacggcagaaggaaatgaagaacgaagcggaatggctgggtgcacaagtttttttaaaatataagaagagca

SEQ ID NO: 95877 - DNA, 426 bp, Glycine max
ggctcatatgattgcagaggagtatccttggttggtcacaaaatttttattctcatccgagaaatctgctagccgtcataagtgaattgtttcctcccaacatgaatttctctaaacacatcaattagaatttgaactctggctacaagcttaagggacctgaacatggtgccactcagatcaaccacttgttcagcaataagtgaagtgttatccacatagcagtgaaaataaaaaaagtcaacctgaatttaattgaggggcccgaagaatgaggcaatttcctctcccagaaaaaaaggaagaaaggaaaaataacacagaatgagacaggttcacttgtatgttgtggacccataggttcgacatacttaagagctaaattgtctttcaaagacatattagtccagaaaatggatcatgttt

SEQ ID NO: 95878 - DNA, 353 bp, Glycine max
aaagaaaagatacgagattatattatttgtcttggtcgtacaccaagctgacgattgaaacaaagaaaaccttgtgaacatttcaatcattcgaaaaacatactaattgttgcttgagtttcatgaccatcttaagtttaatttggtcaccttgttcgtatgttattttatcaactttggactaatatatttcttccagctaacataatcaatatgcataaagtgtcaatccttattctttaagccagttgacaagcctattaagattctctaatgatcgacctccattggttatgtttttcataactttgtccttcaattccagagaccttgaatttatgttctcatcatta

SEQ ID NO: 95879 - DNA, 159 bp, Glycine max
tgagttttttaatctgaaaattgaagttaatatttaacattgctataattcctcgggataatattgtgggcagggcaatgctagagctgaaccagattctacgggcaagtgaaatcaactttgcaggtctgactgctttacctgcattcttgctctctc

SEQ ID NO: 95880 - DNA, 290 bp, Glycine max
gggactggaaatcttttgggaaaccaaacatgctttaaaagcatcacggcatataccaatcttggggtttaaaagaacttttgggtacgaacttgataccctacccaatttggaaattttgaattgctttacaacttttcaaggttaaagaaaaaacctatccatcccaagtccctatcctccaagggattttggattaaaatggaacttggttcaggctactggtggacactcattaagggaagggaatattggattcatcccaattccaaattcctcaaaactacctg

SEQ ID NO: 95881 - DNA, 406 bp, Glycine max
gatgtgacaatttcttttttttgtataacaaaaaaaaacgttgaaagtttaatacaattgaccatgataaaatttgtaaggaaaaaaaaataacaaacatgaaacaaagaagaagaaaaactccacaattttttttacagaaatttaatttgatacggacaattttaagaaatgggtttttgaacaataacaaataaatttgcacctgctcgtaccctgtccaagggactagctattcttagtatactaaacattttcgaggggaacctttttagagcacactattagtagacacttaacgggaacatagccttttcaaatattatactggttgcatattcaggggctggaatccatagcctttgattcatctgcagttatgatgatatccatttaggccttaacc

SEQ ID NO: 95882 - DNA, 429 bp, Glycine max
tgcagaatcctaaggtgatgtcatgtcaaaatgaagctcattaatcttgggcatgcacaaactacagaaacaagaaagaagattggtgttggagtgagaaggctatgggaaaagaggcgtggaaagaaaatggtgcaggaatcttgctgcactgagtggcagaatttaattgcagaagcttctaggcaaggctatgttggtcaggaagagctgcagtggaattcttatgaaactgtgaatgaacagctgaagcatgactggttgatgagtgttgaacagaggaaacaaatggcaaggacaccatctagcaaaagagcacccaagtcccctgaacagagaaggaaaattgcagaagccattgctgccaaatgggctgatcctgaataccgcgaaagagtttggtctgcattggccaagtatcatggcagt

SEQ ID NO: 95883 - DNA, 397 bp, Glycine max
aatgtaacaataattatacgattaactcagtttaatgtaacatgactaaaacaagtacaagtatccagtgaaccacccctctttccttagtgatagctatctattttagtcttcctccatctgtctactacacgtagttggctgttgcagggctgatacaactcacctcttgatttcaaggagtgaatgggtgagcaagcaatgatcacactattaaagcagaaaatattcgggcatttatgatctttataacgcaacaaacaatatgacattgctttgtattaatgtttgaaaactgagctaagcttttttacccattttattgcttctcttcagccacttcaacgagccttacacgaacccactgtttagttactacagacattgtctgattttc

SEQ ID NO: 95884 - DNA, 419 bp, Glycine max
cgaacaacgcttgatgatgaaaaaaccttcaatcgccgattaactgcaatgcaccactcatcatcaactcatcatccatggctttctccgcttcaattcgccctacctcttctcactctcagttgttttgctctgttaggttcaataggaggcaccatagcagtagccgaataggtttctcgtcgaacggcggaagaagatgtcgtcgtttacggaacagtgttaggtcggtgttgaacgacaaccggcctagcgcaagcgtgaacgacgattacggagcggcggagtctgctagggttttgttcgagagactgttcacggagaaccggataaccggagatgaaccggatcttcggattcttgaatcggatctcgaagcggcgctggcggcgctgaagatgaaggaggatcacttgatg

SEQ ID NO: 95885 - DNA, 269 bp, Glycine max
gaattaaaaaattcccgtttgaattactttttggaacggggaacttgctaaggggatgcccgtcgggggattgctgcctttcacatccggtgttcgaacttaccccttttccaaacacacttttaaacttacattcaaacgaaacaaagccctcgggaggggggggctttcatgggctggatcccggttgactcgaagctttcgctggaggggatttggtcgggtcccgttcgactcttttaagggctggccattaagccaggcttcaa

SEQ ID NO: 95886 - DNA, 484 bp, Glycine max
aaagaaaggacatgtgtcacacaaacttctcaatcaatttacagatgttcttattctggatcaaaatttacaacaagttccacttcctatcaaagagaacccagaaaaaacacctatcaatctcaataaaatgtggaacaatccattgcaaaaaagaaaaaaagaaaaaactagtttaaccaactctgatcagcttcaagacgtcaatcaagttccagtacaactttaccaggaatgagcttcttgtcttttgcctcatgagcttcttttacttgtgttatgggaaacgttttatacacaggtatcttcatcttcccagcttcacatagctttcgaatctcaattaaaccatctaaatcagccctcatatatgtccatgagtattctattccatgagagaatcgatatagaagctgttttttcaataaaacagctgtagctgcaggaagcccaatagtcagtccatatctatcagacaatgatg

SEQ ID NO: 95887 - DNA, 203 bp, Glycine max
ctacctgctaccctacgcaagtcccggagaacacacaggttgctggcaacctaacagaatagcagatcatctccttttccccgacttgcaactatggaaaccgaagccaccgaacgggcagaggttccggacagggtagtgtacgacgtagctggtcgccctatcacggtagccggctacaaggaaccggtgcggagcacggg

SEQ ID NO: 95888 - DNA, 281 bp, Glycine max
agccgggaagggggaaaaaaaataaaaacctcaagggacccgcccttgggaaaaccctgaacgatgtgcacaaaaacccttacgtataccaaactcgataacctggttcctaattggcgggtgggtccccgttaaactggtcatcccttggagcaacgtctggggaataaaccccccgaacccgaagggctcgctgcttattgatttgggccacctaccactggggcttgggccccaaccccggggttggccccccccaaataacgggtccctttgggaaa

SEQ ID NO: 95889 - DNA, 472 bp, Glycine max
gaagagaggataaagttctgaatattgattgaatgaaaaattacaatacaagtctctatttaaattcttattaagacaggtagtatagcacacgtgtcaatctataaaactgactaacaaaatgaataaaaggctaactaactattgtgtaatgtaaattacattttttaccatacccgaagaaatgtggcaaattcctgtagggacataaaatggtttttggtatgtggctagatactcatgacatgaaagttgaagggttaattaattatattattacagctgcccaaaaaggaaaaagttactgcaccgcacagaaaatttgaggaagaaagtttcctagagctatatgcattttagattaggatttgttgtagtaatgaaaaatattgagttaaatagtgattggaccctaatagaacagcaccattggagacaaacctcagaaacttttggaacagcaccattcatg

SEQ ID NO: 95890 - DNA, 549 bp, Glycine max
  unsure (1)..(549): unsure at all n locations
gttcgtgagagaataagcagtaaggactctccttagtaattacaatcacactctaattaagtaaacttcactataaatactttccataaactacttctaatttatacataaactaattttaataagaaatggtttaacttcttcaaaaactaatctaaactcgtaaaaaaagccatttttttctttgaaaataaaagattacacaagcaagtgctaggtgcatagatgcacctttgacagtggtgcatattagatcaatcaaacacacaggccaagtttaaaatagaatgaaataaaaaatgttttttaaaaattgagtttttaagaagccagatttgcttcttaaaaaactaatctgtttttttttattaaaaaaaaaaaacaaatacagtttgaactttgaacagagatactaaaaggcaggaaactgcttattttattaaaaaaaaatcttgacaaacaaatttaaacacccaatatctcanaatattaaaaggaaaatttagaatcattcaatctctattactaaatcatccaatctctattact

SEQ ID NO: 95891 - DNA, 262 bp, Glycine max
gagatgacaagtctagtaggtaaggattcgtagcatggagcctaatacaatagcacgcgatactgcttcgtgaaacgatcggccagcgcgcaaccgagtcctcccttcaggccggcttcccagtcatcgtcatcagtttccgctcttgcccgagatgtcgatttccaagatattctttccccctttgatctcggtaaatgacggcatctgtttcagcctcaatagttccgcatccttcgaaacgtacgggtcactcttgacc

SEQ ID NO: 95892 - DNA, 307 bp, Glycine max
agaagcaaatatattataccatatgtaggtaatctagcgatgatgaaattcacccgtacaattcaagccaagcccataggtcatgtgcatcactcatgatcacactgaaatattcaacctgtccctttcagccattcattatctgcaccaacccatttacactttctatattcttggcaaaatcaggaattttgtcctggtaaaattcctgactttccattatacccaaccttgacaaaaaccaaaatcaaaagggtcaatttagattagaaacttgaaggtttcccctcaagtatttgcataggcc

SEQ ID NO: 95893 - DNA, 124 bp, Glycine max
cttcaaaatgattcttcattttcaggctttctgtcactatttacatacatgaaatgagccccggtgtttaagtcgctccattctattatttacaatctcatgctgcgtatttggtctaaaggtg

SEQ ID NO: 95894 - DNA, 338 bp, Glycine max
gggaaaaaagaaataaatttaaacattgttgaggtgtaaatgatatcaacatcaaaaaaactttacaaggaaattatgttcaacttaaacctgcattgagcttaatacctaaatttaacctaaattgattatggtttagtgagtttggaatttccataatccaaccaccccaccaagccattattttaaaacaacttccccaaaaatttttacatgctacaaagaaaaaagcacataaacaatgtacaaaaaaaaaaaaattttttaaaaaaagaaaatttttaacttatgggaaggaaagttaaaggccatgaagatggcctgatttaaataaaata

SEQ ID NO: 95895 - DNA, 202 bp, Glycine max
tcttctcactccacccacccacacacactctctccagcgtttgtggcaattggaattgagatattgcaagtgaaatgaaggccaggcacatctcattcttctcttgatatttctgatggcactcgctgcaaacaaagttcctagcacatcctattgcgactaaaagaacatctctttgcagatcacatgaaaaacactattt

SEQ ID NO: 95896 - DNA, 218 bp, Glycine max
tcctttttttttttttctgttataggacaaagaaacatcccatttctttgcattagacgtttatttaatccatgaaatccttgggaggaattgtattcacataatctaacattacgggatgaaactgctctattgcttgcacgtatgctatgctgaaacaaccttggtactataggactaccatccaaccaaactatgcagtatcctaggtgccttca

SEQ ID NO: 95897 - DNA, 226 bp, Glycine max
ggccaaaaaagggtacaacatttttttagcaccacaccttgaagcatggttattggacaaaattttttaacagcggcttagttttaaggtttcattatgcgggtacacttaaactccgggttttgggtaccgggtaaaaagagctttaactttcctacccaactttgataccttttttcccaaagggaattcagaagatgtttcaaactttaaaaaattttggggc

SEQ ID NO: 95898 - DNA, 225 bp, Glycine max
ggaacagagaaaagggaacatttattcacatttttcactacatagagctgactccataaatggaaatatagattacatcttcaatattggggagggggcccaacatactatcactttaatacaggggggttgccacctacggattaaactggcctaagacatgacaaaaaaactaaaaaacgaatgatccaataccccttaatggttaccgctctcccaaaggtt

SEQ ID NO: 95899 - DNA, 231 bp, Glycine max
attgaagcactgcctaggacttttgcaaacttattgagacagtggatggagcttatgcagcattcaactggttgagaacttttagcgtgcaagttccattttgtgagagagggtctgctccgtatttcatatatagtagacaattgtacagtgactatacagtactacatttcaatgtacagatgcttcttctttgactacgaaaaaaaaaaaaaataaattatatatatt

SEQ ID NO: 95900 - DNA, 323 bp, Glycine max
caatggttttaacttttaagtgttttaactatataaagtgcgcaagtaagccttacttgttccttttatgctaacatactgacaaggagtgttctagttttcgtttccagcacaattttgaaaatgcatgtatagtacctgatgtagcatgcggatacggtattggatcaagtcgctgtgtattaagaactgagcgggatggattgtaaaaaatatatgatagtttagttcgctggcgtatatgttatgatgatactgcttgcgtgtatatgcatggacattgctattggtttaagtgtttggattttagggttcgggaagta

SEQ ID NO: 95901 - DNA, 335 bp, Glycine max
ttggtgtgttgttttcgattacacttgtacgctttcatctcccttctttctttccttttacttccactctctctctctctcctttgtgtttataatttgcttcttcatattgcacgtaccgacatgactccaacctgatggggttaaacactgcttctgcgtacgattcgatgccgctactccttcttcagtctctacaactgagtttcatataaagctgcttactacaaaccaacaagattaactcagaaatcatcttttgggacgatgcaaactggatatcttaaagagcactaaggaaatgcgcacaattttgagggcacgttgtcttctgc

SEQ ID NO: 95902 - DNA, 142 bp, Glycine max
aaatccaaactctactccatatattatccaacaagtcacattaaagtttaaaaaaattaaggaaaaaagggccaaacaaaactatgaatcaatggaagtaatgctagttaaaagacttttttttgggcacatctaaatgaaa

SEQ ID NO: 95903 - DNA, 522 bp, Glycine max
aaaagaatatatattttgtgttaatagaatactatactgatttatgtagagcattttgctttgctaagcattttggaagtgttgtagtatactgtatgttatgaaatgattatctctttatttatttaattaaatataaatgaacgagcatttattttatagtgatagaaggtcatattgatttatgttaggacattgtgcctctctacacattatagtgttgtcgtgactatttgatataacatgataaggttagtatttggcagttttgaagttttttaatactcatggtaagcttacagatttctccctttttatatgaaaagtatgaaacaaaagatggttgagctattattttctcacgcctatcatttgaattcaaatgcttaaattgtttggattaagttggtatttggttagagtttcttagttcttttagactttcctatttcctagataccttatctcattgctattccgatctaattgcttctatatatttagggtaggaaattctggaca

SEQ ID NO: 95904 - DNA, 369 bp, Glycine max
gaagactaacaagttttctcattttattctcaatacaaatgcgagatggaataaaaagcttataaccagcacaaatggaaaagctgttcaattcatggcatcttcctatctaaactcaagcttggccatcaattaacctgaggcacaacttttgaaccgaaagaagtaatgcaagcaactaaaaatctaaatttacatttagtcagttcaaattcattacagaaccaaagatgattgcgaaaaaagaagaccatatatgtaaaaaaaaaaaaaaacttgatgatttctacctcagctatcaacttctgtaatggtagttttctagcccccagccatctcaatttaaatctgaatctgaatattatgatt

SEQ ID NO: 95905 - DNA, 280 bp, Glycine max
ggggggaacaaatagcaaagccgtttacatttcaaaaaatcgttaatgtttccaacaactttttcccaaattacttttgcaaaccgccccattatgacggaaataatagtcaatttccaacaaattcaactccccgtttttttgtggagggggaaaagccccccgggggatttttctttatttttttaacccccctggggctttgggtgagggaattatgagttaaatacccggctggctccgtgttaaaaatgatgccaaaatttcccttacaggaatt

SEQ ID NO: 95906 - DNA, 141 bp, Glycine max
tttcatttttatgtgccaaatttagagtttctaacttacattacttccattgattcatagttttgtttggcccttttttccttaatttttttaaactttaatgtgacttgttggataatatatggagtagagtttggattt

SEQ ID NO: 95907 - DNA, 174 bp, Glycine max
aaggaaatgaagacataaccgtggacaatatttagttaatcgcaaggaggcccttcgtaaaaagccattaagaagatccattgagggcctaatcacttgctcattgaataaggggctgtaactaagcccttgtttcaaatgtgtgcatatttctttacaacgggctcctataac

SEQ ID NO: 95908 - DNA, 428 bp, Glycine max
gagtatgttaaagtcaattagcttggcatggcctgctttcaaagctttaaaccagaaggaccactagaggttttgctggatttgggtctaagcgtaagccaaccagaaaggatctagacaaatacgacattgttgtcgttggtggtaacctcagatccatcttctccagacatcttgatgacgatgctcacggaaagtactccatgatggttgtcttaaatgagccagttaaccagttatggcctttgagaactgtctatgaacagcagagatgttccaaaactgattatatgatgaacgctaagcatgggattaatatgtacaccgcttatgaaatcaccacagttgacaaattcctttctgaagagaacgctattgttcttaagaacggaagaaagattcaatatgagcaacttgtcgattctatg

SEQ ID NO: 95909 - DNA, 211 bp, Glycine max
aaaaagggaatttaacttttagattggttccatcgaaaaagattgaatagtatattgggaattacgtcaaaattttgtgcgtaattcagcaaatgaatccacaatttatttaataggcatagctatagattacttacagttcggcttggattgcttgccttttggggcttggactctttcaggagcgacgttatggccgatttggtcacca

SEQ ID NO: 95910 - DNA, 453 bp, Glycine max
gtcatgatgcagaagctcgtgcttcgtagtgcacagcacggcatgcgcgcatctgcggtgctgggcgcttcttgtcgtgtcatgatgactaccgagtcctctgtttcctcctccatatcggaagtatctcctgtttttgccaaagtggcgcgcgacattccgctgaaagtggtgccgcgagccgagcgacgagcagcgcgcaaagccgctaaacactcggctgatgctgttgagaacaaggtggtgcgtacttcgtcacttcctgctcggttttcgtttgcattgctggccggtagcatctctggctccattttgtggcactttatgctcgatgatagcactaaatcgcgtgtcaaggagacactgggcgccacgttccttggagacgtctatgtatttgtggccaagaaggtgcaggagacagtcaagccctttactgatccgtcacgacag

SEQ ID NO: 95911 - DNA, 278 bp, Glycine max
atgcttatgacaacatcaaatttttggcgtcttgtatcacgaaccgttttctacgtgcgtttttaacgggcgatatacttactgcaagtgcagtacacttaatacatcttgtgttctatatcacaagcccaccaccactcacaggtgcgggctgctagaaaagccactagcagcaacacctccagtctgctgcgcaggatggtgcgacaaccgaacactaacaaagccggcaaagcccttcttcttctgttgttgattttgcatcttaagctggtgca

SEQ ID NO: 95912 - DNA, 404 bp, Glycine max
gtaactcgttcttcttctatttttgttttttgtttgtgtttgtttcttctctcacctgaaaatgtcttgctgcggaggtaactgtggttgcggaagctcctgcaagtgcggcaacggctgctgaggctgcaagatgtacccagacttgagctacactgagtcaaccaccaccgagaccttggtcatgggagtggcacctgttaaggctcaatttgagggtgctgaaatgggtgtgcccgctgagaacgatggctgcaaatgtggaccaaactgcttctgcaacccctgcacttgcaagtgatgtgctgggagatcaagcttcaagcacagattgcccttaattaggaataaagataaactattaatgtgtatcttacaacttatgtattatgtctgtgatggtt

SEQ ID NO: 95913 - DNA, 387 bp, Glycine max
gtgtttggctacaaggtgagtgtttacatttgttctgttcaggaataatttgaatatccttggttttggttcagctgctgttctatgcctcaaaatgtcctcaggtgcctttctctccctctcattttctcttgctttggtaggtgtttgataggcaaccagtattatagaacgtgtatgtaaagggcaaggggtgaaaaaatggatataagtacaaagctctaaacttttagaaagcaccgatatgacacaaacccaaggacacgacgtgtcttaaaaatcacaggacatgacacgactataatacagtatataaaatcaatattaaggattaatttggaattaaaagagagaagtgatactattttatagcttatctaattattg

SEQ ID NO: 95914 - DNA, 182 bp, Glycine max
acaaacctgccaatgttggaaacttcatttttattacccccgggggtttaatagggatatatatctaacttttacatgatctgcattatagggatgccctaaacatagggtctgtacatgtaaaaacaaaactagttttttggggaactaagtacaaaatttgacaactaaaactggttttt

SEQ ID NO: 95915 - DNA, 178 bp, Glycine max
accaacagacgcagaatggcttattaattataggtatacattacataatattaagatacaccgctactctacccttacgctttcttacttacaagtggccagccactacgcaagggaccataagcgaagacttatagaagctaaaccaagaagctacctcgcgtgaactggcagaact

SEQ ID NO: 95916 - DNA, 313 bp, Glycine max
aaaacaatgcttaaatgcccaatgcaaaaaaagatcaatcagtggcaaaacccatgtaattaccgacccattttacagactggaacctaaaacctatgtaattaccgacccatattagttttcaaccaaaaaaacttttacccggggaaaacccaaaccaatcccactaaataattccaattttaaagttgtaagggggagtccaaatgtaaacccagaaaaaaacccctaaaaatgtttagccctaccctttagctttctccctacgggcctactttttttttgcctaagggataaacagattccaacaacc

SEQ ID NO: 95917 - DNA, 458 bp, Glycine max
aaacttgcaaaagtagatgtttcaagtttaataaaaagggccggattggtaccatgccaaaaaccagtacacagaaatattggtagagtcaagagtcgaattgtcacccagtatacataatgtaagtgtagcttctttttacaataagtggtagacaggaagaactagagcattttctctacacaattttccctttctttgactttacaacagagctcctgccagcgttagtaggaatgcagatgatgcttgcaacagatgcataggttcagccatgcatacaaccttgttctttgcctgctcatcaatattatagtctttctttcaatctccccaacatatttaaaaggtaaaaccgtaaaaaaacttcctaacacaaaatcgaacaaccaactgatgacatgtaaattctgacaaagttgggatcaccaaaccaacaaagagattcattctgtaac

SEQ ID NO: 95918 - DNA, 449 bp, Glycine max
gagaaagaatcgatgtcatcatttgacactaaaaagaaaatatgaccaattcagtgactcttgttaatgaaacaaattttcattcatcctgagaatgtgagagtattgacatagcactgtatacctatgaagcaccaacaccgacacggacaccggacacgacacagatacggacacgtggatacctgtaatgtccaaaatatagaacgtaatacgggtgtcgtgtcggtgtcggacactgacacggacgcgtgtcggacaccagacacgacaagggactggagtgtccgtgcttcatagctgtatacagctaatgaaaatttctcttcatcgccataagatcactgatttccatcatcagaatgtcttccttcacccctctcatcactgggagacccccctcggcccttcctctgattccaccttgcccaaacccatgatgaaatcgc

SEQ ID NO: 95919 - DNA, 228 bp, Glycine max
ggcaagaaaaaacagggttctaaaaacctctatggaaaaggccctaaaagcttacaggcctaaaccataatcaggaaaaaaattggcctaaactttggcccggggaaatatgccaaaaaaaaacgggggccaaacatttttcccccaaaccaagggactttggggggggggaaacaaggggggaccctacccggaaaaaaaaggccccaattttgggaaacaaacctt

SEQ ID NO: 95920 - DNA, 426 bp, Glycine max
cgcactcttctgattttttcatttaaaattaagtacgtggcggtgagcatggaaaatgcaagcacgtctagcttagcgagaacgaaatcggatcagctactggagacggtggccacaacagctgagaagtcgccaccttcggcggagggaggcggggtcctgtcaaggaaatcgagctggaggatgacggcgtcgtcgccgggtggcggcggtgggagaaacacatacataaggaaggcaaggagcgctcagttgaaggtagaggtggacgatgttggcagcggcgtggctcttagccgagctttcagcgccagcttgggcctctcattctccttcaccggcttcactctccctcccgatgaaatcgccgattccaaaccattcagcgacgatgatatcccggaggatattgaagctggaactcct

SEQ ID NO: 95921 - DNA, 265 bp, Glycine max
gattggaaccccattttaggggaaagggtaaaaaataatttgattaaaaaatttggtatttgaagcctttattcactttgcctctatacttttcagcattaggatcaaaatttttgggatttttacatataaagggttttgacattggttttaaaatatgggggcggcctttaccatgggtcaggaaaactgattttggtgaaatggttgccaataaaaccatgggaagacctaagggaaaatttttttttctaaattattgggc

SEQ ID NO: 95922 - DNA, 286 bp, Glycine max
aaaacccccttttgggaaaaaaaaaggggctttatttaaggggaaaaaattttccaaactgtgccaaaaaggcaaaagggcccttttaaacccaatttttggaaattttaccggtttaaaaaaaccccgcaagaaaaggggtaggggggtaagaacccaaaaatttttttttaaccccaaaaaaaaaagcccgaaaaggcccgggaaaagggacaacttttggaaaaaaaaaaatttttttacctttcccaaggggggggggaaaccttttggggaaattcggggg

SEQ ID NO: 95923 - DNA, 405 bp, Glycine max
cttattacttcatttttgttctctatcttctcttttcttttttcgggttggggctcggacagaattaggatctgacaatcactcttcctctagtcctcttgctcttgccatcacattttgtgcatcgtcttcatgtcatgtatgacacacatattcaaacattcacacagcaagaagtagaggttaggatcaaacatacgtactattttcataaaccaatctcaatatctcaagtaataaaataacaagtaatacattgattcacagatagcataacagctaaaaaatacaactaaccaacacctataacagacaatttgcgaagggttaaacaaacccggaccagacctagagtgcgtacagaaaaaaattatcaatatatagtataaatgtcacacatcactg

SEQ ID NO: 95924 - DNA, 506 bp, Glycine max
atagaaaatcttgttgttgccattatagtaatgtaattcaccaggtaaaacaattttcaatcatcactacaacaagctttggaattctccttgggatcaattccctaactacaaaacaaacagtccccactgctataacaaaaaaaataaattaattgctctttcagttgagcgttttcagaactgttcaccatgctatgcaattgatatctacaaaccactaaaatttcatctatgatctactttccttttgttgtacttcttttgatttggagattttgtgaatgagcagcttccttcttaacagatttaggaacagatttcttgtcttttctgacaatcctccgtgccaatgccttgagcggaactgtaacgtccaaaggaagaagcacctcttccaactcttgccaatcaagatcttctgagtcaccatcttcatagtgaaccctgtaccacccagaatctttgtcgaaatcagttaccatacctgagaaatatcttcccat

SEQ ID NO: 95925 - DNA, 376 bp, Glycine max
gacagtgcaatgcaattgaagaatgaatcctcaacaattcatttccagagatttgaatttctttcaacagtgcctgaacttgtaaacattacaatgactctagctgaatacatatatttacagaaacaaaactggtggctctatttgccttattgtgttcgtacatatctaagcacaaccatcttaaaatatagtttgctcacctagctcctgaccagccatgccctccctgagaaccctcgcaaaaaactcttccaatgtatcattaccatagctaggtgtcttctcagcactgtactctccagtctcgggatccagaagcaacatactttccgctgcatagtatcttccaatcttcccaaactcagcagcatct

SEQ ID NO: 95926 - DNA, 453 bp, Glycine max
aaggtagtgttaaggtgaatcagaagttattgtacaatcgaatgtaaccatgcccgagaaacgcctctgaaatcgtttgacgcctcgctgttaaagaatgcccctaacccatatgttataacaacacacccgctatgctcgtacaaatgttccgtcgtttttagttttccttctctcgtgagatgcaacaaaaacgcccttgcctccaatttttgatcgatcttccgtctatatctaacaaattttgcattccagaaatggcgcctgctttgaaaatgtacaaatgtgtgggatcggtccatgtgtaccggttcccatgttagtgtgatgagacttctctagtggaagaagtacttgctcaacttgagcctgctgacgtcgaagtcgcccttggccgggacgtcggggaacttcatcggcagccagacgtaaagtttcttctcgaacttcttc

SEQ ID NO: 95927 - DNA, 290 bp, Glycine max
aataagaataacgagtgaagtagcctattgttcgttaacaacatcttggtaaaagtattgacagccatggcagcagtagctcagcatgtcttgcttcctcctatcgacagtagctttaatggtagccagacacctcctggaaatgaccaccaggattgaacttaagaagaaagttgggcgcctccttttccaactgggacggctcgacgtccaactcccgcagacccggcaagtccgacgtcttgacctcgttcatgctgagacgcgtggcccagtcacgcgtgaattta

SEQ ID NO: 95928 - DNA, 123 bp, Glycine max
caactccgcaaataaatataaatttttccttgcgtatagtccgagtttgacaagcaggccccagccggagtgtggtcttattggcatacggcacatggcacgtgagagagagaagcgtgtgaa

SEQ ID NO: 95929 - DNA, 126 bp, Glycine max
gagagagaaagagcggagttttcacacacgcgcgatggctcacatcgcgaggaggaagatgggactgccgcccaaggcggatctggctcgtcgctccggcgagactcaatccgatgcccggcggag

SEQ ID NO: 95930 - DNA, 387 bp, Glycine max
tgccggcctttcgttttttttttttttgcaaaaatatgcatcaattcaacaataaacagggtttccggtctcatattcaggtcctatagaaccattggcactgactgctaaacagcaaatacgcaaaccacattaaactgagaagtaccgtttactacaatataccacatgctattctaacaactagaaagtaacagtgccactgaagccttccggcttaccctaaaacctgagatcacctatgttcttgaccttcgcaccggcgaacggatgcaatatctaccatattcaggactccagggtttcccataatcaggactcttgcgcctttcataatcaggactcctgcgcctgccataatcaggacttttgagcctgccataatca

SEQ ID NO: 95931 - DNA, 108 bp, Glycine max
ctccatgcacaccaaccatcccattatattttcctaagttttcaactcatcatcaattagcacttttgctgcagaatgcttgaggagaacaagaaccatgaatcaact

SEQ ID NO: 95932 - DNA, 204 bp, Glycine max
ggaaaggaaaaaggccttttattatttattcataggccaagccttattttcacgcaactacttcggtaaagggcccccatagaaaaaaggccggggattgacttggccatagcattggacaaaaaaggggttgaagggcaaagcttgccaaaaagggctcatccctacaaagggggaaattccgatttaggaattaaaaggggc

SEQ ID NO: 95933 - DNA, 394 bp, Glycine max
ggctgtcgcccttttttttttttttttaaaggttttggctcggagtgaatttcttggggattcagtaactaaaatcttgtatcccatctagctaaaattggcttcttgccattgtggagaaattttctcaactcatcttaatcgccaatagtcatcatgatcatgaatgagccttgaaagccttgttttgggagcaagggatcgtatggcttggaatcattagaagattgggaacatgtcctttggtgggcgaaagaagaaacaacgttgtaatggaccaaactaggattttttttgaggaaaccacaatgcattcatccacaccattatgaactcccgaaatattgtcgagggggcatgagtcaatgcatctatttcttgccagccttttggg

SEQ ID NO: 95934 - DNA, 333 bp, Glycine max
accaaaacctttaaggcttattttcattgaggtgctgccatatatcaagttaacaagtctcagctatatacaacgagatacggagttcaaattatataacaagcattatgaacttttattggttaatttgagggcaacttttcatggattattaccacagaactttacaaaccataactatacacagtaactcagatagatatcaatactttagtttatctccgtatagctattgcaagaccaaggttttgatggacgaccaaccacagagatctgaacacgtaaaacctcatgaacagcaccttggcgaagcactcccaaaacatgctcatc

SEQ ID NO: 95935 - DNA, 315 bp, Glycine max
ccatggaaaatcatttagacaaaaacccgtgcgtacgcacgggttaccgattagtttaaattttttattcacgggtaacaattgggtggcctaaggcagtaaagttggatgatttctcttacaaaaatgtgtcacgaattaatcgggcttaaacccgagaagataatttggtaacaaccttaggaagcactttaacagagatgcctggtaacactgggagaagcttttggataatttgaggaatattcagcgcctgatcagatgttcttgatagggaactttctggggtgaaaaacttcaccaccattcggacat

SEQ ID NO: 95936 - DNA, 474 bp, Glycine max
atttgcagacaatcctaggttatttaacattggctatttggattttggaggctgagtggagcggctgttaggtcctttatgtgctgacttcacagatctatgagtattccttttcaacagaaaatgctcgaaaaatggtgtcttttcaggtttcttaatatatattgaaacatcactttatccaaatctagctagaggcaataaagaccacacataatacagagagagaaattaatatttggatgttaggttgctgagtggtgttcatgttgcctatattattatagtaattgttttatttagatcatcagtatttagcttccagttattcagatccattgatcatatctatcaaatactataaccttaaacttttacctaatgttatactaaagaacttcagcctgcagttttgtggtgcctaattatagcatggtagataatatgaggatcttttaatattgttatcttgat

SEQ ID NO: 95937 - DNA, 103 bp, Glycine max
gtttcaaatttcaattcattactctccaatcccatagcgtcgccgttactacaccgtccgatttccattccccatttccaattacacttcccctctctatgcc

SEQ ID NO: 95938 - DNA, 459 bp, Glycine max
ggaagatattgcagtagctaacaattataaatataaattattcagtcaaaagaaattcaaccataagcaatagccaatatagaatcattcaacaaaataattaaactaaggaaccaccaaaattattcaagctatctctcctgtccaaatgttaaatgccacggttctgaaaccacttacataatataagcaaatgcaggtagcttaatttcgatatggcaaaaccaaactttgaacataatcatgagagacaaatgcagagaaagacgataatccattgttgaaaccttccatgcggtctatactattatctctcttatcaaccagaacaaattctgcaccacctccatagtcttccagcaacaggacgtcgtcattttcagacttgcacaaaggtaccactggacaaggtggaaaatctagaacttgaagatgatgatagcttacattcagcaactg

SEQ ID NO: 95939 - DNA, 416 bp, Glycine max
ggctcgagcttgaatcacaacaacaatccatacttcaacacataccagcatggctgaccaatttatcctcggacgacccatcggcgaaggtgccccgggcgagcacggcgccggcaccggactctctggcggacacggcatcgcgtctgccgcgaacacccagtcgggcaagtacgccgaggaggagcgatcgggcttcaacgccggtctgggcggagagcacgcctcgggcggcatcccgcacggccactctggctcggcccaccccatcgccgacaagttcacctcgggctcgcactcgcacaccgacggctccggtctcactggcagctcgggcggaaagctcgacaacagcctcgacaactacggtggccaggccggatctggctcgcacggatcgcacagcggcgcccttg

SEQ ID NO: 95940 - DNA, 257 bp, Glycine max
gacagaactaagatgtttcccctcaaattttttgggttgagaaaactaaaatcttttcacattcaccgaacgaagacaacaagtcaacagcatgaccagaagaaaaccccacccgattatgaaaaccaaaagaaaatggggggcataacaatcgggaccctttgcttggggctatttaggatctggttggataccagattaaaagtccttttgatagctcttggaaaccttttttctggaaaaaaaaaacctttttt

SEQ ID NO: 95941 - DNA, 465 bp, Glycine max
cggcttgccaaagttattgggttgtacgtacatggtgctgtaaacgtgatcgaatacgccatactcctccgagaactacgtttgctcgtacgccagtcataaacaccacttcactaccagcttagtgcagcgtcctgagcgactgctcaattgcaacaccaagtgcaccaatacctaccacggtccagagccacttgttcttgagctcgtccatgctcggccagaaggcgttcttgtcggcgcggaacttctgcagctctgcaaacttgtcgggatgagactcagagtagcggcgcacttgatgctgctccttctgcttgtcaccaccaaagaaacgcaggaagcagtagttagcgatggggccgagcagctctaccggtgctagcatgtcactgccatagagcatgacgatgaaagagatgtgaaccagggcgtctccgagatagttcgggttgcgcacaatac

SEQ ID NO: 95942 - DNA, 334 bp, Glycine max
gcaaataaaggcatttgtttattccattactacccgtgtttacaagggaaatacaaaagattcctatgattcatttccaactttttttctcttttggctttccaaaaatgtcacgaggtacaatacaaacgatgattccagaaaacgttgaaaaagcatgataccatacgacggctctgtttctaatctttatctttttcttctttctttgccttttccccccaaaaagcaaatgaatgcctgttattacccatattttaccccacaaaactggcttttcttcttacaaagtgttgtctagggaagttgctatcaacattaaatttgatcaatc

SEQ ID NO: 95943 - DNA, 374 bp, Glycine max
atgctaagtgcatgtcattttataaaacaggaagtggctattaatctatatgcatgacgagtaaatacaaaatgctaactagttgctcaaaggcgttagtctaggaattaaaagtagaaatgtgctatgagagagtgtgacatttaatgttacaatgtactatcccactatgatttccaataaagatcttttatttactgatgagtgatgtttattctccaaattttcttacacattcttctacttctttagtgaagaagcgaatgcatttagtgcattggatgcataggatacactgcaatacttgccatgctaagcaagaggactggttggagaatgttgcccgaagatttagacttggacagaacatatat

SEQ ID NO: 95944 - DNA, 287 bp, Glycine max
ggaaaccgggataccaacttaataggaccccattaaaacaattcaattaacatttttccaatacggaaaaaataatatttacattaaattacaaatttcataaaaattccaaccaattgcataagcaatttaacatagtaaattactacaacttatttaatcattttgacgtaccacttttattgggacaaaataatgaaaaaatgccgactaaaagtatttaaaatacattgggcagcaattatttcaagggccgactttttttaaattatcatagggataatttt

SEQ ID NO: 95945 - DNA, 451 bp, Glycine max
aatagaaattctcgctataatattgaatcactgacctgttttttttaatctaatgtacataaaagcaacttcaaccatcgtcatgataataatgccactaaacattgcctcttctttcattgacctacaaacaaaccgtgaaagcaccattctatgggtctaacataagctgcataattagctacaacaacaatattcacatgacagcctacgggcaaaataccaaacgtggccaatacatttagtcgagtattatatatgaagcaactagattctactggaaattatacacaaattgtatatcactggcaaactcctgattgccctatggatgcctcgtaggtaaattttttttcctcacacttccattcatagaacaagagtaactagaaggatgcagccacaaattctttcttccctccgtaacttttttataggaaatatgataact

SEQ ID NO: 95946 - DNA, 223 bp, Glycine max
gaagaatctacagatattctgcctgaattggcagtagcactgaagccttcccccaatgtgcagtggccgaactctcagcactatatatcagcgaagactcccattagggcagcctctagcgctgcacatgccgcttacttggatccttgtatgaggcccatggctggggtgtcgtctgggatggaagctgagttagcagcgggctcttcagttgttgcaacca

SEQ ID NO: 95947 - DNA, 468 bp, Glycine max
cggctcgagtttagacctaactatcattgctattattaataatggccactaattatttaaatgcttaaatatgattttattcttaataaatatttaatttttgtatttatttttaataattttttattttacattaaatatctaataaaataaaaattttactttgttcttgatacttatttttagtttatgataaattagtgaattttgtatttgttatttaatttttttttatttattaatagtcagatctaaaacaaaaatttgttaatttattagaaaataaatacaaatttttttagtttatcaaaaacaaataaaatatagaggacaaaacataagtattgttttataagagattcaacgtaaaacaaatatttattaaaaaataaacataaaaattaaatatttattaaagattaaaaatatatttaaaccttatttaaaaatgataatttcacatttatc

SEQ ID NO: 95948 - DNA, 104 bp, Glycine max
tctacattcaaagaagatttttcttctagacgctaaaacagagaatatgttactaagtgctagtcggaatctacaaatagctgatcctggagtcgctcgggttg

SEQ ID NO: 95949 - DNA, 325 bp, Glycine max
ggcgtccggactgttcaatcggtctcagcttcccacaagcacaccagatgttcgagttcagctcggcgaagagcgtccacatgacatctacctgaacaggactcatccaactgctcaacacgcttacaagaatggtgacaccacgcactcaaagactcacgtgcacagtgcctcgctgttcgacgagggcattttgagggataccctggcgccctcactaactctccactcgggtcttgcagtcattgcatatggcatagcacgatacacgaaccgcgttgaggtcaaagattggctctggccgagtggccaggtcgtcaatgcc

SEQ ID NO: 95950 - DNA, 120 bp, Glycine max
gttgagaagccttcaagcacaaaatttatttccattgttgcttcttacaatgacactccaaatgagccaactcccagtgatcctatttggctataccatagtgatcaaattgggcaccta

SEQ ID NO: 95951 - DNA, 268 bp, Glycine max
caaaagctacgtcgatacattgtttgcctcatcggagtacattataccaatcttaagagcaatccctccattgtgcttgctcgctgcaccctcccaccctactgcccgggccaacgcctagtgcttggtggcggatcccgggccctcaagctcgggcctgtggacgtacttgcccgggctctcctggaagacgagcgagtggggtcctcccgagtcgagggccttggggtccgagaccggcgcgccgcgctcgaagccctcctcgacc

SEQ ID NO: 95952 - DNA, 289 bp, Glycine max
aaaaaataaagggttattaaaggtacactgttttatagacgtaaagaaactacaaatttttaccctaaaaaccggttcttttttatacataccctttgggggcaattgggccccctacaaaaaagggaaaaggtggggggaaatttttaatctttcacaaatttggagccggctgcagagggcattctgttttctaagataatacatatgaaagatgttacatatatagggtattaaaacaggggctggtactggagttgaaggagcaacacggttttcagctggaatt

SEQ ID NO: 95953 - DNA, 428 bp, Glycine max
acattgtcgcaaaaaattcgggttaattgcaaataatactaaaaaatatgaaatcatgaaggattatgagtctgttagattacaaactgtcctacacaaccatttccatcacaaaatcctgtatactggtttagataatctacattagtatatattaatttctcaattcatgttacagttttcgcaataagggtgggatcaaaaggggaaacatttacagaaaatgagagcaacttagatgcctctaaaagtaggcatcccagatgcccctaacaggattttgttggacctgtgaccatattgacaacgcacaaaattgagttcttccttttcccatgaaagttcctgtatgccaagttaaaaaagcaagcatagaggcagccttcatgaatgaaaaaaactgaagaaggctcggtcggaatctacgt

SEQ ID NO: 95954 - DNA, 150 bp, Glycine max
gtggtgatatagggaaattgtgatttgagtgttcattttgagcagggtgatggatcgtgtgacgatggcgtggctgctgctgctgctgttgagagtgatgttagggaggagattgtgaaggggttgagtgggcttagagttggtgaaagg

SEQ ID NO: 95955 - DNA, 391 bp, Glycine max
gcacagaaacatacaaatttattacatacataccatgataagacatgtatttgaatatacataatagactatagcccaaatcttataaaaattcaaatcttttgccaaagaacccaccaccggtgtgtgaaaaactctacccagtcctaaaaacaaaacctacctaagactcagaggcacatctacgtcattcattcccaaaggccaaatcaagaacaagcatatataagcattatcacatgatttcatggttgaccacaaaagagatcaccagcattatagtgtttgaggccttctatgttgtcaacatctttgtgtggtgaaatgctgcacaagtaacaactgatgatgatgctttttccaggtgggagaaacacacaatcaagaagat

SEQ ID NO: 95956 - DNA, 464 bp, Glycine max
gtacgatcatcctgaaccacaatttggtttacaagacacgcacgaagcccaagaacagcaagccatttttcaacgcgggatgtgagcgtttcattcgtgacgtgcgcaacaccgaagtgcacattgctgtccgcgatgcgcgcgttcacgaagatgaccctctgcttggcatcatttacttgccactcgaaaaggtgttccattcgcgcagccagatcaattccacgttcccgctggctggtggcgtaagctatggtcgtgcacgtgtgtctatggtattccgcagtgtgcaatgtcaacttcctaagacactgcttggctgggattgtggcacactcgacattcgtcccacaatcaaaggcattgatgttcctgaggatttgaagaatatgcgcttgaaggttcgcaaccgcacaacacgcggtaagatgaactctcgtggcaacaatgaatggtcgacaaag

SEQ ID NO: 95957 - DNA, 357 bp, Glycine max
attcgatcactttgatagttactatgtaaattatgatcccaacacatgtcctctacgcctcggtctcaatcccgctccccgtcctctcatgatgcttaaatagtcctccgaccttattcttccccctttcgccgacatgcttcatccacgccatcgtcctcggtcccttccactgcatcatgccccgattcttgcggtgcaggtgcttcgcgttgtccttgtagtccttgacctggtctacaacgccacgtttgccatcttcattgagacgggtgtctgtcttattgtccttttgcaagaaatcagggaggaagttggacgagtccgagtctgagcccgagtcactgccgtcggatg

SEQ ID NO: 95958 - DNA, 431 bp, Glycine max
ccatacaaagtactagactatttatctgtaccatttaacttatttattaagattggtaaactgtttttctcagttaattaaatttacaaaacatcattcccaaatctaacccaaataacttaattaggggaaaaaaaaaaaaaaacccttattggggatggtccctcctctccttattttaccaagccattatacaacagtagccggttgtaggtttcaccaacacaccagcatttacataaatttacaaaaagtggaaaaaagaaaagttatctataggatagttttaccatatggatgccatcacccttcctccctttatacaaggaccacagcagatacagataacaaatctgcttctttttttttttccagccagctacctggtggtaaggtgctaggagcaaataatgaaaaagatcaaatcaaag

SEQ ID NO: 95959 - DNA, 454 bp, Glycine max
aattggaagagaaggtagttcctcctgaataaattttattaaggttatacatgcaatgcaataatgaatcgtgaaggggcataaaggtagacttagttatatctcgccgaccccaacagctccacgttttttaaatacctttatttagcatttgcatgtggtaatgtaacacggagctatatatcagcatttaatttatgtattccacgctacaaagtacaaattaaaggttatcgatctattccacttttttactctcttgttttttcatgaagggagtgacataataattaataaaggtatagacttatctcccgctgaccccaacagctccacgttttttaatttctttcacaaatgcatcgagatttctggcagatgagccacctacagccaccgcggtctctgcatccttcttccacttgagcgcgttttgtttcaactcgtctgcttt

SEQ ID NO: 95960 - DNA, 364 bp, Glycine max
gcgtaagctgtcgctatagtgatacggttcctcacggttctgcttctcctctcttactctatcctcttccgtcttctgtttcttttggcatcaacaacaacaatttggggtttttatttatttcgtttcggtcaaaaaaggagaaaggagaatatatattatgggaaaaaactctcccttcgcctctccagcttcttcttcttctccgttttctgatgctttttctcgaaggtactaattgaagatcccctttccttttcgttttcggtctccccttttctgaccctcaattttttttttggagcatcgtgctgtgataatatatatactctcttcttttcttttcttttcttttttttttttc

SEQ ID NO: 95961 - DNA, 530 bp, Glycine max
caaaggcgaatgactcagatccatagcgttgatgaaaggaatagttcagagcttcattaaaaatcagaacaagaggataagccatctaaatgtatctcgtgtttcagatcaacaacacgcaatatctcatctctatgagctcatgagatctaaaagctgaacagcttgactacgccgtataaaagcaaaaaatatcacaaatatgaaactattttgctaattcatctgtatcacgaataatcttcattgaaggaagaataattgcagccactggtctatctttatatccaccaccttcatcaatgatcagccttaagccttctacatggagtttcgcgtggtgaccactaacaacaatggctggacttgcagttagttcctctggaatatcccaaacactctttctcccacttagagcctccaccttaggcacccgagtatcccgagctttcaaaagttttaactgctctttcacatcttttcctttctccaaaccagcatgaacagcaatcaatttgcagcatttaact

SEQ ID NO: 95962 - DNA, 289 bp, Glycine max
gggcaaaatatgcaaaaacatgttatttggttcataaatgatggaagccaagtaccccctttacccaaccattttccctacattttttatatacaaacaaagtcccaccccggcacgaaattaatgcaccccattagtctttttgctcgccttgctccgcctttcggggacagcagcagcaagatcctccaacacagtaacggggctatcccaatcgatacacccgtaagggatggacaccccctttgggagcccggctggacccttagcagggaccttttgattaccc

SEQ ID NO: 95963 - DNA, 108 bp, Glycine max
caaccaaaaacgatatgcatactcgcgcacttgcaccttttgcgcactatgcacaggcttagctaacccccggttcctaagggccagccggttagggcccaaagggga

SEQ ID NO: 95964 - DNA, 173 bp, Glycine max
aaagtactagcatgattgtacaattgcaaccttgggaacatgaaattgaaggggccactaccatagatttttcatggtaaggcaacaatggcctagaactaatttttgtataaactatgatcatacttagtccttttcccttctaaacttttagttgcataagggcatttact

SEQ ID NO: 95965 - DNA, 420 bp, Glycine max
gctttggcaactgtcttgagttccgtgctcatatataatttgcccgagacgatacgtgaggctgacatctctcgactctcttttgcggttgagcttgctgaagaattttatgggagagtgaagggtcaggatgttgcatttgaacctgctaagctcttatggctcatccaacgtgattttttgcaagggaaatcggtgcaagaaatggtgaatgaagctctgagacgagtccccaatactgatgggaacaaaaatattgatatggtcaatcaaatccgagattcattggctgttatgggtgacaacagtactgcctttagcttaccgcaaccacatatccagcggacaaagctttgtgatatggaggatgtggagcttgatcaattatatgtcaagagaagggagcaattgaaagagctt

SEQ ID NO: 95966 - DNA, 344 bp, Glycine max
agaaaagagaacaaagaatcaacatcttttccctttcttctttaactttaccattttacacgtccatacatgattgtggcacagcaaagtataacatttaatttactctaaaatcctatagtaagttattatgaaataatacacaagttacaagtaaaatcaaatatagtgcccattgtggcattaaagaacatttttgaggcgctaaatttgtagaagctaccgaagaggtcaatcaccctattttcaactttttaactctgcagaagaaccttttcaagatgaagggacaggccagtgagctatgtgtaaaaataaaaaaataaaaaataaataaagaagct

SEQ ID NO: 95967 - DNA, 394 bp, Glycine max
agacaacgagaaaatttcttgtttagaatcatgagattgttataaccgtaatataagcgacatcctgaatttaacctcatagaaagcgggccaaactactataggggcccctaaattcacctgggcccgtctacctatgaagacatgatagctatcattgtatactcctagctttctgaaatctgaccagaacaatatacggatgcagggataagtatgctggaacttgaatgagatactacacagaatcaccaactgtccagctttaccgagcatccaacacatgtatacatgttcacaagggggaggaaaaactgcatattatgctgggactcatcggtccattatccctttacatcgatgtaccggccgaatgcgggaagctgagacccat

SEQ ID NO: 95968 - DNA, 420 bp, Glycine max
gctgtgcctatgtaatattctcttctatgatatttcttgttgtaaaaataccggctagtagtaaacagtttttttcagactgttttatatgctctcatcaatgctttcatctaccttttctcccaaggtattagatatacatctctctctatgtctcttttgctctctctctctccaccgtctctactagaaacaatatttttttttttgttcttccagcaaatttcactataaattgtttaatattttttcccatcaaaaagttgtggagtgaaatatcctgtattttttagggggttcctaggatttactttttttttttgcttctttggtctttgtcttgattgattagagggcagagctaggagtattcccccctatgttctcaatgtgcatagttgattattattttcaagtgca

SEQ ID NO: 95969 - DNA, 472 bp, Glycine max
attcatttaacacaccacaaaatcaggtccaatagaattcctcctctcaaatcacttatcctcagcctgtcgattgaataattaggaagttttaaaggagtcctgcagttgctgccaatatagtgaccaggaagacaagcaaccttagtgttcaacacatgcgctttcaaatgcagccttttttggcagtgttgagtgtattgctagcatagcatgcagtaatggaggatggtactgcacctgcactgtactaccttttctgatcttgaggaacctgattgagcccttctctaagaggcatatacagtggtggcggtggtgcttctacctccacattatggacctgaagtctctgatgttctgccatgaatacagtcaaaattagtgctcttgctatctcatcgtttgtgatggtcacaccttctgtgtttagttcaaatgagaataatgtaatgtcccttctccaagcact

SEQ ID NO: 95970 - DNA, 199 bp, Glycine max
cacttggaaactaactatgcattttaacatgggatccagtgtattacaaaagaacatcacctatcctacataacagatattgtctgaaacctacttcaggggaaggcatcatgagacactacatacatccatcttacagcacctgcctaaccatccaattgagctcctgaacttaaatataacgctagtgtataaaact

SEQ ID NO: 95971 - DNA, 266 bp, Glycine max
gtttccagaagttgctattcgctcactttctctctctctctagctacctccaaccttataatagtcaaacaccctttctttcttctcccccaaccttcttccttcgacacaaaaatttgccaaactccaacaaaacccaaatccaaataccctttttagtattcaatccaaaggattcacctttgtattctcctcacagtggggcatcatctctcagaagaaatttttttacaaagaaagaggaaaaagaaaagaaaaatgttgca

SEQ ID NO: 95972 - DNA, 217 bp, Glycine max
tgaaactctcctcttacaaaagaaccaacttctaaggagctttggtgacactattaagtctacacttctggcattcagaaatgctattgcatccaatcattcaaagaccccttttcctcaagggggtgttcatcatgttaccaagtatgtcatgaattacatcatggctctagttgaatatggtgacacccttaatctccttcttgctgatgacacc

SEQ ID NO: 95973 - DNA, 257 bp, Glycine max
tgtgggtgtgccacattgcttggtgttttaagctttccggtgggttgagatttttttattgttctttgcatttgtgtgtccaattccaactgccatgcttttcatttttgggttgtgccacgttgctctgtttgctcatggattctgagttgtgagttttaaaattcccgtagatgcctgtgttaccttccagggcgtttgtattattggtttttgttgcgccagggtgttcgatgcttaaagctttccaatggttt

SEQ ID NO: 95974 - DNA, 421 bp, Glycine max
cttctttgtttaaagaagaaattaccaatacacatgcaaaataaaataataaaatacctttggaatccggaaagggttttttgcagcattcacataatttggtaatcttcctttcacttggagactcatcctgagaagaataaattaaagcatgaaaactgggcctagggttctacttcatgtacaaatgagggtaaagtgaaaagatattgccatataatcaagcataaaaattttctttccattgagaacaaggaataactgaaaacaataaggacgaaacttagataccgttccttaagtgcttttggtgctattcttcaatcaaaattggaatttcaactcggtaatttatgctgatctttaatgcaaacctttattaagagattatcaaggtgaaacttcgattctaattgatgaa

SEQ ID NO: 95975 - DNA, 404 bp, Glycine max
ctctctgctctagaattattgatgtctgtttctcacctttgattctggctgttaattgttatcactaggaaattttttggtgtggttggtttctttctttacagtgtgtgtgtgtggttgattctgctttgtttattcctttcttggtggtttggttttctcttgtttgtgtttttcattttgaaatttgaaaagctggacatgtttgtattgtagctgtttattgtatgaatgttttcggtttcaatgtgctttcattttggctttcggttgttactggctctttcttttttggttgagtaattattagggcttttgtttttttgctggttgattctgggttttttgtttggatattttagcttggtttgttctgaatttggccacattttgctctggttctt

SEQ ID NO: 95976 - DNA, 234 bp, Glycine max
cataaatgaatttaatagtttgaaaaccaagtttggggacaaaagttttacattgaataacgtgttgccccatttaaaaaattcgacattttatgagccattaaaaaactcgttggttgatgggggaagctttctttttacataagaatcaactaacctatgctacccaagagacaaaacatttcccatcatggggataacccataatactacgggttatgtccaataattaat

SEQ ID NO: 95977 - DNA, 470 bp, Glycine max
caacttatgtattaataggtcatacaaccatcaatggtacatatgagagaactagatgtatcaaataagtccctatataacatttattaagaaagtaaatgttatcccaatgtaaattatgttgcttgcgattatatgtatctcaatattcatagcaatgttgtaacatttaacaaaatcaaatttctccaaatgtcagattttggccgtaacctgctccttcatttcaagcaatgcatcttcaaaacacttggcaagaaactcaggatcaggaatgatgtctttggccacctgcacttgcatgtctgctcttccagcatagctcaccatattcaaaatgagagcatgaggcaaggcagaattatttgcccttaagaacgttataggattgcctccaatcataatctcctcttgcgggccaaccacatttgagatagtgaaggaagtgtggcagagtatccgataattta

SEQ ID NO: 95978 - DNA, 428 bp, Glycine max
gtgaattttcattcaccaccttcctatttacttttattttggttttctgttttcacttctaattacaaatctagagaaaacaatttttttactgttcagtgtacgaatatttgaaaataaaaaacaaattaacaataaagttaacagccttgtaattaaaagaaacagcaaaaaaatattttttcagagtaatcgagtagcccttaagtttcttctgtttttttctcctaatgaacacacctttatgatcaagtagctaatgaaacgtgtgtgggcattttgcttttggtggttggatgaggatactaactaatgcctatggaaatgtattcaggtgtgacctgaagattgtgagtgacgcaaatattttctttattgagacaattctgaagcatcatggagtgtggaactgtttctcagatgtcatt

SEQ ID NO: 95979 - DNA, 518 bp, Glycine max
caaaaagaagcctggttaaaagagaaggcggcaggaggtggctatgagtcgtgcgcgtgtgtattgcgacgtgaacgaaacgcgcccacgcgagtactgggactatgagacgctgaatgtagcctgggggtacgtttctcgtctcttttttcctccctccttcgcccctattgccctttgctgccccatcgaaatctttcgctcgataagggggaatggcgttggtttctgcgcatttgaacacagctccagcattatttggatggatcaatgtcattgccgctgtgtttttgtagggaaggctcacagacgtcttgttgtgaatacacagggatcaggacaattacgaggtgatccgcaagatcggccgaggcaaatatagtgaagtattcgagggttataacgtagccagcaactctcgctgcgttatcaagattctcaagccagtcaagaagaaaaaaatcaaacggtacgtatgtttgtagagtttattgaccatgtactggctgtctactttt

SEQ ID NO: 95980 - DNA, 450 bp, Glycine max
gaaagtaaaagattcgtatacacgttacactgccgcactcacgctattggcctcgtcaaaattcaaagtaggcaaacgtatccatcctgccttgccagcctcgtcgtccgcacaggcaaccctccacgcttttgctactgggcgtggtatgtccttgtattgtgttctcgctttgttatctaagccccgctcgctcctctcctcgttacgctgctcttgttggtggcggcatgttttgcaaagcagatcgatggctggcttttatcaaggattgctcaaaactcatacaacacctccacacctctgttttctcttctcgctccttatgcctttgaaacgaggggtgatcttcaccaagtactttacgcgcttgagtcggatacgctggtgatctcgtcggtgtgatgcgcaccaccacgcagcttctgttcagctgcatcacgtaccggc

SEQ ID NO: 95981 - DNA, 375 bp, Glycine max
gaaaaaaaattgtattcatttttttaagggccaagtccaccataaatgaatttcacttgatacaagctagagctaaaagtgacatcaacatggatatttgaacacatcataataccactttccttattttctcctccaaggatggcaaaaataaaaaataaacagagtacatacaccacaacctggcaagagtgaatttatcaatacagctaatgaagaagtaacacaagtctaaatgatcagtgttcaaactggttatgcatgcataaaagccaatcacaaatattatttgaatgtgatgttgaaaagcacaacatccggactgcagccctcataacctcataatcacaacgtgccacataactgaaaatccat

SEQ ID NO: 95982 - DNA, 303 bp, Glycine max
aaaaaaaaaaattttttaggccccaattttttttttttgggaaaaatgggggggacaccccttttaggatttaaaaaaatgggtttggaacttttttaaccttaacaggaaactaaggggggggtagggggcccaagaaaatttatcggggggggaaaaaaaaaaaaaggggggttttacccccataactggggggggaacaattaagaggggccaaaaattttggggggaggggttggtggtaaaaaaaaaaacaaggggggaaaattgtttgattctagggggggttggaaaaacaaaatt

SEQ ID NO: 95983 - DNA, 572 bp, Glycine max
caacaaatctctcttactcctatccttcttcccctacttatatctaataaatctctctaactaactaattaactaaatcatcaatagtttatgtgttttaactcacttttccttctccttatatcctaacactatactagattgagcaaagagttgtattttatattgggtaaattttgtggtggactaccttaacatgtggtccattaattggtgcaccatcataattactagctattataagtaaacgcgcatctatctggttttgtatagtgtctcaaactttttttagagtgtgtttggatgagggaatttaaaacagaattttaaattctaagaatttcaaatacttcaattaaaatttttttattttcaaaattttgtgtttggataaaaaaaattaaaattttgagggtaaaagaaaatgagtcgagagttcgagaatgagatttcggaaacttttaagtggaagagaggatgaatgttacacaggaaatacgaaaacattttagaaaattcttctataaaaagagaatttcaatttctcacattaaaaggaaattaaaatatca

SEQ ID NO: 95984 - DNA, 263 bp, Glycine max
ccagccaaccctggccttttaattttttttttgggaaccgggattaaaaatgggaacaaaacccccacccgggggggcctggggtccggaaaaaaaaacccccccgattttcctttggcacaatttgggccctaatgggccccccccaaaccttcgtgaagtgtgggcgtaaacccccttcaaaaaatttccccggggggggctttagaaataaggcccggaaaaaaaaccctccctttttttttgaaaaaacccccctgggg

SEQ ID NO: 95985 - DNA, 313 bp, Glycine max
tttttttttttttttttttttttttttttttttttttttttttttttttttttttttttttttttttttttttttttttttttttttttttttaatttccaaccaaacccatttttttaaaaatacaaaattaccccccaaggaaaaaaaaagattttaaaagccccctttttacaaaatggggaggggaaattaaaacggcttaaaaggggcaaccaactttttcccccccggcccgggaaaaaaaaaagccccccccgggctggaaaaggcccctcaaaaagggcctcggcccccccaaggaaggcctggg

SEQ ID NO: 95986 - DNA, 497 bp, Glycine max
ctcttcctaaaacatttaaaacctaattaaaaagaggtatattatttgtaggacattacttttgtttctttttttttttcccgtcaaatcaattattttatcctacaactttatctttcttctctttctatctgtccttttattgtaaaaacttatataaggaaaggaaattatacaaattcaatctcatcggaaaatggccaaaaggattattctagatttattggtccaggccgaaatgcatatcattatcatgtgtgtgcaaaattaccttcatgattaaccaaaatttcaaattttcaatgtgtagaatggtgacttaaaaaatcacaattacaatctcgttgcaccacttgtgaaaaaagcagtccattattgaatttgaatcttatgattttcttcctctctctcttttttcaatgaaaatatatcattttcacattgactagcctcttagccattttcatttgtttctactcactacaactcatcagttc

SEQ ID NO: 95987 - DNA, 368 bp, Glycine max
tttgtttttctttttttttttttttttttttttttttttttttttagagggacaactggtggttttatatttcattttaacaagacttgccaagagatttatcccttaaagccgagagcacttatgtttcgagtttgagacacctttatttattccacttgcatttgaaaaataaaaatattacattcaccaaactgggaaaggggaaatatctaagcgcatttaagtgaacccgggtagggattgttttcaagttttttcaaaaaccagaacctattcctttgggcctattgtaccaggttttccagggtggtaccaaattaccaagaaaaaaaaatggtgctgcgtattgtcaccacatttatttt

SEQ ID NO: 95988 - DNA, 220 bp, Glycine max
aaagggacacaaacccaacatacttggtgagtctattgatatctagggcaactcgatgcactcaatgcagccattcctttctcttcttaaaaatcctccaagtcgtaactcataaaaccttctatgactcaaaaatccggtagagaatttcatgataagagctgtgcaagaaacaaatgatcccctctttcactgcttatacccaccggatcctcacaca

SEQ ID NO: 95989 - DNA, 387 bp, Glycine max
atcggaggacttcaagtcttactagccgattttgaacagttcaaaacgcctttacgataactacacagtttgctggccgcatcttccctttgctccttcccatcgcatcctcgaaaccaacacggtgctacaatctcgcagcccaaccccattcccacaaaccaccaatcctcactgcttcagctgctccttcttctccgcctcggtcaatcccagatgatccgtcccactcctccctgtatccttgacgaagttcccaccagccttggtagtgtcgcccaggccctgggtgacgcctgtgacggtgtcgccgacacccttgcccgccgtcgtcacgacgttgcctgctgcgtcggtgacggtgcccacgcctttgcctagcgtgtt

SEQ ID NO: 95990 - DNA, 104 bp, Glycine max
ccgcagaaacccataacatacttaaagttcaaattaaaaatcgctagtttatggctgaatctcaaataatgatagacataacatgacttatgatgaggggtagg

SEQ ID NO: 95991 - DNA, 257 bp, Glycine max
gacagaatgtacaaagatgagaatatcactcaaatcaagaattgcaaaggtcctaactctccctcccaacttatctcaattctcaacaaccgaaaatctaatcttccatcaatttgttgttatacccaattacccacatgaccccacccctctcctttctcttcctttcccatttgattaaagcctcctaactacctcttcatttgttacagatgtttcccgtttacactcccaataaagttccatggctttacaag

SEQ ID NO: 95992 - DNA, 213 bp, Glycine max
gccgcccttttttttttttttttgagccactgtacatttatcactataacgaaatgcctaagcattctaaactggtacaccaaatgatccttgacaggtacgaccttacccagacactacctaaccaatcaccaacaggtgcggtgcttggcgtacacggctaaacattgcagacagccgcattaacaaagttgcaagctgaatacactggaa

SEQ ID NO: 95993 - DNA, 283 bp, Glycine max
ggggaaaattctgtcaatcatattaataacccctaaaattaagttgggaaatatgcataatttttttaaatagatcccttagaacaaagggctaatttaaactcctgggcaaagaaagaagaccgagaagagattttccgaaattataaagggtaaagcccgaaaattttttggtaaagcagttgattttaacaacgggcgatgagccacactagcttgccttaatttggagcacttaggtggaatataaagggtcaattttttattgggccagcttcacttt

SEQ ID NO: 95994 - DNA, 468 bp, Glycine max
  unsure (1)..(468): unsure at all n locations
cacctatcgcatgcacacatgcaccctttttataaacattaatgataaaaaaaatcttgtgtataaggaaaggaattaaaggaaagcaatataatcaattttaatctttaaaaaaaactttaatcttttcagacctatatttttacatttccaacagcttactggcaatgagacattttttctttaagaatagtgcattacgcttcaattcatactactctaaactcatcttttgaattttattttactttttatttgctttattgtttgttattcattccttattttcatttttgaaaattaagttgtctgttgctgtgttctcactgtcaagtttctacattcctttgctaatattttttttcctaacatgccttttaatttttacctatatttttctttagaattatatatttgngtgagaactgttttccctttccccctcctctatctcttctaatttctttc

SEQ ID NO: 95995 - DNA, 185 bp, Glycine max
ttttttttttttttttttggatcgttgagaacagtaaactgattggaatttccagtaatcagctgagtaagagttacatggaacattgcaactaactattaccaggtacaccaaattgaaatatttttctgccatcaaactccattttttcttataccaatgttctaataacagacattttttat

SEQ ID NO: 95996 - DNA, 230 bp, Glycine max
ccccgggtcgacactcttacggcggccgcccttgtcctttttttttaaattactttgtttaccagtaagaattctcatgatctattatgaatgcatacgtcaaaaaaatcaaacgacttacaatgactatttggaacctgaaagaatgagcacgggtcaaagacacctgtaacccgaagggaagaaaaattaatccgattgtgaaacagtcctctaggaacggtgggtgt

SEQ ID NO: 95997 - DNA, 74 bp, Glycine max
gttgcaatgttccatgtaactcactattaccaggtacaccaaattgaatatcagtttagtggtgtcaacgatcc

SEQ ID NO: 95998 - DNA, 306 bp, Glycine max
ggatcgttgagaacagtaaactgattggaatttccagtaatcagctgagtaagagttacatggaacattgcaactaactattaccaggtacaccaaattgaatataccccttcaaaacatcaggaagtcttgccctaccaaacagcacttaaatcataaatttcttcaatgactccgattagatcattcacagttgactaaaagatccaacaattgcgaaacacctaccggtgcaatagttcggcgtctacagaatttttcatgaacatagcttattcatccccatttgaatttcgaggggaaggg

SEQ ID NO: 95999 - DNA, 185 bp, Glycine max
aaaaaaaacagcccatacataaataaaaagggcccttatggggctatatccaacttttgaaatttactttactcccccaaatttggcataccaaattacaggccaatggcaaattggggggagaaaaaggcataattagttacttttgcacattatagggccttcaaatacaggggggggaaaaa

SEQ ID NO: 96000 - DNA, 235 bp, Glycine max
aactggggaacgatattgatttttaaaataaaaacataaacgacatattttcgttgaagcgaggttcattccttatttcaaaacattgtaaacaggagcactttatccagagatgcaatgcacaggttcaagggagacacttgtcaaacagttcagacatatgagaacacttcataaaagggattccccttaggcaaccaccatgaaggcgaaggacaagatgcaaaggggattc

SEQ ID NO: 96001 - DNA, 408 bp, Glycine max
agtaattactctcataaaattggtgatgccagcaaccaaaattttggtgttgactgcgatgagcagtagtacattaggcctcattgaggtttatgacaatcatggccgtgcttacccttgcaaaggaaatgaacatgagaaaatcttaatcttatagatccctagaaaaccttaataaactcatctacaaaatcatagaaatggactcataacttcgtaatttttcagcagatgcattattctttttgccccgaacgaacaagagcagctcccttcaaccacttatgcatccaaagcctgtgctgctgatagttggtgtagactttcttttggtctgttttttccttgcttcattagctctacaaactccctaaaagcatagtcagaatcatgaggtccaggggatgc

SEQ ID NO: 96002 - DNA, 113 bp, Glycine max
caactagtaacacatacactaatctctctctgtctgttataggatggccgccaataccaggagtcgagggatcaccggcttagggaagctaggcaacaaccggatctggactt

SEQ ID NO: 96003 - DNA, 487 bp, Glycine max
gttgtagtgaatattagtgttgcaattgcaaattggatctctggtgctttttttccccctttctttttcctattatgtaggttaagtcttacctcctaagctttagaggagttaactgggaactgtgtttctctcaaacatgattagaaagcttcatctgcaacttacaggcttgaaatagatgttttgggcctctgaagatttgattaattgttatttgttatttttaagatgttttgattaatttattggccacgttctctacctacttgtcattttgaatttaataattcatcggatcctgaatttccaacttgtgggatggacatggacccacatgcctatctgttttggatttgagtgagaaatgagctgtcattaacaaaaaaaatcatgatattcagagatcctttgaatctgaattaacactaagttccatctcatgcatcacgaggtcaaagttacgtatgaagaataacttattata

SEQ ID NO: 96004 - DNA, 487 bp, Glycine max
atcaagaacctgcaggctttgaatgctcagcagcagtctgagtatgatgagtctgtgatggagatgcagcaagagatcaccgagctcaggctcatgggcgacgctcgcgccgagaccattaccttgctcgaggtttccattgaagacatcaagaagcgcgctcttgccgctgagcaggacaatcgcaccaccatcgactctatgcttcttacccagcgtcagctccaagaccagaacgaacagctcgcagctgctctcaagaaacgcaacgccgatgcccttgctgccatccaagagatgaaggtaagacgcgttgaggtgaagacacagccactcgacctcaaccgtgttgttgccggcaaggtcaccaagaccagcgagaaggtcaagatcggaaagaagggcaagaagaaggtcagcaagcgtcaatgggactctggcttcggcgtcgatgagaacgtcgaagacgctgatgagctcaatggcg

SEQ ID NO: 96005 - DNA, 178 bp, Glycine max
ccgggtcccgggtctacctgctcggcggccgcccttcttttttttttttaaaaaaaagggtaacgcagtcacatttttttaggtcactaccaaattgtggttgagatattcaattacgagcgatgtctgagaccttcttaagtcacaacactcaatgaaatgacgaggacgcacgcat

SEQ ID NO: 96006 - DNA, 408 bp, Glycine max
gagccactgttcatttatcactataacgaaatgcctcagcatcctaaactttctcaccaaatcatccttcagtgctttgaccttcgccagtcactacatagccaatcaccaacaggtgcggggcttggcgtccccgacttgacatagtactcgggcgcatcaccaaagttccaagctgaatacacttgaacccgcagttacaatggtagatctcgttttccatatgcaaattaccgatgcattctcatgtccatccctcaatcagtgccgtcgcccaatcgcatagtgctcagactcgagctgcgaaccttctgaatgtggcctatcgcctcaattagatgtgggacgaacagctagggattttccgtcgcacggaaatgtcccagaccaggcatcgtcttatgcata

SEQ ID NO: 96007 - DNA, 169 bp, Glycine max
aaaggctagagccagtcatgacatgatgatttgcagcatgaaagaatacaagcatatttacatatggcatatgtataccactactggttgtacatatacatatgcataggggctttcatatgatttttaccaaacaaaacagctaactaacaaaatggggtcatgagcc

SEQ ID NO: 96008 - DNA, 286 bp, Glycine max
aaggcagcagcagcagtagtcccccaagtttcatcatataagggttaaaaaaaattaagccttgggttttccaaatccaaccttaaatgagttctccaaaaaggaaaaaaaaggggggtcatgaaacacatatagaacgggttcctccattggtctgccccacattatacaaactggggtcaaagggggggcaaattttttataattttggcaatgcgcggggaaaaatgcgagggtggtcccaatcagggacaatgggatcacgagggatatccttggggggggg

SEQ ID NO: 96009 - DNA, 188 bp, Glycine max
ttcgtctctttttttttttttttttttctcaaaattaaaaatatacaatgagtgaattaatgccgcagcaggagttgtcacccaagtctcatgatcttatgcttaaacgaaatcatgcatagagctttgcaagggccaccttaagtgagtctttctaaaaggaaaagaaaggtggttcatgaaacaca

SEQ ID NO: 96010 - DNA, 191 bp, Glycine max
tttttcttttttttttttttttttttttttttgtttttttgtttactccaattgcggattatcatttcattgaatcgactataaacagccagatattttggtcaaaaacaagaaccacggtgacacaaaaccttaaagatcctcaaactcaaacacaactaaaagtactgagcctaatcataaaccctaat

SEQ ID NO: 96011 - DNA, 454 bp, Glycine max
gaagaccaaaataaaatggggtgcataaatttaggcatttagcatggcattacagaataaaagataataaaataccagagagaaaccaaacctatcatattttgatacaataggtagcacaaaccactcccctcctcacagcatactcctttcttgaaccggaaatttctaatgagaaaaattaaaaaattcgcactcatatctactttgtgtctttctcctgttagaaaattccagagatggagaggcctctggataaccaagataacatcttgtctgatctcaccaaacacctctccagatcttgatcatatcattgaatacagtaacagctatatcaaattatatattgattgaaaaataaactaacatggaaaataaaatctagtgatttgcaccatacattacaattacattggtaaaaaccgaataagaaaaaaagacataaacatgc

SEQ ID NO: 96012 - DNA, 147 bp, Glycine max
ggacaaataatcatgctttcttcaagatgcatgccttgcctgttataaaatcatccacgcatgaacataacagtttacacctacatccctatctcaatgaaaggggcagttacagtgtcactaaataaaacatttggtttatttagt

SEQ ID NO: 96013 - DNA, 433 bp, Glycine max
gcaatgcttattaattaaatatgtatttcttcaatcaatttcccggaaaagaaattcaacgcatccaaggataacagctttataatacaacacatcaacatcattattaatttatgatgtgataatttttaaaaaaaaaatatatgatatgatgtgataattacccaaaatttactagcagcaaaatcatattttagctggatgataatactattttatgaagttaaggaggacctttgatgatgattttgaatacctcacctttaaggttccaggattgttaggcagaggtggccaattacagattctggttttttctttcctgttgtatggcctcatatgaacaaattacttctttgaacttggcctcagcagcctctctattatcctggttctggtcaggatgatactgctttgccttggtcctaaatgc

SEQ ID NO: 96014 - DNA, 107 bp, Glycine max
gtaaattctatcttgcttgagttattattggcttcacacataaattgcgtgtaactgtaaaccctggctgagagccataaattcaaataaatcttttagttgctggc

SEQ ID NO: 96015 - DNA, 107 bp, Glycine max
gccagcaactaaaagatttatttgaatttatggctctcagccagggtttacagttacacgcaatttatgtgtgaagccaataataactcaagcaagataaaatttac

SEQ ID NO: 96016 - DNA, 388 bp, Glycine max
gtacatcaagccggacgagctcgaccgagaggaggaagaagccgagcaggaaatgagtgatgacggctgttgctcgtcagaaaacgacgaggatgtgtccgagagtgagaagcccgtgaaagacccagtgcgcgttgtattgtggaaagacagcaagggcgagaagcatcatatgccagtgcttcagagcacgattgatgccgagaatggagtaggtggcaatgagaccaccaagctctagacagacgacatcggcgatatggccaatcatatcttcagtgaggaagagcttttcattgcctcccccgtagttcttgggtttgctttctctgaaaagctctggctggagttctcactgtctggtattgaggagatccagtggaatgct

SEQ ID NO: 96017 - DNA, 367 bp, Glycine max
aattacagggtcgaaacttgtcgcccaacttctttttgagtagaactctgacatatcgaaatagtatatattacatgcacgagatcctcaaaacgtataaatgtattgatgtgagatgagaggtggaggggagagaaacaaaccgtgccacaggatctacgaaagaattcgtccagcacattttccccattcccgtatcattcatcattgtcgtcagcctgtcatgacttctgcgaaattctccccacgagcaagacaatctgccacttacgaggtgcccacctcagctgtagtgttgcatagcatcgcggtaacctttgccaccacgcatgtcgtcctcgaaagcctgggcgacctccagcacacg

SEQ ID NO: 96018 - DNA, 194 bp, Glycine max
atgctgaccaaatagatatatggaagctcgtaaatcttttacattacataaaaaagctgtctctgctacaccattatgcagccctcacttagattaacacttcttctaactggacaaaatcagcgagctatccaagaaaatgacaaaagtcaaccaactataccctggatacactcactattccaaaaatttta

SEQ ID NO: 96019 - DNA, 174 bp, Glycine max
ccaaaatacattagttcagcaatttgcaactgtatcggatggatgggcactagtaataatttaagtagtaacacacgcacatttgttttttttttttctgtcatcttatctaaacaagagcactgagactaactcgcaggttaacgagtcaatacccgaaccactatgagcctt

SEQ ID NO: 96020 - DNA, 159 bp, Glycine max
cttaacatcatcatcagtaagaaaaactgtgcggaaaagaaagattgtgcatggaaacttattcaacatatctgcgctgttctctttacacaaggcatttttccttctctggaaggtgaaagtcgtttgccgatatactaaaatgcttgcgaaaactaa

SEQ ID NO: 96021 - DNA, 274 bp, Glycine max
acttaaggtaaaggctccaaatttaatttaagtggacactttaactcaaaacaatagcggaagacagcccaatatgaaaaataaaggaaaggcggcgcaaaattggcaacttttctttgcacccaggacattgagaattctaagaatgttacacgcaaggcccatcacaactggtagcacttggatcagcacaaccttcaggaacaaaaatacccacctgcccagtttgctttgcctccaattcaagacgggaagaaagcccccccgttaatag

SEQ ID NO: 96022 - DNA, 427 bp, Glycine max
aacataaacgaatttcaaattttataatctgaaattatttacattcattcgttcaatggaaaaaataaaaccaaagatgagaacaaagcacagaacaaggagcaccacttgcttcatccttacaagtctcgaacatcataaagttgtgaattgttgagcggagagagatgggaaattgggttggatgtttggcctccagcagtggcgagggacggccacttggtggaggcaaagatggttttgcactgcaaccttggtcggggttagtgtgacaagggcaccagtgtggcagtgtcattgcttcgagaatcattttgcatgttgttctcacgcatttcagcctttatctataaaaaaattgaactaagtaaacaaaatcacaaccgtttaaaagctttaacacacaggattcagtaaattggaaatg

SEQ ID NO: 96023 - DNA, 453 bp, Glycine max
gtcattactatgtgcatgtgtctctcgtaggtacggctagacgagccggtatgtgcaatgtctaaggaatgtgtgtgtactgtatgtatgtatcggtacggctcttaaccgatcaccgtgtctgccccaaaaggctttcgccatctcaccctctattcatctattctgctcccaccaacacctattgcgcaaccagctcggcaatctcgccattcctatccgcacgagccatcgcgtcgagggcctgtcccgactggatgcgcgagatgaccccgggtcgaatctcgggctccgtcttgacgatcctgtacacctcggaaggcgggagggcaagcgtgaacgggttggcctgaatggcatcgggctggaacttgggcacggcaggcttgattcgtgcgcggatcgaagcttccgtggcgcgagacgaagaagatccgaccgaatcggcgagcg

SEQ ID NO: 96024 - DNA, 372 bp, Glycine max
tcggcggccgccctttttttttttttttttttttttttttttttttgataagatcattaacgatatcattaagaaaacactaaaagatataactcgaacgccaaagaaactgaaaaaaagaaaaatcaattaaaaaacttaaaatattatgattccttgttctttttttcctcctccttctcctgaaacatcacaccactttctagaagtcatcaccatcgtaaccaagatcatcctccactctttccgccacgtcatcttcaacttcatttcccacctcatgaccctcatcttgttcaagttccttctaatcatgatcaactccaccatactcctcaggttcatactcaggatcattatccttcaaatcta

SEQ ID NO: 96025 - DNA, 403 bp, Glycine max
tccttttttttttttttttctttttttttttttcaaggaatatgtactcttctatatataaattaaattgtttaactagcctattaattatattagcatatattatgatgaatcgaggaagtcaagccatgactaaagacaaaaactttgaaaattgataaatgggaatcaagtaacatgattgatatcgattttcatctcgatagttgatacagggagtaaacagcaatgcttgaacatgttcatcaactgcaggcctgtcttgatcatctgcatgtcgataaataactggagaagttctagccatgttgagagaagccctcataactgactcaggaacattggtggtcatggtaagaccatttatctctggccataagttatctatgagttgccttataag

SEQ ID NO: 96026 - DNA, 463 bp, Glycine max
gctgaggagatgcacatagatgcttctaatgtcaccagggaatattctgttgaccatcagtcttctaatatggtttcaaatgtttcagcagcatataatgatactgttcatataacaagagaaagttctgtggctactgagtgccctcccgttgttgaaagtgttgagacatacagggatagaactccagtagccacagatagttctcatccacgaagaacctcttccactgttagggaatattctgttgacaatcggttttctaacatggtttcaaatgtttcagtggtgcataatgacactgttcatataacaagggaaagttctgcaactactgagtgccctcctgttgttgaaaatgttgagacatacagagatagaactccagcagccactgatagttctcatccacgaagagcctcttcctctgttttaaacaccagcgatgtcgagatgggtgatg

SEQ ID NO: 96027 - DNA, 400 bp, Glycine max
ttttcattataatatcggaggtgcattgataacaaaaatgtcagtaaactttacaaaaccacttatagattaaaagtagcaaagctaaaatcacctgacaaatgatgtaattacagaaacaaatgatatatccattcaagaactgcaatgcatcctaagaagaaatagacatctcatccgacaaataaacctccaacgggaacgccaagaacaatgaaatgatgcaaagcattcatgcctcagctgtagtgtgtacaccaggcaacttttaatcacatttgtaatgctgtttctttcctccttttcccaggactcatggtgatttttcttttactgttgaacttggatcaaagagaagactattttgtcaaaatgaacaccaaacattttatcgactttt

SEQ ID NO: 96028 - DNA, 222 bp, Glycine max
ataaaaaaactattccggtttaatgccgtttaattgaaaaaaaaaattttaaaaattccttccaatggttacaactggggaataaatttctaactaactaataaaagaagcgaaaaccctggccataaattgattatttactgcggagatttttctttaaaccattttggctttgggggctggttttggttggtttcccccccagggggacggggccaaaaa

SEQ ID NO: 96029 - DNA, 166 bp, Glycine max
acaccccacaacgttcaaaactaacatcattatatattaatcatgggagtcatgtcctcacatgtttttattactatccaccgggaaaatatcatttcccccatgaatttatagtcgtcacgtagctaaatccatgatgttaagaattatttcttaatatataagc

SEQ ID NO: 96030 - DNA, 329 bp, Glycine max
accgagagaactcatgtatctcatctcatgatatatataaatattcatatactaacccataaaattattgaaacttatttaatgaaggctataacctcatcttacaagttctttttttccgcaaacatcgagattcaagaatatccttttttcctcttacaatagatttttcgaaaccccaccaaccaagtttgaaagcctccatcatcatcatcatcatcatatttattccaaggactcaagcccttgagcaaaaaccgaagaaaacgcctccatttgactcttggtcaacgccaacccaatttgaatgcctccactgtgatccctag

SEQ ID NO: 96031 - DNA, 383 bp, Glycine max
ttgtgtatctcctataactgtacaactctttttctcatgcttacttttagtgttgattattattacttttacatgtgtttgtgttgtttcaggttctcagttgtttcatttcatgccaattattcacttgtctcctaaaacccaattgatagttccttccaatcttaattactcctttgctacaacaggaaccagaaagttcaagtctttccagctcaaggctggattttgggaatcaattaaatctgggttgatgaagaataactccatgcaagtcattgatccaccctctgcagatgaagaagacgaagaacctctgcctcaagagtttgttcttgtggaaaagacagaacccgatggtacaattgagcaaataatattct

SEQ ID NO: 96032 - DNA, 200 bp, Glycine max
gataagaccattaacgatatcattaagaaaacactaaaagatataacttgaacgccaaagaaactgaaaaaaagaaaaatcaattaaaaaacttaaaatattattattccttgttttttttttcctgcttcttctcctgaaacattacaccactttttagaagtcatgaccatcgtaaccaagatcatcctccactcttt

SEQ ID NO: 96033 - DNA, 171 bp, Glycine max
tttttttttttttttatttaaaaaatcaaaattatgcattatctatgatattggaattaaactgcaattaaacctaaaacttaacgcagaattcatactataatcataccgatgtttggcagaaccatgcgtaaaggcaaactcgaggaatattcaccctacgattacacg

SEQ ID NO: 96034 - DNA, 166 bp, Glycine max
aaaaatataaacctaatccttaaatgtttatggaacatcagacttgcccataggctaattcaatgttaaaatttatggttggtctacttcaagaataatattcatttgggctatttattggcacgctatttatttcggctccagatagtattcagctgctcaagtt

SEQ ID NO: 96035 - DNA, 191 bp, Glycine max
aaccccaaggggcaaaattttatttaaccggaccaattgggcaaacggggggcaacttggccaagccttttcatgaacgggcttaaaccccactatttgtgtcaccggggttgtaaacaaaaaacggcccaaggggggccccccaaaaggttaaatggacaaaaaccaaggttttttaaaagggggggggg

SEQ ID NO: 96036 - DNA, 294 bp, Glycine max
aaatattaccatcaattacttaaatcacctgtaagacatgatatccttcagcaaggggaaagaaaacacctataagacatgatattatcaaaattattgcattaaatttatacacttcaaactttggccccttcaattattttttccaagctctgccactgcatggatcaaattggaactaaccacatctatatactgtgacaatttggtgactcttgaaaattgtggaagaaatctgcagtgaaccaatgctgtaatgaaagttgagcttcttatgcaaaagggatgatgata

SEQ ID NO: 96037 - DNA, 130 bp, Glycine max
gaaatggttaaccatgctgattaatctttaaagcattcataaaacagtcgcagtttatcatatgcaatgtgtgcagcaagaataccacagctagaggccaacattaatgaaagcactctggatagcaaca

SEQ ID NO: 96038 - DNA, 247 bp, Glycine max
gaggcagttcattggtacgctcaagaaggacttggttgttgcatcatagagcgcttctggattggcttcacgaaaatggaaatggtacatggcgtttcatcttgcggtcctgtcagagcccggcgaaggcgcacaggactggagaggcttgcagggtagtttgttcaaatgataccaaacgaacgttctgcctgttgaaaaataaaaataaaaaacaccatgctagaaataaaaaaacaaattttag

SEQ ID NO: 96039 - DNA, 393 bp, Glycine max
acgaaatagatttgcgatttttgtctcttaaattcatgtttgaatggtggtgtgactttgctatttggttctatttttatgaagcctgactgcaattttgcttctgaaaaattaatcaggaaatatgttattgttactttttatacgcatatctatatcttctttttttttttaatcatggtggaataagcttcaaggatctcttcctggtggtggaagttcaaatttttcttcaaatatgcatgggattacatgctataaagtgtaggcctgtaggattcttatatctatggtagattaccatggtgagatgggttagtttataggcttcattttggtctacatacaattgaggtggaaagaaatggcttctgctttggttcattatgtatg

SEQ ID NO: 96040 - DNA, 332 bp, Glycine max
tttttttttttttttttttttttttttttttttttttttttttttttttttttttttttttttttttttttttttggcttccaaaggggggttcaaatcccccaaggcccttttttttggggaaaatttccaactgggcgtccaacatttaggggccccgcttcaaaagctcacccttttttttttcagaccccccgggattcattttcaaaaaacaaattttggcccccgctttatttgggggaaacccgaaaaaatttgcggtccaaactcagggaaccggaaaaaacaaaaaacgggattcacttggactcccccattgggggggtggg

SEQ ID NO: 96041 - DNA, 259 bp, Glycine max
acgtccttttttttttttttttttttttttttttttttttttttttttttttttttttagagcatgtataagaatttaccattttaccatcaagcagcagacgattatgagtaaggcaaacaatgcaactggcgactcattctcatcatcagtagcagcagggacaccctacgcgtatgacgggtcattaacagctgcagccaattagtcacgggcgtgaaacactgacagcagcagctcgccatagtcgccggtcacc

SEQ ID NO: 96042 - DNA, 371 bp, Glycine max
gtcttcctctgactcatctgtgtcagatgcactctttctccgcgctactgtagaatcttcgtttttcttctgcctctgaaaaatacatgccgaaaagttgagcaaaccaaataactaatgagaagctcccaataaaaacaaactaaaattgcaatatcacttgtgtagttgcattggtactatatttttggatagtatgggattagactaacatgatcaacaaacaattaagtactacagtagtagtactaccaagaactcatcccaatacaactattgttttgggggccataatgtgaacctaaaaccaatgttgtcaaaattgcaattctactaataggatcgtatgatcccacaagattctagcttct

SEQ ID NO: 96043 - DNA, 257 bp, Glycine max
gactgcaaaagttttttccttaataacatatacacagtgtattaaacaattaattcacacactatgatgagaagatcgcaagaatcagagcacccaatatcatgaatattggcatgatccatgatccctaagaaacgtaccgtgaaaactatatgaattctgtgcatacacatcacaaattgcatattctgaaaaaggaaaccatgatgaacctcgcataatatatgctcataatttaattcaattctaacttgggc

SEQ ID NO: 96044 - DNA, 371 bp, Glycine max
tcctagtcggcggccgcccttttttttttttttttttaattaagaactcacgttgagtattggtatcataataaaaaagggggatggatatcagagtaatcctcaacatcatcatacatcatgtatggaaagctaggctaagagtaacaatagcttttggaatgatatgacatgatacatataagttttgcttcgagtcttttcaagtatttataatccttctacagaatgattatgtgaagtgtcctctacaatgaaaatctcacattgattgaagcacagtaaaactgtatgcgtgtgtgtgtacatttttcccttcctgcttatcatcgctttatcaatctaaaatttatgcataccttgaattaaac

SEQ ID NO: 96045 - DNA, 332 bp, Glycine max
ggtactagtcggcggccgcccttttttttttttttttttttttttttttttttttttttttttttttaaagaacaattataatatatgcaatgcaagttcggtattccaccaagtggacgaattatttaacgaggaaaaaaagatttaccgaagctatttattacagcttaagtgaatgccaacatactactactttaaggggaggcagtccctaacagattggtaatggttttcataaaccctttatgctttagatatacttatgaagtttggctaataccccgggatgacaatttgacaagaaacaaaatttattcacattatttttggg

SEQ ID NO: 96046 - DNA, 461 bp, Glycine max
ctgcctctacctgaaattctataattgtaatatggtatcaaagtgatatcatcctcaatatataacctatcttgtgatattttgctgctaagttcactaaaatttggaactactttgttatcgtctaaccattcgagtcaccaccattaaggatggataattgagctccacacgcctaaccattaagtgaagacaacctgactcaaaagcctcagaacatcatccctattctggctgctattgcctctaatcatattaccttgccttctttcagggataatcttgccacctatgttcactttgacatggctgtgtggctcctgtaggatgcagaaatctggcatgttctctccatcagctaggtttctgagatcttagggattgctaaggagagaaaaaatgtagggaaggaaaaatacttggatattatttcaaaaataacacagatacatatataggca

SEQ ID NO: 96047 - DNA, 181 bp, Glycine max
aacatcactgaaatgatcttcatgcataagagcattgcactattaaaaaggcaagccatataatggctacccaaactaaacacactcactacgaaacgaaatagagtgaaatctacgtttctccatataacacacaagaagaaaacacaatgcttattcagactcaccacacacacacacc

SEQ ID NO: 96048 - DNA, 328 bp, Glycine max
ccgcccttttttttttttttttttttaaaaagttaaaatttcattaaattatactactacttacaacatgatatgatgacatattggtgaatcccaaaccaggtatccttcgccatgtagtagcgagaaatgggacattatggatcgccttatctcaaaaggcatggtcattacactaaaacaggagctcatcatgtctagtaactagactaatgatgtgtcccttgttttttactcagtggaaagtaaacaaacaacagacgcaaatcgcagctaacgcagaaaagtgacccccatggtgtcatcttgggatccacccaagcttcat

SEQ ID NO: 96049 - DNA, 436 bp, Glycine max
ccaacaaaacaaaagggagaaccctgttggtatacatgataaattataaaggtatacaaaaacctgtactagttactggggcttgtgttacatgttgacaagataccccaaaatgccctatttccttcctctgctcatggccaactaactttttttccctctagttaatgcagaaaacaacagaaattttttctgtctgcttaacttctttggtgcatctgaattcctacctggaattacaatggtgtttagttttttctgcctgcttgacttgtctgcatgatctaaagacgcgtcttcgactgaatcagtgtttaattgcttgttgctgatggttgtttggtccagaattgctccgttttccaaaggatatgaaacaactgggcttgataaaataggtgttgaaaggttttgctctgatgttgttggtactact

SEQ ID NO: 96050 - DNA, 247 bp, Glycine max
atgttatatttaggtggtctttatttttttttcttatgggacaaaaatacattagagtcaaaaaaattagaatacccaacagaggatccatttttttttataaaatgaacaaaaacctttaaaactatatcggttacaaacactgagaaatgacattttgaacatacacctcattactgaacatgacaaaccgggaatattaggggggcactctaaaactacttaaaatctcttgttcttttagtcg

SEQ ID NO: 96051 - DNA, 428 bp, Glycine max
gacactaatttagaatttcttactgaattgtgatataaacatatcacaatcaaatataattttccatattacataacaagatatataaaattataaaattttactaacattatatgctagtattaatagacgttacaaagaattagctcacatataagccatgtaacaatgataatcccgaaaaaaaattactttagcttaactctgctcttgcttgttttacctttcttcttaaaaggcgttggattcagcaatcgcctgaaggggaataaaggtagtccctgaggcgtccttcgcttcactctcaatccacctgaagcaaactgatcagaatcagtgctcacttcactaagccttttatctttcattataacatctggcaataaatgttttgcagcagtggaatcatcttccattttcatctcatc

SEQ ID NO: 96052 - DNA, 366 bp, Glycine max
cgcgaacagcaagagcatgcgctcgttcattcagcaggcggatcattcctcgcactagaccaaccttacctcgaccatggagatgtacatgatcgtcggcaaggaccatacgcagccatcgatgacggaccgccggagatgcagcatgcagcgtctacaggactattcgtcaatgttccaagtccaacaagaggtcttcgaaatggccttgccactcgtccatactcataccaccaagcaccccgatatgacgaggtacgcgtcagtaaagggagcggcaacattcatcccatccttgagcgtcaagacgaagacgatcttgagcgagggggtaatgtgcgcaacccattctcggatccagctcat

SEQ ID NO: 96053 - DNA, 110 bp, Glycine max
acaagttaattgaagaaattcaatttgtttaatcaaattccccaaccccctctgtttttatttggtcactacggattatctgcaataaaatattatatggcgaaaatatt

SEQ ID NO: 96054 - DNA, 120 bp, Glycine max
gttgtataattaacaagtgtataaatattgctgctcttttctttgttacgtgcctaaaattgcgatgagttgaatattacagaaatgtgaatgcaaggattatatacctaaagttaagtt

SEQ ID NO: 96055 - DNA, 361 bp, Glycine max
caaagtggtaatatactaatatatcataagttcaaaatccaaataaatccccaattgatacatcataagtttaaaataaactgacttgcaaaataaaaaatacaacacaatagaatagaacaagtagaacttagacattacataaaaaaacatagaactcaaacatgctttgtaagttcaatctttcagctatatataagtggcaatgtaaagctaatccattgaagatgagcttcatgacattacaagctcattggcaacgtgctccatggtagggcgagatcgtggactttcagtcaggcaggcaattgctatctttgcaattgatgccacctccttaacaataggctttgttggatga

SEQ ID NO: 96056 - DNA, 114 bp, Glycine max
gtatcataaatgtgcacttttactactatatcataagttcaaaatccaaatgaatacccaattgatacatgataagttcaagattaactgacttgcaaaataaaaaattcaaca

SEQ ID NO: 96057 - DNA, 500 bp, Glycine max
ctccataaagaattctccttcctatcaagtttctattcaaagtctccaatattcctaaacacttttcctaaacataaaagccttatttccaacatttcatcctctccgtgacgacaccatcattgtcgctcttcttcttctctagagtgaaacagccgccggagcctccgccgtcgcgacaaaagtaacgaatcacttctctgtccggcaaaggcggcacgcagtaattctccttaaaggaatcgtacgagccgacgaatttggtgttcatgtaattgcataagattccgtacctctcgtttttcgtgacccgcaggtttaggtttgcggaagagtccttgccactgtcctcggagatgtcgatgtgtactaggtttacccgacctgcgaaaccctcctcggttatggacaaagatacgagtgttttacctagtgagtatgttatgcacattcccacagagaactcgcccgtttcagtttcaccctctctggatttctgc

SEQ ID NO: 96058 - DNA, 492 bp, Glycine max
  unsure (1)..(492): unsure at all n locations
gagaactttaaaaatgacctcgaaagaatgaattgtttggatcttaacgatgctataaacactgcagctcaagcatatcatgagcgctatgagcagttgaaagagcaagtgggaagaggagaaaagccaatctcaatcatggaccaaaaggcaattgatggtgataaagggaagaaagagcctgaagctcccaaggagaagaaaaaggctatttcgatctctaaagcagagggaaagcctaacaaacttgctcctccttctggttggaaaaatccatccgggacatcaggaggaatgcagtctgctcagaacgtgattaacctactcgatttcgacgatgaagttgagagttcgaatgggaataaacaagagcatgcccatgtccagcctcaaggacataacagcgatgttgaagtgagtcagacacacaacacaattacagtgaaaagcaccaatacggcttctatctctggagccgntgatctactggac

SEQ ID NO: 96059 - DNA, 442 bp, Glycine max
cttgatcaaaaatcaaattctgagagagattatttttttatgaaatctctttaaataattttttctttcttgttttccctccactccttttcatattaaaagctatgcaatttactctttttcatcggcaattttcaatattccttcttacaaatgtataaactacattaaccaatttgtgaatgaatgttatatcataaaaaatgctttatagataatataactcaatataggtgaagaagagtgtgttggtgaacatatatatctttgaataatattattcttactcatttttcccacatccctattttacaatttttttttcttttttactttcatcacattggttatcttattctacactcctctatctgtctctctcacacacacacattcagttgtaaaatgtgtattataaagttgtcctatgaacaacattttt

SEQ ID NO: 96060 - DNA, 464 bp, Glycine max
gtgacacgctcagagtccaaacccgcacctgtacaacagcctgtcgtacaacaagccgttgtacaacctcctcccaccctttcccccgtcaaaagttttgacccctttttcgacccccaaccggtcacccagagggtggtccaacccccccctcagcctgtgtacaaccccccaccccaacaatattaccccccacagcccattgtacagcagccagttgtacagcaacaacaaccggggcctaaccccttcttccagcccgcagtgaccaatggccccagccaatgggtcacttttggaaacgccgtaccgttcgcgccttctcagggaactttggcgggaaattacgtcaaccagccacaagtacagcagaggccaaacaccgacctcgccggtctcgtatccctcgtcaagacacagacaaaagacgaagtcgagaggagaaaaaaagacgaagacggaag

SEQ ID NO: 96061 - DNA, 523 bp, Glycine max
ccctacgtttgaagagggaaatgaatctggttgtcttgataagaaagatttggacacttgtggccctgaatctgaatcacatccagtgagcaagatgcagtcttctggagacatttgtgaagttattaggactcataagaggaatgattttccagtttctttagacaacaaaaacagtttagatcagttgaagcagtttgatgtaattgataattgctcagatcaccactttattcaagaggggaaaggattgacatcatctcagtttaaaaagggttgggtgaagaaggtacaacaagaatggagcatcctggagaaaaatcttcctggtgcacacttcttcttatttattttgagccatattattttatatgctttggagcatatattgttatacaatggctaaaatcaggctacaaaattatatatgcattgcagcagttgcaggtccctgtccatatagccctgtcaatatatggacagggatcgatccttgtttaattcctttagccattttaatctg

SEQ ID NO: 96062 - DNA, 148 bp, Glycine max
ctactaaacaatttggttatccctgtctttatacatgataaattttaaaggtataccaaaacctgtactagttactggggctttgttgttcaagtggacaagacaccccaaaatgccctattttcttcctctgttcaaggccaactaa

SEQ ID NO: 96063 - DNA, 419 bp, Glycine max
acttgaaaatacaaatcctccatcaaatcttccagttcatttatacaacctactaacgacaaccataattcgtaatattcgatatcatcacaggtaggacatcccttctccatagtttagatggcgtttatgcttaaagaaccttttgaccataactacaaccataaggtaatgttacacatggtaaaattgcaacaaactacaatccaacccaatgatggtttagccctttccccctactttttaatgttttctctagaacgaatgtacaaaatcaaatgctaattcccagacaagcaaacaatatgtaacaagaaccaaatatatatatatatatatatatatatatatatatatatatatatatatatataatattagaaaacacaaaaaaatatcaaggaatatggggcacaaaa

SEQ ID NO: 96064 - DNA, 265 bp, Glycine max
gggaagaaaaacattttgttcaaatcaaaggggccttaatatctttcaactgagaagttatgttcaagtcatcagcccagtcggacatgataattggaagccctatatacactaggggttctatactaatcaaataaaatcacccttcataaacatgtgtacacccttggacaaactttttccatcaattagtatttgtgcctccaaaagctacaccaacatactggagggaaaagctgcggaacatcaatgagattgatattcc

SEQ ID NO: 96065 - DNA, 471 bp, Glycine max
acggcaaagggagaattttattgtaaaaagaaaatttgaatgggcagataaaagaaaaccttgtcaactcaatgcagcaaaacgttcaatgaaaccccgaataaaaagacagggggagaaaaaggaaaaaagttaatataaaaaacactcaatactatttaaaatcctattttcttatatcctggatgaaagcaagctatgttactgtacaggtgcaaccagccttggtaacctggttcacatagtgcacaatgtaacttcctcctggtcgcagatccgatcataagtgtatgaatcttatatacaacagcctcaagcaacaggttgatctaattctcttatcccaatctggcgcaattgttgtaggtgaccagctatttcctgcaataatttaagtccttcttctccattgctcgataagttgatactatgcttaaggaaactcaaatcagcctcaagaacttgcaacct

SEQ ID NO: 96066 - DNA, 425 bp, Glycine max
cgggttatgtctcttctcttgcccatctatggcatgtccctagcagtgactgacttgctgcatatcatctcatattcaatcttcctcctattgcttggaaatgtaaatatcctctaagtcttctttctcttttacaagcgacagccgtgctccgtttcatccttgctaacacatatgcacccttcaaccccccaaacccccgccatctcaaagcttcatcgtcttcgcagcatgccaccccgccgcccaatgccacaaccttgcatacaccggcttcccctccctatcatacttgaccagtctctcatacaactcattcagcgggaccaccaccctctcaataaactctccatcatccagcgcctgctccggctcttcatctccctcctttaaattcacttccaccgtcgcgagctgcatgttcg

SEQ ID NO: 96067 - DNA, 446 bp, Glycine max
cttatactcctcattactataatacattgagtaaaaactttaactttaaaacataattaagttcatatttgcattgtaaaggttatgtttactttagattttaggctattgtactgcagtataactataaaataatatttacttacgcataaaataataaggaatttcttcaatccctcaacttttaagcaatgtatgcacttcaggatccatcatattgaaataattaatgtaactcaatatatcgttatgcgtattctgatgcaaaactgcaatgcccacggcgagtgtgtgacatgcagagcaaaacacgtcgtaccgaaaaactggcacgggaatttggagtgccacacttgcgaagtacgagttgcaaaggcaccgaaattcgagttgcctataggcacaactatacattattcacaactcacaaaagcgggtgcggacat

SEQ ID NO: 96068 - DNA, 112 bp, Glycine max
aaaaaaccaacattcaatttaatcattctaattaaaacaagcatcacaaggaccatgtgctaagttgccaaggactagttgagttttaagaatactgggtcttccgtgctta

SEQ ID NO: 96069 - DNA, 414 bp, Glycine max
agtcgcaacttataatttatagattttcatgcctcatcaatctacactgatgaatttacatgatgaataagtttataaaatatctagtagttttagaataaaactttccctatcagcctaaataagcctattagtaatgacactttttttatattattatgtaatatatgcattatatataattatgtatatataatataacataatatatcacttaattaaagtctaaccctaatacaaaatctaacacggtacagtcaaacagaaggcaaggaaagatacatgataccgatcaattaatacgaaaaggaaacacgaacaaataacaatgaatacatctttaggtttaatagacataaatgacacttaatcttctgcatgcttttgcacttttggagatcgagtgaaattctc

SEQ ID NO: 96070 - DNA, 324 bp, Glycine max
aaggggaagtaaagcttagttactacagtttgaaaaaacgccaagcacctttcgctaaacaatcattctgggctgggcccttttcttgtccctggcaccaattcattcctcgaagttttcaccatcaagccacccatatcgatcgatgaatcaaccctcttgatcatcatcatttacaatctccttgaaccaagaaaccgacaaaagttttttttgacctcgccttcctcatcctctccctatccctctcctgaactctactccccgaactcaacaacgcccttattcgaacctgcatgtgggactccgtctccctcaactcca

SEQ ID NO: 96071 - DNA, 340 bp, Glycine max
aagctaaagaaaaattaccatgttattttacataaattaaagaaacagatcaataataaaataactaagcttttagcttatacgggcagacattttattaactaataaagttttgagggaatccttcattaaccctccgggatttggataattatcttcatttttgtaaagcccgtaaatcatgcccccaagggtgacaacccgcaaaagaaaattcattggcacttcagtgggattaagggatgcctcattgatggcctttcaagcacttttaaccatttcaagtggtttattaagggcattttgccttgagggggtatggtgcttcatatagctttca

SEQ ID NO: 96072 - DNA, 300 bp, Glycine max
aataaagaaatctttcatttttttaaagaaataataccaataaggataacaagaacaacaataataataataaccaatatcctcagtcagccctatccaaaccaaaaggatggttcggggctttagtcaggaatgggtgaaaggcatgttcttaaaatttttttttttactccctaaaactatgggtataacaccggcacatttagtttaggcaacgggaactttttcatcctcaaaactcagattaaaggcctgtagttaaaagcctgaaccttgaaggggttttaaaagaccagaagc

SEQ ID NO: 96073 - DNA, 467 bp, Glycine max
tcaaaatttacataattgttgtgtcaataaagaggattccactgtccttaaggatgataagggaaatcaatatcacacagcaaagctgcataagttcaactcctttacacctttcccaggattgagagctgcagggccaatggtgtccatgtttgcaaggagattaggtgccatcaaacaattccagcatacagaatagtctaccccacacaggaagacattatacagtggtggtgcaccacctcagaagctggtgctgagattccaactgaagaagatccaatagaaagaatcacaattcataataagaaaatgttagatttcctatggaggcaaagtatctaccgttaacagctccaatttattcttcgttctgtatacaaaagttgcctttctttgcttaaagttaaagatgcttcacccaaccacccaacacgcatcatcaaagacgagctattccaagaatt

SEQ ID NO: 96074 - DNA, 178 bp, Glycine max
tgtcgtcctttttttttttttttttttttttttttgagatctcaaaggaaagcgtgttaaatcagaactaaacagagttcaaaacattggccacaaagcacagatccaaaactcaaaaacagcaatttccgaaggggctattcactggccatggacaaaattattaatttcaacggaa

SEQ ID NO: 96075 - DNA, 125 bp, Glycine max
gaactggttccactattgtgagaggttgtccctgttatctttagtcaaattgacaatagtggaacctctcacaataaaatttcgacagaaaatgatgtgttctacaattgcctttactacaaaac

SEQ ID NO: 96076 - DNA, 363 bp, Glycine max
cccttgcactatcggatcgatactggagataccttagccaaggttgtaatcctgaacggtacaagtgaacaaaacttttgcatgtacagttagcgatcgttggaaattacatatgattacagtccgcggatagagcagtagtctcgtgaacaggatctgccttgtgcgacaagccgcctactactgtccttgtagtggtgctcgctcgagatctttagagcaccctacccttgacctgcttccttttcctggggtcaatagcccgccagatcgcgacggctgggaagccaaaagcggtgattgcggtggcagaaatgagcatgatcctttgggagttgccgtatgcgttctggatgccaattt

SEQ ID NO: 96077 - DNA, 341 bp, Glycine max
aaatggtaataatttagttgttttattgggtgatacttgcatacattaaggcacactaggaagtaaatttgactcagtcatttatatcagaaacgttgtcttggatcaacgctgctacatatcatgatatcatacccaatttatatgcataagctatatggcgctggaatcctgctaatatactaccctttaagctatcttgtaatgatgaatttgaatgtcctcctcattttgcttcttgaaattgctgttccctctgtggacaagaaacttgccccaattgtatggcctatatttcgaagggttatgctcattgatcagctcctccaaaggctttactt

SEQ ID NO: 96078 - DNA, 246 bp, Glycine max
gtttttcaccaaagcagtaatcatagtatgtagttcccatcctgtttaatttgtaaacccttgtcagtaatgtgtagttgaattatgtggataagtggtctccagtagcatatgtatgttctcttttggaaattgcttatgtataaatcgatcggatgcttcctcagaacaggcacagtagaacgagctgtctatcagtagctcctgtactatttaaatttttgtgaaaatgtgacacgctgcatg

SEQ ID NO: 96079 - DNA, 452 bp, Glycine max
tctagatcgcgagcggctgcccttttttttttttttttttttgagtaaattactcatgccttcgcaacgtagttgctagctggccaacatcctcagggacgcggcatacagtagctactgcaacggtgatcaacgatcactaacgactgggtcggaacctggcctaggaacagtaaccaccagcccgccattggcggcagggttgctacgataacaactcacgttttacgtcgcagttgtcgaacgacggggatactccctgaagttaaaccaacccctttggggtcggtccgtcggtacttcattgaagcaccgtagatcggcttgatccaagccgaacttctgaaggtcccaatgggcatacttcagtaatcggagcgatgctctgacataagagtgcataagccctcttcaacggagaggagtcgcaccctttaaagatacgctaaaag

SEQ ID NO: 96080 - DNA, 425 bp, Glycine max
atgaaactaatgccaaatctgctcaataataataaaaaaaaagcatgtgcttggtgggtggtggggtagtattactgaccaaaaattaaaatagaaaattacaccactaagtcacaaactaaactaccaatttaaatgtattttacagaaatagttgtttatatttatcaactttttgatagaattaaaaaaatttattttttagaagaataaaaaaaagtaaagatattttttgttagaattaaaaaaattaattttctaagttttgctaaacacgttcttgtgatattttttttaatgattcttttaatgattgacttttaaaataattatcttaaaatttaataattatatcatacaattgttatataaaacttttaaaattttagatgtataactcatttttttcatttctttttctccta

SEQ ID NO: 96081 - DNA, 272 bp, Glycine max
aaaacaaaaaacttttaaaatccagcagcattacaatcccaggggtttcacaacagggaagttaaaagccaatagaatgaccttttacccaataacattaacatttgttcataaacaggaaagaagggctactacactaacttcttcataaacataaaggaacacttttttggggaaacaaagggggatttgattttcattttttggcaactttgttgatcaagggcttgggaatgggagggataacaccccccccaggaaggggccctttg

SEQ ID NO: 96082 - DNA, 462 bp, Glycine max
gatataaataagttcattatcatgtaaaagcttccactacaatagcagtaattagtgtgcgaaagctacattcatctcatgattcattccatttttgcatcattatactacctagagcataataaaactcttagcatagatatacttttcacctattagtttaacaaactaataacaacactataaaaacaactaacaatactataattttgaagtctcagataaatatgttaaaagtcccttgaaaaatgactgaattttattataagtcccaaataaatttttctttattttaaattctcgatatattaaaatctttgttttaaatctctatcatcagttaagtgatgacatattaccttacaaactaattttctaaatatcatcaatgattataatagtgtcacgtcatcacataactaacaagaaagactcaaaacaaaagttttaataaattaagaa

SEQ ID NO: 96083 - DNA, 195 bp, Glycine max
gctcaattcttgctggaggcttcaagatctttgtacagatttctggtactgcattcactgctttgtgtgctagaaagaaaaaagaaatcaatttgcacttcagaactactaatttttcattggtaaatttgactctccttgtccatcacagagaaaatcgagttgaatcctcactgactcatttgtttttttttg

SEQ ID NO: 96084 - DNA, 345 bp, Glycine max
caacatctttcacgctgatacctatcccttacacaccataacaacctagcatatcatctaggagcgaagaaaacggaggcgatctatctcatccgcaccaccacacctgaaccgccaccgcacttcttcgccaccctccccttacccctcttgccacatcctccctatccgccatgtctcgcacagcaactgccaccccaccgccggcatactttcctcctcgcaatgcgacaccgacgatgcggcactgcgccgccccaaacgtcaacgcagtgcatttaggacctcgccacgcacatgagccgcaccacccgaagaaaaaggcccgaaatgtctccgcggcgt

SEQ ID NO: 96085 - DNA, 496 bp, Glycine max
tgttgttcttcctcagtttaatcagcttccacagaaatcagtagaagtaactgcgatcaaacaacagcttttatctcaatatgatgttcttctgtctcgcatcaatgacctaaaagaagctgctgaaaaagagatttggatgttagctcgaatgtgccaacttgagaacaaaatttcagctgttggagaacctgcttatcggactcggataagtaaagtcaaaagggttcgcgagagcctgcaaaactccctcaggggacggattgaattgattgaaagctatgctaggatttcctcaatgattgaaatcgaagtggagatggagactgatgttcttgctgctgaaactgctagtaatatggatagtatcaaagaacagatagagcaaatcatggagcttgaaaatttggaggagagatggaaaatacaagcagaagcaaatgatgaggctgaaagacttcttagttcccagcccatgcctttggacgaagtttaa

SEQ ID NO: 96086 - DNA, 253 bp, Glycine max
gacgatccaaataaaagttaaagatgaataacaatcataataataaataaatctacagatcatatgcccaaataaacgactcaataaatctgtaggtaaaattctagtacgaactccaattattctgcataaaaactacatcactattgtgttgggaaaaatcttaaaaattctagatcagcagagagactggataatcaacggggttaagtctaagctttccccaacagatgtgattcttcacataatagta

SEQ ID NO: 96087 - DNA, 259 bp, Glycine max
gggggaggattcaccccttgggacataaacgagaaaataaagtttaaaggaccgcagggggcctttagcaaatgaagatttataataacccccaacttctttttatgggggtcccaggggtcacttgaaaactaggacattaaggggggtattaaatatccctctaaaatcaggggtttcagagggggttaaggcttttactcttggtcataaaagggcccaattaaaaggggtttttcccttttcaaaaagaaacaaa

SEQ ID NO: 96088 - DNA, 262 bp, Glycine max
ggggacaaaatggatcacccaaaaacatttttattattttgacaggggaaattggcccccccccttttggcggggcatgcatgccacaaaatcaaacataatcatccccatgaaatggttttttttttttctattttggcaaaacccctacaggcagggcaaaatccggggcaacacaaagtttggataatttcaacttgcaatttttcaatcggggaaggtaaatttggggggaccaaattaaaccctcttctaattttca

SEQ ID NO: 96089 - DNA, 158 bp, Glycine max
gacaattgcaaccgggaagcttcaattccaaaggcaataaacatcacacggcataaatttcaaatttaagtccaagaaatataaaaatcaaatgatacgacaaccaaaaacaatgaaaaatggtcaaagactcacgttttgctttggccctgtcccta

SEQ ID NO: 96090 - DNA, 174 bp, Glycine max
aacttaactaactcaaccaattaaccattttgtgtttttcttaagcgcaaaaagattaactttcaacactcaagattagggcaaatgcttcagagctcaagaagatttacaatgctcaatacatataacctaccagagaaaagctgattcacaacggttttcccccttacaatt

SEQ ID NO: 96091 - DNA, 418 bp, Glycine max
ggattttctttctttttaacatgctttggattcctaattttgactttgacccgttgtacgaatttaatggtttttgtgacgctctttcacgtatagccaatgcttgaacgtcttgaattgtttcggactgttcgcaatttctgatagcgctataatcttgtagggagagtcgctttgacgggaaacaagggttttcgctgcaattctaatcggtcaaattggaatcgtcggatcaatttgtcatgaagttcctggagtgttctgctttagatcggcttaatgatttcttgggtaatttgaatctgggagaacgtactatcaaaggatgccttgaagcttatagttgcaaacatgctggatcggataaaaaactctccatcagtttggagacagagattcttgattatcttgggaaatc

SEQ ID NO: 96092 - DNA, 389 bp, Glycine max
agtgcagtaaaagaagtcaagaactcggaagtattgttatttgattggtctctattacaggactatcttgagcatactatttgtatccctccccctccaagaaagtactcctcaagtcttgtctcttccatgctttcccctttctccccaaaatgcaatcaaattttaccagagatctatccaaaagaggactataattcaaaaaacaacaatacttaaaccttatcaaagaggggacagcctaataaaacaaatcaattacaccacaaatttttagaaataacaaataaacaaaactagaaagcttcaggaaggaatgttagcttgacatatccaaagcatttgctttattatataaggaacaaattagagtcagtttgacttcatgc

SEQ ID NO: 96093 - DNA, 430 bp, Glycine max
cttggcttcttcttcctctgaacgcattttccgctgccgcaacttcgaagtcgccagctcagcatcctcgaaatcagtctgctgctgcaggtggttgcaatctggcatggatttcctctggagcgagaatgcggcgacgccgcgcgcctcgcatttctccgttgcgatctacttcgccttcgccagtttcgcggccaggttcttccttgacagattcgtctttcgcaggttggccattaggattttgacgaagggtagagctcctttacatattactaaggaaatgcaagtaaagattggaaaatgctcagaatcaatgtggaagctaacatattatgctacagttgaagcattcattcttaaaattacctaccaagaaccctggttcagtaacacgaaattatacttcaatgactggccaaatcatgag

SEQ ID NO: 96094 - DNA, 442 bp, Glycine max
gtgtatacaatgatagattgctcacaggactacgatatgtcgcacggcctcaacattctttaagactgacactgcttctcataccctgactgccgacctacaccacatagcgatacagcggcgacttgtcacccatggcaagcagttcctcctcgctgtactgctccctcacttccgcctcggtcatttgatctctcttcttgttgagcgacccgtaagccaacctcaggaaaagcgtcgcaacgatgcccgccaacaagatacccagacaaaagccatacccgagccagtacttcggcgcctgcgcttccagaaagatgttggacccgatcgcgccgcctagattgccgatggagatgagcagagccatgccgacggagcgcttccatgttggtgcaagattgttgccgacccagctcaagatgccgataatgggaggata

SEQ ID NO: 96095 - DNA, 395 bp, Glycine max
ctcgagccggtcatggtggagctttgagggtgcagtaggagaccctcaaactctattactcaaacaggattgcagcggattcacggcacccaacttgtccaacttcaaccaaaatctaaacgcaagtttggcagacctgagagcagaagtgagcaaccaaaggaagcactttgccacttctcaatcaaccaccggaacgagtcctgtctatgccatgattcaatgcaggaactacctctccaacaccgactgcgctgcctgcctcgccgccgccgacgccaagattcgcaactgctccaccggagctaacggtgcccgtgtcatttacgacggctgcttcctcaggtacgagagcaatgatttctttgcccagatcatgcctcgcagcagcatac

SEQ ID NO: 96096 - DNA, 324 bp, Glycine max
gctttccagaagcatcacccacaccaacatgaagttctctcacgccctcgtatgggccaccgtggccatgggcctcggcgccgacgcgaaattgtttggcaaagacaagcccgtgtacgaagactggtccctcgagcagtcccttgcgttcctcaaggagcagggcgtcaaggtgcgcgactcgcagtcgctggaagaggtccgcaaggccgtcctcgagaatgccgacgcggctgctacctggggcgcaggtgccgcgggcaaggcgcaagcgtactttgaggctggcagcgccgctgccctggaggcttgggacgagagcca

SEQ ID NO: 96097 - DNA, 373 bp, Glycine max
cgggctgcacagaactcttcatcattcactagctacgaaactcttttctctcgcctcttgctccactccccctgctccccatcaccagcttcgacatcctccgcccccctcatcaccagccagatactataaaacacagtcttgtatatagcgatcacctcatctcgtctctttcatctccaccctgacaccccgctttagagctccttcttggcgctcttgctcgcctgcgcactcacactgctcagactggcagagtacgagctcgcgctgctcgccgcgctcaccgcgctcttgctcgcgacagagtacgccgacacgaggctcttgctcgccgacaccgacgtcaccgacgcggcgctcgcagccgacg

SEQ ID NO: 96098 - DNA, 363 bp, Glycine max
tctttttttttttttttttttttttttttgtattgttttgttttttcaataaactatattggtcttatgcatatttttaagatcaatatacaatttgcctttagggcgtgtacttaatttaacttggaggattgaggaagccataatttagaatgaaaatgggaaaactaaaagttatttggctaacctattgtaccaaagggtgatgaaaaattcttttctccttacaaaacaatgatattcactttatcatgaaggaacagtttcttgcaaatacattaccctccaatcatgtttctgtacaactcgaacacgaatatcgtatgcttatgagaaaaatatgaatggaaaaagagatcaaga

SEQ ID NO: 96099 - DNA, 238 bp, Glycine max
cggaaaaagaaaggaaatttcaaggttgatagaaatttaccccctcaactttcccgataatagaaattgaaaaacccttgggcgggtttaatagcccaagaaaaacccggggattggcttttaacccctcattggtcttccatccctaaagaaacaaataaatttaaacaaaactggcaaaacaactctcccaggaactagttttttcctgggatctcaaaaaactttggcattttta

SEQ ID NO: 96100 - DNA, 407 bp, Glycine max
aattgaaaggagtgcgatttcattacaaaattaaaagacagaaagaaatagtatggtggaatatattaactattcccaacgggacaaacttagataatgcccccacctcccccccccaaaaaaaaagaataccatcagaactaccaaaacggagatttctcctcaatagaaatctaatgcactacaatatttataccaaaaacacttaaaaaaattgctccacttgtcctttctgcttgtttcttcaatcccttctctctttgtgagcatcaggtttaccttctcactcaaatcgcatcgtacacagtcggagacggaaacttcattagtaagactgaagtagctaaagttcagtgcctcctccaaacataggcaaaagccagttaaatgttcaacggttctgactc

SEQ ID NO: 96101 - DNA, 451 bp, Glycine max
gaaatatctgaagggagatttgatgcctgtccacccatacagacgcagacaagacctataaattctctcaacagtcatgaacactggaaaaataactcataggagaatgaaaattgttacaacttggagctaactaaggagaaagaaggaatgacattactgtcattacattcaacttcaactagacaaaacacaaatgataaggagaatgtcgagtcttatgcactgtatgagagaaaggaaatctgtcatagaagtgataatgtggaaggtctctggataaatcgttttttaccaaagtcaacttcccccttggtagtttttgaccaccttaatgagagaggtggttctgaagtccattctgcgtcttgcgcaatgcttccacattcccataaacacatttctctgaaaagctgcaagattgaagaggccagagaacaatctactgatg

SEQ ID NO: 96102 - DNA, 412 bp, Glycine max
ccaactaatttctttacactagctttgattgcaacgatacaagcgaattaattcaggggcaagaattgaaaaatcacttggatgctatgttatacatatctaaagttcatcctttgatgaatgctttattaaagaatgcctaaacttctcaggttattcaaaaaggtttctccaacctgggagccaaccttaacaaatacagcagggtatcctattggagcttctacccattcttcacgtccttgtttggaaaacacttttcctgtccagatatggatccaactgctactctctcccaatggaaaataagctttaacttttttctttcctttgtcaaggacaggcaccactaggaactcagaaccaaccaagaactgctgataactcaaacgatgcacacattcatcatcag

SEQ ID NO: 96103 - DNA, 324 bp, Glycine max
gtcctatgttggacatatataggtatatgtatattccaattaaaaacaagctactctttgcgaccaatgatagtttctgacgaccctcttaattagcaccattccatttccatatatacattgactcgatacgacaagacacatatgacacacataaaaccaggcctagcttcctacgctttccacgtttccatgcctgccactcatcatgctcttagggctagccgggaatgatcacaacaaggagatacgcctgttatataatgttggcgttacattgagttttgtgattatcgtatgtgtacaacacagcacatacataca

SEQ ID NO: 96104 - DNA, 301 bp, Glycine max
ctaccgaagcccaaacgcaagcaccttccgggttcgccactgccctcacgaccactcttctcactcactggggattcgagggctatataaggtggctaaggggtatcaaatcgacctacaagcagcgccgagattggatatgcgatgctttccaggacaacttccatttggagcttgacctgaagagcattgggcaggcgtataatggggagaagggggtggtcctggagatcgaggggctggggaggggggtgacttgttatgcgaaacaaaatgctgaaggggtcgaagcgaaatggga

SEQ ID NO: 96105 - DNA, 343 bp, Glycine max
agggggaagcaaacattatttgtttacacaaactgggttactggataccctttttatggatcaaaaacaaaaatgcacacttttctgctaacaaccacacttttctgttaacaaccattggacaccttttgctcaaatccttcccactgaaatttaattgtcgtaatggattgacttaaattccccaatacaatacaattttatatcaaatgtcaaacatcaggggcagctccctgggacttttttagctttgctacaaaaacccacatgttggcaaggtcattttctagggatggttctctttgctttgattcttcaaacttcctttgaagctcgggttttt

SEQ ID NO: 96106 - DNA, 438 bp, Glycine max
cgtaaattctagattttagctacaaaaaagaatcaaagtttttcatgtttcagtagcatatcttagatcaaagattactgctatatgtgatgaatattagtggcactagcattacagcatgcgttaatcttttgcagagataatccatgcgctgataccaagcaacaatttcaccaaaacagtatttcatcgcaaaattttacattacactttacaatttgtcttaccgccctaatgccaagcatacgagtatgttgcttgctttgtttattaaaatgaggtactaaccataccgtaagtacaccatccaagtgctgatcaagccaatcatccacaatcttgtgcttccaacatcaagcaaaggttcatttggtttgaaaccaagattgctttgtatcacatccccaaaagacatggccatggacatccaactgatca

SEQ ID NO: 96107 - DNA, 173 bp, Glycine max
ctcgagccgttctcactgtctctccagagaacttgatagagagatggcagctgcaacatctggtgctgtgttaaatgggttgggatcttccttcttgagtggaggaaacaggagccaaacccttctggcctctgctattggaggcaaagttggtgctgctgttactgttaatc

SEQ ID NO: 96108 - DNA, 235 bp, Glycine max
ggaaaaaaattggacgggctttatgagtaacattccactcccaccccaaaatacaaagttgagttgtacaaaaacaaaaatgacccgcatattccttacaacatatcccgcatatgtttgaaacgactcatctttgcctaaattacatttttttccgggacaaccctcattttttggaatatgaattgaactaataaggggaaataatcattttagccgaaaaaagctgaatcaa

SEQ ID NO: 96109 - DNA, 251 bp, Glycine max
taagattgagacaaggcttttttgttggttggagatgcatgattgtggtgtgctttgttttcatttcatcatatgacagccttgtgggtttctttggtgtttcttgatgcatacttaatttactttattattgtgtatttatctcttccatttacaaaaaaaaaagtttgtgtaggtttccttctttgaagtaaaaagaaattaaatatgtactgaaaatggaataatagtgtgttttatttgtgttttat

SEQ ID NO: 96110 - DNA, 195 bp, Glycine max
gcgtggcacatcaatgcatagaaaaactcataactatttgggagtgtgcactactaggcaactcatgggggtggacgcataatacacttgataacaggcttgccattagcgaccttgccctgtctggtcaattcgaacgcctccaatgcatccttaaagtcatatcgtagcgagaccagtggcttgaggtctacc

SEQ ID NO: 96111 - DNA, 286 bp, Glycine max
gaagtaaccgtccttaaaaggagatcacatcaattgaacaggaaaagataaaaacaaattattagttttttagctattggaaactcatgatcacattaaacacagaaatttgaaagcaatttaacagaatcacgataaagaaagcctgtgacaaactcactccatatcttgttcatcatgatagcagactacctaacttgaataaggtacctaatgtccttaaagctcaagcatgcccctaactgttttagcatcgtaagtcttctacaagacaagaaccattgga

SEQ ID NO: 96112 - DNA, 328 bp, Glycine max
aacatagcattacattttgcgatttaacaaatcataaagtttgaaacagacgtagttcggacaagggtaaaatgtatgtttgagtattactcagaatggaatatcacctcattcattttgaaggttaaaaatgcatgcaccgttctatgttgtaatttgaggtttctctgcagattttcacgtagctctgtaagctccaaagccttgaaagttaaaaatctctcaaatattaagttcctatttcccagttttgatgattaaatagcatactatacaaaattttgtgatgcaatgatactgataattacatgcctgagtatgaaacgat

SEQ ID NO: 96113 - DNA, 488 bp, Glycine max
  unsure (1)..(488): unsure at all n locations
taactactatggaggtaatcgtttcctcaacaattgttgtggaagttgctgcaatttctctcgcgatggttgtggtggtggtcgcaactatggtcatggtggtagatagtctaacattaagtgtcaaatctatcataaatatggtcatgtggcttcctattgctattacaggcatgatgataactatgtctctactcaaccaatggcctatccaaatcagaatcagtactcaaatcaaaatcacaatcaaaagaaccaacacccaaaccaataccaaaatcagtatcccactaaccaacatccaaaccaatatcccactcaatcttcccattcatatcctaatcagcctccatatcggaatgctccacctcaacgcaaaaatccaccaccacaagctcatctaactcgtgctcagtgctcctctccacanaattggtatccagatttaggtgcatctcaccatgttacaaatgtttctcaaaatattc

SEQ ID NO: 96114 - DNA, 252 bp, Glycine max
caaactctatgatttcaattaatatttacaaatcctttattttttaagaaaatcctacaaatttaataccgaagcgacaaaagtattttcaacaataggaagtataaaaaatataaaccaaggccaattacacaaatacgcttcagatcaaaatccacactaaacaggaatagcacatacctaggaatttcataatttaaataggaccaaaatgttgagcaaaaatagtcttgttataaatgacttaaaaat

SEQ ID NO: 96115 - DNA, 538 bp, Glycine max
ctcgagccgattcggctcgagaattaatcatttaaaaattataaaaataattataagttttaataaaaaaaattaaatctaatcataaaataataaaaaaataactacaaaaaagtaaagttttatacttttaccttttgtatcaggattatttaataataaaataaaaattacaatctcgaaaaataaagatttaagcataattatttttaatatttcacaattatataaaaattatatttagattttataaaaatacaatttattaatatctagttatctaagaaattaatttaattaaagttaacatatttaattaatttaaaattaaattttagtaaacaaaaatcttaaaagataagttataagataaaatataaaaaaattaaaactcaatactggtagtaataaaaatattcaacagttaagtttgtaaaaatttaagtgaaaaaaatttaaataaaatttattttaaaaatagattataaataaacacaaataagttaagtaaaatgaataaattaatatataagaatta

SEQ ID NO: 96116 - DNA, 302 bp, Glycine max
ctcgagccgctcgagccgctttcgaaagattttatccaattgaaattttaaaaatgactgggataaacttaagaattcaattattgaaattgaataagtaaacaatttaattggattggtcgaatggtatcaaaaaaatggagtactaactcccatttcttatttattattgaattaaccgatcaacttgctttgttatcgaacatttctttttgatttcaaaaattttccggaaaaaatttgaatctatttttatatgcgaatcaatcctactacttctggtcctgaggtttctgcgcttg

SEQ ID NO: 96117 - DNA, 342 bp, Glycine max
cgttctttaaccgcggtaatctgagcattgcgcgcgacctgctcgacattctcgcggaggccaagcaggaggtccccgcctggctcgtcgacattagcaaggagcgctcgtttggcggcggtggcggctacggccgcgggcgtggcggtggtgggcgcggtggcggtcgcccgacgggcgggggacgcgatgtgcgcatgggcgggggtggtggtggtggtggcagcagtggtgggttcggtggcgcccgcagcggcggcggagggtggggcggcagcggtggtggattcggcggctcgggcggcgcgttctcgactaacggcggcggtgggggcggtgcga

SEQ ID NO: 96118 - DNA, 246 bp, Glycine max
caaacaaaaagggtacattcgtctccctctctacatgggttgggtaaaaatgatacacgcgcaaatctctcctctgtcttgtatatacaggccaaataaataaaaatgccttctgaccgtctctcgcagacctcgcgatgccttttttgtcgttataatgtatttgctgttgtcgtcgtgccgtgtgttggtcgtcgcttgtaggggcgacacaatgtgtttgatttggatctattctctattgtt

SEQ ID NO: 96119 - DNA, 545 bp, Glycine max
cctcaccacaacaatttgggcccaccaaaccacccgaacttgcaatactgtgtcgccaacaagcccgaaccgggtccttcttccaaatctcactccgtggtagaggaggatgtgattgcaagatgaggtagaaataacgctgtaaaatcgaaatcttatatcacttggttttccgtggatttgtgacatgattgatttgaacaaaaaaatcagaattagagtttcagctagtgttttgtattaaagttaggaccaagcttagatataattgcttaggtgtttttgttcatgttctcctatacattttagttttactttggtaatctatgtagatataatttcttaggtgcttttaataacgtttagtagcttcatttcggtaatctatgttaacttttactagtattatgcaatttgctgaggtcaaactctaattttgattggagaacaacactaacaacacttaaggaactgcgttctaagttttgtagattaatagctagaactcgattctcattgaaaatcaggaaaaaaaaaaaagaaca

SEQ ID NO: 96120 - DNA, 201 bp, Glycine max
gacatgatcattcaaggagatttataagagacacatgctccaatattggacaactttggaggacagaaaataaacaaaattaacatgttggggaattaataaaaggctactgaagaccataaacaagcaaagctgcaactgaccctacaccagccaggagtccaataataactccaattggaggcaagctacccaccaata

SEQ ID NO: 96121 - DNA, 468 bp, Glycine max
gtaagaacagggagacccaatcagctttttttgttgatgtgtcaacatctatatgaaccatgcatttgtaaatgtgataagatggaatgaactaccaatttagtctcctaagtattattaccctctctcttgagtagttcctaaagtaataaaactatataagtaattccctaagcattaaatttccatcaatttagttcctaaattgatttattctattaacgttcaggatcattgtgaaaggttttttaatatttgaaggactacatatcatgatatataatatttcagggattattattattttttaatttagggatcatttaagagagagtaatacttcaaagaatcaagaatgaaattgatagtttatttgacatagatggctcgtgatttatgatgtgctgactattttgttgttttttaatctaaaatataaaatctctaatctttataatcaaaaaatac

SEQ ID NO: 96122 - DNA, 323 bp, Glycine max
gcttgtcaagggtaaaaaaggggtggattcatttaaaagggcatgatgaccaactttagggaaagttaggggccccaaataggtccccaattacataagcaaatgactaattagacccaatatgctcaaaaacagagaatgatcatgttaatgaagtaattaacagatcccaacccagaaaagatcaagaaaacacacctattcatataccactcggtactatttgttacagacaaatttaaactgcaaaaagttaaacatgcaatccctttaccacattaaaaaatctggaaccaaaatgccttttgaacctttagatcaaa

SEQ ID NO: 96123 - DNA, 488 bp, Glycine max
aaaaattactgatgtttttttttcctacaaaatgtatgatttttgtccatagaagaagagtagaagagagtgtggaggtataaggagaaagtgacattatttttggtttatttatttatttttattttcaatccataagacataagtaacatctgtacagttaggctgggaccatgctcaccctggccatgtagcttgtactatacagatttcatttgaaccctgaatagcttctgcagttactttaagtcttcattcatcaaccatgtgttagttctatcattttaagcgtgcaagatatcaaaatgctgtcatttaattgaatgcaacttacaactaccttgatatgatgtgtctttcattctgatacttagtggtattgctcttagccttgtgtattactattatcatcgatacaactgtctaacagtataaaaggaaaatgtaatctatcacatttgagtaactgacagaagtgggtttttctt

SEQ ID NO: 96124 - DNA, 453 bp, Glycine max
aagtaaaggctgaccaattgcagataaaacttataagtataaaactaacaatagtggaaagtaggtaaacgactttaccgaaaggcaaatctaaaaagaaaagaaaaagagaaaaaaaaaactataattaattcactgggggtctccatgatcagccacaactttccataaatgttgttataggaactaggacttaatttgtatgatcttgattaatgatgtttgcttcttcagaattagatgctgctgatgttttaatgttggagtccttggagagtcctcttccacgccaataaagaaaatagcgcagcatataggaatccactaatgaatcaggaattgcccttatgagaaacccctgcacagaatggaggaagtatggctcaaccagtttttcgtatccaatccatcttgtgcatgttttactatacatagccggcgttggaacaaaaa

SEQ ID NO: 96125 - DNA, 415 bp, Glycine max
gtaaaacatgacaaatggatttttatattgatgtacaagaactatacatttttgaggggaaaaataagaagaaaaaagaaaccaatggggcattctattctactagcctcaaaaccgacaataaactaccctctcctccctgcaaaaaaaatggagaaaaccaaaactacaatggtgttttacaagaatgagctataaatacagttggcctaatatacaaccatcaagcattcactcaaccaaaaaatatacatctcactttcaccaactaaccgtccaattttcattcgatcaacacttaaggtttctgctcgccatcttcaatgtttgcagcaatattccctaatcaatgggttcaaggtcaagaaccagcttcctatccatcgtgattatccaatcattatgatgatttaca

SEQ ID NO: 96126 - DNA, 380 bp, Glycine max
atataaaaagtttttatgcaaactgaaatttttattaagaaaatgttaagataagatacattcctttcataaaaaatacaaagtgtgataaatattcttcccctatgaaacttagcagtacatttagatgctacggaaccttattaataaaactgttattactatagtccaacaagtagctattgcacaaccttcatctcaaggcaataacttttaaatcaacttcatacttagaatccatcgtatggtgaagcaggaggcagggttccagagaggaatgatgagatcatggtcaaagatcgggctggttgccagcttggaacaaaatgtcctgctcctcttactgtaacaaacgtcactgctttgtatcccaccacata

SEQ ID NO: 96127 - DNA, 356 bp, Glycine max
aagaacaattactgtattacgttattattgcgagatgcccaccccgcctatcgcatcgtaaatcatcaagaagttcgtgtatacaaaacgcgctccttcatattgccgaggccacgcaagtccgacgcgtcaagtcactctccgcagcgccatcaacatcggtaactccgtcgggggtatacatcgtcaaccgcggagtatcattagaggacacggaggccaacactagcatacacgtcagtgagacgtctatgcagcgatgaccctctcctcctcacgaccgcgctgatgctcgctagcaatagtggagttgacatcatcatcgaggtcgtcacggtcctcgtagtcgttacctt

SEQ ID NO: 96128 - DNA, 243 bp, Glycine max
aaaaagggatttgggaaaaaacccattccccttggggggaaaaaactttccaattaaattggcaaaagggccaaaaaaattcccccccctaaaacatcccgggggaaaagggcccctttaaaaggggagggccaactttgaaaaaagaaaaccccttttccgggttttagcggttgggaccccttaaaaaaaaattaccgaaaaaggtttttaaaaaatttttccccggggcccctttttgaa

SEQ ID NO: 96129 - DNA, 492 bp, Glycine max
gggagaatatatatataaacatgatgtgctaattaaggttattttttaaatataattttggagaaattttataaaattcatttgataattacattgtttagttagcaaaaacattatagcatactcaaatttaacaaattgcaaatgattgttgtctattcatctttgagtctcacatatgaagtcactgcaaatttagctaaagttattcataagtaaaagtgagaaaggtcaagtgtttgtgttatattctccattcaacaagaaaaaaccttcaatatccccttaacatgatttatatattgtataataaatgtttatgttaaatgtcaaacatagcagattatggccccattgtaagcggtaaaatagcagattatgcaggtcgtcgagttgtaagtcaaagtcaggctacacttaattctaatttcaatgtttctattgctcacctttggttattttgcattctgacgtgcaagcaatgggtttctg

SEQ ID NO: 96130 - DNA, 452 bp, Glycine max
tttttttttttttttttttttttttttttttttttttttttttttttttttttttttttttttaaagaatcgaacaatttttttttggggcaaaaacctcaattatgtattccaaaatttggccctcctcaatctttttaaaaaattctagaaccataaaaggctgtttggccctagaaaccccctttaaattaagattggccccttttgcaaaagcttgacccagtttgaaggctgtcaaaaagctcccaaactaggcctgggaaaattttcccatgaaaaaaaccttttagccatttttgcggggggagcctcaaaataaattgatccccaacattaaaatgccccattgactcattgggaggcttaccaatagggcccacaacagaatagcagcccgaactccttttccaaatgacaagttggagacccaaatgggggaacccctgtgc

SEQ ID NO: 96131 - DNA, 252 bp, Glycine max
ggggcaagccaattcaatttgcctttaaaaaaattttttccctgacaggttttttggccaaagaatttggtgaatccccacgggggggggggggtttacaaaggggctaaattttttgaaaaagaagggtttgaaaaagcaaatgctttatgccatgccccccccaggggaagccccttttccccaatgaaaaaagaagggccttgacccgggggggggggccccctcttctgggttggggggcccccaaaa

SEQ ID NO: 96132 - DNA, 222 bp, Glycine max
aaaagaagctctcatatttattggggggctaaaagggcaaccctttgcctcagtacaacattaaaaaattattgcacctgcaaactggaaaaaaacacggaattttaaagcagagatgtgaccccccccctttttaacacaggaatagggttaaaaagatgaggccccaaataaaaactttttttttttttttttagcagcctgaccttaattgcttctccc

SEQ ID NO: 96133 - DNA, 469 bp, Glycine max
aaatcaaacacaacctacacatctaggtgcgataatattattatatgactgttcattttcccatattccagaagccaagcatgatgctttactattacagcaatttcagaaacaagacccggtttcacgtttattactaataaccccccacgaactgtatataactcttccggtggcaatacatttaaaatggatgttacacttaggctttgacaatgaatatcgcatccctcttttttgtacctttagaatagcatgacaaaatcgaagagaacgttgaatatacactaatccacactatatataacggctattatgcacatattggagaaaatttggagatctgaaccctccctgttcatgtgcctcgaggtaccacatcaaattaaaacataaaaactttatctactctttgctgaaccgattgtgctttccctgtacgaaacttgtaagaaccaccacaaatgac

SEQ ID NO: 96134 - DNA, 110 bp, Glycine max
ttttaagagtaaaaaatgtcacgtgaaaattggtcaagactatatctagtccgaaaccatgtaatagtttgttgtcaatttaagataataaaataataaactactgctgc

SEQ ID NO: 96135 - DNA, 110 bp, Glycine max
gcagcagtagtttattattttattatcttaaattgacaacaaactattacatggtttcggactagatatagtcttgaccaattttcacgtgacattttttactcttaaaa

SEQ ID NO: 96136 - DNA, 52 bp, Glycine max
tagatatgagactgaataaaattaacatatatcatggtaaataattagacga

SEQ ID NO: 96137 - DNA, 313 bp, Glycine max
aaaggcccaacgagaagcccaaagttttttacgggggaggcaaaattaaaaataaaggggggggggcaactgggtaattggcccccgggccctgggttttataaattgggccccaaaaaggggttttttttggtgggataccaaagctccttaagcccgggggtattaaaaaaacccttcccaggggggggttattttttacttggccaaacagcaattttgcggggggggaattgcccctttttaaaaaaaaaggccttttttctttttggggggcctggggagaacaatcaaaacttaaaggggttacccc

SEQ ID NO: 96138 - DNA, 314 bp, Glycine max
aaaggcccaacgagaagcccaaagttttttccgggggaggcataattcaaaataaaggggggggggcaactgggtaattgccccccgggccctgggttatttaaattaggccccaaaaaagggttttttttggtgggataccaaagccccttaaccccgggggaattaaaaaaacccttcccaggggtgggttattttttacttggccaaacagcaattttgcggggggggaattgcccccttttaaaaaaaaaagccttttttcttttttgggggcctgggaagaacaatcaaaacttaaaagggttacccca

SEQ ID NO: 96139 - DNA, 428 bp, Glycine max
gcaaaaagaaagagccatcatcaaaatatgtcgaccaaaaatatatcaatcaatacaaaaaaaaaaaacgggaatagagaaacccaagccaccttaccctcctttcaaaatatacacatgagatatcaatctacacttactcttcgaccctaatttaaatccaagggatcttcctatcccctagcacggtctatgaacatgtcctacaatatgccatgacattgcaaatttgataactgaggacacttacatttttctcaaaatctcaaactacaactactctatattttaaataatccagagagaaaaaaaaaaatcaattatctggatcagacaagttagaggggctgtcaagttcggccatgctagcagatgcaaaagactcggttgattccatagaagacagggatgaaacagtatcagagtct

SEQ ID NO: 96140 - DNA, 341 bp, Glycine max
acgggccactccccaaaagaaggaaactggggcataccctaaaaaaaataaaacaacttgggtggttttaacgggtccctatcacctttaaaaggggggtgtgggaccaactagtttgggggggaacacaagcggttacaattttattaaccgcccataggggggggaaaaaaagaagggggggaacgccccacttaaaactgaagggaaattacaagattgttcctggcttcctgcttgaaaaaacatccgccaaaaaaggggaacttttgttaaaagaaaaatttcaataagactctttaatacatttttttaaacacaccttttttttggttaaaaat

SEQ ID NO: 96141 - DNA, 223 bp, Glycine max
gttatagtcaaataccatcatgtgatcttccaatagacaacttcaaacaaaatctaagttgtgtaggaatagcagaaaagtagaatgtacattgaataaggacgttttctgaaagaaacaggcatcctagtcaagcacatcgacaatacatcaataacatatacttttgtagatggcttaaaagaatcgtacatgtaatcaaatttatttattaacagtctag

SEQ ID NO: 96142 - DNA, 238 bp, Glycine max
aaaaaaccagaaaggcccactaaaaaagggggaaccccttttaaagggggttttctttggagggtccgaaaaccccgggggggttggcccatttgggatattggggtttcatggtcaaagggaaatttggtggagttgctaggaaagcatttggggggaacaaaaggggggtataatcccgggccgcccccaaggggaattttttttttttcccccggggaaaaaaaccacgatttcc

SEQ ID NO: 96143 - DNA, 433 bp, Glycine max
gtacaactgctgattttatatatcattttaacaagacttgcggagagatatatcccttaaagccaagagcacttatgtttcgatttgagacacctctatttattccacttacatttgaaaaataaaaatattacattcaccaaactgggaaatgggaaatatcaaaacgtatagaagtgagccgtggaaggaattgtaaacaagttatgacaaaaaccagaacctattcctttgtgcctattttaccagcttttcaagaatagtacaaaattaccaagaaaaaaaaatgatgcaacgtattttcaccacatttatttttctctctcatcaatgctggcttcttctgtttcgttgcataaaattgcagcaggattcggaggatctgatgctgatggctctgtctttctaacttgtaggccagtaaagcgcgcta

SEQ ID NO: 96144 - DNA, 153 bp, Glycine max
tgaagctgggcacttggttcctatggatcaaccaaaagctgcacttcagatgttcagaagctggatgggagggaatttgatctaacaaaaggagattagagataattaatgttcctcataatttttacatgaatagtgatcataattatttgg

SEQ ID NO: 96145 - DNA, 212 bp, Glycine max
ggggcatgtagagcatcccgttagggtatcatttgaagaacaaacaaaccttttccaccaaggtaacatggagaatatcggttttcagcacagcctacgggtcaaatcacattcaaatttaaataaatactaaaaaatcaatatgaccgaccgtttactggactatagtccggctaaaacataggaagcaagaatttccattccattcctag

SEQ ID NO: 96146 - DNA, 174 bp, Glycine max
gggaatccagcccccccaaaatttatttttggctgcaaataatgttaaactttgaaaatttttccttaaaccccggttgaacgaacaatttccttttttttcacatgatacgttaacccaagggaaaaagtaaaaatggtttgctgctgggaatgggaatcatcaaatcaaaaa

SEQ ID NO: 96147 - DNA, 107 bp, Glycine max
gtcttttttcactcttaagttctcgtttgcggtcttcggtttcctgaaactggggttttcaattaccatccattcgctaataattaaagatgtttgggagggcaccg

SEQ ID NO: 96148 - DNA, 214 bp, Glycine max
agggtcttgaggggaaaaattggtaacccctttgattaaattggaaaacagcaaacccccaaaactgggttccaactacaaagaaacattacaatcaatttgggcttaaacaggggcagctgatttagggtatcctctaaagaactgggggggtttgggtgaggagaaaacactatctggggtctctaatctattaacacttttaacacaaaaa

SEQ ID NO: 96149 - DNA, 452 bp, Glycine max
atagtttcaatgattatagcttattttctccatgattttttatcagaattcaatttgtgataccattttgcaatcatttttatgctactaatgctaactcttggtgagagcatttgaccatggagctgcttgtccccaactcttccccaaagaagtggttaatgcgtgggtaaaaagaggaaggggtttaaacaaccttctgtgttacatcgtaaagttctaaactaactacttcatttacttttggagtcttgaactactatttgaatgaaggtgaagatgaagcgaaaggttaacaaaagttactgaattgaaagtgatttattgatccaagatctgaagattcacaagtactttgcaaaattagggtgaaagcccatggaatggattgtttccactaagtcatattgaatgctgatttttggaggaaatttttaaaaatactgagaaat

SEQ ID NO: 96150 - DNA, 426 bp, Glycine max
cataaaggattataatcaatattggatgtttggaagatgatctgtacaaaagtaacgagaagtttcttatcaacgctcaataacagcacctaaaatctcaatagttgggtgttttcatgcaatcccatgttccagctatctactacataaaaaagaaaggacttttgatcgaacaaagttccttgtcacgggaaataacatctcttacattcctcacaaggactattgtaaacatggcaatgctaccaatctattcacggaaactctgagctgcacaagatagtttccagttttacaacaacaaaacctgcagatacaaactatctatcagagcttgatatcaacatatagattcataactactggatgaacaaatatataaaaattgaaaaaaccaaacacggatgcaattttacaacttttttt

SEQ ID NO: 96151 - DNA, 244 bp, Glycine max
aggaaaaaacctcggacttcatcattatatattcattcaaaggagccaaatccaattttcataaaaaaagaagaaatgaccgttttacaaaattgattgcgccttaaaccaccatcagtttatattaggcaatgaataaataccggattgaaaaagtatgataacacaaggtcattttgcattacttgcacttcaattgaaaaagaatctcctccatattcatgcactcaaatgtggggaaact

SEQ ID NO: 96152 - DNA, 365 bp, Glycine max
aacgtgacaaagagaaagatacgcatagaaaggagttggagaataagtagaagtactggtcaaccttttaatattacagttttgttgggtaccagtgacaccattgcatttagtgcactgggtttgatccaattgctacaaagaagctataaggcagggaccaattcttattttaagaaacaaaatacaagtatcatttcctaatttaatgataagtaaatcttagcaaacctaatatattttaatttatttctttccaacttcaccagctagccggtaagttggcacagctagcaagtgattacttcttggaattgtgaggccaaatttttcagtcatgtccaagttatctggggacatgccta

SEQ ID NO: 96153 - DNA, 321 bp, Glycine max
gggcatgtaaagcatcccgttttgttatcattggaagaacaaacaaaccttttccaccaagggaacatggagaatatcggtatacagcacaacctacggatctaatgacctctaaatttaaataaatactaaaaaatcaatatgaccggccggctactgaactattgtccgcctaaaacataggaagcaagaatttccattccattcctagggtgggtctctattttaaatatacacatttttgcttggtatgtcggtcatataaataacaggccggtcttttaactgtaccgcatcattgcaagctcccttccatttaac

SEQ ID NO: 96154 - DNA, 300 bp, Glycine max
aaaaaaatccaacatcacattgttttcaggggtatacatatttttagaaaagaatgatgtttcaattatcatgtatgaagaaaactaagcacatatgtgagtaaggccagaaattatgcatttctagaaaacttaccaacagataaaaacaatgggaaataacacgtccatatgttacaatgctccaacatcaacaaccaaaaaatttcactaagaattgcttctagtacagtgtaaaaactatcaccctacaaaagccaattgatggtaatgttgccaagccatgtgaacatggagaac

SEQ ID NO: 96155 - DNA, 284 bp, Glycine max
atgggggcagagaaacaatagaggcaagttttagtgttacaaacttacaggtcatcactttatttttattctccaggggcggttaagacttattatcacccccctttcctttttaattgaatagaacaatgtgtttcaccccttactggttagaccacacccccaactcggtttttttttccccccccacccaattttataaaactgggcccctttgtttttttttttcggggggcccccggccccttaattcggtgatcccctctaaccattttttttttggg

SEQ ID NO: 96156 - DNA, 409 bp, Glycine max
ccttggtatttaaatccatatctatgtccatatacgccacaaggcaattcttaggattacatctacattggaaaaaaggggttggcatttaaactaactctatactgacataaactaagtaccattggatccattcaacaatttccttgcttaaactaagagtagaatttaatttaaaacaacatatttatgaatttccacagaaaggattttaattccatactaataagaaagaagaaaaaaacctaactacaaataagaaagagaaaaaaagagttgttattgatgcattgttggaggtgccattgggtaagcaagaggaagaacataaggtggatgaggatgaacatgggggtggggtccaggaggaagcatgacaggagtgccaactgcagatgccatgtgccct

SEQ ID NO: 96157 - DNA, 411 bp, Glycine max
ctaaaatctgagatttgattgcaaagtaaacctgatacatctgactgagattgacccaaattacctatagggaatatatttcttgctaagttgctatagttaaacaatgaatgaagtaaaatcagaaaactataagggagtagactatcactttaaggttcttatttcactagatttcaattaaatctacccatttatacgtattgtggcacaatttgatgccttactggtacatgggctgcttgtgtaattgccgagaactccatgtactgtttacaggtgaacttggaaaaatgattgttggaagtctcttactctcctcgagataaggaaaatcaacagtgtaatgtagtccacggctctcatgcctagaaagcgcactgctgaccaccagctttgcacaacaaaaga

SEQ ID NO: 96158 - DNA, 234 bp, Glycine max
agacccccatttttcccacattttctttgtctaaaagggtggtctttttaaaccccggatcattggaaccccccgccttaaatggaaaaaaggggtttaactccccccaaaccttaaaggttaaaaaaataaaaagcccccccagagctttaaaaacttttacccgggggaaaagatttattaaacactgggggggggaaaaaggggtggccaaaaaaaaattgggggggaacc

SEQ ID NO: 96159 - DNA, 474 bp, Glycine max
acgaattccatctttaagaattctttcatatagtttatacatgtacttgccagctaaaaccccaaaattgaaagagcataaaagatagaacaacaaataataaaataattacctaaatatcacttcttataaatcaaaagtataactacaatcagtacttctacttttcttggagataatgttcttccatttatccttgagatcaacaggagtacgagtctcatcaaatacacgacagccaaattccaaaattttcctccaagggatattctgattttctgtggagaactttgatactccttcctgaaatgtgagaaccaaagctataattgagaaataaaagccttgtgcggctataatatcttagatgaatattgtataatacacctcgtccaacggaaaaagctccttaattgattatatatgttttacaactttaaagtccataataacttatgagaacataaaatgttt

SEQ ID NO: 96160 - DNA, 218 bp, Glycine max
aatccaaactgaagcccatcataaagcttttttttaacccctttttcccaagtcacttccaaaggggaagaaaaacccactttttacatatgcaacccgggcacactttccgaaacaggataatagttttagattttacagactagcttttaatgcagggggcttcatttaaaaaggacaattatttttaggttcttgcccatgcttttacataacta

SEQ ID NO: 96161 - DNA, 378 bp, Glycine max
aactctcgatgtcatgtagatttactccaatgctaaaaaaactgtttctttaccctcaaaaccctccacggaatcgccaatggagttgctcttaccctcacaaacatttttaatttccaaaaatatcctttttccacttttttatagcggaaacatactttcactgcaccacccagagtgtgaaaaatattgtccatcgcaagtgcaattctgttatataagatacattaaatcatactttcgttatgtaactgaggttgaaaaaacattacaccacagaattgtgattcttgtatagcggaaatatgatttctttgtataatgaatgataaaatcatactttcgaaattttgttttttttttcctactcccataata

SEQ ID NO: 96162 - DNA, 229 bp, Glycine max
gggtgaaaaagggcccaaaaccctaaacctggtattataaggcaagaatcctggcattacatggttaaaactaaagcaaggaacgcgccataaggaacatttccggggggggtgggattttacatcggggccaaactaggggaaaaataaaagccccccagtttccgacagaatagtttattggggccaaagttataccaaatacggggcttttttaacctttaggttt

SEQ ID NO: 96163 - DNA, 288 bp, Glycine max
gggaaactaaaaaagcattcattttttataaaaatttttggcctccaagaaggggaaattgaccccactcctaaaatacctttgggtaaaacaaacggggggtcaaaaaaggatccactcggagctggatgacccaaacaattggccaagaaaaaacttaatgaaaaaattcatcctgggggtcgatgttggggggggggacctttatcctagattttaaaaggagggcctaatgcccctaattgccttgcaattaaaaaattgaaccccccccttaattaaattggg

SEQ ID NO: 96164 - DNA, 83 bp, Glycine max
gggtagcggagggagagtagatgggtgtggatggagcgtttttagaaggagtaggtatgatgaacaatgacttttaccatttg

SEQ ID NO: 96165 - DNA, 450 bp, Glycine max
ggaagaaacttcaactcttatttatatcccagtcttgcatagaatagtaatcttaagtaacaaggctagactgataaaaaaaaaaaaaagcacacaagggctaaacatataagttttttattgtaacaactactagacctgtaaaggataagtcaaaaatatctagttctactaggcctacagaattacatgtgaagaaaattccagtaagacttggctgaaggaacatcacatgaaaataagaattcatgatgtggataacgagcttccagattcaacttgtcattttcactggtaccatattgaaatatctggctgtttctgaagagtatccatccctactccttgcatatcctccttgaaatcaaatgatgccaaatcacaaagggaaccaaacattgagtggaagttgttgttgttgtgattggtctcaaagggagcattcaaagc

SEQ ID NO: 96166 - DNA, 408 bp, Glycine max
gagaaaccaaaaaagtattcattttttataaaaattattgccttacaaaaatggaagattgccccacctcctaaaatacaattgggtaaaacaaatggggggtaaaaaaatgatccctcaaaagctggatgaccaaaacaattggcccagaaaaaacttaatgaaaaaataaatcatggggttagatgttggggggggggacctttatcctaaattttaaaagcagggcctaatgcacctaattgccttggaattaaaatattgaactcccaccttaattaaggtggggggggattttgggcaaactaatcatgggcttggaattcccatgtgcacaagccttggggataggaggatttttggactaagccttggggagggaaatggggctttggaagcaatttttgc

SEQ ID NO: 96167 - DNA, 437 bp, Glycine max
gacgaacgactatagtattatgacttggctacatactatatgaatgtattgtacaacaacccgaagcaccggtccatatccctccgtccaccgtcctcatactgaggaccgagtctcagtcatcttcgccaacaccaaagccaaagctgcgcctatcctccactctttacatcctccgaggtacctcactccgtatctcataatcgcctcagggagatttgaagggttattaaacaaggtcaacaatgaacctctatcctccgagtccagacgggctaattgatcttgatatgagctctcgggggatttgatcgatgtaaaagtccacaatgtcatgacagcgacaaagacgctaatcggagcgtatatgctcggcgtgtggtttggaaaatcgaggacttttagcagttgaatagcgtgagaggcggaacgtaaac

SEQ ID NO: 96168 - DNA, 233 bp, Glycine max
caaaattgaaaacccaacaagtttgggttaatatttcaaagctgggtcaaaaaattgataaagtatagcattcttaagggctaaagtggtatacttatacataatctactgggaagggattcatgggtttttttacataccttacagattattacatgggggggtatatatatatttatatatatatatatatatatatatatatatttcccgggaaaaattaaagcccctaa

SEQ ID NO: 96169 - DNA, 303 bp, Glycine max
ggaaaagacagaccccgttgaattgaacatttgaaaatgggatcaagaaaaattaccgcccagtttgcttacacttaggcctgtccatcatttccttcccaacactttggagtttgaacactccgaaagacaataaatcagtttacaaagcaaccatttcaacacccatttcaaatgggggctgtcccgctcaaatcactggacactttggactatttttttgcatttaggaggctaaagaaacttttccaagcagcagagcttctttcgtttgatacgggggaaatgaaataaaaaaagacc

SEQ ID NO: 96170 - DNA, 356 bp, Glycine max
aagccaggcgatggtatatttttcttgatagtgtatgactatcgaaatgcaacggtgccgattgcctgaaagtcggcattacggatgaaagtctggctacaaacgaagcttgaaaccaatctctcgtttggccttgccagagagcacgttcggtcggttgattagacaagaagagcaaaagaagagacttttgaggatgttcgtgataaatgagcagctacttttttttgggtgctatagtacgtcgggcctgattcatgagactgtcggctggctcaaagcatatatcggaacccaggtcggacatccaaagaagttgggatctttccgtctctgacaccgccaagagttgcact

SEQ ID NO: 96171 - DNA, 332 bp, Glycine max
gggggcactaaaagttcataatttttccataaaaatttaacaagggatttatcctgtggttgttgggagggcccatgctctccatacaaaaaaagctggcctgatattggaaaccttaagctcaacccggcggggaggcatccatttttttttatagaaccaaaaaaccccgggtaaataacatttttttacaaaggcctccattgcatacaataacaaagtttcctggaaatttatttacttccccttacaattccggtttagccggggcaaaatgctgtattttaaccaaacttaagggatgaagcccctgttccttttttttttttttt

SEQ ID NO: 96172 - DNA, 184 bp, Glycine max
acaaccaacgttgcccctttactaaggggggattttaaacaatggttaaaattgtaaagcttttgacagggaaacatcgggggaaaaatttaaataaaaaattttttacctaattcagagttaataaaatcccggctgaatttggtttagggggcaacttttcttttaaccatgggaaaatagt

SEQ ID NO: 96173 - DNA, 157 bp, Glycine max
taaacaactaaacttattccccacaaagctaatgcaattcgaatctaccttaacctaggtatccctccctggggcattaactgccactattattggtatgattgctggtgttattggagggggggccatgggggttgttgcttgggttaccaccttt

SEQ ID NO: 96174 - DNA, 355 bp, Glycine max
gggggaaaaacactgaaatttaaatgctaaaggggagttttcgttaggaaggaatttgggcccctttcttttaaattccctaacccctggcctggaaaaacttttgctgcggcttgaaaatttctcgattttaaaactgggccttcatctatattttggtatcatcttcttctagaggagacctttgaatggcatatcccttttttgggggtggggacatttaccggataacaacggattcatcaccttttttaaaaatctggggggggggatccatttttattgggggaaacctggcaatttttttttttaccaaagctggcaggtctgacctttaaccccccttttttagggg

SEQ ID NO: 96175 - DNA, 487 bp, Glycine max
caaatatcaaaagaagaaactattattatgttccacaagtttacctccttcctataagtattgtattccacaaaaaagcattcacgagacctcagattaatcttacaggatccgacctcaaatatctcccaagaacaccgattatcaactatctcgatcttgtctataaatgtaaaaaataatatactgctccatagcatataaagcgacaaaagtacaaggttatatttgaaaaggcattaggcctaacaataaaactatatgttacaccaacattcagtatttgacggccgagattatgatgcttgtcgttgcaattaagacgcaggtacttcatagttaagaagatgcttatttcaatgtttactttggaaggtaaaactccgctttcactgcccttcaaccaaaaaagaaaagtgcatgtcatggctctgaatctcatcatcatgagaggtagcaatagaccagagaagttagagataatttt

SEQ ID NO: 96176 - DNA, 146 bp, Glycine max
ctatgatagttttcttcgaggttaattgattttacaactattagtgattgcactttaaataatgtaaaaattttctttttcatcaagtctgttcaataaaatgttacattttcctctctaaaaaaaaaccaaccatttcatattac

SEQ ID NO: 96177 - DNA, 119 bp, Glycine max
agagaggaaaatgtaacattttattgaacaaacttgatgaaaaagaaaatttttaccttatttaaagggcaatcactaatagttgtaaaatcaattaaccttgaagaaaactattatag

SEQ ID NO: 96178 - DNA, 322 bp, Glycine max
tcaacctcaacccacttaccagtttttccaaattttcattctttttccctttccatgagttgatgcatctttttcaagctaattaagcttgaattagctggtggggttttttaaattcgtcgataaaaaattacagtcgttctgctattttttttttcttcttcttgtgtttttgcttgcagattcaggaactggtgtgtgagatggtttttgttgacttaaagaaccacttccttatttaaatggcagtaagtgattacttaaatccctgaaagacatgcagtcagccttgtttctgctgaaatgaagaacttgcagagct

SEQ ID NO: 96179 - DNA, 462 bp, Glycine max
cgtttgcaaatgcttgtggagctatgtgtacaacacagaagggagcaattcctgcacttccaaccgctgcagaggcagagaagtttatttccaactctaaggccaaatagactctccttccaaatttgatagtctatctggaaactacccattcattttcattctagagtttcgttttataagcctttgataaccaatgacttgaaattgttgtttctgtttttgaataataaccaacttcttttctcttttttgcacaatgggcacttatagtgtaacactcgttttttaaaaataaatcaaattttaaaaagataatgagatttttataattaaataaataaggagaaataattttattaattaaggtaaataaaatgaatatgtatttttagaaaataaaaatgttggtttatttatttattcaataggaagtaaaatataactatctttatgaaataa

SEQ ID NO: 96180 - DNA, 462 bp, Glycine max
agataaaagcaaagaacaccataaaataacattaaatagatatttagaacattacatcaagagtttcagtagcctgctccccaacaaagaagttctagccttccattacgagtaaagcttcaaaacaacaaagaaagaaatgtttttggtgaaagaaaatggaagaagatgaagaagaatgtcttctccagcctctcagccctatttctctatgtttttcatgaagcaaatgcttggctagcctctggttgtggtgctcatgcccttttgtttccaccaatctcagtgttttaaagactcttggacttctcagcacacgaaggcttgctcagcgagcatgtcttgctgagcgagagtaagtgaaaacctgctaagccagtttggacatgctaagcgtgagaagagacaatgtcctcgctgagcgggctggctgtgcgctgagcgtgctgatctctgacttat

SEQ ID NO: 96181 - DNA, 330 bp, Glycine max
ggacaagcctaggggggggtgaattggtttgttattgttgttctcggtgggttgcaggggttaaaatccatgcaaccccttttgttgacttaatgaagatcagatgagttggtattatatttaacccaaaaaaaaaaaaacccccgttgtttttttgagaaaaaatttacacagaaatgcccacccctttttttttttacccccctttttgttacttaccttttaccccccctttttaataggacagacaccctagtgcccggggacattccccttttgcgtggccattcaagtcagcaaatcgaccttggtgaccacgggggggggctt

SEQ ID NO: 96182 - DNA, 301 bp, Glycine max
agaaaataactcctccacagagggacacctgtctatttagggaactttcgttgacaggacaatacagcaatgccagcaatgccagcaagaacaccggcaacaagaaatggagatttccctatttgatgtgataaactgccactaccggaagcccatatccatcgagatagaaaatgcagcccacaggtatttttgaacttttggattgaaaaatcctaaaggtagatgcggtatgttctgtcagttccacgaaagaaaaacagccaatctcacaagtaattctcctcagattattatacaa

SEQ ID NO: 96183 - DNA, 126 bp, Glycine max
tgcttgtttatcattttcttacttacctatcacgctctgccacacaacttcgtctgcgcaataacggaataaaaaaacaagactgattactattatggcgccgagggatcataccacaagcaacgc

SEQ ID NO: 96184 - DNA, 300 bp, Glycine max
gagacaatcataccgcctacgtattcacatactatcttttctttcccttcccttccctcgttatattcccttatcggaggctgctactttctctacttatataaaaaaaaaaactaacgagagattcataatccgcaccccatacagaaaaaaaatactagaggggggagtaagactttggatcaagcgatctcatgcggaggaggatggttaaggtccagaccgaaaattctagaaccggaccccttaacctcgccttcattatggtttaaaccgataacagaggaagagtccgagtcg

SEQ ID NO: 96185 - DNA, 155 bp, Glycine max
gccttcgttctttttttttttttttgttgatagatgaggcctgccaggaattccattaaaaactttaggaacattgacaggcaaaacatactatgactatggtttaaacaaattatgttcattggattagcgaattaaccgtgttatacaggaag

SEQ ID NO: 96186 - DNA, 300 bp, Glycine max
gagactgtcagcttcgcaccgtcatgaacgccattgcaactgctgcacttctctctctccctttctccttctccaaatcatccaagcttgacaccaaaaaggtctaacatactttaaatcacaccaagttgtgcttaagggttgagaattgttcttgttctttgttttatgcagcctttcttttttggtttgaaaggaaggtttagagtgtttgctgtatatggagaagagatagataagaagagtacatggagtgcgctctttgatgtggaggatccaagatccaaagtgccgcagtat

SEQ ID NO: 96187 - DNA, 272 bp, Glycine max
gggtgctatacaggtgcaaacccattcacaccagcataaactctatattgagccatggagacacgtcccaggaaaggtaccatatcatcctttgagaaactttaaaccctgcaccaaaaagataaaagctcatgccttgcatagatgagcagaaatatttggaaggatcaaaagagcccacggttaagatttgcttcactcagggccataaatcctcaaagtcacatgacatacattggtaaaaccctttgttgctgcttatatttggaggc

SEQ ID NO: 96188 - DNA, 262 bp, Glycine max
ggctcgagttgagatattacgcacaacacaatcacggtggacactttgcggcacacgaaaagccacaagagttagtgaacgatataaggaaatgtttcggaccagatggatatgtactcaatgtaaagaggaagaataactctaccagagtcagtatacaggctaaattgtgaaggaaatatatatatgaaggagatatatatgatataaaagaaagaactctattttaaaaaaaacaactaagataaaaattaagatactg

SEQ ID NO: 96189 - DNA, 461 bp, Glycine max
gaaaattgctggacccctctcaatgattccttggcatatatataccgtgatgatccttttcttaaggttagttcccaagtttcaaagaatttggattcatagttctccttgatcagatatcagggccgcgtaattttttttgtttttttgcgtacttgaggacactacattacacagacaatagtagttagcatcagagataagcatgtaacataaaccatgtgcctggggtataagctttattaaggatatacttcttagagagattttaaagtaaatttatctttaaaggtaggatagaagccaccccaatttcccaacacagtcatttcttaatctatattcaagggattcggttactctaacgtgagtaatttcagtggttaatgagaaaatcaattattgacattatagatattaggtgcacgtgaataataatagattacgaatgttttaaaata

SEQ ID NO: 96190 - DNA, 477 bp, Glycine max
ctcagtttgcagccctttggtgtatatggttggaaagaaatgctagaattttcactggttgatggtcttcttttgagctcatttgggattgagtatatattttcgctttcttgtggtgttctgctaatggtcttttcagaggagtgtctttgtttgatcgttagagagatcgacatgttttgttacatgtctttgctttttctttttttcttttctttttccttttaccttctcttttatctactttccccttgagggtttcttatccttcaattttgcgtcctgctcttaataaattctgtttataaaaaaaaaaagtcaatactatgtcctgtcaaatgagccaacataaaataaattggtgaataaaatagagataggaatttgttcttgtgttggcatctagtctttgaaagttattaagagatgccaaatggaaagcatgttggcattgtggttatgtctacaaatgatgat

SEQ ID NO: 96191 - DNA, 277 bp, Glycine max
aaaaattaaatgaaaaaattgagaaaagggacataaatgtcttcaataaaaaaaacaaaaatattatctaaataaggggttatttattattgttaaaataaaaataacaaatcctttcctccgctaaccataaatttcctcctctttccatgaatggacaagctaaaaaggtatcctgactcgtgaacataaaaactccctttgtatgccttaaccagatgaaagaaggggtaatcctttgggataaaaatttcctccccattccacccaaacaaat

SEQ ID NO: 96192 - DNA, 418 bp, Glycine max
caacttgcctacactgtcttagcttagccattaactgcttcagttttttccacagatcatgaaactgtcacagacattggtgcggacacccttctcaacaacatcaccagcgttactccgcactcaaaattccattttgttctcaaatggaaaaagggtctctgtgttggagtatcaaagcctcaggctcccgagttgcgcctgcagcaactcgggatccgctgttacttcttcttcttctgcggcggccaagaagaatccttcgccgccggcgccgcaggttgttaccaattctggatatgattctgcggtgactcaggagctgccagggaagttggaggccttagaggaaggcattgagaacgcgatttataggtgtcggattatggctattctgggtgtatgtgggtctttaact

SEQ ID NO: 96193 - DNA, 377 bp, Glycine max
aatgtattccttctctcttagttgatagtaaacttctttttagtgcataattggaagtattttgttggcggatagcatttgggacagaagatctgttcacatatgtcaacagtgaagagtgttggttaaagcggaagcacatatatatttcatgtttggagtatttaggactcatgtgataaaagagtgtatgttggaagaaaatgattgacttttatgataaaacatcactgtcttaatgttccctgttggcgagttggttagaaatatgctgattctttctttctttgttgctgaacaggtggacatttactttggtcactatttactttgggcttgggtcttgtgtctccatatatgggtgtcgctataaacac

SEQ ID NO: 96194 - DNA, 268 bp, Glycine max
aggacaaaaggaaaaggcaccaaattaaatttaagtggacacctttattcaaaattttagaggatgaccgatcaacattaaaaatataataaagcccttttaaacttggcttcttattttttcgcctaacacattgaaaattctaaaaatgttacgagcaagtcccatcactacttatttcactcggatcaggacaaccttcaggaacagaaatatttacttgccaagtttgctttgcctccaattcaagattggaagaaagttcccc

SEQ ID NO: 96195 - DNA, 161 bp, Glycine max
gaggacaaaaggaaaaggccccaaatttaatttaagtggacacttttacttaaaattttagaggaggacatgtctatgttaaaaatatagcacaatcctttcaaacttggcctcttattttttgacctaacacagtgagaattctaaaaatgttacacgca

SEQ ID NO: 96196 - DNA, 304 bp, Glycine max
atgcaggcctataacattctattattattcagtaataatcaaattatatattgctgtcaaaattggaaggggaaaccatctataggtttaccttcaagttataaaccaaaagttgttcccgtatgtgccaggcaccgatgataattcaggagtctaagtgttcctgaattatcaccctgtggtctttcaaaagatgttttttcgggattcgggaacgagaggaggaatccttgggtaaacaggttatatcaagtcaagaaagcagtattttgtccttccaaactaatcttcatgaaaatgatgt

SEQ ID NO: 96197 - DNA, 167 bp, Glycine max
  unsure (1)..(167): unsure at all n locations
aaagggncacatctttttcatacatatatacatacattggaaaagggggcagaacatgtacagccttacagataaagcctaaaggactctttacataacatcaaacttattggaaagagatcattttttaaacctgaaccccaatcctttgggctacctccttaaag

SEQ ID NO: 96198 - DNA, 105 bp, Glycine max
gcagcttcaggagaagtgaaatatataatccatctttcaaaaagttcactaccttgcacagatcatgcaacaggaacactacacgcttaatggccttaataatac

SEQ ID NO: 96199 - DNA, 288 bp, Glycine max
gtaaaataagcttcttaatatgtccctgccatctcagttgtgataagtaccaaagcataaatgctggtaattcagcagatgctggtgtcatgtaacttgtacaatcttgaagggtcagctaagacttcatggagactacagggttaaatacaaatatattttatttacacacatttttatgccagatgcattgcagcaaaattggaaaacggtaatcaaatgcatatgctattgcggacaaagacgtaaaatgtgacactaatctatgttggattctttttgtaaatg

SEQ ID NO: 96200 - DNA, 250 bp, Glycine max
ggaacaaacagataactggatttattttttctcaaaggcaaggcaagccttttgatacattataccccaaaacaccaacaacagtgctcaggggggcagttattacatcggactttcacatgaacgcgtcataaagggggataaaagcaaattccttcaacacagggcctttagggtcaagcccagcacaattctttgggacttaaacggggacccaattcagcaattatttttaaagcactacgggttt

SEQ ID NO: 96201 - DNA, 295 bp, Glycine max
actaacaatcataattgaggaccaactcaaaaatgtatattttcctcaaatgtcagccaccaacttaaaagaaaaaaaaaatgtgacatgtaaactctaatgctgatgtaaaaagctcggaacgtaaacaaaaacgatacaaagaaaatattgttaccattcaaatcataaaataaaatcaggataaattgataggttgaaaataaaaataaaattgtgacatgcacacaactgtgtaaaactaaggtatttggggctgaaatttttcttcagttttcacaagcaaagtatcatt

SEQ ID NO: 96202 - DNA, 305 bp, Glycine max
aaacataaaaattagacgagaaatttactaaataaaaaaaacgatcagagtttgatcgatgaaacacaagagaaattcagataaattcttcttcatcttttatcagcaacaatctctctctctctctctctctctcaatctaaaacctcacacacgctctctctctctctcttaaatctgtcatctgctacttttttttttccttcttctctatatatataaatctgcgaaaaaaaaaaacacgaaaccgcgtcaaccgtcaacgacgtcgttttgagattccgttccgttcgggtttttccttt

SEQ ID NO: 96203 - DNA, 304 bp, Glycine max
tttttttttttttttttttttttttttttttttttttttttttttttttttttttttttttttttttttttttttttttttttaaaaacccaaaacccggttaaatgggttcccccggcaaaaggggaagggtacacatacaactttcgaggaaaacgggcttttccttttttaagaggggaaaattgcccaattttttgggcaaggggggccccaggggcatttcaattttggggtaaagcctaaggggggtcacccgaaaaagaacgggcccccgggggggaaaaaaaacttttttgggccc

SEQ ID NO: 96204 - DNA, 262 bp, Glycine max
gggccccccaaaaatatgcgtatcacattcatgccattgaaaaaaaattttaatgcttatttaggggccccaactaaacttttacattggattatattttaaacaacttttttttattcagctgtccctgataaaactgggttttttttcaaaatatgggactatcttttgctacctttaaaaaatattaatttttttttcaggggataaagacccaaatttgttactgaataaaaaataccgggggggtgggacttttttt

SEQ ID NO: 96205 - DNA, 242 bp, Glycine max
gagggaaacccctccctactaaaaatcgggttttcaacatcgatcaaaaaggggattcaacaacattgactaaccggtggtgtatggaacggtggtgaaactaccaattttcaacaacagcccataattggcccgggggaaaaatacatttatttttacatgggggcctaccccaaccccggtggagaaaactacactttcaacattgtttttcgccagcatcgatataaaaaccggggctt

SEQ ID NO: 96206 - DNA, 257 bp, Glycine max
cttccttatactcgaacttctttcttggatattacaatttttttctatcgggaaaaggaaagaaaaattagaatccaaacaatgcacaaaaaaatcacctgaatcatatctacaaaacgctgaaaaaaagaaagaaaaaattggaagcagcaaattcaaccacgctttgaaagaaaactgcattttattaaccttacctacacacgacagtagtcgggcaatagtacttactcacttttttaacagtcacagatacc

SEQ ID NO: 96207 - DNA, 453 bp, Glycine max
attaatttatgtagtacataggtcttcagaaacttatacaacgaaatgagcaactatatagctcaggaaatgctcccaatggaggtgtatctttgcccttcattctggtgcagacacgcccccatgcaactgttgaagtggaaatatcagaagatatgcagcttgtgcattttgatttcaatagcactccctttgagttgcatgatgataactatgttctcaaggcaatgaaactttgtgagggatctcataatgataatacaacagacaatcctacagatggtggtgaaggttctagcatatatgcacaggttcctacttctgtttcaaaccctccaaataggcctccttcatctccaccactccctggaatattgaaggcaagagttaagaacgagcattgatatgcaattttgtactgcattgccttatttaagcatgtttggatatttt

SEQ ID NO: 96208 - DNA, 346 bp, Glycine max
accacatcaaactatatatttaacaattaacacggtaaggtatcgaatatgatcccaaaaagggggaaaatatagcaaaaaataggattaataacatagctttcagcatcaaacatcagctaaaagaattcaaagtgcctaacctttttatcagagtaattattttctgcagattcaccagaagaattctgtactcaggttggttgatcaagaatccctgttccaacccctataatggcttaacttgatgcattccgctgggatggtgcagcctccaaggtaggaacaagatacttgatcaccagacaaaacctcaacagcagtacggaagtacctacttacatac

SEQ ID NO: 96209 - DNA, 427 bp, Glycine max
gtacagcagccggtgcattaggcagatcttatcaaagaagagcccttacaacgctttgcagcatttcaatcatctacttcaagacctccagcacggcttcgaggcactttccaccatgctcaccctcacacacacctctcttgcccttggtgtctacggtccaccagcccttgaggccatcttcactgacgacctgatgcgccaaccctttctggccctctttccactcctcatccttgtccatgtggccctgctcactgatgacgacagcaggagcatcccgggatagcgtcggttcttgtcgcccgtctgagtgcgcaagagagcccgccagctgccgctggcgtgcgagtgcgaattgtacgtctcctgcagccgcgccttgaccgtgttctggttgaggctgagcgtcttgcctcgacgtcct

SEQ ID NO: 96210 - DNA, 210 bp, Glycine max
aaagttctttacatgaaagtttgatgatgatgttaccgataaagagctacgagagtgtttttagccgacgctgcaaattttctcaactccagaattgcttccctttgatctgaacctttccaatttcagaatcatcattttctgaacaccaattgataccataaaagtcttcaatattgaggacagaatgagtacatataccaaacacta

SEQ ID NO: 96211 - DNA, 149 bp, Glycine max
aatatgaataaggtctatttatttaacttacaataatacattggcattaagacatcgttcggcaacaattgatagttagttacaaacaatattataaaaaggtgagcgaacataaagaaaagagcacgcaattctgaatcatgattctt

SEQ ID NO: 96212 - DNA, 522 bp, Glycine max
ttctctacaagggctttttatccgatgaagaatgtgatcatttgataactctggccaaggacaagctggagaagtctatggtggcagataacgagtctggtaaaagcataatgagtgaagtcagaacgagttctgggatgtttctcaacaaggcacaggtatgatgaatcaaagatgatttactttatgcttgtgtgaaaacctttaagttcttcatttgattatgattaattatgtagcatatagagaagtatggttggggatgttcttattttttatttttttggattgtgcttttattggaacacatggctcttgtcatcttccctgtataggcatgtttatttgatggtgcttgatggtgagaaatgtactagaaattagtttggagtttataaataattttgtgagtttgattgatccttgggaaaataagtcaagatagacgagtgacttgagtaagttgaatggaaatgtatgcaaaatgtggattgaattataattagcaataaagtgaagatg

SEQ ID NO: 96213 - DNA, 362 bp, Glycine max
  unsure (1)..(362): unsure at all n locations
atgaaaacaattcaagacaactaggctataaatgaaccttcaccaatgtatcaactatcaacaaccagatgaaagcctaagagtgatgatgagatatcaacaaccataagacagaagctactaaggcccttgttagctgtttacctaccttggaccttcaagatgcattcttttgattatatttacaaaatagacaaggaatttaaatactaaaatgctatgcatgatgaccataaattagaggacagcatggtgtaaagaattgtggaggactggggtggggggggggggggttnncccaatttctcctttcttattcttctttccacccttaataaaacctcttcaactggataccctct

SEQ ID NO: 96214 - DNA, 225 bp, Glycine max
gaagtaactgtggatgttcttagttcgggttgaacaccctaatcaagaaactttaaaatcgcttcgtgagtaacaggacttgtcaacataccgtaattcaagctgggattgtacaaccgtcttaaatgacagtttgaagcgaattcctagaaaaaaaaaacaacagactgaattaggaacgccggactctgctgtttatgccttactactatacccacaagtttt

SEQ ID NO: 96215 - DNA, 449 bp, Glycine max
ggcaggtaccaaactggagctttgacaccgattataagatggctttcacgaggtatgcagagagcagcagcacctcctcatccaccaagacctgcagccagggctgaaaatgttcctgctcccaggccggaaggtgacaatgctgctccagcaggtatgatttggacattttatgcatgtgattatacacgtctcttttgggaaacactagtgatagagctgatgtgatttatgatgtaatttgggaagtcttcacttggaagcttacgaggttcattttatattattatactttattcattaattttctttcggttaaattttatgttcctaattttgtatgaaaaaagtatcaattggagttttttgatcgtgtattgacacaatgacaaatgcttacctttgcttcttatcttttggaagagggtcaacctgaagccgagaatggg

SEQ ID NO: 96216 - DNA, 364 bp, Glycine max
  unsure (1)..(364): unsure at all n locations
gctattggtttaattctaggcttctttcattgttgacctattatttatcacaacttttcaagaaaaaaaaaggtggagatgcagggcattgaggatcagaaaattcaacagaatgaacccgttggttcaattgctccaaggtatgaagctgataggattcagcaaatagggaatccatggagcactggactatttgactgtcatgagaatcagacaaatggtaatatctactctagtttcattactttaaattagttatatagttagattacttgtttaaacttctgctaaaaagataacaatgaaatttgtagcacttccaatactanagatggagagtcctttctttttctatacaaaaatt

SEQ ID NO: 96217 - DNA, 308 bp, Glycine max
cccggtcaccccgtcatagccattaggattcgcatcaagagcgatccaatcatggctccgtcaagatctcagccgggcatcgtctcgccagagatcgagaggatcaccttgcacaaccctatcgcctttacagccagggtttatgccgctcctttcctctctctctaccccttgctctactttgcctattatcaccgttacgatcaatggatcaaatctgaagaatggacattcgtctactgcgtcctcctcggtttcggtcacgccctgacgtttctgtccacccgatggtcagtagggatccgaac

SEQ ID NO: 96218 - DNA, 323 bp, Glycine max
aagcaaagcaaatagtaaaaatggcgaacgcaccctgccttcgttgcagctctcttgctcttcactgctcaacgcacacttcttcttcctctcactctcagagcctttctctttcttcacacacttctcgcctctcctgggaataaatatagtactaagaaatctcctgggaaggtgaaggccgtgtatgctaatgaattttgggcgcctgagaggagttcacgtcagggaatttggtctatcaggacatggaccaccacctatggtgcatgagcggttccagagtgttattagtcagctttttaatatagaatagtacgttg

SEQ ID NO: 96219 - DNA, 142 bp, Glycine max
atgtaaaagcgtctcaatcaagaatattggggaagcattggaatgactgcatcgtgactgccgcacggaacatcggacagactctccttccgactacatcaacgccccgcttcctacctccggacatcacacttctatctca

SEQ ID NO: 96220 - DNA, 303 bp, Glycine max
tttgttatactaatattttatttgtgcaggtctctgtgtttatgattttgtttatgtacaaaattaaggaaatttaatctttgtttttgaatgagccttgggttagacatgtaggcgacttcacctagtaggataaggtttttgatgttgtagtttttgaatgagccttagagcagacattatcaagtagtcatagtacattttatgaatgatttattttttcatccaatgactaacaagtagcaattcatcagaatatcattgtctattgcattcattcttctgtatgtgctcattgtcaac

SEQ ID NO: 96221 - DNA, 133 bp, Glycine max
ctcctgtatcaacctcatctttatcgtactactacttcccacgttctgctcctttggggatcgtgttcacaaaagatggctgacaatgaggatggaatggataagactactcgtgggaatgaatgggaggttg

SEQ ID NO: 96222 - DNA, 313 bp, Glycine max
ataaaattaaaatttattaaaattttatttcccacgagacctagtacagtttttaggaacccaataaattcaagagattttggaaactgaaaaaggggtttttactaaaggaaactgcaacaagaacaatttccacttatttgggatgtaccggagtaacacaaggtcaaaaggagcttttttggtagaacacacgtccggttgattcaacattttttacaggagggggtcatttttaacaggtagcttttggaacttaaaatgaagggaagggtttggcaaaggggtaacttttttttccccccttttttat

SEQ ID NO: 96223 - DNA, 476 bp, Glycine max
gattaagatacccttttgcttttcaatcaatgcccaaatcctcaaaagtcttctgaacattccccagcatgttctcagtgatggaatctcgttaatctatatgccagattcccatcggggtccagctacctcaccttttgacctttctgttctgttgatgaacattcttctcagtgcttctaaattgtagcaaatgcagattgtgattatgggtttccgttagttagttgtgttggattgccctccatagctatacattcagaactgaattttgattaaccttagttttaagtgtattaattaactgtaccatgtaactgaatgctgccaatctgcttctactgtgttatttctgggagttagtttggcctctatggatagcatatggagggtaaagtagagaaaggggtggttctggatctaggaatttgcatggctgaacgctagccttcttgtggagagtgtctctactcttc

SEQ ID NO: 96224 - DNA, 149 bp, Glycine max
gatgtaagcgattactgcttttttgaatttggatgtgtgttggtttatgggagcgaaatggttgtggctgacattgatgattgaacttagagtaggttccttgctatcaagatttggcgtgctaaaggaagtgtcagatgatgcgtgac

SEQ ID NO: 96225 - DNA, 448 bp, Glycine max
aacgcattatatatcctcattgaaagggaagaaaaataatgtaatcagtccttaaaaaaatgtaatcagactaatgaaaaaaatggtggataaagggggcaatcaaactgataaataatcatttgattctagaatatctttgtcttcgttcatccacttcattcatccaatcattgagccataaaagtcccttgtacccataatatgtagcagcaagaagtatgaccaaaataaagacaaatagaagaagccgcttcattcttgaaataattttctgtagttttgaagtttccttggattctagaacttgttcccgcctttttcgccgcttccgaactgatttttctacatctggctcttgtacctctgtaactctagttttacgcaattgtagttctgactcaacaacctgcactttactgttacaatcagaattgcaaggaatgag

SEQ ID NO: 96226 - DNA, 409 bp, Glycine max
ctctcctcccacgcccgccagtactgctcgaccgccgaatcgacgcgagtgcgcctgcgacgagcaccgtaccattgttcgcagcgtcgctgtcatcgcccggctttttccccacactccgctgcgtttcaaggcgcccgttgctcgctggaccaggatacggtcatcgtcgaccacgccctcacccatcgcccgtccggaaccgcgactgcacgacgaactccattccggcgccgacgctgcgacatttcgtctcccgctgatcgactcgctcaggtacgtgctgctgtcaagtccttggttgctttgctgggacgccgactgcgtgggcttgggttcgtcagttgcccgaccctttgccctgccgtcctgtggtgcccgctggtcagcgtcagacatttgatctgac

SEQ ID NO: 96227 - DNA, 283 bp, Glycine max
aaaaaggcaaaataactgggtaaatatcattagaaagtctccacaccaatcgttaattcatacccaattatgtagcgtttaaacaaacccccttcaatttgaaatctctagttcttttcattttacaaacttggtcatccatttttggcaaatttaataaaatacagagtttagggcctaggtaaactgataagcaatgaattagttctgattttgatgggtttggattctaaaattcaactggcccatccctaaggaaattgttagccattattttgggctt

SEQ ID NO: 96228 - DNA, 516 bp, Glycine max
tttaggaagtattttaataattggggtagttgcattatatttttattatggatctaattcaggagataataattctgatttatgtaattgtattatggatactactattaatcatacaattacaggaacaaataaatcaactttatctagaatatcggaaaaagatattaattttatacaagaatttttagtaggtggtatgccagatatgggtgattcatttttaactaaagtatctgaagaaaatattaaaactatgaaagattctatagcagaaggtattaaatcaaattataatatatctaaacatttactacaaattcaacgtcaagtaggagatatagatactaaacaaactctgttaggttctttattgaaattttggccagaacttaaaaaagttaatcaatctttaattaaaatgtatagaattgttgagcaaataataaatggaaaatatgaataaaaataataaattaattattatcaaataaaaaaaaatatttcaattattat

SEQ ID NO: 96229 - DNA, 205 bp, Glycine max
cccctcaagtgtgttcaacttcagtgccactaagttctgatgctgacactgaaaaggtggttcaaaagggtgtgcggaatgataatgaccccaccttggtggttagaggcttcaaggagttgggggtgagtgaggagcttgttgaggtgatggaagggattggtgagttagatactactgagatacagtgtgcggctattcctgc

SEQ ID NO: 96230 - DNA, 220 bp, Glycine max
gttctagatcgcgagcggccgtcctttatttttttttttatcttttgttttatcggtagcaacaagccaacaaccaattataactctaagaaaattgaaaggagaggaagaccatggaacagggcctttgaactgaaactgactgaacaggacccagatacaggggcatatccactgtgggatgatcataaaaatccttggtaaaaattttcttgaattt

SEQ ID NO: 96231 - DNA, 259 bp, Glycine max
gttcgaagcctctcgaatccatactcaacagaacattcatttccctataaattcgaggtcgtttcggtccgctctcactccaagaaaacgttttgcagaagattccaatcggggctcagaaaataacgaaacctaatcgccgatcgcgtcgcaaaatgatatcaacattgatcagaagcatagacatgatattccacgacaccaagtcaaacaggtgatttggacactttgtgggactgaacaagaggttcagcaaaac

SEQ ID NO: 96232 - DNA, 212 bp, Glycine max
gccaagaaattaattcaaactattttaaaccagggaaacaaaaaaaaaaaaaggtttatgatacaccatcaactatttttaaaagcaacctttttcgagtccaacaaaataaaattactattcatagttaaaacgaggtcaggtgcgggaagaataaaaatacataattcctgccttcctgggaaaattttaatagccaaataccctttttt

SEQ ID NO: 96233 - DNA, 218 bp, Glycine max
ggggcataaaacgaaaatgatttttatgagcggaccagttaaacaactcccctggcaagaaacataagtaaatggaaactaatgtaatacaaaaacattggccccctatggggaccccttcggagaaactgggcccctagcttaccggaaaaaaaaatccggagctttaggggtgggctttcccccaaaacaatctcaaaaaaacaaaaataaaattt

SEQ ID NO: 96234 - DNA, 173 bp, Glycine max
ggggcttggagtactaaaataataatagggtcaacaaacatcatggcttataaagtaataagagattgaagaaaacaatggttattaaattaattttaaccccccgactgggtccaatccagacactcaatgatccaataatactatgtaacagcagcactgaagcctaaacc

SEQ ID NO: 96235 - DNA, 311 bp, Glycine max
ccccaaccttcgttctatacttcaatcgatgcaatacaatctttagacgaccatcagaatgcgtctcacacacgcagccatcgctgccatcttggcattcaccgtcactgcaagccctgtgcccgagcaccctcaaccaagctctttctaccctgcagctgatccacccgcagagcacccaaagccaactacagttcatccggctgcagagcacccgaagccaacttcggagcacccgcctccagagcatgctaagccgacacctgagcaccccaagccaaccccggaacatcctaagccgacaccggagc

SEQ ID NO: 96236 - DNA, 368 bp, Glycine max
ctcatcctctaccactaccaccaccacaacaacaaccactaccttcctcctactactactctacctcctcccaacacattccttcttcaaccacaacccaacaacttcttcgctctctgtcaagcactcttcacacgacagcctcttaaactcactcaaccgtctccacctccaagtcacctgacttgccggatccggttactgctctataatacgttcttctcttttctgactcttccatccgggactgtttgctgtttccacacggaccaggccaacctccattctccggatcactctaacatcgtccttgaggccttcattggacctgcgaggacttcttccacttccctcttacaatatgtacc

SEQ ID NO: 96237 - DNA, 473 bp, Glycine max
caggcactcctcgagttcttccttcttccttacaaatcccttcattatgggcataaactccaatatatcagttctatatagcagttgttactcaaaatgaaggacctgttcatttgcatattttgctcattcaaaatcattaaaacgatttaggtttcatagtgaatgataagttagcggaattcaacgactttggattgttaacatccatacatctttctcctaggaagcaaacacaacactccactgatcgtgccctgggttcttaccataattttctttcctttctaatttctatattttttattttattattaattggatattattttcctcagctgattagtatacatggtagccaattttttgtgaattacatatttttttcctaatttggactaaagtctgaaaccgctgacaaagattagtgtccaagtcaagcaaattagtcagagaaatttagttaggatagt

SEQ ID NO: 96238 - DNA, 479 bp, Glycine max
gtaaactgaatcagttggattttccaagctctcactaactgggtacacttgaaaatagttcagggcccctaattcaacttaaagttttcatttttagcttatttattatatgtgtctccaattcagcttagatttttatatatgttccaagttccatctttgttcatttatggaagcatagtaatagtatctcttaagctttgattatcaatttaagaatgatacttagagttgtttctattgattattgcctgaccaaaccctagtgacacaggttatagttttttgtttgttttaaacgttatttatttatatgaactgatattttgctatataagatttgtgaatatgcttaaaacatatgcattgatgtcatttatgtgaactattattattttgctatgtaagatttgtgagcatgaataaaacataagcattgatgtcagctatctgtgggcttccaatccttgagtgtgttt

SEQ ID NO: 96239 - DNA, 452 bp, Glycine max
attcggctcgaggccagatctggaacgactctggcaaggtcatcggtcgctgcgagctcattccagctgaggagcgtgaacaaaaggtcgagggaccatttgctggtctccagggtcttcgcgtcatcgctgatggtaaggttgctgacgaggatgagaacgttgttggcgagattgtcgagggtaatgctaagcgccttgttggcatggcagttgatgaggatggtgatattctcgacaagtatggcaacgttaagggccacgctgagcccctacctgatgaggaggaagaggcccctgccgacctttcgatccttgatggactcaccttgaacaagcaaggttacctagtggatgccaacggaaaccctgttggtcgtctcgtcgaaggtaacgtcaaggatctcgctggacgcaagtctgacggcgagggtcaaattcacggagacacc

SEQ ID NO: 96240 - DNA, 442 bp, Glycine max
ctgattccatcctcccgctcctcctcttctcccaccaactcgccgccacactctccctctcccccaaacaccgcaaaaacaaacgcaaacgcgattttcaacaccccaatcccctcacccgcaccccggactccttccgcaacaccttcctcatgtcctcctcctccttcgagtggctctccggcctcctggagcccctcctcgagtgccgcgaccccgcccccctcttccactccctccacctctcctccggcgcccgcctcgccatcggcctctcccgtctcgccgagggccaggactaccaacaaatctccgcccgcttcgccgtctccgaccccgtcgctaaattctgcgtcaagcaactctgccgcgtgctctgcaccaacttccgcttctgggtctccttcccctccccttccgacctcccctccatctcccaatc

SEQ ID NO: 96241 - DNA, 311 bp, Glycine max
tttttctttttttttttttatcaaaagaccaccccaccggttcaacggtgtccacaatgagcatattctaaaaggagctacagggctaagaacgcaagatagccatactaatgtattcataggaagacacactgttatttagtactagaaaaatactctttttattttatttacaaacaagctttttaagctggacacatcaaacgaccttatgaatatttcatttggggaccaaaattgctaaacttagcttccaaaaaaatgaacattcttaaactgtactcatacccttttcttcaaggtaatcacct

SEQ ID NO: 96242 - DNA, 316 bp, Glycine max
aaaaaaaaaaaaccccatttttctttttttattaaacgggttccaaaaccccaaaaaggaaaaatgggggggaaaaaattccctgccaacttgttttggtccaaaaagggaatattttagggccttggcctttggggggggctgccaattttttaaatgatgaaaaggcccccttgttttgccctttaatgactttaaaagccccccaaaagtgccccaaggggaaatttgcttgaaatttttgaaaggacaaaaagttaaggggttttttttcccttttttgggcccaaaaaaattttttgggggttttttttta

SEQ ID NO: 96243 - DNA, 73 bp, Glycine max
catgcttctaatgtttgaatttcatcatggaagacttccatcattacattatattgaagcatttcttgcgctt

SEQ ID NO: 96244 - DNA, 210 bp, Glycine max
gcaaaagaaatatcttttcccgttttcatcgttgtcaatggttgtgcatctgttgaggctgatggagaaggtcagatgccatcaatcctcttccggaaaccacatattcccattctgggcattgatcctttcgagtttaacgttagaggattttcatgcttatgcgatatgctgatgtgggttgggtaatatggagggtgattaatggtt

SEQ ID NO: 96245 - DNA, 109 bp, Glycine max
gcacgcaaacagggcgatctattactccattcgatgatcaaatggtgattgaaaccctcaagggatagatgccccaagggtttttatccgtcgctccccaagacaccaa

SEQ ID NO: 96246 - DNA, 478 bp, Glycine max
taccagtgttcatccaagaccatctgtttctaccaattcgaggtctaagcgtgctggtcatcatcatagtggaaagtgtaaaggtgataaatcaaatttaggtaaaggttttaagcatattccttcttctgggatggaaaagtcagtggtgtctccaaatattcctttaaataatcatgaacacagagcctttccacagagaacaacaacaaaatcaaatcacattgtgacaaattttggttcctacatgcgtgcttcaaacacacagatggtggaagtggttcctacaatcaaggaaagttttaataaacatcccagggatctgaaaatgtcagctagaactgctccaatgaacaggcgtattgtggaagtggtttcagacatactaaggcagttaaggtggggtcccactgcagaaaaggctttgtataacctgaatttttcaatggatgcatatcaagctaaccaaatcttgaaa

SEQ ID NO: 96247 - DNA, 286 bp, Glycine max
ccatcacgcaccccgaatatgagtttcggtctccctcctgccggctcgaccccggccgaagaatggggcaataagctacttcaggccgtggatggggctctcgatcaagcgggtgcaaccgcttcgaccggcgggttcgtggatgccgctcccaaagaccaagactcgacctcgcacgacgttcaacaggataatctgcccagactcacaggcggtctcgcttcgagtgccaatgtccagtctatcgccaacgaggcaaagctcgccaagcacagcgaaggcttga

SEQ ID NO: 96248 - DNA, 532 bp, Glycine max
  unsure (1)..(532): unsure at all n locations
agccgaacaagatactccagtggtcaatgactctgatctcgtcgccatttctgacaaactacgactagtctcggtcaacgactccgaaccggaaccaagcgctgccgatttgttgaaatccgatgaggaattggccagactcttgcanggtttcagtgtttcacctaagaatttgcgttcggtataatcgattttggaaatggagtgaatttctgtatttatttctagtttcaactttatttgtattttcactttgtgtgtgtgtgcatgcattattatatctgtacaggcagaggaggaagcgctaatgttgcagtagtatgtggcaagccaaaatcctcgagaatttgatagtggagtacggccctactagtcaagtcctcatgttgcagcagtatgggctatatttttttgcggaatatgatattaaatgcataattgactttcatgctgttcttggttcccagaatgggatggagcatagtgcaagcagagatggatttacaggtgagcacaacatagaaagcagtgc

SEQ ID NO: 96249 - DNA, 617 bp, Glycine max
  unsure (1)..(617): unsure at all n locations
ttttaaccttaaataatttaccatatatactcaattgtttttttatcttttacttacctttaatcattttcatatagtatatttcttagaaaaaaaatccaaaagtactgtcaaaaacaaaaaaaacattcaattttaattgtaaaaaaaaaatattccttattttaattaacttcagtatgccatgataaaagttattaagttgataaaatagagggaataaggcacttgtacagtattagatattcttgtgggagggaatgccagatgtctagtcagaaggattaagtaacttctccaaattaacttttatttatacatacaaaattttcatttgtatttagaaaatttctctttctctaacccattacatatatggacatgggccactttgtctccagagttttcacgatcaacggtttcacccacagctgctgttttcacttcttcaaccctcatttctggttaaatcagtgcactctacccgtttcctgatacaaccctaatttgatccaaatgacccacttgtaaattctttntttttaaataaataaattcaattctaatcacttcactcaatctcaatatcttgaacgagaatgacagacatggatcat

SEQ ID NO: 96250 - DNA, 291 bp, Glycine max
gtgtaatgctgactcacttccaaatcttaatcaattgtcgagagagactgtgcaatgatatatccagaatctgcttcatatagtcaaggtagcataagtaggacaacaactagactaactggtgcaattaagacaactatcagtttattacattcacatgagtatcagttatgccttgaaaacctcataagaatgcggataataccttgatgaagctactgcagcagaccactcacactacatcacattgaggtatagtcatgaagtttaacacattttgtctgatattac

SEQ ID NO: 96251 - DNA, 476 bp, Glycine max
cactaaatatttccttcccttctttttaataatagattctaagaggtaaaatccaaacttcaaatcaatccaactaaatacttacaatcctacattctaagagacaaccaatataacaagccagaagaaaatactaacaacgctaagaggagaacataatttcaccagacaaactagaccctacagttaatccttgtcgagagaagcaaatcagttttggaagtcagattgtaatttaatgatgaaggtaacttgaaactaaacaatttcaagaaccaccacccacatctgctactggatgatcatcttgtacttggcgaacaaactgccctttcacccgaaggcactgatctgccaatctcttccggctttgatatcgcaccagattcaagatggtgagattataaaaatatgccacaggactttccaaattgactaaaaccactgattgcattaatcataaatcaatgaacttc

SEQ ID NO: 96252 - DNA, 487 bp, Glycine max
ccctgccaaaccttactggaatgaatgccctcagctatctggacatgagcaacaatagttttaagccattggattttccaggatggttttcaactcttaagtccttaacaacattaaagatggagagaacacaactttcaggacaggttcctacttctttgtttacacttatcaatttacagattgtggttctaaaagacaacaaaataaatggtaccttggatatcggctcctcctacagcaatcagctgcgacttgttgattttgagactaattcaattgacagctttgagcaaaaagacgaagttccaaatgtgaaaatcaagataatacttaaagataacccaatttgtcaagaaaatggagaactagaaagctactgctcctcttctcaacccaatgtctcatattcaacaccactaaataactgtcaacctggtacctgcagttcagaacagattcttagtcccaactgtatatgcgcata

SEQ ID NO: 96253 - DNA, 484 bp, Glycine max
cagagcagagagtagccatccgtgccgttatgcgaaaaccccaaaccttcctttaatcagacctcagattaaaatcacactttcatcttcttcactaacgataatggtaaccaagattgggtgagtagtagtgaactgaagaaaaattggaaaaattctttaggggtcaaagtcttgagattttagaagacacgcacgcttcattgtgttggctcacttgaaattagtccaagatttgaggctcaaaaagagtggaggaggcgttggaaggaagctgatattgtgaattttgtcttgacattgaccagagcaattcagagctggagtcaaaaaaggccatcagtatatcacggtcaaagtgaacaatatgggttcgcacaaagagttgcctagaactgcccaaattctccttgtgagttcgcaccaagaggtttatgaaccatgtgatgattcttttgcactggttgatgctcttctagctgac

SEQ ID NO: 96254 - DNA, 195 bp, Glycine max
accaacctcatgaatttttataagctagaaaacaatgacgtactccaacttttcattaaaagcaaaaaaaaaaaaaaaaaaaggattatgcggatagatgaaaagaaggaaaagcaagaggtaataacttttcctcctttattccagatcagaaattaacccgagggaaccccggggggatcatgaaaataaaaa

SEQ ID NO: 96255 - DNA, 493 bp, Glycine max
cattgataataaaattgtaatttagtaacaatagaatgtaattttttgtttgtcaagctgaatttgatgtccctgaagcatctgatctgaggacacaaaagaaaatacttcagactgtgagggagcggtggagacaattcaagtctgatttgacgtcgaaatgggcacttgcagccaacaaggaaagtgttgacgacactgtatgcgaaaagtacaacattagcaaggagaagtgggcccaattttgtcagacccacaaagaccctttgtgggagatgtgcgaaaaatggcacaagccatccagaagcaaaacactacccctcacatgttgtcttgtgggggttatcaatatttagaaaacaagttgatggatgaaaagagaaagaagaaattggaggaagttgctaaatccggaatcactgacaccatgattgatccttcatctgccatcaaacgacatgtgaaatggaagatggtccgcaccaagaaaact

SEQ ID NO: 96256 - DNA, 486 bp, Glycine max
gtatcagggagcctagaggttccttctggtatctcacctggtcagacctttgatgtacagcttccaaagattgaaggttcaggagaggagaccctgctcagcatctcgtttcaactgaaggaggctacgtcatatctcaaggcaggtttcgagatcgcgacagcacagatatccatcacaccagcaacgccattgaagcgacctcagtcatcgggcaagcaaatcactgttgagaaaccattcaggaacaccctcaagatcacggcggatcaagccatttgggagttcaacactcttcatggtagcctcacatcctggatacaaggttctaccgagcttctctccaaggcaccagaaattgacatcttccgcgcacctaccgactacgatatcccacaagacggttgggattggaaagacaagcaactgcatcacgcgaaaccattgactcgcaaggtcgaatggtcacagtctgactcagagacc

SEQ ID NO: 96257 - DNA, 288 bp, Glycine max
ggaaaccactaaccaataatttatttctatacacactcaaaatacacaacttttgcacagaccaaacttaacgccatttacaaagatgctgaccttttcatcaatgcaatggcatcactcattctaatccaaaaaactgacctataaaaagaaaagaaacgccatgaagtaaaaagaaaaacaaaatgaaacggacaaacatttcagactcaataatttttctacctcctgaccacatgctaccattgtgaacatcattgacctcactcacatgacaatctccggctt

SEQ ID NO: 96258 - DNA, 499 bp, Glycine max
cccattccacaccccacactcttctcctctatttaacaacgcccgaaaaaaaattagggttttcaatttggggaaataaaaatagggggaaatattctggagagagtgtgtagaaaatatggctgtcgatgatatgacgctgtgcatcatcgtcggctatggaggttcctcttcttctcgtttctccgatgcttatcccaaaaggtaataaataatccttgaagatctttgtctctcttctttaaaaaaaaaactgttttttttcctctctctctctctctctctctctctctcttatggatttgatggttatggttcaatgcttttcccctgattttggagggtttttggagttacctcgaatagggttaaacataattcacctctagcgttttcgaaatctcttcctctcttacagagattgaagagatatatcactgtgtcactctctctgttatataatatagatagatagttaattagttagttctgttcttat

SEQ ID NO: 96259 - DNA, 239 bp, Glycine max
ggatgaaaaaaatggggggccctgccaatgtatacgaaatttttgtttcaaaattacaaaagtttgggaatacgaaaaaccccattaaacttaatgcccaaattttttttttcaaaacttttatgggggggacattatatttttgggcccacaatttttcaacttaaatggcaaaggaagggactaaaacatttgggggggattcacccaacccccccattggaaaaaatttttttttg

SEQ ID NO: 96260 - DNA, 134 bp, Glycine max
cgacctcttattgatttgtgcacaaaaccacttaattttgaccccaactccattctcctctagttctcccaccatggacctttgcatcaacacacgcaccccccacacgccgcatgatcgcttcgccaccacac

SEQ ID NO: 96261 - DNA, 424 bp, Glycine max
gcttcctctttccttttctctgctcttgtgatgacagcgacttaatctctgagattccgccataaatgctttcttcgcattctcgctccgtactccgtcttctcgttccgttcggcatcgctaatttctctccgtcgagaaattagaggtgggtgaagtgaggcagaaagttggcaatgattatttctctatggatggaacaggtagaaaatagtacttccagggacttttaatgctagcttaagagtatgggcctttgattttactatgttgagatactttatgagaagtatagagtaaacagcagtttggtttagagggtgaaaagcttcacaaatatcatgctggaaggaagatgatatgatataacaagcaagtggaaactttaggttcattttggctggtgcaaatcgatcttcattat

SEQ ID NO: 96262 - DNA, 54 bp, Glycine max
aaaaaaaaaaaaaaaaaaaaaaaaaaaaaaaaaaaaaaaaaaaaaaaaaaaaaa

SEQ ID NO: 96263 - DNA, 450 bp, Glycine max
gcaaagagagatgggaaccgttagtaacattggcttcctttcagtattcagagttcctctagattcacaacaagcactatcaaagcagatgaagaataaatcatcgtgttgtttcatggttcctcctaatcataactattctattaggcctagtccaatacgttgtaataaactatcagaaagtgggattgaggagaaccccacgaccacaagcacgagcaagaggccctctaagaacaaggacaggatggaggagtacaatatagctatgaagagaatgatgaggaacccttatgagtatcaccatgatctgggtatgaattatactcttataacggacaacttgattgtgggctctcaaccacagaaacctgaagacatagatcacctcaaaaaggaagagggcgtggcatacattttaaacttacaacaagataaggatgttgagta

SEQ ID NO: 96264 - DNA, 161 bp, Glycine max
gttaactgtttaaaaggaacagaaacctaagcatgcagaagataacagagcaaagttccaaaaatgacatctaacagtggtgtgcaatcagtaagagccacttcttcttcaactttgttaaaatataaaatagcagtcattaatttaactgaatgagattg

SEQ ID NO: 96265 - DNA, 452 bp, Glycine max
tgcttgcaggaaaacgactatcgatcgaccaatgaaacctggacgactcaagcgtcagcagcaggtgctcgccgatgatcgtgcagagatcccgctcatacctgaagaccaattagcagcgccgctagctgccgtgaaattggccgagagcggcgatttcccgcggcttttgatcgccttgaccctgcgtccgcgactcgccagagctactgacgcctctggtatgacagcactgcactgggtctgcagtaaatcgacagcaccgccgcgtgtcgtgcttaccgtggcccgcgcgcatccggcagccgccgccacgcgcaatttggcgggactcttgccactgcacttagcagtgaggaaaggccttgtcctggagaccattcaggcgctgctacacgtgtacccgaatgccattgagatgcgcacacctgatggtaagacatcgcttatgt

SEQ ID NO: 96266 - DNA, 133 bp, Glycine max
aatggtaacacgcattttttttttataaattgttcagtatataacacatggtagacctgcccagcttaagacttttagccctactgggccttcacgattacttgtgaagaaaattgcggagaacccttttttg

SEQ ID NO: 96267 - DNA, 238 bp, Glycine max
actggtaatctaaaatttttatgtgtctaggacaatatacaatcaaacataacccaagtagcggggttacaaaccaaccaaaccacagactaatggcactcgagttagcaaccagatacacgcacaattggtgacttttgtttttctcactcataaatagatcacacgatagggaaaaaggagaaagagagcgagagagagagagagagagagagagagagagaaattaaggcacagg

SEQ ID NO: 96268 - DNA, 359 bp, Glycine max
aacaggggcaaacaggtccctggattttttttttctcgcagcaggaaagccccgattgacagtcaagttaagctttttgatacattagaccccaaaatcccaacaccacttctcaggtgggcagttgttatatccgcctttcccaggaaaggggcataaagggagataaaagctttttctttcaacccaccccaccataggggtcaagcccaagggaattgtttgacttaaacggggacccttttcaggatttttttttaaaacactggagattttttgaatttgttaaaaaaacaaaagccttgttatctggaaaaccacacatttttgggaaccagcccccccccccccaggggggg

SEQ ID NO: 96269 - DNA, 213 bp, Glycine max
ccaggaaaggatgggccgtccattttttggggtggaggcccaaaaacgggggggaccacttttggtacatggtccatatttggcaaactaggggaagattttttgatctaccaggggacaggttacccttgcattggctttgggagcaaaaagattttaaaatacaatcccccccaacaaaaacacaatttttttaattacctttttttttta

SEQ ID NO: 96270 - DNA, 427 bp, Glycine max
atttccccaaaaccattcactctctcttgattcatcaaaaagctgctttttttcttcttccttttctcttagcttctaattcagattcaattcgcctctcttttttttcttcattttttttgtcttttgttaatttttttttggtgtcattgtgtttggaaaggagaatcttatcttattttatgtgtacaattgatgtaaagttttcagctttgaattgtacttcttgtggggtgtgtgtattctggagcttgtgtttgatgtaaagttttggaggagttttgcttgttgtacttgtttttgtgtgttgaagagcgaagagcttctgtttgatcaaaacagaagctctttgttggtgtttttgtttttggaattttcttctggtgatctcgttggaaaacccgagctttccgaggctcgggatctg

SEQ ID NO: 96271 - DNA, 418 bp, Glycine max
aaggaaccaaaaaagttgactgcagatgatttattgggcagttataacctaagaaccagctatgatttattttttttgggttttttgaatttaaatcatttacagggtttatgattatggaatgtttggggaggcacaaaaacgaattaactattgacatctaccattacctcccaaatgatgctctttttttgaagaaaaatataatcagtaactcaaatgttgtcttgcaaaactcagcttgtttaaaatggtgccactcctatttgcttttggatgatatcttaccatttatttctgtacagcaagtcaggaaccgtccttcaccttcacattcttcggatgtgatgataaaaggcgagcattaaactggctcaaacaaaaagcatttcccctttagttatccaacgttcaaagc

SEQ ID NO: 96272 - DNA, 317 bp, Glycine max
cgaaaaaacggccaaagtttttgcgggggaatttcaacccctgtttttccaaaattacccttcaccaatatctttccaacggttttttggggccatcggacccttcccaagggcaaaaccttttcgcttccaattttttttctttttaacccagttttggcaaatttcctttgaaacttttggccaacaatttttttgttcaaaaaaatccagttcccatagaaaattaacaaaaaaaagggggctttctaaacgatttggcccaaagcccatttgttgttttaactttaacaattttaaccctctcactggggatt

SEQ ID NO: 96273 - DNA, 113 bp, Glycine max
gcattggcaagacgcaccaaaacaagtcggctgggcgcgccaaatggaccaccccataaaacgggcgtaattagaccacccaacgggggcaccatgttttgtacaatcgttaa

SEQ ID NO: 96274 - DNA, 406 bp, Glycine max
attccaatgagttttatactgtatcaaatcattgcccttatttgtcctgtctttcttctcttttgctgcacagagaaatgggcagaatattttcgtgctcatgatattctcttcatcttctggtctgctaaagctgctactgctgccttggaaggcaaaaaacttggttcatcatgggaggatgataacatggggagaacttatagcccagacactaagatatatggaagggatgaacttttggcccgcttgcaatcagaggcagaagagatagttgacaggataagaaattcaggctcctctgatgcacgaccatctaatattaaatcccctgctgaaaatactgctggtagttcatcatcgagtcatgtaattgtgggatttgttggatatcctaacgtgggga

SEQ ID NO: 96275 - DNA, 109 bp, Glycine max
aaaacaataaaaagtgtatagtaggataaatcagtgggggagcttgtacacaagttcccagcattcctctttgataccttcaaatagatatcacacgggtactgggagt

SEQ ID NO: 96276 - DNA, 394 bp, Glycine max
ttttcctacaaccttgttccttctccttatgtgaaacatgaattgaagaaaggtgaaagtaatatgaacaaaccaacaaaatcagaagaagctctcaagctaccacacgaggataacaatactttttcagattctaaaacgagtggcactgcagagctagaagactgaagtggaaaggagtcagagaaagcagagaaacatcccctacagactaaacctgcagaagaagaagaaaaagaaaggacagtggatgggctcttaatgcattacactaggaaacaatctgctcatccttgttttcaacatgacaagggaccataaatggtgaggaggacagcgagacatgtgcatactagtctgccagattatgatgatttgtaggctcgtcttgcag

SEQ ID NO: 96277 - DNA, 325 bp, Glycine max
gcattaaaccttggaaatggctattataatctgaaattgcacacaggtgagacctctgttatatttgcttgaacttagaggatctagaaacattttaaactctaaactgatgatttatccagaattgggtagagttccaaccctttagaatggcattcatcagcctaaaattatgcatagctttgatagaaaagaagcatatgcaaatgtgcatcaatccaataaatggtataagctaccacatattctaatcattatcttaacctgagttatatacaatacataggtcttcaattaccaccttcagattcgaagttccaataca

SEQ ID NO: 96278 - DNA, 438 bp, Glycine max
agagaatctccaattatgcctttctctttctacatgtttttgccacctcactagctgctagcatgcccccctctcctcaataagttttagaattttttgcacttgttttgcttatcgtcttcttggtctgttccaaggtgcaaaagtgacttcttgtggaaccaaaatagcatatagctaggattgggaaaacaaacatataaaccaagacaagagaatataacatcgtatctcgcttttttcttcttttttttttcattcccaacctgtaggagtttttcttcaaattaaaggcaatatgttccccactgctatttcctattcaacttctttgtctgaggatgccagtgtttcttctggtacaaaagttcaggacttgggaggactcaatcatggggtctcaagcatttctcctcagcaacagcctcaaaagatcaa

SEQ ID NO: 96279 - DNA, 157 bp, Glycine max
cccaggcctcaacaaaaaattttggggccaattttaaatttacgttccgggaaaaacaaaaaatccccctttgcaagccgttttttcttgtaaataaaaaacccaaacttttccggaattttttggggcagttccttattcttttgggggaccccct

SEQ ID NO: 96280 - DNA, 463 bp, Glycine max
gtgtaatatttccacttgaatgaatatggtgaaagattttctattggacagcatatataaaacacaaattcagtttaaaatggcagttcggaggcttaacaacagctatgctctcgactttgcagttgatagatacacatgcaacatttgttaatgcaaataccattcaactacctgtgtatatgatcatacttgatactacagagaaattatttcttttggataggcaataatggttgttatgactgccattaagagtatattgttgtcacttctattttttgtatgtttgttatttttatgcaattcaggtgggaatggaacttaccaaatagtttggtaatcttggaactgggcgtgggcttgaaatggttgctgcctttgaaaaagcttccagcaaggccatatcatattatttttcatcttcctctgctcgctcacatgaatcatccactcaacctga

SEQ ID NO: 96281 - DNA, 491 bp, Glycine max
cacggactagcggataaaccaattgatttagaagctggttctagctcttctcatgggccctctgttactacaatagaggctggtaaacatactgtaggtgcagatgacataagggtgtcatcaagtgttgatacccatgccccagttgcaagctcatcatctcttgaatccactggcagcattggtgttactgacttagacattgcaactgttgagtatcaactaaaggctcttggtgtatctaatgcaccaaattcagaaagtctgagttacaaagagaaatggaagaccggctaccagaacaatttgatgcaacgccagggattccagcaacaaaacaatccatatgatgttcctagtgccaactgtcaaaatgtaaattctgtgtatgctggtagggaacaatttccttttaattccaacaagttctccaatgtccagccactactgcagtcatctggttttacaccttccctatatgccacagcagc

SEQ ID NO: 96282 - DNA, 331 bp, Glycine max
ccaagaaaaccacacactaagcacggaagacccagtaaattatacatcaggaagggaagggtttccttccaaataattattcaaataactttttcaaacaattatttgaatgacataattacattgagtttcaaagtataacccctgaagccatcaatgtggaaactatcacggtgcaggtatgaagtcaggagtaaaaacaactggaagctatcgatgtctcagctattttctgtgatcaacagaacatatgttgatgctgcggggtttgcacgtcacagcagcattgctggagacccatggcttcgtctctctattttcatcatgagct

SEQ ID NO: 96283 - DNA, 324 bp, Glycine max
aaaaaaaggtgcggccttgtattcaaattgggtttaaaaaaaacaacttattcattctttatatgggatcaggctaagcttattcgggaccttgaaggctccatcattggcagaacaccttgacctcttttgatgagggattcgttaaattgcagaactatgagatgtatctcaagcgtgatgagcacttcaatcaccactcctccatcagggccaactttgccaatcaccggtgttaacaccactctgccagagggtgcaattagcattacccatttggcaagcatcggagctcttcatactccaaacatttttgcccaagtt

SEQ ID NO: 96284 - DNA, 369 bp, Glycine max
tgaatttccatattctctttctgaacttcttctccttgttgttgtgcgtctctctctctctctctctctgatgttctttttccatggagtcggcgacgattgctggcttccctcgtcaaaccctaattcgggcgtgaaaggcgtgcgaggcaacctcatcggtggagaatggagattgtgaccggagatcggtacctggagaagctggcgcagttcgtggagaaccaggcgggtcctctgatcgaaggagccttggtgtcgaagctaaatccggcgggtctccactacgtgcaatcccggctggaggcgctgcacgagctcgaaagcctccttgccggcgctccggtggactacctccgagcctacgtg

SEQ ID NO: 96285 - DNA, 181 bp, Glycine max
caatgaatcattagggtatcttgcatggttcgatgcgaagcctatccataatggagcagtgcctagcttcaactttggttcttgtcctttatattcggctgttattctatagcacttcacctagatctttggatggatacttgatgatctcgtagagtgctttttagatggtcaccatggt

SEQ ID NO: 96286 - DNA, 387 bp, Glycine max
gaatggctgaagcccatctttgtttatagcttataggggaagatgatgagaaaagccatcatacacaaaaagctaaacggtactactcaagtaataatgttacaactttttccatacctcatgcattgtgtcaagtcatggggcaatcataacactctctctggtgcatagttttcatctttctttcttaaatttccctcatcatagatatagagttccctgctccattgcttattagcttatattcttgactttccctttcccacattaagtctctgccaccataagtatctacacacgatcttcattctcctcattccccatctgcgttggaacaatgtcctgaagaagcccattgtccctcaagaaaatatgaggagccaccac

SEQ ID NO: 96287 - DNA, 151 bp, Glycine max
ggaaaaatgagcatgaaggaaagctaaataagtttgatttatgatgttgcacgtattcgctgatatgacagatcactctgctagggatctattggccagagtgagaataggtgcatgggattctaggtgtgatacaagtcagcatcacctt

SEQ ID NO: 96288 - DNA, 255 bp, Glycine max
aaatgaaggtaaccataacaaaaaaaggctcgtgttttacaagccagcaacgatagcattctgaatatacacacgttgaaacaattctccattatgtttttactcgtatacttcaatcagtggtcagagttacatcatgtgcaaggttaacattcattaagaacaactgcactttgagacatcctctgcacaatctctttcccagtaatgaatctcaccagcaaaacttctttttccgcaacttggcttcttctt

SEQ ID NO: 96289 - DNA, 274 bp, Glycine max
ggatgaactatgctattatcaacattaacgaaacggtaggggatacaaccacggaatccagcttaaatccatatataaattgagcaaagtatcatgtgaatataatgcataatacataaatatctttttccttaaaaaatatataaagcaccaatgtaaatggctgaataaggaggggaaagaaggccataaaaaagatggatccaaccagacaaattgtgtagatcatcaaaatgcgtccatcttaatcctcccacgtttccaagctcctgat

SEQ ID NO: 96290 - DNA, 358 bp, Glycine max
atgaaaggaactccttaggccttagaggcatataagacttccacttcatcctcaacatcatccacccataacctagataccaaattcatatactgtttgataggaccagtccaaagattcgcataagaatttacggccgattttagggaggttcttttagcaacaggggagagttcttgttgttgaaagtcctctctgactgcgctacctccagggattctccaacaaagttgttcgagcttgcgtcacaatctaggtcctcaagaatggggttattaactttttgggtgttagtcttagagttagcagtagttgtgctttgtcctttaccctttagacatgggtccaattgagcata

SEQ ID NO: 96291 - DNA, 349 bp, Glycine max
attaacatatctagtaacatatatttattaaaatttaaactaaatgattaataatacattaaaaatttaaaataatataaaaattattggtataaattataaatgtgacattaatacttgtgtaagatacccacaataagctaactttgtataaaaagtggatgcttgcttgctttatcttgctgtgtgttttcctaaaaagcttgtgcaaagcttttctagcaacaaccttgactactttaactggatgtcgctctgctagggttcccctagcaagcagccaacgtcatgaccaatcgcaacatcgttttcccatggacctttcttcttgacccttcgtcacccacaa

SEQ ID NO: 96292 - DNA, 291 bp, Glycine max
gaaaataaaatatatcccagaattcattatcttaacctcatcttacacaacaagtttacaggaaacgttttgcaagaattataccacgattgctcaagcaacaaaatgttacaaaattccaagccaaattgccgtacaaaattatggaaaaatacgtgatgagttctgagagttggtcactgatttcactactgaaaatggacgtaatttttataatttcctctctatttcccaaatatacaacctagttgtagtaaagtatatgatacactaaaaaaaataaaactagaa

SEQ ID NO: 96293 - DNA, 339 bp, Glycine max
cttcggcttcaggttcgggttccattcctccgcctctccgctgatttccctctcctgtggctgcgcacaccaaacccctccggttcggttgagtccacatcaagggtcatcgcatgaggaggaagagtctgttttcctttaccttcaacctatttccagcgaaaaccacttggaccgtgtcctcgccaaggctcaaacgctcgacgaaggtgtcgttgtcgtttggtagattccttcttccctaatactctgtcgctcgtttgtgttcgatagtgagaggaatttgaacctatcacccgtgcctccttctcccttcaaccacgaaatcaaccttataat

SEQ ID NO: 96294 - DNA, 348 bp, Glycine max
cttcagaaaaggaatatctcttttaaacattaccaatatttgagaggaattttgcccgggcagctaggctccctccacataaattcttattttatgtatgtatacaaggaaaagtaagcatagctaataacaccactaagcatgatcttgtgaaaagaaattaataaagaacctactcaaataattgggaaacaaaaacaagtgatggatccttctcaagttcaatagttccaactatagaggtccttctacccttcaaaaaccggttgtaccattttgcagagagctttgggtatctcttcaactctggatcatccctatcaacgtagtataggccaaagctcgact

SEQ ID NO: 96295 - DNA, 135 bp, Glycine max
gttgtgggttaagaagagttgacccatttcaaggttgattaataggagaatcattttagttgattgattgctgttaactaggaggctgatcaaggggtaattaattcacaataacactatcatatactctttcct

SEQ ID NO: 96296 - DNA, 166 bp, Glycine max
ggctgatgtttatagctttggaatgcttccgatggagatggcaagtaagaggaagaacctaaatccccatgcggatcattcaagtcaactctacttacccttttggatttataatcaacttggaaaagagacagatatagaaatggaaggtgtcacagaggaggaa

SEQ ID NO: 96297 - DNA, 212 bp, Glycine max
agaagattgaggatcttcatcctgatatgattgtaaagggttatattaagaatgtcacaccaaaaggttgctttattatgctgtcacgaaagattgatgccaaaattcttctgaccaatctttccgaacaatatgttcaagaacttgagaaagaatttcctattggaaaacttgtcattggcagggctatatctgtggagcctctgtcaaat

SEQ ID NO: 96298 - DNA, 167 bp, Glycine max
aagggtaacatttattgttaaaaataccattgcaagatgtaaaccaaatgttttgccgggccgttttttaaactgggtagcaaaacaattgcgtaataaacaaatactactttaccttgctatgaacttatttagggatagggctcaatcttatacactttgacatt

SEQ ID NO: 96299 - DNA, 315 bp, Glycine max
gaaacaaaatacttttttattcctttcagaatcatggccacaaaaagagacatcaggttttctattggtgcgctcgacataaatacagtaatcacagcaagaacagaaaaaattattaaaaataaaggtacctggaaacgtccaggagatagaacttgttaggatcctgtattctgttatatgtgtgaccctttaatgtcaaaactattgtatagaataagctcgtatcacttccaccactggtgcttgacacattggacactttcttctactttggagcaaatcattggcacattttgaacatgtgcacatgtg

SEQ ID NO: 96300 - DNA, 389 bp, Glycine max
aagccacagaattataatattatacaaagttagccaaatctggaagttgttctttggcagttggacaagccctgaattagctaatatcttgaaagtagtaactccccctgccttccgctatgttttcatgatgttcattactataaggtcgagaaatccaaactatcacaataaataacctgtgcaatatcttctatgggagtcacaagctataagtactgttcaccattgtatgacaagtcacccaacacaaaaacaaaagcaacataacaatgaataaagaaagtaaaattactcaccaaggtgttattctctttcaatcatctacctttccccatcattcattatcatcaatattttcatcatccttcatgtacttctcttgcact

SEQ ID NO: 96301 - DNA, 295 bp, Glycine max
ctttatcatttgatctagccatcgaagttcttgttgaacttgtgactaaacatgagggagtgccccgaattttgttatgcaaagtacattatctgaaggaagtacttctttttccagctctttctaggggagacataaaagttattggtggtctttcttgcttgttgtcagaaattgggcaggctgctccatctctaattgtagaagcaagtgcagaggccctagccttgattgatgccctcttgagctgtgtggcatttacaagtgaagattgggagattgcagactcaatact

SEQ ID NO: 96302 - DNA, 332 bp, Glycine max
ccaaaaatattcaaccaataaaagtgttagaaagtttatctcatgtatagaataacaaaccagcatggagtaattaaatcaaataaaaaacaaaagatggtaattagaagcattacaagcaacaatgaacaagattgagaatacacccgtctacacaatttgcagctcttacatacataaaccagactcaaagggggagccaaatagaaaatttgtttggactttcaagaaatgggtatgctcataaatgaaagtaacgttgacaattttttttttttgaaagagtatataatctatctgatgaacaaaacacaaactacaaacctgctttg

SEQ ID NO: 96303 - DNA, 292 bp, Glycine max
caaccagaatacaccactgcgctgcccttacaatattcacaatccaaatcattcatacaatcacacaaccgacagataaataataatgaaaaagaaacctagaatactcaacccacctctcaattacaacgtagaaaagagaatcacctatgattccaccctcaacacgtaaaacaaagtaacctttactactaccacaacatgctatgtatccaacaaatggggccccagcaggtcatgatgaaaacacaacaccacgctcctaattcaagcactccccaacattgaactt

SEQ ID NO: 96304 - DNA, 493 bp, Glycine max
ccgccctttttttttttttttgaataccttcttcctatcactttgacacaccttttccatgatacattttattatcagataaaattcatacaggacccattaaatagaattgggatcccatatcatttagtaggacctacattaacattcagtttgtgttgaaaaaaattgcaatactaacatttctccatcaaacaaaccagtgtcttgatcataacagggcctccatccaagtgtgtcaccagttgctttttagttcaaatgctcaactaataagattgcttctgctagcataaactatttttttctttaaaaaaataaattgccaccattaatgataaagtttgataaattatactgcataaatgtgtgagcaaaaaccatggtctggctaccccaaaaatgcagtttgattaacatatacaaagggccagactgccagactaaaagggcaccatgtatcatcataatcatatatcttattattttccct

SEQ ID NO: 96305 - DNA, 204 bp, Glycine max
cagaatggtaggatacaggatatgtcatatcatcatgatcaatactacaacgggacaactgggttttataccatggcaatggaggaaggtgcaagagctcggccatatgcagtgcctttgtcaaagacacctgcagtgacgttatcgtggcctcccaattcatggtcaacatctaatggacaacgcctatctgtgcagaacatg

SEQ ID NO: 96306 - DNA, 131 bp, Glycine max
tttttttttttttttgaaacgactagttctttgcatctagacaatacgaagcgatgcgtacgggcttagttcttttttaatgcattgatacgacgaaccggttaataaatgtgttaaattggaaccgttct

SEQ ID NO: 96307 - DNA, 345 bp, Glycine max
atcaaatgcatattcttttcactcaagtttttctagtgaatctgtattacatcaactaacaatcaagcaataaaaaatttgaaagaaaataagtaataatgatactgacaagcgtatatttagaaagttcagaagagacaagacacaataatttagttacccatcactgaaagaaggataatggattacatataggcatccctttgcaacaagtgcttcatgaatcaacaaagacaccagcatctttcactacaatcttatccggaaaactcaatcttggcaataaccattccaacaaatagaatgaagagttttgataattggttgtaacaggatgctcatctg

SEQ ID NO: 96308 - DNA, 252 bp, Glycine max
aagaggaacaaagcccaccctttgattttttttaagtttctggaatgaaattccaaccgtaacaaatcacagcttcccttacttttatataaccccacattctttcaaaatgggtgggaaaaaaaaaaaatggcctctcaataaattcaaacttttggatcttagggggaaaatgattcagggcccctgaaaaattgcttgaaactgaaacccacttttccattaggccccccattggaccttaaaaacccc

SEQ ID NO: 96309 - DNA, 429 bp, Glycine max
gaagactttgaatttatggtgaaagaagagtaaaggcttttttacaagtgaaggcttgattttggggtggaagaagaatcgaaggaatttgggtgggggtgcgggactttgaaagatcttacagaagtgaaggcattggaattgcttagttttatactgtggttagcgccgctacactagtgcccattctcaattaccgaagcaacaggagtggcagcactagttcaatctccaaagccctcttgccagcttcaatcggtggcgccataccatctacaattttggtgtttcaggtttatgaattctatggtagttaataggaagaatcagaatgggttttgctgttttgattgagtgaatatttagtgatgcctttcaaaagaaatcagatctaggcaggtgtagagaatcaaagacagacataaaact

SEQ ID NO: 96310 - DNA, 242 bp, Glycine max
tcggcggccgccctttttttttttttttttttttttttttttttttttttttttttttttttacaagaacatggaaatttttcatattttggaagggcactttaattacagttgaacaagaagtttcttgccaagacacaagttgaagcccccatggttatgcatgttacaaaaaacacgagctggcctcaaatagatcacttcgaccctttgttttcactgcctaaaatttggaacccttg

SEQ ID NO: 96311 - DNA, 149 bp, Glycine max
ggtttctctgtttctctcttctcttgatctcatactttcactctcactcactattcttcatggatcataatatgtgctcacatatgaggacaaagatggcgataggatgcttgcgggtgatgttccctgggacatgttgattgaaacat

SEQ ID NO: 96312 - DNA, 148 bp, Glycine max
gatgcattgaacacttctacttatcgtgaccctaaagggaatgatgcatgtaaagatgagaaaagctcagatcctgtggtcaatcttgtgccagattcgtccataaaggatgttgcataaaggaccaccaatagatcaaatttgggaa

SEQ ID NO: 96313 - DNA, 375 bp, Glycine max
gtcggcggccgcccttttttttttttttttttaatgacaattagcattaattatttaaatagacaattttccttattgttcttgatgctcctgggggatgtaaaggttctggtcttaggagtgtgtaacaaaaatccttacacacgttattctaggttagactcatggatggtgttaagcaccctcataactcaactcttcaagcagaggcaatccagtgtatgctatacaaagtccatattacaagtatatatacaaagcccctatacttacaagtaggatggtggcacataaattgagatgacaccaattgtgtgtgatagtgataacatgacttcaaggtcatctgcggaagaacatgacgatttgctaaat

SEQ ID NO: 96314 - DNA, 105 bp, Glycine max
ctgtgaaggacaaggctgattttgatgagcataagaagaaagtggtggccaacagtgcatttgagaatcctagtagaaccaccgacaagaacaacatcatggtcg

SEQ ID NO: 96315 - DNA, 172 bp, Glycine max
ctagtgtttaatcttagttcaatttctatatgtagaattttgatacgacagataaagttatgcccttgttatttttattatgttttgaacaaaatattaatgggaaggaaagttaccaaatttcaattaaaaaaaaagaactatgtctcattctcattcctaaatttctcct

SEQ ID NO: 96316 - DNA, 541 bp, Glycine max
gacaggaacccagagcagcaaagcatatatggagagagaaagagtgagtgtgttgacgagagagtttcacaaataaactcacaaaaccatgtttttcttcttcttcttggtctttgacaccatgaagaagtagtattagtagatggatgtatatagcttttcaccctttagagttttttggtttctttcttctcttttgttgtgtctccaaaatccttatttctcccgaaatctagagtaagatctcttttttcaagtgtttttgaaagggtgaaatctagtgagagcattcattaatctttgcacctatgaggatccgtaagagacaagtgcctttccctctcttgccggtgactcactcagatcccaacctgatcaaccggtcaccggtgatggtgcaactcaacgatgacaccaaagcttcttcttgcactacttatcatggttcaaccatcactgcaccctcacccctcttggatcgccctcagccggccgatcagcctctcccaccgatcgggaagcccaccaacggctctgatga

SEQ ID NO: 96317 - DNA, 479 bp, Glycine max
agtcggcggccgcccttttttttttttttttgcgcaagataagagtctgcatattaataatcttcaactaaagttcatacatatgaccccctaattaagctttttcctcctattatttttgccatatactatatatacacacagacgagttctacaagtttgccaagccatacatacatatatacagaatttaatttccatctgcatgcaaggaaatctttgatgagaagggacttattaaacggcctctattgatccgtgcgttgaatcttgagttggatgaactcgtgtttgtggggaaggtggagtggagaacaaaaacttctgactgtatgccttggctatcaaaatcgccctttgccaaataacagtttctgagaccaatagcgctaataaagtagaaatccctgtaatcaagaataaccctgcaaaactatgaaagttgagacttagagtagcagaagaaatttcagtagacg

SEQ ID NO: 96318 - DNA, 109 bp, Glycine max
gtgatgacggtgttgatggtagctggatgtgcagcggcaacagccatagggtacgtgggatagtctgcagaggagcatgtggcttggcagccaatatgcgaccatgtgc

SEQ ID NO: 96319 - DNA, 208 bp, Glycine max
aaggaaaaaccaagtcaagatttcaccgggcttttggagcctaaaattccaaattcaatttcaggggtaacgctttggataaaacaactcaacaaaatttacccgttaatctcaattttcaaccttttcagcaaaaaaaaacccttccttggggacagtcaatccctttttgggaaaaattttaatttgaccaaggggaaaggtttac

SEQ ID NO: 96320 - DNA, 463 bp, Glycine max
cgccaggactgtcgatgcaagtcagccgcgcgctcaattcggacatggacaccgaccgccccccgttctcgatcaggattcttaccagcacaggacgatggcagggatcgccacggagacaatcgacagcttcatcactgctgcctcgccaaaaagctacgatggatctgacctgaccccttcgcagtattccgacgcctttgcaaatcaaccgacagatctcacagaggatgccttcactccgttcgaatccgtggatgacctacaggacgataggtctataataaaggacatcgatctcgcttctctgggtcatgcgacgcatgatgtgaatgaaagcgcaaactcgctcagtaagaagctgttcgcatgtgaaatatgtggccgctctttccaacggatcgatcaccttgccagacataaggtcaaccacgatagcgtcaagccgttcaattgcatcgtc

SEQ ID NO: 96321 - DNA, 420 bp, Glycine max
ataaagttgtttctttcatagcaatacaagccggtaacaaacctttaccttctgttttgtgtcaagttactactccagtgcatgccaacatgtttcagactagctacattcaaacaaaaccttcagtctagaagattaaaagagggaatccaagttgcacctttttctgaattaattctccatttccaagtaaattaagcctcaattagctctctactagctatctgccactgcccactagtaaacagtctgttctattatgatctccacatgcaataaagtagtcactatgatgtcaatcaacctgaacaaatgttgaagccaattaaagatgatccagctgggtgatcaagccaaatactttttttagtgaacacagggtatctctcaaagtactgaaattcatgaggctaattttct

SEQ ID NO: 96322 - DNA, 420 bp, Glycine max
gttggatcccaatcccaattctatttggggggtagcttaaatggttaagtagagcggaacggaagaccctttgatagcatgtgacgcgaagtcctcaagtccgaaggtgattagcagcggagtggtccttaaggctgtcgtacctgctctagtccttccggcgtaatgttctccgaagaatcggatcagtctttccctctgcggctgctacttctttacttattcactagtcttgagattttagccgagactttgctcaggtctcatagaaaagaagattccttcccgctcttctctgaatggagagaatgagttgtactctttcactggaagctatcttactaaagagtgggcctatcttttcgaccctctcgtcactcgtttcctttcgagaagacgaagaggatgacactggggatc

SEQ ID NO: 96323 - DNA, 308 bp, Glycine max
ccccacaagtcacactttgattccataaattaaataacaaaacagagaaaccaactttggtcacagatcttatttaatttacttcccacaaggcacactttctttccataaattaaataacaaaccagagaacccctgggctataattatctgggggggcccacttcattcatggggggatcttatggggcttacaataagcataacccttggatttctgggtttggaatttggggggattggctgggttaaccaacttggggggaggaccaacttcttgttcctttttgggttctatgaacacgggc

SEQ ID NO: 96324 - DNA, 289 bp, Glycine max
gggaaaacaaaaccctttttaagggaaaaaaaatgggaataagggggccccccccctgccattccctttagggaaaccctcccgttaaagggggaccctttttaagggggggccaaatcctaaaccgggttttaaaaaggttaaatccctttggcaacaaacaggttttaaactttaatttttaaacccggggggttcccccccctaaaaaaaaaaacaaaaccgccccaccattggcgaaaaaaataaattaaggggtttgaaaaagcaaaatttggtttggttttta

SEQ ID NO: 96325 - DNA, 459 bp, Glycine max
aaacgaagcaaacagatctctctctaatatagactatcatatgtcactgatcttccattgatggcttcttgatcaggaatccctataagcacgcagagacatatctagtaaacattgtttggagaagcaattggatcatatgaggtgttcacttggttgtatcggttccctagctgcaaattcagatgtgcaatttttgcaagctttctataataaggaaatttccctcagagtcacacagattagttttgtggatagcgtgaacaaggcgagagtaaatcctttgatccaaggaagcactttgctattgcataagcttggcggaggtggacacaagctatcatcatggctgaaggcgaagggtgtattgagcttaaattccgcatatatgacggaactgatatagcacacagtacatattcttcatctaccacagttggtacccttaagcaaaagcta

SEQ ID NO: 96326 - DNA, 169 bp, Glycine max
agggggaaaaaaaaaagggatgttaacctttaaaccacattaacatccttttataatcattccataaaacaatgttggaataattgaccccttaagactgctggtgggcaaaacaaaatgaccagggggcgggtaccaaatgggtgcattcgggcttcccccccaaaat

SEQ ID NO: 96327 - DNA, 331 bp, Glycine max
aatattaattatatattatatttaaatagtactaatgtatgatcatggatctaatacatatggaaagaagcattccaaaggcatactttaaggcgtagctagaaccagaacaatgctccatggatctatattcaataacatccatcatccatgccatgtatgatcatggatccaagagctcttggtaggcgcttaacaatgtcagaacataaaaaaaataaaattcattaaggtcaggacttctacacataacgatacagcactgtgagcaaaatctgcacatgaacttcataattgttacaactgcatcttctctttcaaatttccaagc

SEQ ID NO: 96328 - DNA, 386 bp, Glycine max
agcgagtgattcagcaaaacgtttagaatgaacttgccaagggtattcttagaggagagttcaaggaagaagacacaattttagtagacacagaagtcacagtacttgccaatggtcaaattccccaacaaaagctagtttttaggagggttgaagctgattccagttctgctgctgaagacagacgggaaggctttccacagattctgtgaacgcacttcactgctcctcgtttctccacatgttaggtttcacaacaaattttgagtataggtcgttttcttatactaatgcaactctgatcctgttcatagcatgatatagtttatagttcttcatagaataacttttattggtcaatacaaataccatgcttaagaagtgtt

SEQ ID NO: 96329 - DNA, 352 bp, Glycine max
gtttgtttctttgtttcagaacgtggcattttgaaactcagcttttactgcagttttttttggttggcaaaactgtttttttttttctcttggattattttgtagacgttgtcaacttgttcactctctagtctccccttgaagcattatgcttgaaggagaattgtattactgtgtataaaacaatgtgggggtcatcgctagcagcattagtatagaatacatggattgatggaaaagaatagaatggaacagaacatggtgaaatgaaatgattataagttttattatttgaattgttaaggagaggaaggaatgcatttcattccattccacaataatcatctttttc

SEQ ID NO: 96330 - DNA, 411 bp, Glycine max
aatgtgtaattggcagacactgtcggcaattcaatatattatgtcaatggcttgtatgtaatgtgttgccactgttcatttctctccttgtacttgttataatgaatcgctattccgctcagaaaactaaaggaagcaaatttcattcggactgctatgcaaaaactttacacttcaatgggcaacttaagacttgtaagttgtcggtttgctcgtggcaaaacattggttcaaaaattcagaaacctgtgataagtataggtccggaaatgtcctataatgatccacgtggggagataagccgaagttaaaggaccttaccctctttcccatcttcctctgctcctcaattaacgtttctatggattgatatggaactactttgtcagctgtactatacaggtaaagctg

SEQ ID NO: 96331 - DNA, 409 bp, Glycine max
  unsure (1)..(409): unsure at all n locations
gacatgtaacagctgaaaagatattaatcatcgatcaatgatcaatccaatagccataataaatctgaagattattcactgtaatatatgtataaaagaaataattatacatcatgatgaaagtaaaaaaaaaaaaaaaaaaatcatatatgacgatttggaaaaatcttcacagtgaagtaaaatactgcaaaaagtaataattgtaaaaaaaaaaaaactcgggaaccaaaacaatatttaggacaaaaatgcctacgaaatttctctaccaatgacaaaaaaaaaatgatcttacaattacagaagtatataaatctaaacttccattcatgtagggctagnttggtgggctggtagtgaacacggatccaggagaagttcaaggagaaactgacactgtctgatc

SEQ ID NO: 96332 - DNA, 271 bp, Glycine max
aaaaagaaaaaaattgccgcttttttttgggaattcaattctttgaataagttttttaaaaaaccgggttcctttgttttccgaactttaaaaaaaaaatctccccagaaaatttggttggatttgggccccttttgccctccccccaaatttttaaacccccccttacagtgcccccgaattttagccgctttcaactggcattagcaagatcctttttccttgccccaaatgacccccgaacttgaatctgccctcacccctttttttg

SEQ ID NO: 96333 - DNA, 475 bp, Glycine max
cgccctctcccctttgagtgcactgcttgtccgtcgaccttgccattccccttctgggctcaccaccaccaacctcgtctcgacacatcctccctactttcatatcgacttgacgtggtcgctggctaccatcatgcagttcaagtcctccatccttctcatgggcctggccgctgcaggcctcgcctcggctgcccccgccgttgccgacgctgccgcacctgcagtcgagcgatccgagcccgttgctaccaccaacaacgttcagcgcgacaccaccgacgccgctccttcggctgactacggcatcggccctcccatggaccagtggagctacaagcgtgatggccagcccgccggtgactttggtgttggccgtgccgacaggtggagctataagaagcgccagggcgagcccgctggcgactttggtgttggccgcgctgacaggtggagctacaagcgcgacggcgag

SEQ ID NO: 96334 - DNA, 196 bp, Glycine max
agggggggcccaacgattgtatgcatgccctcgacccgactggaaagttcgatagggggggaagaccaaaaggagtgtgggggaagaaccgacaagcaagcccccaagcggaaaaaatgcccctggcggggcacaaccttgttttggggcaccggccccgttcggtcaagggtgaataaacccccccaggagcggg

SEQ ID NO: 96335 - DNA, 320 bp, Glycine max
actagcttcactttcgaagtattctagttctttaacaacaccttcacgacttttttcctcatctgcaagatccttaattgcttcagcataatcgttgtgtatattaaacaacttccacaagaaatgttctcccttcatagatttcagttcttgttgcagacagagatgcttctctgcttcttgcttctgcactttcttctgctttctctccataaccacagtcttctttttctgataaacaagtgctgatttttcctacgcagcacctttttcctcctcaaactgctcatagcccctcttgcactcgtcagagccggata

SEQ ID NO: 96336 - DNA, 454 bp, Glycine max
gtttaaagtccctaatgaatatttgaattatatatgacagtattggctgatcctaggtttcttgtagaaactggagacagaaatgtttacaatcttagccaacttcccatgcttcaaggctataatccaagccaaagttcatcatacaggcacacaaactactactaaatttcacttcaaattctttcaaacatgcattttgaattgcacaactgaataaaattatttcttcttttttcagatatggatatggggatgcttctctcgctatctatgaaaacatggtgcacaggcctttcatgaatagaagttcattagatgaatctggagctgaattttgtggcagcagattaactgagagaatccatgggaccaatagtaacatcaattggactcgtaacatgttccaagttgattcttcttctagtttcaatgaaccatcaacaagcaaagt

SEQ ID NO: 96337 - DNA, 394 bp, Glycine max
catcaatcaaactactttcaactcttacccaccaaaccaaacccaccaaaccaccaccatcaagatgcgtttctccaccattgccaccgctgtcatcgccgccggcgttgccaacgcccaggtcgactccatcatctcccgtgtcacctctgccgtaggcggtgtcccctctgacatcggctccgtcgtcagctccatcacctctgacattggctccggtgttgcatccatcaccagcgacgccgcctctggtgcttcatctgtcgcctcttccatcgagagcgacgcctcctctgtcctcagcagccttgcatctgaggcctccaccgctactggctcgcgcgcctctgagatcgcatctgctaccagcgctatcgccagccgtgctagctct

SEQ ID NO: 96338 - DNA, 360 bp, Glycine max
cattgaaataacttattataagtttgtagaccgactggatattctccagtattgccgagaaccattcctatcccgcaaatgtctcataagagacgaagcgtgttcagctcgtggctgatgtcgctagctgatgaaagaaactgtcgaaagagacttttcatgtccggagtcgaaggaagcccttgcaggtcgagctgcttacaagagaccagcgatggcgaggagaccaccagcgacggcacccatggcggggacgttgttgtagtcggcggcaccagtagcgctggcggcggcagagctggcagcagacttagcagagctagcacggctggcgatagcgctggtagcagatgcgatctc

SEQ ID NO: 96339 - DNA, 208 bp, Glycine max
ataaaattctttcaaaacaaaaatgaccctggggcacctttatattagagacatacacttttatggcgaatatacagcctgcacataaggaggcaatgacaccctgtacacactttacgtacaaaccaactggttgcatacaccccccaaaccttatgtcggcattatatggggagggaacacttgttgaataaaagccaggaagcga

SEQ ID NO: 96340 - DNA, 295 bp, Glycine max
aaaaagccatatcccacgattgccttcaaagattacaaacaagaaaacgttctatagtatgcaatttcttaatgaaaaaataaaccttttcgttccttatccttaaacaataatgtaacatctataaaggcattgagacactaacagccctgaggactactgaggattaaaaaagacttccaataaccttgacaaagtatgcaatttacacacaggagagtgctaacaccactggttaatctgctctactcgaactgaagtttgtgatattttaacaatgactttccttcgcctc

SEQ ID NO: 96341 - DNA, 434 bp, Glycine max
cgcctcttcctcttacaaaccacagaacccacacacttgcatacatacccgcgtcttacacgcgtttcacccgcctcgcctctgccttacacatcactctcgcatacccttgacctctgatgacatcggcgccctagtcacctgctccgcccccaacaactagaccaccccagttccccccgcggcttcgtccgcccattgccacacaacatgccgtcagtattctggtcatcccaccgcaggtggagagtgagatattgggtcctcacagctgctgttctctacgtttcatattgtttcgtgcgcggcatgcccctcctcagcaccaacctaccgccctacaccggcaaacacgatgtcggcaccatcgacctcgaggtacctgtcaacccaccgcgacgcgtcgatgagaccatcaacacagagactggcga

SEQ ID NO: 96342 - DNA, 487 bp, Glycine max
caaaacaaggactttagtcgacttgatgaactataaaccacacaccccgagctctaaaatgcagtcctttgagtaccatacacctcgcttgactgacaagacgtgacctccctgaacccattccaaaatcgtaaataatgatcatacaatcgtcgaacccaaccaaaaagaagaaagctatcaagccgtatacggcaccgcagtacggcggtctttctctatcccacaaaggccagggaaagcgcagaaagtacttggtgacacatgaacctgccagaactttgcaatgtccgggttatcgatctttctagtttcgccgttgtatgttgggtggctgacttcttccttgagtacttcccggcgatggccgtcgcccaagtatttcatgaatgtctcgctgactttgacgtattggtttacgccctcgtgggcgtcgatggtgctgccggtggtccaggagagcagcatgggctcgatgagtggagcg

SEQ ID NO: 96343 - DNA, 386 bp, Glycine max
gtcaccctcacccagatgaagatctacaccaacgtcattcgtctgtatggaatcactcgatgcggacacgggctttatatgggcgcgttggcgaagaaactgggaatgcaactgttgatcggagtcgagaacggtccggatcatcccgacaacaataattgatacggatgggagaaggtcacccttacccagataccgtcaagtacgtcatcgagaagatcaacgacttccgggcgctcgatcgatccctcggatacgccaatatccccgttggaaccgtcgaacctccaggcaccatgaccggaaatcccaccgtcatcgacgcatctgatgtggtcatcatcaacacatttggattctggggagggatcgcctacgatggatca

SEQ ID NO: 96344 - DNA, 434 bp, Glycine max
gtgatctcattttatttagcataggagcagcacgccactcggttgtcgtccgtgggattcaacttggttcccacatctcgtacatgtacaaatactcctccactctacaacagagccaacaagcaagacaacgccagaacagatgacgccatcatggtagacgcatcgctgacaaattggccctgttcatctgcgttgctcgagtgcttgacggcgtcgttgccggttccggttctggtgattgaatctccgtcgcacgactcgatctcgttggtagacgccttggaattctgggaattctgggaagtagacgtctgaggtgcagattcagaggtagacacgactggagatgcatccttggaatcggatgtcgatggcgtcggatcgtcgggagtagagttgggtgcagaggtagacgccggagcttcggtgct

SEQ ID NO: 96345 - DNA, 52 bp, Glycine max
cttttattgtcctgtatatcaataatcattgcatcttatgaccttatttgtc

SEQ ID NO: 96346 - DNA, 53 bp, Glycine max
ggacaaataagggcataagatgcaatgatttttgatatacaggacaataaaag

SEQ ID NO: 96347 - DNA, 307 bp, Glycine max
ggaaagccaaaatgaaaaattttttttatttagagggtaacctttccaaagggaaccccttttttgggtccctttgggggtttaaagttcagaccaccctaacccgaattttgaacattggctaaaaattccaaatgaaagggcgggttttcccacaataaaaaaaaatttcaactccctaatcacagattcctttaaaaaaaacctccaagtttttttttgggggaacgggggaaaaaacttcccccattccaaaaacctaggggcggttaatggaacggaatcaaccaaaaaaggaccccccttt

SEQ ID NO: 96348 - DNA, 502 bp, Glycine max
  unsure (1)..(502): unsure at all n locations
atcgaacagctcggtcgagggcaccctgtctaggaatttgggtgatgagatcagtcggaggttgcaggatgtgcagcctgttgttgatgaagaggaagaaggggaaggggatagctatgtcaagaccgtggtgactactcagcggacacggaaggtgggcagccgcaagccgtccaatacgaatccgcaagcttcggggaccgcctcggtgccgaccatacatgtcgacgaagaggtccgagagtacgccgacgccggaacgatcacggacgccgtcaggatcttgccattactcgaagaggagtcggcagaggaacaagccgaggccggaccatcgacgacatcctcacctcagataccacaagagaaccctccggcatataccgccaagccagatccggtcaatgagcaggaagtcctggatcgacatcatccgcgcaagcatggtcaagatatcgacgcggatgacgagtacgaagcgctcgtncaggcaacgggagtg

SEQ ID NO: 96349 - DNA, 481 bp, Glycine max
gtagaatcgtgcatacatgcccggactacttcaaataaacagcataatcttcatcaatcgtcatgtcattactattcacccattcgccgccgcgaactctacgtcggcacccgcccaaccaaccccgccccagctccaagtgcccctgctagactcctcgctccattgggcaagaaaccttctatcgctcctgcagagtagacggtattgaacgagttgaagtatagggcgtctcgggggtgcaggctattacctgtccagagtgtggaagctgccaggacgccgattgcaagggtcaggccccaaggcaacatcttggctgaccacgcggagtgcaagctttttggaaccttgtaccggtcggaagcccgatccgagacgatcccgcgcttggtcctctccgctttccgcaactttaactgctcttccagcacagtacacctcactcccgttgcctggacgagcgcttcgtactcgtcat

SEQ ID NO: 96350 - DNA, 523 bp, Glycine max
  unsure (1)..(523): unsure at all n locations
gcgcgacatacctcctgcctctggcacctaccactctagaccacactcgtgtttcctgactttacactcatatcttcatcttcgccaacatgttccaatcaacctccgcctaaacccctcttcccataaggaagacccgtacccacgtccagctcgacccggcttagccccttctaccaacaactacccaacccctccccacttttctggtcctacacaggtccagcttaattcggcccgtcatggcgtccactattcagttcccccctgctcaacagcaacaacaacaacaacaacaagaagctcaatcatccctgagcctaccaactgccaccacccggtgtcaggcctgtccttcccaataccttacttaggcgactctaatctgcctaagggcatatatcaacaggactttagtcacagcaaatcaacaagctctctcccagcgttgccaagggttctacctnccccacccacgagacatcgcgcaaagctaccgacttttgagtctagcatttctctc

SEQ ID NO: 96351 - DNA, 222 bp, Glycine max
ggccggggaaggggttcttttcccgtttgatttgggaaaacttgctaactacacttagacaaaggacttgctgcaaaaatcattatttaatcttcaccactttccaaaatgaccacagccgtcacagaccagagtttcaacctgaagttaaggggaaccctaaatcccttaagcccttttaacgctgcaagaaccacatttataccggttgcctggaaggct

SEQ ID NO: 96352 - DNA, 417 bp, Glycine max
atctccttttaattattcactcaaccctttacactgggtgatgctaaataacatgctaccctctattggtggttgatgctgatactcctcatagtcacaaagtaggtggctagcagtagcatgtgagtgaaggagcctgcctgcagtttttttaatcgtactgtactatgtttgttatgtccacacgaacatgatgactccaaacttgaacttggaaatcgaaaatcattcagaaggcagcagccaagtggcttcaaatgtatccttgcatgaagcatctcatgatcttacaaagggcagcaccaccacttcctcctgtctcacaaaggatgaaactgatccaggtttcattacccttgacttgacactcaacttcaataattccggtgatggcgagttgaaagtctcgagtgatgc

SEQ ID NO: 96353 - DNA, 447 bp, Glycine max
ccactgtcactcagaccccaactgtaaccaaaaccaaaagtgttacccttagcaagactgatcctaccattatcacagtctgctaccttgccaccatcactgtcaacctcgcaaactttttactccctgtccccatttccatccaactcttcgtaaacagtatttcatgcatattcatcggtagttatagaggagccatcctccaccacactctccctgtggaagaacaaagcaagctcgaaagaatgtccagtaaagacgcctatatgttccctgtctatggatctggagtccttttcggtttatattgcctctacaaatatttcagcaaggatcttttaaacaagatcttgtccgttcacttcaccttctttggattcttcagcttgttacaactcatagcatatcatttagaaaaggttttccccgactgggaacaagttgtca

SEQ ID NO: 96354 - DNA, 389 bp, Glycine max
ctcatgataaatgtttgaaacagtatacaaaacatagatttaacatttcatatactacataaactcacaacaatcaatatcaaactttacatatctaaaaacttatatattcttcgacatatatataaattattccttcttcttctcaacagcttcattctctttctcttggtcatcgctatattcaaagacagccttgatctcattctggaacaaagcgcacaacataacagcaccagtgcaaccaggaactaagaacagaagagcaggttgagcatgattgaagatagtcatagcatagaaggtagcaatgataccaagagcatatcctaccaagcaggaatagaaataagtggtcttgaccatcttgaagtccaacttttcaactt

SEQ ID NO: 96355 - DNA, 242 bp, Glycine max
tccttctccaactcatgtgcttacacctagctatatcaaagcctgaaagttatttcacatgacatacacataaaagccatgcatataaattgagacacatctcatttgaccaccaatcaagacccatctgaatttcaaaaccttaattaagattttctcatttgctttgtacgtttaaatggcttctgcaccagccttaaaacgcacagattctgttgtagataatatgccggatgcattga

SEQ ID NO: 96356 - DNA, 117 bp, Glycine max
gaagacatagaaaactttggttgtttagagaatacatagaaaaggaatgattctgggtttcttgatatctatcaagaaatcgaatattctggtcagagagaagccactgatgatgca

SEQ ID NO: 96357 - DNA, 347 bp, Glycine max
ggggcttccacaacatcaaaagggcaaaaaacactttcacacatccgtcgccggctaagctcgcaaacgtaaacgaacttgagttggaacttctccgacgagtacaaccaattggtctcaaaccatatcgtcttttgcttctactcaccgcattctcgaatttcctcttttctgtgacgcgtggcaaaaatttcccccttaatttcgtattttagatgaggttccgttgaagttttctcccctcgttctgttcttctgccatcgatggaacacacaagtgtagcgtgaaaaaaaaaaaaaaagattacttactcagacgaaccaccactctattggataatatcaaa

SEQ ID NO: 96358 - DNA, 468 bp, Glycine max
cgatatactgaatttatctgtaaaaataacaatattttctttgacatgtacaattttttttcatagatttacactagcatctaacctctatgctaaaaatcagatgctttctgtaaaattgaaatgagttgttctacatctagtttaaatatgcctacgtttggaagatgaagacctagagtatattcctcttcagtaaagtccacttttttcaatgttgttttgtaactcgtagtagctgatattgggtgaactctcgcaattgaaacacaatgtctatccccaagttcgaacaaccaaaatctccactctgtcatggtcttcccatccactttagctgatatatttgtccatcttgtgtgagaaaattccactttattcagcccttcagtaagtccactccctatagctttaacatatgcttctttaaggctccaatacctgtaaaattccgtcaatacatcattc

SEQ ID NO: 96359 - DNA, 410 bp, Glycine max
gaacttaatcttgtaattacatgagaattcattcccactaatatacaaatggataatacaatgcacaatgcccagcttaaaaaagacagctagatcatttttgtaacttcaacaaaaccatctactctatttaaacatcaacatctactctgatcgtcagcctaatccttttgtttaggagtaggaaatgaagacatctcaccatccttcttatccttggaaataggaggttcactcccatcctgatggactgcaacttcctgtggttctgcagggatagattgaatcaattcttcatcaattgcaagagttctctttgagcccagcagggcagcatcaagaacaatattctcttcaaggagtgactagctgatgatgatgacataacagatttctcttatctagtttga

SEQ ID NO: 96360 - DNA, 480 bp, Glycine max
aatagatttaacttttaaggtgattattattaaattcaattaatgtattttttgataattgaagaaatcaccttgttgatagacatgcaaggatttatgatgatagaccataaaataatccaaaaggaatatattaagatataaaaacttcacatccaagttcctacccttttgcattttgtactcatcattatttattgtggtttatgtgcttctctctcaatggtaaaatgaaactaatgaatgatcaatttttatggtaacttttagagataaaaacaaaaggataaaaatgataagttggtccataagcccagcacccagcacatgaagttcacttttgccttatagatttatcatgttattctttgtgtcatgtcataaaaatagtgataacttcaaagttcaaaagactaaagtgataatttacctttaattaagctccaattcttatgaaatgaaaatgaataaatatctatt

SEQ ID NO: 96361 - DNA, 217 bp, Glycine max
aaaacaaaagaaaataatttttcataatggcaaactcatattttacatgaagtcaaccatttaagagtatacccacacatacaatgcgccaagttttttaattaaactaaaatttgccgagggaaaaataaggggaaggacaatcaattttggcttccaaattgcttttgaatatcgttgaaagatatagggggtgatccccttttttttgctttct

SEQ ID NO: 96362 - DNA, 354 bp, Glycine max
cgatcctctcaagggccaatttttatgcatttaatcactagttttccactagtaaaacatgaatggattctccccttactggttgcacaatgtatcttacactatccaatacctcaatatgaattgacattgaaatctagttaatccactctaccatggcacattccataatttttatcccattatatatacatctatcaaatgaatacattacacaaccaaccacacttctgtcccatacaaggcttccttaaagccaaagcaatcaaccatttaaagaaccatccaaagctagcttaaaagaagaatttgctttgcatcaatcaccacccttatgagttggcttctggatct

SEQ ID NO: 96363 - DNA, 438 bp, Glycine max
ggagaaagaatgtgtgcggttactaaattttcagagatacaaaattgtactcaattaatgtgtcactcaatgaattgatcaacattttcacatgaggccgtatacctgaggaatcattgcaatattggtattatggattcaagccattcttcatctttggcattaagaaacatatgttgaagcatgcattggttgtttaagggccaatggaagtatggtatattcaaagattactatgcaaagattgcagctgagacataacttcttttctgacttggtctcttcttattttccctgtcgtggtgagttgaaatggcttcctccatacaataaacgtttttggtatcttaaacctgcttaaatgattttctaaacaatattgataaagattctttctagataggagaaactcttcatttgaagcagacaactgctctg

SEQ ID NO: 96364 - DNA, 253 bp, Glycine max
gagccaccagcccaattaaggggttaataaggaaaaaataggcctcaaatttacaacctttaaccaagagggggaaacaagggacaggggtgaactggcctttacaacggttacataaacgttagaagggccaaaaaaaatgcccatcacccaagggtctgatttaacccttacatctccatttgggggggggctttgggcctgggcctgacgtttaaactcaaaaggtggagcagcacgactttttttaaaa

SEQ ID NO: 96365 - DNA, 505 bp, Glycine max
cgctcctgccacaagtgcgagactttgttcgtgccgccctcagcaaccatctgtgactcgtgccgccacatcagatgcacaaagtgcccgcgagagcctgccaagttgaccaaatggcctgctggctaccccggggatgcagaagcaggcagcgacgaagagatggagcaccaactcgagaagttccggcgcacctggcgcaaaccacggaccagggtgcgatgggaatgcgaaaagtgtcaaaatctttttgtctctgggtcgccgcaatgtcctggttgtggccacgagcgatgcgacaaatgtaccagatctcctatcaaaaaagccaagaaagaagaacagtttgacccccaagttgttgctgctgtggaggccaaactgagagctcttggggtggacgacgattctcttccgccttctgagattgagaataagtgaaattactctccctattcctattcgacaataacatggctggactatgtctagtatttttcccccc

SEQ ID NO: 96366 - DNA, 83 bp, Glycine max
tgaaataatagagtgatctaataattgtatcaagagctagattcctttttattcaatgaaagccagttttttttacactcaag

SEQ ID NO: 96367 - DNA, 83 bp, Glycine max
cttgagtgtaaaaaaaactggctttcattgaataaaaaggaatctagctcttgatacaattattagatcactctattatttca

SEQ ID NO: 96368 - DNA, 416 bp, Glycine max
ggggcatgcaagttgggtttcaagtgagttagaacccaacttgacttcaaatctcatagctagatggtcagctcgtggaggtgagccttgtaaagattccaaggctgtggagattgcaattcctgggttggatggtggggaagtgattgagctatcagctggagatgtgcatgaatttggttttcaagcactggatgattcagggaagcctctttgtgtaggtggggactactttgagactgatctttcaggggactcatggaaatctaggcctttggtgaaagatttcagcaatggttcttacttaatttcattgcaggttcacccagattttgatggggtttacaatctcactataatcctgctctatagacactttgaaggtttgaagtttaccccatggaggttttcttatg

SEQ ID NO: 96369 - DNA, 405 bp, Glycine max
agtacacggcccaatgaaaagtctataatattggagcataatgaaattacattacactcaggtaatttagattacctgaacatacgccaaattgtttattgcacaaacaatgttatctaaggtctttctaagcttgttttctttttctcttaaaaaaagaagaaaaagaaaagcatggaataatattctcttttggtcaatgaggaacgaaaataacaagttcatagaaccataggctgagcatctgccacttttgatgttttagaatgcttgccaaccattggctcaacacccaaccatttttgaatatgttgaaacactgtttcatctcgtaatattccacggtgagaagcagcaactcccaccctttcagtggcttcaagtccatcacccttggcagattca

SEQ ID NO: 96370 - DNA, 442 bp, Glycine max
cgggaggccaaatggcaagatttatattttcaagcttcaccatgccggggagacaatttcaaacttattgtaaatttaaatagaaacatactgcagaggtagaaactcttgatttgcttgataagtctgctaaaaacattttatcgatgtaaaacttaagctaggaccatggtttcaactgtggggggttgaatcttttgctgtgggttgccatcttcaatctcccaaatttcaggtaacgcttttttgatattatgaatgctgttcagggcatgatcagctccagggaccaaatttgaatggcccacctgccaacaatgagttattacttgttagcttgcattgcacgacaaaggggttataaatttcttatatcttctcataaaatgcatagatggcaaattgtatcttactaaaacagtgttaagtccagttatttttg

SEQ ID NO: 96371 - DNA, 324 bp, Glycine max
gctttttatttcaaatccaacattactttaactgtcttccacataaatccaccatggccgactcttcttcttcttcttccaaacgccaaaagcaacatgatgatgatgatgatgatgttgaagaacaacaacctctgatcccaggtctccccgaccacatagcagaattgtgtctctcctccatcaaccattctctcttattctcaatctcccactcctgccgccgtctcatatactccccttccttccctccctttttctctctctacgccattctctcccactcctccgccaccatccacttccacaccttcgaccccatct

SEQ ID NO: 96372 - DNA, 296 bp, Glycine max
agcctataacacctatattttattttttgttattaataataatcatgtttgattcagataaaattaattactcttaaccatgtcaatcatacatgcaatcactggtcggctggcatccggggtaagatgtgaacggccaccggctcgaactcttccggcagcaaaatcggcacaatccgcggcggcacagcggcgacatcgacgacggagatcccggaagaaggcgaaacgacgcacagttttcctctctgagcgacgatttgttcggctcctttgagtctcttattctcgagaat

SEQ ID NO: 96373 - DNA, 349 bp, Glycine max
ggcaagccttatggaaccccttttattgatataaaatttgactattgggcataaatcaaattaacaaaatttcccttgttttagggaaaaacaatacaaatcctgctccaagaaaaaaaactaaaaaaaaaatcaaaaggggaaaaaaaccggggggaaaaaaaaaaaaaagaagggaaaaattttttttgtttaggggggtttttcatttttactgggcagctaaaaatcattttatagctttcacattttaaacccgattttttacttttcaaagaattcttgaacaagccaatcatggcaaaatatcatgctcaaaaacttgggcaccttttcatttttccccagg

SEQ ID NO: 96374 - DNA, 417 bp, Glycine max
gtgtagctgtgcacagctcttttttttttctttttctttttcgaacttgtttctttcgtttgcttctttcttctttttcgtgtcgagttgctgaaaagaatatgctaaaagacaagtcctcttgttaccgcagtttacttttttccctttaacacttaattattaggtggtgaatccgaggacaagaaaaagacactcaaaatgtgattcagttttattttttttctacccttgtctgtgatgtttttctatccctgagttatgatttaaagagtaccgtgcaagtttttctgattgtccttattaatggcttgatttttctgtttccaaaacattggttcctttctcacatgcttggtgtggtcttgtctgggtttcgatttgagtacaactttttgataagcaaaggggatattt

SEQ ID NO: 96375 - DNA, 115 bp, Glycine max
acgaggccgaaaaatattatgtgacttgtaaatgaatttgcagtaaacaaatattcatttacattaaacaaatattcaattgcaataataatgctagtcctcagcttgtcttact

SEQ ID NO: 96376 - DNA, 213 bp, Glycine max
ccttcacaactcatcaacgagagggggcattttattctttgtcaataattatggggtaaaaaagatgaaacatttggggtcctctcattgcttaaagcatccaaatataatttttttacggcagaacatattatcatatcttggaagcttcaccagttactcggctaaaggcaatggtagtctttgacccggatgggccccccaaatgcttgc

SEQ ID NO: 96377 - DNA, 523 bp, Glycine max
ggcatcccggctcactccttgcttacgactaggcacgggagcttcgcctcacacatccaacatcatgtctacatctgcagggcagaatcgccgcccacgggcacccacgatcaccatcgatacctctgcagttggtcgatcatccgagaacctggtccaacccgaacaggaccacagccaggcaagcaacggatcgccaatgttacgaccgacctccactgggcaagcaacgcctccagagctgcgcaaaagtggtagcttcgaaagtcgcgaatcacggccggttagtccacataacatctcatccccgacacagatcagccatcctcaaaacttcctcgccgttcctgtgcaacgaaagagaggaggcagcgtcgagtccgatggcggtgataccatctccaccaccgatacgacctacgtcggcaccgaccatcaatcgaaggctttcggcggcgacgaagtaagacacggcgccggcgaccacccagtattacctgataaggatgcgctcatacccgat

SEQ ID NO: 96378 - DNA, 487 bp, Glycine max
gctcgatgggcgaccaaccgccgatggagccggcgacaatacctgccatggcggcaccagcgaaagcgacgttcgagcctgagcgcgagcgattacggcggcgacgagattcgggcgttggaggcgctggcgagtgagagacctgcgaagcggcgtcgtccatgtgtggtgttcctggagcctcagaagatgcgcggctgcggctaggagagcgggaaccgaggaggagctccttggggtgagcgacggcgaacttgagactgcgcagacggccgcccttgtatttcctaagccaggcgagttcctccttgatgtccatgaggccttggttgaattgccatgggttctcctcgtcggtgacgatgaggtcgtccttttgtttcctgttggcgtagcgcttgatgattgcagggcagcatttggcggcgaattcgtcagggaccaggcggatgataataccgatgggaatggagatggcgccgagtac

SEQ ID NO: 96379 - DNA, 360 bp, Glycine max
gacattgttgaggtgttaatgatattaacattacaagaacatcacaaggaaatttatgtcaacattagacctgcattgagcataataacctaatataacctaaattgttcatggtataaagagtttggaatttccataatccaaccaccccaccaagccattattttaaaacaacttccccaaaatatattacatgcttcagagtaaagagcacagaaacaatgtccaagaaaaaaaaaatttatcaaaaaaagaatattttttacttatgggaaggaaagttaaaggccctgaagatggcctgatataaataaaataaaatcacttcctacccaaccttattaaatgctgcagatgctt

SEQ ID NO: 96380 - DNA, 342 bp, Glycine max
ggggtaattaaacaacctttaattggtaaaaacaaaagtaaggggacattagtgaaccaagcaacagccacaccagtgaccccccacaaaagttcatttccagataaaatggcaaaccaatggtttcctgccttaaaggcattctaacttgaaattgcccaactaaaaattcattatctggctattcattgcatggaatgaaattgaaatacattttcattttaataaattatttatcatcatgggggcctatttccccaaaagggatttgagccaccaaatgccttttgtgttttgggggccttcttcctttgggggaggatcgctttggggggtcttggg

SEQ ID NO: 96381 - DNA, 465 bp, Glycine max
ctcccgaggaattctcagcttttccgatttgcaatatgtggatgttcaagtttgtaaaaacttggtgacactgttccctttgtcccttgcccgaaatgttgggaagcttcagacccttgtaatacagaactgtgacaagttggtagaaattattggaaaggaagatgcgacggaacatgcaacaactgaaatgtttgaattcccatttttgttgaagttgcttctttttaagctgtcactgcttagttgcttttatcctgtgaaacaccatctggaatgccccgtattagaaagcttgggtgtgtcctattgtcctaagttgaagctattcacatcagaatttcacaatgatcacaaagaagcagttacagaggctccaattagccggctacaacaacaacctctgttctcagttgataagattgttcccaatctgaagagcttgacactcaatgaggaaaacat

SEQ ID NO: 96382 - DNA, 394 bp, Glycine max
ccttcattgattcacattctcgtatagataggctctcaagttgcatcaaacttttggcagttgagcatttcaataaatactccatcccattacagtcgatcacttccaagtctttcagattgatgaaagacactgcacagctcactaatttttctaatcgagggcacccccaaagagttaatatttgaagcttttcagagtatggcttaacccatgggtgctgctctaaccctatcgactccagctctccaagatctaacagtgttaattgtttcaatgcgggaagtgaacggtcatgaacttggagtttctgagagggaaatatctccttcagaccatagcatctttccactcgaagatgttctaagctgggtaccttctgaaggaaatcaaa

SEQ ID NO: 96383 - DNA, 481 bp, Glycine max
gttgattcgtcagggagacagattgaaatggggctcttgggtcccgtatccagtgatatcgtggcacagtcgcagggaacctcgaatgaacatgttggattattgagagctgtgcctggtgaacctatgtctcagggattgccccttttgagcatgcacagtgagcgggtagaagtacaagcaagtaatccaggaatgcatcaaattctttccgctaacaaacagtccatgcaaatgggtatgcttctgaaaagctcagggccacagcagcagacaacaactcccaagcgcaaggcaccaatggaattatcgtccagtatctcctttaacaagcgggttgcagcaatgggaaatagaccttggttgcagcaagtacctaatgcatcaaataaaggttctctgcagatgcaatccccatcaaatgcctctaggacacaacatttggcagcttctagcaagagaaaaacacagttggataaca

SEQ ID NO: 96384 - DNA, 455 bp, Glycine max
aaaagaaaaacaaagataagtttgtgtgaaagacattgatagctcacgtaaatgagcaaggtcaatatgcatcacttaagggtacaattcaaacaaaataaaaccaggtgaaaataggtgtaaaatgaaagcaagctccaatgtaacaaataaacaaagataaaatccgtaagaaaattaaagcctacaagaatgaaaactagaatgctatagtgcgttagccaaattatcaaaactcttattcaggcacgaactcccttaaggctaaccatgcgagtagatccatctccctggggtcccctcaatgctgaacccctttgagcagtcctccctgaacctccatacgaaccccttcctcgtccccttgaatagccactcccagctgcttggcccaatgccattggccttccaccataccctgcacgcccactgccttgccttggctgagaaaggga

SEQ ID NO: 96385 - DNA, 201 bp, Glycine max
accaccacctatgaccttttttattttataaaaccaacttaaaccccaactaattttccaaaatgggattaaagaatgcaaaacaatggtagaagaagcctataaaacccaattggggctttttatatcctttaaaggttccttttaaaccattttgaaattttccggaacttggtcaccagctgagcattttttggaatt

SEQ ID NO: 96386 - DNA, 301 bp, Glycine max
  unsure (1)..(301): unsure at all n locations
atagncatgatgaaaagtatcgtgtaagaaattctgtacatatattttacagaaattgagaggcaatgctgaaaaaaacaattagactccttataattcctatttctatatcctcgattgtattccagagtcctaccttttgctgctatggttaggaaacaaaaatgctgaacctccttactccaatgcacaaaagggctctgataaattcttttaacttttcttcataatttaatttaatgtacctgtttggaatttagttatcaagcatgatccaagaaggatgtattagatgaaaatt

SEQ ID NO: 96387 - DNA, 163 bp, Glycine max
attggtactcagaggtgcaattagatgaacaagttttgataaccctagagggatacatcacatgatctctcatgaatcagggggacaaatcccctagacagagcataaagaactttttttacttcaagggggctaggggcaaaacagcccaacattttttttg

SEQ ID NO: 96388 - DNA, 216 bp, Glycine max
aacaaaaggggcccaggttttattaaacaaaaatttagccaaaccccccccaactttgaaaaaattcaaagtccccccccaaatgaacaaatgccaaccttatcttccctttaaaaaaaaaattttaaactttaggctgaaaggacttgatttgggaaaattgctttcctggggtcaacccctttgggcaggccccaccccagttcaatttggggg

SEQ ID NO: 96389 - DNA, 510 bp, Glycine max
gatcaaccgaactcggattacaacacctcgttcaccagtgtctatgtctatatacatcaacattaaacaataaacagaacataaattaaatgttgttgctattggctgtcggattgtgctaatttgccaacacaaattatgcataaacaagtgccatgttgcattactacccccttttttttttaccaaagagaggtcaacagcatgaccttaattgcaattgcataaaaaaatatgaacaatcaaaaagaagcttgtgaccaaagcttgtactagcattctgcataaccgcctccttcacccttcaaaaagttgtcaatttgttctagcgcctgcaagatacaacgggataacattagataagcatcaatacaaaagttagattcaacttcagctccaggaacttttcagtttgcctggagccgacgaaatggagttagaaggaagggcatgaggcagaaattgctcaagacctcaattgcaatatcagttggagacaattcggacaca

SEQ ID NO: 96390 - DNA, 399 bp, Glycine max
gaccagtaatgtatccatggccaatcatatcgacaaacttgcgctacattcaacgtttcattccattatttcgttcgatccattaaaaagtctgggtatagtatcttgtttgactacagtttcttccattatccggtccacacgacctccccttacgaaacgagagttagaacccgcaggagtcacgatcatttgcttaaacgccatgcccagtctcggtcttcgacgccgtaaagttatccgcggcgttggtgttggagtgggtgaaaaccttcttgaccttttccaacaaaccctccttgtgagctccgccggtaccctcgaggttcttgtcgtggaccccagtggtggtggattctcggccggtcaaaccggtaggctgggaggagtggtaagcgg

SEQ ID NO: 96391 - DNA, 271 bp, Glycine max
ggggaaaaaaaaaatttgggtttttaaaatttgaaacccatctttttggatttgggttggaaccaagttccaccccctacccgtttgaggtttttttttttaagggggggttccttttttaaaaaaagaaaaagggtttttttgaaaaaatcccctttttttttttccggccctgaactaacaattttcaacataaacgtttttcccaacaggaaacccccggggtttaccggaataaaaaaatggggggtacaaaaagaaggggggcccc

SEQ ID NO: 96392 - DNA, 224 bp, Glycine max
gtacgattaaaacacataaggcggatttaattaaggcatcagggtttataccttggaagcccccccttgcttttaaataaacggcaaaaaagttttcttttttagagaacttttttggccgagcaaatccatgccttgggttttgtagctgatgcttttgaagcttgtttttcaggggcttttttggaaaaagggcttgaatgcaaatttatttgggaacccaa

SEQ ID NO: 96393 - DNA, 493 bp, Glycine max
agcttctataaaggaagtttattaagtttcccatcattggaggaattgtcagtaatcgattgcgagtggatggaaacattatgtccaggtaccctaaaagcagacaagttggttcaaattcaaaaggagtcatcagatgctatcaaattggaaaatgacctgaactctaccatgcgggaggcattttggaaaaagttattgaactctgaagattggagattcaatattaacctcaaagatagcccagtacaagagatatggcttaggcttcactcactgcatatccccccacacttctgcttccctaagttacagaccttgattgtggacggctgccattttttatcagatgcggtcttacccttctctctacttcctttattacctaaattggaaacattgaaagttcgaaactgtgattttgtgaaaatcatatttgatgtgacaactatggaaacactcccttttgccctgaagacattgattttagagc

SEQ ID NO: 96394 - DNA, 400 bp, Glycine max
agctaggaaccaaagtaatattaatttgctttttagagcaaaaattatattaacaggtaaattatttaataatctggagtaaataaacacttaagtgtgtactagtgtcgaattcacgtttgaaaatgaaatgtcaaatcctgaaagcggcattgacgtagactcatgaaaaaggtcttaatttgttcatctcctctaaccattttttcttggtgaatcaatctcctctaagtgcaatattggagtcatatcccttgccagaaatgcctatcgattttgcatggcagagttcagatcagtttccaatgggatatctttccaatcaaatatgacttgtaacagcttgtctgttttgactgtacctgcacacatactttccatcctctcgcaatcccatact

SEQ ID NO: 96395 - DNA, 265 bp, Glycine max
acccggaaaagggggggttttttaacctaaagttccaaaaaaaccgggaggaaaaaaaaaaccagggggtttgaaaaccacccttggaaaatgggccccgggaaaacccaagcaggacccccattcccatattttttccggaaaaaaaaaggctaaaaaccatggggaacaaattttccccaaggggtagggaaaaagttccccgccttaaaaaacgggggggggcgaaacctgggtttttttttaaaaaaaagagaaaaggggg

SEQ ID NO: 96396 - DNA, 398 bp, Glycine max
aacggggagaacccatttttatttttattttggaaacggggaggtcaacacgaagtatatacaaattaacatcaaatgtacctttaccctcaccctctcctttctggcaaaaaagaaaaaaaaagaaagaaataaagaatagaaggctttccaccactattaagtcgctcccttcctggtactcaaataacacgtccatgactggaactttctaagacctggattggcaccctcaagtagcttaaatctgtcaagctgatgccaaaaaaactgagttaatacctcagtcacttcaggtcttttttatccagagtaccatagccaaaaaactcttcaatcaaattggaggtaggtgaagaagtctaaatctgtacttggcgttggacatgttgagtacc

SEQ ID NO: 96397 - DNA, 429 bp, Glycine max
  unsure (1)..(429): unsure at all n locations
atcaccgccaaaccaaccccaactagtcttccttgggccgccttctgaaccgtccttcttgtctttggacttcccgtcggacttcttgtcttctggcgcatttggaataatggacaacgagtccactctgttgttctggccaggcatcgcggaaggctgggctactaaatcatcaaaagattgcgcgggcttgatcggggagttctgggcggcttgtgcatggcgatttgggcgacctgcttgaggctgaggctggcgctgttgttgcggaggctgctgctgaggctggggataatgacggggaccagcaggctgttgctgggattgaggcgcgtggttggcgggaagagtgacgttccggtagcgtaaactgaggtgtcctgttctgctcctgtggcggnggtgtctcgatgatttggggtacttgct

SEQ ID NO: 96398 - DNA, 434 bp, Glycine max
aattccatcatgtgtttgttttagaacgataatgtacttgcatgaaaagcgaatgatgatgcaggggtaatgatgaccatgatggaaactcgactcaacaagcaaaccaacgacgaacaggtcgagtagttcgtacgatctggaaataaacgattcgatgctcgattggggtatgagcagaaggaacagggactgatttcacccgtccacacagcagccagccacagcggcagtagcggcggcgacaagtacaaaattcagaggttgagtcttctttccgtatggagagagattatctatcttgcttgagtcaagacgacagagcatggggaggatgaactgaactgttgatatcgatcgaattaagagagtaaggaagaaggcaaaggaccgtattaacaagtagcgagtagtaacgaggcgagcgcgataag

SEQ ID NO: 96399 - DNA, 207 bp, Glycine max
agaaaggtaaaagagagtgccaaaatgcccttaattaggcatgcttttgtgtcaaccgcagaccggtatgggtcactcataggaacaaaaccacctcacatgtggatttggggagaaaacttccgactacctagagggctgaatgctacagctctccctgggagagtttcaaattataaaaagacatctattggttcctagttatca

SEQ ID NO: 96400 - DNA, 154 bp, Glycine max
cattaacaacttttatttaatcgcctgcttagctcatgaaaaggcgtttttgttaaacaaataccaaaccacgtcctaattaacgaaagctagagggcgctgtttttcccaatgttagccaccctacctaaagttatggaccaattgcttacac

SEQ ID NO: 96401 - DNA, 430 bp, Glycine max
gatgtcaagctcgccaaaactgtagagccaaccaaggtttacagcgaagctgttctagcactgcactgctacttctacctgcttgactacaggagacgcgtgtagcggccacgaaggcgacgttcagcccacgaacgagcagccactacgttcaccaccacgatgctcacaccaacaaacgcgtagaaaaggccacgcgagaaagtcgaagtcgaatcattttgctgcacgtccgagagtgacgtggtcattagatccgccacgttgggtggtccagccagcacgaaggcgtaatccggctcgtccgatcgcgctgacttcgctgtctcaacggagtagtaaccgggtgtttggtcgggacaggaaacaactcgtagatcgccaccttgttcaccgctgccgcgtacacgatggcactggcctcgcgcca

SEQ ID NO: 96402 - DNA, 433 bp, Glycine max
aaagtaaaaattgcagaaattttaaacattttctataagtactaatacaatgtcttgctttaacaaaactattagctgtttattacccggatcaagacatcgaatgagataaatggaaaataaaatctagatcacctaactaaattgttttagtatttaaatagagaactggtactgcatagttcgccacgacatttccattttctataatctataatatgttatcacccagtcaaaacaaaataccatcttcgatcctaccgatatgctctaacactagaagaccgagaattggtacatggcaggaatgcaatattcttcagtaagcaaagatagctcctcagcagaagtgattggtacttgagtctgtatcgcaaaaatcatgttgaaacaacacgtctatatacagattgaaccacccaatttgaacttc

SEQ ID NO: 96403 - DNA, 208 bp, Glycine max
ctcagccatattttatctcatgctctgcgattatcttatctaccacgattccctacaccctggaacactagtcgaagtgctgcaacacagaactggagaagggataaggtcaactttgactctctcacacacacctttacgctgcatgcaagaagagaacgaatgagtcggtgacagaagccatggagtactagttgctccacttaat

SEQ ID NO: 96404 - DNA, 161 bp, Glycine max
ggcacttaaaaacccatttaaatttataaggaaaggttttaaagagaaaaatggcctttgaactttttagctttgaggaatctaaaagcaggtcaatcagaaggcggggttttagttaaaagcaaaacctttttttcttcctttaaagaggtccttacccc

SEQ ID NO: 96405 - DNA, 338 bp, Glycine max
catagcatatgacttttgttcgaataaaaagtcaaattgatattataataacaataaggctttaaattctatgtaacaaaataattatacctcaacatgggaccatggcaattctgcccttctatattttgtatactgaaaaagttttatgggggattaagagcaagaagaaatgtacatttatattgttaacaaatactggaattcatagtcataggggatcttttcaacaatggtagaaggcttcacattactgtggcttctaaagcaatccaccattgatttccttagagtcccagatgtaggaaactggctgcatacccactccaccagtgagt

SEQ ID NO: 96406 - DNA, 408 bp, Glycine max
gcgaagtgaaatgtggagtggatcaacattgatgaacaaatcaatggcataaattttcataaaacgaaagcaatcagatagcactctctatgaattaacaaaaactaattacttcatcaataactagttaactaccaagttgcactattgcatcctgcatttaagaagagacaactattattagtgccccccctccccctcctacaattggggtaaagtgaggattatccaagccttatatagactacttagccatatcacttggcgtgtgggattaaacacacaccctcactcctaacacaatgatggtgctggaggctgaaatgaaggcatccaaaaaggctgcaattaaggcagactaggggtaaccgcaattaaggcagactaggggtaaccgcaattaagcca

SEQ ID NO: 96407 - DNA, 272 bp, Glycine max
ggggggaaaaaacttttccatttgcctttattagagaacaaaattgaaagaaaaaatggaataagttttttttataaactaaaattagcttattaaacttgggtaaaaaacttattttaatttatgcctaaacaaattttattgggcagcaaaaactaatttcttttataattatttatacagaaacttttcctttgggaacttgtaatagaggtgaaacaaacaggtcccacttaaaagggctagaatttcactccggaactcctgaaatt

SEQ ID NO: 96408 - DNA, 142 bp, Glycine max
ttgtcgttctttttttttttttttttttttttttttttgattttggagaaaagtaatttccacttcaaatagaagttatctacaagtattcacattgaattggaaagtaaaaacatcacaaaaacatttttatacacatata

SEQ ID NO: 96409 - DNA, 427 bp, Glycine max
tgctctctcaatctctcacgtagctctctcactctcacactgatccaactccaccacaagtcagagaatccgcagatttggccaaagaatctgtagatctgacatccaaagttttaaatacactatcccctcccacctcctcgatcgtgtgtattgtgaacatcactgccacggtcatcgtcactagagtccagtgctagcttttggagcactgtgccaaattatgtcgtgccgctcatcgtcgattcagattcacaatgctaaaaacctgtcataattagattcacagtttttataaatcggtctttgcaatcgacaatctctttcttttcttttcgggtttagggatttagtctgattcctctgtgtttcttgttattgtgcaggcattacttgcgttttctttgaatctgattttggtactatt

SEQ ID NO: 96410 - DNA, 442 bp, Glycine max
gaacaggtgtataaagcattgcaattaattccactaagaaagtatgcttcatacatgaggaaaacaaaaagttacaaaatcaaaagcacagaaaccatcgtgttaagcatttcaaataaacgcctacacgaggaaaacaaattttaaaaaaaaaagttctgatgtacaaaaacaaagtaagcagcaacatatttgacatgttcttcatcagatccaacctctgccaaattgtgtctgcagcactattttaccttcttgagcatagctgtggttctaaactcagcatcatcccttataaaaccccaccaaaaaaatgtgagaggaatgcttgttgcatgccatagagcatgagcatccacatatcccatgtaaggtggaaagtcatatgtctccaacaccatagctaagcctcctccaaccactactgcccataatttccatc

SEQ ID NO: 96411 - DNA, 126 bp, Glycine max
gtgaacagcctcaaatatatccaactctgattgactgcgggctaagacatcggttagagcatcatcgtccaaaacaggtgcagcgtatttttttttacactcacgcaggagtgcctgcaagtattc

SEQ ID NO: 96412 - DNA, 422 bp, Glycine max
ggaaaggagggagtattatattttgtctgaagggttcactggttcaagaatttcccatgctttacatctggagctaggtaaatttttttataaccttgtcttgtggttatgatagcaagatcttatgcaactttgtgcaatggattattaaaacatcaccaagtttcataatcaagcaaccagttataaccagctcgaagaagacactctgtatgtataagcagaaagagtataacttgctcaaatttatagatacacacaactacagaagtggcatcacccaatttactacaagagctagttacggagaaggtttctaatccttttaggcacccaaaattttctttttacttgcaatcttatcatctattccaaaatacactatccttgtctgcatcaagtatttctgctttgatgacttg

SEQ ID NO: 96413 - DNA, 424 bp, Glycine max
ctatagtataattatcaagttaacgtaaagcacccaattaacacagtttgatacaatagggttgcataacctcatttttacttcatgtaaccctatagtataattatcaagttaacgtaaagcacccaattaacacagtttgatacaatgtaacatgaagtaaaaatgaggttatgcaaactatgtagaaaatgattgatggaattaagatgtcaatcatccttaagtacataattaattgcaccagttgttttctaattgtattgtttaaccccagttttaattgcaacaattgcaccatttctaatcgtttgatgattatatccaaatagtttgtagcttttgttgtatgtccattatccatcttcattcataggaagtatttgtgttcctaaaacgtgctgcatgttctaatttgattgat

SEQ ID NO: 96414 - DNA, 447 bp, Glycine max
tttctagttgatagattggtgtaaagggagacatgggaaggcttttcttgatcaatcttgaaggagacttctatagctgcaaacactgccgaacacattttgctcttgaggatgatgtcatttccagggtttttaatctttttctccctgttttttttccttccatgaaacattattttttatttcttggtactcgattttacaattttttaaaggatagttgggggttttgctagataactagttgatatatatgtaaggcttttatgtgatgttccttgctggttgatcatgatgagagggatgtggtgattcaccccaaagggagggtggcaatagaagaacataggatatgatcatctcaagtgggggataaaaaatattagataagatgtacgtgctcaataatatattttctaaacagtatctgtctcaaacattttcaat

SEQ ID NO: 96415 - DNA, 473 bp, Glycine max
caaacgtacacaaacacacagtacattaataaacagtcactgtggccagaaggcttctgcagcaatgtaaccaggattcagaattaatctagttagtatatcatacaatgcatggccagttacaatacatacacataaccataacagtaacattaatggagcagtaatatgacactattgaattttttgttatggaaacttcaaagaaaaaacacaagcattttggccaaacaaggtattagtacatagctacatggaagaaacctacattaaaatggctgcctaactatttgcaattataatccagtagtgaaataagatggggcaattatgacaatctcggaaagcctctgccaagggtcagcttccaaaattgagttccttagcctgctgtctgtatatgcttatccgcaaggaatattgtctccgtgaggattaaccgaaaacttacctcaatgggtcctgatatcctg

SEQ ID NO: 96416 - DNA, 485 bp, Glycine max
ctcgagccgcttccaccaactgctgtgcgaggaacgacgacgagcacgtgaagctgcagagaccaagccatcgaagatcgagaccaaattagccgaaagaacgacaaaagagcacgaaactgcatcttcctggcagactgcgtccttaaaagtttggactaaacggtgaagaatagaagactttaatctgttgaaaaggaagaaccacaatgatgaagtttgtccgcttttttgcaggtcaaggattgacattgaagagtttgctagaggtccactctcccgagtgtattatgttcccaattggatcacgcaggacgaggaggaagccattttggagcaggtatatgcggttccggatgcttgtgacatttgggtgaagctgaagcatcgccgtctgcagatgtggggaggagaagtcaaggaaccatttgatgctaaaccactgcctcaatggctcatgcagatcagtcacgcactcatagata

SEQ ID NO: 96417 - DNA, 427 bp, Glycine max
gttgatgtcatgacgatatcatttgttcgtgatagtagacgtctagcttcgctaccaaatgaccatgcttcattaactaatgcgatcaacactgcaaaggcacttattgctgccgtcatcacgacccgttctaaaagcaatttctcttcatcatcccgctgcgcagctcgaataacgtcattctattgctcatgctgtgaacggcagccacactcgatcatcagcttgcgttcttgtttcgccttcgctggcagcatttgcagatgcatacgtcgatcaagagattgcctgatacacacaatattgctgcgtggatcgtcgtatttgctccggcacgcgagcagatctgctgcgcctgcagtccgtgcctagcatataacgatcggcaaagcccgccacaacatggatcttcatctcactggctcaa

SEQ ID NO: 96418 - DNA, 438 bp, Glycine max
ctcgagccgctcgaggcctgtgagaatcattgtcgatataaatatggacgtttatatagatatggatatggaaatggaaatagatactgctatttcgactattccatccagaaccttcgatgccctctgtgtaatcgccaacgttcccgcattatatgtggaatactggaaatactgctattcgttgccggtgctgccgaaatggtcattatgttattatggccatgcaaacttttgtttggggtgccactgtttattacactttttatacgtaaatggagaaaaagacatatgtcaatatacgaaagtattgaaaattatctagaacaaaataatttgatgcctattagatactcatacaaggaaattaagaagatgaccggaggttttaaagaaaagttgggtgaaggaggatatggctatgtgttcaagggaaaa

SEQ ID NO: 96419 - DNA, 275 bp, Glycine max
tatggatcccctaagtgggttagtactgtcgtcttttagacttgaacttggagaaacaggaaaatccatggaattagtaagagttggaagtgagcaggtgcttgttgttggaactagtctgtcttcgggtccacacacaatggccactggtgaagctgaaagttgcaagggtcgccttcttgttctttgtcttgatcatgtgcaaaattcagatagtggttcagtgacgttctgttcaaaggcagggtcatcatctcaaaaaacttcaccattcc

SEQ ID NO: 96420 - DNA, 268 bp, Glycine max
gtttattaagctttgatttgattccttcgtttagaatttgagttgagactgaattggggttgttcaattgtgtatgaagttttttttttatttgattaattcattttgatgcttacaaatacagatgctgttttgaatgtgaatgtttggtttttggttttatttgaattggtggaatttggagcaggtgaggggccatggataatgaagatcttcctgacgctgatgatgattctgaactcctccaagaggatgaggatggtgattt

SEQ ID NO: 96421 - DNA, 409 bp, Glycine max
gaaggtgatgagagtcgcgagcagcagcagcagcaacgggttgagcgtggtagccaaaatgagaagaagcagcagcgtttctttgttctccgttcgagcctgccatgatctccctcatggaccttcctgcatctacgttggccccctccacaccgcaacccaagagaccctcgaagctctttactctcaggtcagctcaatcaatttaacttaattacccttctacgatacatttgtttccctagctgctcttaatttttcttaattaagcaggcacgggatgcatattacagcggagagcctttgattcttgatgacatgtttgatagactagaggtatctatctatgtctatctatccatatctttcttcatttcaccactcatctattcactcatcttatggaaaa

SEQ ID NO: 96422 - DNA, 348 bp, Glycine max
acctcggaatgtcagttaaccatatctcaagatttcaacattatcaaacatatcaaggttctgggtgtacaactgtataaggggtacaaaattgactgctttattaagctttttctcgtaaactgtgatgctcaggcacacagtaataactgctggaaattgacaaagatgaataaaggggataaccttcccaaaagaaggcaagcaaaaaataaagggcaaatttggtagtgcccattagtacaaatcctgtttcaggttttggtaagaaattgtttttttaagagcctaaagtcctcaacaaggaaaccccctcaaggggccatgagcccatcaattgtgtatgaa

SEQ ID NO: 96423 - DNA, 369 bp, Glycine max
ctcgagccgcgcgagcataagaagcggttccaagaagagtaccagcgcttccggagcgggtgccgttccctcaaggcggaatccgtctcccatttgcaggaccttctctgctgcatggtcctctccgagtgcgtctacaagagacctgctgctgagatgattcgtgctgtaaataaatttaaggatgattttggtggacaagttgttgctttggagcgggtgcaaccttcgtcagatcatgttcctcataggtatttgttggcagaggcaggagacactttatttgcctcctttattggaacaaagcagtacaaggatgtaattgctgatgcaaacatacttcaaggtgccatctttcatgatgatgct

SEQ ID NO: 96424 - DNA, 362 bp, Glycine max
agcgcttaaactatcacattgaataagagtcattggaagctccataagaaacagtcctttttataccgtcatagaaattcctttaccaatgacacacacactcaacatattcctatatgaacaaatgaaacataaatctccaatgtgttgagaaatcaaataatgtgcttacatgctgagcagcattcagggagaggttgcttctttggcttttcatatgccacaccaatcttcaacaccagataagggaaatcttaatctttcttctcctgagaatccttgatcattgttggagcacccaccctatagcttgagcaatcgtaattacccgaacgctccagtgaaaaaattaaaagaatatg

SEQ ID NO: 96425 - DNA, 250 bp, Glycine max
attgtattcataacatcacacaatgggggaagtgattataaccaccaaaaccccaaccatgaatccagatcgtttcatatcatacgtaccctactgttgatgatgttgcaggttgtacgtgctgaaaaggaaattatgtgcattgagagggatagggaagcactcctgcaattcaaagctgcccttgtggatgactatggcatgctatcatcttggaccactgctgattgctgccagcgggaagggattc

SEQ ID NO: 96426 - DNA, 106 bp, Glycine max
caaaataagttggagcatagagacacatccttctaggaggtgactaatataaggcggggccaaattcgtcttaaggcaaagcatctccccgttggaaccgaaagga

SEQ ID NO: 96427 - DNA, 451 bp, Glycine max
  unsure (1)..(451): unsure at all n locations
acaaacttccttattttcttccaaatcnctantacccagaaagcacaaaagctacacacatgggcaatcttttctttttcttcatttcgtccaccagattcatacacaattcacgtatacgtacaattattaagtaattgatttccaccaatctctttctttgatgatcaatcattaattgatccattgttgtttacctgtaaaattcatagagatttcgtacatactagttattgatcgattcatcgattatgaatgatgatttccattatatatatgaagagattgatgatcgtgtgttgtttttgtttggaacccaaatagaaggaagagatggcaggagaatcatacgaggaagccatcacgagtctgaccaagcttctcagtgagaaagctgagctcggtggcgttgccgccgcatagataaaggagctgacggcggagcttgatg

SEQ ID NO: 96428 - DNA, 313 bp, Glycine max
gacaaatattttttcatatgcttaaagaaatatataaatttgggggggtgaatgggggttgactgtatcacacccaactacatcactgtatactgtcaacatgccgttatattctccactctatagcataaaagcagagctggacgaatatttttggagagacaaaatgggcttttacactctgcttatgggagaatatatcgaaaaaaagattattgtggccaagatatgtgacggttcaactagagcaatggaaggataaatgcgttcaacatttttacttatcaccaaaccttcaacgattggagagttt

SEQ ID NO: 96429 - DNA, 413 bp, Glycine max
  unsure (1)..(413): unsure at all n locations
gagcgtctttagttgaaaaatcacgcttanatgcctcaagatagaatcaaaattctgaggagtgctgtaggaaattgctacaacgatgatcctgttctttcttcctgtggcatttttattgagaaacaagtgagtctgattgaaggtcgtgttcttgagacaccaaaggtatgcattgatcgattatatatttcacatttttgtgtgcacaggatatatagttgaggagagataaaagagaaaatggtgtaaaggaggtggttagtcaagtgtctgttagtgagagaggaaccacattaactagattttcaaccaagtcccaattctatttcaccaaatgactagattttatttcttttttattttatttgattaatccatttcaaatgtacttaaatatctacgcagaacat

SEQ ID NO: 96430 - DNA, 231 bp, Glycine max
gtaatgaaaatcattcaattctctcggtacgttgttaaacagaagaacggcataacttgcttggacacttcagattccaacgtgtctcacctaatcagagggggccgttcttacaagaggtggttcctgcttcaaccttgaaagattgttacatgctacatccttcaaagattattaccctatcgaatatgagttaaatcgacggagcacggaaaaagaacttcattgctg

SEQ ID NO: 96431 - DNA, 426 bp, Glycine max
cctataaaattcttatgttttagggaagggaaacatttggatcgtcctgaataggatatcaccagacaaaaaaaaaaaaaaacttttatcctatcaaattcgcagaagcactgttacataaaatttttgttcttaatcaaatgtcatctgttaagtttcatgccagaatggattcaaacaatggtgaatataaataacgctccccgtaactaggaaataccacctgcacatcaacaggagcaaatgacatgatttagcattcccaaatattttgtacctctaactggaattttcacaatttctcacacattttggaaccttgaagggtttttgattggtttccaagcaccgattacaatgaagcaaaagatgttactcaagtgtatgacgtaaagatgaaggctttggcaacaaaacaggggaaca

SEQ ID NO: 96432 - DNA, 150 bp, Glycine max
ggagaaaaagtgtttgtcttgcatcatagagagtgtatactttgcctgaaaacactgttgtgccatttgacccccaaagaaaaattaagaagtgggggggcaaaggggataaaaataacttcagctttaatttgctgaaatttccactgg

SEQ ID NO: 96433 - DNA, 503 bp, Glycine max
taagcacaatcagggaatatccttattgaatgatatccataatattctacactatctaaatggcgcgatttggtggtttcctgcatgatgcctactttgtacccatgcatgatgcatgatgccaaccatgatgtacgtacttccttaagcaagctggaggtgcatccttcctcttggaccttgtggtgcttacttcctggagacccctgtgtcattcgtacccctgtgtcatccttatcagagtatgttattaatattagaatccttatatattattgttttcccaaagttgaggaagcctcagcctgtcagtggttatcagattctaatcaaccagcatgctcagaatttggatgttgaatctgattcatccaatgctgttagttctttcaacagcaaagatggtgttgctgcctgctaccacgttaacatgaagagagaaatatttaatgatggaatgttagtaatagactctcttgacacttttttttccccacacatta

SEQ ID NO: 96434 - DNA, 143 bp, Glycine max
cccattcataaaaatgtggggagcttatgtaacgagtgatggccaccgcaaacgccaggcctgcctggcttgaatgctcttttccctgatggtcatggtctcattccatgccaatgcgaaaatgcgtctataaaatgctcccc

SEQ ID NO: 96435 - DNA, 149 bp, Glycine max
aacaaatacaatctcagggaagttttattattaaatagaatacatggcacactgacgacaaccttacactacaggtagcaaacctgtattcacaaactgctaaacgtttcatcagatgtaatatttacagagggaggaagaatggtaaa

SEQ ID NO: 96436 - DNA, 131 bp, Glycine max
gaaaacgatgccaccaggaatcatagaacctttaaaaaaacggacaggcacatgacctgatagggcacggcgtgcatcgattacaaacatgaacgcctaaagccaaacgtgcggtctatgacgagctaagt

SEQ ID NO: 96437 - DNA, 118 bp, Glycine max
gcccgggaaggagaatttttaggattaagacggctatacttaaacaaggaggtgatatagtacgaaaggttcattcttgggcaaagcatctatcaacgctaaactaatggcacacaca

SEQ ID NO: 96438 - DNA, 157 bp, Glycine max
aagaactgaagtactaaatgaagtgggtgtttactaacagataacagaaaactagctaacaaactggaacatgtatcattgccccttgcgttctaatgtcaaataagaacaaatgggaaaaaaaaatacctgacttagaaatcagactctttcataa

SEQ ID NO: 96439 - DNA, 124 bp, Glycine max
tcttttttttttttttttttagatcacatcaaccaattttatggtataattcgatcctttaagatgtccatagtgatacacccataacgtgtcacccctcacaatcccatcaatgtagggagcc

SEQ ID NO: 96440 - DNA, 159 bp, Glycine max
atctgcaaaggatcaacactttttgaaatttatagcggaagaatttacagaaactctgggctaaaaatatagccacctatactacgactcaacccgaaattcataaacactataacgccaaactaaaacccactccaatccctcacttctgagccttgg

SEQ ID NO: 96441 - DNA, 342 bp, Glycine max
aatcaggcaatgggtttaaattttataacatcatcatcaacacaagccttataggcataaactctggtttttatttttattttcccttgaaacgaaagatacatacacacatacctacataggtttggtttgaatagctaaaagattactattatacctgctttcacgattgaaaaagttgcttaatctttttctcgagctattcctttttggctcccacaaccctttaaacttcctttccttccttccacaacacgaacgtgggcatcggctccaccttaaactccttcgccacaccctttaaagataaaaccctcacacaaaaattttttaagaaaaatt

SEQ ID NO: 96442 - DNA, 403 bp, Glycine max
cggtcgcccttttttttttttttttttttttttttttttcaataatgatgacagagaactgtaaccacgttcgttgaaccaatgcatgtaagttaagaagcttgatccctctaaatcttgggaaattagatgaagaagcacaaaatattgatcgctgattactaatctgcaaaaaagaggcgggctttgcttcatggaccaaggtatgaataataggcatgctgttttggaacaaacaaaaataacctatggcatgaggttcaaaccgaaaggagattcacaaatgtgatggacatgatagcactcttcatgagagtgatttaactcttgcaaatgtcaaatagcctgtgtgacctcgagcttcaccacaaggtctagccctgacagaagaaatagatggact

SEQ ID NO: 96443 - DNA, 455 bp, Glycine max
aatggaaaacagcatatccaatatttatttagttcctcgttgcgataaaacaatgaacacattggatgtagaaattaaaagtaaatttatttttttgttctttactgatagaacaatactactatttcaatattcttcttaaggctatttattttattgcagttatgctcctttaccaaaacttacttaactcttcaggttggagtaaactttgagtgccagaaaggatcataatgcaagccaatggaagaaataagaggcactcctcttgcctttctgattctgatcctcaccacacgagcgtgcacctcacccccattaagcctatgaagcctcttgtaacccactgttgtggctttgatgatcaatttaccatccacatagatttcatgccgtttgatcctttgaccaagaccaattgcctcttgtattctaatcacattgaatctgaattt

SEQ ID NO: 96444 - DNA, 418 bp, Glycine max
accttcaattgtttccttaaccttggtgccttcatccattttatcagtctcagatatatgatcatctttcttatcctcttctatttctttcaactcatcaccttttttatctgctactacttgtttcacaccatcaattgccttatcctacttgacttctttcacatcatcaacttccttatcctctatgacttctttcacaccatcaacttccttatcctcttctacttcttccaccctatcttgtttcttatcctcattgactgcttccaccccatcttttttatcctcctttacttgttcaaccccatattcttacgtatactcttttgcttcttccactccatcttctttgctatcctttgctacttattccaccccttcttctatctgatcctgtttagcttgtttcacccca

SEQ ID NO: 96445 - DNA, 193 bp, Glycine max
tttatttttttttttccagtgaaggatttaaacgccgaactcaaaactcaggggaggggacacgattgttcctggcttcctgcttgaaatatcatccgccaaacaatggcaactgtgcttaaaggaaactgatcaataagactctctaatacattcttctaaccacactctattattgatcaaaatttattga

SEQ ID NO: 96446 - DNA, 391 bp, Glycine max
caaattagaatatacccatattcaattaaattcaagtagcatggagattcgtgtataaagttaccagaagagtaaacaatataaggaacagtgagagggtttgtaggataattgctagtgctgcagtggtactggtgaatatgaagactctgacccaacccagtttaggagaaatccaattaagcttataaaacggaactgtagtaagagctaagaaatagaagcttcatactcattgtgttgctatagatttcatcttacatgctttgcagttatagattggcatcactctgacctttggtaagcattacatgttctaaaatacacctcatagaaaattgcaggatatatagtttttcttgatattacttgcattgctgacataaagact

SEQ ID NO: 96447 - DNA, 466 bp, Glycine max
tcgcttgtaaactatacaaatggaaaggagaggatgcggaagtgaaggaaaaatctgaaaatcgagaggctgcgtctgtttctgtgtctcttctctgtgtggggtggcggtgtctataaccaccgtattaccctctctctctctctctcgatttggattgttctttctgttctgttctgttctgttctgcggttgaggctaaggagttatttagttacttactatgcccatgcccatggctatggctgcttcgacttcaacctcgctctccgtcgttggaagtaacctcgccttcccgcgccatcctcctgccacatcctcctctgctcgttttcgcactcgattgcgcaacaaccgttttttcctatcttcttctctcccaagtgatagaaggaggcttaaggctgtttgtggcggcggattgggattgcgaaggaacaactcccgcggcggcctcgctttcgtc

SEQ ID NO: 96448 - DNA, 462 bp, Glycine max
taatattcagtttttccttttctccatttttctctcttccgctttttccttttctccattttctgtcttccactatctgcttcccttgaccttgaactttattcttctgcaagctttgcatccattcattcacggcagacatgagatttattatggtatcagagctttatcatttcctctccgctgccactattgatcaacctctccgttcattgccgtcgccgtcctctgtcatgagacaccgattctggtcaacacctaccttcgttcaatccttattcatcttctcatatttccctttttcattttttgattacattttcctaaattttttttctccaaaacacaaaacttaacattttccctttcctttgatttctggcctatttgagccgcgattcgtgaaaccaccactaccaatcaattcctctccgcatccgcgacaaaacccctaaacatttg

SEQ ID NO: 96449 - DNA, 254 bp, Glycine max
aaaaaaaaaaggcaatgatattgggagtccctggggatcacttttatctacttacaaaataacaggcccgacctatataaatgggcctaaactatttataattttacacacagtgtcctttttaaaaaacaaaaggtacggctacactaccatttttttcccaaaaatataatccaggggactttacttgggccataagggtatcatactcaggctaaccttcctgggttttttttttaagcggggaaacctta

SEQ ID NO: 96450 - DNA, 354 bp, Glycine max
ccttggttccgcaacatgtatatgtagggcaatgttaaacaacatttacattttacttaagaatctagctgcttaagtaacaaaataatacttatctcacatttgaaaagttaacatgtattgggaaggccaaagggggatgcacctttgatgtgaccttttcctgcctgaaacaggtttttttacataaccaacggacaccaaaaactggtcaagggatgatagggacctcatgttatccgggggaaaatagctgggtgactttcccatgatcgacgagaagagaagggaaagtgaaggccattcagctttactttcccccaaaaacttatccaaaaatgcaaatgccaccct

SEQ ID NO: 96451 - DNA, 126 bp, Glycine max
ggattgttatattagttatcaattttaagtaagtgggggctaggttatgaaagttttgcaacataaagtaagaaagcccgaaaaatgaatgttgctaacttaagcgtgtgaattatcgatgcataa

SEQ ID NO: 96452 - DNA, 390 bp, Glycine max
ccttgtatatttcagaaaatgaaactgtacacaaacatacatttgcagaaatcacatgtaacataaatgattgtcagtaaaacaaattcatatacgagcatgcatgtagtaaaggtgccaccagttaaagaattgtgaaacatgtgaagaggtattgatgtgtatatttgaatcttcccatctcccatggatttggacatttggtggagtgaattataacacaaataacaggctggctacttgttaaaaatgatgccaaaattcaccttacagggatgtacaaagttgtaaaggtgaattcatgctatttgagatataacttcactggcttcggagcaatggtgtcaattcataccccaatttacagtccacatagctagcataataaac

SEQ ID NO: 96453 - DNA, 306 bp, Glycine max
ctatcatggcggtggtctgattacgctgcagggtgactatgatgcatccctaacctccctctaactctgttcgccggcacgcccgcaggactgatcatgctatctactaccacatcagcatatagcctgaccacaatgcccagacccaagtcatccctgcctatatacaacctcttctcgatcaatttgccattctctagcaaccccctcattccttgcctccctcgcgagccactgaccaccacatacacctattacccaatatggcccacgtacatgtcaggccctatcgttacccgcactacc

SEQ ID NO: 96454 - DNA, 77 bp, Glycine max
gcctaattgggaatgctggcatttttcacttttggaatatcaaatcaacatgcagaaaagtttgcataacattacat

SEQ ID NO: 96455 - DNA, 466 bp, Glycine max
  unsure (1)..(466): unsure at all n locations
cttaccactgtgatgaaacacaaatcnattcataaaggacttgcgtctcatcacaggggggagtcttctcaacaaagtattgacactactccgcaacacaaattctttctgaatagatttggttgtttccatgacagtacaccatgccaatgagttcaggtggaaaaactgtagataccattcatggacttcagaaatcagaacatacacttacaattttgacaaaatgctggtgtaatttcaattgttgaactgctgctactcgtattcagtaatcacttgccaatgaaatgtgtatcctattacatcactataaaattcgtcttgtattgttgtgtacactgagcattgttggaaaatcttacttttataaatagtacttataaggaaaacactgaaaagaatagataccatattaatcaaatgaaattgcacgagaccaacatgcttacttagattacatatg

SEQ ID NO: 96456 - DNA, 389 bp, Glycine max
ggccgcccttcgccctttttttttttattttttttggttttaatcatccttttatatttccaaaaaagggggagacaataaatacatgactttacaaaccgctgtgtaacttaaccccctatgctaccttcctcaccttatggcggtaaattagtgtaacaaagaaatggttcactcaatcccatgtttgggcaaacttaacacctttggacttctgttttgctgcctgaaaggccagcatcttttgatacttccgtgcctctttttcaacctgatattgcaaaaacccaaacaaagaaacgaatttacaagctccctggaaaacatgcaatactgtttaatgttaaccttaaacatcctatggatttaactaacagaagcaaaccttg

SEQ ID NO: 96457 - DNA, 116 bp, Glycine max
  unsure (1)..(116): unsure at all n locations
atgtaatgttatgcaaacttttctgcatgnttatttgatattccaaaagtgaaaaatgcgggcattaccaattaggcaaaaaaaaaaaaccccaaaaaaaaaaaaaaaaaataatg

SEQ ID NO: 96458 - DNA, 274 bp, Glycine max
cgcaggaaataaccttctatttgaatgaatgcttcatagaaagaaaaaatggtgtgtggggggcattcttgaaaagagagaagattcccccccccgtgcctaaacctaatgattcaaagaaaaacttaaagatgatgggacaaggaaacaccatattcaaatggtcatatcaatcctattatcaaaaattatgaaatataagattatcaagaaacgagacacgggcgggaaaggggagtagagaccactcaataaatgaaatagctactaaagg

SEQ ID NO: 96459 - DNA, 381 bp, Glycine max
ttcgtccttttttttttttttttttttttttttttttttttttttttttttttttgtttttgggaaaaaaaaaaaaaaaactttgcttgcccttgccattaaacttagtggtaaatcccccccaagaccctttaattttatctatttatttttcacccaacatccgaacttttccccaaaaaaatagaaaaagctttttttaaactggtccattggcccccccattttttaccgcccagcttttttttttgctttccccaaaaaaatagggtgtcttgaaccatccggggatttgaaccccccaagaaaatcgggaagagttggattgccggctaaaatgccctccagttttttgaacctttttttggggaatgatttttt

SEQ ID NO: 96460 - DNA, 394 bp, Glycine max
aagaaagaaaacaaacgcacatcaatagtagctgcacgttcttttgtgcgcagatttatttgtataaatatattaatatatttatacgtataaatataataatattaagttaatgaattagacaaaatattattgtacacaaataacgaatttatccagtttttggtttagaagtatacatcatgaaagtctgaaagtaaaaagtggaaactacacgatgaagtcatgcttacgtgtaccacacgcagaaaactgaaaaagtcggtatagcttttgttggctatgtcaaaactctatactcattactacaatcaagaaaaaatgagggcgaaaaaaactcgccgttcaaactgtgcacttaacttcaaagccggagaggggacgactataccga

SEQ ID NO: 96461 - DNA, 225 bp, Glycine max
gggaagaaaaatgacaggttttaaaggggaagtcggattattaccaacgtagaagatatacgctgttgtcttaatggttgcaaaggtggagcctacactagttcacaattttaagtgaaaatttccctcacaagccaatccaaacttggttatgagaggtccaaaatgggaaatgatgggggggcaaacagaattgttacaagttcatacagggccaaaatgggt

SEQ ID NO: 96462 - DNA, 380 bp, Glycine max
aatgcaaacttgatttatattggttcggtcacgccttatgtctacattcagtcctcaaacaacccacttgagattttccactatctttataaaaatcttttttacaacttctgaacacccaaggaatcactttcctttgtgttcaggaaacttacaattcaagagacaatcaatctcttgattacaacttactttctgagatgaacaaaaaaatttctcttctttagagtggataatacaatttgaagttcctagatgaactctcaatagatttgcaagtgtgtgcctaagagttgttaagagagcatttgacaatgaagttttcttggaataactctcttactttttgaaatcagacacacatatatataggcccttcg

SEQ ID NO: 96463 - DNA, 494 bp, Glycine max
  unsure (1)..(494): unsure at all n locations
gttctagatccgcgagcggccgcccnttttttttttttttattgatataatacatgatgagttatatttcatttcaatagcacaacactaattaaactagtctttttcaaattatcaaaacatggtataagtatctcaattgacagtgaaaaaatctaaagcaatcataacttccaactaattgccttttccaagcattaacaagcttagacattggagttttccgatccaagagggctagtgtcttcaaggtactgaaaaaaaaaaaaagggaagaaaagaaagaaaatataatcagaatgtcagttttcaaaatgtgtaacagaaattaaataaaattcttatacatgtaaaaaagaaatttctagaaaatgaagtaatcagaataatatcatcaagttaacgatagagtaaaatctcaatagtttataagaaaaacatttataataataatagtgatcattgatgttttaggcttattatacatcaataat

SEQ ID NO: 96464 - DNA, 395 bp, Glycine max
cccttacgcttcgaattgataacttcttatggtacattgagaaattcttacaacttaacttcaaccttgatctaaattacaacctgtgtcgaaaaatttgtgctaagctaagtaaataatttaaactataggacaaatccacaaagaaggcaaacatctgtttccaaacacaaatgctgagctgttttcttatgaccgctgattgttaggctctccaatatctactataggtgatgctgctgctgccactatgtctgtaggttcattgttggcaactgagaaagaaaattcagaaaccaaggccaaatggtcgcttcccactttctattgatcaaggaaaataccggttagattcggaaaaattacgtttagacatttgaatccaaggtgaaaag

SEQ ID NO: 96465 - DNA, 256 bp, Glycine max
ccgaccataactaggtttaaaaggaaaatcctcactataaagtcctgaatggcccgcttacaacttttttcggagtcttttttttcttaccgctcataattctctaaattatttctctgcctcacaaggaagagtataccacccatttctttaggtcggcacgctacaatcaaaggatcacataccgcctataaactcttttacacataaagatgctaatgctttcttttccaataactaccatcgattataaatg

SEQ ID NO: 96466 - DNA, 448 bp, Glycine max
ctttttacttattacaccctatctttgttcttctctacattcttgttcaaataggggtagtctccaatggcttagttcatatataccctttaatatttctccttttaaaatgctttaatagaattcattatttttaattttctgctctctttaatttacttcacctaaccttactttctttaaaaattcaacatgacttttgaagttaagagtgattaaaactacttttttttttgtgaaaatagaggaactttgacaacatttaaccaaaagtatatgatctaaaatcacatttttaggataaccattcttagcattaacatggttaagttcaagtagatcaatattttatttttacatttttttacaaagagaaacacgttttatatcattagaatactccgaatctctaataaatgacattaattatatgctgcaataattttat

SEQ ID NO: 96467 - DNA, 422 bp, Glycine max
cggctcgagggacttctccagcctagtcccgcccagacaacggccgatgaagagccgggtgagcctgcagctgggtcaaacgatgcggcccccacgtcgtatggacaagtcgaacctgcagttgccggccctgcctcgtttccaccctgccaagtacccatccgcgtgctcgtcgctgtccggcacgccgagatcagaacagaacatgccttgcgggccggtgtcgccgggcttgcaacagcgggtctacaccgaagcacagcggagccggtatcagtaccagagagaggtaatgcatggattcattggacgcggtaccgagcccgcgagtgtgaggctcgcgccagttggttcgcccggtctgcctatgacgcccttgacgctagacgaaccggaggacgggtacatcggtgcgtctcacg

SEQ ID NO: 96468 - DNA, 287 bp, Glycine max
gggggcccaaaatcaatttaagggggccctttaactcaaaattttagggggagacactcccatttgaaaaaaattgtaaaatcatttcaaacttgggattttttttttgcccctaaaaaattgaaaattttaaaaatggtacacccaagtcccaaaaaaaattttagcacttggatcaacacaacctttaggaaaaaaaaaatttacttgccaaggttgttttgcccccaattaaaaaatggaaaaaaggtcccctggtaaaaacatccccgttggcatttccaagg

SEQ ID NO: 96469 - DNA, 422 bp, Glycine max
tccggacatgagagagagagagagattagtgaggtgtaagaaactggaaggagtaggtgttgttggcattctgacctaaagcttgtgtctttctgcttcgtttgtatcttctgctgcgtaaagaggatccctttctgattcttccgtaaatttcgtctctgaaactagggctaatacttcatctaccgatctctatattctggtttttccaagttcttggaaggaaaatgatgaagccatatgctcacagtggttgaatatagtacgtcagaagttcacacaagatatatatataattattattgggtaccacctgcagaatgtcattccgcagcatagttcgtgatgtaagggatagtttcgggagcttatctaggcgtagttttgatgtcagacttactgtgcatcataaaggaaaatct

SEQ ID NO: 96470 - DNA, 354 bp, Glycine max
aaagctttctctcgtagcagaatgactcatcggcccgccaaactcgtctccgaacgggccgtatttggctcgagccaaccaggcggtccgagcacgtgtatatacacggcgaacggcgaccaccgcgtcctcggcctcgaagcaatccggcggttctcgagtggctgcgagcaaggtggacgaaggcgacaacgacgagctgaccgaagtcgacacagagacagaggaggaagaggaggagcggattgaggacaaggcacacctgaagaagctaggtagcgccggcgggtcggaggagactctggcgagcacgccgtcgcaaacaggagcgagggcagcaaagaagcgcaagct

SEQ ID NO: 96471 - DNA, 391 bp, Glycine max
caacaataaggataacagtactgtcgataacggtgatgttagggctaaggataatagcggtaacgcctctgttcagccggtgccggaggatgggaattcagcccgtccgcaagttaattcgatgttggatacggtttcagatgactcctccagcttgaaccgtcctcaagatgaaccttttagtgttccaggcgtgggagagcggtcgccgggaccggagaattgtgtcaggatcagtttggcttcgcggtctaagcaggagaagcgggagctgaggaggaggcttcagggtgagcttaatagggttaggagtttggtgaataggattgaggagaagttgggggtgcttggtgggtatggtaattctgatatgatggtggatcgtgggatt

SEQ ID NO: 96472 - DNA, 323 bp, Glycine max
ccaggtggcggaccgttttattgattttataagagcccctgacccacatcaaaccaaaattcaagacagcaactttactacaacatccaatagtttccctgcccattttatattgctaaaaaggttgcaatcaaacaacaaacactggtataaaaaaaagggagacattgagaatccaacaatttatcataaaaccaagtttatgacctttaaagccccacttagttcaattttaacaataggttcaaggcaaatttttggtaacttttccaaaacctggtgaccggggactaggggttagcattaacttgatctccttcccg

SEQ ID NO: 96473 - DNA, 191 bp, Glycine max
agcaatatatgcaagccaatgcgagtcaattaccatgattgatgtctcaaaatgacaaatcatattactagtatgtagactggacacaagcccacgattccacctccccatcaaacaaaatttgggcttcatatgtttaaagggatactaaatgtacatttacactttttgatcaatctaaatgtatttac

SEQ ID NO: 96474 - DNA, 307 bp, Glycine max
ggagattcaaggcttaatttgtttcttttttctcaattaattttcccaagagaaggtgcaaccgaattgtagaggaaaatgaccaaattgtttctgtcatggaaaactagtgtttttttttttttttttttctgatgttagttcacttcggattctccgacaattcgccgatctaacttcgcccggttaaaactgcgacctgtgaacagaaggaggctttcaaattgtggctggtgaggtcaagcaacaagagtgctcatttatttgatcatgggtcttggattactggttttttgtgcttgatcca

SEQ ID NO: 96475 - DNA, 168 bp, Glycine max
ccaagcttacctttgggatatagggtaaaatttgttaatatcactggctacatatatttttattctatctaaatcctataacaggttccttgtatataatccctcccctctttggtttgaactttaagacctttgacctcaccaagttggatgggggccccaatccca

SEQ ID NO: 96476 - DNA, 260 bp, Glycine max
gctctatagattgtagcaatgtaattcattatagacttatgggaatgatccattcatctaaaaatgtaacaccaaacatcaaaaacatggcaccaaggtagcatgggtagactgtcatatatactgtatataaacacttcttccagatctgggagcaatgataaatagctgacaccatcatgtataaatgttatggcaaccattaattacaatgataaaacagatttaacacggagcaaatgaagaaacatctgccatac

SEQ ID NO: 96477 - DNA, 126 bp, Glycine max
gttgattattcgtcgttctgcattgatttggtccacactttcattacatagggggggattgccccgcgaaatagcaatagaacccccccagacatttctaattcgtggtctaattctaaaacattt

SEQ ID NO: 96478 - DNA, 201 bp, Glycine max
atagctcttaagggggatctacaggtatcaactatatataacccgctattcctgaaaacccctaaacaccactgaaagaactacctggacactccgcaaaacatcttgcaaccttgaaccaccccttgtatccagtttgaaccgtgaaaaagaacagactcgcatcttttacaattgctctaaatatggggggcttgacac

SEQ ID NO: 96479 - DNA, 386 bp, Glycine max
gaaaaattgatttagatagatagattcaatatgttaaacactgggtgtcaaatgaacaacaaattgtgcggacaaccgattcaacgccacacaacaggcattgcatgagattaatactcatctctccattttgctttctgcttgctcaaactaaatccccccgcccctaaaaaaaacaaaacaaaactaccggagaacttataaactttctccaacaactgtattgaataacaaaaggatttaatcaaaatccccctttacccctggattaaaaccttttttactactacaccatacaaatgggttagatagaacttagaaaccccatgttaaccttggccaataaacctaccttcattctcctaaccaccaacaacaactacttg

SEQ ID NO: 96480 - DNA, 193 bp, Glycine max
gcacagagaccttctattcactcatcggcatttctactgttatcggtcttggaacggtggcgccgtgcatcgcccgaccttggaccagctagagaacggagtcaagtgaagacccgtcctttgcgtcctttcactctacgaggacagttctggaacgagacgccgctggtcaaggaaaattgcgttgattgca

SEQ ID NO: 96481 - DNA, 171 bp, Glycine max
ttttttttttttttttatttttttaatattaatggatactctctataatttggggtgattacgtatttctagcataaaacttgagagaacatttttttttgttccatcatataaaaaatatatggactgaaagaacacattcatcttctcaaaaaaaagggggacattcat

SEQ ID NO: 96482 - DNA, 342 bp, Glycine max
gaaaaaactagggcggagtaatgcactatgcatgtaattcattaatttgattaccactgctcaaaaaccctcgttttaggctatttaaaagtgcaagggacataccttcacttttaaatgagggagctagcttaacctttgagcatttgttcacacacacaaaccaaaacaaaaagagaaacattccaaaatttgccattattttggctttaggacctggatgtaaagttcaggcccataaatttacataattaaatcgccccacccttttccttttctcactcaaattttatttttaaaacttgtatatacactaatgttaaagatgataccactgaaagt

SEQ ID NO: 96483 - DNA, 540 bp, Glycine max
gttccaatcctttaaatgcatttcctcctaaagtaatgggtatcccaccaaacaattgcacaactggcacatgagtgtatcaaaataatttgtattctctgataaaagaaaaatgttttatttctttgtgctctgtaataaaatgtacatgtgtcagagaatgaaatcctagctgaaaatgactatcatctacatatctacgaattggaactatgtgataatataacaaaggatgcatggacacagcctgggagaatgttctaagttgccacctgctgtaatggaggccaagcaatctcatcatcatttgtatagccgagaaaaaggaagtcagcacaattcttccaacaaccgtggttatatgggtttctgaaccgcccatcaggaccacgaaggtaatcataacgggaggaatttgctagttcatttgtggtcacatttcgagctatcatggaagcctgtgttagcgttaatgtcgtagctgcaaaaaaaacaacagcattcatcaccaaaaacacaactaaacctggatgttttact

SEQ ID NO: 96484 - DNA, 277 bp, Glycine max
gcccaaagagtcatctatccattttttgttttttttgggtttcctaaacccaactaacgcggttcaaaacacaaaaaaaaacaaaaaaacctacccttattttaggaaacaactaaaaacactagcaaacccataatttaaattgaaacgccccataacaacaaatcattcatattcattcaaagcgattggcgaaccctttaaccttgccattggtgaaattgataccaaccatggtttcccccaaaccacaactaacctttgccaaaaccttggg

SEQ ID NO: 96485 - DNA, 404 bp, Glycine max
aggagaaataaggtctatcttggaaaagaacaatcttccacaagggagatttgctcctacattatccatagaaacataatagtagatttcaaaaacatcatgctgtcaacctgatttaggtatcttctgacacgagctaatacagcatttttaactactactcaccgataagtgactagtttacacaatccactatatacacttcaggctaactgctattactctaataaagagagttgtatctgtagcaggtagcaataatggatgagatgcaaatgaggagtgcagggagtaaggtggtattcaggagtttactttcactgaaatacccagagattgttattgttccatctgcaattactcgagctagagttccagcttctgttgacagcaatcccccattg

SEQ ID NO: 96486 - DNA, 266 bp, Glycine max
ctttatctaaacataaaaaacactttcttttgctattttctcgctagtacaatcataggttggtaatcgcggcccatgatgttttgtttttttctttttgttctggggtctgtgtctttcgatagatgttctggtatttgctaagtgtgctcctttagctgaagtgtgtatttcagtggtgagttcataatcccagtttttgtgggttgcattgatgtgagaagatgacaagagttggtcgtgatgtttagaacgtggatttggct

SEQ ID NO: 96487 - DNA, 188 bp, Glycine max
ctcgagccgaatcggctcgagctacaattattaaggtgaagataatttcggctctttacaagtaaagaatgaaattttcatatggtagatttagttgatcaatataattattgttttaatttaattccttgaattaatttaattattgttcttcgacactttattcagtatattattaatttttttag

SEQ ID NO: 96488 - DNA, 186 bp, Glycine max
aaaataattaataatatactgaataaagtgtcgaagaacaataattaaattaattcaaggaattaaattaaaacaataattatattgatcaactaaatctaccatatgaaaatttcattctttacttgtaaagagccgaaattatcttcaccttaataattgtagctcgagccgattcggctcgag

SEQ ID NO: 96489 - DNA, 206 bp, Glycine max
ggtcgggtcaaaaaccatcacattaacaaccaaccaacattttgcaacacagcattaacaaactgtgctacacatgtttcttcaaaatcattggataaaattcagaccctttacttatttataaacataagcctgatattggcccccaaagaaaactaggttgttttgtttatcttggcaaaagaaagctttcttttttgataaaa

SEQ ID NO: 96490 - DNA, 466 bp, Glycine max
ccagaatttcatgcaccgtggttattttagtgacacttggctgaattcatgatatgctttggttgctactttttgatttaatttcgtatgattatttttctctctctttaaattaacattttaactgtactgactattgtttatggtgtttgcttattatattctgccaaaaaaatggtaacagttgtcttcactctaattatgagtaagaaagagatacgcaataatgtattgggtgtccaaacgttgtaacctgccttttctgacctttacagcatttattcctctttaactacatactatgtttctttctgttgagttggatctatatctattaactcaataaagctgaaataaacttgattgttggtgttgcaattagttgattatacagtgttaatgtctctgtgtattgtgattgagttcccagattatgttacagcatttattcctctttactacatac

SEQ ID NO: 96491 - DNA, 491 bp, Glycine max
gcagaggagtgtctcgtttatggtttatcatttcggagaaggtgaaggagaagaagaagaacaacaacaaccttcactcttctattattattattattattattattcaatttaatcatttaataataataataataattttgttcaccaattattattattctacatcagcatgggtaagggtcccttttccttccgccgctccgcctctcgccgccgacccaagaagaccgccgccccgcctcctcctccgtctgcgccgcagcctccctacgcggccggaatcgccacctcacccgacgacaacaacaaccgtctcattgctgccggcgccggcagcagcgccttgacgaaggcgaagaagaagaccggcggcgcccgcttgtggatgaggtttgaccggtcgggccggtcagaactggtggagttggagaagaacgccatcatccgccacgcagcgattcccgctagagacctgagaatcttgggcc

SEQ ID NO: 96492 - DNA, 409 bp, Glycine max
aattcggtcgggctgaaagtggcaattactcttttcttgggagcttctggtctgaggttactggggaggatggaactaccatgacttaattggtctggaagcctcactccattatgctgcatgtggtggaaatcaacaatgctgcaactgttgattgccaagggtgccaatctgactgctagaatgcaaatggatggacccccttgatggttgctcgttcgtggcgtagagactggcttgaggacatcttaaaaacaccttcagaagaccccttacaagttcttccttctccatatatatctcttccacttatgagcattgtgagaattgctagagaatgtggatggaggacaagtgatttagcaccatgcttagatccatgcgctgtttgtttggaaaggaaatgtat

SEQ ID NO: 96493 - DNA, 228 bp, Glycine max
cctctattaaaagatccataggattgaatgcgttgaagaagagtatcagatacgtattggcagaggcctcacagattttagattgagagaactaataagaaggagtttaatgggggcaaaagcattttggtattcccggcagacagcacaccggtgataacagaaaattggtgattaaaccaatagattccttgagtgatatttaatggccaactttccacataaaaa

SEQ ID NO: 96494 - DNA, 165 bp, Glycine max
gttatatattgagacagaatggggtacacaactcatagcaaaaggcttattacgctgtaaaggtgcatttaaccataaacaaaaatcgcctccaagactataaaaacattacattttaaacaaattagacgtccacttcatgatccgcaaacacctactgtaact

SEQ ID NO: 96495 - DNA, 523 bp, Glycine max
  unsure (1)..(523): unsure at all n locations
aaaacaccttttttttttgccaaatttgttttactgcatgacccttccttccttatgccggtgtaaaaaaaaagtttgcttctttgtagtagtcacgattgaagttgattatattaattgtaatatttgtaagttgattttattgtaacgatttcaagaggcaaacgactattcctctattttcaaggatgaaatgaatgagaaaaatcaactgaaccctgcttctgcgttcctctgtgttttttggttggctcacataggaaaaggaatagatgccttttactgttttgaaacgcttttttctaaaaaaaacctttggtatgatatctctacattaatttaatagaaaaatattatagtatagcactaatcatgtaagtttaataatagattaagaaaaatgaaaaaccgtatgatgaaccanatcaaatggctgaaaattgattgatttggatttgatgatatattaaaaattgatcaaatttaatcattaatatttaatttatatttgatttagatgaat

SEQ ID NO: 96496 - DNA, 358 bp, Glycine max
attaaagaaacatgcggattataataagtcagtaaccatctttcgagaagctagaactggcatgtaaatctttacaactaggggttatataaccagcaaagaggtctgtcatgtcatgtgggacataaaaaatcaccacaataagtatgagaaaaatataccacccactacacttgttctcatcatcagcataaacaacctaggaccttcacacctgggtcaatgatgttgatgttgatgttgttgtaccagactctatctggtgaacctttaagtttgaagtgggcacagcacacagactataaatctcgggagatcgaaactcatcacagtctgtggagccattcttggggaaaaa

SEQ ID NO: 96497 - DNA, 474 bp, Glycine max
gatcgtcccattccaattatttccccctcttcaaaattccaatagcataatcccccgtctctgtctctctccatatccaacaattttcaaaatattcttattctctctctctctcttcacatcagaattcacacccaatccacaccctgcctcactcccctccccacccaccaattttttcaatcaaagttccaatctttttccctccccatcaccaaaaatcttgttcctctccacctcctccatctgggtacatttcattatttaccttcttgttcctctcttcacgtgacatttctcactcttccctccacacccaccagttttttctttcaaaggtccaatctttctcaccccccatcaccaaaaaaactcgtttttctccctctcccccatctgggtgcatttcatcatccacctcttcattcctctctctccggcttcatattctggggatccgtgagagagggaaat

SEQ ID NO: 96498 - DNA, 111 bp, Glycine max
accggactcggtggcatcaacagagaactgagtgagaatctcttctccatttctacgggaaaatagatctccccggaaaagatttgtaagtcaatcgcctttctttttatt

SEQ ID NO: 96499 - DNA, 160 bp, Glycine max
cgcgcatccgaatcccaccatgggtagccgttacaacaacaacaacaacgccaccggcgagacggctttcgtcgacgacaacgccatcgccgccgccgaatccagagtgcaacccaccgacgcgccgaaaaaacgttggggaggctgctggagccaatat

SEQ ID NO: 96500 - DNA, 66 bp, Glycine max
ccaaatgaaaagggtaatttaatttataggcctagtgttattaactaagaaaaaaagaaaaatata

SEQ ID NO: 96501 - DNA, 377 bp, Glycine max
ccttcatataaccatgtgtactatttagataggctacattagtacgtattaatttctcaattcatgttacagttttcgcaacaagggtgggatcaaaaggggaaaaaaataaaacaacatatttacagaaaatgagagccacttggatgcctctaaaagtagacatcccaaaagcccctaacaggattttgttggacctgtgatgatattgacaacgcacaaaattgaggtcttccttttcccatgaaaggtcctgtatgccaagtaaaaaagaaagcatagaggcagccttcatgaatgaaaaaaactgaagaaggctcggtgggaatctacgtcctgtacaagagaaacaaacttgggtaggttctgcatacatt

SEQ ID NO: 96502 - DNA, 177 bp, Glycine max
gagatccacaccacagagtaaaactacttcctcttgaggagaatggtcctctgaatccggagccggggctctacccagcgactttgccagaaggggatatctggagtaactgaaagtgtcccaatctcatttaggagaacagtactatttgcgtgccactttctggattgattaacc

SEQ ID NO: 96503 - DNA, 427 bp, Glycine max
  unsure (1)..(427): unsure at all n locations
ctgcgcattcttttcgccgatccaatctgagtgagtgtgtgtcggcatggattcagcatttgcgagaacgagaacaagatccatgttcttcttagcttcactcctcttctacatattcgcagtcaccaccaccaccaccttcgcatccatccacatctacgaccatgaacctttcatagaactcggcaattcctacctcctcgccggcggcagcgaaggcatcgtcgcttcccaagccaattccatccacgacgatggccgttcctacattcggtaacctctccctccctctctctctctctctctctctcgcgattccagctgcgacagtgttcgattcgtctttaaactctttacattgcttcattttgacttaatgtggaacttaaaatgcanaactcgtggattacttatgcctgatttagct

SEQ ID NO: 96504 - DNA, 112 bp, Glycine max
gtcgtatcaactctcgcaaagtgcaagggctatcgtataaccaaataccaacttctttccctcaaatttcttaagctgaccaacagcattctacttaatagcttaaaccatg

SEQ ID NO: 96505 - DNA, 253 bp, Glycine max
tctgactcgattttttcattcctttattgaaatcacgatttttcattttagtgtatgtgattaattctacggttttagttagatctgtaggtgaggtgtgtagctgtgataggagctaggtggttgagatttgagaaactctaggcgtgattataattaattttcgttattaggtttttttaatttgactagatctcagccttgagctgttcaaatagctatggtcatattcatgttttagctgttaatttaa

SEQ ID NO: 96506 - DNA, 315 bp, Glycine max
attttacactaaactaggatgactttatttcaccaaagtttgaacttagaaagattgccagttggtagttttacgtgccttggtcttcattatacagtgcatgtgatggataacattggagagatgtgaagtcctgattaacagtgaatgtttgtagacatacatctatacttttagttattagtcatgtattttacaatggcatctgtctgactgaatattctacaagtgatgattttgcagcaatgatgaccctatatttggccatgcaagtcttgataattctaatgagcttttggtcctctaaagatgtga

SEQ ID NO: 96507 - DNA, 352 bp, Glycine max
ccagtcaacaaggtatagtttaaaacttaaaaaagttaagcaaggaaaacccttgaaaagggagaagaaatgttcaagataaacaacaattagatgtggcaaaaatgtctaatgaagaagtggatttgtttaagcttcctttgggaccaatgaagcaaccagtcaagtttgttggctacaaatgaaccttgggatcattccaatcccgacaaatttttaaaatttgatggtccaactggggcaataaaccctttgatgggcaaataaggaactgtatcattcttgccgagcaactcgtgggttgtgatgacaacaaccacagtgatttcatcatggaaaaaacgcctaatcc

SEQ ID NO: 96508 - DNA, 248 bp, Glycine max
ggaaaattaaccaagggggtgcattggttttttccaatcaaaaaccctttggggaaaaaataaaatcttggtccttaccggtaaaatatagactttacaaattgaacaaaaatcaggggaacttcatccctttaaacaacggggaggaccaaaatttttaatgaaaacgggtttcagccagctcctatactggcgggatttttggaagaaaatttgggacattacatcaaggggaatggtttactttt

SEQ ID NO: 96509 - DNA, 194 bp, Glycine max
accaaaacatttttttttcatattcttgaaatctgccaaggggggaaaactaaataacattaccaaccaaaacctataggtaaattaatcacgcacttataactgctttacccaaacaaaatattatccacgcataaattatacaacctttactaccataaaatgaactactgttgatcacattgcactttgtg

SEQ ID NO: 96510 - DNA, 270 bp, Glycine max
aaacggaaaaggttttttcatactgaatagagcgtgtacatttggatgttttgcatagaaagattcaagatactggtatttttcggcgaaagtgaattcaacaaaagcatatctctgagtgtggaacgggagatccaatcacactagtgaacattaattgggtcatatgctcgcccaaattctccagagagaattgcatgaataaaaccccctgctgaataatccccgaaggtgctgtgaacttcatatattatataacatattggcgtg

SEQ ID NO: 96511 - DNA, 159 bp, Glycine max
attcgcgatttttttgccaggataattcacactttaaaagtatgactatctttggtgacaaattacaatttatctagaatcttgtagaaattgctatcagagggaaggagaaacactttcaaagaaatagtgaattctcatatttcaagaatcaggata

SEQ ID NO: 96512 - DNA, 421 bp, Glycine max
ttttttttttttttttttttttttttttttttttttttttttttttttttttgggggttttttttttttttttttttagcccctcaaaaaaggtggtccctttgggggaacatgaacaactgacaatagctttggtccaaaaaaaaggttttccaatggccctttataaacaattggacccggaatttatgcctcaatattttatgaaggtcaaaccaaaaatgggggggaagggggccttcagaattatgcccaaaattgaccttgaaaaaaattggttcccaaaaccaaaagggaccttttttctccggggggtttttattttttcaggggtgggggggccagacattcccttaaactttggttttagggcccggaactggccaaaaaaactataaagaacttttttaagctttttttt

SEQ ID NO: 96513 - DNA, 518 bp, Glycine max
aaataaaatctgttaaacaaaggcatccaattctctgcttggagtcaactatgtgttctgcttacatacaattacatttctagtttggttccttattctaattgcagaaacaaaagaacagtaaaagctgcaggggaacaaagttacccaatttcaacatgggttggggcttatacataattacatcactaggtgaagggtaaaaagtaataatctccccctgtcaatatctagttattaaccatctaaactaactacgtgattacatattggtacaaatttccactataatcagtgagtaagaattatatctgttcctaataccatggccctagattttctgactacataatgaatacagtttgcatcatcatgtcatgttctcttgaaaaatttaccacctttctttcccatgcttacacccacatcagattcgaaaagatattttgtgtctggcctccatttcaactctttgagagtggaaaataaggttgcaagttcaggagagatatcactat

SEQ ID NO: 96514 - DNA, 185 bp, Glycine max
ggctcgagtacaaattctttgtgttgagttgtgtacttgtgttaattgtgttgctgtagtaggaaatttaagtgaggagagaatgatgatgaagtctgctatgtgtgcattggtgcttgaggcactggttgtggttgaagtggggcccatggctgaggctgcagtgacttgcatcccaacacagt

SEQ ID NO: 96515 - DNA, 263 bp, Glycine max
ggagggaaaacccaatttttgcctcaatcttgtctcaacataactgaatctcaccctccctttttttttttggataagtccatacatccatagggtttttttcattaattatcatgcaaaacagcctaatcacatttgccaaaataacataaaataaagtggaattggggaaaacatgaaaaaaaaaagaaaatgatgattttgatgatgaaaaaactcaatttggtttccttgctctacccatatatgtatatatattatgg

SEQ ID NO: 96516 - DNA, 111 bp, Glycine max
ggaccctgaaacctgtgctctcaatttttattggaggcatcctaccatatggggcagagatcatcgagctcgttattatcctgacatgaataaggctgaaccagctctatt

SEQ ID NO: 96517 - DNA, 129 bp, Glycine max
aattggtcggggccggcccgaaacaaagcacttattccccggaaaaatttgaatgaaacaaaattaaccgcactcgttaatgacccatgagccacaccaattaatttgctaacatttttacaatctccc

SEQ ID NO: 96518 - DNA, 162 bp, Glycine max
aattgaatcaacatttaatttccaaattggggcacacaatctaataaaactgtacagagcttaatttccacccaaaaataattttaaaaaaccggaagcaaaactattatgccaaaagctaattaaaatgagttttacaacataacaggggaatcacctaaa

SEQ ID NO: 96519 - DNA, 227 bp, Glycine max
gcaacaaaggggggggcattaatagaaagttgatctgtacataattgctataaaactgattaggagcctctgttccagtataaaaccaaaagataagggggctcctattcatggaaaaatttggattcctaatttgctatacaaggatttacaaactttgtctacctcccgacaaaagaagcccactaagagcagctggagtttgacctctcacacttgataacccg

SEQ ID NO: 96520 - DNA, 391 bp, Glycine max
aaaccataatataatataataattttaataataattaaataataaatttaaaactagggactaatcctaagttttaataaagtacctacaccaatactaaatctacaattaaaacaaataagctaaagtgattatcatcacgaccataccacacctaattaaaggcaggggccgtgggaaagcgaaatgattatcatcacaaccataccacacctagttaaaggcaggggttgtggaatttacttaaaactatgtcataatcgtgaataccaaacacacctaattaaaggcatgtatactgtgtagcaagtttgcaaatgatttcgggttaaaaattgcaatggttccctattcaggttgctaacttgagggcgggcgatgctgctccagc

SEQ ID NO: 96521 - DNA, 245 bp, Glycine max
aaaaaagccccttttatttaacccccaaaaatggaaatgggaaaaaaaaaatatttttcacccctcaacaaaaaaaggttcccttttaaaaaaaacggggccccaaaggggcccgaaaaaacaccttatcccaaatttgaattttaacccaggggcaaacccccctgaaacaaacttgggaggggctttttcacccaaacaaatttatgccccaaaacacaagggggggaaggggccaaaatttt

SEQ ID NO: 96522 - DNA, 103 bp, Glycine max
gcaaataaggcggaggcaggagatatattttcagaatgtggaatgactgatattcacatcggggagacaatagctgatgacgtatctgggaaaccactacctt

SEQ ID NO: 96523 - DNA, 150 bp, Glycine max
gcaaataatgcggaggcacgatatatattttctgtatgtggaattactgctattcacatcggggagacaattgctaataaagatatatgggaaaccactaccttctatctaggcggaacaaccaacagtgaaaatgtctatctccataaa

SEQ ID NO: 96524 - DNA, 341 bp, Glycine max
acatatatattatattaattatgtactctcctttaaggagggggatattggaaaaacgcatcctaatatgttcatctcgtcttttgaactaaaaaaacgtgaagatgggatcatattacagtgtaaattacgttacccaatcatctttattcgatggatgatatatttatttgcaagtaagggatgtaatattaacaataaacagaactggccacaggctaacattattatttacaagaaccaaaacttgaggggggacatttccaaactaactcaaactataaaagctatctttgctaaatagaccgacactgccttggacttaatatggccactgctgt

SEQ ID NO: 96525 - DNA, 519 bp, Glycine max
  unsure (1)..(519): unsure at all n locations
aattaatgctactactcatcactataacaactatcatgagatgagtagtactactgctgcaggatctgcaggctcagtcttttaccacaggtcaacacccccaatatcaatgccattggctgaccaccaaaccttgaacacaaggcagcagcaacaacaacaacaacaacaagagggagctggcaatgtttctctttcccctatgatcattgattctgttccagttgctcaccacctccatcatcaacaacaccatggtggcaagagtagtggtcctagtagtactagtactagtcctagcactgcagggaaaagactaaggctatttggggtcaacatggaatgtgcttcttcaacatcagaagaccccaaatgcttcagcttgttgtcctcatcttcaatggctaattccaattcacaaccaccacttcagcttttgagggaagatacactttcgtcatcatcggcaaggtttggggatcagagaggagtaggggaaccttcaatgcnttttgatct

SEQ ID NO: 96526 - DNA, 80 bp, Glycine max
atgaacaacttcattgccagtttttctagtactatttttgagggatgatgcagtatagatgaatccaacttcactgggtc

SEQ ID NO: 96527 - DNA, 80 bp, Glycine max
gacacagagaatttggattcatctatattgcatcatccctcagggatagtactagtaaaactggcaatgaagttgttcat

SEQ ID NO: 96528 - DNA, 154 bp, Glycine max
ggtgaagttaatttcatctaccataagtatagactttgtcatttgaaagcacatgcaattaatttgtattattatttgattctttatatgaacaatgccggtcttcatcggtgaagttaatttcatctaccataagtatagactttgtcatttg

SEQ ID NO: 96529 - DNA, 164 bp, Glycine max
gggggttcaaaagacaaagtcttttcttatgggggaagaaattaacttccccgatgaaaaccgggattgttcatttaaagaatcaaattattatcccaattaattggatgggctttcaaatgacaaagtttattcttatgggggatgaaattaacttcaccctt

SEQ ID NO: 96530 - DNA, 458 bp, Glycine max
gcttaagatcacccaagagagattctaagacacacaacacagactcacacaaagagttacaagagaaatcatcatggcatcagcagcatctgggtttgtgttgtcacttaatgttgcagctgccaccacaaactcaagggtggtcatgttcaacaccaagaacaacacttctaggtttgttgtaaaggcttcagatgagcctgcagcggcggcacccgccaccgccacacccccagctgaagctgaagctaaaccaaagccaccacctattggccccaagagaggtgctaaggtgagctacccccaaaacccaattttttttgtagttgtagttgctcatgttgtgcaaaatagctatcaacatgtcctcttattttcattttctttcttgtcatcaaagatttatataattgatagtaaaaattggatttttttgcaaactaaacacaattattttc

SEQ ID NO: 96531 - DNA, 195 bp, Glycine max
atatcaaatggttttcatatcttcattacatgttaatcagggggggaacaaggatgcatgggacactagccaaataaaagtaccactatctaaagctctaaactaaacttttggagactagttgctgtgtattaatgctttaaagtacaccgggattcatggttatgcaataatgacttacaaagcttttacttt

SEQ ID NO: 96532 - DNA, 187 bp, Glycine max
gatttcagaattcaaaaaaagatatattttatgaaaaaatgaacacgttaatctggccgccttctacaaaccgttaccttggtgcgctcccttactctttcctctctccgcttcgaatcatcaccaccaaccttaacctttctaggttccattccacggatgctaccaacttcttgacacactctcc

SEQ ID NO: 96533 - DNA, 127 bp, Glycine max
gcaaaaaaaactttttattctaggatagccacatccttggtggggaacaccctgataactcaactctataagttgaggcaactcaatgtatgctattcaaaacacatattacttacaaggatacaaa

SEQ ID NO: 96534 - DNA, 384 bp, Glycine max
tccacttatcgtcaacacaacacattaaccaaaccaacaaacaacgatcgctcgcgttcatgcacagtgctgtggccactgaagtaaacgtaactaagtcatttcagttccgaactcactcactcgcatcgcatttttccgtcagatctcggcgagatcgctaaacgaagccgtttttcgctatgaaacgcgagtgccgccgctcgatctcggggtcttaagtttgcgatgcagccaaatttgtttccctttggaagcgtgctggggaatcctttcattttcaatggcgacggcgatttgagcgagggaggaggagggatcgagagctctagggttttcttcttgctcccgttcttcttgctctcccagggcggagcaatggat

SEQ ID NO: 96535 - DNA, 120 bp, Glycine max
cttcactctttttaaaaaaaatggttctcaccatttccaattagacacacataaaacgattcgcaatagccgcctctgataattgattactatcaacccaacttcaagttgtgttctttt

SEQ ID NO: 96536 - DNA, 266 bp, Glycine max
attgaattctaaagttctaaagtaccctgaattgagcctataaaatcctgggaatcttgaccaaacaaattacatcaaatcagtcacttacattccaagcaaaattgagctgaatgtatacaacaaacctttgaataaataacagaacactaataattcagatactttaaagaaaccttaacagatagattgaataattacaagaaattgatattttttttcctgattttggttaagctaatgcctacaagaaagctcacaatcac

SEQ ID NO: 96537 - DNA, 297 bp, Glycine max
ccgccaataaaacattcacatttgggggctaaatacaagatatttcatttaacaagacaaaataattccttcagggaaagtgcataacaattgatttttccatctaatattgaaaataacccaaattacattatgcttaaagcaaccttcatttcagaagggaaaaatatttttaattccattccacaaaaatcattcgattaaaatccaatttaaaaagcataaagttaaattagtttttaaaacaggttttttgaggaaagcaacttcatttagtccacttttcttaatcttggg

SEQ ID NO: 96538 - DNA, 238 bp, Glycine max
gttaaaggacaatgtccaattaaattcaagggtcccatcctttccaacataatttgggtccatacaaataaacaatatttgcctgtttaacacttgccacagaaaatattttgccctaaataaatccggggcttgattcattaattttgaatttaaaaaactaaatcaaagaagggacatgaaacttatcatttggtggaattggttcatgatcagattccaccttgggccccttttt

SEQ ID NO: 96539 - DNA, 433 bp, Glycine max
agaaaataaattcatactcattcactatatttcaatgggccggttttctcgtatggcaattagacaaacagtaggcacctaacgctccagtcaagaagcaaacctaaaagcaggacaatcaatcctgtgtggaaatttttttaccaatttccatacacaatctataacataaaaaaaaagagagagagagaaagaaagagtgtgtgtgatacagagattagagagaaagtccttaaccatttttctcttcttctctatatctgagtcttcaatcatcagaaggtatacagagcggggtttcaatatcagaagaaatatccggcacaggttcagaaaggccacgtagtagggaaggttgaataggtgtagacaactctgaagaagtagcagactcctccaccatcaaattctgcaatccaggctttaactcatc

SEQ ID NO: 96540 - DNA, 289 bp, Glycine max
ggttatacacatcacccattcacaagtactctaggggagacaaagccaccttctgccaatctctaactggagcagccccgctaaatgcgacaagaccaaagaaacgcctatcaaatgcaaagttactcccacccttcgtcgcaatatgccaaaacctttttcgaaaaccgtccagaaaaaagttttcccaggctagcacctgggtctaaaaaagtcatttgaacatggaccacggcaagctccgggtcctcctgaaagggggtaatcgttgaagaagcgaaaggacata

SEQ ID NO: 96541 - DNA, 208 bp, Glycine max
acaaaaaatgggttatggggattattattattattattattatcaaataagctaatatgatgcattattattattactactatacaacaaaaaaatgggtttggcacactggtattttatgccatatccatttttttggtgtgtaggcctactatacaacaaaaaaatgggtatggcacactgttattttatgccttgacgtttttaa

SEQ ID NO: 96542 - DNA, 268 bp, Glycine max
aaagcccatttgataatcatttaaaaaaaaattttttgggggatttaggggtttattaaaaaacacacagggcccggcaaaatttgataatcttataatgccgagatgatgaagtaatgaaaacctggggttttcaattcttcaaaaaaaattccctcggcatccttgggtggatacttttttgggacatgcttgaaaaattttacctgcaactaaaacacattattcccgggaagcacattacgaagcccagtttccttagttttta

SEQ ID NO: 96543 - DNA, 270 bp, Glycine max
  unsure (1)..(270): unsure at all n locations
gttggagtaaacttcaatggtgtttantatacttttcatttatttgtagcggctggaatacacccaacgtaatactggaaagtattgttgccggtattacgttgggtgtgttggagtaaacttcaatggtgatgattatacttttcatttatttgtagcaactgtaatacgaattttggggatttgcatatatttgttttttttcaatgatttggatatttgttaaaaataacaatttttagtgcaaaagatgtcactattttgtgcttt

SEQ ID NO: 96544 - DNA, 343 bp, Glycine max
atataatggaaggcaaggtgatgttgttgaattttatcatgaattaatagagcagggttaccctgatggaaatgaaaaggctttatggacagaggtgctggaatcatgttagtcctcatctgcagtcaagttaccacagaaaaatgtatacatgccagttgaaaatctggaaaattcagtatcttctgcaagaagggtaccagtttccaaccaggaaaacagtcactggctcaacttcaacagtaataattctgaaaactgtatgatttactttcacctggttaacatttttggcatattttggtgtttctttaacttctgtcccctcccatgttagcagctg

SEQ ID NO: 96545 - DNA, 348 bp, Glycine max
ctaaaccccacccttttcttattcaagaccatttcatattttacaaatgaacaatgttcattgttattttcactatacaatctatactgtctcaaactaataattcagtttgttctatgcatctaaatacatagaccatcgaaatggttgtgccacaaattgatcattcaaaataatgaagattaccatggctagcgttgctcctagggaaatggataaaaatcatcaataaataagtcatctcctacagaagttgataatgatgcctcttcactcgtaccctcaagtttatcctgcaagggaattgacaagttatgcattaacagcacaaagcaattgcattctaaa

SEQ ID NO: 96546 - DNA, 523 bp, Glycine max
ctcgagccgaatcggctcgagggtgattggagtgtgttatgttttgaaatttggcatctttcaggagatcaggtctattgtaaatcaagttcttaaatcagtgtaattgtggaccaaaaaattgtcaaattataattttttgcataccatgctaatagggagcaacccttgtcatggaaaaaagggaaaaaagaaaataaagtagtccaagatcctgagttatattcatgctgcagtatatacaaatgaagcaccaacaacagaaatagagcaggtgtagtattaagataatggaaaatgagagcctaagctcttaaaaaggatacaaccagagtctcagctcctcagagaaaaatgccttcctatattccccactccaaatattccagaccttgggcttcccatggttacaggatgttaaatatctatgattctatcatattcatattcttgtatgtaaactattgattatgtggacagtctaacaaatcaataactttattgagttgttttatatgatgag

SEQ ID NO: 96547 - DNA, 185 bp, Glycine max
  unsure (1)..(185): unsure at all n locations
attttagtttgacctggtggcactgtgaaattttttacactataaatacacaagaaaatgtcataatgttgtggtgactaaggtttgtcacttacactaaaagcttcttaactggttnttcaaacctatggcatcgtatagtgtgtcaaaaataaaatctaatatatatttactacattttacat

SEQ ID NO: 96548 - DNA, 416 bp, Glycine max
  unsure (1)..(416): unsure at all n locations
gaggcaacaactttggtggcattctagaatgatatctgttctttagcatgtactcgtaagtcactatgtcaggcattcagcaatgtgcattcacactcattagcaacaggtatacacatgaaatgtttaatctggtcactatctacgacccagtctatcaaccaacatttacctaaaaagttacacataattctagaaaatataagaccaacatactcagatgtataagaaacgtttgcccggttgttatgcccaactctgatcatcagcacgataaaaatgcagtaaatttatgggttccactttttcctcaaatatctcttcagattgtgaagggaagtgaaacccagttgagcaatttttcaaaactttaggactctntatccaatctttgcgtgcatcacatgcctttattt

SEQ ID NO: 96549 - DNA, 445 bp, Glycine max
aattaattaaaatatgtattccacttgtcaaattaatcagaattaagggtgaggacgtagtaaaatgaatatttagacatcttaaaagtaaataattacaaagtatgtttatctaattctaaagtgctataaaaattaataaacttattataaatatcaatatctactgtgaatgtattttaataaaaattctttaattatatggcactttagaattagataaacatactttgtaattaattaattaaaatatgtattccactagtcaaattaatcagaattaagggtgaggactagtaaaatgaatatttagacatcttaaaagtaaataattttgttatcatttagctataaaaccttctaagattgatttcactatttactcaatttattgacttcactgctggatatgaattcagaattgtggataagcattattatattg

SEQ ID NO: 96550 - DNA, 312 bp, Glycine max
ggaaaaggggtgggtgtatattattgaagttgggggatacattctaggatatgggttttttttccctcttttgggttggaggtttttctatgttcatgggtaatgacacttaaaaatagggcccaaaacaaaaatcatgatcctttgagatgctccaaaattggtgaaaaatcacaggcctcatagctcttttttggaaaaaaaaaggtggggcttttttgggagaacacaactttttttttggaactggcttcactgggaaaaaacctttcactggcatattaaaaaaccccctttaaaacaagggttttt

SEQ ID NO: 96551 - DNA, 223 bp, Glycine max
ccccgggcaaaaaggtggattaattcccttttttagttaaaaaaaacccctttttttccaacaaacatgatttttttgggtttccattccacccaccctttataagcaagacgggtttaaaaaaaaatttacaacccctccccaatacaaaaaatgggtaatcccattcccccaacccttaaacttgaaaaattgcttttggccggttttgggggggggggcc

SEQ ID NO: 96552 - DNA, 266 bp, Glycine max
atgaagaaacaacaggggggtttacagaaacaaaattatgattcttgggatgacactctgaaagcaaaactgtgtattataaaacttaaacaccctatgccacattgattactgattaatcatttcaacaaaggagtatttgtgcacttccaatgggcttacgcggttcttttagctaacaaagacttcttatatgctacaatggatttgaaaagcttacaaaaattggctttcccaaaacccccacatgcacccttctggtacac

SEQ ID NO: 96553 - DNA, 182 bp, Glycine max
ccttaaaagaatctgatttttttgaaaacataaggcaacaaattcaatttgaacaatttacatgaataaacccaatttttgtaagtccccccatggtcaattcatatccgaggggtcctaaacaaccataaaacgggcgtttcagggatctgaagcaaaatgtgataaacaaccggttcgag

SEQ ID NO: 96554 - DNA, 308 bp, Glycine max
tgactgtgaattttcatatttcatttatggatgtttgggtgatgagagagtataggcgtggttacagctggtgcaagctgttcacgctggaggagtcgcgtgagttgagatcgttcaagtgcttgaggcccttgggatactcgagcgacgggaataaggttctgttggaacacgaccggaagaggctgtgttggtatgacctgggaaagaaagaggttacccttgttagaattcagggtttgcctaatttgaacgaagccatgatttgtttgtgaactctcgtcacaccctatttcttacctcgtcaa

SEQ ID NO: 96555 - DNA, 309 bp, Glycine max
aatgctggggtcctttcttttatgacaagtaaaaaacccaaatcaaattattttactacccctcctaaaaaaaattggattaataaaatttatttcttaccccaccccttacctagaaatgaaaggcaagccaaaacaaattttattgccttgcgtaatgatttaatcttccaaacccacctttttaatctaaccttccggtccaacaaaaccatgccaacccaacctgaaatgggagataagcctcccccgccaaaaaaaaaagggagggaataaaacatgccaaaccaaaaaacaaattattttttt

SEQ ID NO: 96556 - DNA, 477 bp, Glycine max
aaaaaggattttattactatcatttttatttgatcaaaacaggggcaccatcaacaaagccacacattagaaactctgctgatgtatatccttcaaaattctacaaaatatataatgttaacactgtcaattcatcttctaattgctctagggagattcatctttcctctcggctgccacctttggaaccaccaacacagtttcttgagataatggaacaccagaatcttctctctcaccctttgttgataaacttggttctatcaatgattgtgatttcttgaaagttccaaactcaatatttttcagtttagactctttagaggatgggaaactcttggcttgcttagttaacttagcagcagactctgacagggcagtcttgtgagtgctttgaagaagggggaaatctttctttgagagctcaaacgacctcgaattaccctccatgtgtgtctcaaaataaacctttggaag

SEQ ID NO: 96557 - DNA, 151 bp, Glycine max
gctcgaattcgctcgagtaaggagtttggctttttcacgctaaacttgcatgaatatatgaaggatctgggctctctttgttcatggcccatcaactttctccaccgagagagaaatggaagcagcatcatggccgacaataatactacta

SEQ ID NO: 96558 - DNA, 191 bp, Glycine max
gcaaaaatctactatattacaagctaactgcttaaccaaacaatgctccctgggctcactgaaaacaccaaataactcctttgaccccacaaaaaacaaattggcggccataaaaaccacaccacctaactaccttgaaccttgaatcttactatttgctttgccatttgctttctttcaccaaaagccat

SEQ ID NO: 96559 - DNA, 514 bp, Glycine max
ggatgtaaaagtagggggcatatcatattataggttcttttggacagtggtctagggttgtgtggacaattagacattgtgaaaattgtgataggtttggtcaaaacacttctgcaagggttgataaccagggctggcatatgctggtttaaatttgggtgtcatatgcagttaacaaaaggggcataggcagagaagatttaagctaaactactagcaagctatcatggtggtgcccaagtataaacacccaaagagaaactcatcctgatacaataattcaacaacaaaaaaataattcatgcataaaagttaaatattttacttgagttcatgtctctattgttcttcaaaaaggaatgcacctgttttaatttatgtaaggttggaattagttatgtgtagatcatgcatgcgatatgtgtaatttactctcaagttactgctaaatgtctacagccataaaagtatgatccaaaatgtcattaataaatcctcagaacttttctaattc

SEQ ID NO: 96560 - DNA, 407 bp, Glycine max
atgttctgtgccatatagcacattgggtgggcttctttgtaaaccatacaattagccttgatatttcaataattaatttgtcaaaataggaacttaaaatgaacatcacaaaatcaatacagtgcacaaaaataatgcattccgtaatcttaagtcacattctgtggttagaaatgcattataacatgtactgcatatgaagtttaatcataataaatccaccacttttctttttcccttcaaacatgaaactcaaccatggttacatacattgaggtgacaattttctacagagatggggaaattactggacagacaccactttatcaacttgcacttgcaacatcagctataaatatgctggctgaatcacaccatccagccaaaacatctttgtcggagcactt

SEQ ID NO: 96561 - DNA, 312 bp, Glycine max
ctagatcgcgagcggccgccctttttttttttttttttttttttttttttttttttggggaaggcaaaaatttgctacgttgtcatcaatgccaataattattacatctaaaatttcttcaatcaagggtcattaatctgtgttgtaagtcaaatcaatgacctgtacacagttatttaatttcttgagtgtcaaaaatgaaaaacacgggcataacatggacatctgacactgtcattccatacagatacttggggaaaatgagtatgaaacattaacaagcaaagtcaattcatggctcaggttgcattt

SEQ ID NO: 96562 - DNA, 327 bp, Glycine max
agaataagatttatttggggtggtaattgtatcttacgtctatttgttgacttgcaatggactgaggactttttatgattatttgcaagtcttttaattattagaatagttattgtgcctagaaagatataaatagactctttaaaacacttagttgccaatattcagatcagattcaccattaaaaagatgtgtttcttggttttttggtgtgaaaccttacattcttatcgaacaattctattctttgtgacgaatcatcctcatcttatcatccaagattatgatggggatctttccatgtactttactcattctccttttcct

SEQ ID NO: 96563 - DNA, 369 bp, Glycine max
cgccgcctccctccttcgctccatgctccgctccggctacctcccccacgttaaggcctggaccgccgtcgtcgcctgcctcgcctcctcccctgaccgcggcgatggccccgccgaggccctccagctcttccgctccgtcacgcgccggctccgccggctccccgaccccgccatggccgccgcgtcgcgccccgacacggccgccgtcaatgccgcgctcaacgcctgcgccaatttgggtgatcccagggccttcttgcaggtgttcgatgaaatgccgcagttcaatgttgcccctgatgcgttgagttataacactatgattaagctgtgttgtagaattggtagaaaggacttgcttgtgtt

SEQ ID NO: 96564 - DNA, 433 bp, Glycine max
caaataatgagggttgtagaaatatggagaacgatactaggtgtaagttaaagggaaaggactcgaatagttggttattcatggaagacaccgcacaacaaatcaagcgtccttttggtgttcctgaaggaccagaattcactgttgggttggatgtacctttgagcgagttgaaggtggagcttcttaaagaaggtgtgtccatcattatgctgactggtttaggtggatcaggaaaaaccactttggctacaaagctttgttgggatgaacaagtcataggtaaattcaaggaaaatattttatttgtcaccttctcaaaaaagccttaagtgaagattattgtagaaagactatttgaacattgtggatatcaagtgcctgagtttcaaagcgatgaagatgcagtcaatcaattgggacttttgctgag

SEQ ID NO: 96565 - DNA, 445 bp, Glycine max
gccacaactacctcgcaccaaaacatgttcaacagtcctagatctattcataacctggtggcacattgttgggcgcaatatcttcaaggaaaatggcagcaccgcctgccggtgaccgttggggggcgatggaaaggaaatctcatattgacaccattgatttgacgaattcatctcccgagccagatcagcattatcgcatgccattgaaacagcagcgacttccaaactacttcaaggaagagccacggaatgaatctcgtagcacacccagggttaagaccgaacggaaggcggcggaaatgagaccgctcaattctcaacgacgtgcgcgtcagatcgaccctcaacaccttgcccgaatcattgatacaagcagtccgcatactgtcaaagcggtattgctggatctttgcaagctctcacctgcattatctggagccct

SEQ ID NO: 96566 - DNA, 360 bp, Glycine max
cctggcttggaaattcattatggacaatcgaaggtcctagcctgtacagtccggccaggttcccgggtagtggcacaaagtaactcctttgtacgcgcaaaacacatgttgccgttaataattcccagtacacctaacgcactcgctgctaaaagaggaatcaagattaagggacctggccagattctttccgatcgataccaacgatgcagaattgatccaagaaatattcagtcctccccttgcgtgatgcgtggtcggagagatctaaacgtgaggcgctgcaggtcccttgttacgttggtcgtaacacaacccacaacctagtagattctgaaatgattggaaggtgaatgtccg

SEQ ID NO: 96567 - DNA, 141 bp, Glycine max
gggaaccaaaccaagggaaagtcccaaattaaataattttttctgggtaacaaaatttggatcccatactacatgaaaaaaaaacagggggtttttaaacaagtcctgaacgggaccaaacgaaaactccatttaaaactg

SEQ ID NO: 96568 - DNA, 310 bp, Glycine max
agctgaaaaagatagctcatgcgtttattcagtaccatattttacaatttaagcattaccataattctggggatgaatttcaaagacaaattggctagagagtttcattaaactagttcatttagcaaggatttgctggctaaattatcaaccttggacttgattgacaagatgtttttgtccaaatcacaagactttagcttaagctcgcttaaacgctctttgatcgcttaaatttttggtttgatatcaggtacctcttggtctttttgagccaaaatttccagaattgattctagctctttggtca

SEQ ID NO: 96569 - DNA, 358 bp, Glycine max
gcgaacaaactgtcatgactgattaatgttattttacattttacaacttgcagtatgcaaatcaaaacttgtagcatcatgctgttggctgctgtgactgtcgtacacggggtttctgaagttggtatcaattcctaaaagtacagtcatgaaattatgtacctaatccagggtcttttaacttaatatgcactattatttcaggtacattatactttgtaacttcacaaaatactggcaatcttctctcaatcatccttgtgctggtgcatggaagcagtgaaggccaatcagttagtttaggcgaataactacttgctactgatgggaattgaggcccctcagcttcatgattttt

SEQ ID NO: 96570 - DNA, 401 bp, Glycine max
caacacttcttgtatcagtagagtcagtgatgctaatttagtgaacgatagccgtcaaaggaatgaagagagaataataatgcatgtggaaagggattcatgttctcatgtcccagaaaagttgtcagaatgcttcattgagaattctagttcatcattgaccaaagagagggaacctgttgtttctggcaagaaatatattgctgttaaggatggccttattgagagtacttccaagatttcactaaaagtatgtcccaagtcagaagcagatactgatgtctgtgatgctaacaatgaagatcctaaatgtgcagttcaagatggacagtgtgagaaagctgaagagctggttaaatcacctggcaagcaggaacctcaatctgaagacgagagtgatg

SEQ ID NO: 96571 - DNA, 437 bp, Glycine max
gccataaaaattttcacccgcaagttccttgtaacatctggagttatgccggcttcaattctctctatatatacaaacagccgttaactatgcattctgaacaaaaaaaaactaacataaaaacatgtatgtaacaaaggattaaaaaaaaaaacttattgactcttgttgaggacaatggctcctttctgtagggagagaggctggaagattatatctatctatcatacaggctgggccatcaggaacaagataagataatttacatgattggaagcaacacataagcagccagcagatttattttctcccaaaaaggaaaaacgggttgttcacacgctgcccatcaggcaaaagctctgcagcgtttgtgtgttccttgtttggagatggaaaggacagagagagggaaagagatgcagcgacaccttcatcct

SEQ ID NO: 96572 - DNA, 419 bp, Glycine max
accatagaatacatcttatgagttctcacaatgtgagacaattgatatgacttctttcgaaacttattaaatcgagttgactaattagaggacattatactgcctttggtctacacatactaagaatgcatcaaaaccaactcgattttctatttgacttttgtataaatcttaccacaataatttcatccttcacccttgtaaagagaatagagtatttcacagctaaaagccctattttataaaatccatttttctataaataaaacaagaaaatccatgtaatccaccagattttcgtcattgtcaacaaacttctgtttctgtatgtttcaatcaatgatcatcagatttctcaaaactggagttggacctcatggtatactcagcaacaagttgagcaaaagatgatgacttat

SEQ ID NO: 96573 - DNA, 255 bp, Glycine max
cgttgtataacgattgtatgcgacccgaaagtggtaaggaaaacatgatacaagtgggctcagagcccgccgacagagcggtaatcgtcgcggttcgtcataagaggtcgttttggtgttggcaatgccgttgaacgcattccggatgtaatatgaggtgtttaagcgtaagtggcacgggcccacttggcggtaccgaccaggttgttgagcgattgctcggtcttggcccaacctcggttcttgagaccacag

SEQ ID NO: 96574 - DNA, 400 bp, Glycine max
aactcacaacattcatcgcccctttttatttttgtcacgaacttctactactcagaatattttctattgaaaaaaaaaaaaaaaaccatggatctcattcttcaataagctctcacattttgtgaccaaaataatacttaggaaaaaaagaaaaaacaatgtcatccactgctagcttgggttatgggggtccaacctgcttcaacaatgttgttcatcagacaatgaggaacagtttcatagccacaaaacagcataacagtgtgatgagagtggtgaagggttggagaggaagacatggttataattgcaacacatccaaaagggcggtaggagttgtgcagtgtagagggctaggggacttcataggtggagacttgataaagtttgatcttggacg

SEQ ID NO: 96575 - DNA, 396 bp, Glycine max
gaaattgattttctggaatatcatgtttggtaggagatgggtgtccttcgacagaattaaaccttgacaatgtgtcactgatgactgtggcagatctaattatttacaaggaacttgatttttcctatatctctttgtcttcctttattgtctcagttgtctgcagctatttgaagcctttaaattggagaaaataaaatgaatatttgtacttgattgttgatgattggaaacaagagatgataagtagctatgtagcaccatcaagcttcctcactggttgttagtcccgcaatttcttttagtggtttccacataaactttctccagtttccacattcagcaatgaccctcacattaggcctaagtgttggcagcaaagctaggaactgcagt

SEQ ID NO: 96576 - DNA, 486 bp, Glycine max
cttcttcttcttcttctcctcctcctcctccttcttgtattggccatcatctttatcttcattacttttaaattcattgtgatccacatgttggttttctgcactcaatttcttcttcatcatcagcttgccttggtcatcatctttacctttgttgctttttaacctattatccttcatcattttcttgcttggttttgaaaaaaccaattcttggattccatttaatgaagaatcatctttttttcttttcttcatcttgctttcttggttgtcatccaagaactgcacttctttatcatcagcaacattaatattcattacttcatcttttctcccctttttcttggctttctcatccatgtctgagaaaagaatgaaaacaacagattaatcaactttattaacattgcttaatgtgctactgtttagataaaagtataaaagaattgcatcaagaactcacattcggaaagttcttaattt

SEQ ID NO: 96577 - DNA, 366 bp, Glycine max
gttctaattaaatttgcttctaaggcggggtaaaagaagaggaaccatgttgtctaaaagggactttgacaacatctctaaaaccttttacaacccctacatcttcatccatggtaaacagatcctccgttttcctcatgatagcatgggccaacacaaccactaaggcgacacacataccaactattacattgtaggttacatttgtaagtacaagcaaaccaatggtgatcaacaacaaagagataaccaccaatcgctcattcatcttaaacctcaaaatcaccaaaggggtatttcgtaggaaatataagttcagccatgcaatcatcataacaactaatatgatcaaagaaatggggtgtc

SEQ ID NO: 96578 - DNA, 291 bp, Glycine max
aaaaaaaaacccccccttggccaatgggaagggcctttttttacgggaaaaaaaatttgcgtgctggttacaaaagggaagggggcccttacaccccaaattttggggacttttacccttttaaaaaaagcccctgaacataggggaggggggggaaaaaccaaaaattttttttttacccccaaaaaaaaacccccagaaacttccgggaaaaggaccaccttttaaaaaaaaaaaaatttttttaccttccccaagggggggggaaaactttttgggtatttttggggg

SEQ ID NO: 96579 - DNA, 423 bp, Glycine max
agactaaatcagttatagattatagaatctataattggttaatcaacttaaatagtttgtacaacatatatatatataatgttagatataaggaaataatgcaaagctaagctctaagactagagtaactatgttatggatttactatatgtagtaattatacaaaccagatgccaggttgtaagggttggcaatctgattccttttcaaccaagcagttggggtgttcaattggtagacgaggatgagtcatgaattttgtgtttagtgctccatcattgtcttgccagtcctcatccctgtatcccttgtaagggggaggaacatctggaggaaaacgccactggcacatctgcaaaaccctaatgaaaagcaacgggtgaattccaagtatgcttgaaggaactgtaacgcccatgatct

SEQ ID NO: 96580 - DNA, 58 bp, Glycine max
aaaaaaaaaaaaaaaaaaaaaaaaatttttaaaaaaaaaaaaaaaaaaaaaaaaaagg

SEQ ID NO: 96581 - DNA, 237 bp, Glycine max
gggaacggaccaatcaacattaatggcccccatttttcccccaaaaaaaatacttttttttccaaaaacttttaatcacgatcataatttttttaatgggaaaaaaagggggtccctcctgaaaaaattttattaggggtttccatgcaaggcaataatgaatcgggagggggcataaggggagacttagttttttttggccgaccccaacagttccacgttttttaaaaccttttt

SEQ ID NO: 96582 - DNA, 317 bp, Glycine max
aaaaagcaaatccagactggggggcttaaatctcaaaccggtttcaccccaagcaagcagcattagtacataaaatttttaaatcaacctgagccttttaataaacaaaaaaaaatgttatactcaccccaagtcattcaaatggccacccaaaatacccagcttgatgatgatggctattttcagggatagttggggttggggggctgcttcctgttgcttcataattactggtaaaatgaaaaaaacgaaaaggccccaaaaaggaaaaaggatttttccttccatgggtctccctaccactactacttaccctt

SEQ ID NO: 96583 - DNA, 177 bp, Glycine max
aggatagaaatattatgaattatgaaatggggcataaaatgatcaggtgaatttatctaacaactagaaaactgggggtagaataactatctagcccaaagccaagtcatacattacatgcatactcatgatataacgatgatcccaatattgattacattgcccgcctccccttat

SEQ ID NO: 96584 - DNA, 409 bp, Glycine max
gaaatgtacatttgtcataaagcgtgcgtatatacagccgttatttcgtgcttgagccttatcccagcgccggacctccaccattgtccacccagcactttcctccttttgtgcatacaatctagtaggcgaaggtgttgatcgactcgtcagggttctggcggatcttcttgttggtcctcttgagccagaagcacataacccaagcagcagcagcagtcgcgacggagaaggcggccgaagagctgagagcaatggtgtagcgcggcgcgtcagagtccatccacaagtaaggggtccacacgaaggaagcgttcgcgcaggtgttgacaatggcgagcgcagatgctttcttctctttggtctggccgcaggtggaagcgacccagccaagaataatggagttgac

SEQ ID NO: 96585 - DNA, 218 bp, Glycine max
ctcctctaacacagccaaatttttttcctttttttccttttttctttcgagaacggcatcttgaatagcctattttaaccaccatggccaggctcacgctgagaccagacaattcctgctttttttcacacactcaaagagctaattcccacaccccttttaccataacaacctcgtttcaacgatttcactttcatctctcatcatccaaccacacc

SEQ ID NO: 96586 - DNA, 228 bp, Glycine max
gggcgagttaaagtccattatcgttgatgatacagcatacaaggggggtcttttaaagaatttaaaggggttattcttttattttttttggaccttagtctataggggaacccccatcttatggggaatgcatccctcaaaattgatggctgattgattattttcctaaacacatgggggggccttattgtccttggaccctatttgaaaccccttttgaaggaactt

SEQ ID NO: 96587 - DNA, 411 bp, Glycine max
ctggcataggctcgcgcgcgcgatggcggcggccggcttggattttggctgcttcccccaggtgcgaggccgcagggaggcagtgttctatatacaacaggagcggagcccggggtggagaaggtagagggtgggagggaggcacggaaatgaggcagcagcgtcactgcagaaagaggtgatctgcagcgctccttcgtcggtgtggatgatggcgtcgaggcagccgccgtggcgtgcacccaaagcatggtggggcgagtgggaagcgtgtgcatggcgccttgcgggcaaggagagcatacgtgcagcgcggcgggtcaggctgaggtggcggaagcgcgcgcaggatgccccgcggttggcgacggagtgacgatgtcatgtcgtggtcaaagagtttgcaagacg

SEQ ID NO: 96588 - DNA, 293 bp, Glycine max
aaaaaacctccccctaattattcaagttccctaggccggggggaaaaatatttataaccggccccgcattgggggtttacaaacccggaattttttataaaagagcccccaggggccacataatcaaacaggggccttcctatgattatttccccccccctcgaacttgctccaggaaaaaaaaaggccccggaagggggtaagggatagtcaccattattgggggcccgcattttaacaacttttggatattatagccaaacaaaaaaggggggctgctttgttgaaggggg

SEQ ID NO: 96589 - DNA, 291 bp, Glycine max
ggtaatttgtacaaggtgaaatcttaaatgaagtatgccatgaaaagttactgcggggagttctatttcaagactgaccctgatgttgatgcaggaaaacttgcggactggaattttgatttgcatgatctgcagttatgttttggtgtaaaggagtttttggtgattgctcctcagagtgcaagtggtgtggttcttgatgcgccagagtctagcaagctcttgagtgctattgcaattgctttgtctaattgttcaagtttatggccagcatttgttccagttcatgat

SEQ ID NO: 96590 - DNA, 283 bp, Glycine max
aaccaagaccataagtggggacataaaaatggaagaaatttccataagagagtgagttgttatataagcagtaagaagatagatacaaatgataacaaccgagcaggctctcacttgctaagttcacctgtcaactttcccagaaaattcctcactgggtgtctgtagactgaaagagtcatccccaactacactttcttcctcactcatggaatctatttgatccaagcttccaatacaatcttgatagtcttcactcagctgacactttctctcaatgcat

SEQ ID NO: 96591 - DNA, 429 bp, Glycine max
caagaatcatagaacaataaatttttagatatttcgtgatccttggctcctccggggtaggtgccttttcttcttcttcaacaccgcatcatcaacatcgtcaccccatcaaaccaccccacaagccttctctcccaaagctcgctcctttttcttccaattggaacatttcctgcgccctccaagccccactcgctctcagccactgcgctgattcaaagctcgttcaggaatttgaagtggtttttgaggactttattgattctggggtggtcgatgctgagcttctggccaaggtggttctgttgggaattcgagggaagaaggttcggagtgtgattcacgccctcaacaaagttcagggccgaagaatttctttgtctactcatcttaaaggctctgatatcattgcaaaggagtgttgccgct

SEQ ID NO: 96592 - DNA, 256 bp, Glycine max
aaaaaaaaaggtttgggtttatttatttctttgggggaataaaaaatccctgacagcatgcccccttagttgccagctttaaggggccccacgtgtaagggggtgggctccaaaaacccttaccctgacaaaatccggggggctagggttgtggttttccccctaaaacgacaagaatttcccctcgattcttccgccctagaaaggggaaaaaaggaaaagaaaactacccttttcaaggcctccaaactaaaac

SEQ ID NO: 96593 - DNA, 468 bp, Glycine max
aaaaataatattggcaaacacctttattacaccaatatctattttacagtaatagccaaatactgtgaagtgttaaatatatacacaatgagaataaacaagaaatgtgtaattggtctacctagtatgaaggaaaagagaaatcacaaaaactgtctacttccttaacaattaacaagccctaaatcggaatgtcaaaactcataaagcacaactatacatcctcatactacctgttgttatactgcaaaattaagtagcagatgatttgcaaatgaatcttcaaagctaaaaatgccgcaaataagtgctagaaaaggcaaaacctataataagatcgcaaggttgttactgtgggttgaaatgcagaggaattcattgtcatcttttggattttgttgcatgagaactggactttgagaactgtgatagtttcttcagaaacgtggatctttttaatggcttttt

SEQ ID NO: 96594 - DNA, 356 bp, Glycine max
cactaatactatatcagtttaatttaggtgttttacaattctcaaatttattaagggtatggtattaaatgttaggataaataacatgtgttctgtctgtgtaaacatcttctaagattgtatctaattataaattgttatatttagctagttgtattttcttaattttttaataataataattttaaatttttattaagaatgatgtctaattgattgacaatacatgtatattaaaatttaaatattatgagtcattaattatttatttgatttatattataaattttaaatgtcaatttatagtctgtaattcaagactttaagtttacgattctttacctgtgaaattggtg

SEQ ID NO: 96595 - DNA, 446 bp, Glycine max
aggaataagttgaaggcgattttaatatccttcccaatggagaagatcactaatagctggtacaaataaaacacataattatatataatttgccacaaagcatcctctgtaaatcttcaaaaagtatgcagagtgaatggaacccttttaaatacagacatcctgtaaagtacctttatttcataaccccggaggcgtttcataatcaagttctgggctgagatctgcatacaaagatcatataatttatgaggctaaaactatccgggcaactgcattggtgtcacttaaaatctagaatcatttggcccatggtgatccaaagaaaagaaaccattttccgcagaacattctgattataatatatcacagccagaatgaaagagaaaaggcaattattgacgaatagaaataaaaacacacactgaggacagtgctattggata

SEQ ID NO: 96596 - DNA, 433 bp, Glycine max
cctgggtaaatttgatgtttaaattacttagaaataacatctgtaagttcatgatacactacgatccgcagttgcaagaatcaggaagatctagaaaatagaaaagttcacactgttcagtattccgttccgttacaatgatatacatgtattaattatggaatgtacaatgaagtacggcacaattcttattacatagaatcactgtatgaagctgtcacctccgcaacaaagaacataattttctcctttggcatttagttcttaacatttttttttccagcattaagatcctgggagggcagcattttcatcgatgtgaaggtttatttaccttccagcttcaatgatccaaaattactctgaactagtgcagcagcagcacgagcagctgcagatgcgcgatccgcagaagcaatggcagcccgtgcct

SEQ ID NO: 96597 - DNA, 429 bp, Glycine max
gttcctttcaaggagaaggggtttctatggttcaaggagcttccagaggaattgggctggaattttttcttccatctacaggtaaaacagcttttagagaacgatgataaagagcatgttattgctacatgccgtgatcctagtgcatcaactgggcttatccatctgaaagataaatttgcagaccgccttaaaattttgccggtggatttgactgttgagaattcaatcgaggcatctgcattggcaataagagagacatatggccgtctaaaccttctcattaatgcgtctgggattctttcaatacctgaagtaatacatccagcacatgtggcctcttctaaaagtaggaggcggccactggactggaagaagtgctgcagcggtggctagtttgagcgcaagggttgcatctattggggacaa

SEQ ID NO: 96598 - DNA, 414 bp, Glycine max
gcacctacttctccttccatctccgcttcagagagagaaagtgaaagtgagaagaagaagccatgaacagaagaaccactttgcttgttcgaacgctattgttcctcttcgtcctcaactccttctctctcttcctctacttcatcacccacaaagcttcttcttctccttcttcttctttacaactcaaaaaacctcgcacctatctcacaccactttcccaccaaacgcacttctcaaagccatggcctattctcccctcctacctaccgcgggcgcaggctcctaccacggcccctccccgctcctgcgaggcctacttcgggaacggcttcatgcgccgccgcgacctccttctctcccgcggcggagccgggtggttccggtgccgccacagcgatacgctccggagct

SEQ ID NO: 96599 - DNA, 396 bp, Glycine max
cgagaagtgtgtttgatcccacttccagtctttacaattaatttttttttcgtcgcgtctcgccattatgcgtgccgacaccacactcattgcctctcttctggcggcctcggccgccgcccagcacaacttgactggttacaccaacaacacctccgtcgacaactcctacaacaagaagattgtcgccgacctcgaggctgaggttgccgctctcaagcaccagctcgaggaggcccaggccgagacctgcgatgtcacccccgtggctggaggctccactggcacctctcccgccggctctggctctgctgttgcccctgccgacgctgctaccacctcttccgagcccgactggtacaccggcgaggacgactctgagtcttccgacaagcc

SEQ ID NO: 96600 - DNA, 485 bp, Glycine max
atcacaacaagacgaaaagcacgcctcgcaaccatcgcaccacttggaacactctcgcgacctttgcgctagtgatcaccgtctgttcctagccgaattgttccatccggccccggcgcatcgacgcgacgcgatattcaccgggcattggccttacatttcacaatcacaacacgctttggatctttgtcgcgtacctcagaaatcgttgtaacgacaagtgcgcattgaaaaagagcagtgcgcatatccggaagccatggcgcgaacacaagcaagttctgctgctcaaagagggcgaccaagcacaggcggcaaaggcaggcccagcgacgctggaaagagcagacctagcgagtctggcaaggaagtcacaaaagcgccgcgaaggagtagtggtggcaagacacctgcaagtcccggaactcgcaaaaagccgcgctacaagccaggcacggtggcattgcgcgaaattaggagatacc

SEQ ID NO: 96601 - DNA, 137 bp, Glycine max
cctcatagtctcccacatgtgccgtatcatccgtgcactctccaaagtcaaagccacaatgcttgagattctcaaaggatcaaacaaccaatccaataacattcactctcaccacataaagaagcaaaagatgacta

SEQ ID NO: 96602 - DNA, 115 bp, Glycine max
ctcaactgaagaaatgctacaatatttttgtgaaccattgagtctggaagataaagtattgcggtaatctaataccattatatatctatggtcctactgaaatcttatgtgatat

SEQ ID NO: 96603 - DNA, 458 bp, Glycine max
gctaacttggacatgacatgacaatgagtaatacggtgtaccagttgataagcacaaaatattgacttaagtctgtgttagcaatgcttgtgtgggtaaatttattgtttttatgagagtaaagaaagaacaacaaaagcaatatcaaggaactgtgaatgagagaaaatttgagagactcaattgatgcaattggaactcgaggaaccaaaatcattcaatcactatatacaagggactaaaaatgcaattaaacttttattttatgcatttttatagatattataataaaaatatgtcattttgcttttatgatttattttctttttgaagtgcaaattgaagcaacatgccttgagatgaaagggcctaaaattttcatctttacttgctgaaaattcagaatctagattggatgagcctgtggtggatctcccaccactcaaggtgaaagatct

SEQ ID NO: 96604 - DNA, 325 bp, Glycine max
gggggggcagaatatgcctgttttggaatattcaagaaagctcaaaatcactcttggtttattttaaatacccaatttgatggaatttttattttgcagcaatctctgtgctgatatgatacaactaagggggtttttcgatctgaaaagcattgttcttgattttagagccagattctagtaaagattccgtctcccatgatgtagtagtaccactacctgaatctacagggcttccatttggaggcaattttggcttatcattcatcaggttttggaagggaaatggagggggagaaatttcaatttcaccctttaacatttt

SEQ ID NO: 96605 - DNA, 500 bp, Glycine max
gcataatataatccaatttgactagaaatataactatgttcacatccaaatgaaagtcgagaggccaatcaagttgcagtggcaaatattggagaataaatggagatgtcatagaccaactcttctaaaacattatttgttaggtgaaggctcatgaatggttttaatcttacacccactcactcaggagccctttaggctacaaaagtccaccctacctttgggcagagatgatcaaactctttaggctttaatactatgtctcagatcaactctcctaaaagcacaatatattcaatgaggggtcatgaatgattttatatctaactggatgtaaagggggaaaatcagttgttttagtcgaaaacagatgtggctatgaataaagatcatggaaataacatgataaagggagctttgacttctggattgtgagtcacacacaacagataaattcagatcctgtttttagggtttttagaccagaatacccctttata

SEQ ID NO: 96606 - DNA, 491 bp, Glycine max
aaccccaaacaagtattttcgttgcatcttcatagttgatacaccagattgtccatgttctgttgcacagcatctaatgaactacaaactacattaaattacaaaacacaagggaaactaggaagaaaaacaaccccaaaaatagaggttaaaaaaacacattgcttgaaacacacaaaagaaaaattgatcaatatgaacacaagttaaatttcccttctctaactttgctgtacagccaataaaatgtttgcaagcattatgtatgaaactatgctaacatacataatgataaaggaaggaagaaacaaagagaactattaactgcatatgccatgcaacataaattgaaatcgcacaaaattttaattctaaggatcatggtcgtgaggagcagcagagactgatggtgatggaagaaccaatataggtaatccattatgtacaaattcagcgtaaggggaaacatgctctggcttatagtcccatat

SEQ ID NO: 96607 - DNA, 229 bp, Glycine max
gggccataacacaggggcaaaaaagatcattagaggcaatggtttttggtttaccggacaaaaaaaaaagcaatgccttaaagctgaaaggagagggtttgttcattttcaaagggggggaaaagaggggaattttttttttacagaatttcccaaagggcagaaaaaagggagtggagccaaaaatggcttgggactcaaatccgggaagggaccataggaaaagggg

SEQ ID NO: 96608 - DNA, 489 bp, Glycine max
gcaagtcaattattttcctaatttcactcactttcaagcaaaacagtgatgcaatgttgtaattccgaggaaaataagtttttcgatgttttactaaccagctctttgctgagtagaaacaggaggcttgaaaatcctcgatggatgcagcatgcagctatgattaatttatgggaatcaatttcatcactttgataacgcatatcttgagtgcgtattagaatgggaattttttcattgactttccttcgagagatcaaaaggaggaatggtgcttcgtgctcggctcgatttattagctttcacctgcaggagagttacctgcattttttcacctggatgggaaaaaggagagacaaaattgaacataaagcaaggtcgaattttgatgggtctgttgcgagtttttgttacgccgttataaagaatcgattcctacgtaaaatcactagatgatagcgtcaaaggcatcaaaaagtttcaaaatct

SEQ ID NO: 96609 - DNA, 476 bp, Glycine max
cctaacaaagaaaccgtattgctttccaattaagatgcaataattaattcaattccaatgcagatgagaaaggcatattgtgttgaaacttttgatgcaatggcatgttaacctatctttacgaaaatgaatttaaattgtcagttatgtttgtcaataagatattgcattcgtgtgataatgggtttgctgcacatttttgatacagcagtatggagggattatcccgatgtaaaattgcttgaaaataactccatgagagtatcagcattcagcatgttcaaaaaatcgacctactagctcaatgcatgcgcagttacaaaactaagatagcgatcaaatagttagtcgtactatacgggagtcctatccaagctttttccattccatgaatcatttccttcagaaaaatatagacgtgattaggggattctcttttcaatagattttctataaatctatggtcgatcttttta

SEQ ID NO: 96610 - DNA, 419 bp, Glycine max
gattccagacatggtctctcttttttatgagcattctctattcttacatcatttgactcataacatatgtgttgaggctaactgctcaacaacactcctggatctcttagaatacatgatgatattgctataatttcttatgactttaaatttcaataaaagaatctgtaaacacttacaagttacaacaaaaattgggaacttaagtaaacacaggagtattaccactataacacagaaatggacattggtactgaaacatcacccgcaaagctggtatccctagttgtatttgaattgctagcaaacgcatagccaacacctaatccaccataatgtaaagttgcatgctcacatctctgaaaaactcttgcaagtgaagctgcttttcttcttgcgcgttttgtccccgtaaaaag

SEQ ID NO: 96611 - DNA, 225 bp, Glycine max
gcataaacaacaatcctgcaataaattagtctaaacttctgcctgttgatataagctaaaataatatgttgtacaaacatctttccatcaaaccaagtggtagaggagtaacaagagggtaatatgacgagagaaaaaaaaaatgtcctacttattctgtgaaacaaacacataacaggcaacacaacaatgaagcataatctctaacatacttatggttcttta

SEQ ID NO: 96612 - DNA, 191 bp, Glycine max
gggccctaacacaggggcaaataagatcataagaggcaatggtttttgtttttccggacaataaaaaaagccatgctttaaaactgaaagtggaggggttgttcattttcaaagggggggaaaagaggggaattttttttttacaaaatttccgaaagggctgaaaaaagggagtaaagacaagaatggct

SEQ ID NO: 96613 - DNA, 388 bp, Glycine max
tagacttgaagtctccgctaacttttaaaaaaaaaaaaaaatagacatgaaccattcgttgattaatagtgtttgaggtctctgttctgctactatgtggcgcttggattacaatccatggaaaaaacttgcactggatttgctttaggagctatcctcctacacctgctgttgttgtccctccctaacctttccatagcagaggttactgtttatagtcccgatgagatcttcagcatcggttgtggctcatccatcaattcatccacaccggacggtcggaactggattggagacagcaacaccaaactccttcatgatagccagaacacaggtgcagctcctgcgcttacaccatctacacaacagggcccttacacctatgctc

SEQ ID NO: 96614 - DNA, 290 bp, Glycine max
aaaaaaaacttccttattcatatccacttttaaatattcccaagcccttacagatttttacatagacatccccaaacatttgtaagtttatctaattggaaataatgtgtaattaacattttccgggaactttaaacaccaaactcaacctgaacttgaacagtaccctcatcgcccctggggatcattaatctcagagaaaacattcttggggacgatcatcaacctgtaagattccttactcccatagctgggggggtgcaatccagggctgtgtactatgatccgaa

SEQ ID NO: 96615 - DNA, 141 bp, Glycine max
gaccgggaaaagaattctcaggttattcatttaacatttatttaaaatatcttatacattgaaactgtcatataaaggtgccatccttacagcaagcatgttttgttaagacaacactttgaacccttgtcaaccacacta

SEQ ID NO: 96616 - DNA, 479 bp, Glycine max
acaattaaattaggacttcaactacatataaactgctgaatgtttaaagcctaagcagatgaattactaaaatccaaatctttagacagtaatttgctagaaatttctagttaaaatagacatcaggtaatttgcaaccgtatgcacaagtcccttttgacctttctcttttaaagaggacttgtgaacatagcaactttttatttttttaataaagattaaccaagttaccgacaagattatgaatccaggtatttctaaaaactctacactaaactacaatttgccatgttttatcatcttcagtgcttctgaataaccctgagctttgcacttctacttcgccggtttaatttttcttcttctcctgatggcgtgattggtcttttagtgagaattgttccatttgatccatatattacttgctttatccatgcttctttttctttgatttcatcactagtcttcctcaaatcact

SEQ ID NO: 96617 - DNA, 438 bp, Glycine max
cgacactaaacagtctttttaatgaaagtgattaagcaacaggtctgttttagaagtcccgtccattccatcgcaaattggaaaatgaaataaaatgatacaacactgatgtaacctatttctccattcgaccattccatcggtaggaagaacattttgaaataatcaatagaatcttaaattaagagcctcatagtaataggttccaaattgtgagttgtcattggataaatggcgggtaataacgttatatcttttaactgaaactcgaagaaaagccactgttcagcgtaagaagcagcttaaatatgatgtacaatgccgtataatgcgagttccatttcagtagcaggctaaataaagcagagaaagaggggctccctctcttctttcttcacgagcaacatgctttcaagatatcttcaatttctgggtcat

SEQ ID NO: 96618 - DNA, 311 bp, Glycine max
tttccatgcttgactctgtgaagatgattttttttcttcctattatcccatttggcgtactctatggttaataaaacaaaaactgaattttaattcaattatatatactagtctttagctggtcacccgtttcttcatatcagtgaagaggatcaggtgacttattaaggtttcattgacttatcatggattctatctatgataatcaatctctatttgctgatattttacatgtgcaactgagcagttcttttttgtttcaccaatcaccacacgtattttctttaggaggcaatcctgtctgatacact

SEQ ID NO: 96619 - DNA, 260 bp, Glycine max
aaaccttgaaattttaagcattgtaattgggggcccctaatggtcaaccatatgaccggactcctatggggctaagaaagttgggtcaggggatgatgatgcggcaacagcatggggttacaagaaaacaaaggcttgaaaaaaaaaaaacctaaaaaaaaccctttatgactcaagctgaacatcccagatgccctggattttggcatcctttggagcctttgctcccaaaatagtggcggacggttgaaaactttgga

SEQ ID NO: 96620 - DNA, 367 bp, Glycine max
gaactgcggtagcccacatttctcggttcctccactttatattattgtttcaaaatatttaattctattattgacagtgtcttttctctctagtgtaatatcattgaagaatagttttaattgaacatgtttgatgctaaatctgcttaaattatttgccccctcaagtcatcatttggttacttttctttgttttggttgccaatgcttacttttatctttcttaatattcaggccaaatacgtatgtgttgatggagatggaacagttcctatagaatcggcaaaggtttgttaatttccgtatacacgagttttcttggtattgtgtcaatgaagtagcattagtgttggtagtaatgattggg

SEQ ID NO: 96621 - DNA, 423 bp, Glycine max
ggggagcgtgctagaagattttcattcatatctggtccgagacataacgccggtccggtatctgaatgcaagacccaccgcgactgctgaccgtcacggtcgttgcatccatgaagtcctccatatcaatatacatgcggtaggctgtcattgcacatgactcctccctggctctttccagtcgttgtcaagctactttttgtgtaacttcttactcgacctcagccttggactcgaagttctcaccagcgacaagttcggggatgtcatcatcgtcctcgtcgtcgtcgaccttcttctcgccgtcctcacccttctccttctgcatgctctggtaggactcggcaagtttgcgtagcgatgcgagcgaatctgggccgagctggttgaggatgccggggacgagctctgttagctccttgt

SEQ ID NO: 96622 - DNA, 458 bp, Glycine max
gaattcatgtaacaaaaagtaacatatattggtcttcctgtttatttttggaatataataaactgttaaacaacaagcaacgcatgttatgcagatcagcacatcatacaagtgccgcgttttaccttccaaaaataatgacaaaaatatctcttcaatattttccttcggtactatgcaaaaaaccaaaaaggaaaatgaagacacagtcatgcaaataaaaagtttgacacaaaaaattgacattttttggggtggtttctgcacgaagcacgtgcttaggctcgtgtagtgttccttgttaggtatgtaggtcaaatgctgttttatttttatttatttgttcaattagttacgaataccatcttatatacaatgtgagtgagaggacttaggatcgaatttccccttcaatgcaaaggggaaatcaaagatataggggcctgtggtagaggaag

SEQ ID NO: 96623 - DNA, 225 bp, Glycine max
ggcgagggaacaatggccatttttatatacaaactggaccattttactcggagggaactttagcaaacttatttatttttacaccagcccccattttttaaagcccccccaaaagaaaccccaggaaaacggtttttttcctcaaaggaacctacttaaaagggtccttcttaaaaaaccccttgaaactaaatgggtaaaacgccccaccattaccaaagaaaa

SEQ ID NO: 96624 - DNA, 287 bp, Glycine max
ggcaaaaaaaggggacaaaaatttgaaaaaattccccttggataaaaaagggaaccttgggtaccccaaaaaaaaagggggggtaaaagggaaaaagggaaaaaaaaaacagttaaagatttggggaaaagccatttgccccaagaaggaagcaataagagaactggaacccccaaatttttcatccccccctagcaagaaatcccttggggggggggattaactttccaacaatttaaaacttgggggttttaaaacctgggggggttcaaaacttccccggggaa

SEQ ID NO: 96625 - DNA, 406 bp, Glycine max
gcgccgtggagttcgttttggtgaggattctgattaaagagttttcttttattctttcggagaagcgtctctgtctctctgttgcggtggattcttaaaatttgctaaatcttcttttttctttccctaatctctattagtatcatcctgcgtgtggctagtgattggaatgcttagatttatattttttgttaccaaacagagacggatctctacctttctatttcttttgcagtagcatcaccgtatcatcagcttcagcttgctttcaccaagacggctttactatttggtgtgttccatgtcacaaaaaacgaaaggagatattccttttacccactcctcgacagggaagatctgaagcagcgctagcagcacacgtcctctaatggacgccgactcctct

SEQ ID NO: 96626 - DNA, 447 bp, Glycine max
  unsure (1)..(447): unsure at all n locations
atctagagaggagttggtatatcgcgggtattctacagaaaaggaaccctagctgacgaagaaggaagacgttcatcgcgcgcacaaagtatgctttatgtaatgcccccccttcccccccgcagaaacaccgtcgccaatgtacagcagcacccgcagatgcagcgactgtgagtagccgctgcagcccaagacgcctgtttccctccgccctaggtatctcgctcccaacaaacaaacaaacgccgcgcttgcgaagggcaagcgatgaagttaaagcaaaaaattgttgaagtgcccggccgcaccgtgggaggtggggggcgttttgaaggttcttttggccgttacgaagaatgggaataaagggtgtatgttntgaagccggcgacgggatgaccgtctagcgaaagaagtggaaacacacagacagcgatgcaaatagct

SEQ ID NO: 96627 - DNA, 399 bp, Glycine max
cttagtgggaagccttgctaccttgctttgatttttgttgttaattaacgatcttcaacaatcttttatgtaaacataaaatcaccaccagctatacctcttgaaattttttgttatggtatagattctaatcattctggggcgatcagtgtggtcgtgtaatacatgtactcacctcacataatgagataaggctttcttgttgatgttgtacagattcttgtcacatatgaaagcttataactataggtgtcctgtctctctctctctctctctctctcttttggggtttctcaggacaatattggacttattgagagagtagtcatggaggggatggctcccaattcatgtgcaaggccagttctagagaaaaaaacaaggccacaagagcaactg

SEQ ID NO: 96628 - DNA, 419 bp, Glycine max
tttttttttttttttttttttttttttttttttttttttttttttttttttttttttttttttttttttttttttttaaaaaggggggggttaaattttcactttcaggggcaactgttccaaggtgaaaaattttaaaaaataaagaactctccctttcactcttttttttctcaatgggcttgggaaaaaaataagaaacctaaaaagaaaaaacctgccaaagctaaaaacctgcctatgggggttgcccccttatccatcggggaattttccaaaggtaattaaaccccttggtgaacaaaaacccccctttgtttgaaaaaagggaaaaacttcaacccccgatcaaaaggtttcccaaactgggggctcctttgtccaggggaacacctttgccccctattggaagggccccc

SEQ ID NO: 96629 - DNA, 417 bp, Glycine max
caaaaggcataaagtgcatgtctcgtctttcatgaacagagataatcatatcaaacagcatcaaccactcatacccctgcaccccaccgggcgccccatctccatccacacccccacttcctccaccttccactccacctccccctgtcccatgttatatacaaactcaaattcagaatcgtcagctcactcacctgtgttcgattgatggggacgagacgaaatgatgatgtgatgtaataatgtgatgttgtgatgttgtggtcgttggagtcgtagcgggtcctcgtcttgtcagtagtcggttcaagcggaatgggagatggaaacgatatgcgatgtataagaagaaagggtagaactttcgtaggccggtcgatgagaggccagcatggcaatggctcgagagaagttggt

SEQ ID NO: 96630 - DNA, 410 bp, Glycine max
aaatctttgttatcagcagtcctaaaacttgagttctagtagtctttctcttgaggcggtcttagataacctaatgtgttcattcaactagataattgttttctcactgatatgttatgacaagattgtaataataaaaaattgtgatcaaattgaactaaaaaaatcatgtaataattaagactccagactaatcttaatcaaatataagcaattaaaaaacgctgtatgcccattagatatgtggatgtcatgcgacagaattcttagctaatttgggcttaagaccattatgaatatagacaattgtaaatgtatttatgtattatcaaatacagttttttcttaaataactagcctgtgcgtatacacggatagcggatgttaataacttgcctatgcgtatctac

SEQ ID NO: 96631 - DNA, 396 bp, Glycine max
cttgatccaatcaaggcataaagttcaatttatacgtatgttttcttgtaacttcatttaatttaaatcaaatctaacatgatgttttagctcaagtttattttcgtatatagaaatatatcactagtttattttcgtgtatagaaatatatctacattactgtagtaaaaaatcaaatagaaataaaggataaattttattacatcaaacttctattataaagtgttggtattgaaagtttgcaaataaaaattcgactatttaatatctacttggtcgaattgatatcaggtgtgaaaaaaaaattcatattaaatttgatcaacatatttaaattaaaatgtaatattttttttatgatatctataatttgatatattcaaaatttattaaat

SEQ ID NO: 96632 - DNA, 450 bp, Glycine max
ccgaaagtgcttccattattgcacctaccataccactcaataataccggaagagtactggtactggaataactaccaaatatattttccttttatgaaccataaaatgatacattattattattacaaaaaaataaagcaccctaaaagaagagaaaaaatcttaatttttatgcataaccaatactttattctgttctcatggctttgatccaatcaagttcaactctgaaatcacctggtccagatctagcacctgggacaccaccctcagcattgacagatagagacatgcctaaaacacgggatggattcatttcgatttgtgcatctataacgttccctctccaagtaggtaaatatcgagctagaggaatatggatcacacaatgtcattggactcggttaaagaccatgagtggtccatgtttagtatttcgacaaattttat

SEQ ID NO: 96633 - DNA, 167 bp, Glycine max
actggtaatgggagaagatatgttattaatttattatacaagaaaataataacactgcagtaatagtattatctatggataatccacttgccggggaatataactaggttatacaagctctaaagttcaaatctcactccctttattacacaaaaaactttttttat

SEQ ID NO: 96634 - DNA, 370 bp, Glycine max
cttgttctgaatgattttactacaaatttggcatgcctagtagcaatgattgttaaagtttctttgatttggtgttttattgcatgtctaaatactactatactagtcatcctttgctggtttaaatggagcatggattcttggatcttgatttattcagatcgaatctgtttttgatttttgcgatcttacattattgacaagatgattaagtacatgaatatattgctaccaatctctctgctgtaataaataaatatgctttcttatacatatgttcagctgcctgcacatatagatatgataaagagatcgcgtggtttatatttgtatattactgcttttgcgctcatagttaattttatatcct

SEQ ID NO: 96635 - DNA, 375 bp, Glycine max
tctcaccgcaaattaaccatgagcttcctcagtatcaccttcataacactcttcctcctttcccaccactacatacaccacccccaagcgaataccccagtggaccgttttaccatcaattgtggcgcctccgtgatatcctccgacggagaaagaacttggatgggggacacagactcaatgcttttatccagtcaagatagcaccgtttttgctaaaccaacatcacaatctccatctaccaatcatgttccctttaccactgcacgcatgtcacgttcccaattcaactactccttccccgttaccccaggccccaaattccttcgtctcttcttctacccagctgtttatgcttcctttccccacaccgat

SEQ ID NO: 96636 - DNA, 477 bp, Glycine max
caaaaaataaatgttaaatgacttctttcttctaatatgataaatgcttttccaataataaatttatgtttgtttccttaattgagacattggttagcacttgccttttatgaatattccgaacctgtcatgatccaagactatgatgaatgaggtacagattctttttttttattcgtgaacgaggtatagattgcctggctaaatagagtaaaacgattcatagaattgatgactatgctgcctttgatatgtaattatgtatatgcaatactgttgcaaatttctgaaaacaatgacttatcctagttaggatttgatagttttgtttctcagtttgatggggttgctttttgcattttcaaatgatatttatgcatagaacgtgatgaaatatattgattgttttggttgcagtgacagattgcatggtgttaattccagtatagttggaactgatcttgaccacatgttgat

SEQ ID NO: 96637 - DNA, 464 bp, Glycine max
aattttccatgctaatggcgagtcttttgatgcattacagtgcaagggagaagaatagaacaagatcttgattagggttgtggagcccatttattgtgtccattcatgcactgtggaacattgattttttgaagagtagatggagactggtgaaagcaacagtactagtagtaaccaaagttgtgcagtgatgaaggattctaaatggtacactcaattcagaaatgtatccaatccttggatggcaagatatgtttatggcttgattttcctagtggccaatctgttggcatgggctgcccgtgatgaactttctagtcttagtgctttaacagaaatgaaggggttaaagggatgcaaggttggaaaagactgtttgggtgcagatggtgttctgcgtgtgagcatgggttgctttgtatcctttgtcaaaatttcaatatttattatatgcatgaaatctg

SEQ ID NO: 96638 - DNA, 354 bp, Glycine max
gaaatgaatcatcataatttatttcatgataaatcgaatatttgtatttacacattcatctctgcaaaactatggtattcatgacatgaggtatggaagtgaagccgaagaaactcattttattgccactaaagaattgtaattacaaaatatatacaggacacatcaatgtaagatttggctcacatctcagacaaaagattgctaattttgcggagctccttgagagctgacatggcattaacctgcgctttaccaaccacaacagttttagacatgttatctaatgatgcttattggcccctgtcttgttggaaagcacactcaatcacctggatatgctcaagcattgac

SEQ ID NO: 96639 - DNA, 438 bp, Glycine max
gatataattgtccctcatcctcaatccctagtttctccttggcgtgtgatgcttgatcctcttcctgtttctcagtatcattggtgtttatttctccagtctcctcggtatcattttgtggaatcttcacctcttcatttaacttttctgtgaattcctcttcttcctctctctcatcttgactactctcaacaactatttcgtttccaatagatgtttcgtcaagtgttggttggagggatttatcttcatgtacaccttcggtttctgtctttggtatctccacatcggtcaattgatttgcatctgtttctttctctgctgtaatttcgcttgcatacttgttctctaaattcccttctgagcacgtgtctactattatctgttcatcgatgtccacatcaccagttgagtttttgctgctttctgatgtgatgt

SEQ ID NO: 96640 - DNA, 429 bp, Glycine max
tctacaacatcttgacctcgttcggcgccgttgctcgacaggtccatcaaaaggtcatctcttcggattacaccgccttgaaatcatccggcagtccaacgcagttcccgtccttgtcggtgaacttttcgcggtcataccggacttgaacgagctttacattcccaccgcagacctacaaggccgagtcccagctcgacctctccaaacgaggccctcccgtttcggctcgggcacactgcaggacaggttcaacgtccgatctccccttttatctcgtcagatctccaatctttccctcgaattgcacaatggccgttgcacctatccctcccgtgccccggtggaggaagcgacaagaggcatcttcagcagtcgcagcatcttccgctcccgccgccgcttcgtctgaagcgcccgtttcgagcg

SEQ ID NO: 96641 - DNA, 426 bp, Glycine max
cttgatgatattatcgatcacatcgagaaatcgagatgaggatgatacaaaggatgatatttggttcgatacgagtgcccacgatggtatctcctttcgatcttacttctgcacttcttcacttcgtacacggctgattctggcccgcttcagcccgattgtccatatccaatgtgatccttctgcgtcgcttctcgacgaaggtatacacgacgcccgttgcgttatctaatgacgagacgggttggccacgtgaagagggttctcgcgttcgagcggagtatccagactgccttctcctcccgacccttggtacccagcatacggatcatcatatcttccgtaaccctgtccatacccctgatccgcatcggcatactgccccgcatcgttcgggtcaaagtaatacccctgatgctggccatg

SEQ ID NO: 96642 - DNA, 139 bp, Glycine max
cttatataataaaattagagaccatgtaatagtcagctgcattatcaatgttacagtggattacagatcaggtctgatatctttagagaggacaccgacaacttggcatgcaattcctatgccggatgtgaatattcac

SEQ ID NO: 96643 - DNA, 432 bp, Glycine max
aaaaatcaataattctttttaaatgagaaatcacgttaaccatctattccaccagtaataaacaatgacattaatgcgtatacaatccttggtaataactattagcattaaagtgttaagatagtctcatgcatcatcagtttgcaccgtgaggtcctgtacacccaaatcatggtatagaccatgcacaaattctagtattggccgatcgtacggcccttgctttacctgtcagaatgacccactaaaagtgagtatctagattaaagctactgaataaaaagaaacggaaacatgccgaactgacatactcaaagtttgaaaatgaaattagggctctatacaatagatgaacaacatttaacttgggtgcccaattgaacaggactaagcgttcgagggatgtgaatccagacagataactaatcaagt

SEQ ID NO: 96644 - DNA, 493 bp, Glycine max
ctcgagccgatcatctctatattattttttaaaatatccaacatttgtaatatatgaaaacttattggctctttagaactaaaatttgaatatttcaaaaatataaagaccaaaacttacgattctgaaattcgtaagatatgaaaactaatgattgaactaaaagcaaataggatccatttttaagagactataaaataatgcttttaaaaataaaactaatgattgaactactgaagacactaattaaatttatatttttaaatattatctaacttttttttcgggcacgtcttgtgcttgaaaatggccatcttcaataagaatattcactttccttaaaaaaataataatattatctaacatttgaagtaatgaaataatataaaatcgtaataagaaaccaagatataaaaaatgtaaattaatataaatgattaaattgtgtgttttataaattaaaaattaaaattaattgataaaataatttata

SEQ ID NO: 96645 - DNA, 481 bp, Glycine max
caatatgtcggtagcaatcatgtttgaaatacatttataattatatttaaatcataaatcaccaattatgacgttgataactaaattatatcttctcatattagcattttgattattgtgttacataatggttctgcaatccggatttcaattccacgctttctcttaataaatatacccatatggtcatatcaataaactctagttctttttaatttcataaattgataagtcatcggacatccgttatattttacaaaacaactattaattaccaaaaataatcggccactttagttatgatggcccaaaaatttagttatgatgttattataatctatttaattaaaccttatactaaaaaaactctatataattaaatctttcctaaataatataatactaatgtttttttttaattctgttttcaaatgtaaatgtccaacccttttttagaaaataagttttgaaattaaataaa

SEQ ID NO: 96646 - DNA, 396 bp, Glycine max
attataatgatttgcatgaactatgtaatatggctacatactacgctggaggtagatcaattatagaagaggaatatcatccgttgttgtcttggtgtgaaaaagtatcgcgtgtgataggatgatcgttggatgatgttacgcaacgatcagattgaactccggcagggcttatcgcgaagccatggtcgcctctgaagtcctgggcatggtggtgttggcatcggcgggatggtcggcattaacgggttgagcgtcgtacttgcctttcctctggaagaagcccttctttccgtgagcagccatgttgtcgtggccggcaggggcgacggggtcgttggcgatcattccggtgttttgggtagtacgagggttcttctccatgtcgtgggtggt

SEQ ID NO: 96647 - DNA, 224 bp, Glycine max
aaacatgatgtaagactcacaaaaatttgtcattttcaataaatttcaactaacaagagaggatgtgttcaaaagagtatgtctaagagtgtgttccctagcatttctccttgtcaaaaccaaccttataaaaataaggaatgtatatacagatgttcaaaattcagagtacacaagcagattatgggaatgcagtaggagtatgattcaaatgggaccccttt

SEQ ID NO: 96648 - DNA, 353 bp, Glycine max
cacctaaaaacatgtttctcttcattattgtgtagtcctgtttttaacattaaaatggtgaaaatccacattaagaatggatttatgcttcagaaaaaaatgcagagaacttacagaaaaaatgattgaactacttcaatataatgtataccatctccgacaaatttttcatacagccaacaaaaaagccataacaccatcgtctctaataactctaaatcaatcttcccatttcggccccaaaagtatatagcattgcggatattctgatcctcccaaagaattaattagttatcgcatcaaaaaaaaaatcattccattaacttaaaaaccaagaagtcaaagctgatgat

SEQ ID NO: 96649 - DNA, 494 bp, Glycine max
aaaaataaataaaattgatttcaataatttaataaataacttcacacttcaaagcatttaaaacatcaacatcatataatgtaagtgaatattaaaaagacctcattaaaattcggtctaaatatacatcagccgatcttgaatatcatagtatatgtcggcacgacatttcaaactctacacaacattaatccatggtattggttatgtatcacggtccaacaagaacctatagcagtaataaggtaaaaacacagaaaattgaccaatttacagaatcctgccaattctagaatctatgatattctcccctgaatcaatagctttagccagcggcggtgtttccatagagactcagccaagtactttcatcttctccccttctgcctgtctttttttttggacactaactacttctgcgtatacaccccataagtacttcaagctgtcctaaagcacacaaggaccctacaattaattcttccatgctcatg

SEQ ID NO: 96650 - DNA, 439 bp, Glycine max
tccggaattaattcccggactagccggcggccgcccttttttttttttttttttttttttttttttttttttttttttttttttttttttttttttttttttttttttttttttttaaaactaacaaaaacaaacgggattttttggaaaagggcaacggggtgcattcatggggttttggggcccccccacattattttgcaagaaaagggtttgttctttcagggaatccaaaatcccattcttaatggcccctttgcccgtttgcaactttaacaattattttggggggggcaacaaccttaaatatttggccccgggctgaaaaaaaaagcttttttttggcccaaaaaacgggcagcctgaaacccgtttgatatcccaaccctggggatctcaggggggaccccgggggcaaaaaaagcctcaacccatgggg

SEQ ID NO: 96651 - DNA, 404 bp, Glycine max
aggtggccgcccttttttttttttttttggagaaaataatggtttattcacaataataaaattatagtaacatgacaaaagattaacaaaatacagggagccaaggattgggtgctgaaggggagagtgaaaaacatcatttactgaacttggataagtacagctgctcgaaagcaaaaaaaaaatacttacaaaagattatggagagtggagtctcaagaatatatgcagatgccagctcctttccaaaactgtcggtttctagagttgtgctcaatcacaagaagttgaagagataagtactcactcaccaacaatgttgcaatagcatagatcaggatttaaatgaatacataagccaccggggattgccacataacgtgcaagtcaaggatgctattaca

SEQ ID NO: 96652 - DNA, 206 bp, Glycine max
agttattccgaatttcggacccctaaactgggtatgaaaacccattggaggcctttactgggggcctaactgggttaaaacctaaattggcccaaatgggtgggcttttgccttccgccttattaaaaatagctttgggtttttaaaaaattggctgggctttttggggaacaagggcacaacccttttccggataatttactaaa

SEQ ID NO: 96653 - DNA, 373 bp, Glycine max
agtggtagagcgtcagtcagcttcaccgacattaagtcggaacagacaatcgtgttacacagctacttgccaattcacacgctcgagaagtgctactacgaagactcggtccatggcaaggagaatgtgccgacccagtcctcgacctctcgccgcagctcgatgatctcaaccacttcctcgccctccttcacgtactccttgaacgccgctacgctccctgggttcttgcggccgttcttctcggctgtctccttagccttggcgtccagggtcttggtgatgttgacagctctgtccacgatgtccgcgacgcgcttgaagtcgccagtctggaagccacgcgttgtcattgctggcgtgcccatgcgca

SEQ ID NO: 96654 - DNA, 509 bp, Glycine max
agatcataaagcgaaatatcagtatatttctctactttttaaaaataatattaggtttaaataattatagtagtagctcagaacatggcctccacgatgaagcttgaaagctatgatttccctttttccgaatccaagttgtaggcgaagaagacatgttgaataattatggtgttatcctagcaggctaccacacacattgtgttcctaatctgcactacagagactgcgattcagactgaagtaacaactctaagatccaccaaagccactaataaaatagaaatgagtggcaaagtgggatccaagacatgttatgttcactttgcctaatagaacaaaactagtaacatgtccaccctggccacaattcaagcatagagcatttggcaactagaaggagagaattcacggaaagcacgcggtgccttcacaaccttccacgtcacactcacttgctcattattactattcacacccaccttaattttcccaatggccacgttcaa

SEQ ID NO: 96655 - DNA, 139 bp, Glycine max
gctgtacaatgtccaatgtaaatatcagatattagcacactgatcaatatacattcaaatatatatattgggtacacaatatgaaatttcactagtctacagttcaatgaacgctatacatagtaacatactatgacta

SEQ ID NO: 96656 - DNA, 282 bp, Glycine max
ccacaaaacaaaggaagttttatttttcccatttccataagaaaatttagtccctttggatttttatacatggtaaagaccttttttccatcagttttttcacatatttatatttgtcccccaacttaaaactcaccaaactaagcccattaaaggcaaaaacaaaaaatttaatgggacacgaaagaaagccaaaatttagttcccattttccaccgccaactaaaaaaacctcctagcaaattagttcattccattccctttacctttgcagaggaaaat

SEQ ID NO: 96657 - DNA, 286 bp, Glycine max
ggccgccctttttttttttttttctatgtatttatataatcgaattgaaattacgatgctatcaaatgttcaaatttactatatgattttttaagaaaaaagaaagtgctaattattaataaatgatatctatgtatatatatatacagatggatatcctatatctgatagcttaattaatattcgaccccttcttataatgtgttatagggcgctctatgtttaggaacttatccattgctttcttaatgtgcccgacaatccgaaagaattctgggggaggggt

SEQ ID NO: 96658 - DNA, 186 bp, Glycine max
cggtattcaacaaaagtgtatgcaagcatgtattacgatacagtgacataggaaaataagttggagttccgactgttttgcaatagccaactgaatgacttgtggcaatattcagaattaataagatctggattgacggccatatatataaatttgttcaattctactactcaattatcataatga

SEQ ID NO: 96659 - DNA, 303 bp, Glycine max
gggcccttaaaaaattggggccccaaactaatttatggaggggggaagttcaagcaacgggcggacaaattaaaaggggaacatgaactggagagaaataactaaattttggaatccccaaaaatgccagagatcaaaaattgggacttcaaaacttaaatatataaacctctcatcataagaatttggcgaaggaatcattagggggggaaaatggcactactcaaccttaggggggcccgggattcaaaaaaccattttgtttagcaaaaggccaagttatgggttccttcctcatccttt

SEQ ID NO: 96660 - DNA, 430 bp, Glycine max
cgggaatgcaacacatgcatgcaccacatatgggtcctttttcacctataggtgttggcatgcaaatgaggttaggagtgggttgtggaatgggcatgcctgatgctaatgatattgagtcctctagatttattcaagtgccccaaatgcaaggaactcatcatcctagtcagggtcaccccattccaatgccacatgctcccatcttttctttcccaggagaaccttttatcaacccatcaactttaggacttgtggaaactgtggataaggcttcttcagcctttggcttaattaaggatcagattccacaacttgcacagaacaccaacaacggttgtaattcaacaaatcagatgtcaacagtacagtgtgaagcaaccattggtggatttgaacactcaattgtggtacttaatagtggtcatgc

SEQ ID NO: 96661 - DNA, 277 bp, Glycine max
gggaaccccacaaaagaaaaggggacattaaaaaaaccaaagcaacaaaaggcaacaaaggcctgaaactcgcgggggttaacaaaaaggtaaacgggggttcccacaaacacgacacattaaaccccagataaataaaagcaattttgcccccggggataaaaaacccagtttggggaacaaccgttggaaaaagagggggggaacctcaaactttggccgaaaaacaagctgcctagaaaagaaaaccccaggggcccgaaaagaaccccccctt

SEQ ID NO: 96662 - DNA, 388 bp, Glycine max
tacaacttagcagcagaattgtttttgtcttgtattcatcccttaattgtttattgggtgatcaattttataagaatccatgaaaacttttaaaagtgcccttggaccatttttgagcttttatctgatcaaccatactagtggagctaccagcctgtctaaaggtcatctgtcataggggagcacctgcagggttccatgatgatcctctaaagagacccacccaagttggttatggttctcttataatcatgctggtagcctgttggtgtgacccatgaaatgtaaatatggtataccataggtgtatgtgttggcgagatcttaatgggatgataacttgattttactcctctcctctactttatagggtgctttgggagcatgg

SEQ ID NO: 96663 - DNA, 400 bp, Glycine max
ggttcacttacaaatgacaacctctcccccttttataggtttcaagggaaagttctagatacataaagaaagatttcatatacttcaagggaggattctacatacttctctcaactacttagttctacatgcttcttccaattaaatattacttctacttatctctacacttttctagaactttctttgaagtagtaacacaaatttaaatgggtctaaaacttgattaatgggttaaaccaagtttatattattcaacatagcaacattgagtttgcagcaactaataaaaccattacacactttacattagtacgttttagatatcagtttgtaatatggtaatcagagcttcaaagccgtgttaatggcttgtgatcctgaaaattatgctttgatg

SEQ ID NO: 96664 - DNA, 154 bp, Glycine max
gggaaagaaggacccaaagctttttcgggatttatgacttatacactttgggttttaaaaacaagtttgggggccgcatgatgtaaccaccgacaatttataattggaaattggaagtttttggacatttcttaagcaagccccattttgggtt

SEQ ID NO: 96665 - DNA, 434 bp, Glycine max
tattgccaagcgcgtgcaaatttatgtgtcatgatgctgtcgtaccttcattctcgtgggatatcaggaatttaaccggctgtacttgatatcgctcggcaagattttgcactggcaaatctgatttctcacgcgaatcttgcagtttgaggttcttgagtggttgactgaatatcgtgcaatcacatctaagccatgggacgaataagcatgaatgagcaaatcaagtgacgtcttcaagcggacaattaatgacgttctggtcgatagatgggtacattgtgagcaggacgttgacatctaattgattcagtattaggagatagcgatttgagcacctaacttggcttgccgaaaagtcatcatgtgctccttcagatgtgcttggacaccgcagtgagtgcgatcgaagcagcacgcatgtccaatcgtcg

SEQ ID NO: 96666 - DNA, 335 bp, Glycine max
gcgaggtggaaaggagtatgaaccgatatgattgttccgtctaatcaacctggatgttctagttcttgcttgcttcctctccctcgtcctgaagtcccttgaacagcgtcgtcttgtcgttgcgcagatggttcagttcatcaatgatagacgtcagtaattggttcttggcatccatctttagccgtccattattcatcatcgacatcttcataatctctagtgcctccttgtccggatggtcagccgggataaccacatccatctccggtagtttaatgtcatcaatgtggcccgtgtgacccatacgagcaaaagcttccttcaaaatctta

SEQ ID NO: 96667 - DNA, 421 bp, Glycine max
gaaaaacaacactatattaagtaaatgaagtggccgtgaaaaagatgcaaatgaaacaagagctaataaaaataaatagtgcatttaattgttggttctctcaggacaaggtggcacgtcatgagtaattccaaagtactagacccaaagtaattaagagtgtttaggaacaggaacaggaacaggaacagcagcagcagcagcagcctgagagccggtgaacctagcgagcatgacaaaggtcatccctccagcaacgttgttgatgaatctaagagccaaaacagagaacttgaagagcaaaggaggaagccatttgtccaaaagaaactccacaccgttcagagtctggtacctcacattgctgctcacacccatgtgcgccgcccaagtgaaggcgttcagaaccatagggggagac

SEQ ID NO: 96668 - DNA, 433 bp, Glycine max
aatctatacctatcgtataagttaactaatattcacaaaaataaatgttacaatataaaaaaggctcatgattccggtggcctgactctacaagcagaccactctttaatcggtgacatactaaagtgtaaatgtacaaactcgtggaacatgtcaacaatgtttgacatctatatcatgaatttagtaatgatgcatacttctaggtgagcatctaactccatgcttcgatctttttctgcaggttattctagtaatccaaggccttgaaattcttctatgaatgtccatcttttaccagacaaagaaagatcctatgtttcttgcaaagtcactcatatgaagacaaaaccaaagagccttgaatgcaaaagtaccaggttattctgcacctcataaatccaagacaatgtcctaaagcctaatgggaagt

SEQ ID NO: 96669 - DNA, 525 bp, Glycine max
  unsure (1)..(525): unsure at all n locations
ttttttttttttttttgaaatttaatatgaatgttttttcttatattaactcattttacatcgaacaaaggaaaaaaaaagaagggacgaaccaaaaatatatttgcctaggcctgatgctaagttgccaacagaaacgttagagaagcttctgtagatgttgttaagatccaagtataacaaattccaaattaacgaaattcacaaaaagtggtggtcctgcatgcgcgctatggactttttcttcactggaatctggaatccattgactaaataagatttcaattcagcaatgcattctatttgtagatccactcgttggaacgagcacccgactcatccatatctataaaaatgcttactgcctgcagcaaataatacgacattcgaatgtacactgaccattgtttttttcttggcaaccacttatttatgggattattgtcagtataaaacttcaaaattacacttgtagaatttttcgttctagtttgagtgttagaaactatttgggtaagcttctnt

SEQ ID NO: 96670 - DNA, 229 bp, Glycine max
agctcactaggccgccgtttttttttttttttttttttttttttttttttttttttttttttttttttttttttttcgtcataagcatgcttaaaaactacagtttccccttgacctttgggccggcctttaccacttttcgcatatctttaaaagcttggacttttcgatgcttgaatctcgccgggtgggtcttttaacaggtccatttactttaaataccaaactt

SEQ ID NO: 96671 - DNA, 459 bp, Glycine max
aagtctataaaatgtacaagtttcttgataaaacaaagatcttcacacaatacatatattcaaaacactaaaatgaaaagatgaataaacctatctgcatccgcctccccccatttcccagggcgacttcaattttctacacttacaaacatggcatccctttttcttcccttgtggcttcactctaatcttgtgataggatgctggaataaatccttggccatgtttaggaattaattcacacataatatggaattcttcaccttttgccacacattgaatggtatggcatcattgtagaaaaatctcacaattgctaaacaagtttcctctctttcattcctcttatacaagaaattgattgtggcttgggtgctcatacccttttttctaaaaatatttccagacttctcaacatcaaccactttatggctcttttttcttttttcactaatttca

SEQ ID NO: 96672 - DNA, 291 bp, Glycine max
gggggtcaaaccaatttttttcccttttttttcgctcccttttggccaacttttaaaaaggggggcaaacctttgcatagaaaaggcccatggggggggggaacgaccccggtggcaagacttcaaacccaacccccccaattagttggagaaactttaaaaggccccttgggaaaaataagggggctaacccaattcctttcaaaaggtgggcaatccccaccttttttttaaggtttatccggccatttccctttttggggcttaaaaataccttaacaaagggggggg

SEQ ID NO: 96673 - DNA, 213 bp, Glycine max
gaaaatgacatagggaacttataattcccataaactttattacggatccaacccttattattacaaaattgctgggataaatcaattagctacatttaaaagggaccaaaaatggggcccatataattagacaaaagcctttagccaaagcagcttttcatttataaaagggtttggatggcccaaaggggaaatagggaaaaaccgaaaagg

SEQ ID NO: 96674 - DNA, 319 bp, Glycine max
gagggaagggcactcataaaattttaagcattcaaattaagaggctacatttgtgaaatttccctgcctttaatgtttaatggcactacccaggcaataatgcttttaaaaatggatatttgggagattagcccatttttggatactatctgtccaactgaacattcccaaaaattaccaatgaaaagggaatttttaacaaacgatggaaaggctaaaaatgggtttggggttaaaaaggaacaaggggattaaaagttgtagctgaaaatcgagtatcatgtttggttggaggcacccttgtttggcctgcatgcca

SEQ ID NO: 96675 - DNA, 123 bp, Glycine max
acgagggattttatcctattcaaactataggagtgcctgggctctacatctcaatccagatattgacattggatgggtacaccctttagtcggagtggtcaaatggtctcatgatcatggact

SEQ ID NO: 96676 - DNA, 368 bp, Glycine max
aagcagtcaaggggatccagctcaattggtttagcagggtgcgtgagttattggaaactccttgacattggctttgatttctatggataaaaaaaaaaaacccactaagcaatgatgtcaacaaaagtttggcgagctcaaatactgccattgcccaagtgggaaaaaatcccacgattacaaaccagaagttgcccgtcttagttggctcatttgtacagaattaaacacttggattcatcaaaaacgtttcttcgaaacatgcttttatatgcctatagggtagaggcaattcaaaccccaactttgttaatctttgaattgcaattcctacattccaagaacagcagcagcactaccaatccccc

SEQ ID NO: 96677 - DNA, 351 bp, Glycine max
atgcagacccagaaacattacatgcataccactgtcagcagcaggtttctgacgaatatattccatcaggggtgtgacaataggtgtttccttgctggccccgggaaaagatacaatataagaatgaggccaatgatactgaaatttgtcttcagataaatcctcatgaccacatttagcctagaagccagtactaagatcctctaaaacacatttaacaatagaactaatgtagaaacaacatacaccaccataacattaggcaatggcagatgagcacataatgtcagagacagaaaagtgatcatggtgttggttctaatgcttatttatcaattcactttgaaataa

SEQ ID NO: 96678 - DNA, 472 bp, Glycine max
cgtacgcatgcatccacctgggagctacgtaacatagataaacctatcataacccctaagccttggtgtgagccctgctcctcttcttgtgtcctcgcttcctgtttcggttcctcttttgctttcgagtgcatccctcgtttccaccagttccggtcgatccggtggggctggccgcaccgccggttggggacgcagcgtagactggccagttggggtcgttgacggtagaagtggtgggtcgaggtcgtcgtcgtcgagaggatgtggaagagggtgaccagtcaccttgtccactggcggaagttggaccggattgaccattggtggtggtttcgttgactggtgcgggagagtttcctcctcctccggcaccgaaagcaccagtttgagcaccgtttgtccatccccaagcagagttgtaagatggtttggtagcccattcgggagagtaaccgacattgttgatatc

SEQ ID NO: 96679 - DNA, 413 bp, Glycine max
gccaaattacagaaattgcaatgggccatctgatctttgtcacccaacaaatatatcattttactcacagccgagctctctaccagctagcctgagttgtgttaaccagcataatgtggctgctgaaacacaggcatatagccagccattgccccagtcaaatatcattcagggtttcgatcaaaattgtatccaagttagtcgtgctccttcaagttatgtggcacacccaaatagcagtcagcatggaaaagagcctcaaataagaagtcaaaatggaaatgccagtggaattactacacaatgtggaacagtaagtcaagatacttgccaaccacaaccacatgaagagtcaccaagggaaactgctggaaaattttcagcatttgactcaagttggatagataatactg

SEQ ID NO: 96680 - DNA, 452 bp, Glycine max
gaatcatagaacaccacttctaaattattgacagttttactcgctttgatcttgtgtttgcatccattactctcatgggtacatatgctaggcaaatgccctaagacttgtcatcactacatgcaaaccaaattaagaaaaaactagcctagcctatgctgtttatgcatcaactacggcgattagtgattagggaacatctaacatattaagctctaaacacaagttgatgagcctcaaaataaaagctgtcaaatattactcagagctgaacacttccgttgtagcatcattcaactgtcaaccaattctgcacacttccattgaagattgcaatgtgaactataggtattggcaaagtcgccttaaactcatttaccataaacccatgttcatatcaattgagtaaagatctggagatggtatattcatatcagatggtaaaaccccat

SEQ ID NO: 96681 - DNA, 162 bp, Glycine max
aatgggaaaaaaaaaaaaattaaaccatttttgggctttgggacgggacaatgggttatttaggtcaccatcaggcatttacttaaccaaaaaggaaagggtaaatgggcccagggcactttggggcatttggaaacttcaaatgggggaaacaaaacgaat

SEQ ID NO: 96682 - DNA, 264 bp, Glycine max
atcagccatataaatttttagtacattcataacataacattaataataaaaattgagttttggggctataagaaattagccaccttagaaacacagttaaacacaacctataggttcatttgtgacagggttttcttacataaccagaataagtaaaagggcagacgtcatttattactcaaatagcatggcctcttctcattaggatggctagcaaggcaaaaaagggtgctattcatagaaggtaacaaacatagctgggga

SEQ ID NO: 96683 - DNA, 403 bp, Glycine max
gtttgagtttgagtttgagttgagtcctcagtgaatgatatttgtgactgaaaaggccaaaaacatgatcatgaggaagcacaacaacccactttggtttgtggtgttcttgtttccctcttaggctccttttggtgaacttcagagtgcaaagttggttggttggtgggttggtgtggttgcttcattttctaggtgcattttggtttctctctttttgtcatggctggtggacggagacaacagaggctcaacaagtcatgcattctcctcatagccattgcaagaatagaaaggtttgcattcaagggggtggcatccaacttggtgacttacctaactgatgttgtgaacttgagtaactcatctgcagcaaagatggttaacagttgggttggattta

SEQ ID NO: 96684 - DNA, 483 bp, Glycine max
ggaaatagattgtttgccataggtattgctttcgcaaaactgaattcatattttacatatcgtctcctaaatggtgctattagcaacctatcatatcatacattctttttctttcctaagtagtctactgctaaacaagacctaaagttgctgacaaaaagcatgacatttcatacctcattttcaaaccatgtttgtctttcttcctcttatttgtttctatatgcatttgaagttgagatattttgatcagattttcatattttatttcttcgttgtcagattttactttcctatcgctgtaactagtattttccttgagttggtttatatagattgcctttgtgcttgattgttttttacttccccttctaatttggaactaacttatttttccaatatcaatgatattatgcaaatcaagccaaataatttttttggatttgttatcatacaaattcttgttttttagaaagaatttaa

SEQ ID NO: 96685 - DNA, 463 bp, Glycine max
gaaaaacataatcagacccttgagtacccaaatacaaaattcttgaatcattcaaattccttttaattctaacattgagacagcattacctatacatagcaacatcacaggaatattgtaacaaacaataattttcttaaaaaccgtctctctctcacataataataataataataataataataataataataataataataataatatatattcagttaacaaaccaagaattcattaatgcacatactacaagcaatatttgtagaacctatcaaactatacagcaatttaaggtcagcgccagtggcaattgccatgacgcattatttcagatttcacctgtcccaagaggctgccttgaggtatctccagaggcccaagcttgataatctttctcaagctgcttaagacaaatttataacaacaagtcagtctctttagaatctataatttataaaga

SEQ ID NO: 96686 - DNA, 94 bp, Glycine max
gttttgagggagacatttgagttgatacgtaaaacccttgtaaatgcatgatgtaaagatggaaagttcaaagcgttgttttacgtatcaactc

SEQ ID NO: 96687 - DNA, 94 bp, Glycine max
gagttgatacgtaaaacaacgctttgaactttccatctttacatcatgcatttacaagggttttacgtatcaactcaaatgtctccctcaaaac

SEQ ID NO: 96688 - DNA, 484 bp, Glycine max
gagcttcgtaaaaagtaacccttattacatcataatataggtaccgtaatctccctggtctctgataaacacgtaggtgaatgggtccgggacgaacaccacaatgcccggtataatgcacaaaagaaaacactggtccaatacaatcttgttctattttaacaatttctggacttccactagtccgctagtgctatacaacgagaccttgtcgtgcttaagcctaacagaaaccctttttgagcaatcatttacagtagaaatgaaattgaggagtaaaatgaaaaaaaaaaaaaaaagtaatcagaaaaagtataactgctgtgtatgtctctgctttagtgtagatctgttaattttgagttttgactacattacgataaaagtgcaagttcagcccaagccaaagatgatgacttgagctccacgcttactgatgtgtcaattctgctctccagcatgctacataattctcgcatagatg

SEQ ID NO: 96689 - DNA, 414 bp, Glycine max
gttgtcaagagagtctaacttagttgattaaacaagatacatgaattagtctaactcagtcggttaaacaagatgcgtaagtcattgttacaaaaaactgcagataaatatgactgaggcagctacaattgtgaactcaatgcagctacaaagactaaaagtcttgatgttgtgactgcaattgggttgccaatcctagcacaacctaaccatccattgctaatccaaagcacttgaaatagaaatttacattagcaaggaaagtagtagaaatttcaataacccgcactagcagggaaacaaagactagataacattatccaaagtaaaatagacacaagaaactagtcatctatcatgcatggcagaatacatttcacatcttacaacatgacaagatatccagctgcatta

SEQ ID NO: 96690 - DNA, 300 bp, Glycine max
ggccccaacaggtaaagctttaacaggtgaacaaataccaatttcacaatgaaagacattttagcaacacctttgtcacgaacaataagcagctaaaccttgggtcatgatatgaccgacccatccgctttatggttcataaggctctataggggatgctcaacaagggaggttacagaaaccaagggggtacaaaaaataaaatagccaattggagagcgatggatcccatggtctcctattacatttaaatcgcaaatccaggccaactttgaaaaactactgggtttgattattttt

SEQ ID NO: 96691 - DNA, 445 bp, Glycine max
acaaaacagctaaacgaaaactccaaattccaaaagcctattttggcttcaacatattttccttttattttccaatttccatttttcatcatcgtcatcatcatccatattattatttatttattatcatttcgtcctagtattggtcacctgaaaaacctccccggaatcacgttcagaaaaccattatatcagtagggccaaccaccgaaacacccaaacacagccttagataaaaaaaacactgagaccccaccctgcgaacgtttgacctttgaccaacacaaaacgacgcccacaccccatggtactattgtcgtgcaatcacccaccttccctgtccttaatttcatcaccgacttatattgttttttcactccctcgtcgagttttcactatcactactactgtgcagcaacttaatgaacaaacttattcaaacgac

SEQ ID NO: 96692 - DNA, 429 bp, Glycine max
atttcgtccacatgagtgtgctattccttgtccatttttatttggtccacgtaagtgtgctattttcgttaatgaatccgaatccgatcaatcaactttcctccacgacttgtgttgtggtcacgaacgtgttttcaagatttcatattaaagttactgatccgtgagacttgtgttcatttaatgcagagtccctaggaccataagacatacaaaattgaaaccacaagtccctaatggctaaagattagccccacgtcttccctcaacttttgcccttttcacccactgccacgggcgatatataagtttttagaaaatgaaaatttaaacatctaaatgcattgagtttatctcattcgaaatatttgtaattttatgaaaaaaaaatgttttatttatcactttaaaaaattaacataatattat

SEQ ID NO: 96693 - DNA, 390 bp, Glycine max
gaaacggtgggaatatgcatgcatttagaattgttaaacacaatagcaataacttttttccaacatcttttaataattctctaaattattaaataaaattgttgactatttttatattgtcctaatatatgaaatatatatttttttttataaacttattgctaaaaagacattgaaaagaatacagtacatgatattatccgtccaataatcaacagcgaaagtataaaatattgcaaccaattaaagaaaacaacagtcaattatcaccagcgtcatctattatctgttattaggtgcatgcgatgttggttgtgtttcatacagctggattcattttgtagcaatgatagttcacttgtttataaattaaactaagaaatgattgga

SEQ ID NO: 96694 - DNA, 467 bp, Glycine max
gtatcagaagtcaaatatttaggaaatacaataaatatttatagaagtttctctattttaagaataatttatcataaataaaatcattactggtaaaattcttttcaatttaagaacaatcaaccactaaaatggtgatcaataactgatcgttcatgtagaacaaaattaatcaattatctgactaaattgttcttaaactgaaagtacttttactaagaacactcgtaatttttttcctaaacattatggtgaatatgctaaatatataccatatttacagcggtatagtgaaagaatcagtaagattctactagtttgtggtgatctccctcagcaactctgcttgtgagggaaggcctcattgtgacaatggctgactcattagccccagctttaagagcagcctttgcagcttccaggaacctcttcaccgcgtcttcggcgtacctgtttgcttctttcac

SEQ ID NO: 96695 - DNA, 298 bp, Glycine max
aaaaaacaagggggatccccacttaaggaaaaaaacccaaggccccaagggggtaaacgcccgtatgaaatccccgggggaaaaaaattacgcccccccccacaaaaaatcttaaaaggtaaaactcaaaaaaaaagccttaaaaacggttaaacccgaaaaaggggggaaagcccccccccctttagccccctccccaaaatggggggcccgcccccttttccccgagggggggcggaaatatatcccggggggccccaaaaccagccccccccgggggggggcccccccccccggg

SEQ ID NO: 96696 - DNA, 414 bp, Glycine max
ttgttgttttttttttttttttaattcgtaaattggcttattatcccactttgcagagagaactatcagaaaatacaaatcaatgtagattttgttacaaattgcatgtaactgagaaaaccctcatacagcattactgtcgccatcactatgagaaaaaaataattaaaagaaaaggtaaatttaataataataataataataataataataataataatagaacatagaacaacaatttgttacaataatatatgtacaattaattgagagaaaaaaaaaaaggcataaatagagacaacacacaaattggtatcttgtaacttcaaactctgctcaagatgggtttagatcccgtgaggtttggccctgccatcttgagagaagaaatcttgctagtgggcttaaattgct

SEQ ID NO: 96697 - DNA, 126 bp, Glycine max
aagatgcattgttattcgttattcaggattgtagtccaagcactgcatccaagcttacaggatgatgaatgctcatcttgcaaggactgttgggaatggtgatatatatcatacagactttgcggg

SEQ ID NO: 96698 - DNA, 461 bp, Glycine max
  unsure (1)..(461): unsure at all n locations
agtgacgcaagtgaaatggtattttctattgcattatctggtatttgtattatctttaaatcaagtgatccttgattgaagaacctctgtcactgggttgttttcattacagaaagagatgagcctttatgcaattcagggtctttgccatctttaagtaaacgccatcaaatttgaagtgatggcatgatacaatattgagcttgcattgatttttggtggcaaattataaatgtttctgttgaatatcgtatttttagttgaaaattccatattcactacagtttacagttgtaagactaaagaacaatgacttggttattttgcaaccaactagagaagttgaaaagcttgtaacagtcatgtgnggagtgaggtattttgtnttgtgttgctaaccatgagcatggtatatattttggttagtgagccattagctttttgatttgtcaaggcacact

SEQ ID NO: 96699 - DNA, 448 bp, Glycine max
caactgtgtactgttttccttcacatgatgatgactaacaaactaccagaatgacgtgggagaacagtcataattggattcaagaggcgaacaacaagttgcttcggtgttcctgagtctgttcagtcatttgtagcatcaaagctacccatggcgtttgccttcttcttctctctccagttctcgccccacacttttgcctctgcaaccgcgcgctctctgtccaggtcgcggttccatggagtctctctggttcttgcagtatttacagggctgtctctctgggactcctgcctttcattatcatccaatccccattttctccctgaccccccaccgatgtcaatcctgcctaactcggtcgcggcactcggatccctgctgtctctcttcctgaagtcgggtgagtttctgtgggtggaaggggagccgagccggcggtcagggc

SEQ ID NO: 96700 - DNA, 417 bp, Glycine max
aaaaacctcaatatatatattcagtctttctgcttgtctaatcaattctcccacactttttccattgaaggcaaactgaccacaaaatcattctggtcctcactttctgcataaatttccccatcgctgctattcctcaaccaacgactaatgtgctcctcaattgcttcatctatggaagataaaataaaattaaattaaaaaactaacaactatgaagaatatacttttcagactccccttgaaccaaatttcattagtagtttaaaacttgcacatacaacatagaagaggcatatgtgatgtgtcacaatatgtgaaatttttattctttttatcataacttcttcttctggtcattgcatatcaatttctctgatatgcagttgctactgcaagtagaggagattttctatg

SEQ ID NO: 96701 - DNA, 174 bp, Glycine max
acttgcggctcgagcaacattgaaaccgcgattgaacagcttccggttctcggcgaacgggagagtagctgcctagctgcaggaatcgattagtgattgtgaagatgcggagagacaacggtgatagctaagaaggttggctttgagatgattgatgcatttgctgagtcacag

SEQ ID NO: 96702 - DNA, 455 bp, Glycine max
aatgcgtgaacagttatcccacccttgtgcactcgagtatgcaaaatgcacattacagagacaggatccaaaataaaacaaatcgagatggaaaaaagttggtcataaaccattttaaaagctatatctatctctggaatgttacaaaattaagccaatttccaatcgcttaagttttacacatattgcaacctataaagcgaagaactaatcatacttataatgcaattttccatcacggaatcctatcaaactggtaaattctgcactcttaggtgcttatacttttgttctttgttgaatctttttgcactcactgccaaacctttggataaaaggagcttcaaggcatcaaccccctcttgcaaagcctcatcaattcgttgcctagctgttacattaaacttttgaagcaaaaatgctttaggatccatttgcccaggaggactcccaat

SEQ ID NO: 96703 - DNA, 302 bp, Glycine max
gttattgaccaaataatccacttttggattataccattttattaagggaaaaaagagttccaactcttatttcaaaatttttgcaatcaaaaacttggatattctgattgtctgagaccaaaactaacatgagtatacctatattctttttatacaacaacaaccctaatatacacttttttttttaaccaaaatcagtcgtgggggatttttcaaaatctagttggagttttttttttctgacttaacctggtggattctttgacgtagtttaccccgggggtcatttattttccaaaggc

SEQ ID NO: 96704 - DNA, 106 bp, Glycine max
gatcttccttgtatggtttgtgcactaggaaaatttgatggacattcatttcgtatttattatggaatattaacataattgacttaattataaaaaaaaaaaaaga

SEQ ID NO: 96705 - DNA, 91 bp, Glycine max
ataattaagtcaattatgttaatattccataataaatacgaaatgaatgtccatcaaattttcctagtgcacaaaccatacaaggaagatc

SEQ ID NO: 96706 - DNA, 541 bp, Glycine max
aaagccgtgtttgttgggtgttttggaggatctgctttgttttgctgtgttcagtggattgtgttaaaggggttttgaagatttttgttgaagttgaaaaatctgagagttttttggttgaagttctggctcccatggctgctcaattgcaaaaatctgcagatgaaatgaggaagaagcttcatggtgattcttcaacggttgaactcaataattccaattcggttccttccaagggtgcaagttccccttctgatgcaagatcatgtgtatcatccataggggatgcttctggtagtgttaaggaagtcgatgtggatcatgagtacttgtccacagatcagggcgttccttatcctgccggcggctattacggttactactatccaggttatggtggtttctatggagagtcagacaaccaagggtactatgttggtgccgatgccgtggatcttcagtaccctgtcatgcaagcagatcatggttcttatgtctatctcgtgccaggatttcagactggctacccttcatactatca

SEQ ID NO: 96707 - DNA, 179 bp, Glycine max
aaaaaaacccccactttacacattattaccacaattaaaagagggggggaaattttaaaatagacagggcattcttaacaaggggggcatggctaatttcctttattgaattaaacaaacgaacaaacgaaagaaaacccaaattccaaatcatgccgaggattccccattttcaaaaa

SEQ ID NO: 96708 - DNA, 435 bp, Glycine max
tgaactcaatctttatattagatttcagagtggacagtgagatgataataataatggtggaacacagataaatcaaattataactagagaatggcaaagcttaatggcatcatagcatgaattggtagtttacttgcgtgataaggtttttgaacattaatagtcactcttctcctccccttctctctctattgctaaataatggtaatagcttctttagctaatattaatatcacatgttcaatgaaattgcttttatttaacatttagcaccaaatagtgttttatagatatttaacagttgatctttattgtgtttattttttgcgtgatttaatgtgtgaatggatggttctgagggaagataactttttaaattacagggtgggatgtccaatgaactatacaacactattgcccgcgtaactgatggga

SEQ ID NO: 96709 - DNA, 474 bp, Glycine max
actaaaagtattaccatacttgattacggctacacaggaatccgttttgtacataccatatttatgataattattacaaaacaattatgcttatattaatgtgcagggacagaacatctataacttgtaacaatgagggaacatggtatgaaacacaatagccactggtaactatagcaaagatttgttgttccaagctaatgagaaaatgcagatttatttacgaaaatctttgctcaaaatatgcatgcagcacaaggaggcacaaatcaaccagaacattccatgcatcagcattttagatcctcttgtcactagctttcaggagcaaaatgggataagtatattttcaggcattaatatcatccacccttcacagcaggaaacaagcaattgcttttaaatccaagcaagcagagctaaagctgaatagctggaccagcatataccacctggcgcatataaagatcacta

SEQ ID NO: 96710 - DNA, 462 bp, Glycine max
  unsure (1)..(462): unsure at all n locations
gtcaacaaattaacatttaactggataatctactatgaacacgaccggattgaagcgaattacacttggtattgaacggttttgtttgggattattatataagggccctccaatcgacatgactttgttgcaatacaagcaagttggccagatgagactaacatttgctccccacatcattcatgtaatagaccctaaatgtcaaaattcaaatgatattttttgttcataaaatgaaaccctttaaaacgacttctgtttttcgtctttatctttcaagttgaattgaagcccgtgttgattacttgatttcaacctatttgctattttgagtgtaacaatcaatcttttacgtcaaattctttaaccattcccggaatctctgtttaagtatccatccaagcgtggagtacctcatggcttattcggtcatacctgcatcactttntaatttcttcaaac

SEQ ID NO: 96711 - DNA, 398 bp, Glycine max
gtcacaaaattgcaggggagctctgatttcaaattgaaattgacaatagcataatccattatagcattttatagaacttcattcatacgctaagcaactcgagccaaatcaaaatgcaaagtcactaagatggcaatgttcttccgatctattttttttactcaactaagggcttacttcagccgaactaagtttcttggcatttgaattatcaggtggtggcaaaaaaaaggtacacatatatagcaataccgttgcatagaaaacccattttcatgttgagaaacaaaataaatccagttatccagtgatctccgagcaatatttgggcagacgaaggtaggataatttcagtcaaacatgtggggaagtggtctgatagccataaatgcatccac

SEQ ID NO: 96712 - DNA, 477 bp, Glycine max
tttttttttttttttttttttttttttttttttttttttttttttttttttttttttttttttttttttttttttttttttttttttttttttttttttttttttttttttttttaaaaaggaaaaaaaaaaaaaaaatttttaaaaaaaaaaaaaaaaaaaaaaaaaaaaaacccaagaagggggaaaaaaaaaaaaaaaaaaaaaaaaaatttttttgaaagcaaaaaaaaaaaaaattccagacacggggagggggcaaaaaaaaagggggcccccctttaaaaaaaaaaaaacccaggggggggggaatattatataaaaaaaaaaacaaaaaaatataaaaaccttttgtaaaaaaaaaaaagaatttttaaaaaaaaaacccacgggggggggggggggggggggaaaaaaagattaaattcaaaaaaggggggggggggaaatattatccaacccggagggggggggggg

SEQ ID NO: 96713 - DNA, 407 bp, Glycine max
ctcaagttcagcctcaaatttaattatgaagccaaaacaatccctcaaagagcccaattctatgggaggttcggagtctcaaagtcccaactctttgaacccctcaccgaatgaccagccgatattggaaagagcgaccacaccagaggctaacccaccttcctctataaagaatcacattttattttctgcaagaaatgaggaagaaaaagcggagtgggtgtcactcatacaattcgcaataagagatccgagaaactggaacatcattcaaagtaatttcaaccgcgcacacaagggtcgtcaaggactgcaaggctagggcggttggggaggaagatcccaacggtttgattttgaatttggagaggtcgatctacaacttaatgggctctttggtcacagag

SEQ ID NO: 96714 - DNA, 190 bp, Glycine max
cgattaatcacttcatttacacatgcaaccccggtgatgccgatgcaacatcctcagggttgttcaccccacccacacggaacgcgacacaagtcgggtgatcgaattttcctggaaattcagcatagctagggggttgttttgggccgatattttgttccatataagttctgcacttggatgttatttt

SEQ ID NO: 96715 - DNA, 477 bp, Glycine max
ggttcacaatttggtttatgctgaacactttctcaccaccatcactgtgattctactgatacaaacgaaaaagcttgattctttccattcatggggcgtgggctccgaaggatgaagcagcggaaagaaacaaaatctttggattttgatggtgggtgtgaggccgatgaggccaaaaaaacgaccaatttcgccgaaaacaatgatgacgtggcagggggttcttcttcttcttctgatcgagaaggcgtgagaaagaagcttggcgaaaaaggtaaaaaggataaagaggatgtgaaagagaaggagatgttagagggcgatttgatggacaagaaagatgatgttcaagacgaaaatcgcggtagaaaaagaaagatgtttccgaaggatgacggtgagagtgaggccgatgagggcaaaacggtgatcaagtttgctgaaaagaatgatgatgtggcaggaagttcttcttct

SEQ ID NO: 96716 - DNA, 241 bp, Glycine max
gaaaagtagaaaaacaaggcaaagtttctattcaattgaaaaagggaactatataaatatatctatatatagatagatagatcgatatagctcttcttacaactcaattgaaggcagtactgtgatagatcttgacaacattctcattcaatattagccacactttcgtgttagtagggcctacacatcttgatgtcttgaactggctcacagcaactcctagtgcaagggaatgctcaag

SEQ ID NO: 96717 - DNA, 247 bp, Glycine max
gaaacatatatttgattctacataggatgaattaatcaatgtatggggatattatggaagatatcatatacatggttagaccagagaacttttatcaattccatcttaagtagcatatactaatacacatccccacaattaccttcgcacaaaaatgatagtcctctaaacactttggggggaggggaggggaaatggtaagaatggtatatttgatcacggttcatcgggccaatcagtagggtcg

SEQ ID NO: 96718 - DNA, 439 bp, Glycine max
aatatccattgaccatctatattgttttaaaatcatcaatcaaaaaaagtgaacttttgatctccacagtgacatgatcaaagtcaagtgttaaagattgcttagcagtttcaaaagtatgcttacacaagcaactttattattattcaaattccaaattctaaatgtagcaaatcatacagccttgttgggtgataaaatggttgtaacaagatcatccattgctctcacagaagaccccttttctttacctttctctggtatggcctctctcatgtgagctgcaatctcattcgccttctccttcatctcctttcccttcccttcttgctccatagctatttctataaccttcttaacctgctccccagagatcacagtttccacagttcgagtgagctcaatagccacacccatttccttcaccaacatcttcaca

SEQ ID NO: 96719 - DNA, 326 bp, Glycine max
tagtcctttttttttttttttttttttttttttttttttttttttttttttttttttttttttttttttttttttttttttttcaaattaaaggggcccctttaccccaaaatttttggggaaaaccgccccttttgaaaaatttggaaaaaacacctcaaactgggcatttttttttggccccaaaaacattggaaactttaaaaaggttccccccaagccccataaaaacttttacccctgggaccagcccaaccttagggaacaaaaatttttcctggccaagtttgtttggcccccaattcaaaattggaaaaaagtccccc

SEQ ID NO: 96720 - DNA, 332 bp, Glycine max
tctggatcagcaaaatgcatttctgttgaccttcctggtcatggaaaatcaatattacatggtgtaaagggtgctggtgaagaaccattgttgtcactggagacaattgctgatttggtgcataaattaattcatcacattgctccagaaaaagttacactagttgggtattcaatgggcgcaagaattgcattgtatatggcactgaaattttgcactaagacaaagggtgctgtattaatatctgggagtcctggtttgaaagatgaattatctagagaaatgcgtactgctaaagatgattctagagcacttgcagtcattgcacatgg

SEQ ID NO: 96721 - DNA, 444 bp, Glycine max
gcttgtctaagccatttatcttcaactgatgtaaaatatcaatcactaataagaaaatcaatgattgatattaatatatatgcataacaaatcaagcatttgtcggaatatcaacacaagtatatcaaaatgaacaccatccttagtggtacgggcattatctgaacaaagctcgatacttggataagaaataatggagataaagttccttggaaagagaggttagccctttgtcatgacacaaatcaaaagaaaatacaggaaaaaaacaagggacattctataaaagtacaaactcaatattccattcccaacccttccgattattccttccttctcccagacccttccctcccattccattttattttttaagccctaatcaattcaccagtttcacttatccttgccacgtatgcaaggttgttataaccttttataaca

SEQ ID NO: 96722 - DNA, 268 bp, Glycine max
gagttttggttgctccctttttttcggatattcatataaattgagtttggattttcatctcatcacaacttcttcaatcaacacgttgggctttaataagctcctttggattgtggatttatggtttcctatcatttcagcgctcgctagctgagatactgagatcgtgcatcgactagaatactatttactctggaatatgatggcatattaacccactcgaatgatctacatatcctctttaattatgaactcgaaatattatctt

SEQ ID NO: 96723 - DNA, 182 bp, Glycine max
ctccaacataatcttatatttaagcatccatcatgggcaatgataaaacatgtatatatagattaacatatccctaaaaatgctaaatcaaatacatatgaatcacaacaaattccattcactattgactaccacattgcttgtctctatattttccttccctcctttttggtagctccctt

SEQ ID NO: 96724 - DNA, 242 bp, Glycine max
aacattccaatttttcctctaaaggaatctttgggaaagagggaatttacccgtcttacacgtaacattaaacaaccaaagcagggggttaatagaatctttagaaacacacttaaaaaccgaatccaccaacaactttattatccattcccctggttaaggggttccgttccaaacgaccaatttttacaacccttacccaacaaattgccacgggccaattttcaaaccaggggtttgca

SEQ ID NO: 96725 - DNA, 457 bp, Glycine max
  unsure (1)..(457): unsure at all n locations
acaaggaagctaaaattgcatataaaatatgtctagtgataatgtatatattcacataaggagtaaaattatatcatcccgcttagaattagaacccttctaaggactataggctattatagcaccaatgctacaaagggtcctagaatttgattactgcaatatacaatacacattatatatatgcttttttttagtgaatgcatgtcttccatcttccttttggggaactagagatcaaagctgtgactgtggaaatggaagatgggatngatggcgttgtcttgtcatcctgtgtgacctgatttcttcagcaacacttgtctgaagtgttgaagggccacaaactatgatacccacatcaacaaggccccatttctctgacattgattcataaatttctgcaatatatgtatccagataagtaaatctaggtagtgtgaagaaacaatatatg

SEQ ID NO: 96726 - DNA, 521 bp, Glycine max
ctttacttgtaaaaaagagggacttattagggggttaaaacctttatgttcttcttaaaaagtggggtattaaagtgggaaaaagacacattattaggagcagttttgtaaaacccttacaaatagaaaatttaaccgacatcaattaatagggggcttaattgaaatgtaaaagataacacagaataaaaaaagataaaaaaaaaactaattcaataggaaaacataacaacaattaatagggggtttatttgaacaggtttaaaagattacaaaagttaaaaacaattcaaaaaatgaaatctgacacggtttttttatcccatgttgaaatcaagtaagattcagggacaaacatgatttttctgattataattcagagtttattcaaatctgattctgaactgatttattaccaaatcaaatcaaggcataaattaggaaataattgatacaaaaattaaggacaaacttgcaacacactcctatgttctctctcacattacctatcttgctattat

SEQ ID NO: 96727 - DNA, 382 bp, Glycine max
agaaaacttggaaaattagcagccacatgggagcttccaaaattctattgacaaagccaacgtcatatgcaagcatgccttaccgcatttgagacaaacaattatacaatcactttatcttcttggagggtcataaaactaacaattaacaactaacatttgccttaaaaaaatatgtcttcttggaggcttatcaagaaattttagaaacataatcatctggcctcaagacttggttctttgggagcaaatgccatggaagaaaagaaggcccgatgaaagcaattcctagacagagtaaagccagtgccactacccaccaagctttggggggtatgcctaataataggtcatcacatactggcggatcaacagaagaaga

SEQ ID NO: 96728 - DNA, 136 bp, Glycine max
gtcagatgtgtttgcgaactgattctctgcataaagtgatggaacgtttggcaagtccaggtgtgaggcggcttgtaattgtggaagctggcagcaagcgcgtagaaggcatcatagcactgagtgacatattcac

SEQ ID NO: 96729 - DNA, 232 bp, Glycine max
tttgttttttttttttttttttttttattttttatttgacattaattatttataattaaagtgcttacttcaaccaacagccttaaaaactgaaactagtggacaaaaagtggccacataatacaacacatacacaccccttcaagatgattcacatgcaaaatagcgctccactgataagtgcttacgcaacactgaaagaacttgctgtgctctacacaaaaattcttgc

SEQ ID NO: 96730 - DNA, 392 bp, Glycine max
ggggaaaggaggggggactcgttgcaattgagaacaattagtgcacttccatgcacttccactgccgttgataacgttccccgagttatttctatagcatctccactccacacttcactgccctgacaagaactgaagtctctgccaggaagaaccttagccaggtctgatgtttttgcagatattaccctcttctgttcacttagattgaagaaagcaacgtagacttctccttttcttcctgtagcaatccaagagtgcaagccaccagaattaatagtatcttcactagattctactgttgcacacaagccagaataactattcaccagggtcccattagggttcaactcccacatctgatttgaatcccaactgcagggagaaaatgt

SEQ ID NO: 96731 - DNA, 360 bp, Glycine max
ggaactgtatattattattctttaatagaccatcacgcaaaaagaatgctaaggaatgatggtacaaagcgtaccgtatcggaccaaaacgaaatcctatacactacgtatccgtatacccgcgtgcgtatcagaaacgccccccctgtacaaaactcccaaacaaccaaaaaaaaaaaacccgtcctacaaaaactcacacgtgcaatccaaacacaacgaagaacaaaagagagaagaacacaccgcacgtggctcccacgtgccgaacaccaccatcgctcgtgtcgctctcacgcgaagaggtagcaggagtcccagtgaaattagggttggaaccgtagagaacctgaatccctt

SEQ ID NO: 96732 - DNA, 391 bp, Glycine max
cccatttcaacactcaaagcacacaaaaacaaacctttttcacttcccctgcaaaacccagaattctcggacaaattctgacttctggggtgtgttcaaatttgcacctgaagcagaaagtctcattttttaaacatgagtgcaagtgacaacgcatggggtgaatctgacacaattgagatcacaggaaagatcatggtggaggccataatattcctcttcatggtggttgtctttgtccttgtgctccatctctatgcaaaatggttctggtggagcatggaggaaaacgccactccccagccccgtcaccgtcgtcggcgtcgtcggatgtttgtcttcgcccccggtcaagactcggtgatctatgagactcaccaggttgggcttg

SEQ ID NO: 96733 - DNA, 378 bp, Glycine max
atcgacgtgctcggtggccgccctttttttttttttttttttttttttttttttttttttttttttttttatcttgggtaaaaagaaagggggtcattctaccctggcactacaaagaaacatgttctttacacaatataaacacttaagagtttagaccgttggcttaatgggctccaagtccaagcacaaacattaaaattaaagaaaaaaagattggatataacaagacattacaaagcaaccatccttagccattatgtgcacaaagtattggaaaggaagtagcataacaacgactttttaagagctatccctcaggaagaagaactctcctaaaaataaaaattaatgaataccatcaatcaacaaatttct

SEQ ID NO: 96734 - DNA, 246 bp, Glycine max
aaaaatgaggctgggctaaattaaaaatggaaaaacttcaatcaaaacggctctgcccaagtttagcaccaattcaagtcccccgccaactaaaatacaggggaaaataaattgcaccaaagcaaattacccttttatccccgggttaagataaaaaaattccccctggataaaatctagatccccaaataattgcttcactcaatcggccttaccgaactaccaagccttgggctgcctggggcc

SEQ ID NO: 96735 - DNA, 110 bp, Glycine max
ggctcgcggagtgtcggcatcagaagcctgtgaggacatcaaggacaggggaggactcgagacagaggaagcagacccgtacactgcaaaagatggtgaatgcaaagtct

SEQ ID NO: 96736 - DNA, 433 bp, Glycine max
cttatataccttagcttttgaagaagttgaatgaaaagagcttttataaaagtgcgtaagttgattttagtttacgtgagaatatcatcttctcatgtaagtacttatagagaagcttatccagagaggaccttatatgcttttcttatgtgaagtataatcctttcttttattctaagaaaataataacagggtcttgcagtggaaaagggcgacatcacaagaggcactggtttcactgctacactgcctctgcctcacacaacagctattgatttcagctctgtgcctgatgtgaaaggttcatcaaagagcttcccaaagcatgaaacgcgacacctttcagaacacaagaatattgccagatgtgctaggtttagtgctgatggaagatttgttgccactggaagtgcagatacatcaataaagttat

SEQ ID NO: 96737 - DNA, 508 bp, Glycine max
atgttttctaaaattatatttaatctttttatgaggacattttttttttattgtaatgggttgactttatcttgtaaatcattgcatgttttatggtttattcaatataatgacatttaaaattaattttaaattttaaattagacaaaaaaatattcataaatttattattttaatgttatagtcatttttgtttcttggggtacttccgataaaattagaagtaatagtcactctgagtgaaacagaatggacatgggacatatatatataaacccgagagatcgggtgtataaatttttttacctttgatagagatgcagggcgaagataagagtgaggatggagatgaaaacgtgggatgagatatttatcatcatgctctattatgcatattgataattattacttataaaaacagctgaaacaattataaaaaccaaaacaattaaaatgactgaaacaaaataacaattgctgttcaaggtagtttctaatttctctatat

SEQ ID NO: 96738 - DNA, 436 bp, Glycine max
gattggcaaccttctcatttttcttacagatagtaaaaattaaattgtaatcttacatggatgaaggccaaagaatatttagtgatatctaaaaacaagctcaaatactatttgaatgagtgattcaaaatttaatagggcagtattatacaaatgctgtatatatgcctgctctagttttggtccttactgcggtccatgttttccatgcgctctttcttgagagcagtgaacttggcagcaatgtgatcatagtctggcaacttaggatgaacatgaataggatgtggacaaggacatgaatatgtccttaacatcttatatttgctgtctctgtgcctctcttggggcattgtcatggaccttgaataggtagctactgcttatactattgttgaggaaccaccagtccttggattggaaactttgggagaag

SEQ ID NO: 96739 - DNA, 283 bp, Glycine max
ttttttttttttttttttttttttttttttttttttttttttttttttttttttttccccttccctattttaattgcataaataataccaaataacccaaaagaaaaaggcaacaccaaatttttccttatttccaatctcgggagtcaggaattacaacttaactttcatttggacattaagttactaacacccaaatccttaaatctaatctgaaattggccccccaaaaagggattttcctttaaacaaaatttgccactatggtatatcctcagctttt

SEQ ID NO: 96740 - DNA, 453 bp, Glycine max
cgccctttctatcctacttgcttgtggctgatgtgattcatgtcactcatgctgcagtggcgacagtaagtcaggttgggaataatgaagctgccaccaccttgatgcaaagattttgggattcagccatggccttaaccccaaatgatgatgacgatgatactcgaagtgagggttcgctgaaagtggcttctgagggaggagaaacagggagatccattccttatctttcatcaagcattgccaatacattttccttcaaaatacaagataagacgggcagaatgcacagattcacatgtggtatgcaaactatcacatgctaccaatcagatatttatttgcactttccttctatccatgacagcatataactcatggtttcaatatacgctcgtatatagctctttcatggatacactcgaatatgattggcttgcatgctcattgata

SEQ ID NO: 96741 - DNA, 275 bp, Glycine max
cactcaaatctcattgataaactataaacactgtgatcacataagatcattaacccaataaattcaatcctggtcgattgattttatgaactcatgatgtcagaaaaaatggacagagctgcttgttactgtacacagtctccagggttgatgaggctgcaaatcctaaaattacaagtttacaagcagcaagggatgaccatcccaattttcagaaagcacaatatcaagcaggagcaaaaaaatgctttaaccttttcctcgtatatataaat

SEQ ID NO: 96742 - DNA, 343 bp, Glycine max
gactggcaattcagaagatattgcgaaataacattcaccatagcgtgatagaactatacaatttaatatgtaataatgctcataaatatgcacactctaaacatcacgtacgaagtaggaactcatcaaggaaagaaggccaacattgcacagatgagatcagctatccaagttctagcagctaggaactcatcaaagataattaacgataaatgattaaaaaaaattcctcaccaggtacgcattctgatactacatttccacaataatgaatacaaaggtacttctctcataattctgctagcacttgattcacatttgctgatttaacaagactgattga

SEQ ID NO: 96743 - DNA, 458 bp, Glycine max
ctcgagccgaaaaaatgctgccaatggttattcgaatgcaaaacgctgtgaaagaccatctgattttgtcaattttcttcgagaagcgttgaccaatgttataaacaatctgaagaagtcagagaagttgatctcaaatgagatgacacaagggaaaattggaaatatgatctacttggtgtttgacaattttcagcttgttagggagtgggataagagttcaactatattgcccttgctgtttaatctctatgatctgctaaatatgcctgaggtgggtttgatttttatcagcagtacttctccagataccttttactctaacatgggttatgtggagcctatccccatttactttcctgattacacagaagaagatattcgtcatatattattgagaaaccaagtgaaccagaagctatattcctcatttctggatgtatctctgaagtctttct

SEQ ID NO: 96744 - DNA, 414 bp, Glycine max
acttagttcttaatacgttatgatgtattcaaatccaagtaaaaatgttaccgaaagtctacaactcagcattaaaccagcaagatgtcagaaagtattgtctattcccccacattaaacatcatcaaacctggggcattcctttcttttaggacatcaacggtgttaacacaaattttgtgtcatattacaattttatatcagctaagagcatcataatttcaggatctttaccacttacaatccacaatactaaaaagcttcttggagaaatgttaaagacacggagtaataaaccaaatcctaataactccattgtccattgtaaaatactcagtccatccatcccatgaactgccatggtcacaattatccattttaaaccattggtttggcttcaagcattcatagggg

SEQ ID NO: 96745 - DNA, 260 bp, Glycine max
aggacaaaaggaaaaggccccaaattcaatttaagtggacacttttactcaaaatttttacggaaaacattcccatttgaaaaatctagggaaatcctttcaaacttggcattttttctttgcccctaaaacattgagaatttttaaaatgtttcccccaaattccatataaacttttagcacttggatcagcacaacctttaggaaccgaaatttttacttgccaaatttgctttggctccaattcaaaattggaaaaa

SEQ ID NO: 96746 - DNA, 384 bp, Glycine max
aaccactcaaacagttgcaaatgatttgaaacttcaaagtcttagagcttaaatgcagaaaagaaatgttactcccgtttaaaatattatgaaaaaaatctaataaaaaaaattatagtcaatattacaagtaataaaaaagaatgtcaaaactctacaagagatcaatagctgcaaagaaaggtcgcagaactgcattaataagtgatggggataggagaggtaactagggtctaaaacgatttgaaaaggaaggcaaagaaaagaaacgagtaccaaaatcatcatctttagttttaaatacattcattgcttgggatagtaataagggttcattcctacagcagcaggcggatccccatgttggtctttctttgcagaaac

SEQ ID NO: 96747 - DNA, 66 bp, Glycine max
aaaaaaaaaaaaaaaaaaaaaaaaaaaaagaaaaaaaaaaaaaaaaaaaaaaaaaaaaaaaaaaaa

SEQ ID NO: 96748 - DNA, 402 bp, Glycine max
ggagagagtaatagtttgaagacgagttttgttatttacttgcattttatttgtttgtattttgtgttaaaagtagggtatggagatattagaatttatagggctcttaaccctcaaaattgacttgtacaatgaagattgcccaagctttgagctcaatttaagccatatttctagttgatgtgggactaaattccagtcaattgggcatttgggactgcaattaagataactttccatcaaaagataaaaagcaaaacagaataattttgttggttgtttgcagtttacctcgtcttgcattgtgctgttgttgaattcaagtggagtttcaattaggatcttgctaatgctatttgttaaattaaggcaaactcaatctctatttaagtcatatctttt

SEQ ID NO: 96749 - DNA, 448 bp, Glycine max
aaatgaagcgcaatatattatatcaaaaccatctgtcacatacacttatcctaagacgacatttgtatttcattacaaaagtattacaagtaattgtctcactttgaactacgattaaagaaatagcttgcctccttcaacgaacatttggaaacaaaaatggcattcaaaagtccacaacctcaatgactacagcaatgcagtgttggccgaagtacttcaagtcgaaatcaaccaggagacccacctcgaaaatcattagaaaaagcagcatatatggacattcatatgttttgatacacaagccatcaaattagaaaacatcgtagaaatgttcagaagaaacaaacaaacaataatctatttggcccaaaaggatgatgaaacacgggagaaaaaaaatgaacaaaagaagcaccaaagcaagttattattcccatacaaatat

SEQ ID NO: 96750 - DNA, 225 bp, Glycine max
tcggctcgagaaaaaaggagaaaaaaaaagaaaaggaaaaaactccgaagagagaaaaaggagggttttgtgtcgattcgtcctctatgcggtacgggtgcatatcattgacaggagagagaacctgtgcgcggagagatattttaaacgcggcggaaccctaacgagtcgaacggcagcggtggcggcgaaggcagatcggagcgcgagcgaggaggatgagcg

SEQ ID NO: 96751 - DNA, 268 bp, Glycine max
agcatccaaaaaactttcccctataacccgaagaaaaaaatggtgaaaaaaaggggaccggtcgcttaacaccaaattaggccccctaaataccccaggtaaaaatcacgagcgtaattttaaccgggaataaaaaccactttggacaagggaggagcgggcaaaaaatgggcttttgggacccaacaaggggcccttttaaatattaaaccgcggaaatgccccctttaaactcacctcaagacccttaaaaaccgggggggtaaaa

SEQ ID NO: 96752 - DNA, 373 bp, Glycine max
agattctattctcctcaagcaaaacctatagctcccccacactcctccagtacttgaataaaagctaaataaatattaaagcctttccttcatcaaggtactgtttgatctttgaatttcagtcctcaaagattggaacaacaggaacatgtgtactctcacaactgttcctgtgctcccttctaagcttaacaagccttcgctttctccgcaccacaattctctttttccctactgaggaagacgggtcgggaagaagaacaaagcaatggttcctgtatgtgtaacttttcttttcttctgagtttttttttttatttattatcaacatttattgatgttgtgtttgtctcatgggtttgtttggaattga

SEQ ID NO: 96753 - DNA, 221 bp, Glycine max
gggggaacacaaattaattttattcagggtacttgcaataactattgataacccgggggaatacttggagctagactaactagcgtataaaatttccccttaaaaacataaacatgggcttagcagattcctccttcataacattttccattatggaaattatttacataccccctttactggggcccctaccatgtttagggattcacccttatatttaa

SEQ ID NO: 96754 - DNA, 431 bp, Glycine max
aaatatgaaacattcatagctgaactttatcaaatgtatcgcttcattttccattttccttcctaccttgcaggacattacaattgaagcagaaaattaaaatgttgttgctgtggatattacaaagttctatcactaaattgacaattccaaatagaataataacaatggcaactgaatccatctaaatgcaggtgcaaacaacacaaatcagattacttgccacacttactagcagattttgggccaaatcattacgttgttgttgctatatctgatggttaccagattcactaccattttgtgcaacactctgttcttgataatcatcactgcttttcgaattgttcatgttaccagtgtccccttgttccttctccctgttccattgctctattttagctctcctttctgcactactttctctgatc

SEQ ID NO: 96755 - DNA, 260 bp, Glycine max
agagtaatagatggtcgagcctaaacaatgatattagatttaaaaccggatttgccaatgcaatcagatggctcaacttgggcaccaggttgaactgaacccggcagctgcgctttaagctactttcattaactacccgtagcaaaactgccgcacaatgtatactaaggataattactattacatacaagcataactgtgcactgctgagtgataaatactttgtacatagcatgtacagggaatctgattgcctaaga

SEQ ID NO: 96756 - DNA, 420 bp, Glycine max
ggatgtgtgttggtagcactcttcaaaattgacatcactgccttaggaaattaatcagtcaaccaaaatttaagggagctctgatgattactggctgaggatgatgacattgatcaccagtgggaaaatgcagttcaagagttaccccagtcctttgcctaaaatatactagatttttaattcttaatgtgactgctattgtcgtggaattaaaccttctcatcaaaattcttaagccagtacaccaccgtatgccagaagtttgcttgcttggagactgtagcattaattgtgagtaaatggcaagtttaaattaagggggaaatgggtggtaacaacattttgtcttctctttgattcaggaggttagaaaaggaggtggctatcttcttgtagcaacagatatagctgctagggaag

SEQ ID NO: 96757 - DNA, 184 bp, Glycine max
ggtcttacagtaaatttataacacattgaatggtatggatagtctatcccataaactagatgggacgatgcatagttggccgatcattgtgcactatgtcgcttaggcgcttacttagtctaacttggaggattgtggaattcatacttagaaagaatatgtgatgactttaagagatttggct

SEQ ID NO: 96758 - DNA, 210 bp, Glycine max
aaaagggccaaaacgaaccacgccgaaaaacatgcccgacaaataccagatcatgcctaacggattccgatcatccagcgagtcccgactggggtaaccccccctcatttcctaagggtccatgggacccctcccttattccacaagggggttccccggggtccgttcgaaccccgggctgggcccctttccaaaccagttattcacccc

SEQ ID NO: 96759 - DNA, 429 bp, Glycine max
ggcaaagaattttgcatagccaagatccaatgcataattctcaatctctaactaggactatctgtagtgtttcatgaataagaaatataatgactgtgacctaaacaaactctaaacaaaagggtaattaaaagtgatgaagagaaagcaatttgtagtctctaaaatcctctgccgcagaaggatttacatttgatgaggtgctatctgtgtcccctccctattcatgtcccccgtttgttgatgttactgttcctgttgctgctgtttgttgttgctgttgctgctgctgttgttgttgctgttgctgcagctgttgttgcagttgcagctgttgttgctgctggtgaaactgttgttgctgctgaagttgatgctgaaattgctgttgctgctgaagttgatgctgctgctgcttttgggaatgaa

SEQ ID NO: 96760 - DNA, 124 bp, Glycine max
gtagagctctagcgcgctcatattaacaaggaacaaccactgatacattgcatgctaaccatcacaactacaagcaaacccaaccacattgagctagatggaccgacatgaaagctgcactact

SEQ ID NO: 96761 - DNA, 322 bp, Glycine max
ttggttatgtattgatttgatacccaacaatatgtatgtctcaatgatttaagtactttttcctcccttcaaatttgccagaatctttatgtctgttagaattttaggtttccaatagactcttatttattggatacctaaattataattttattatcaatttaaatttggaatttgtctaagtgattttcacttttattggtttgcagagatattgaaagtcctcatggaggcctttcctgaaatttcaatgactgttgatctgtcgaacactactgtgttgcatactgctgcagcacaaggacacattgaggtagtaaat

SEQ ID NO: 96762 - DNA, 457 bp, Glycine max
aagaaaacgaagatgaaatacagcagcagagtgaagagaaaacaacgatagaaagtcacgaagaggagaacaaggcaacgggaccgtcaaagaaaggtagagacaagtatgtcaggacaaaagtacgactggctagcacgcttaacaagttctcgatcgtggatatggttggaatcttgatgcttgcatcccgtgtgctcaatctaggactactgccgagtgattttgcggactgggtggccacaggagtgatcccgtatcataacgcattagccacaacttgtgctgatgtgccagaagtacgggattccgtcaagttcatttctcgattcttccagtccgtaatgaaacgtcatagggcgagtactgttcagatcgcctactctgccaaccacctcatgtatcacatggggttgcgtctgcctcgactaaatgtgtcgctagctgtgcatcgcat

SEQ ID NO: 96763 - DNA, 277 bp, Glycine max
ggacagggtcacgctggggaaacctgtttgaaattgatgcccctttacgaaacccaaaatgacatagcgctagttgggttattgccttagggtagcgtcaagttcggtttgcttgaccatatttggcgatcttcgcaactttatagagcctgcgttgggctaaagcgtttggggcttgaagcccgtccaggggggcgatgacgtgtaactcatgcctaccaatgcctaaatagcttgagcggatgtaatcgttattccaaacgaaatgcaaatgttt

SEQ ID NO: 96764 - DNA, 434 bp, Glycine max
gaaaaatcgagctcaaatatattatagtaaatgatgaagaacaccagttcttttaccctacatacaattgctcaatctatctcattctcaagctaacacccgtgtttctttaaaattatacaacagggcaatagagaataataatccaatttcttgctcagaaaacgattagacacagaaggaaacaacaaaacagaaaaattgaaattctgttcaatgatttgtttgcttgcatctcttgccttctcaacctgggactattattactttcccccaggtgataagaatttgggtgggtgtataaattttccgagttcccaaagactctggtataaaacatctctccaaacatcccaaacacaaggtggggaacccttggtgccaaaatggtggcaccagggttcagcatttgggatgatgatgcatcctcttct

SEQ ID NO: 96765 - DNA, 287 bp, Glycine max
ggggaaaaaattttccccccaaaaattcaacaaaaaggggccacccccttaaagaaacccccctaccccaaccagggaaaaacattacaatgggcaaaagtcccccctcaaaaattcaaaaaaaccggaaacccggggcttcgggtttaataaaaaaccttaaaggggcccaaaaattttttcaaattccgcgagggggaaacaaaaattgggggccccaaacccggaaaacccccaaatccccgggccaaggggaccccaaccgggaacccccccaaaccaagggg

SEQ ID NO: 96766 - DNA, 350 bp, Glycine max
aaagcatagtatttgatattatttctattccttttaccatcttccatgcatgtataataactaactgccaataatttgagttgaaaacagaatgatggaaaatttagaggggggaagggaattactcaacattcctattctatttacatgttgtaacagctaaaacgagctccgcaaattcctttacacctttagaacgaggcgatccgattcaactgaaccatgtcaccacctttgatgtgtgacccgggagaggccattatttgagaagcagggaggaaagtacatataaccaaaaaataatcaagtctcaagagtaaaccctgattcatcatcatattaacatacag

SEQ ID NO: 96767 - DNA, 321 bp, Glycine max
ctttgccaaaggtgaataaaaggtgaaagattaagcaaaaatggtaaaatgattgttgtcataaactctcattttaaggagtttgcttcatctgtacatcttatgggaacatttgaaaagtgttattgtaccacgctggtgaagggaaaaaatgtatatctaccaattttgttacatgggagagtggtgtatagttgtagacttttaggttgcatagctgtattagtagtcttagtttgctcatgtatatgctgttgttgctgatgcaatgtaaaacttactctccaggatacaaatagtaagtgttgatatcttcaatat

SEQ ID NO: 96768 - DNA, 322 bp, Glycine max
gttgtttggagcgatccgagaaaaactctgtaaacatgttggtttaccaggacctccttacaggtgatgagcttctctctgactccttccgttacaaggaaattgagaatggaatgctgtgggaagttgaaggggaagtgggttggtaaaagagcagttgatgtagacattggtgcaaacccttctgctgagggtggaggagaagatgagggagttgatgatgcagctgttaaggttgttgacattgttgacacattcagacttcaggagcaacccgcattcgataagaagcagtttgttaccttcatgagaggtttatcaa

SEQ ID NO: 96769 - DNA, 290 bp, Glycine max
gaatagcaaattggtcaactaaaggcccaattgcaatttgggccctttgaagatccccccttggctttattttattttggaaaatattattatttgggggtccccaacagatgggtgattgaagcccaacatggggaaaggggccccaagaaaggggtcatcattcatcagccatagcccctggggggaacagggcaccctttttttggggattggttggtgccttgacctccaccctttttcaaaaattggggaggggattcctttggtttggaaaacctttttggtgg

SEQ ID NO: 96770 - DNA, 310 bp, Glycine max
aaaagctgtcattttgttttttgtttagtttactggaatggatttcagtcgattcttattgtctttgaatatgactccacgtacctagttcctgttttctgtgttattatatctgaaccttcaaaatctagtttaatgtcagatacatcaagttcattagaatctcactttaacagccacagttaaaagatgatagtatattaatctcttgttgtccctacttttgtgtctgattccctgctttggtctcttcttctttatcttgcatttcgaacccttcgaaaattgattatagttcacataaatttta

SEQ ID NO: 96771 - DNA, 101 bp, Glycine max
tctgcacaaaactgggagaacgccgaaacacaacaggatggcggggaaaccccaaggggtccaccaacttaatgggaaaacaggacaggggaaaaacaacg

SEQ ID NO: 96772 - DNA, 449 bp, Glycine max
aagtaaatcatttttgtttgcaaagtagacgatgaagggctcaaatatacaaaaggatgtaaaaggtgaagggataaggaatggatatgaatccatggatgagaatgagctcctaatgattgccttcctcctctagctcaagcttttgggttctctatcttttgaacgagctctctttcttctctccgtttttcacataaaaacccttcctgagtttgagattttgcgacgacgcgttgagcgcgagtaagtggttgtggcgctaagcgcgccatgtgcgctaagcgcccctttgcctgactgcaggttctctatgctgcttcttcgcgctgaacggaaaccttaccgctaagcgacaatagctcgctaagcaagcttagcgcgttgagcgtgaaccatcagacttcaacttttctctctatcccttgctaatatatctgcaaaataaa

SEQ ID NO: 96773 - DNA, 481 bp, Glycine max
gaataaccacattataagtactttttacttgaatagttggcccaaaaattcattacaggtgaataaccacatttaagtactttttacttgaacagttggcccaacaacagatatcagacaaaaattagaaagaagtaagaaaacatttactttggagtttaatggtcatatcctaacagtgtaaaacaaacttatacatgatgagttatgatggatgatgacataaaactattttacaatgtcggtgcattacctattttctctttactttgatttgatgatgtaaacaagagaaaactgtcatcatgatatccaaaaactgcacacggtatgcagttggatgaattttccatcatgatatccacaagttgtacatgttatacaattggatcatattagtacccttcagggacatcttgtagagttccctgatctttccaccatctccaaatctgctagatgttgaagatggttgacaggg

SEQ ID NO: 96774 - DNA, 200 bp, Glycine max
caaagggtggaaaaatcaaaactaagattttaccacccccaataaacaaaccccaagggggccctttgggggccccttttttccaagggaaaaaattttagagaaaatcagggacctttcaggaaaaataaaagccttaaaaaaaagaaaaaaagaaaccccttaaattaaacggggtttaattaagcaaccccccctta

SEQ ID NO: 96775 - DNA, 421 bp, Glycine max
ctactgtactggatgctcattatcctatgcatatggacattcatagcatctaatgcagagaaggcagcctttttcagttgcacatgctcgagcgagaagagtcgttcggagagatgacccagacgtacatgaacatgaccgcatatgatgcccagagagaaaggagatttgacgcccttcttcaaccttaaaaagacccacgccaggtatttatcatgtcgtccgtcgcttactcgtcggccagcatcgcagcgcgcttctgctgcacacgctcctgccttctttcgcgcgccgacttggacttcgcacgcttggcgtccatctactccttgatgtgcctctcgcgcgccttctcagccttggccttgtggatgtgttcaacgagagcacgcttgtgcttgaaggtgttacccttggagag

SEQ ID NO: 96776 - DNA, 313 bp, Glycine max
ctttgtttagattttgtccctacttcatcagttgtcaaatcatctacaaaaaaaaatggaccaaaggcttattgtcagtacaaatactcatggtacttatggacttaaaataactatgctttgtgaatcgggatcaataactattctttataggagtgcttctgttttgactttccttcaatgagcttgggctttttctagctgttcaatggccccttccacttcaatacttccaaatttcaaatagttctcaagattctttgttttcgattattctaagtggatgaatttgtgctgaactgtaaattgtttg

SEQ ID NO: 96777 - DNA, 292 bp, Glycine max
aagggagagtagctacaaagagaaaactggtgattttgcaaagtgaggccaaaaggggacaaaaaaacgaacgattaaaaatttttctatacaaatgtcacaattcttcctttgttgcccaaaataaccatgtccagggaaaggaaagagggaagtgaaaagttgaaaagcgagagtttagtaacctcgatcaggggtcataacctttccagctttggcgcctaatcgggattctccctttatgccttcaccgaggccccaagaaatcttggggagcttgacgggatcttgg

SEQ ID NO: 96778 - DNA, 342 bp, Glycine max
gcccaaaactaatctcatcacacttctataaagaaccataattactgtcttaacaaattttcatgatttagaacacttctcaaaatgaaaccaactacagaaacaaaacttattgttcctatatacagttacaagatttggctaactcctagagggtgcatcagtattcatatgcaagaattaaactatggttatttggatctacacttaaggtggcagcattacttaacaacagagaatgtgacatgagcattaacaactagatcgcttccgattgcctaaagtgagagagaccttacctcatctgttatccaaagcccttactcgtacttgtgccaccta

SEQ ID NO: 96779 - DNA, 302 bp, Glycine max
aggatgaaaggtgttagagattgggtcttctctcaaatactatccaaatcgctggtctcgccttcaccattatctggcagtaatagtctctatgctggagagcatcggaatgaaaattttaatgagccagggctcagatcactcagctaattcagtatcatcacccatcccttccaactcatcaaactctttatatggtgatcagagtaatcagcatagttcctccttgcagctagtttcagatacagaaatctatcagtatcaacataacactaatggaagacggaaggatactttggcca

SEQ ID NO: 96780 - DNA, 389 bp, Glycine max
atcactaacatatacccagagcttcattaacattttccacattgcaaaaattcctgttgaacaacaatcctctatcattcaaacttgctaatacttgaacaaatcacaggaaaaaaaaatcctgacattttctgtgctttactgtacagttatgacttcattttactagaaatgaatatcaattctctcatactgattattaatccataatctacagatagaaataagttcaagatgccagccagccttacctaaaagactttcaaaaactgcatctgaagtatcacggaaaagaaaattccagctagcctcttcaaaaaataaaatccaattcgtactttctgtcttccttttacaggggaaaaaggtccatatctacgtagggcatg

SEQ ID NO: 96781 - DNA, 399 bp, Glycine max
atggcatatagaaaaggaaaaaaaaaaagtattactagggacacaaaacatattctcttctatctcatgatcatgatgcaaaagcattagcatcaagcaccatgcaccccatggaaagtgtcttctctctctctgtagccgccagaactgattatatccaatttctggtgcagtctttgggctgcagttacattggtctatgggcatatgattccatttcaccaaatcgtttgagcttcttggatggtatctacaatgtaaggaacaaccaagcaagctctagtttggggagtgtgcaggcacaacagcttttcagtcagttccggactttgacatttgatgtcaatgatgaccgtgttcctggactagcttttaggaatcaacgaccctacctagagc

SEQ ID NO: 96782 - DNA, 463 bp, Glycine max
aataaaaccaatttaattatgagaccaaaatatcacaacaagtggtggagagttgaattaaatagatttgatggacttaaactaacatcaacgatgcactaccgtcgcagaataaatcaaagagtaatggtcaaagaaagttattggtccatttggtactgtgccaagtcagcaactactcttcttactgcttcctcgaaggcagactcgtcccattcacttccctgaataatcctcaatctgaaggttagttgatgaagtgcattgttcccttctgcaatgtgagtgtttgcgtccatggaaaccaaactcacgtggtgagccagttttaagaatttcaataaccggattaataaatcagtttgagaaacttgtcctctcacattcacttgcaactccaccattctctcttctgatgtgcttgattcgggtacatgtgaaattctgacacttaatctttcat

SEQ ID NO: 96783 - DNA, 393 bp, Glycine max
caaaaaaaaaataatccattcttccatttttaaattgatttaatttttcgttgaatcttaaattttgatttttcactataataataaataataaataaaaagattaagtaaatcatgatatataagataataatcatgatatatgatgcaatataaattcagcaaaaaaaaatgatgatgtataatcttaatattttcttttttgagtttgaattaaaagttcatactctatcaaaacttattaaaacaaaataataggcagatcattggactgttatattttgtcaatgtttattatttcaaattcatacaatggctttttgtttgccatcttttgttaatatatatatatttttttttgtgaaataatagtatttgtttaatatatatgat

SEQ ID NO: 96784 - DNA, 248 bp, Glycine max
caaatccttatcaataaaaccatgaggccaatttaaaatttttttagtccccacccaaaagtttttcaaaggaaacttccgggaatgtaggccgaccaaaatcataatttaatgaaattctaccccatcgttatttaaatttgaggggaattttgatgtatccgtcgcacacgttttacctttaaaatgaaattcccggggcaaggtttcaagtaccttaggacaggacgtaaaaaaaaacttgataa

SEQ ID NO: 96785 - DNA, 410 bp, Glycine max
aatgtaactaacagcatgttcattatcctatgatgtcttatgttaacattaacaaccggttgaactacacaaagataaaccagtcaaacgagtgttggcacatcaagagtttgtttctcaccatactccataatcttctgaagtgaccatcctaaccactataaaactttacaaaatgcaaaaatgagaaaagaacgaaggattgattgactgacttcaacagaaatctcaaataccaatcattccccccccccccatagtatcattaacaccacaaacacaggaacaaagccaagaatgatttgccgcttggcatatatattgccaagagtgtttacagataaccaaggtattcaccaaatatgtcacttggatacaaaccaacctcggcctctaaccccccatcaatt

SEQ ID NO: 96786 - DNA, 364 bp, Glycine max
ccatctggtgggagggcatacaccaattttcgggggtcgaaaaggattttgttgaaggtctcattgatctgattatatatttggattgaatttcaagggaatatggcatctttttctgtacacgatgccaattcagaacaaaatggcaaccgttccttctcctttgcaggaaactcttccagaacattcattgacagagatggtttcacatatgaacgagcacctgctgtgtggaacacgttgatgattgaagagctaaaatgacaaactcgtgttccttcacaccctgcctgtacattaacatggtggagtaccatatttcatgcgttaaggctgtggcaagctctctgtacatttacaaaat

SEQ ID NO: 96787 - DNA, 393 bp, Glycine max
gggtgaaagcactttttttataggtaacaaatcacactgatcattattatacatttatacaagacaaatccctttattataagggaaaatgccttaatagccacatttcttcgtaatatacaactttagaaaattgattctagacaagttgatgatccctttcttctttagaaaatcttcaatccccatttatatgcctgtgtgataggagaaagagtgatcctacacaccaaaaaagaaaaacacaaaactcagagcacattctcagtagagttttggatttagcggtgggtagattcgccataaatgtaatcaaggacagcgatgactccgaaaacaaaagcttgatccatcccaggattcaccaccacatggtacaaatccttgctttca

SEQ ID NO: 96788 - DNA, 366 bp, Glycine max
catcaaagccttcatgggggtggagggatttatctatgctgggttttccagcaatattcaggggaaggtgatgagtgcttaagggatctgttcaaagcctacatcacgtgaatatatgccagtatcactatctcctaaaaggaaaaaacttaatctaaacaactgaacacgggctaacagaacataatagcagtttcacagagacaaaagctagtagtatgtaaacatatttcataagctcttaggtctgtttcatctaatgcttggtatgtttcaggttcatagacaagtttactcatggtaaaactacccaaattttatcccaacaattacatcacagaccttaagctgggattaatatctgaa

SEQ ID NO: 96789 - DNA, 223 bp, Glycine max
acatggaaactttttacccctttctcatgaaagcctttttttataggcattaattaaaaaaataatgggtagaatttgggattaaaaacaagggcctgtttaacaaactttgaaattaattccaaaaatttttatattttaatcaatgaccataagggccctttatttcctaaaatacactacactttccttactttattgaagctaaagggttttttaaaaa

SEQ ID NO: 96790 - DNA, 423 bp, Glycine max
ctcaccccttatccatagctctaagcaattcccatacagcttcccaagctctttcatcatctacaactcttcccaatctcccagtagctcagctgcaactgcatatcaccacaatggccgcagagacagaaaacacgcttcagaaggtcgactctctgactgaccaccaagatggcgccgctaagaagggccaccgcagagtcagctccatggctgctgatgtctaccggatcgaggatctagaaaaggaaggcaagaagattgagatcgcaatcgaaacccagaagctgaattggaagctgaacaagtcaccatccactgtcgaagacccatcagtcttgaaaatgccactcaccgagcccaagctcaagtccatcgccctgcacttcccgctaggcctagcatgtcaccgcacggaacatg

SEQ ID NO: 96791 - DNA, 469 bp, Glycine max
cacgatagtcaggtcttctcattatgtcaggtgcttttcagcaacccgaaagagtgcccgagagcatacatgagcagatactgcctttccagcgagcatcccgcgaacggttccacgacgcatatccaccactcgatagccacagcaagtacaccgtctgccaatgcaggcatacagtataccagccacgccatcacagcagacgcgctcgctcttcccatatcgatatgaagattgaccagcacccgagtgcatatccataccccgcacataccgttgccgaagcacagaagtatgactgaggctgtgtgtagaagtcgaagtcagggaagggggcgagtcgttcatttaggaaccctcctctccctcggccttgttcttcttcttcttcttgcttgagccgaaatcgttctttaccgtcgggacggccgactggtggacgataagcgggtgtagcactcttctgggt

SEQ ID NO: 96792 - DNA, 444 bp, Glycine max
gacaagaaataaattttagcacaattgtatgtagaatattgtttagacatactatgcaatattccagccaacagtaattgttaatcctatattatttacaattgctaacatttttcttagaagggccaagttttgaccaaggtgtaactctcaactaactgaacaagtcgtcttggctggttgtatcaccatcgtcatcatcttcgttagaactgtcactattggcattgaatgtcaatatcaactgtagaaggtctcgatctgtggatgagttttctccattgctttctgtcctgacccttcgtcttggaagtgaaatcagttgcatcaggtcttcaggataagctatccggtacatccagcccttagccttcggtttctgctcaatatttttgggcaaagtagctttctcgagggcctttggagtccatatcttgatgtcat

SEQ ID NO: 96793 - DNA, 273 bp, Glycine max
ggcccaaaaggaaggggccctaagtacaactttattcaacttcagctgatttgagggtaataatgcgcttcatttgaaaaatatgaacaccttccctaatgaccgatgcctaagtctggaacttacccttgaaagaccattcgaatttaaaagaacaaaagccctacatttatccgagtggggggtgggaaaaagaatttgaagaaatcccaaaggcctaagcctgaagaaattttaaaaggggggataatccactggattgcgtttttccca

SEQ ID NO: 96794 - DNA, 438 bp, Glycine max
gacgtcgcatgcacgctagctcggggttatccacaggatcaagaccacaatacggtagaggattgttgatattagtaaggtccaactaacacttattttacacgctgatacaagtgaacaagcaaacatctttaatatatatagcttgcctgtattatgatatcatgaggtacaatatattataagttgatactcgatagaaatgatagtttcatcattttcatttgaaagatgcacctacatataaaagagacaatggcatttgagacataattcaatatatatgccaattagtgaattctgaggtacatgataatagcaattatcctgtggatatatatacttgaacctatggatgtagaaacataaatgtgtacatgttattattgtattctgagttcagatgtgaaatatatactaatggtatttgtcacaatt

SEQ ID NO: 96795 - DNA, 227 bp, Glycine max
gcccaccttggaatactttaaaagatttttttcaaacctacctccacatgcattttttggtaaaaaggctaatatctaaaacatgggaaaaattcaaaggctaaaacacccagttttaaacccgggaaaaagaacaactcccttacaaaagggacccatttgcccatacaaaccctaaaaaacactggttcctaagagtaaacctttgaaaaaagggtttgattaaa

SEQ ID NO: 96796 - DNA, 249 bp, Glycine max
cacaacaatttcatattgatgggcattacaaatagagtgataaatagatcaaaatatagtttaatgttttttcttgtctagtgacattgtggcaatgaatatgttattctccccttgattttcgttctccaaatcggctgcatcaaatcaggaaggtcttttcattgcagctttacaaactttagttccaggaagctttcaggcattgcaacaattctcaacatataatcactattgctcagttttgac

SEQ ID NO: 96797 - DNA, 157 bp, Glycine max
gaaattgaaaactatatattaagattgagattgttgaaatgataaattggaaacagagcctgagaaagtttatactcagtttaagaaatatagtgaagcagagagaaatgaataggtgcatcttttaacccttgaattgggattctctaacactact

SEQ ID NO: 96798 - DNA, 339 bp, Glycine max
ccgaggtcatggccgaccccgaggctcgaggcgtcgtcaaccgtgccatcaagaccttgcgagaggtctccaaggtctacgagggtgacggtaccaacgtgcctcctctcaagatcgccgagggtaaccacctcgtcaccaacttgatcgccgagttcaaaaaggccgacgccaaggagatcccggacaacgagaaccccgcgctcgtctacgccggtgtcctcgctgccggactcgtcaacgcccacaactatgaccagcagacttgggagtccaccttgtgcccttacctctccttggccgttcccggatacgacaacggtcccgtcgtccgagagc

SEQ ID NO: 96799 - DNA, 304 bp, Glycine max
gttattcaaagcatcagttatttgatttttcaatccagtccaaagacacacaaacaccttagaaaacacacaaaacatcaacaactatgggtaactgttgcggacctagtcagcctgaacgggagctatccaccaatcctccccaatatgcagggtacctctgatgatcctgaattaaccaaagtcgccacaaaaattcaagctaactaccgtggacatcaagttcgtaagaacatttccgctggccctgacgctctagacatcgctgggcagcaagttgaccatgagggcaatagtcagcatg

SEQ ID NO: 96800 - DNA, 383 bp, Glycine max
ctcttttgttgtaactcaagagttgctgttttttttcctcgtgacttctgatttgatttccaccttcactcaagttctctttcttctttctttcccttttatttttttattttgcctatgtttctttaaattttaatttgtagttttataccatatgtgtgatttttcttatatttttgtacaagatttgttgattcaattatctgagagttccaagtactttgttcattgtgaagcaggttttaattgggaatctgatataggctttggaggttcttccacttccaaggatgctttcaattatacactacagaggatttttcagcgattgagtgagtggatatgaacatggaaggatcttatgattcatcatgcaatggaga

SEQ ID NO: 96801 - DNA, 443 bp, Glycine max
atattctgggccatgaatgaaaagaataaagcttttgagttccgaaacccaataatgctacggctataccatctttacaacataaattaccagcagcttcaattatttctgactagcatcaaacgaaaaattgtaacaagggcggtaagactttaacgttattcagtccttgcagatcagtttattaaaaattgagtaaatcaagtttgatgggagtttctgaccagaatctcaattttcatacaatgaaaacaggggttaatcagttgaatcaagactatttaatgaaacaaagaatgatccacaataatagaagaaagaaatagtaaaattgaaacagaggtacaaaacacattatgggataaaaaaaaaggatacaattagtaaaagtattggaggacaaaagggcaactgacatgattaaaaaaaaaaaaagagggggg

SEQ ID NO: 96802 - DNA, 324 bp, Glycine max
aagaaacctaaaaattaatattaggccccctgattaattgggccaaaacatgaaaaaatttacaggggggactcaggggactgcaaaaaaaacaaaatcctacattcacttgcatatgcaagctgatgtccaacaaaaaatgggcatcactaacacatgcaagtttgtaaaaagaaaaaatcaaggttaaaccttccagagggcccaaatttaaagacttttttttgcagtcccaaaacgggaatcactctttttttttccaaagggctttaaggggtagacatcccaacccccatccctccaatgggggatataaacgggggg

SEQ ID NO: 96803 - DNA, 218 bp, Glycine max
accaacaaaaaaaacccaaacattaaaaaaggcaaagggaaacctaaccgggaaaatctaaaatggggaaaagactcccttaatcaaaacgaacacttaaacaaggcgcggtttggtttcaaaggccccaaaaaactaaaagcccctttgccccaggccaaagggaattggccaaaacccccaaacagggcctttatacaaaaacccaactttcactt

SEQ ID NO: 96804 - DNA, 280 bp, Glycine max
agtcagttcaaattcattacaaaaccaaagatgaaaaaaaaaaaagggccctttttgtaaaaaaaaaaaaaaacttggggggttttacctcagttttcaacttttgggatgggagttttagcccccagtcttttaaaattaaatctgaatctgaattttatgattgcccagttttattttggttgatacaagccggggccttaaactccgggcatttgcatgttgttggaccctcaatggggatcaccctttcaggggatggctccattggaaacaaagg

SEQ ID NO: 96805 - DNA, 116 bp, Glycine max
gcaacctcaactgttacgcttagtactccacgaacaatattcagtctgtaatgggtatgagagtgaatacactctttgactcttctctgggactgtccatagctgcagacacacca

SEQ ID NO: 96806 - DNA, 250 bp, Glycine max
gaatcaaatcaaatatagtctgttaatatgatcattcccatcagacataacataatacagtgcctaaagtaaagtcaggcagactcaagcctaactgcttatgcttcaaaattcaaattatatacttgttggctcttgctgctatataacaacctagctaaaatgtctacctcaatattactctgctcatgaagatgtaatttaccctgatcacatataatagtacaagcaaaagaaacaagctggatac

SEQ ID NO: 96807 - DNA, 221 bp, Glycine max
aatgtgaggagcctgttgatatatgaaaatgcaatggaaggcagaagcgttttgccaagcaacataggattcaaatttacaagatattcattattgctaatcttaaaaaacggctatgacattcaaatttcactaccaaaattctttgaatatatgacattcaatacttaaataaaaaaacgaatgaatcgcattaaataaattaaatggaatgggggggg

SEQ ID NO: 96808 - DNA, 387 bp, Glycine max
acaacaatgaatttatgtacaaaaaaaaaaaagatggtttttaacacgagacaactggcccaggtgacacagggttaaaatcgtctgatggaaccgcttccattatctccactttgaaagtcacagtctttgtagcgatcatagagtaggagttgtcccaaacaagctcgtattttccttcaggaaccatgatatgactctcgtgccatttgtttccctgatatttgaaatatccacaaacgtcacgctttcccttcgtagtaatcttggccacagaaaagccaacatctgaagaaactgttgggaactgccaatacaaaatggtgtcctctttggtctctatttcaacaacatgctgttgcccagctcgaatacaaacagcctcct

SEQ ID NO: 96809 - DNA, 484 bp, Glycine max
ggctttttgtgagtcatcgcctgaaatatcaacttcttctgagactgagagtgacatgtcattttcaaggtacactcccttaatgcctcatagacatctttttggagatatacaaagagagcgcttctttcatagtgaccatatttcctattctgggcatggagattcattcagctcttccaactttgttgacctggattggctgtcttcaggaaattcatgtgaagaagagccatttgagaggtaatgctgcattgcattccagggaagcaattatacagatacctagagagattagttggttgcaagaatattttatagggagagttatggaagcaacaggacagggtagggaagggtaaatgaggaatatatttaagaattacaaatttgggttgtgaatatcagtgtctggggtctgtgatgtacacaacaacatctcttactgtctccaaagcggctttgcttcagttccatcatcatg

SEQ ID NO: 96810 - DNA, 235 bp, Glycine max
ggaaaaagagattaatacaaacttttgaattaccaccaatacactcgcatgctacactacagccaaaataagacttactttggtgtagaccttattctgaataaattcttgtaattacaaattaaactcaacaattctgaacataatttattgaaaaagttcaaattgatttagctgcaaggttaatacacaggaggtgggggtgagttatagaggtagggtggaggaggcgaat

SEQ ID NO: 96811 - DNA, 374 bp, Glycine max
gtgggggcaaagacaatctacaatggattagaaacaacaaatttgtggaagaaaatgtattttgtacgagattttatacacaaagtttggttgcaaaacaggcaaaagcttgacattaagatgcacatctcaatttatccgtggagtgcaatctctcaagtaaaagctgtgtgtgtttcccagttacttcaccttttcaaggttagtccattcattgacaatgacaaagggaggcaaactggggtttttgtcacaccatgtcgccatatggctttaaattcaactagtcgtggttattttggtgccattcattgagttgtatgctttgcagtgtgggatgtgctactcaacaatcaatggcaaagaacaaacca

SEQ ID NO: 96812 - DNA, 197 bp, Glycine max
actaacaacatgtaaattttattttacagaacaaaaaaagtgttctacataaattttgtgtttccactggtctaaatgatgtaaatttagttagcattgttatttattaaagtttgaatgattagctttaataaaagaaattcactaacatgtattacaacactcaagtctaatatgtaaatttaagaaaaaccgtt

SEQ ID NO: 96813 - DNA, 317 bp, Glycine max
actgaatacacattctaaattaaaaagccgtggtagttgtacaccgattgcggcaatgaaatcaagcaagcatgccacgtgacatataaattatcttgtatgtcaacaccatcaaattaaggcacatctttgtataccgaatccacgaccaacgaacctgtattagccgccaatccatcagggagaagaggaacgtgaatttgtgtgcttagacaaagatgcagcgcaaacaataggctttggaactggaattttaagacaattttgactaccaccagggattatagagcactctggcagtggtctttgcatattcc

SEQ ID NO: 96814 - DNA, 421 bp, Glycine max
aagtatatcaaaggttcctcgttcctccttttctttatcttccttaggggatgtgtatggtttgaatgtgaatgggtagggttacctcggcaaagtaactgcaaaaagaaaactttaaatgtactttcaaacaaagaaagtggttcaattctattcaatactaaaaagtaaaaactaaaactaaaaacccatcccacaaaagcacaaacaaattgagtccaacaagtcataagtctgaagaaatcatcatcgatcagtagtacgtgactctttcttgtgtcttcttgtcatcaaacaaaaagttgttgcaactgttattagtgctaatgagctgtttaatttccttaagaccataatccaatggattttgttcccacaataatccattttgtttgcctgtccacccactaacactaccacc

SEQ ID NO: 96815 - DNA, 388 bp, Glycine max
ttcaactcaaaaatttattctcctctagaatttgcatgttgaaactcattcaatagtagcttgatttctcaggatcctagagattccttgttggaatttagtgagtaacaaatcccttccctttttggtcccttggctcatttttcctttttgcatgacctctttgatgggtggtgttagaatcttgttgtaagactattttgatgttggcttctattagctagtcttagaacacaaactgaggaggtccactcagaattcaccaagtgcatcattgttcccatcttctacaagggcttagaaccctaggacattgatttgggtaaggaaagcttttactatataattgattgttcgtgttgagttttgatgttgtttttgtgatgct

SEQ ID NO: 96816 - DNA, 353 bp, Glycine max
ctaatgagttgcatttctttagggactttagttgggtaacaaagtaatatcaagattggaattatttaacgaaacctaacatatagtaaaaaaaattcttgctgttcatttgaagtacaaatgtgattcatgtggctgagtaagggcttgtgtgggccgaaaactacgtcgtaacaaattaaaatgggcccgtcattgctttatttcgtggattggttcattgaacgtttggataccctacatctttagctgaaaatgaggaccaaaattttcaccttcttgttcttcttcttcttcccttttctaaaggattaatctaaaacccccacgagttaagcccaaagaattcccca

SEQ ID NO: 96817 - DNA, 444 bp, Glycine max
ggatgtccatgtaaagtgcatgtcttgatcatttcataatgttacacgttttattgtccgagtacagcttgaattcaatactacttcagcaagcaaataacattactagaaattccacattgctggaaactcatttgaagatattctcagactcagacatcactcgaattttataatatccctatgcacgaagggaatcagtgcacatcaaaatattaatcgatatgcacatagaaatacaacctttttttttgtctataggttggggggttggttgagaagggacatacactattgctacaaaataaataattaaaagcgtactccatgttacacagcactatttatttattttttttaaaaaaacatcatttttatataattatgaggtcatctaatcctggcacaacttcccaattatgctatatatggtacatatgagca

SEQ ID NO: 96818 - DNA, 496 bp, Glycine max
agaagaaaaattataaagtaatgacatgtcccggagaaacgaaattcaccacaacataatctaaatgaaaaaatattatgatatacttcatgctagtggtgtgtaacttccttcaattatttaaggcactattctacaatgagtacaacatagttacatactgatactagtttagtcactactcactagaagttcaattttggcgaacacccctaaggtatctaaccttttaacttggctaacagctgcgtaaatacaagaaatttgtacaactaaagcattatatacatgtgcctccaggctccaatagctcacccattcccttccaagggctcaattgctgttccagcagtatccttcataataatagcatccagtttccttttttttttttttttactaaatgaaagaaacctttgactgcaataaaatagtgaggtccgcaagaacggaagcaaactatctgaacttggggggtcatgaattgtcctgaatg

SEQ ID NO: 96819 - DNA, 398 bp, Glycine max
agaatcaacaactatattttcttttattctgaatattcaaatttatattccctcaacttctggcttgactatgatattccgcttaatataatcatcctataactatacaagtggatcacatgataaatgatgctcagattcactcattttcaactaacaatgaatgctgaaagcttctaatgctagaatggattaagtatcactatcagataataggccaagtgattaagaactggcattaggcgtagtggatttactttcccaactatcagtaacggatattggtgaagaaggtggcttcctattcttcaacaatccagcttcatccaatgatgaggttgttacattatgtgaaaccccagaaccagaaccatgaactgcttcttctagatgcttta

SEQ ID NO: 96820 - DNA, 525 bp, Glycine max
ctaccctaaaatggagggaaacagtggcagaggagtaaggggaacgaagaagatcgcaattctgccatgggaattgataattgaaatcttgttgaggttgccggtgaaatctcttgttcgtttcaaatgcgtatgcaagtcatggctatgtctcctatctgatccacactttgcaacatcgcattttgaacaaccctccacacgcacgcacagactcatcttcatcgtagcaccttcttctcctcaaatccgatccattgatttcaacgcatccctctacgatgattcagcttgggctgcattaaacctcaactttctgcgtcccaatacgtatcacaatgttcagatcttaggttcctgcagaggctttctgcttctgaacggctgtcaaagtctctgggcgtggaatccatccacaggggtctacaaaaaactatcttcctcgcctattgggtccaatttgatgcgatccgtgttttatacgtttctctatggttttggatatgactcttcactgatgattac

SEQ ID NO: 96821 - DNA, 388 bp, Glycine max
agaacataatggtatagcagtttcatcattccacgtaatactgtgcatgctttaaacactacagagggattcataaatcacaatacaaggtgagtataaagaaaacagtagtaaaagtagcagaaaatatttgacaacctaatcgttcttgttgctattgttagtcgtcatctccagctagctcggtgtcacatggggagtgaaagtagagactctatatacacagccacttgggatggatatggatgattggaataggatctatgctcttgcacctgtcccttgtcattacattttgccaatccagttccaccatatgtcccaacaatatcaccaccttttgtagagcataggggaaacaaaagaatgttttcagaagacacaacaa

SEQ ID NO: 96822 - DNA, 125 bp, Glycine max
gacctctatatgatccttagaacacggccgctgtattggtaactttttgaatttgaggttcacatttactttgatgctaatgaatagaatgtactattatacattggctttacatgagagaaata

SEQ ID NO: 96823 - DNA, 331 bp, Glycine max
aagccgaataacgcattgcaccactcctgtattgtaattataggtacacatttcagctaaactacacgaaatccctccaaaccagaaatcatattaacatgaatcagttaaagaaactttaacactaatatgccacaactataaatacaacatgaatactacaacaggtagaatgatcttcaaaaaaggatctgtgatggcattagacttctagccggaaatctaatcagctattgtataaaagttcgctccatctgtttcactatctaaacgtatacccgattatacaaatcggtccaatgaacacctcctataattaccatgaaaaggg

SEQ ID NO: 96824 - DNA, 242 bp, Glycine max
gggttggggaaaaaaaaagacgctttatatttattctttgaaaacgcaaatgttaaaaacaacctagggttttgaggggggaaatccttaattaccacttttaagctcatttttgaaacaaaatcctaattaaccgcgtttttgcttaagggcaaacaaaactaggtggcccccccacacacaattttccccagagatttggggccccacatacatgaatctattttgaaccagggggggtt

SEQ ID NO: 96825 - DNA, 351 bp, Glycine max
aaagaaaaggggaaaatatactgggatatacctttattactattatagattttacaacttcaaaatagaattggaattgatgctagaatcctaattttacaccataaatctttgcacaactcagtcctataataaaaatatccaattctaaatcaattccaattttaaggaaaataaaattttgaactattaagaactactgtaaagcaaagctgcatggagttcaaaaaagcccaaacaagttggtgcgatcctagagaaccgttaagcagattctgaatcccgatcaggtacgtgttcctccatttatgagtccgagatagtaaaatttattggcgccccattttgaaa

SEQ ID NO: 96826 - DNA, 375 bp, Glycine max
actacgagtatattttagtttaactccattggttgttataaaatcgcttacgtgtgtaccatatatatatgaaaacttttgatcaagaggctgcatattatatgggagggtaatatgaagagctggtattgaacagcatacaacattcattcatatatacccgcaatcaaactaattgaaaggaaacctaagaaacaaattgcaatgacagaacctgaattgatcgatcgaattccttgaaattaaaccgagatttcaatctctcctaagaaaattaaagtattaacatctggaacagaattattatttatttccatgaaaagataactatgtatgtatgaaaccaaaaaagttagaagcattttgaattggatg

SEQ ID NO: 96827 - DNA, 385 bp, Glycine max
ataaaaaatagtcatccgcaatgtcctaacattaatgaaattatatcggctgaaattctctctatatacaaatagccgtagctatgcgttctgaaaccaaaaagacagtacaaaagcatgtttttaacaaagaagtaaaaagaaaaaacttatacttttttgctgggcacatgaacagttggacgtctcctttgtataaggactcactggacgattacatacatgatggaacaagataatgtacatgtttagaactagcaactcagcatatttatttgtccgtgaatctcctaaaaagaagatacggtgaattcacattatgcccacccggcaaaggctcagcttttggaacaggtttgacgtgttccttgtttgaagatggaaa

SEQ ID NO: 96828 - DNA, 289 bp, Glycine max
acttaacagtatcaatattgatatatataagatcttgtaaagacacatatgctagccacgttactgggtcctttattacacttacaagttcaaattcacacaaaacaactaagcatatttttgcagaaatggcttgggaagcgaaattgagaaaattatttatccaaggtccaagccagagatgggatcactatttaattatgttccctgttaactttgttgttggatccgaattgcttctgaagggagacgactatgtttttgcccacttgaaaagctttggcgagaa

SEQ ID NO: 96829 - DNA, 414 bp, Glycine max
gaagaattgaagaacgtaatgtcaattattttgcctacataatgtttttcttatataataaataatttaatgtcttggaacatggaagttactgctacgtgttagtatggcagtttcttatgtttgaataattctataactgctttttcttaggatgagcaatttaaagcagttatttctgtaagtattggaaaaaacgactgtaccgcaggctctataaatgtaagaactaaacacccagttcatcaaaatatcaactaaacagattcttagaaactctggttttttactttcaatttcttacattttcctttttttattagtagtataaaatattaaccgcgtctattagtccattatttcattgcagtttattaaaatttgtatttagggcttaactccaccccacaaaac

SEQ ID NO: 96830 - DNA, 313 bp, Glycine max
aagaaataaaagcatattgcgatctatataaaaataatcatggcatatacaaatcatcatatataaaattaaaccatgtctatcatgtatttgaactatcaaaccttagcgcattctaggtttcataatctatttataaacccacccttggatctaatgagtttggtgcttgaaaacaagaagacctatgagccaagtggttctgcatcgatctcatatatgaatataaatatatatacagcagcacaccatgttaggatctctccaatgccaaataaaaccaactggccatctatttaccgggggtgggtgg

SEQ ID NO: 96831 - DNA, 486 bp, Glycine max
gagccaaatgatatttttattaaactaacaatacaatccaaaataataacagcaaaaattatagcatcaaaactgactttagaaaaaaaaacaagaatggacagacatccgattgttaaaaacataacttgatttaggatgtaagaataatactcattctcagagaaacagctcaacaaaacatttgacaattcctgcaggtctcagtttcttccatggtttcttacataggagttgcgtgctaacaatttctggctggaagtgaaccgatcacccttgcacatggatgctgctgattcagattcaagagtttgcacaggaagatgtccaagagactggaaagaatcaagggcatctaaagtcagctgccagccacaaagagctacactacccacaccagagctggagcagggattatcacaaccagcagcagcaacatccccattcacccaaggacagtagtcattatgtaatttgattggatca

SEQ ID NO: 96832 - DNA, 289 bp, Glycine max
ataataaatttatcctgggagaaaatcactactcatataaaggacccaaccaacaaaatttaagaccttaagcacatgcagttcaaatttataaaacaacattaattaactagaaagggttcaccgaccaaaaatggaacaagaagacacagtagtgttgtatccagcaccaggcataggccatattgtttccatggttgaactcgccaagcttctccaaacacacagatattcaatcataatcctcctttccaccggcttcctcgaccatcccttcgtcgacgcctat

SEQ ID NO: 96833 - DNA, 461 bp, Glycine max
gcacaatctttaaccatacataaagttttaacataggtacatataaataatatgtacaatgtgcattagttaaaatacaattattcaaattcagacacatgggacatggcctaattgaacaactactaacaaatacatgcacaattttctcgactcctaaatcatccctacattgcgaagccaccttttttatgcaataacacggttgttcttgggcactcttgaaagccacaccaaccaatgtatagaagacacttatcttcttagccctgttcagataaatattccataaggtcttacaaaaaaaaaaaattaaatgtaaaccaaattaagtttctttcataagttaaaaataatttatgcactttaacttatatacaagttcttccatcgaacttttccaaaagttgaagggaaatgttgattttaactcatgggagaaactcaatttattttacttt

SEQ ID NO: 96834 - DNA, 168 bp, Glycine max
tgactgatgttgggacctgtctacttgttattctcaatagcatgttaattttacaggagaaaactaaatatgaaagaaaatctacaagttccaaatacggaactttctcggaagatatgaccacagctctacttgacaagaaaagtaatagcaatgagaacaaagcag

SEQ ID NO: 96835 - DNA, 416 bp, Glycine max
gcagaaatcagaatcactcgataacaatttcgggctggctaaggctaaggttactaatattgttaacactatcattacagcacaagttcttgcaacacttgggagtcacacttgtcccagacaactttgaaatatccatagacttgcccttatagccatcagactctaatgtggcaatgctagcttcttgtgtaacaatagaaccagtgtcacttttctcagtcttagattgctcttggcaacaatcagagctactattatttgttctgcatgagaagtcctcacacattttgactttgcctagaccacaaccattgcaaggtttcacaatgtgcacttcgatagataccaagttcccattgtggtttcccttcagtgagctcaactttgaaagtccagaagattcattcttgttt

SEQ ID NO: 96836 - DNA, 342 bp, Glycine max
agcagcaaacatgctcattctccacctgttaattttgcaagaaattggtccattggcaaaccagttcatacattaaactcaactgattgagacatatcttgaaaatatacatatatatttcattcgcaaaagaaccaatataaagacagcaggacataacccttgaattcacaacttgcagggaaagagcaccatatatccacaacaaccaaaactacgaaatgtaaaattttggctgatacaaaaactgcggatattaatcagttaccaaagcattgcgcttatcaaatttggaaattacacttgaactgatattcaacaacatacaacatcacaaaaagc

SEQ ID NO: 96837 - DNA, 276 bp, Glycine max
agaaatcggcttaatatttcaatgtaaaaaaccttcaactaataaagaaaaaataataagtaatagaatttttctcactaaatacgtagaagaaagttacatctctctaaatagaaacaaaaaaaaacatttacacttcttcttataattaagaggagtacctattttattgaaagagactatgaatatataactaactggtgaagcttgttttcatagacccgaattccatgagctgcacatgcaccgaaacgcatgtgactaagcttcattcta

SEQ ID NO: 96838 - DNA, 299 bp, Glycine max
gtataacatgttgtttttattccacttatgaaaaatttgaccgttgaagttaaggtgaatatgactacataaagtcttcgacatttaaataaaaaatcttaatgatacaagagccaacattcggctttatttaataaatcttagaagcaaaacatatagttccttttattttggggtatgaggggagaacattgtttaatcctttcacaatatcctcatctaattaatgccatgagaaagaactctgcgtaccctagcttccagatgaacatatagaatgatccagtggaagctttgtg

SEQ ID NO: 96839 - DNA, 271 bp, Glycine max
cccttaaaaggggcaaaacattttttcctttccaactgggccttggtcttgccccccatttttttacaaaacgcgcaatttttaaagaaaaaaccttgggctccttggtaaaagagttcttttttggggctgcccgcttttttttcaactaaagccccgggatcctggacctccctttaagttagcttcccccccccccccatttccttttaaaccctttggatgcaatggggcggggtggttttttgccccccgggccccccccccaaat

SEQ ID NO: 96840 - DNA, 93 bp, Glycine max
aaaaaaaaaaaacactttctcataaaaaaagggtcccaaagggttacatggatgacaataacttttgaaagcaagccgccaactttatttttt

SEQ ID NO: 96841 - DNA, 403 bp, Glycine max
ctggtatgctccaatcggaggagagatctcaattgagataaaactaaaagaggacgacgcaaagcttggctttgccattagtcgtacagaagagggttttattttcatccaaacagttattgaggataaccaagaaaatgtaccagccacacgttcaggactcagcaatctgtataaagcagcaaaagatacttcaaagttgttggtagtatctaggctttcaaatcagagagtcctcccatggatggtctcttcaacaggagccattaggtgttatgacactgtttcattgagccagaaactctccttgcatagacacaccaaagttcctattctccttcatgtcttcctttgggatagaacattggcttcaagtttagaaagtacaagattgagttcatta

SEQ ID NO: 96842 - DNA, 135 bp, Glycine max
tcgctttttttttttccagtccacgaagtgcaccaaaattaaagaaattcttgcgtgcctgagagcatatgttcaaaacgaaatatgacaggacctggtttctgacactcttaatatatggttgatatattatgc

SEQ ID NO: 96843 - DNA, 274 bp, Glycine max
aaggaaagaaaatattgggattccgaaaggttcgggaagattgacaatatatatcataaacaaaagcaaaatttaaaaataagctaaaataaatgtatattaatatattaaagaaaaagaatccaaatatgtataagacatatggagtaaaccttgccaagggtttcgggtttggttgtgttgggaggagtttatgcagtttcccacgccagcaatgttgaggatatcagtgtgagagagatgtttaacacccaagaaatctcttgtcaagcct

SEQ ID NO: 96844 - DNA, 375 bp, Glycine max
aaacttgtcagtaacaataatggtttggtagaagtagtagtcgcccttgaaacaggacaaacgatacgaactttccccaactcaaaacaacacacagactccagttactgaaattgccctgtttcatttttctcccctaaatttcaccgacgctgtcttttttctcttttgccctcacccttttgagagcatcatagctgtaacttgggcgttaccgatgctggaaatctcaacttcacatgaaacccctctagagaacgcggacggcggctccgcggcggtctcggacgggtcgaaagccgatcacggtgaggacgatgaccggaatcccgccgcgaaccggtggccgacagaggagacaatggctttgctcaa

SEQ ID NO: 96845 - DNA, 487 bp, Glycine max
gaaaaatataataataattaaaattgtcgtactccgtgtttaattattattatattttggaaaaaaaataaaaaataagattattcgtaaattattatgttcgattaaccaaaaaatttattttattaaaggataagtattcaataaaattaattattgaaataactaaaaaaatataaaatgaaaaaaaatcataatttatttaaaaatagtaatcagaaaatttaataaatatatcaaacataaaaaaatataaaaaaatttaaaaactaacattttaaaaattgttaccgacgttaaaacaaacactaaaaattactaaaacaacttatttacattatagtaaaacaaaattttcaaataataaaaaaaacaagaatctagttgaaatgcccttaaatataactgtatataactgtataaattattttttaatttcatatattctaattagtttatttacataaagtttgtttgaattttactt

SEQ ID NO: 96846 - DNA, 267 bp, Glycine max
tttggattctcataacataaagtacgttttacaataactgcctatatcacttcctctatctttagggttttttcctttcacttttattttttaatttttaagtaaataacttttctaaaattactaaccaaacaaacaagattatgggaatagtatatatttaatttacatgaacgtgattcccaaaatacaattttatatcatgaaataagtgtcacctttattccttcagtcatattctgccccttttttataaaaaaattattg

SEQ ID NO: 96847 - DNA, 280 bp, Glycine max
agaaagtgtttattcttaaagttaacattcctaaagctccaaagagtgatctacgaaaactgatggaggtatgtgctctttatctcaaatttccttgaccgcagtttcttatgttctaatgaatgttacaatgagctcattatttttctatcctaatgaaaaaggtcaatcattgcagaattctattgacttgtactgtttatttggttggggcaaaaaactatcataaaaaatgcttaggatccactctttccccctttcattattttgtctgtcgata

SEQ ID NO: 96848 - DNA, 265 bp, Glycine max
ctaaaaatccctttgtattaatgtggggtgataaatcaacagtacaccgaatatatgtccaaatgtgaacgactaaaaaaataaagcaataaactaattctggttctaaacttattaataatatactgaatcaagggtcgataaacaataataaaattaattcaaggaattaaatgaaaacaacaactatattgatcaactaaatctaccatatgaaaatatcattgtttacttgaaaagagccaaagatatcttcaccttaata

SEQ ID NO: 96849 - DNA, 134 bp, Glycine max
aaaatagacgatgttaatgaacatgtttaaaaattaatggcagatgtagcttttacaacatcaagactcaagtttgccaataacataacattttggtatactatgtcacatcacccaggtgagtatgtgctaag

SEQ ID NO: 96850 - DNA, 385 bp, Glycine max
cgcttattaactagaccgccattcaccattatttttgcctcttgcattgcatggaaaccctcaaaattattctgaggatttgatgcacttgtggtatagggttccacttccaaccatgttagccccagagaataaaaaccttgccctagtggatgttgtcagtgaggctataaccaaagatccttctctcaaagcagcattgttttcagccatttcctcactcactgaagatcctgatcagaagaacaacatctataaccaaagccaacttagtaagagtagtggtggatatgaccctagatctaaggtgcctgcaataataccacctcatcagccttgcactactcagttgatttagatgtttttttttagaggaatttgattt

SEQ ID NO: 96851 - DNA, 246 bp, Glycine max
ggagagtgttagagtgtgttttggggtgcttagatctggagctgagaacattgtttgccagcttgatgatttctttgatgagattgtggaggggaggaagaagcttttggatttttgcagtcataggtaaaaaaaaaaaaatgatggtgaatagtttttagaagttcaacttaaactacaagaacagaatagacgaatgcgctcatttcttgtttgctcgattaattaaagaggggcatgtggttg

SEQ ID NO: 96852 - DNA, 138 bp, Glycine max
ggatgagcaagttactactcattcgtgttgttgggttcgtggctacctttgtgaccatggtgaggatgatggcgcccataaacgtgagtgcccaaaacataggtgatgacatcgtcacacaagacttcttgaacagca

SEQ ID NO: 96853 - DNA, 214 bp, Glycine max
agtgaagaaattctagccagtatcattgattaaaatatcatcaatacactttaatgtactaattttaatatggagtaataatttccaattaaacctttttttatcattaattcctttctcagtagtcatcaccccaacaagacacggctaacatatatggaacaatttcccccttcttttttttacccttttatccacttatcctccacctgtt

SEQ ID NO: 96854 - DNA, 439 bp, Glycine max
atttcctttgttttatcaaaccttgtttgtttgcactcattgctaaaacaagaacgatcgaacatatggcaaccaagtttgctcatgcactcactttatttgttctagtggcctcaatgctttcaatgagcatggccaatatggattggtcctttggttctaattctaactactctgattggtggtccagattccgcaaccgtcaccaaaacaagacagaacaagaacccagaaagatcattgtgggtgggtctgagggttggcacttcggttttaactacacagattgggctttcaagaatggcccattttaccttaacgatacactagtgttcaagtatgatgctccaaacgctaccagtttcccacacagggtgtacatatttccaaacttgtggagttatttgaattgtgatgcgaagagtgctaagatgctggc

SEQ ID NO: 96855 - DNA, 376 bp, Glycine max
  unsure (1)..(376): unsure at all n locations
gtcagacagaaagcccaaaagctcaaaaaagaaagggaagaagcattcactatttaatgggattagtcaagaaaaacattttgagaagtctgatggttggcaaggtaccccaccttgggatcctttggtggggggaaatggatatccaaagttcctttgtgatgtcatggttgaaggcttggcataacatttacggtgtgttgggatcgatgctgcagttccttattcaaagaagcctgaaccaaggatgttgatagagcaagcacataaagagaaacgagtgatnttgacgtgggatgcaaagttgcttagacatgattatctgacacanaaccaaatctatagagtgaagagtcttctaaaaaatgaacagcta

SEQ ID NO: 96856 - DNA, 169 bp, Glycine max
agaacaaggaagagatataagattgatatggttgttcggagaaatgtcatgggaggataaataaaactctatcttacactgattctaaactgttaactgtgaatcatatgatttgcttgatcataataacatggtcactaataaccactcctggatggaaatggtcgtg

SEQ ID NO: 96857 - DNA, 156 bp, Glycine max
aaatgttgtacaaggatgcgtgaattgtaattggaaaccctgctaaggaaaacagcaggacaaagaatttggcactataactcatgctaggcttccctcttagctttttaaccctgatgcgtgagaccctgagactgggtaaccaatctataccct

SEQ ID NO: 96858 - DNA, 477 bp, Glycine max
aaaaaatccaatgcttcttctggtgctgctgctgcaccaggtcccgcaccgaacaaccacaagcacaagaaaagtaggagaaaactcttagggtggattctggggtttgtggcaggggcagtggcgggaatcttagcaagattcgtgttttctctaatgttcaagctggctctggcgttgataaaaggaagaggaaggaaagcggggcctgatatctacagtccattgataaagaaagcagaggatttggccttcttggagaaagaagaaggaatggcatcgttggaaatcatcgggcgaggtggctgcggagaggtttacaaggccgagttaccgggaagcaacgggaaaatgatcgctataaagaaaataattcagcctcccaaagagggtgctgagttagcagaagaggacagcaaggttctgaacaagaaaatgaggcagattcgatctgagatcactacagtgggacaaatc

SEQ ID NO: 96859 - DNA, 385 bp, Glycine max
cggctcgagcacaacgttacaaatcacacaaacacacaaacgaacaatgaaacccactttcctcctttctctcttattcttcacattcacactctcccatctcaccccacccgccaccgccggtgaccgttacgtttccggcgacaattccggcgatgccgacttcatccgcgcgagctgcaacgcgaccctgtaccccgacctctgcttctcctccctctcccgctacgccgacgccgtgcagagcagccacgccgccctagcacgtgtcgccgtcgccgtggccctcgccaaggcccacggcgccgcggactacctctcgcaccagaccgcggcggccagcgacgacgactccggcgccggctccgccctgcacgactgcttc

SEQ ID NO: 96860 - DNA, 121 bp, Glycine max
gcattcgcggctcttcctcgcgatttgtgccacacctcttgcttattctgtcttcgtcgccgacagtgtacgcgggagcagctgggcatggaaatgacatggatacccttcatgcccatgg

SEQ ID NO: 96861 - DNA, 395 bp, Glycine max
cgcagatgagatctcttgaaattgctcgattttccaggctcaggtttcgagaaaatccatcttgtccgtttgacaacttctccctgtagcaatggcaaagtaatcagtcaattactaatttgcaatcttgctgtttgatgatagatgaaactcttccaagtgctgtttttctttgtgaaattctttagtacttttggagcaaatgaaaatgccttactctgtctcatatgtatgagctatccctttaactaggttttctgttgacagagttcacattctaggtcgagaacacgaaatttctcactctgggaagaactaaatttctagtgtttcttttaagtacaagatcccaggctagagtctttgaactgctgtttagagggatttacatggaa

SEQ ID NO: 96862 - DNA, 407 bp, Glycine max
ttttaatgaaatctactcatttgtttaataaagtcccaatgcctggcaaaagtgtacaaatcatcatgaaatggcctcaccatgtattttgcagcccactccccgtcactgattataaaccaacatgcacgttattttattatgcctagtactcagtcgctatattgtgatggccacatcttatagccagatcttagggtgtttcttttgtgctgactttcaatcaaagtcttattttcgaaacaccaattctgattgaaaaacaacataaaaatacttaaaagaaactgtatctaagttttgtcctactatgatcatgacatggtctacttaccttttgactttttttaaaagggaagagtcgctatggtattttgatccaagcactagagcagaaccttacactt

SEQ ID NO: 96863 - DNA, 406 bp, Glycine max
aactgttagtttcataaataaatcactatgtctatattccacaacccttaattaccatttacctgtgccaggttacacgtaaaaaaatatgagactactataacccagaatctacagttcatgaaaaacctattcaaaatgtaggacaaacacttgttgaacatgcactgaagcaacagtgatcaaagacttggaaatgttaagacacaagacttattcaccactgaataatggctcactaacttataaggggcaccaaaccaacatttttcagctgtgagagaagcgattagtttcaacaaagcgtctctcttcctttgctaaacgtctcagtatttaaaaagttagtgttcaaagatcatctaggacctgacagaacatctggttgaatatttggatttgagtc

SEQ ID NO: 96864 - DNA, 325 bp, Glycine max
tttttttttttttttttttttttttttttttttttttttttttttttttttttttttaaaggagcacggttcactcaatgggggagccgggaaaaagatagtttttttttaccaattacagaagagactggatgcaaaacaaaacaaatcaaacccaaaacccaaaggttttcaggggggggctctttttttcttcctatcctttggggcgggattagacaggcaaggggggggcgaattaatggcactgcccacactggtctaagtattttcaccctggtaaaacatggtggctagcccctttcttgtatggtcttttaacacg

SEQ ID NO: 96865 - DNA, 247 bp, Glycine max
cccagcacctaagggttctgttcccgccccaaaaaaaaaagggaggggtggggttctctctcatgtttatccccaaaccaacccgatgtaacggttttgcaattcccccttcacggagcaaatcccgtacttacagtcctaacactcgcaacaccttcacaaccccaacccttcaaacgcaacatcccacataattttaaaactgggatcaacgatccatgggcatttcacccccccccctatttta

SEQ ID NO: 96866 - DNA, 453 bp, Glycine max
atgaaaggttattttatttctttagttgcaaaaaatgctggtattaatggattttttttcttattctcacacataattatggccaatatatgttcggacacacgattccgtttgttcacctctattctttcccttaatattactccacgcgtaaaatatctatttcatggagatgatctttgttagttttataaaatctgcagttcacacattaaaataaaagaaattacaagtttattgctgttagtgtacctcctaatcttacaatttggaaaacttcttagatcttaagagtagcatcaagaacagggaacggtagcatacatctatataagcctttctgttcatgcactcaagcattctatataaatcacgttaaattttaagggtagagtcattcccacagtctcattcacaaaatccttttggaaactgcacactgctatggcattg

SEQ ID NO: 96867 - DNA, 426 bp, Glycine max
aaaaaacctagataaattcaaagaaacactataaattcacttttgcacacatacacattcacatagtcccctacatatggctctatgggagaagttacctctcaagaggagtgaaattgtgcgtattggaggggagagtgctacaccaattacaatccaaggtcaatttacaattaattgggaggtactacatttacaacaacaccccatgaatgcagaaacggaagaagcatgcacaaaactggaattagaagttccgatcaaaagtcatttgtcccctcacaagctaaaacctataattattctcatttatttctctcttttttgggcgaacaataatgacgagatttaaacctataatctggtgcaaactacacaaatctccccactactaggccggccctagtaggtttcattcctttctta

SEQ ID NO: 96868 - DNA, 433 bp, Glycine max
cgtccctggttcctagagcttggtatagtccgtcaaaagcttgagctcttgcctcactcaccgcctttttggtttcatttctagctatcttatacttatcccaagtttcagaatttctacacctagaccactccttgaaacactccttttttactctaactctgctttgaacactttcattccaccaccacgattctttacccctaggtccaaaacctgtaaattcacccaacgtctctttagccactttaataatctcttgggacgtcttgttccacatatcatttgcacttccttgtgattgtccacaccatccctcccatatcttttgttggaagattccttgtttctcacccttcaagtgccaccatttgatccttggtgctaccataggacttcttctctttgccctatctttaattcttacatccat

SEQ ID NO: 96869 - DNA, 427 bp, Glycine max
attataattcccttcaacggagggcttgcggcctaaattttgatggaatcagcacttttgccacgatgattgtttccagaggataaagtacagccttgtcctattacccggtaacggaagccaaacctaatctcaaagaacactgctactacattagcataagaaattaggattaaatcgctctccactgcaccctgcaatttgtttccatgatttgctagcattctgcatctggctataccatcttcatttccatttttgaaaaatattggaagttcatgaattatacaagtggcatcagaaaaggtgatgatttttcacgtaaaatacgtgagccaaaaggaatgatccctaaaaattcatgccctctgataaagcaaccactgtacacaaacaacctaaccttacaaaaggggtcttcttcttt

SEQ ID NO: 96870 - DNA, 105 bp, Glycine max
atgaaaggtgcttttctttcttgagctggcaaaaatgctgactttgatggatccctcttcctattggcacacataattatggcctacctatgtgccgtctcacca

SEQ ID NO: 96871 - DNA, 286 bp, Glycine max
aacaatagttaaaaccgattatttttttttttttcagggaaaaccttacataaatggaaaagggggatcctttcttgggaacgggggaaacccaagccccccctaccaaacaaacatgggggggggaccaaaaaagccggcctaggccttttttgaaaaaaaaaccgaagggagaaccggtttttttttattaaccctttgggagagggaaaaaaacatataagggcttggggccccaaaattccggaaaaaaaacaaactggcccaaatttttaaaaacagggct

SEQ ID NO: 96872 - DNA, 397 bp, Glycine max
aatctcattctccgacgaacattcactaaaatttagaaatcacaaatcgtaggagatatacatatacatagttacataaatatagactagtagctaaacaattaataataacacttttctgtcattgtatttgtattccaaaatggaaattgcataatcaacattcccagccgagccataacgcactaggatcaagatcgtactgaaacaaaataaaaatttgagaattttttggttaatatatataaacttatataaagtattcgttgctattattatatattcttttaatctacaaaacatcaacctctatacaaaggagagtgttcttgaaccactttagagaccttggattgtcggaaaggcttcatcggtctcggaaagaaccaccctttcc

SEQ ID NO: 96873 - DNA, 466 bp, Glycine max
aaaaattgttttagatagataaattcaatatgttaaaacacagtcaattcaacaacatattgtgcggacaaccgattcagtaccacacaacagccattgcattagatcaatactcatttgtgcattgtactctctgcttgctcaaactaaatccccccgtccctaaaacaaaacaaaactaccggagaatttagaaactttctccaacatttgtattgaataacaaaaggatttcatcaaaatcccccccacccctttttcccccctgaattaaaacctttgctactaaaccatacaaatgggttagaacttagaagccccatgtcaaccttgaccaattaacctaccttcattctcctaaccaccaagaacaactacttgttcttcaccgtcagccctagctcccctgcaacaataacagtggtcgccatatcaagaaacatgccatgctacacaacttcagcaa

SEQ ID NO: 96874 - DNA, 300 bp, Glycine max
aaagcacaaatttgagtcatcttttgcactaaaaattgttatggggaacaaatatccaaatcattgaaaaaaaacaaatatatgcaaatccccaaaattcgtttttcagtcgcttcatataaatgaaaaggataagcatcacctttgaagtttactccaacacacccatcgttatactggttagtattgttgccggtcttactagcacggtaaatgggtgacctataaattgcatatctttaaaagcgcgcagttttgcaatactttttacacacggctatctatgaggctggtaaactc

SEQ ID NO: 96875 - DNA, 270 bp, Glycine max
gtaaatagactatttaacactttctcctttgaaaactaaattacatgagggaatattctgggccgggagaccaaatttaagcacatgaaagtcacggggtaggaaaacaaaaagcaatattgatttgtgcctaacacatatccgtgctatctacttcacgtctaaattcctggacaaagccgaaggagacaatttgctagcgggtttctattgcaacaaattagaggacgtagtaccatagtacttgttgttgtctacatcatcatcatg

SEQ ID NO: 96876 - DNA, 235 bp, Glycine max
cgggaaatcaatatatattattcctttcaaagacaaacaatttacaaaaagaaaagggggggaaaaaaaaccgtttgactatttggcttgcaaaacagggtaataaatgtctgattaacggattacaatgttgtcgccggcctaggccaccaacatggattggaggtgggggaaataaaaaataatttgcttaattcgtgactaacccacattcattcttacttagcatgtaatg

SEQ ID NO: 96877 - DNA, 411 bp, Glycine max
gacatgaatatcctcctttttgtttacaatcaaatagtcgaaagtccaaataaattttatagttaggcatgagaaaatagtgcagtgaagtatttattttcttgaaccatgtctatgaactgcatatattacataagaaaactacgcagatttttccactatttttgtatatcccgttgaaaattttgggaacctaaaccattgttgacgaaatcgtgtaaatccatgaattttaagtcggaaacggatcctctttatttttcttccaaaggtgccccatctttgtttcaagacggcatactttgctgatcgcactagtttctttgtgtacctatatacttgatgttgttgggtctgatcattttcttctaagtttggacggtgcaggacctcaactaaactttccaaacg

SEQ ID NO: 96878 - DNA, 414 bp, Glycine max
acaaaataaatttattgtaaaaatattattataactcaaaacaaacatgcactttcattatcattgcagttcactgttcgccactatgctatcctttattgtcacaagcatacaaatccaaccatttcccacctgatcacacatgggtttacaaacttctagggaaaaatttaaaatatcaaattaaaataacacgcccagtgactttgttttttacagaggggcaaaactctctctctctctctttctctgagcgcgggttccttgtatcatctaccatgttcgctaaagaaaaaaaaaacgattaagaattgaaaattggaagatacagtgtactgtaatacatacaaaaacaacacccttgagattgatttgtatttactacttacctaaacccagcaacaaaataaaata

SEQ ID NO: 96879 - DNA, 301 bp, Glycine max
gatgagaaatggagattttaaatgcctcctacaaaaatttccattcatgtgcaaaaaagagatgatctcttcaaatgccttgacaaggtagaaatcttggattagtagtctaatataaagaaacagaatttgtgaaagcatcaaattgagttagtcatggcatgctcatcctctagcaatgatagtcttctcttagaaaccttggacctataacaccacacttcaaatgcctcagttaagtctggatactgcatgtactcattatccagccactcagttaaaacctctgcttgatcccctg

SEQ ID NO: 96880 - DNA, 181 bp, Glycine max
ttttttttttttttttcagatcaaaaaatctacatttttcattcatttcctcccccaattgggctagagtcaccaatacagtccagtgccaatgaccttatcactaactagcttcactacattcctgtttcatgctgtaacattcagagaaacacatcctccactagcaactaatcctttt

SEQ ID NO: 96881 - DNA, 237 bp, Glycine max
gacagttcagtagataatatccattcaactaaatttgagaaaaaacaaaaagcatggcgatatataatatgtccttcaatagaagatgagataacaaagggtagcccagcatatacttactgggtgctagggtgcttacgacgaggcacaatgatccgataacatcaaaactgctgctgcttctgctaactcaagcctccaccctttcctgctcggggataagggccttccctgttg

SEQ ID NO: 96882 - DNA, 380 bp, Glycine max
acttcacattgtgaggatgacatgattaaaaacaaacacatggttaatcttttcttcatggagatcattgttcagtccacacataactgagacctcaaatgttacaagttaaaacaaaacacataagtgcttcttaaaaggaagcatagctacactcattcaaggtgtcactgatggtggtatcagtgtcactggtactttgacttttctcattacattgtatgaatggttcacttgctgggactgacatggaaagatttgtgtttggaattgcacaatgcgctttctgcattttggttgtgactgaagagttaggcaaccgcgcaatggtaaatgccggttcatggcttgtgagccgctttttagcacctctgtgcatg

SEQ ID NO: 96883 - DNA, 123 bp, Glycine max
cccatataaagcatgctgattattcaatgcagtaaagcaaatgagacaggttttcatacaggaactgattattattacatgaaaataacctccttattaagatgctgagtgcgctatggatga

SEQ ID NO: 96884 - DNA, 217 bp, Glycine max
agaagttggaacatcaacacaatagataatgagttgtccacatagtctcatacaagaataacagtttactatagagggatcaaaacacatagcatacttcctagacgtggacagatgcacacaactttcaagtcacactgttacagaccatttcagggttagtagctatgttacatataaaacacagttacagacttcataacctaatacaattaca

SEQ ID NO: 96885 - DNA, 273 bp, Glycine max
gcggaacgggcaaataaacaataactttgccggaaacctgggttttcttcgggtcttttctcagggtctttccccattgggggttttactaatccccaacctcctttttaccaaaaaaaccttttttttttgcttcaatttattcaaacccatttgctagaaggggaaaaaaaataaaatcccgcccatttaagcccccttcgaattcactggtaaaaagggagggtaaatacctaaaagaaaacaacggaaagccaaagaccccaaaagttt

SEQ ID NO: 96886 - DNA, 106 bp, Glycine max
gaagaggcttcccaacctttgttgaattttattaatggatccacacactggacaacacacgaaatttgaacacaatgtccgtaaacattcaatgttcattaatgaa

SEQ ID NO: 96887 - DNA, 342 bp, Glycine max
aaagaagcaacatttattatgataaatatcttagtcccatttgacaaaagcaaagtaaacagtagaaatacatgctctactccagaaaaaaaaattctggaagactttgagcctgtgaagactctgagtagaagtatcacaaattaacgtgtgtttgattctactaattgatgtgaaatcaggtatctatcactaacatggacatagtacccttgtaaaggaaaatctacagaatcaggccatgagttctcaggaaaatatcctagacgatatgttagccacaaaatggttgttggaaagagccagaaagtaggtggtttggcaattcaatatacaattttc

SEQ ID NO: 96888 - DNA, 290 bp, Glycine max
cacatgtaaatcgaccaacatttacatttgctcgaaaacaattatgatactactgcagctaccagtatttatgagaaaagaaaaacgtggccaactactaacacctaacatgaatggaacagactaccagcttgataatatccccccaaaggagccacatagaccactcatctgtgaagtccatatcgaacgtcaatacattatcggcagataaaaacagagagtactttgttattttcagttacatcaactactacaaacataaacgggcaaataaacaagaatctaaa

SEQ ID NO: 96889 - DNA, 349 bp, Glycine max
gagcaacataataacatctaatataatggtcatttgcacattaaggttctgaccaaacatagcataacagtaaatacaataacaagttcgagtttttgctgtcaaagtacggtctaaaatgaaattaaaatggtctaacaacaacttcacacagttctattcagcttttcctcaagatcgcgacctttctcggggtgggggagatcggctatcatatctcccattatttattgggctttcagctcgttcatacttggggcttcctcttggatctggtctggaagatggatttgatccatgaccataatctgggctaccccgacctctacgataaggactaggggatcta

SEQ ID NO: 96890 - DNA, 424 bp, Glycine max
ccagttcagaaaaacaacaataatcattcagctcctctctcaatttcactagagtcaccaataaagtccagtgcaaatgaccttaacactaaacagcattcaccaatccatggttcatgcctcaacattcagagaaacacaacctcaactagcaattaatccttttaaaaaaaaaagcgagagagattataagtttagttttacaattctgaacaccatcagtcaactcaacgagcaatgctttgccacgaaatcgctgctttacgtttgttcctatgcgcccacgcgtcgctattccttctccaatgccgaacctccaacgtctcctcccctctcgcacgctgcgcgaagaacggagccctcgccgccgcaaccgtgaacctcggaattccgagcgaagaaaccgattccgattctgatccct

SEQ ID NO: 96891 - DNA, 336 bp, Glycine max
gggcagcagcaatttaaaactttgatgttgaaaaatttaaactaaattttacatcaaactagctattatagtaaaatcattcaaacataaataacttgaaaatcaattttacaaacgcccacctcaaacactcacacacatacactcactgactccctcaactctgcaaacacactcaaacacataaacagaggattgaacaaaacaccaaatacaaacctaccaatcaattctgccattactgttgctgttgatttggagggtttggcggagggggcatgccaggtcgaggaggaccaaacaccggaacaccgcttccaggtggcggtggcatgc

SEQ ID NO: 96892 - DNA, 315 bp, Glycine max
ctcgaagaagcataacccatcaccaccacccaatccctcgcctcgattggattcggctttgtggcaaccacacgattgttgttgttgtcgttttgagatcgggagggaggaatgagaatgtgatggtgtgggcatgggggttgtcgttgtcgttttggcgtggtggtagggttgttgcggcggtggggctgcggcgtgaacgacgatgcagcttcacttctcgccgtgcatgagaagcatcaccatatcaagcaacagcaacaacaacatcaatggctttattgacttgatgaagatcaaggtcgctgcgcgcca

SEQ ID NO: 96893 - DNA, 505 bp, Glycine max
ctcgagccgattcggctcgagctgccattgattcaagaatttcaagaaccgggtctgaagtgtgtgagttgaagaacaagaaggagggtgtgcgtgtagggtgcaagaacacagataagaagcgaaaggtcgtttactctccacgttctgaaaatcctgaagcaccctctgatgagaaaaggagaaaaacgagttcttcaaacccattatcagaagattcaagaactgtgcgtgtagagtgcaaaaagaagcgaatattgatggaccgttgcaagaagatgcagtgttgggctatgttgaagcgtttaatggtgggaagagatgcgtgggctttaaaaaaggatattcttgatcccaaggtattgtgcgttcttcataagtctgaagccataagaaagccaaagggtttggaggatattgagtcaaagttgaagaattgggattactccgaaactgatgagtttgtggatgatgtgaagcttgtgttgtcttatgctttgcaata

SEQ ID NO: 96894 - DNA, 351 bp, Glycine max
ggtaaaatatacgtatttttgttctttagtttgaaggtagtaattaagcttaattactcaaaatagaaatagaaacttcttaaaagaaattcaatagagactttttacataaaaatatgaataaaacggggtaattaaattggaacggttgatgaaacatgccatctttccgggttcctatgatattttgaatcagcaaatcaaaagattgctccttttttgagataactcctcacttgccttctttctttcccggcgacttcatcatcatcatctcttctcttgcaaatcttgttcgtcacgcatccacttggccttcatagttttccaactgatctcaaaaccctcact

SEQ ID NO: 96895 - DNA, 432 bp, Glycine max
gtttcagcggtttgattcatacgcataggagccctccgcagttcgcgtggccgaaccctccgacatcgaagctcttcgatctggagttcccttcgcagagctttgggaagagggatttcgctttggcgacccaggagtatgggattaatggcgtgtccgccattttcaatattgggaaccggatcggtcatgccggtgcggatttcggtgccagcttgaacgggctggttcagcagtttttccggtcgttgccggtgccggtgccattcaagcacgaggagagttctgtgagggtggagggtggcgaataggtgaggcagaccagtgacatctcctacctggcggaataaatgggagtggatatttaactcatgccatgaatctctatttacgctataaaccacaaattgaagaactgcatcaatttttgga

SEQ ID NO: 96896 - DNA, 438 bp, Glycine max
atatcaactctgcaattaaatttgacaacatataatgacatctgttgtatttgatatttgtaacacagcttttgcacactctaaattattatagtaagatcttaaataatagaaaaagctattaaaacctctaattgaacaaagcaaacagcaaattatggctatgctaaaaagagagcaccatattagcctccagctataacttgcttttctgagcacaaacaaacgttaaccaaagttaccaaacttacaagcaaaacaaaaaagtacagagtcattaaaatattttattataacagcttagaaaaatctgaattgccaacagaatcttaaggcataacatataagaaaaacaaaatataagaagctgcaacggcgcaactttctcaaggccacttccagaagggacgaaacattggcatcacagcgaacttcatg

SEQ ID NO: 96897 - DNA, 401 bp, Glycine max
tcaaactccctctacgttcccctgctttgtctctctcacacattcacaactccatgcactttttctctgtagctatctaacaacttggcctaaaataaaatgggccattgtcttgatctctgcaaacccagatcagggtcttgcgtagctaacaaggctatacttgtgagggcagccaaaccagatggtgagatactagagttcagcaccccgatccatgtgaaagatatcttgacaagttatccagcatatggtgttggtgtttcacagaaagtcactgaacatctctacccagatcatgaattgaaggcatggacactgtactacttgctttcctctatgcattcccctccaaatcttaaatctttaaagacaggtggagggataaagaggatcaaagt

SEQ ID NO: 96898 - DNA, 302 bp, Glycine max
aaataacaaaatagcttataagaaaacttataccaggggaaaatttaaaaactaccttgaactatttatctatactataagttctatgtctgcctttacatatttcatttcttttggtggcttaaaaccaaactttccttttttaaaaaaaaaaaaagattctagagttacaacaacgggcaagtgttccatgactacccgataaagaaggaacaattacaaaggaaggaaggaaagcttaaacagctctaaaattgagagagaccagtatttttatatgttactcatcttcttggggtgta

SEQ ID NO: 96899 - DNA, 338 bp, Glycine max
tttctttcttttttttttttttttttttttttttttttttttttttttttttgggggaaacaacaacgggtctagatattgctttatgaaatctgaccaccaatggctttatttgatctatcgggagacatgaaggggggcccaaggaccactcctttcattgccaggaactggtttgcccaccaggctggtttcattagggtcactacctccaaaaaattaggggtctcaaagaagataaaaagaatcccctcctggttgactgggacaacccttgggttttgatatttttaagagacaaaagagaggaatgtcccgcctttattccgggaaagcca

SEQ ID NO: 96900 - DNA, 297 bp, Glycine max
  unsure (1)..(297): unsure at all n locations
tttctttctttttttttttttttttantttncncttttagagaaatanaaaaaaatctggggattaagataatgggaattactcctttaaccatccttttcctttggccaccgtaactactacttctgtatgtgacaaatctccttgggtaaaaagcagtcccggggagagtcactgctaatggctaattcaatttaaagatcagcttcacctgagctcacagagaagatatctataggagttttaatgcagtcataaactcctttacctcttgatctaccattttgggattctttt

SEQ ID NO: 96901 - DNA, 282 bp, Glycine max
ggaagccatgtatcccccatattctattataggagcccaacaacaataataataattataaatgccttgctgatcaattcacacccttttctgccaaaggaaagtggtttttcaagggaccaaaattaccggggaaaaggggaaggggcttatgcaataataatgtcctttgaccccccaaaaacagggccaggggcagctccaaagctcaccaacttaaccatggcacgacgagggttggtcttgggcttctcacacaggtttggcaaaaacacccccttt

SEQ ID NO: 96902 - DNA, 139 bp, Glycine max
ctcgagccgaatcggctcgagatttattttatcagattttgtcattgtagactgtttgaagaatcgtggagtgtttatagtttggtgacaaatttggggatgtatcatgtaaatggagccagaagccagattaaaatct

SEQ ID NO: 96903 - DNA, 346 bp, Glycine max
gaaggaaattttttcccggctttaaaaaaaaaacgggctgggggaaaaagttggctgccttttccgggtttcctttccccaggttcgggggggggggaaagcccaaacttttttcctttttgaccccctaaaaaaaacccctttggatttggattcttttggggggggggcaaaccacctttggaaaccccatttaagaaggggggggtttttttcatacccaaaaaatggacccttggggggccaaccccggtgtttttcacctttttttacccccccctttccccccatttgggtttgtttaccgggtccccgggggggcctcccctaagctttttttgcccct

SEQ ID NO: 96904 - DNA, 356 bp, Glycine max
ggcaagaggccgttaaagcttttccataaacttttattctccaaccccaaaattcccaataagctcattgtttagtcacttggccctttaaaggtgacatatcctaaattaacacccccctggttggggggggggcccaaaagcatttgaaaatcaagggttggagcttaccccacttttccccaagccttaaagcaaaaattttaaccaaaacatttgaaaagacttgaaagaaagataaaccgactgggagagagatttttcacaggcttcctttcccaaccgggtaagcataaatagaggtaggccctctccttggctttccggtcattttaatcattgaattttggcccttt

SEQ ID NO: 96905 - DNA, 143 bp, Glycine max
cttaatcagggggaaaatgcatcttgcgacgatcccgaagacccagccaagtctccaccaagctcgcccaactcctgcactcgcaaggcttgctgctccgttctcacagagttgggtctctaacaaatccatgactggatgcg

SEQ ID NO: 96906 - DNA, 259 bp, Glycine max
ccacagcaaaaaagacattattggttaaatggtcttgggattccccctgatatcagctaggatagacagtaagacccaacccccacgagaaaacctggagaagcaatgggcaaaccaaaaatttctcaagataacatatttatgactacaaacaactgcttatgttgcacaaaagaaatgggtatctaatagttgacaactggtaatatccctgtagtttgattcgctactcaaaaaacacaattttgcaacagaaaac

SEQ ID NO: 96907 - DNA, 401 bp, Glycine max
aaagcctcaccagaagtcatgaaatacaattggcatttgctgaacagggtacaccaagagacccagcatagggccacccaaaaaatcccacattatgacccaattcttttaaactgccagaaatggaccacaccttcacaaccgaacacaaggacctcgggttggaagggaagaatcataatttcttgcttccctcgattactcattaaatataggctcgccatattaaacacattacacatgctaccaatctagtcttaaaaaaaaggaaaaaatatatgtaaaaaaaaaattgctaaaagtacaattgattatgtcatgtggcgattgatgaattactgcggacatggagtggaacaaagggattgagcagaaacctgcatccactctaccagattcag

SEQ ID NO: 96908 - DNA, 362 bp, Glycine max
gaaagagataagttcagatttcttatataacgtactttatactttaattttaatacaagactaattaattaattaattaatgtagagtatatatgattaacaacttgctacggaatattgtcatcttcagagtagtttttagagctgtggccaaacagattaatgctttcattggcattagtatcaccttgggattgggatggcttgtaagaataccatctggaccaaaagagatagttgaggaagttgaggaagcttagggcagctagtaaccaatagaaaaagtcaagcttgtctttgttgagatcgttgtcatggagccaaccaccagttgaagaagaggaactgatgttattcaccat

SEQ ID NO: 96909 - DNA, 135 bp, Glycine max
cttttgcaatatccaacacactccaaccatgggctaccaagacaatccgtatcgggacgaggacggagagccctggatggactacgactacgttcaatccgatggcgtgccatcttccgagcctaggcaccagct

SEQ ID NO: 96910 - DNA, 238 bp, Glycine max
atgagccaacccaattttgatgtgtacataagcttgacctaggtcttattatgacatgcattagctgtgctcctcaaaagtcagcatagattcaaatcattcatgaaataggaaaatcttggttagttggtagttatatatacattgtacaatcgttatttgctttctactccctaaaagggatgtggtgtctatcattgattatagctttattattatggctcttgtagcctgcttc

SEQ ID NO: 96911 - DNA, 335 bp, Glycine max
gttagtgtaaataacgacaatggcattgctataaacattgaaaccgacaagaggggtatcaaaaaggtgcatgggagaaaaaaatcaattaattctaaatctttttttttagtatcttccatggttgaactttgaggcatgtcaacaagtttctgtatctacaatttacacacaggacacacaaaaattggagacagagaccaatatcaagaactattttgcttggcagtgaggccgactagacgcttaaggtagtttgcacaaacgtatgttcccacatgatctgcttaattcctttaccaggatttaagaaaccacaatcatagttcgttctt

SEQ ID NO: 96912 - DNA, 347 bp, Glycine max
agacccaaaatatgtttctattaattcttcaaaaattgttactaaattagcacttaaaatattatatttggttaacaaaggattagagcatgacacataactgttaatttggtgttatccaaagaattaaatttgataacagaatctttaacagacggtgatgttttagattttcatagaactgattagattattaatttttttttaaagactaaaatagtgtgggatgtaattgaaatatagaaggccaacctactatagcatttactcattatcagtagtactcttgaattttcagctcctccacaacatggtctatgagtatttggaatcatcacatcatctat

SEQ ID NO: 96913 - DNA, 247 bp, Glycine max
tttcaaacaatgtcaatggctgcttcagcttcttcccatgcttgtgtttccccaatcgccacatgcatcccttcttcctcttccaaattctcttcttcttcttcttcttcttcttcttattgttcttggctgacactttcttcgccccaaagagttggctcaaataagagatggggatgcagagccatggttcagcaagccgttcagggtgctcctgctgcgtatgccaaagaaatggaacgacttt

SEQ ID NO: 96914 - DNA, 121 bp, Glycine max
cttccatcttgctaggatatgatattgcagtgatgagtgcagcacccatatacataaaaagggacccgaaaggctcgaacgagcaactcgagatcctgctcgggatcatcaaactatactc

SEQ ID NO: 96915 - DNA, 111 bp, Glycine max
ctcgagccgcatacatagagaaattgactcatgtaaaaattatcccttcaaatgaagctagacctaaaatgatccagaggtggctgcggcgagaaacaaagctcatggctg

SEQ ID NO: 96916 - DNA, 389 bp, Glycine max
gatcataaatcatttattattagcatttcttcatggaaacctaaacaacgtaattttcagtctgccagtctgccaccttcaacgagtataatgtaaaataaaagagccaacacaatcggtccatcgttctttacatgcagcctaattgtacttacagcagctcccactcagtttcagaagcacgctgaacttgcacattcttcgagtccatgtacgttctggagataaatggcaatgaagtttgtgaaaatccttgttttggctcaatatcggtgtctccataccatattgctagctgttcatactcctttgataacctcttctttgaagaaaatgcatccagaattcttttcttatatgatctaagcttttgggctctacaagagact

SEQ ID NO: 96917 - DNA, 443 bp, Glycine max
acaggccattaaaactgtatgcatgtgaatataaaattgtatccatgtgaaccctcagcatgcccatgcccttgcctgcaaatcaccaatgccctagcctgctgcatgtcaccctaacctgcaaacagtgccctagctggagctggtgtgtgaaggcgtgaaggcagaaccctagttgtagctggtgtgtgaaggcgtgagggcagaaccatgagtccacgtcggtctcgcaagaaccaatggcgggactgatccacgttgcaaatgtcccgccattggtattggcgggttgcccagtcagcagctgtctcgctggacacataccttgtaccgcaattggtgctggcgacacccagccacgtcagcaccattctcgccagagctagtggcggcatcgttggaatcgctgatgcagctggcggcatccaatacaaaacagaccc

SEQ ID NO: 96918 - DNA, 345 bp, Glycine max
aaccattaatgtcatgtatacataaaaacaagttttatttttcaaagcatggtatatgaattaactcacctataactaagctacaacagaaattaatcaaagcaagagtaggtagtgttatttcacaaaaacaagcatcatcaagcttgtttgattgatgaatcatgattcttggttgtgccaagagagcacgagatcttgcaaggcatgtttccaatccccccaatgaagttcctcaaactccaaagcaccctccagcaccttaaccgccactaaaagaagttgatgaggcacaatctcaaggagctcaaaaaccaaagccactttccctttgagcaacgcaat

SEQ ID NO: 96919 - DNA, 437 bp, Glycine max
acaacccaatataatgcataaaaacctattgggattaagtttgagccactggctttttgaatcagttcataagaaggattacacgaggtatcaaagctatctgtgtcagttcagttcactgtttcatccactaaattcaatttgcttcctacataactatttccaaccagatcaccgaataaaataaacaaatgatatttggcattgtaattaaaatttctattcaccaagaacaaacacttgtacttcatttaaggcagtattggaagaatcaccactagaaccattacccccaacatgtcttcccatgatgacatcagtcgtaggaaatgagcatcaagctcgtcactggcaagcagagctcacaaataatatttttacgatcatccccagtttatcatccatcataaaaccatgttgagcgtccattataagtg

SEQ ID NO: 96920 - DNA, 345 bp, Glycine max
ccgtaattattttggttgcaactgcatgatgtttttttacgtgctatgatgtatagaagatcttgtttgaccggacaaggaaagggcattacaagtttgacggaaattcacaaatggaatacaaaagccctgaaattctaatggacaaaatatattatacaaatatgacatttattggtaagttcttagctctgaagccaaaaccttatatttattggaaaattcttagctctgaagccaaaaccttcgtaatatatacaaagtgtgcaagagtgttgcctcttgtgaaatgtgtcaaggaatttttgttcactcgagtttccttctgaccagtcctttgaaaaa

SEQ ID NO: 96921 - DNA, 352 bp, Glycine max
ctgccaaaaaacatgttgattaaggaaaatgttgaaaagctccctacaagtgggacacccccactttacaaaattggggggtaacccaataggggggggcttacctgcccggggtctaaaatggaccaaggtccattctacataccccttaataagccaggcctaaaaaaaagggttaaaaaagcttttcgaatccaatgcggataagtgaaaatggggttacttggaccatagtccccaattcaccatccttaaagaacatttatttctttattatatcgaagggcaaattttttgccattgcattttgcaaaatcattggctaaaagcttctgggccccaacaaatcaca

SEQ ID NO: 96922 - DNA, 196 bp, Glycine max
gtccagaccacaggtatcaagacaagagtaacaaacaagtaatccatttatgggaatatcctcaatcagtaaaaataattcaattaacagaccatataagtctgacgaaagacgggaagataagcgagatcctcggacttgctcgaggcccgaatcaactgaaaagcccggctgcagctctggtgatgggcctgcg

SEQ ID NO: 96923 - DNA, 296 bp, Glycine max
gttgatcaaacaagatataaaggattagatacacaaatacttggactgaattacagcatgcatatatagactagctcagaatcagatctcataatcatacaaataaaacccaaagcatatagggcaaattgagtagctaggccccgggttcctaaaaccaccctcggttagccacacaccatacaattaaaagtaaacacaagacaattgattaatctattaatcggtccactgaaaaggaaacaagcaatagcgaaagaaagagagaaaataacactggaaagagagaatggaat

SEQ ID NO: 96924 - DNA, 130 bp, Glycine max
aacaaaatcaaatgctaaattcaaatgaattcatatcactataaacaatttttcaaaaaatggatacatggcaaatttggaagtgtttttacacgtgggagaacaggattctgtgaaaatcaagattctt

SEQ ID NO: 96925 - DNA, 349 bp, Glycine max
ggccgccctttttttttttttttttaacccaaatgaaatacactttcaatgatacaaaccaaaaagattaaattacaaagcattttgtaacataaaaacaaacaaacacacagcgtttacatcacatgatgtaagattgtagggacactcaatttattatgatcagtacaaagacataaggatgactacaatggaaattttgacccagcagcacatgcaccataattaggctttaaattacatatttatcacaacaccaatcatatttatcacacgattcttatcctttcgacttctaaagattcccattggcagacatttgagatttacgaaatctcctctgtttgga

SEQ ID NO: 96926 - DNA, 422 bp, Glycine max
ggaaaaacaatgccgcatgaagcaccctcaaatttggcctaaagtttcccacatccctggcattaaggttgacgatagatggatttagccaccaaggatgatcaatagagaatcaacaaattatcaaaggcaacgtgtgatatcatctaaatcaaattcactcaagagtgctgcttaacccctagcttcgaagaagtaaccatacagatatggttgattggcacggagaaactgtacctacccatgaatctaagttcaaatttgaactagtgctaaatgtaacttttgatttaattgacctgaaattgacactttctcaatagctgaatttttatttgtgaggtttttcgttgggtacaatgtgaaggatgaaaaagtgtaccaagtgaacttgagaaggattgaatgattttagcttatct

SEQ ID NO: 96927 - DNA, 388 bp, Glycine max
gtttgtctctccaataggaaggagcttttaagtttcttccatacataaattcagcagataattaggtgctaacttgttgaccaaccctatgtgaaatggaactatatatatttccacctgcacctgcaccacactttcagctctatcttattttttgcccttccttgcttcaaatcgaatccagctatgttctttttttcattatgctgtgtcgtcgttggctttccttttctatttaaatttgtgtatttgttttttatcttaatcttgattgggacccttctctttagagagtcctagcccgattatagtttaattattttggatatggtcactcggttaggctatgccaatacttttacgtgtgttgacttgcttccttctttgt

SEQ ID NO: 96928 - DNA, 196 bp, Glycine max
cggctcgaggttgaagcccctcctgcagtagaaactaaaacagaagaagaaacaagtagtgttgtcaaagagagggagactttaatttggttggtttgcactatctgttttgtatttttatagggttcacaacaaacatgtatttcttaataataactgacaaagttgtttcttgtttgtgtaaaaaacgaatgaa

SEQ ID NO: 96929 - DNA, 344 bp, Glycine max
gattgatcatccttggacaagccctccccaacaagcaaggctaaacaagaaaatggattgtaggaattattcgggtattttataatacattaaaatttgctattcacaaattaagacctgaaaaaagaataaaggaattaatttacagttatcaggttggaggaaagggggagaaaaaacaaaatattatgttgcttatcctaaatagggggaaactgaactttgtctaaataactgtccaatctttccagagagagaggctgctcaccagggtataggtttccaggcttaggaggcttctttgaaaataaaaatgacttgctgtcaaagaaacttgagaaaga

SEQ ID NO: 96930 - DNA, 201 bp, Glycine max
gagaaaaaaaatccttacatcaatgggataaataatcatcatgaataacattggcatgagatacaactattcatattacaaagaaaaaggaaaaaaaaatactatgacaaactatcctcacacttctgcaatgccataagaatggcaagatagtagcaatacatttcatatatatatatatatatatatatatattccctt

SEQ ID NO: 96931 - DNA, 64 bp, Glycine max
cacgtggcgggagatgggggttggaatgagggacggttggagcggggtgagtgtggcggtgggg

SEQ ID NO: 96932 - DNA, 358 bp, Glycine max
ggacacaacacaacaccccttgggaccgacacacaacacaccatcaaagagaagagagagagagagagaaaacgagagagagagagagaaaacgagagagagagcgagagagatggcaaacgaggcgaggaacagccaggtcttgggcaagatcaacaagaacatcgaagcgggaaacttctacgaggctctccaactctacaagcttctcaacagcaggttcgtcgggtcgaggaagtacaaagatgcgaacgacctcctgcggacgggcatcaccaccttcttctccaaaggacagccgacgctggccaccgagctcttcacgcagctcatcgacaacttcaaagccaacaaagca

SEQ ID NO: 96933 - DNA, 389 bp, Glycine max
gatgattcaggaaagattcgcatgaagggtttgtgtcatggaagttgattgtgatgaaactggaagcattccaactgaactttgaagacacaaacccttcaagatgattcatgaaagattcgcatgaaaccccgtgatccccggcgcattctccacactaataatactatccagaagagtgggatcttggggaatgagcaattcaaagtcattgtatcccccgtgtctaacaaccagggaactggggacaatgtcaatgcccagaatcttgagggtagggtggatagtaaattagtgcctactcaaccaagtgcacaacctgatattgctcgacaatttcgccggaatctgaaaaacattgctgatattatgtctgtttcccaagaatc

SEQ ID NO: 96934 - DNA, 279 bp, Glycine max
ccacgcaacccactttatttttttgaaaaaaagatcccttccttaaaggaaaaatacctctgggcttcttattgggggtccccatcaatggtaccccttttcaaaatttcacttgaatcactccacctagggggtttaaggcaaaataattttgctttaggagcaatgtttttttcaccgtctcaaagaggcatattgcccagagctcaccatcccaaaagtcttcaaggctcctttaggccccattggtctcgggaacaaaaaaacgggccttaacta

SEQ ID NO: 96935 - DNA, 450 bp, Glycine max
ggaaaaaaaatgaaactcatctgcattattattcaaaaaaaaaaacatttctttaattgatattttcagaatttaatctatacataagggatccctaattatacctttatgttcaaaccaccatttacaccaggtgtaccatcagatatacccaaacagccaaagcctaacacctacccaggaattcccaccaaaaacaataactacaacctaatataagttaaaaacaaacaaaaattccgaaaccattaatcattcaccataactagttatcgtcgtgtcatcgcaattgaccaccctccgggtccttaataatgtagccgccaccccaatctccgggtcctcccgcgctgacccgacccggacgcgatccgggtcttgacccgttcaaactcggggagtggacacggaatcttgatcccaccggggtgttcaaacccgaactttttt

SEQ ID NO: 96936 - DNA, 425 bp, Glycine max
ggggtagtagctgctgctgctgctgcttctgctgtggttgaatacaaagggattcaaagcaatgatttttgtagcaatagcaatgagatcgaaaacttgcatgggatgcttccttcggatgcagaacttgctgagtctgctgctgatgttgagagctttttgggtagggggcttgaaaacaagtgcgtggggatggaagaattgggactcgttgataccaaagaagaggagtgttcggtgggtactgggacggcgaaggtggaagatgaagagagccctctgatggagatggatatgggaagagatgatcaatcatttgagttgagctctgattatgagacgtgcgaagaggtcaaggagatgaaggttagtgatttggaattggggaatgagttatgagagatgaaagagaatgatgatgatga

SEQ ID NO: 96937 - DNA, 349 bp, Glycine max
gccctttgtttttcttttttaaaaaaaaaatttataatttattcaataatgtatctcacttgggatacaattatcggcaaaaacggagggaacagaaacacgaactataccataccatgaacctcattctccggggggggaaactcctttggcccatttgaagccaaatcttatttacattaatggaaaagaactgtattcacacacaggaccaattggaaataaaattggttgaatgaaaccaaaagtaatgcagcgctgatattcagtaaagaggatcatgcctcatctgcattctggatagggggaggtgcaccagcaagccaaccccacacgccacctgaactct

SEQ ID NO: 96938 - DNA, 220 bp, Glycine max
acaaaaaccatgcgattttattagatccaatattgggcgtgctgtcctttcaaagagagatagcatcaatccatttattagcccattttttggactattttgtgcttaacgcatactacatacttaatatattcttacaacatttcataatttccacccaaatcaaagactctaatttttttttatcacaacagttacattgataatgatatcctttatt

SEQ ID NO: 96939 - DNA, 349 bp, Glycine max
ataccaaaagtaatttttcaagtaccataggcagaaattgtgtggagccagaagcattcccttactaaaatataaaaaaatgtaacgaagcaatttcctttgcatgttggtattccaagcgcttctttataatctttcttctgtaattcccttcatctaaaagaataaaaaagctgagaagaaacatttacatgtctaaaacccttttttccatttagttttcattaaagctctattgccgccacgagtcataatacacatcagaatgatcgaaaagttcaccaaacgcagcgtattcggttgcatcgcactcataaccgaaccccattcccaaatcgaacgagtcgta

SEQ ID NO: 96940 - DNA, 544 bp, Glycine max
gatgagacgacgtatgaggataagaaaaactagacaagcttatggtaaaaatgaagacaacgaggactggattagtgagagagaagttgatggtgaaactgaggacgatggggacatgatcagtgagaggaaaagaaacattagagaagttgatgctgaaaatgaagacaacggagataggatcggtaaaaggaaaagaaacattagagaagttgatgctgaaaatgaacacaatggagacagaatcagtgagaggaaaaaaaacatcgctagagaagttgatggtgaaaatgaagaccacaggccagacaggatcagtgccttgcctgatagccttctgttccacatgataaattttatggacacaaaatctgctgttcaaacttgtgtcctgtctaaaagatggaacgacctttccaaatgtctcactaatctcacatttaattctgatctcccaagcgaaggcctggatagaagttttaagaaatttgagtcttgggttttgtctagtcgcgatgactcatatcccctacttaatcttacc

SEQ ID NO: 96941 - DNA, 437 bp, Glycine max
ccatcattcctttttgtttacgctgaaacaaaaacaaacttctgcgctctcttcgtgcggatataataataaatcgtcggttgtcgttgtttgttcgatttgtagttgacttgctgcgaaggttgctttgatcattcgaagcgcctgagggttttgttcttggaatccgaaaatggccgcagttcggaggcgggtgtggcagttatcttcaattccaggtttcggggcttcgaaattggaagtgtcgtcgtcgttccaaagagcaattctcgatccatttcctgtttcggggaccagacacttttcccaagtggtgaaatccaacggcaaacactcgttccaaagagcaattcttgattcatttcctgtttcggggaccagacacttttcccaagtggtgaaatccaacggcaaacacctgttcctcgttgacacct

SEQ ID NO: 96942 - DNA, 397 bp, Glycine max
aagtgggaaaagtagtcaagtagacattagattaagctttatatacagaatatttgatacccctttaccatccttcattatcaaccatgtaaatatactagtaagaatgtgtatgaaaacactttgaaaccacgttgaacggagaaattttgcgttccaatacgaaaacgccaaactggggttgcttctccattgcatcgcctttacgctatcacaaacacacactaaaaccccttgcttattaatcttcttaattaaatcctagagtgaaagaaccaaagattgagaagaagagcataggccaggttggaattataaataaatcatcctaaacccatgacagaacaacatcctcaaaagttcttcctatttggtgaggtggaagaaatctgagacc

SEQ ID NO: 96943 - DNA, 415 bp, Glycine max
aaaaacaaaatcggattaattaaaataaaataaagtaagaaagaaaaaaccttgttctttctttaaccgaagaaagagaaaaaatagtataaaaaagaaaaaaaaaaaaaagctgtgtattccaatttccatgtcaaccaggtggtggaggaggatagccactggtatctgaccaagtcgaaggtagaagctctgtgaaccccgacccgctaccaccgtcttctccgccgtgaccctgctctcccggcggccggaaaatccccatttgctggctagaagaaaacagaggatacgaagcataggaaggcagaaacgccggcggcggcggtgatggcaacaacgaaaacggcaaagaagattgaaacgctgccatttgcgaatcaaagaaccagtggtcgagtccatggaactcccc

SEQ ID NO: 96944 - DNA, 336 bp, Glycine max
tttgtttttttttttttttttttttttttttttttattttttttacaaaaaaatcaccaggttttctttgttgcccaaaaaaatatcgctaactttcaacatatcacaattttgaacatgggattattttttaggggtaaatacagagggacctaacaactagttcccacataaaattttagcaaaagtttttttattttaatactaatcatttaacagagggggaaaaagattcacccatccccaaagttcatgggaaatgtggcttaacaaaacttagcctcctaacgcagtagtttagccttttacattcacttgctcaaaaaaaccaaaccc

SEQ ID NO: 96945 - DNA, 318 bp, Glycine max
gcggccgccctttttctttcttttttttttttttttttttttttttttttttcgggaagaaccttcattgaatcattgtaccctccgggaaaaatattttggggatggataacaaatcacactgggacaccagacacagtgcaagaactcttatgggacacactaatttccagacaacaaatcctaagtctgaccttgctcccttttccaaaaacccattaacatttacattagcccccccccaaacttttatacaagcctataacttttctcacactatgaatttacaccctattattattgcaaaatttttggcct

SEQ ID NO: 96946 - DNA, 466 bp, Glycine max
aaatcaattcgttaattgcttgaaaattaaatatatacataaactctgaatacagtcaaagtttctgtaaattcgacactcgatcttacaatttttaaagtactacttgaacgaattgatagacttgccaaagagtgaacatcacgttttcttccaactccattggcttttctccttctccgaccggttccaataacttatccacaaaagatatggaagatccttcaacatagcctttagaagttcctcaatctttttcgtactcctatggaggagatcctcctctttaggtgttgagatagtgtcggctttttcataaaccctggcagagctaaccattttttttgtttccctcttaagtgtcacctttatgcttcacctatgagtatttcccttgaccatgaaatcatatacatgacaccaattgagacaccaagacaatatacccgcagcccctaacatatag

SEQ ID NO: 96947 - DNA, 383 bp, Glycine max
gatgtgatcgatgcggagatcgggggtgcccttgagcatcgagatcgtgttgaacgaacccgagtgcgagtagccggtcagattgaaggtcatgttcgtgaactgaacgtgactgacgccaccttcgatggtggctcggccgcggatgaccacgccggttcgcgactcgcccacgaacacgcggggatggctcgcgtcgctgccgcccttcaacacgtagatgaggatggagctgccctcagcgtacgttccgttgcgcaggaagtatcaggtattcgctggatccgaggcgtacgctccgttagcgcgcgttgcgtccgctagctgggaggcagtcgtgatgtctttaacgcgtggtccctgccgggcacgcaccatgcgca

SEQ ID NO: 96948 - DNA, 344 bp, Glycine max
aacaaaaaccgcatcaatgccctgaatcacaaacaaaagactttaaactacaaaagaataagggtttgaaaaaaaaaaaacaaatgacttaaaatacttggaactgagtataacactttcttcaaaattttgaacatgtctttaacaacaaacattgcatacaaaaaaaaccaggccctaacctaatatgaattacccccccagcgaaaaacttttcaagcaacagggaccccaatatcattagcagccaaaactggggccggctggatgtattctttttcctcctttggaaaaaggattgtgacaagaacagggaggggaggtttaggaccctgtttcccctt

SEQ ID NO: 96949 - DNA, 261 bp, Glycine max
aaaaccataatccatagattttcttattgcatcatcatcatcatcaacaaaccgcatttcaaaagaaagataccgccccctggatgggcccatagtggttcccaaaacacacaggccaacaaaacaaaaacaaaccaaacctgggaaaattaaagaaattagaaacccccccaatgggggctcacatttttttaacctttagaaccccccaatccttcgaaaatatatcaatgttccctgaaaccggttgacccagtcacc

SEQ ID NO: 96950 - DNA, 511 bp, Glycine max
agctgcaaaactgctatttattattaataattggtttaaaaaatacacataagaacctcttaagtaaaatggaaacgttctacaatatgacaattgtgtggaactttgacctaataaaacctattttgactgtagaatatgtattggagctgaagaaacaaaatgatgcattcactccaccccccatttaaaattttatttattcttcttcatatgaagtaggatgaggatgctatgaacctttgcagcccatttctgtaaaccaggaaattcgttcaacagtgggttcactttcttatccccaccccccaccatgcatttgaagtgtttgatgttcagtctcagggaagactttctttcaccattaatagtgtaatggcataaaacccaatgaatccaatcctggaatgcaggctatcaacttaaatttgcaaaacattcattcatttactttcactgttattctgaaagcctatggtttctttcatattcacaacactagggggatgag

SEQ ID NO: 96951 - DNA, 258 bp, Glycine max
gcttacaaattaattgtccattgaagactacaagtccaacaaacactgtaataagcaaaatcgacatgcttatagcaaaatcaaaagctacatcttgaagctaaacccgcgagtaccacacccgcctaaagaaaatccaaaacaaggcttggtatatggtttgaaagaaacgaggctctagtaaataaaaaagactgaagttgtagcctcctttttagttcttgatgagagtacaaatacttaaacactaagctaact

SEQ ID NO: 96952 - DNA, 280 bp, Glycine max
ggaaaggaaagggaataaaaacatacctttgttttattaggggaaaccctttttcggcttgggtggggcctataactaaaaataatggggggctaaggaaaggtcaaccggcttttttccgggaaagccccaattttataagggaaacaaaaaaaaaaacccctggccaacccaaagggggagttgggtacaaacattacccccccggacttaaaaaaaacattcacaattggggggtcccaccaggaaaattttttattcccccccggattggcccccc

SEQ ID NO: 96953 - DNA, 371 bp, Glycine max
tttttttttttttttttttttttttttttttttttttttttattgttttttttttttgggaacccaattcattttatttccttatcttcttcgggaagggttcatagataagttttttccactgagccctgtttccaaattaaaaccctttttccgatagtttcttgaaaggtttatttaaaagtggccatcagtatggagcccaaatagcagttttatggccctagactcagccacatttaactgggattcaaccttggaaaagacttttggcagccccttttttgagcgaatttgaaaaacctggtcaaatacccattcccaaagcattttacacaaaatttttatcaagccccccaatttaacagggg

SEQ ID NO: 96954 - DNA, 434 bp, Glycine max
agataacacatgtatataccacttatcgatacttgtttgtacatggtcaaggtttatcagtgttccctccctgaaatatcaaaaagcagacaatctaacattaaacataaattctaattttaactcccttcccccaataaagatctatccccgcaatatccatcaattcaaggatcttccaataataagcttcagcttgaatcaaattagttgaattatttggctgcatctattttctctctgcagcaatgtaactccaagtgatcctggaaaataatcagcaaagctatatgtatatataaaaaaaatcttttcctctctttttcatatttatcctttcaacactatcatgcatcatttgtttggtatctatacaccaggacttgaaaactagtccattaggacaagcaacatattacatcaccattgggatg

SEQ ID NO: 96955 - DNA, 379 bp, Glycine max
cacagcgaggcttcgacagcttcatcacattccttccaaaacttccctctcttgttcaattgacggtctggacctacactctttcttcctcaatcaacacacggtctctttaaaagcagcttcgccacgctcctgtggcgtcatcatacattatcacaaatctttgttacagaccctctcaacgaacaatatgctttccaagcttacctttgccatcgtggcacttcaagccagccttgccctagctggcaaagccgtcatcaccaaccgctgcgactacgacgtctgggactggtcaatctctactggccatgcctcctcatccttcatggtccctgcaggaagctcccacagcgagggctacactggaagtagcact

SEQ ID NO: 96956 - DNA, 531 bp, Glycine max
agcagagttaccatcccgcttcttctcatacgcctccataaatcaagggcctttatataacaggattggaaaattttccattctttgtaaattgtaatggcataaattcattcaaatgttgtcatatgaaattgcttttacagttttctataggattaaaactcttttacttcttacctgcctacctttgatatagttgtgatagttctgtggttcctttctctggttctgtaatgtgaaatcaacaactttaatatcctggcctagcagaggatggttgaatgtgcactagtaaaggggtcttagtcttagcattaagacacaatgggttgagaagaactaagcaaagagaagtatcaaagttacttctcattcaatcatcttgtgtgtgttgtattgtggactgctgcattgtgattgaatgacataattgagtgagacatgaaataatatgaatcaattatcagatgtttctacaaaatgttttgttgtgtcttgtactgttttgtcagttgagtattgtgagtggaa

SEQ ID NO: 96957 - DNA, 474 bp, Glycine max
gctcgagcagacagctacacacaatactctctcctattcctccttcttcttctcttctagtctgagagagcaaaacgttaattactctctttctctctcatctaatcatcataatcatccatgttcctcttttctcagtcttcttcttcttcatagtctctcccttcttgtaatcactgatcatggtggcggctacgtttgatggattctccataagggactacacatccaagatgagatccatcgacgttttcaagtgctggccgtttgcatctacctcctcacgtgacgtatcagatgaggaggttcagtcgtggcttccgccgatgaacccgtgccctagatccgacgattctaccgaccaccgcgctcaaaatctggagattccgccttctgctgcggaaaccgatgaagacgacggcgatgtagattgcagcgaagaggaatctgcagaatctatggaatctgagaaat

SEQ ID NO: 96958 - DNA, 399 bp, Glycine max
ctgctgtgcctgcaaggaatccagaaatcatagattgccacggtaggagaactctcccatccccttcatgtttcttccacagaagtacatcaaaagcatttttggcagtaaacatggcagattgatttgtcccgttacgcatcacagtaggtcctatttgtactggtccatttgatgttgtgaaaacaaggtggatggctcatacgcgagaaggcggtggtgtactgaaatataagggtatgatccatgccattagaacaatatatgtagaagaaggacttcttgccttatggaaaggtctgttgcctcgactcatgaggatcccacctggacaggccattatgtggggtgtagctgatcaaataattggtttgtacgagaggaggtatcttcatcatt

SEQ ID NO: 96959 - DNA, 392 bp, Glycine max
tcttataattgttggaaagggtcgatttccgtcgaatatggtggctggattggcagaaagacaagcagagcacgccgagttaggccccattggagatgttttaacatcatcggaaaatgtggtgtcatcagttatggttattcaacaacatgatgtagcgtcggtagatgatgctcctgtatataaggtgcatggaaagcacgacaaggtcaacgatagtgattcatcccataaggttgggatttcaatatcaaacgacaacgtagtgtaattatttttttatatcccttttgtaagcaaagaaggggaacaaatcttaagcaccagcaaatagttctttttaagtaaaattatatttaaaataaataaagataaatcacccctaaattttt

SEQ ID NO: 96960 - DNA, 253 bp, Glycine max
cacgccttacaagccgtcgtcgcctctatcgccagcttcttcgtggtcaccctccttctcgccgccgccatcctcctctgacagcaccaccgcaactccaccaagacccgggcccgctcctcccatatccgaacccgtcccgcccccgaccgtgaagcctactcctgcctctccgccgtggacgccagctggtcctacgaccccaacctcatcaagatctactgggacaagctcgcccgcgccaccgacaact

SEQ ID NO: 96961 - DNA, 370 bp, Glycine max
cggctcgagttccaactgattattgcaactctttttgtaagattagcttgagaaattgtattggctcatgatgctaagttatttatcttagcggatttcagcgagatttctatcaatgatctgattgttacacacactgaagccaacttttaattttcactatggttttgctttgaaatgcccgtttgtttatttcttgttaagataattcgtggccttaattggtgttttgctatttatgcagcattgtaaaggcaaactgatttgaacaatgagggtgactataggaaattgaaatatggattgcgatcactgatcatcgatgggatgatcaaaagagattcatatgatgatattaaggacatctgat

SEQ ID NO: 96962 - DNA, 295 bp, Glycine max
aaaacagggaaagggggcatttttttttaacttacaaaacaaaacattttttttataaataaaactcaaacaagaggccgattttttaatctgtactccaaggggcgcgattagttgtctccacactttatgccctaacaacaggactaacttcatcccctttttgcattaataatataagggagcggatcaaaatgggggaaccccttaatattatgagaaacttgcctgatctcacaggggtgttatcacaatcctcgggagggaaactcctgccaattacacatttgggcaa

SEQ ID NO: 96963 - DNA, 427 bp, Glycine max
gaccaataataatagtccctaacttcagataagagtgatgacgatttctttccccataatcaggtttatacatagttactaatcattctgtaccacagttttattaaacttcccaaagtaaaatcaaaatgggcaccagtgatgaattacatatataatcatttacaacattgatcagacaaaatctaaagcttgatccatccactttcagtatacaccgcaaatgaggttatttccagctccaacactaactatttggagaccaataaatatccgccacaacctgcaaatgaaaaattccttgtgacaaaaaggttttagttggatcctcctcttatccagcgaccagatcctggttttcccaaactagaatagtaatcacccacatttgccacaaatagtggatctctatcttctactttgcact

SEQ ID NO: 96964 - DNA, 216 bp, Glycine max
caacccaaaccccgaaaattccaaaatacttttaaaaaaaggggaccagaccccactttagtctgaacaacaaaaaggctcctacacaacaatttttttgtacaaaaggcaaaatgttaaaaatttcaaacaaattttttttgtttaaaaaaataaaaacctatttatatggataaaaataaccgtggcaaaacaaggacctaaaaattcaatgtt

SEQ ID NO: 96965 - DNA, 486 bp, Glycine max
gtgagagtgaatgatttcccatttcccaacgacaatggcaaaaaccgcgaaaccctggccccaaaacccctttcagcaaattctccactgtcttcaaaagccacggcgccatggacttcgatcaccacctcacggagctttccgcctcctcgccgttcattccatccggcgaggacttccacttctactacaaattcaggaacttccgccgcccgatcgaggaaattgcgaggagaacgcagtcgatgctcgacagaatcggctccgcggagaacatttggggcagaggctcggcgttccccggtgacgtcgacgacgcgtacgagtggctcgtgaacgcgaatgacgacgttttggagctggtggaggagctggtggacgagttgcggatgctcaagaaggacgagggagaggaatgtgacggcgcgaatccgaaagtgccgtttcatataccgacgatcaagaagccccagtatgcgtacaaca

SEQ ID NO: 96966 - DNA, 318 bp, Glycine max
ggggcataacgccacttttttttaattattccaaaatgccctttcgtacaaataaattttgtacaccggccaaaatgagctgtacagttagctgatcaaaccaaacagtaatttttttcaattgaagcactttactggtttggaaaagatttttaacactcttaggggggttcattcacttccatgaattctttcgtgggagggaaggagtcaacattgggagaggggaattgctagaatctacttttcaaaacagcaacagttggtgcaacataacaagcttcaactcctcaatggttatgattgccattaaaatgc

SEQ ID NO: 96967 - DNA, 191 bp, Glycine max
cggaggttaaaagtggtttttaagggggaatttattgaagtgtgaacccaggatcaaaattataaattacccactgttgtacaaattgaagttaatagtgatacatgtgtgcctcgcatttgtctctatcgccccactccccgtttgttttttattgaccacagggtgagaagtaactaggaattttttac

SEQ ID NO: 96968 - DNA, 458 bp, Glycine max
agtatgaaggaaatactctgataaaacttgtttgtaagaatatataaatgaagaaaaacaaaaataaaatgaattaaacttttgtaagataaaattaacttatacatcttattttttgaaaaacttaataacagaacttgtataataacatttgccatagtagcattagtgtgtgaagctgggggagaacctctttatgatcaatcaatcatgatagatagagacataaacatcatcttgagctatataccatcaatctgcatttgcaatgtgtggcgctgctctaattaattttcccgaatatgagagaccattgttgttgatagctggttggtgccccacgaacaaagccacatgacccataagcttgtcttttctagaaaacgaggtgccacacgagcacagccacttgagatccccacagtgcttctcatgtgtcctcagatcagagagcaccg

SEQ ID NO: 96969 - DNA, 350 bp, Glycine max
gaaagcagtaccacacaggggttccgtgatatataatgaaagtaaaggaaaattacaagagttgcatcatgcatgtgacttttttattttatttcatttcattaaactgctatgggaccccgtattctttttttctctctctctctctctcatcttcaatttacactttacacataaatttatgagcgcaaaaacatgtccacccactatagctatgcttttgctttgctggcccatgtgaactggggtttcttaggagaaattaacgatctctgatcccagttcatggcggccggaatgtgacccacagctccaatgatctgcttttaacctggcccatgatcagaaag

SEQ ID NO: 96970 - DNA, 377 bp, Glycine max
gcaataacaatacaaactatttcatcatttcaggcctcctaattaagcagctacgctgtttacttatggacagctacaaactaatttaactaccacaccagtacctcaaataaacacaaccaaaagtaactcagcataagagctcatacaatcataaatgagtgcaagaaacctcaaacaatctttggcatttttcaatgcaaaacactaaactacagctgacttaaaggcattaagtaaatttgtaataatcataaggggcatgctactttccgacctaattgaattgcatggtcatcatgagtctgtttgttgatgttggggtggctgctgttgctggggttgtgtatggggccatggcatgaacgccatgggag

SEQ ID NO: 96971 - DNA, 280 bp, Glycine max
ggaaaatattgtaaatacattaattatgaaggaaaatgtgtacacaagaaaacccaatgactcagaaatatgtataaatatatgaagtttcaaattacaaaacatgctcaaattacaagagatggattgcacatattaacctcaaaagtttgtataaaagtgtgtgtgctggaactcaaacattgactgtagttcctgtacaaaaaaaaaatactataaaaaatactcactgttcaacatgaaatcctcacgataaaccaaaaaactttccacgtggggt

SEQ ID NO: 96972 - DNA, 318 bp, Glycine max
gccacataataataatatggttcattgactttagcaaacaaacaaaataaattagcaaaagataagagcggggcaatgcaacaaaaaaccgttacacgcaacgggaaattgcaattcgaaccccgaaggagaaaaacaataataatggtggtaaatattcttaagagcaaaaagagaaatgctgctgtggatgacataacagagagtcaatcggcgctggtcattttaagccgtctgattggagaggcaagcacgctggctgaagaagtacgagaagatgacggtgatggtgaggaaaccgactgtgatgatgaaagg

SEQ ID NO: 96973 - DNA, 378 bp, Glycine max
cacacctaagccaaaatgcatttccactccaatggtaactgggtttcagtacatcagaaccaaaaaggaataaaaaaatgtttattctatgatatatgcacacccaaaaacaacaaagaggaatccaatttgccactggttaatctttttactcttttttttcttctttctctcttctatctatgtctctgttcattatatgtagtaggatggcgaattgccagtgtatacatacactcaggactactagtatcacactgcaaactctgtacaaaaaggcaaaccaagatcaaaagctggattggagaaaaacaaacccagaataatatcaaaacaaaccaaagaatgacacactaagcagtaagcacactatttttt

SEQ ID NO: 96974 - DNA, 275 bp, Glycine max
gggaggcaagcataaagcttgttttcatgaaagtggccccccccaaaaacaatcaaactccctggggggttgggaaactatttatccacttccttttttaaaaacattcacatgctcaaattaacccctgcctaaaagaaaaaatcccccggggggggacaacaaaaccaaagggggcaaaggggttttgctaaaggtaagggaacaccctacctttttgcttccatttgaagttaccagccaactgaatacaacaaatccctcagaccataaac

SEQ ID NO: 96975 - DNA, 161 bp, Glycine max
aaacaagataattttgcattttttttcgcttgctgttttgttaaaatctgaagttaactaactaaccagcttaacaacctcaagagtctgaaatttagtccatgacccacgtcttctagaacatatataacatgctaccttattaatgatacacattttac

SEQ ID NO: 96976 - DNA, 250 bp, Glycine max
ggggcccagggcaaggctattattttggtaagctcgccccatttgaaggattggcctttgatcttaaaagagggcttcatattttgggggggaaaaaaatttataaactatcattggaattgtttgctaaaaaatgtaggatttttaatggtttggaacaatagctcttggttcaaattggggggattttgacactaaaagggggggttcttttccaatacataaaaaaaaaaaggctcgcttttttaat

SEQ ID NO: 96977 - DNA, 399 bp, Glycine max
ttttttttttttttttaaacaagataattttgcattttttttcgcttgctgttttgttaaaatctgaaggtaactaactaaccagcttaacaacctcaagagtatgaaatttagtacatgacccatgtcttctaaaacatataaacatgctaccttattaattatacacattttacaaattttgcaccaaaaacaaaatcgtgccttgtaagagaagaaaaaacataacatgaaaacaacgacccgtggaggttggagaaactcaggttagaccagaggcctcgccgagtcaacggccgtcggcggcaagataggcgcggtggaagactacgacgacaaccccgatacttcaacataattgtttcgaaccctatgcgatctaatagacaacgcccttgc

SEQ ID NO: 96978 - DNA, 418 bp, Glycine max
ggcctccaactcaacaaatactgtatttggtgtagcgtgtcctcaaaacataaattatacttacaatatagcagggaacgaatcttagagtttgctgctcctactcactttaacacagtagaaaatgaatactgtatgaacattacgaatttgtctctgcttctctaatgggcagaattacttaaatcaacggctataatttcacactttacttttaagtagttgtataggactcatccaaaattacaacggcccaaaaaatatcaatgccctattttttaggacaccactatgctgattagttcctgtaatgaacactgcaaaatcgacagatttcctattttacgtaaaagtgatcacaagcagataggtatcacagagactccggactagtggatggtctgattctagctggcat

SEQ ID NO: 96979 - DNA, 227 bp, Glycine max
aatcggcaaacagataaagaaccctcaaccacacaacaacaacaacaaaggaaaagccctcgaaaagattttggcgaaccaatttctcactacagaaaatatcatcctcttcttctttacattagttttggataaaacattccgctgatactgaattgtattctctcttgacttcgctgattttagacctttgtttttttctgcttcgttgttttcagggagaaagg

SEQ ID NO: 96980 - DNA, 301 bp, Glycine max
attgcactaatggaaatgataatacgaatacttcattactaatatttcataattacaatttctcaagtagcctaaagaataagtatatataatacaacaatctccaaaagaggttgaatgctaaagccttgcaacatctattaatatttataatagactttaatagcagtaatcctatattatattattaatataacagtattatattacaaatactggatttggaggttttccattataacctcaaatgggcacgaggtattccattttcaacgccagataattagcttatagctttcgc

SEQ ID NO: 96981 - DNA, 153 bp, Glycine max
gcttgaccttttattattattgttattattaggttggggctgcctttgggttatatcaaaagcagtaacaacaattaaagccgctgcgaagacagccagacaagcttattaacatttacatgcaaataccagctattatacttcataatagta

SEQ ID NO: 96982 - DNA, 285 bp, Glycine max
agctaacactcccattgggatctatttaggtcatgatgataatgccccaccagaaatgagttcatagatagctactgcctgctaggcatattgttccgcagtcagttgcacccctaaagtgtcctttttttgtctacataaatttaggtactagctgataactaacaccaaaatgcagtaagtccactaacgagggcatgaacacaatcatttacagcattacacaaaagaagggccttttgaaaattattgggacttttttaaatagaagttgcagtttgaaac

SEQ ID NO: 96983 - DNA, 252 bp, Glycine max
gggtcatagcacttcccaagggtttaggattttataacccttattaaaaaaactggcatgagtccaaaacccaaaatatagcgcaatgatttatgaataatgactttacccataacatttaaaatgaaaatttctactggctgttgaaatgaaacctgagcattgttgaacatggaaccaacttggtcaaaacctaacttggaaaaaagcttaattttggattttgaaaaaaagtacaattcaaattcattt

SEQ ID NO: 96984 - DNA, 363 bp, Glycine max
aaacaaaaactccaaattccataagcctattttggcttcaacatacttcccttttattttccaatttccatttttcatcatgatcatcatccatattattatttcgtcctgttattggtcacctgaaaagtgaagactgaaaaacctccccggaatcacgtaccgaaaaaccattatttcatttgggccaaccaccgaaacacttaaacacagcctaaaaaagagaccccactccccgaacgtttgacctttgactgacacaaaacgacttataatttttttttcactccctccctccttccagttttcactatcactactactgggccgaaacttcatgaacaaacttattcaaacgaattg

SEQ ID NO: 96985 - DNA, 226 bp, Glycine max
aaccaaaatctggccccggaatcttcaaaaaaatagcaaaaaaaacctttccccaagacattccaagacttttttaagatttttcccaagggggaaggaaaaccccgattggggggtgagccataaccgggttggaacaaaggcccaaatcaaattaagtagggagaatgggggggggggagtcaggtttgccccccaaaaggggacccctgggggcggggaaaaa

SEQ ID NO: 96986 - DNA, 410 bp, Glycine max
gtcctgagtcggctcagagttaactcggacactccaactcagatgcagcaggaacacgacaacagtaatgaacaacgccattgggtaataatgggtagggattggtttcttcaatcggaattaacgaagaagatggcactggttacacggcgaaatgccataagaaaaggagtggtgggaattgtgtgagtggagtttcggaaaaaaagacccaaagagcttttcttatgtactactgtagtaaagaccaaatatacgtaatgtgtatcatcacactatcacgagcttcaaagaaaaaaaaaaccactgtctctgccgctggtaccaaaaaaaaaaaaaaaaaaaaaaaaaaaaaacaagagaaaaaaaaacaagagaaaattaatattcaaaaaaaaaaaaagggcggc

SEQ ID NO: 96987 - DNA, 377 bp, Glycine max
aacccagtcaaatacgttagttcttgaggcaaaaccaaacatatatttaattgagagcttacacaaactaacccgcataacccatcagaaccaatacagaaagaagtaatcagattgacctcgaaattttacagatcaactaaatgtattgtcattcttatttaagaaaaaccattttaatttggaatgtcatttttagctttatgaatagagtataaacaattttataaaatcatccaatcacaaattatggtttgaaatactttttaagataattattttaaaaattaacaaatttatcatacatgattgattatcatataaaaccttttatgctgtcaatttataacattttttttttatcttatgtatgaata

SEQ ID NO: 96988 - DNA, 152 bp, Glycine max
cggaattaactcccgggtctactcggcggccgcccttttttttttttttttttagatttggaaaagtcacactcaatcatgttaaaagaatgggaaaaatacattccctgcacaattcacactctccttgaatcaacacagcattgcaaact

SEQ ID NO: 96989 - DNA, 131 bp, Glycine max
gctaaagaccatataatctttcatataaatgggtgtaactgggtgaacccagtcaaccaacctttgcactatctacaaaagaacatcctatcgggatcactctgagggattaaaggcggaggaaccacatc

SEQ ID NO: 96990 - DNA, 173 bp, Glycine max
caaccgttcactccttcttctgcgtcaccgacaccatcataatcaccatccctttccttattcttcttctgcaacatccctctccccattttctcgctctcgttatttgtgctctactccattctccatggctactgattacccttcacctgtcaccgctcaaaacatcaacc

SEQ ID NO: 96991 - DNA, 262 bp, Glycine max
ttttatttaattctattcagaccaacaatatattaataattcagccacaatttagtgagggttataatcaaccacaaaccaatatgtttatccagatatttatttaaataaagcaaaaactgattatactaacaaccttattgaaatgctacttattaaagaaggtttgagagagtaatcatcatgacaatttataatcagcatgctgcctatctttactgtagatgtgctgcagacatggcaacatgtagaattacaactg

SEQ ID NO: 96992 - DNA, 392 bp, Glycine max
ataatactggagcttacaatattagaaacgggggggtgaagaatttcaaaggtttttcatcaaggaaaaaaaaaaatcctaccattgcccggatgaatcgtgtctaaaggccgcagatcttcctcaattttggtcgcctaattaactactaccaagcagcgacactattcacatattggtaaagtaaagcctagaaataattcaaaagcaaaggttaaacaagatgccatatttatctatacctatttatctacaaatcggattctggcacaatgcctcacttctgcactgtcgaggcattaaccggcttctctttgcagcttgtgcctcacaattatcaggttccatgtcatctatcatctgaccatcatcacatccagcctcatcagaaa

SEQ ID NO: 96993 - DNA, 482 bp, Glycine max
gatggaaagataattctaattaaattcttattaaaaaaaatactacaccataaaagtaatgaaaagatattgtaagagaatataaaattattcaaaataaaataacaccctagaacaacccaatctatattgactccttgtttttagccaaaacagaagtccgaaacatttatatttaaatttactctttggcacatttggcagcttaaagagctttgatgtatgttattacgatggtattagttggtggcaaaattttggcaacactccgaagaatatatttcctcttctcacatatcatcgcaattgccaattgcattaatcccataactctcattaacccgatgatgcttgctccatgtctaatgtggcttttggcatgtgctccctgttctttccccacaatacgctgtacagtcctagaatcaatacgaacccttctagaagacttcccaaactgattatctcacccaacacagctg

SEQ ID NO: 96994 - DNA, 227 bp, Glycine max
atcaacacattatttctattacattgaaggtggattcattcgatatttggcgtaactgtcatgaatgcaatttgtacactgcaacctaatgtaatatttattacagaattgtgcgaatcacataacctgaatgtataaagctttttccaacatttgtgccacaatccattatttatctgctgctaaaaaaggtttcactaaatctgccttgtattagcagcattaca

SEQ ID NO: 96995 - DNA, 349 bp, Glycine max
tcataatccggatcgagattgagtgtaacaggatcattttcttgttatcttatataaaggtcctcaaggaaggtattgtactgagatgactgagacaagggttaatactctcatggtcacgagttacggcaattatggcatgttgcacaacatcagaattcatttgaattgccaattccttggtctcgggcattccatcaaggaacatggtaggtttgcgttagagtgctcttcatcacttagaggtggtggtaataagatgaaacttatagtgaagaagaccgggaagcaaagttgtttaccaaccatgatggtagctctcaatgagggtcatgacgccatctctgag

SEQ ID NO: 96996 - DNA, 407 bp, Glycine max
ctttggcaaacttttactcaaaggcagggccatcagctccactgtctcaggaagtaaagtctgaaatattagattatctaaatacagctgaagaatttttgtagaacatcttccaatgtgttataaaaaaaacaacatatctaactccctggatgtcgtcaatggttgcgataaagtaaatttattcttcattcaatttaaattttgattcaaacttgttctctttattcatgtgaattatacttgctagctatggttgatgattaatccccccttccccaaacaaaaaccagagagaggacaatgcgaaaattgagtctgtatgcttcatgtaatctgtatctcaagttatatcccaagtaaaagagcagatacattcttgtatgttttactttcttttatttacc

SEQ ID NO: 96997 - DNA, 124 bp, Glycine max
cttcacttacttgtccacaatatctaatgtattttcgtaacaaaccaagcccaacagaaacttcttcactcttagggtctcatggcatcatttcagaacgtagccagctttgagccatggatgc

SEQ ID NO: 96998 - DNA, 424 bp, Glycine max
catcatagcgtccagcaaacaggaaaagggtctcgttgttatccaccagcttcatctccctctttaccctctctttatttaaaatctcatatatgtgacccctaatctctccaaagtcatatcctaacctaagagagtttaaaaaggttggaaaaagacatgcatggtagagtattttcaaagctagcttcttccacttcatgccaaattgccaacttaaaagctgcttggttggtttccaagtagaaaacagtaccctatggaactatgagagggacccctttgtccttttgatggaaggaacttaattctctcctattgcatatatgctgcatcatttcctcctcttaacctagcttcgatcactttcagatcacttccaagttcaagcagaaacatcatcgattgaagatgaacggcacag

SEQ ID NO: 96999 - DNA, 424 bp, Glycine max
gggattcgtcggcattgctgtttcggcgtggctaaatttcatttaatgttacggcagtgaggagagcaggggtacatcagcaaatgattaatgctgaatctcgaatgggttatgtagtccagaactcaacttagaaaatttggcatctgtagaaaaaacaatatcatggcctatctctagaaatttatactggggaggaaacatttttaactaatgatccattagcatgatcattcaacataatcctactagttctgcctaagaatatacaaaaattagacccacatatacagggagcaggacctaggactttagccagatccacattaaaaagacaagagatgaccatcttatggatgcaagtcatactaactgtagaactcagtctctttctggagcatcgccagatgctcttcttgcactg

SEQ ID NO: 97000 - DNA, 481 bp, Glycine max
gataataggtacatttgtattttattgctgctgttacaccttgacatttagctatatgcaacatcataatctatttcaaagtttcactactatttgttagttaatctacatgccttgttgagataacttacaacacgttaaaaatctatgctctggtaaatcgtaattgaaagttaaacaactagaaacgaacacaagcatagctggaatgtcctatagtagttgaaatttagataataaaatggtaagctttcctcacacttgttcttcgtttctagtgatctccattttcaaaattgtgggcgctgatgacttcctgagtgcaattgcaattttccttcttagcattggcctcatttactatttgcttcgccagaaatatgggctcttgagtatttgggcttcgtgggctacaatctttgcttttgccccacaccacagcatataggcccaaacaaatgataacggcaccgatcaccct

SEQ ID NO: 97001 - DNA, 220 bp, Glycine max
aacattcattatatcaaactaatttccaattttcaaattccgtcttattcattttcctttaaaatgagccttaacagccataagacaaaatgggtataatgattaatgaactaaaaaaataatagacttcagcggtgctgaagttctttttggatacatatgtaatgctatctaaagacatccccaaattattggatctccattaaaatcatatcataaa

SEQ ID NO: 97002 - DNA, 168 bp, Glycine max
gggtggagccacaactcacaatgcttcaacacaaattgaggcaggttattttctttgtaagccataccttgcgcaacaaaagataaactgaataatacccatacataaaaccgttttttataaccataaacaattcataaagttttttttttaaactaaaaattgccc

SEQ ID NO: 97003 - DNA, 152 bp, Glycine max
tagcaaacttcaacttgtaatcaatggagagagaaaatttcaagctcaaaatatggcggagaaaaaaatggtgatcctaggaggtggcgtggccggtgccaaccttgcaaaaactatacaccatccttgccattggaaccttattgatccca

SEQ ID NO: 97004 - DNA, 443 bp, Glycine max
atatcaaaatttagttattggatacttctaatttttatgaatataatacagacgaccataacgaaaaataaatgcttaaaatcatgcatagacacttgcatgaactaggcaatggcatgtatttttaattaattagtcattgatttagagaaaatctaattcatcatttgttgagagaggatagaccacgagcttgcacccattgttcaccaccaaattttggagcctttttaccaattcagtacatggccacaagacctgcacttcccgcaagctagtcaaagaccatagttcttttggaagctccgtcaaggatttgcagcttctaacgtctaaacgtcgaatgcgtggcattgaacctttgtcaagtctccaattttttaccttgattgctatcatctcaaacacttggagctgaaggaaccctcccgtggcacagtgga

SEQ ID NO: 97005 - DNA, 445 bp, Glycine max
aaacgcgttataagtttactagttttctagtcgaatcaactgggctgttttttttttttcttcactcagtgctttctttcctgtggtctatgaaattaagcaaataatgacatacaaattacaatgcccatgtgaagcgacaaagcgagacacagcgtaggcaagcaaagttaaacttgacttgaagctgtcaacagagtatgtacagatatagacaggagtggaaccaaattatttgataactccatgaaagcctccttgcttgtgttaaattgacagtagcatttgttgtgagccagttctacatactaattgctcctgttatcattcatctcgaatagccctcaataatcaaacttgcttgtgttgaaggtatagtatgtttacaaccaactgaattttgcaagagtacagtaacgggcaaaaccccctttgctatatttac

SEQ ID NO: 97006 - DNA, 410 bp, Glycine max
aagaaagaaatttggtgggtctcatgtggacccataccttttacaccttattttaataataaaaaattctcttcaatttacatctctatttttattctctgaaccaaagacaacattaggcatgttcccggcaaagtggaatcacatactagtacactagttacaagctagcagacaaaaatgatgatgcttctagctgtcttaagctttcggccacatgagcaataactcctacaccagcattgtgaaaccattcatttttcacctgaaaatcagacaagcactcgtgttaaaaactctgtatcagtgataccatcatcatccgacagattaaatggatgcagtacatgaatgttgttatgagcaaagaaaggccagaatgctgagtgaaagctgacatcaactttttt

SEQ ID NO: 97007 - DNA, 178 bp, Glycine max
acgagtaaacaacaatatcttagatcgagcttgacgttcagagagacgctgggcgcagcggtcattccgttcataggaataatcgaacctgaggttttcacattcactagttgcttagatttccaatcttccaggaataagaatagacattattctaccttcgacgacattctcaccc

SEQ ID NO: 97008 - DNA, 360 bp, Glycine max
cataatcaaactacacttcaatctcatccatgtagggcaacacaaataacagaatttttgttaccatttgttcaaaccatatttaccgaaatcacgtcaaacatgctccatatacacaaacacagacaagctttaatataataaaacagcacgacgttcattttttcatgagtttcaccagaagcaactgaaaggggcttttagtttgacgtggatttacacgtttgagatttcaaaccaaaatcgtttgaggttgattattgcgccagttacgttggtctttgcgcaagttacggaagtagtttttagggctacgttcaaaatcatctttataaatgcgaatattcctccctggagcct

SEQ ID NO: 97009 - DNA, 394 bp, Glycine max
  unsure (1)..(394): unsure at all n locations
gtgggtgtctccatgttggatctctctcgtttcttcttcttcttcttcttcttcaccttagtgttctccttcaacactcttaagtcacttttgtcttctccttcaatatggtgttattagcttgaactcactcccaacgtttcttttctcattgttttgactgcaatattgtaacgctcacactccttttattgctgcctttgacttgtcttccttcctttgcaagagtttttttttttttaccttctcttctctctctttccttctttgatctttggatgttatatatataggcgtttgttgcctcacgggggcgtttcttttcttaatatctgaataaataggcacaaactcatgcctcanaatcctcacttttcttcactttcccttctaa

SEQ ID NO: 97010 - DNA, 499 bp, Glycine max
gaagcaaatgattcaaatttgatattcagtaacatgatttgaaatcttgacataatcagcaccagaacaaggggaaaaaaaatagcatttgagctttgaacctccttatctggttttcttctccagcaataataggatcatacttaccatttttcactcctcctaagttaaagatgaaaggtagaagatacatcaacaagcttcctaacaataacttgtttcaaaaagtgacaccaacatgtaacatattaatacaaacaaagatcaaatcatcaaatgacagaaggttgtcttaatcacaactcaagattaccctccaagtgttattctgagattgatttcaagctcttcttgttgctcaaagttcaggtccccatcaccgcacaattgcggataaagtgattaagctgaatgctgccacatccaatttgcctccacctcaatttctcatcatcaggatcagggcagcaagtgtacatagacaaggcatgcactatgt

SEQ ID NO: 97011 - DNA, 322 bp, Glycine max
gggggcccaaaaaaccaaacatcctttcattaaaacccgggggtgattaaaaattttgcccctgtgtccaattttacctttttccccgtcagggttgcccctttgattcgatttctttttgcccccttttacaaagttttgccttgcatctctgaatttcccccaaaccaaccaataacttttgggggaggaaggggatcttcccccctttcctccaaacaaaggcttttttcaacccttttaaaagaaccaaaagcccaaatgaaaaccagggtttaccagaccttttaggaatcctcgggggttgaaatcaaaggggggt

SEQ ID NO: 97012 - DNA, 404 bp, Glycine max
gaaggatcttcggtatctgaaccagtacgcataaaaatctgcatctgggaacctcagacacacacaggagcagcagaagaagaagaaaatgggaacagacgtggttgtcggaggagcttcttcagattcacatcaccaccaccgtgactctgacatagaactcattgctgaaagagcacctttacctcacagtggaccactgaacaaaagaagaagttccaaattaaacaacacttcttctgcttccacctccgccacagaggaacaagatgaaggagactacgttgaggtcactatggacatccaaggtgactctgtggcacttcacagtgtcaaaactgttaacaacgatcaaagcgaagatgagaaactgattctgcttggcaaaggcatggagaagaaaa

SEQ ID NO: 97013 - DNA, 517 bp, Glycine max
gttaacgaaaatgaaatcttaatattaaaatacaaggtattacacccacggcaagctacacccaccgggaaatgtttggccatacctgcggccaagacgtgcagatataagcaacggaaagataaaacgcttttgagctacaattttactattctagctgccatgcttgatttcattatcggtcacgggtgaagatatactagtatttgcaacctcctttaagcatcttcttaccattgaattaatataaaagaattttaatgtgaagttttctaatgataaaacaatgaatgtggaggtgcaaatgatattactcggcaaccaagatagagaagcatgggcagctgcacacgtacaatatttcaggattccccttatctccttcagttcccacacccttccctctccccaattattttcccgttggagtaccagtttaccatgggaaaatattgtaggggtgagtttctagtaacaaatcgtagatcaacttccattctgcctactactaatatac

SEQ ID NO: 97014 - DNA, 218 bp, Glycine max
gcaaaattggaccctaaaattattttatccagagtaacaatttgcaaaggggggctagttttcaattttcaaaccaatggccaatttgaaaacaggcgtgcaattcatgaaagccaaaatttatttagcctaaacccaaaaaccttaacaaacattattttcctaattccttccaaattctaactaggccacttaattaacctcctaaattttggggc

SEQ ID NO: 97015 - DNA, 434 bp, Glycine max
ccaaagcccagccctctctctctctctctctctctctctcagtgcggaaaaccgccttgcttcatcactctttctctttcttctctcactcactactcactctctctggtgtgttgccacggatgaccaccaccaccatgaaatgtcaaaaacccttctcacaaaacccaccttcccattagatccttcctttcccctctccctctcttagatcttcttcccttgcatgcaccatccattacaatttccaatggggttttagcctcttcgccttctggggttcacctgttttgcgcaaaagtgaaacctttgaaccctttccccaacctggtacctcagcaagggcgtgtttggattgattcattttgagcaaaaaaaaaagggtttaagagaataagtttgtattttttattttttttggagaaatgggtagc

SEQ ID NO: 97016 - DNA, 360 bp, Glycine max
gaacctccgtaacatcctaatccattactttttaagaacctaatatcagggcaaacacctaatactagaccacccctttttacatttcatcccaatggtacattatttacagagccaagagaagcctcagatgatttaacctcctactagtttctacatgaaaatgtcttgaaattgtccagaagattcaaccttcatggcaaaatatgtgggagcagcaaactgggcatatagttaaaaagtagataatattatgggctgcagaactaaaccaaaatctttccaattaccaaagaagcaattatccgcaccaccatccaatcgttgtaactcctcacaagtcaagggttggatgatgtt

SEQ ID NO: 97017 - DNA, 328 bp, Glycine max
cacaaagcttgattgtggttttgagattacacttctctgatcttttctctccaaaatcaagatcaaaatctgtagaacccttttcctccttagattctctctctctcttaatttctaattatatctgacttttatcctctcacatccacaaatgtttttctcaaagaatgttcgtagattcttcaaattcagaggccaggttttttgcccatgtcttctatactgtcttttcaatttctgataacctattcaccctcatcaaactctcttcatcatcatccacaagaattttcaaccaaaacactcattagtcttttggctcaacact

SEQ ID NO: 97018 - DNA, 334 bp, Glycine max
aacccaatcctaattcaagggaatgcatatttcaacatgcaaaaaaaaaatttcccaaaaaaaagttttacaaacaagcaaacatttcctaacataagcctagattaaaatattttacaagttttactttgcaatattcaaatgagtccctttgggacacaaattttcacggacatgttatttcataagggaatcccattattaataaaccccccaaagaagaaccaattaaaaaaagaaaaagagcattggaacccatggagattgatggagtttcagtaagaaaaacatccatttccttttggatcccgaaatccaatgttctcaatggccc

SEQ ID NO: 97019 - DNA, 478 bp, Glycine max
aacaagctcaagcaagaattctttcactgctttctcatttatactagtttaagttaattacgaccacagctctagatacaatcaaaatgctaaaagcaaggatcactacaaaagctagcgatatctaaattaaactaagctactcataaagtacatagtgattgttttgtttgactcactcaccaaattacctaagaaacatgtcttcttaagttactattggtatttgataacaagtattataaccttaggtttttatgatatctgcttgttcctcaacagcaaagcatgctcaagctccacctccacttccccaattgttggtcgcccatttggttcatacttcaagcatctctagtatcaatctcttccatgttagattccagttccactcccatgtcaataatggtggtggaaaataaggtataatcaccattggtgtttctgatatctgcttgttcctgcaaccacagagcat

SEQ ID NO: 97020 - DNA, 463 bp, Glycine max
caacaatttctccgtctccggtggcttgcttccttctccggcgtcatgagtaaatcgtagcagcagcaggcgcggcggagatcggttccggcgtggcggatctgtgtgatggtgtcgcacatgtaaatcgacccttcctttttgcacttctgagtattacctgaaattggttttagcagtttcttatacccacaattctacttgtctagactagggtttcatggcagatagtgaccctccatctttaggtcgtgtgaagcttactgatttagtgccttggaacgggttagcatctgattcctataaaatatcagattcaattttgtcacattctctggctcagttatctgcagtcatcgttcagtttccagcaagtgacggggctattctgcgatctggtttagaatctgctcgcatgtatttccaccaaagggaaacgtatccacctgcagatataatcgat

SEQ ID NO: 97021 - DNA, 525 bp, Glycine max
gtgacaaaatactatcctgtttaacaccagataaagctatcctgtttacactttttaccagcttgacataacttgaggacaaaaaagttacaactaaacttgttgcagaccatttgacagtgattaccattccttcatgaccgatagagggctatatagttgtcctattgattttgaagatgtcttcattttatatattgtttgatactggccagcaatacctccatcaagctgtagagctgagtctacccttcattttcattggattggcgtctcataatcctaagagtttctaagaaatctataataaaacatctatgggataaaactctgcagcacgtgtctttcatttatctgcttaaaaagttgcatatacagacagcaggcataaaactctaaaacctagcttcagataggttcagagcccccttgagaactatataggcctatcttcacaatcttatcttatgctgcccatacgttggaagtcagggggactgattcctgtctgagttttgatgggca

SEQ ID NO: 97022 - DNA, 81 bp, Glycine max
gacgttaattacaatattttatacctttgcgaaattgtgacaaacccgcaaaacattattgaattgatggtattattgctc

SEQ ID NO: 97023 - DNA, 81 bp, Glycine max
gagcaataataccatcaattcaataatgttttgcgggtttgtcacaatttcgcaaaggtataaaatattgtaattaacgtc

SEQ ID NO: 97024 - DNA, 411 bp, Glycine max
aaaagggagggacaaccatgaaagaaaattacgggggaggggaatgcccataagttacagtattaatatttgtgcagcaacaagaattttgtaaaggtaaaggcccatccgctggtttcttacagttctatcctttcagcaacaaaatggagttgtggaacacaagaatgtatcaatttttaacacgccaaggagcatgtgctaaaaaaagcaagaattaatatacctaaagagttttaaaggttgaagcctccatttatactgcatgtgtacttttccaacttataccctagctacttgatgtgttcatgaaatccttaagaagtttggattgacaagaagctcagtgtttctcatttgtgagtcttggaagcatagcatatacatgctcatattcttaaagagacaaaa

SEQ ID NO: 97025 - DNA, 176 bp, Glycine max
ctgcctgacaccattttcagttcacaggggtaggtttaggtcccttgcctggtctggggtgcaatattccccatacaataacaatacacccactttattaaccaattagtcaatatacctagtagtgagaagatttagtgatcgatcctttcctttcgcaatctaaccgtggattt

SEQ ID NO: 97026 - DNA, 348 bp, Glycine max
tttgttttttttttttacaaataaagcgtgataatttaacatatttacagacacaaatgaaaacctgttcaatgccctctccctccaaccaaccctctcctgtctcctaacacaacctcaacataccatactaatacatacttcacatgacaaacgacaatgttggggccaatatcctatcctttttcacccaaaaatggggtattctggaaaagaattacaattaacagaaaagttcaaattaaaaactagacttctttataaaatctttctttccacagtcaaaattgacattactaaagtagtcatctaccgtcattgttcatcattgtttaaatgcaatgaccc

SEQ ID NO: 97027 - DNA, 329 bp, Glycine max
cctttgttttttttttttttttgttttgaattcaaggttatctatataatattttgattgggaaaaatacaaaccaatgtgattgaaaactattcccagccaacagtaacaacataatgttgaatataatttacactggatgtaattactgggactaaatagtgatcaggattaaagcctctatgaccccaaacctgagggcttaacccgcaaggtattggttagggatacaatctgattacattgcaggatagtcccttaagcccggcatgagagtatatgttctcttgtaagaggtgactcttgtttagattggaaaatgccacttt

SEQ ID NO: 97028 - DNA, 473 bp, Glycine max
tttgttttttttttttcatgactttttgacaatagtattaatccaaccgcatattacagaggaaaagcaaacaacaaacactatcaaattcacaaaagaatcaaaaaatgcaccccaacacaatacactcccaaaaacaccatcttggaaggcgaaacataccacaaggaacaacttgctatggaagaaaatgcggagacaatattcagtagataaataagctccctttggagtacatacatgacaaatggacaatagtgttaatacaaccgcatattacaaaagaaaagcagacaacagacactatcaaattcacaaaagaatgattcaatgcaccccaacacaatacactcccaaaatcacatcattggaaggtgaaacataccacatggaacaactttctctaatactggccctgatggggctgaaatgccaattccctctcttatatttcacaatcaaaattgaccctc

SEQ ID NO: 97029 - DNA, 196 bp, Glycine max
gcaccaactgttttaatcaatataataaagaggacaacaaggagagataaatacaaagtttatacatagactattctacgaatgaggcaggacatgatgcatcagttttaatcaaactagcgaatagcgattgaattgattttgacagaatgcaattattcaattggttgagcgaggatagacgacgagcttacgc

SEQ ID NO: 97030 - DNA, 423 bp, Glycine max
ctcgagccgctcgagcggctcgagctctcaacaagtatcaccgggagacattctacactcatgatccagttgttggttatactgactacccttttcatgctgaagaatccaatgttgtagcatcttagggtagagagaatgtactatgctatgctaactacaataaaagaattggattgtgatttgaagtggattgtgatttgaagctgtcccctaacaagcaacaatgctaacggaattaggcactattgctgggttcctttacactaatcattcaagtatgttggtttggtatgggtgcggactggtctggtgtatactgtgatttgtgatgtatgctggggtgggctgttgttgctatcagagaggctcaacttttaataagcttttctttccctgcaaattcctatttgcaatttggtt

SEQ ID NO: 97031 - DNA, 258 bp, Glycine max
gggatggcacttcaataattttgtaggcaataagtatggattaacctttcagtcatcagaattcaaaagtgagtccatcagggaaatttgttcaaactatacacgattgagactacctgacagagacttaggtcaaacaaaacataaatgaacttcagtaataggaactcagctgactcagagatacaagtgaaggcgcgcagaaatgaactatttacactgagcacactttggggattaacgaaatagcgcccttaa

SEQ ID NO: 97032 - DNA, 289 bp, Glycine max
aattcataaaaaaaaattatattacttttttaattcattatattttttccgtaagcatttactgaaaaaattacgtaagacggaaagatggccattacatcatatcgtttccatggatcaaaatcctgaagattcataggtccacaactcaaatctttagataagccagttctagctagcccctcctaatcaaggatagcctaaatcactaacccatcaatgacacaacgaagtattgcatttagaaaacatgctttccaccatttttctttaaattttttaataacct

SEQ ID NO: 97033 - DNA, 525 bp, Glycine max
gagaaagtaaaatttattacgaggggattagttggagttggaacttagaattgacacgatacgtatgtattgttgtaacggctgataatctatatattctagttgatcgatcatccaattccacgcacaggcatatcaattgtacgtgctgtagcgttcgttattgttggaaggtcgtcgactcatctccaccttcttcttcttcaaagaaaagttgacaaaatggagaatgcgagaaacggcgtcgttgctgcgaatcaatagccgtaagcaacgcaatattgatcgaattaatgatattctgtgtaaggtacgtaacgacagcaacatcaatgaagagaaagaagcatcacactgagaaatccagaataatcggactcctggttgtgagtttccttcgaagtcggatcctgcaccgcactctcatgatcgccatctacggctcccttcttctgctattcgccctattctctctgttcgctccgtccccggtaaatgaaatcaatcttcagacacagaacaatg

SEQ ID NO: 97034 - DNA, 231 bp, Glycine max
gacagcaaaaagtcaatatatttccaaaaggaagaactgaaccctgaacattaaaccagtaatgcaaggcaaacaactatgtatatgaatactaagaaaccctcgacgggctggaaatgataaatacaagggcaataatatggaggagactaaaacatcccttatccacttgagatttgacattatcaagcattacctcattaaacatagagtgtaacaaagacccatcga

SEQ ID NO: 97035 - DNA, 121 bp, Glycine max
gcataaattgaacttttatatgtggagatgggtccacttgaaagtattcatgttccaagaactaagattggccaggacattacatggtagaagaaaaaacagaccctaccaactattacaa

SEQ ID NO: 97036 - DNA, 311 bp, Glycine max
agaaaaagctagaagcaatgatgaaatcttgtacatccacaaaagcattgcatgacatccattcgctcagcatatttattcattccaggtgaattagcaaattgcgagtaaaatatattttcccttccgaaggttgcaaaattgatctcaaatctatatatattctatattacattcatgctcggagaactcctagttaatcacttccaagactgaggttcttctcaatgagaatcatattcaagttgtaggctatttcagccaagcccatgtccctaaaagcaaccataatctttttacaggcaagcata

SEQ ID NO: 97037 - DNA, 275 bp, Glycine max
aaaggaaccactactagtgcttcccattcccctcaagagagaagcgccaaggtgccaaaatctgtattccagaattaacatcagtcttcatgacagcagtaaatacctcaagatgtctcacaatacaataaatctaatgtactcacataaaattcaagaaataacatcatgtagctatcaatactatatgccttgtaataaggcaaagattacaacaaccttcttgaacggaaatgaaagcaatatgctcatctctttctaccaccacgctctct

SEQ ID NO: 97038 - DNA, 127 bp, Glycine max
ctcgagccgaatcggctcgagcaacacttttgggttatcgcgaggagcagttcacccacctgcacttcttcttacatgatgtctagacaggcccaaagtccagcatggcgtttatcgacgtgcccaa

SEQ ID NO: 97039 - DNA, 288 bp, Glycine max
ctgcagtggaacatcagccatttctgaataattatatatgtaaaaatgattcatggatactggaatacacctagagattgaaaacgtgaagaatgacaagttacttaaataactccggtagaatcaataatatgacgtgaaaaaaaaaactgaaaaaaatggcgcctccatatttaactcctcaacgtttatacaggccccaaagggaaacaattgaacggacacaaacaccatgacatacagaaaataaactatttcccaaattaggtttaaggctctgggtttact

SEQ ID NO: 97040 - DNA, 248 bp, Glycine max
tttgatattggtttttgttttttttttttttttttttggcatgtagaagctgccatcacataccataacacgcaacaaaaaacgatatagtccagaacattgagaatataaagaaaaacatttaaactaatccgactcagacagattaaagcacgaacccggaccagaaatgaccgcagatctcagaagccttttaaataaaaatgccctaaaaaaatgagggggagagaacgacggctacaactgcc

SEQ ID NO: 97041 - DNA, 324 bp, Glycine max
aaaattgaatagttacaattttattttaattatattggacaaaaaaagttatcaaacagcaaaactatggtagatataaaatgcattacatctcgcatgaagggggggatctatacataatatcatgtgttgcaagcaacacacaacattccaacatgtagacattgaaggtcatacataacttacaatgccaaaacaccaaccaacaagaatgtcataaaatacagtaatatgagagagctaagcaaattcacgatccagatatacaatccagcagtgacccactcggagccgattcgaacccaaactgaagtccaaccaaca

SEQ ID NO: 97042 - DNA, 321 bp, Glycine max
agatattaaactcataatataaagtgtgttaaaagaaatatgtttgacaatatcttgagagtattgctgatatggctcacgcttttctttttgttaggattgttccttgaaactaccacaagagtcacgcaaaaccctatcttcattagctttcacatttgaatcacatcttctgcatcaagctaattatcttggacattggcatttcattttgctttcaacacatccatagagcactttcttttcctcaccacttttgcttttccccttaagcatatcccactgccctgtacattcccccaagaagaaacccactattct

SEQ ID NO: 97043 - DNA, 124 bp, Glycine max
gaaaaattaagatcacgcgaacttataatttaaaaaagcttagatgatacaaaagctgaagctgaacacagtgaatattttgaataattcagtgtctgaattccccaccgaatcactccatgac

SEQ ID NO: 97044 - DNA, 208 bp, Glycine max
ggacctatgaaaaatctatttcaatcatcatgaaaaccttttccaaaggcttttccaattagtgcaactcacttataacggtcacaattatcccttggaagttaaaatccccaattagggtttttcaaagcccacacattttcccttcctaggcttcatcttcctcaaaatcggaataatcttcattatcaaaatcattggcactttc

SEQ ID NO: 97045 - DNA, 360 bp, Glycine max
cccctcgaggtcgacggtatactcggcggccgcccttttttgttttgactatattatctccaaatttctatatagcttaagcatatgccacatttttctacatagatcaaaccgggtaactcttagttaacatagagccagctagagtacattccatacagtaatgtcgaaataggttcactctacagctcgggagaacatatggcatgaatagccgatgagccatgaggaacagaaatctatgtggaatttcaacattgcctagatatcgacacaattgcctcgtggagacacccaatctcattcgtacagaaaccagggtcttcagtgatctggcgctatttgctaaaaggtcttcat

SEQ ID NO: 97046 - DNA, 287 bp, Glycine max
agagttaattagcagtaatataattaattaattttgatacattacgatgccttgattggttccttgagttgtcagaataaattcatctctttactcactagtgatgacctgagaatccaattatccaaaatatgagagcatcaagatgtaaactccgacaattccagagtagttatttacagcttcctctaaagcacagtaccaacaaaagtcttaaattttttttatgcatcttcggggaaccaggtcaagatccttgttccattttggctttttatttgaacaga

SEQ ID NO: 97047 - DNA, 331 bp, Glycine max
  unsure (1)..(331): unsure at all n locations
gagcacaaacataattcagagctctatacatttttattggttcatctcatcaataacataagcgttaaacattttcctaaattattgtagtccatcccttctttaaaaacagggcatatcagnccctttcacaggaaatcatttgcaacaaatattttgaactgtgaatgcttttttccaagggacataatgacgaaggaattcatacatatagtagatgctaaataatcaaacccagtcaccatcattccattacctccaagaacaaaccaaactctccaatttctgcatagcccttgcaggggcaacccacaaaccccaatgacacatg

SEQ ID NO: 97048 - DNA, 225 bp, Glycine max
ctcgagccgaatcggctcgagcccaaaaatctctccctctttcgctctttggctctttcttttaccgattttcgttgtaatttctttcttagtcgcatcgctctcggatcactttgggtttttcagcggagacttgcgtcgcactcgcatgcagcactttactgcgaggtacggaatccgtgaattttccggcgaggtaagattccgttgacactttgctttggt

SEQ ID NO: 97049 - DNA, 390 bp, Glycine max
gagaaatgcaaggccctaacactactaactctctcttcaacaacaatactacctgtggtaatcagccgcagatccacttcgacaccacttccaacgacgatttcctcaagcaaatgctttccaacctcccttcttcttcaatggaccctcgaccaaaccacacccgataataacgtcgttttcccctacgacgtcgaacacgccaacttggcctccaagtttcgcaaccaccagatcaccaccgacaacgacaaggcctccgctctcatgctccaccaccacctcctcctctcctcctccgccgctgccgccaactcccaactcctccacatgccctttgactcctccgcgccaaacgacgtcgttgacgccccctccttcaaatctctc

SEQ ID NO: 97050 - DNA, 365 bp, Glycine max
ccaattaaataagataaaacattagattgttttctttctcttaaccaaaagataaggcaaatgttggactgtcgaacgggataagctaaagaaaaagtaacataaatgtaaaaaaagaaaaagaaataacaaaactcgttgcgaaaagaaaagaaaggaaaagacaaaaaaaaaaaaacagaaatgagatagaggaatgggaaactccgaaatttgtgattggattggttgaagcatgaaagttagcgtctgcaaaagtcaaggtaaatacgacgtcgtgcagtgaagccacccgcttcctagactccacgtgacttgctatgttcaggttcttcattgacggtaacggcgtgataatcaggact

SEQ ID NO: 97051 - DNA, 326 bp, Glycine max
cacaaaagagacatcttcattaccataaataaaacaatcgagttcctacaagaagcattggctaaaacttttcaattttaaatagtcttttaaaatattagcctgccaatcactcactatgaacagattacatatctaccactgttctgaactttcaagaagaaaatggaactcatgaaggaatgaccacttcatcctttccatagatacgctgaagctcccgagtagcagcttggtatgatgctttccatattcgaaagttcttttggttgatggtagagccagtcacattttgaatagcatcaaaaagcatatcctgattagta

SEQ ID NO: 97052 - DNA, 410 bp, Glycine max
gaggaattttggtagtatcctctgcaatattttgtcatcagtttcagttttgtgatcaaagtgagtgagacagagacgtgagtcgctccggtttctgcttctgtgtgtcagtcagagcttctcttttgcccattttttctttctgtgggaagaagaaaatgctggttcggaggagggtgatgagttggtgaagggtggcgaaggcccttcaggctctggtagctcatgtcttacttttctccttcactatttcccttgctctcaagcttgaccatgtcattcgacactcatggtggtaggcattttttcctctatgggtttttcatgctgtggtagcacgaggcacgttttccttgcccgctccttctatgcctgatgatcgccgatgggctccttttcattcactcgta

SEQ ID NO: 97053 - DNA, 459 bp, Glycine max
agtgttaagaggataaataggaggatattattggaagataaaagctaatcaaaggacattgaacaaaactgagaatcaagagcatagtgctgctaaatctttagtgctgctaaatccctgaactgcacaagaatttaaactaaaccagaaacaaacacaacaatagctatttatttgtttgctcttaattttctatacactataagtcaatattatcttaatttcactacttctatacattggtgttctattagcttaaactcctctctaacagataacaggttgttgtgctaagtctttatgtatctgcacaaagaggcatacccctcaatcctgccaaagggcatgtggttccgttccaccacgctgcttccaaagccttcatgctttccccgttggcttttcctctcttagtcttccaagagccaattaacaaaatggaaagcatatgaagtcaat

SEQ ID NO: 97054 - DNA, 339 bp, Glycine max
aaaataaatataacttataattcatgcccctatagatcccacgattaagctttaaattaatgcacatatacactacaaaattaaacatcctgaaaatggttaatatttcattacattttctatggcactactcaactctatggccacacctaagattacccgattacatgatgataaaaacgtgattttggtggcttcataatacattccagcatcgactctccaatcagacgcaattagaacaatttggctcaaaatgaattcattgtgacctagagacactaattcaaagtctgaaagtactatagcctccaagagcagaagatccatacccaccac

SEQ ID NO: 97055 - DNA, 289 bp, Glycine max
cggaatattaacatttaacaccatggaagccgtccaactcatgtccaccacaacaatcaaggcgtcgagtaacaattacaacgataactcagttcagaaaatcgatttaactccgtgggatctccaattcttccatattggaagcatccaaagaggacttctttttcgcaaagaaaaaaacacagaatattgtcaaatcgagcatctccaacactcactttcatccactctcgcattctttccactcctcgctggccgccttgccattgtcgaacatcacgacaacact

SEQ ID NO: 97056 - DNA, 376 bp, Glycine max
ttcattattgtttgccttttgtctatttcttcctacttgccaattcttgatctggaggttacgtttgggacttggacactctctgtcaatagtactaaataagcgttgaatttttagacaataacggggtctgtgtgctcagctggctaggctgacaaaaataaatacaaagaggctgaagggaaagccttggggaagaagcttaagaagtgaaagagcatggcgaaggggaaagaagatgcttattcaatttcaaggactgggagaaagcaaaagaagcttaactccggactttcaggcgaatacaaattatccactcctagtcgaaaagaaggcatagagagctcccagagaggctacttttggtgaagagctg

SEQ ID NO: 97057 - DNA, 268 bp, Glycine max
aagcaggggcaaagctaaaatattttatatttggatttggatttgttggcacccagctgagatgccatgccgtgctttacaacatccgtgcatttcctacacatccttagcaaacataaagtttagccctctcttttactcattcacttctgtctctattcaaagtctgagtccatgtttcccattgctttcaaacctcttgggctctttttggatatcttcttctccctaacctcgtatcgttccaagggaagatcgcacaaccatg

SEQ ID NO: 97058 - DNA, 185 bp, Glycine max
gaaaacggctcatgacaaatggaggtcattctaatggaaataacttatccgggggcattggccgcggtgagagactcaatgctgctcaaagggagagaatgctcctcttgaccactgctacctttgatcgcatcaagggtgaggatacattcagtgccaaagatgaagattggcagctttacaaa

SEQ ID NO: 97059 - DNA, 322 bp, Glycine max
  unsure (1)..(322): unsure at all n locations
ttttcagtatgatgaatannatttatntngattcttcctgatcatataaattcaaacccggattctggtgttttccaacttaccttgttaatgatcttttaaacaccatttagacaaaaactatggaaaaatgatcacctgtaccatagattatactggaggaaaaacattcgatcactaatgatctaattttccctcaaacacatcacacaaaatctataaacagattattgactacaatttacaaaaaagaaaaaaacaaattgctatataatagctgactgcagacatgtaaaaagggggtgaattttcttaaaaggaa

SEQ ID NO: 97060 - DNA, 131 bp, Glycine max
aatccatggggatatataattaattcaaatatgttaatatcccataataaattcgaaatgaatgtccatccaattctcctagtgcacaaaccatacatggaagatcactccccaaaacaacggggactaaa

SEQ ID NO: 97061 - DNA, 395 bp, Glycine max
cttttggccaaaatccctcctctacaaaaacccaacccaagtgttacaagtcttaatttccattatcacgtgaattgttgcacattccttgtttagtcccagcaatgggaagccacaacacaacaaccagctcctcgtctgattctgaactcccttgttctaattatattccgatacccgatggaacccactttcccgcagaagaagctccaagagagctgcttgtgatcttttgtgggttgctggtgcttgtgtccttggtggccttcaatggctacagggcgcatccaaatgatcatcatcacgtgtcgtcatgattgccaacaacgttgttaacagtgacacccaatgaattggaactgagccccgatacagtaccatgttcaacatcggag

SEQ ID NO: 97062 - DNA, 309 bp, Glycine max
cattgaacctacttaattttctccattcattgaacattcaattatatcaatcaactctttcgcttgtgttgtgtttatcaacctcatcaaccaactcggtatttgcattactatttagtaatgtacgataccacaaaacggatcttttgtgttgtgaacacaagctaaggttgtcgttacaaaaaaaaatgtctaaagagttgcatatacaaaaaagttgaatcactttttttcccccagaagtagatacagttacttggcatgcattatttgcctttattactatgtaatatatcatataatattaat

SEQ ID NO: 97063 - DNA, 423 bp, Glycine max
  unsure (1)..(423): unsure at all n locations
ctttcatacgggtgagggaatatgatcgaggttattctagaagtcctagtcgtgattcaaggaggagctattctagaagcctcagccgcagtccatgtatctcacgaagccgcagccatagccgcagcagaagtcatagctatagtgacaggagcagaagttggtctccgaaaccaaaacactctcgacggtcaatattctttttcaaaaaagggggaggggccatggttgaagggaaccgcagcttggccactaaatatacaatgttcattagggttgactcttgttttttagatgtggccttttgcggcgacctgngaactgcatgttaggatcttgatggcatgtggtgctcaaacgccaacttttggtttgagactggatgagttgcaatctaaaagctggatcaccgtctaaatgcca

SEQ ID NO: 97064 - DNA, 285 bp, Glycine max
tttttttttttttttttttttttttttttgcatcaaaccaggtgttatttcatttctcccttggttggcaaattactatgtagatgatcttttaaacaccatttagacaaaaactatggaaaaatgatcacctggtcaatagatgatccaggaggaaaaaaatatgagcacttaggatctcatttttcctgaaacgcattacacaaaatatatctgcggatttttgagggcaatttgcgaaaaataaaactgcaaattgctatataatagctgactgcatacatg

SEQ ID NO: 97065 - DNA, 183 bp, Glycine max
gacattgaaaatccaatttttaatatgacatatatttgacataatactacatagaatcttcatgatcttttatattttatagatgatacctatcggcatgactagacaacaatccaagctctttttttttttcctattggttttatcctagcaaatcatacatttgtttctaatatatgggct

SEQ ID NO: 97066 - DNA, 182 bp, Glycine max
ggattaattcatctcatctcttagaaaagtggacaatactcaaaatagcttagcttagaattaattgacatggcgattggaaaggtacccggtggtggaaacaagaaaataaccaaaactgttagagaatgaaaaagagctaccgtggaattatacctatagtggattgattttacaaaaga

SEQ ID NO: 97067 - DNA, 321 bp, Glycine max
gtcaaaataagggcttaataccattgatttcaaagtgaagggcacagttcatgcgaaaagtttgagcagttattaagctcgatcggcatataattggctattctaagttctaacatatatatatagttgagcctttgtcataatatcacatgtcacatacttggcagaatcatgccagcctaactagtcagatatgaagcatccatggtgggatgagagaattgccactagggactgtttgagcctttcccgtttcttccaccaatgctcttccttggaatgtctcacagagagttagagaaggaaccagtctttgtggtg

SEQ ID NO: 97068 - DNA, 480 bp, Glycine max
ccatgtcaacgtgcacagaacaagtgaaggtgtgcttgggaacggcgcatgaaggatctctggatgatggctatagttggagaaaatatggacagaaggatattctcggagctaagtttccaaggtaaaaatttgggtttttttgcctcaaatatgcataattgaagtttttttaccataagggaaaatttgcataatttggtatttgaatatgactgaaattaaagaaaggttcatctatatagcctttttgataaactattactggagttactgccaaaggccataggtaggcacccctcaaacaaaaataacaaaaaatcattggccaatggagtctaaagagggaaataaataataataacaaattttggcacgcctagctcatgttccctcgttgtaacttttatcacttttcagccaatggagtgagtgaggacaaaagtgctttttataaaaagacaagtaaaacttatctaa

SEQ ID NO: 97069 - DNA, 280 bp, Glycine max
actagctcggcggccgcccttttttttttttttttttttttttttttttttttttttttttttttttttttttttttttttttttttttttgcccggggtttaaaaagggtggggaaacctgccattaacatttaacaatttgaaaataaccccttcatttcccaactaaaacccctggcaaaggcaatgtttgtgaacccccaacaaagcttttggccgggaaaaagttccccaaccccacaaattttgttttaaaaaaagaaaatttttattataaaa

SEQ ID NO: 97070 - DNA, 416 bp, Glycine max
tggcgggctgtcgcccttttttttttttttttcataactaataaataagtatctattatttattttagcgtagccttgtaaggagttacatgcagatgactagtaagcaacagaagcgagaggtatagtgctagtagcaaattttgtgaaagagccctacatgacagcatgcttacaaactcttcacaagattccaacatctatttttcttattcatcataatactgagatatcttcttatttattgctgcttgcccgtattgccatgatgcatgaggatcctaagaacacagcacattgtatccacagagtagctgagaaatattgaataatcagctttcatataaagaccatcaagacagtctgcttgggtggtagcaactagcaatggtgtttggttccttatctcagatgtg

SEQ ID NO: 97071 - DNA, 481 bp, Glycine max
gagaaatattaatgttgagccctctcattttaagcttaaagctgcttggatctgtagaattacatcgtgtttggtcgttattctaatttcataacataattaatagatgtttgggatttttctggaactggattgtaagattgtaaaattgttgttgatgcactatcgactaggacaaagggtgaaagtccttgttttattgtgactgtattggaaactcgtttctgtaatgtgagaaatattaatgttgagccctctcattttaagcttaaagctgcttggatctgtagaattacatcgtgtttggtcgttattctaatttcataacataattaatagatgtttgggatttttctggaactggattgtaagattgtaaaattgttgttgatgcactatcgactaggacaaagggagtagatgaatttcgttgtgttgtggaaaattgcaaatctctcctacaataaccattttcaaattt

SEQ ID NO: 97072 - DNA, 418 bp, Glycine max
ggaatctaaaactcaaattcccaccactaaatggattttagcgagttgaaagtattattgtttacaacaaagtgttctctagtttaactggtttcttgtctaaaccaatctgttcactgaaaaataaagttattctcgttagtaaccaatgaagattattcctgttagtctgttgacaaggagttaaatttccaaagaatttgtaacatcaagatgattaaactatttgatcacaacacaaatatttataatttacaagtaaccagaggctcatcttctagttctcaagtccgtaacatcatatctggatatcatctaatgaaatctcatgcgtcgttatcgtctttaatttcgtaataaattgtgatgggtcatcaatacttgatgagcctagaataatttccctctttagcttttc

SEQ ID NO: 97073 - DNA, 461 bp, Glycine max
aaaattctctctaagatggtttgatctagaatacatctttgttgttttgaatctgtgtcaatcaactttcttttttgcagattaaactacaaaaagtacatcttatgctggttttgatcttgatatgttctgttccgatccggcttctctaaattgattagcaaatcactttagaggataaagtaagtaattttagtgtttgatgagaaaatcaactgtcagtgttatgtacacttgcataacaaatcatgaatgtattggaatattaacggttgattttctcattaacgactgaggttacttactttacagaagccaaatctattttgctcatatgggcatatagctacgttaattgagtctatcttgttttcaaattaaacgtgagaatcaattcagttgacccttttctttaatctggtttattgttatcaactactcaaattgatcaagatagatta

SEQ ID NO: 97074 - DNA, 211 bp, Glycine max
gacaattcaacgctatgttgattcttgggattaatgaacatatactattcgggatccaatatttcacatcttatacaaagggaaattcattcatataacatatgaaaaaaccaaaattaaaaaaaaaaaaagaagaagaaagaaattgacccaaagaagtggaattggatgaaaaaaaaataaaattgtgtaatttacgtagttcgacagg

SEQ ID NO: 97075 - DNA, 220 bp, Glycine max
gggaacaaggctacatataaggggtaacatgcaagtttttattatttatttttattaatatgtatttaacccatactagaccctgccaagcttaaaacattattaagttctacggggcctacaggattccatgtgaaaaaaattgcagggaaaccctttttcggccaaaggaacttcacataattaggggggtgccaacccttttaaaaggaaaataaaa

SEQ ID NO: 97076 - DNA, 507 bp, Glycine max
cccactctgatatttttccagatgaaaccgcaagccgaagcagcctcttttttataagagaaggaaaaggctagagaaccatccttttcttcttcccccggtccctccttttcacacacacaacactcactctttctttctgttttcctttttctattattccacttatcaagaaaccctaatacagatacagtttccctctctctttctcaagcaatccaaagtcacaacccacacacactgtacgggttgtgcagatcagagggtgttggtacactctatctatcttttttctcccataagcagaaacaccctctctaatgtttctctctttgtcccatacccatacctcattctgcaagcgtccccttaaataataaatacaccgcgtgtgtgtgtgtatgtgagagagagagagtaagaaataaagcaaatctctctgctgtttctcttacgtctttctattttgggctctcatggattcgggtaacagtgggagtatgcaat

SEQ ID NO: 97077 - DNA, 354 bp, Glycine max
aaatcaatggacgcttttttcattatcatttttcagccaataatatttcaatttgaatacatttgattatttgttcaactggccacatcagcattttcttctggcacatcatggctacatattctctagctagtataaataatgtgtgcttattttggagtggtggcgcgcacatatatgcatgaaatcatattcagttttgtctgtgtcgttcattctatgctgggcacattggacattctctgaaccataattttacacaagtagtcaaaaccaaaatccatatacagtgacacgaaccacaaactgatcatatgatgctgccattgcatgtatgtagctctctagtttacc

SEQ ID NO: 97078 - DNA, 231 bp, Glycine max
agaagaggtgaggctgaggatgaagaacttgaaggtgtttggggaggatcccttgggactctcccttgactctaacacaggaaactatagggctgtgcagatatgacatcaaacgcaaccgcatgttctctctctcttgccacagtctgatatacacttgccatctgtactctttgcacgagaacgccgtttggagccctaacgcctggctctcatgcttcgatgctgtta

SEQ ID NO: 97079 - DNA, 487 bp, Glycine max
ctactgttaatgcggacaaagttactgtactttgagtctaactccccattaaatacatctgcaatgtcaacaataaaaagcaaatcttgtttagttgcaaggattagatgtgtgatcacttggtcagccaaatttgagtaaaatgagaagctgctgcagttgttgcaaagtatccccgcattagcatgcagtctgccaatctcatccagtccaaaaagcactgattttgataggccagcactgccaactaacgctacactcatccaagggcaagctgcagaaaaaccttgatgttcttgttctagagatcctctactaatcccaatttttgatacatactcttggatttcccccctagaaaactgaatatatgcagagtgtttactagcaggattggaagcgatgccaataaccagctctttaagggtatttcgatttgaaactgctgcatgccagcctgagcatgtcagcaatcctggaacaagat

SEQ ID NO: 97080 - DNA, 159 bp, Glycine max
aagtatcaaacaagtgggaacaataatttccataaatgaaatgaaagataataacaagaacattttcaccttttcctttgggtcgtcatgttctatgttctttttacatttctacaaacattcataaatgcaaaagaaatcaagaaaaaaaaatcaaag

SEQ ID NO: 97081 - DNA, 113 bp, Glycine max
aaataacgagaaatccttttattgctctatggtaacatcggtaaccgaaaattgcgaaaaatcactttgtcacagtcatcccacccattaccacactctacattgcaaaccaa

SEQ ID NO: 97082 - DNA, 330 bp, Glycine max
aggggcgtgattgatcattttacaagactaacaaaaaaaatgatgttgcataatatagaggaaaaaatgcgatgccatgcgcccacccttttatatttatacaactttcaaccccctaaaactgcagctattagcctattagaatgattaatttttgcttctttttttttggtacaagttcttacttctttaacttacaaaaaagagatgaatgcatttttcggtaaagagttggcctgacaaaccaattgtagcagctgccgaaaattcttccgagtccacaggaagcttgcaacaatatatatacatattcaaatttttaaaccaaca

SEQ ID NO: 97083 - DNA, 355 bp, Glycine max
agaaaataaagcaacccaaaattcattattttaacctcatcttacacaacaagtttacaggaaacgttttgcgagaattattccacgattggtcaagcaacaaaacgttgcaaaattcccagccaaattgccgtacaaaattatggaaaaataggggatgagttctgagagtgggtcactgattcactactgaaaatgggcgtgatttttataaattcctctttatttcccaaatatacagcctatttggtggaaagtttttgatacccttaaaaaacaaaacttgaattgcttgggactcggggtagcaattatatgaaaacgggagttagatatggcacttgaaaaacaacca

SEQ ID NO: 97084 - DNA, 390 bp, Glycine max
ggaaagcaaaaactaatgcatttctcagaaggagtaaaggaatcactaagacgcctttcaaatataatttggatggcggaggaattacacagagtagccgatttcttgctgccaaacatatcacgtatttcttgcgttcacacacaaatcctcgaggcaggttgtggcttcagcttagctgtttgctccctcatctacttcaagggattgctgttcagtggatattcagatggatcaatcaaggtctgggatattagggggcactcagccagtcttgtatgggacattaaagagcacaagaagtctgtgacatgtttttcactttatgagccatcagacagtcttttaagtggatccactgataaaaccataagggtgtggaaaatgatc

SEQ ID NO: 97085 - DNA, 381 bp, Glycine max
agccattgctgctgtagcagctctgaggatgttgcatatagaatcctgggtgcatggcagggtgcggtgccatcaaatgcaggaacaacaacagcagctacaccagctggccatccaaggtcaaatgggacttagacctggagatataaataatggcatgcatccaatgcacagtgaggctgctcttggaggtggaaacagcggtggtccaccttcggctactggtccaaacgatacacgtggtggaagcaagcaagatgcctctgaggctggaacagctggtggagacggccaaggcagctccgcggctgctcataacagtggagatggtgaataggcaaagcgacatgttcttatgtgcttttcatgagatacatatga

SEQ ID NO: 97086 - DNA, 391 bp, Glycine max
gaaaaaaaaattataccatgcatttaaaacattagtttgtaccgcttggacaatagatattggtaagcatattaagatgaaatgccaaaacggaagcaataaactgaatatgaaattctgctcctcgcatggaaaacacaagaccagtcttctcggaatatgaacttgtctcttcagtattacgtccagatggtattcttcccaacaggagctgagcactatgtcctctcttaacacaaatcccaatctccaagaactagggaatagggtgcttatatcagcactgttcttctaatgttcctctcaactgaatattaagtaagaagctatttttttcagctaaataaatgttgagttgctgtcgtcagatccacatattggtctttcaaac

SEQ ID NO: 97087 - DNA, 488 bp, Glycine max
gaagaaatggaggaagcaaagggagttgtgaagcacgttttccttgcaaagttcaaggacgacgtcactccagagcggattgaggagctcatcaaggactatgccaatcttgtcaatctcatcccacccatgaagtcattccattggtatcatcttctttatgtcttttcttttctttctcacgcttgcaatgcaattcaacaacccacttagatcagggcaaaaaacatcaacgtctacacaaaacacaaacggggtcagcaaaaagtaaaccccattgaccgtaaaaattgaatttttaataagttcattcaaatgggtttgcccaggttagccaatgaatgagatctaagttctggtgagcagagtgagtggatgtggaatattaattgggttcgatttcaaatttaaaaattggaagcaactatttgttgcttgctttggctttcaacatagaattagaattcattatggaaaaattgaatcta

SEQ ID NO: 97088 - DNA, 382 bp, Glycine max
aaactaaggtaagggttaataaaattttaaaaacagggcataaatggtacagatgttaaaacttaaaagctttgctagagtacatttgttgaaaagcctgagaactgagaagagggattttttataaaaaaaaaaaaaaattcccttgaaacaatgaaatttgacggcatctaaaaagagaagaaatttgtcagataaataacacttttttccacttccttgggatatttatatcaattggggacaaaattaaaaaatagcattttcgtggggggggaaaataatgaataattaactcaccaaaaaaaaaaatgaatatttcaacctgaccgataatgcaaaaggagaaacacccccgccccccccacacaaaaacaaaaac

SEQ ID NO: 97089 - DNA, 334 bp, Glycine max
cttagatggagcggagttcctttatgtacatcatcccctccaattccccaacatttactcctgctcctccttagacactctcctttgcttcactcacacgattctttctttctttcttcgcttccacctttttcccttcactcctttattcttcttcggatcggagagtaactcacacactctcatgctcaatgccactttcctctgttttcattctcctcaccaatttccgcttctctaccgagatctcgagcgtgtaacagtataataattatcataataataatttattggtgagaaatgaggttgtggtggtttttggagtttgggtgtg

SEQ ID NO: 97090 - DNA, 339 bp, Glycine max
caaaaaagattatgttctttttattggcataaaaaaaatccttttggtttataataaaacaggaaaaaaatggaaccatcaccttaaatttcacagtaaagagaacgttaaaactaaaactccccaattatgtttacatattaaaaaaggcctttttcttttttaaaaaaaggccccccatttgccaaccattctatatacccccttaggcttactctcttgcgccacatgacctgcccccttcacaagggcgaaagttaggggaaactcactttttttggattcctcggcatatcaataaaaaagaaatcgcatgtttgtgtttgtaaaattatgaag

SEQ ID NO: 97091 - DNA, 170 bp, Glycine max
ggcttgggtattagactttaaattttgaaatttgaaatcaagttcacatccccacaaaacaactgggttacacatataatggccccatgcattccatttatttaatatagtatataggaattgacttttgcatgaagcacaattgaaaaaattatttatccaacctaggc

SEQ ID NO: 97092 - DNA, 394 bp, Glycine max
cctcggggaattccaattccacattttcaatttataagtaggcaaaaatgttcatatatgaattggaattatgttgttttcttattaggcctatcctgaagccaaaggaaatgagatcggaattcctcggggaattccaattccacattttcaagaaataaggaggcaaaaatgttcatatatgaattggaattatttgttttcttattaggcctatcctgaagccaaaggaaatgagatcggaattcctcggggaattccaattccacattttcaagaaataaggaggcaaaaatgttcatatatgaattggaattatttgttttcttattaggcctatcctgaagccaaaggaaatgagatcggaattcctcgggggtaccgagctcgaatt

SEQ ID NO: 97093 - DNA, 400 bp, Glycine max
cacataattattagcatttggcatagggtttaattgtagtgactctccataattaaaatcgttaatcacatcattgtaaaaaataaaatacaaatgttcggacgataaataggacaaaaatggcaaaaagaattagaactcctaacatgtgaagattttaagacatatcctataaatcaagagcacaattaaagtacctaaaatttaacaggcagatttgtcaagaaagccaaggtgtaaggagaggtggatttgccaaacaaagaacaccaacgaggaagcttctcaaggactcgttcggttattggtgttaatctgtccacatcagtccttagtttcagaagaggactatcagagttatgagttgaacctgacctccagtaaagagtcagatcaaaca

SEQ ID NO: 97094 - DNA, 397 bp, Glycine max
attgacattcatccattcccattatcttgtccaaccaacatggaacaaccaccggacaccaccaccaatctcttcgaccacctctcgaaggagctcctctacaccatcctggaccacctcaacgacgatcctttcgccagaaagtccctctcccaatcctgtaagtccttccacgcgctcgaagccacgcaccgcaccagcctcaagccgcgtcgcctcgagttcctcctcccgaaaaccctccaccgctaccgttccatctcgcacctcgacctcacgctctgtccctgcgtcgacgacgccactctcaaatcactctccctcgcttggcactcctcccttcgatccattgacctctccaagtcgaggctgttctcgcacgtggggctgtcggctc

SEQ ID NO: 97095 - DNA, 309 bp, Glycine max
  unsure (1)..(309): unsure at all n locations
gtgacattcaaggagtcaactatgcatgctaatttctctaccctagccatctgcgatcacttcaaggaagctcagaagatagcaaaagaggtgaaaagtagttttgccaatgaccctgacacgatggccgagctgcgtagagtagagcaagtagcagaacgcaacagcattgccttgaatgtttgtcgggcaggagcccttgatccaaagttgaagactttttttacattctgtcatcatcctttctatgctactgnctattgngaagagatcctgatagtagattcaactcatttgctcctaacaccc

SEQ ID NO: 97096 - DNA, 485 bp, Glycine max
aaaagagaaggagagagagaagttatgttgacaactttaatatccattttgatgtaatgtaaacttcgtgttgttgttttgtgcggttttcaatttgaggggtctttcctctttgttttttctctctctctgagtgagaaaaagcaaaatcttcattgagagaatggcccagcactgcggatccaaatccccattcttttctgcttttgtaaggcatctcacaaagcaaaatatcactttttgattcccaatttcttctgggtctctctctctctctctcctcttcaacattcattcatcaatgcctttcttctccttcttctgcaaacaatgactcatccggttttcattccctttgaaatgacgatacattatcatatcttgttcaattgaaacctctgcattatcatctatggcattaatgggcatgagtgcaaacaggcaatgcaatagctatttcccaggatatcattccccaaggtatc

SEQ ID NO: 97097 - DNA, 521 bp, Glycine max
gagcaacttgcatcatcagcgtcttctctttttctcagtttctccttcttcttttttaaaggtgctgcaagcatacgtgtgattttctggcacaagaaggaaaaagaaaaagaaaaaaaaacaacgtggaatcgcaacgggataaggtgaaacaccaacgttgtgaggtgtgaacaaagtgggctctgttatcaatatcattgtaatctctttctctgttcacgcaaaacttgtttttcctttttacttgtccctgttttgtgggagtggtcttacctattcgggtgagttttctttatgttgttttcatcctgttgctaatataacgccgtcaagattattttttttttgtccctttttcgcaattttcctaacatattggaacgaattggaagtacggcgttttatctggacttaacaagttctgcttttgttgcatgttgcatgtctgtcacatttgttgggagattaaaacgatgcactgttttatctcaatcttctcactaagttccggaattaca

SEQ ID NO: 97098 - DNA, 356 bp, Glycine max
caactttccttttcttttctccctccaagatcacatttttctttgacccttttgctccctgtatctaaaattcccctctccacccactttccctttaagtcaatttcatgcttctctgtctcagatcctagatcttgctgtcggtgggttgatcggagtagatgtcgccgtcaaacgggttgcagaacggcggcggcggcggcggtaatggggtgagttatatagagcaccaggtttcaaaacttgacactcttgctggtgtggcaatcaagtacggtgttgaggaccaacaagctaaaatacgtagtagctgatgtgatgtgcatgcatgtattgctctccgataacatgatact

SEQ ID NO: 97099 - DNA, 221 bp, Glycine max
aaaactgtcgaaaaattagaaacagagagacctaaaacgtggtcgtgttgacgaggttgttgttattcctggcagcaccaactcggtaccgattccgagtcaatccggccgagtcgtaaaactcgtcaatctcatcaccgtccccatctcccacagtcctcatcatatgcaacaccttcctcgccctctccctcgccctctccgttcccgtttgttcgatc

SEQ ID NO: 97100 - DNA, 210 bp, Glycine max
gacaatatcaattagctgcacataaaatcaataaggataatatatggcataacactattcccctgagaacagtcaatccccttaaaatgtccttatcaatagttcaaaagtgtaaccaaattgtatggttgcattcaaagttcaaattaaacacaccatacaaacaaaccaagacctacatcagtgtgcgttgccatcacctttgtcttc

SEQ ID NO: 97101 - DNA, 282 bp, Glycine max
aataaacaaactaagattacttgatttacttcattgctcgtacttattagaactttctccttatacacaaagaaaccaaaaatatgaaactgaattaattaatgataacaggatagaaaccattcttgctaaggaaatcttagttgcctagacacattgctaatattgactatttgaaagttactttggtgtttgagggcgatggggagagtaatgcagatgcagatttgtgctgctggtgcttatcattgacattggttcttcaatggaatgatttctttc

SEQ ID NO: 97102 - DNA, 147 bp, Glycine max
gggggaaaagaacattggccctttggaattataattattacaagggcccatgacatccggaacaggcccttgaacataaaatcccaagcccccctcagtcaaagaaagatttttttcggggggaggaaaacgggggggaaaactttt

SEQ ID NO: 97103 - DNA, 414 bp, Glycine max
cagaattaaaaatgaatcaattacaattagctgacaaaaaaacaacagcaattttgagaaatattacagctgtcaaaaaaaacagactttcacgttgtatcgatcacaattcacaaaatttgtcaaaaaacctacagaattaacatgaggcaacttcacgatctacatattctaatctatgcacgtgtgcaacgtaccctgatcaacctatatattataaaactaattcctacctctgatactgtccatgtggagctacgcctaccatgtgttgttacaacttacaagctacacagaattatgagaataaaacaatacatgtatcgttttattcacatttgtttctccaacaaccaaactgtacctcagcaaaaagaccctgataaatcccaggaaacttgtccaatttacatc

SEQ ID NO: 97104 - DNA, 370 bp, Glycine max
gtcacaagagataattttattccaaggagaaaatatttaatacaagtgggaattttattgattgatcccattgatcctctcaataacagagataatcccttggctgccaagcttcccctgaccattagccagcatgctagaaaacaactgtttagacaaggaagcccctggcaagacaacaagatgagcatcatctcctccttccacaacatcaacccccatccccaaatccttaacctgatactccgcaaaaccccctggtcgaaaatccctctcaatcatcctctccccgaacaattcaagcgccttcgaacccgcagcaccgtcttttatggcttccacgaactccctcaggtccagccccgcacgc

SEQ ID NO: 97105 - DNA, 310 bp, Glycine max
aatcagtatatgtcagataaatatattaacagaatcgccatcctttacagaaaagctaaaaggcctcaaattcttatatcaattgtacatctggagtggctaaaaattgggccacctttagtaccggttgatcatcaggcagacattataatcaacgcactccacacgacacattttaccgaacctttcctaacattatacaatttatacacaatgccacttaacgtgactgctcccacccatttaagctctacactttaataaattccaaaaaaaaaaggaaaatattgagaccaaaaaagtaaaactt

SEQ ID NO: 97106 - DNA, 311 bp, Glycine max
ctcaactgaattttatcgaacgttttaattgaaaatcatggttgaatttgtgcgtagaaatggaggtagcagtggccaaagcgttgaaaccgagtttaaggagtgagttcatcgttcagaaaatgcactgcgaggatattttcagcctgaacgcgaacaccgtcgccgtcggcgaagatttctccgtggacgacctatttgacttctctaacggctctctgcacaacgaacaccaacaagagtgcgacgaagagaaacaaagtttatctgcttcgtcgcagtcacaggaccgtggagaagacgatagcaac

SEQ ID NO: 97107 - DNA, 139 bp, Glycine max
aaaaaaaagggaagctggtcattactatctccaacaataagaaccaagtcctttctcccctgattagggtagctacaaggatcaaacaatgtcgtcaccagctaattgatacctttgatattgacttagatcataactt

SEQ ID NO: 97108 - DNA, 387 bp, Glycine max
caaattactatcaccctcatcaatttcacctgaaccgccaacttcatcaacagaaaaccttactgtattgaactgaaatccatgacctgtggaccccaatgtcacatcagagtctaaattactacgagcatacttgtgtgactccataggctcccaaactttctttgattgaggcaaatccctgctggaatagttccctgagatgactctgcctttggttcttccattactctcatgcatgaagtctacatgattatacttgctaccacgataaaattgcttagatgtatctactgtggattcagacttactagcaggttttgtctcccaactaactctattggttctattattcgggctacaattgcatgaatggaaatcatatct

SEQ ID NO: 97109 - DNA, 307 bp, Glycine max
catggaagaggctggttttataaaacaaaatatggtagcaaacatgcatttcaaaactgaaatgttgaagcaaattcagaactataatctattatattggcatctgaatagatttacagcaaaattgtctcatgaggaaaaaatatcaaattcctcaataatcagcatcatgtagaaatcaaattagtgtacaacatatgaagagtaagggcaaaactgtgagaccaatatttctgtctgccaacatgattatgaggctgcagcagatgatctttgtgtcttcaatccaaacagattctcaaacaac

SEQ ID NO: 97110 - DNA, 320 bp, Glycine max
ccactcttggatttccttttcacaatcttctgtagcattctcagctgctaactttgctgcagcctctctgtcctgtacacgttttaaatctttctctaaagtgccaagagaagcttccaattcttgaattcgtgaagtcatatcccgattttgctcatactccaactgatattttaattttgaaagttggctactcaggttcagcctctcctctgctatactttgagcagccttgagtcgattttcttcatactcacggatgtttgcaaccccaactgacttgctgaagtccctgtatatcctatcagtaatttcattta

SEQ ID NO: 97111 - DNA, 481 bp, Glycine max
ctcgaaacttgtatttttctttcttctttggtggagaaaaatcagtaatctttagaattggtcgtttatgaagtttcttggaaattcttctaattgattccatcagctcttcattttttgtcaaaaaaagaaaataggcagagaaatgaattgtttgacttggtttgagagtcaagctgttgataatacagggtagaagaagaaacaagtaaactaatgttaacagtgcgctgactctgaagagtgcctaatttctttctggttcctgtcaactgaatatttcggctattgctttctatctcttcaattcattgtaagcaagttgaaagttgatgatatgataacactgatgactcggattttttcacgcagacagcagattatgtcaaatctgtggcttataacctcccagaagagagaaccttgacaactcaggactatatctgttttgttgccatgagtatcaattagcagctttctc

SEQ ID NO: 97112 - DNA, 221 bp, Glycine max
catcattgcatatttttattaatataatatatgtgtcattacaatattcaagacaagttgcaacagagtactaaaaacagatatttatagaggtaaaacaaggtgactgactagaggcatttggcctcgatctcctctagtgtaagccccttggtttctggtttaccaaagtttttaattccaaaaaagccccgggttttacacaaaatgggtaaaacaaa

SEQ ID NO: 97113 - DNA, 366 bp, Glycine max
caaggtcaacatgttttctgtctctcctattactaaattgaaagttgaaacaatgcccaactctggtgaagctttagaatgctgtagttctagtctctaatcttagtacactaaaactagtagatgctcatgaatctcttattctattcctatatgctatacataaacatatcagtgatatttttattgtaacgttctggtgttgtaaattgaaagttgaaacaaggactaactcttgtcaagctttagaatgctgtagttctagtctctaatcttagtgcactaaaattagcagatgctcatgattttcttattctatgcccctatgctatacataaacatatcagtgatatttttatgtgtaac

SEQ ID NO: 97114 - DNA, 288 bp, Glycine max
agaaacatacaaactggcaaaccagaagttcgtactccaataaatcaatccactaatactaagaggctctaatgggacatcaaaaacacaattagagcctcagttatcctgctatacaaatatgttaacaaaaggccacgaatcactcaaagtgtgtgaaaaaaataaaaaacacaaacggcaaacccaagacgctgcttaatcattgattagcaggggctaataactgaactaaaaaataccaaaattggagcctatcttttttttcttcactcagatttttacaag

SEQ ID NO: 97115 - DNA, 399 bp, Glycine max
caagataaggactccatacattaattacattatccaaaaagtccaaaccacattaccatgcagcaaaggcagtgaagcactgccctcctataatcagtcttgtcatactaaatgtcgacttgacataataggcctccaacaactacaattactgataaataaataaaaattaaggagtggcctttattaatcttgcactggttttattgaacacaaggcgatcatcatacactaattcttcaatgctcccaatgtccaagtttcagtactaagatctatcattacacttcacagcgtggcttagcaacttcacgcctgagcgactgctaacgaagcctgatacaaattccgacagcgatcattgtccccaagcacaggcagccccaagattaaacatgc

SEQ ID NO: 97116 - DNA, 423 bp, Glycine max
ttttttttttttttttttttttttttttttttttttttttttttttttttttttttggtttgtttttttttttttttcccctttttttcttttttttttttggggggaaaatttaaaaattttatgggggggcggggccccttttaatgggggcaaaaaaaaaaaaggggcgctttcccctaaaaatttcccaaaaaaaaaaaaagggggccctttaataatggggggccccaattgggccccctcaaaaaaagggcggctttccgcccccatggaggagaacacaaaaattggggttttaaaaaggggccccacccccggggggggaagggggggaaaaaaattcggggcccccaacccttaaaataaatttctgggggaagaatcggggaaaacccccccccccgaaaaaaacgggggggg

SEQ ID NO: 97117 - DNA, 308 bp, Glycine max
aaacataaaaccccatttttaaaaaacattttggccaaaacgtttggaataaataaggggaagacatggaaaaaatcccttccttttgttttttaaaatggaaagaagccggatttttttttgccccaggggggaactttgtaaaacgtttaagctttttgtttcaaaactaaacagaaaataaacgggggggggccctaaaaaagatttcccaggggaaaaaaaatttgcccttttaaaacccaaaagggggggcctgaacaaaatttaattcttagccaacatactttgtccaaagggggttgaac

SEQ ID NO: 97118 - DNA, 333 bp, Glycine max
aaaacaaaaacttggggcctttttttttttttaaggaaaagggtttgggcaaaaatccatgacaattgttttaccccttcggaaagaattttgtttcaccgggaaaaaaatggaaacccggctttctgaaaccccaaaagggccgttttttaaaaccaagttgattttccctttcaaaatttttttggaaccaacgccccccgtttaaaagaaaaccggaaaaattcttttaaaaaagggggggaaaacaaacccgggtgcccattgggggcccggcccccataaaagttttcccccccccctttgtggcaaaaatgggtcagctttttttcc

SEQ ID NO: 97119 - DNA, 199 bp, Glycine max
ccaaaagacgcttcattcatacaatcaatatgatccacgtcaacatggggggaacttttggggacaagttaaaataaaatttgaaataaatctaaacttttactaaagcttgactgcataaaaaaaataaaattctaacttggggggggttactagtataattgaagaactcctgcgactaaaagctttgggttgggga

SEQ ID NO: 97120 - DNA, 377 bp, Glycine max
ggcggatcgggtagtgacccgcctggactggtaaacaaaccaaaccaaaccttgcaggtctctcgtcagaggcatccattccgttcccacagcactcaccacactgttactcttcttcaatccttactacagacagcagtatcttttattggatttatctcactcactcactggctttgttttgcatcttctcttgcccaactcctccaggcctttccgcctactcgctggcaggaactgatggggaagaaagtcagaaagaagactcgaggttctgccaaggagatgggggttgctacccatttgccaatcaaggttattgaatcatccaacccgactgtcgagtcttttgatgaggttgcaaaagagacaaattc

SEQ ID NO: 97121 - DNA, 472 bp, Glycine max
ctttttcatctccgttcgaaaaccccgatttccacttcgaattcgttcacgctgtcaaactccacaacaacatcaaggagcacttgagtgcccaggggaatcacctttgccgatctcgtcacgccgaatcctcatcgaaccaacgctcttctcaattttggtgcctatagggacgtgaggttgaactatcttggaaactgaggacgaagtgaatgcgatagaggcacaacaaacagagttggaggagaataggatgttgcaggaagaaactcaggtttgacaacgccatggttactcttcaatcagccaagtgcttgattttggcctcggttcaactcattggtaatcttagcaaagatatatacttcgttttgatccttgcaagagagagagagagagagatttcatccatacacttgttgttgttaaatctaagtatttgcttgcagcaaagttccgtaacagtggtaag

SEQ ID NO: 97122 - DNA, 330 bp, Glycine max
caaaaaaaggggggcggggcccccctttggaaaacatatccccccaacccttaggaattccacaattggaacccggacataatgggccaaaaaaattccccaaaactaatttttccaattttaactataaaaaaaagggaaaaagcctttcccggggtttttccaaaaaaattatccaagcccccctttcctaaaggcctacatattttggggataaaaattcagttccaatccttaagggaaaaccaaaaaaggaagcattggggacggggcccgccaaaaaaaaaggaaaaaaatcccccccataaggttactttggagggggttttt

SEQ ID NO: 97123 - DNA, 481 bp, Glycine max
ctcgagccgcttcgttccttaccctcgggttgatctgtgagaggggcttgatagccctctctctctctgctgctgcaattcagattgttggcaactattttttatacagacgatttgtcttcacatggaagcattgcttgcttgagggacgcctttgtctcaaaggagttggaattttcgggttttttgtgggattggagatttagagagtgcccttgcactccctgttttatttcatcaccatgattgccactgaaactatagtaccaagtacaaaattgaagatcaagttctcaaccaaaaggatagagattgattctgggccaaaatgtgagtttggacagaaagtgtatcacaatgataaaaacaggcgctgtaattctaatgaaaattcctcagcactgaattctaacaagaggggaccaccagtaagtgttgagggccaaaaggagaaaagacaaaagattgatcggaaagggtc

SEQ ID NO: 97124 - DNA, 375 bp, Glycine max
gatcatcaagacccctagtgtcgatgacctaatcacttttcgagagggacagggggctcctacagatcatggtgctgctgctgctgatcaaggtgctgcctgctgctgtagaccaaggtggttctcctacggacatctaattatttaaaattaagtacttgaggtgttgaataccgatatttaaagatgagtatgtttcatgtgtcatgggacaagatatttcttcaatggatttgcttcccttaaatctgtctgattctgcaatccatccatgcctgatcattgtgaacgattttatagctgcttgatgaacttgaattcgtgatttacaccttttaatcgaaattcaggctgaaaaaaatgttggacactctt

SEQ ID NO: 97125 - DNA, 381 bp, Glycine max
aaaacaacccccgggggtttttttagcaaatcgatcatcacaatttcccacaaaccggcctaaggttacatgcctacctgacccaacaattattaacgggccccccaccccaaatcctcgatcaaagagttgaaatcggtggaaaaaaaaccttcttccttcacaaaacgctttgccatttgagcaagcctttttgctctggtcctaatttccttgggctcctttccaaccatgaacctcctcacagcctttttaaccgggttcttttttacaggggcccttcccattatcccaatccacgtttgaacccctaccctccccccaattttaactatggccggcaaaaacttaacattggaaaattgctttgggaacattggc

SEQ ID NO: 97126 - DNA, 415 bp, Glycine max
ttttttttttttttttagagtatatccatccaatcaaacaataggtaacatgctgcacgagaccaatatttgatctttgaggttgcccaatgagcattagagtaaacaaagtgaaaaaaggttacaacaacaacgccttatcccactagatggggtcagcaaagtgaaaaaaggttaattcggcaaaataagtcgagcagcaagtttgtgggaggcaatagcaactagaggaacaaaatagaaaaacatgaataaaggagaaaaagattagcgactaaaaataccattgaaattcatgtgaaaaatcacttcacaaaacagctacgactttctgcagatactccttcggctaattagtacaatataaataaaagacagatatctattatactatggactaagcactatccattgt

SEQ ID NO: 97127 - DNA, 499 bp, Glycine max
attgaaaactaattgaaggttttgcagtccagcgttgatcagaatcagagcatggacgggcatgattcagaagacccaaagcaaagcactgctgatatgacagcttttgtgcaaaatcttcttcagcagatggtgagttgtatactctaggcttgtagttctgcattgctgattttcagtatgtatttcactgctgctaacaagaattttgtttccagcaacttaggttccagacaatgtctgactccatcatttctaagaatatcctttttagacactcttcaagttgataaagtatgctaatcttgaataggaagttttcaaagaaattaatttccgaaaaatggtaattcatgatattgatttttccctgaaataaaatgattcaaagaggtcagatgacaggatattcatttgtgattttagttgccttttatatttttagggcaactctattatactatataataggaatcaaaatttaaacatataatacaat

SEQ ID NO: 97128 - DNA, 403 bp, Glycine max
  unsure (1)..(403): unsure at all n locations
gcgttttatctgctaatctccgaagaggagcagaatcgtcttctccatcgtgttagggtttgcggagttgttatttccctttgttttgtttcttcgtactcagggatagaagcagctccaatccaaatcatgtgtttttgcaactaattaactctgcaatccaacgtcacatcacggcgtcgcagttcctccaatctttcactaaagattatggacagtgtcgtgcgtccactgcacgatattttgttcctttccgtcgatcacgtgctctgcctctgacctccaaccctaatttcactcttcgtcgtctcagttcccgcctctccaaagctactggtttttaataatggatggggatcaaaacgagttgngtactgtgggtgaagggaatgttgatattgga

SEQ ID NO: 97129 - DNA, 477 bp, Glycine max
cattccaaaaaagttgtgtggccatcgcattcaattaagtaatgttcatatgagctacacaatatggtatgatgaatgtttggttatttacaaagaaagaaggatgaatctgttttcaatgcttatgactagatcaatccccactgtacagcaaaaatattggccctaccaaaagagtattagaggaaaatgatttaaccatgttctccccttgtacttcatgcagacttggaacttctgtatctatggtcatacagcaagaatgaagaggaatgtggatttcggatgtcaagatccatcccctgtcacatctgattattgctgagcatggacgcatggtatgtgctctggattataggctcctgcagcagctgagattgaccaggagaatcctgttggttagaaaagatgtttggtggttgtaaggtgttagaattagattgatggtcgagcacacgattactctgttcatacatg

SEQ ID NO: 97130 - DNA, 323 bp, Glycine max
ataaaaaatccctcagtactcatttattacaataaaccaggtcaacaaataaggatttttagcgagctaaagacaataatatactttggcaattaagctctctctaccttggggtaaaacctgatcaaataaaagtaacatcaaagacaaaaacagcaccggaaaactaacctttagaattgccagggtaaccttcatttttaaaaggggggggggggctttttttttggagacccccacaccaattccaccttccctaagggaagctccagattgtgctttttccctttaagccactgcaggcatgtccttgagccatgaat

SEQ ID NO: 97131 - DNA, 413 bp, Glycine max
cttctccacaatattttatgtattttcgtaacaaaccaaacccaacaaaaacttcttcactcttagtttctcatggcatcatctcagaacgtagccagcattgagccatggatgcttcgcccacctgtcaccgattcatggctcgcagagttcttcgctcgcgacgccgataccctaaccagggctcttcagaagtctctctccggcgctgttctgccgcaggacaaccacctttctccgtttctgcaccagcccgccgccgccgccgccacccccaccgtgtccagcctctccggctccgaccaggaatcggcgccgcgccgccgtgcggcgcctccgccctctgggaagatctccaagaggaagtcgcgcgcctcgaagcgctcgcagacgacgttcatcaccgcggaccc

SEQ ID NO: 97132 - DNA, 444 bp, Glycine max
agacataaacattatccttttaagtatattgaaatatcaatgaagcttatttctgtttgtataaattataaagcactcaaaaggtcttcatatactataactataactataacaagaattcacattgaaagtcttatgtctaaattaaagtctgcgcctcttaacaaccagaaaccagaagggtataagcaagatgatgatgatagcaagtatttgagtgaaaagcatagagctgggcacttccatctgttgaatgaaaatgtggtctgcggagaaatttacttgttgaatgaaactgtgatctgctgaggtgtttatttgctgaatgaaactgtgatttgctgaggaatttgtttgctgaatgaaactgtgatttgctggggaatttgtttgttgaatgaaactgtgatcagctgaggtgttcacttgttgattgaaactatg

SEQ ID NO: 97133 - DNA, 363 bp, Glycine max
gataaactcatttatttcagttacactatcgtaatcattatttacatagctttccatcctgagcttttaaacctttacacatgcttgtgcacaattggaatgcctcatacaacactaaaggggaaaaaaacaaaaccgagaaacctaaacaaaagaagtctagatggaagaaaccaaataaataccacgaggaagagaaaacattattcatgtgttgtttgtgttgaggtgtagcataacatgttggatgttccacatttttatttatgtttgttggatatcatggcaaggtaagtccagaggagaagcttataccagccatgttccaacccttcattttgcaatcagggaggggcataaacg

SEQ ID NO: 97134 - DNA, 445 bp, Glycine max
  unsure (1)..(445): unsure at all n locations
cgaatatgaaagaacaaacattggatatggagattcacagccaacaaatattgcaagatgggaacattccactgctcaaactagacctttacttaacctatatgactcacaacacatagataccaagaagtatataagtggttcttgnggngcaggcagtcagaactctgaatcaagtgacactcaagaaccagatttggagctaagactttctctttaatctgccactatagtaagagtggcaagtctagcaagtgtactgctcttattgacaattatgaattgaaaaagcacatgaacaagccagtgtggttgttgtaaagtttcatcctgagatatcatatatatactcttgtgtgatgagagatatagattaactactcttttgcataatagcaatgcaaacttctcttttaacgtatattatcaaagaaactaaagagaa

SEQ ID NO: 97135 - DNA, 404 bp, Glycine max
atccaaataaccaatctcaatgaatatctgagaaatctttagaacagatggctgccactttcatgaggcttacaaaacaagcaaggcactcgtcaatttcctgaagatccaattccaatctaagagatgaaaaatatagaccaaagataaccaaatcgcttcaccaaccccttaccttccaacctgagtcactggtagatgcaattatgtttcctcagagaggcagtcaatatgataagcctgagtagtatcagaattctggtcctttgaggatatgtttaacaaaattttagaaaaggaaaactgccaataaggacgatggactggaggtaacaataaagctgattgtttatccattgcaagttgccgggaacatttgctgcaaggttttgaaaacagtgtct

SEQ ID NO: 97136 - DNA, 456 bp, Glycine max
ataatcaaaagcagttgtttaaattgcaaattggtacaaaggttaatagattcgctacactatggaatctgtcataactcataagcatcaatcattattacacgttgtcctaaattctatatatctgttaacaataatccaaaatgttatatactcctgtcaacatgttaaatttacattttgcctacttgtaataggagcacagagtgctaaatgcactctactcactatcctgcataaataaccaatgctccaattgactaggtggggtaaccctcttcctaattaacacttcaacagtgggacatgttctcttccttcctccccttggccttgacctgaactcttcatcagcttcttcaaaatccccaagggtaaaaacatgtttagcagttttttcatgattatctcgcacatgtttgtaagcaaatctcatgccacaatcaggaaacccac

SEQ ID NO: 97137 - DNA, 315 bp, Glycine max
ctcttaaactcaatattcgatcttaacgttttaaaatactactcatacgaaatattacacttgaaaggaattaacataattcttaattcctaccaaaagctcaaatactcaaagtataatactgattgaaagttgaaaaacaatatctgctaatactgctttgtgtggggctaacacttcccaccacaccttttcacagcatctaatgcagagtgcatgcagatcttcaagaattctttcaaatattaaaactagatgaacaacatatactatatcgatggtctaattttgctgaaactccaacttcggcacagc

SEQ ID NO: 97138 - DNA, 249 bp, Glycine max
aaaaagataataagggcatgcattacttatggcatcattttaagtctaatcactattgatgcgcatgatttgatactcgagaaattcctgaaatgatgcaacaaaataggagaaaataaacacgcagaggttcactttctacactggtggaccaaaaccaaaacatagtcataggggtgggagggatgagctactctacagagggggatactgtaaatggagcaaaaatgtacagttgacaggcgggga

SEQ ID NO: 97139 - DNA, 354 bp, Glycine max
aacgggagaaaaactggtactattctttacgggaattggaatagcagttgtgtttaatgggggatgaaaggaaaatgaccatgcggccccattttaatcactggtgccccctaaacacccccctttttattatatatatatatatgaaacaatatttgaactggcactgaggaataatgctaactctcacttctctctagttttggttcagggtcaacttgtcagtttgaaaaggacttttttgctggtacactggactgagcaggttttttgaactgcaccacaatcatgggcatgttgtcacatccttcaccactggcaggtgatggggccaaacaccgatcaagtactttt

SEQ ID NO: 97140 - DNA, 415 bp, Glycine max
aatttgttggagatgagatgataataaccaaaaaaaaaaaaaaaaaaggaagaacaggaggtgtggatttttctcaatctcaccagtcactctcaacctcaagggtccctctctgcattcagatttcagatgcaaatggccattgaacatttatatcattctccacctttgtatcaaaaccagtgcaatcagaaaaaaaaaaaaaaattaaaaaaggagattttcatttttcatggctttcattcacagtgcaccctctgcttaggagtagtgctcctttctcttccagttttgtgggaatttgtaacagagcgaaagtatgaattctccaattcatgccccttcaccaccttcttcctcttcttcttgctcttataaccgtcctcctccatgcatcgctcatacttctcgtaat

SEQ ID NO: 97141 - DNA, 490 bp, Glycine max
gcaattaactttgatcaattctcatctcttgtgactcttctctgtcactcacatacctcacttagctgttagcaaacatgggtgttcctgaattgatgttcagggtatcttttatggctgtactcatcaaattggcctcggctacaaattacattgttggaggaccaagtggtgggtgggacacaaactcaaaccttcaatcatgggcatcttcccaaatattttcagtgggagacagtcttggtaagtcactattagcatgcatcaaaacattacctttatgttgatcatactaaaatactccctccgttcctttttaattgttgaaattttgaaaaaaaaaaatgttttgtatttcttgtcatttacaaagttcaaaatcacattaattactcttttatcaattatatccttacttttcacctaatttataattaatttacacattgagtgaagtggaaatgaaagcgggtaatatgagaaatcacac

SEQ ID NO: 97142 - DNA, 396 bp, Glycine max
attcaaaatacttcattagcattgttgttttgtgtagtcgaagtgttgaaccaagaatgcaaatttacttgtgtattttatagtgtacaatcgtatgaaaacaagatgatctcgccacaaaacagtatgagcctgggttaaatatcctgatatttctgatccattcagctacagatgccatctcaagaaatggctcagaagccagagtgagttcaatcctcggtaataagcaacctagccatgacggaaccatgaatgtatgattaacctggattcttcaaataaaaaaatcaaatgaggtcattgttcgaagttggattcaaaagtcggaaccacgtgtttttcggagctttaaactccaattaaatggggacccaattcacaagcagaggagag

SEQ ID NO: 97143 - DNA, 158 bp, Glycine max
aaagaaatcaattgagaacaagaacaaggttggcaattaatccaaattaaagatttgcattcatatgacaccacagtacaaaccactgtttattaccacatcataaattcccagccattgttatgcgaccccaacaaccatatgatccagctacactg

SEQ ID NO: 97144 - DNA, 138 bp, Glycine max
ctcctatagaatcctctggttattccatatccccgtttgccttcactctagaagcgcgattcatttctaccaacacaagaagcatggctgccatatcaataccttttgacatgaaagcttggacatactatgagtatg

SEQ ID NO: 97145 - DNA, 506 bp, Glycine max
ttatgacaaacactccatcctgttttttttagtaactgctcaaacgactttccaaacaaggaaaccgagtcctctgcattcttcaaactccaaagcttcacttttccctccacgtttcactgatttctaacccaaaccctttccctgaatcccatttggattaagctgcattatatcctgttttactctgttttttttttcctcttcttctttctcctctgtttcgatgtagtattttttacttgcaatttgtcttctctgttttatgtcaagtccatccttggtttttattgtttctgcttatgaagaaacctcaaagacattaacctgagggcacatgatcgtgagaagagtgaattaaattaacatatctgtaccaatacccatcaagtttgttcattttctaaaaaatgaactacttgtatcctgtgaaagaagagtacttggaatggccaccaccgtcgtcgtcgccgccaacaacgggaggagttgatgagtcagcaatg

SEQ ID NO: 97146 - DNA, 439 bp, Glycine max
ctagaatgtgtagttgatactgtgtattgtgtgtgtctaggagttctggtttggatttagatatttttcaattacttaacacgaagttcttgggattttagtgggtgatttgggtgaaataattggaaagttttgctaaattatgtacaaggctgtcagtgttggtggattaccttactaggctcaagtgcttccgattgatattagtcagcagggttattgggagtcacatcaccaccatttatcactatggtttcgccaatcttatgctctacaggtaatcattttatgatgcttttgtgaatgttttttatataatcacatggatttgttgaattgatagcttcgtaatgttcttgaatagatttattttggtcccttgtacaatgttggttggccttttgggccatatgttctccttgccatttgtaactgaaga

SEQ ID NO: 97147 - DNA, 482 bp, Glycine max
aaacaactcagtttattgttaatataatttgtccctgagtcagctagtgtctgcccgacttttcttttgtgtgtgtttttctttttctcaacacaattttagagaagttctgtaaaataaagtaacttttctttttgttctcttacaattaattatatcaataattttaacatattaataatattcatgaaatttcagtgactgtggtatgtaaagtcagtcatattatgagtactttgtatcagaattattactattattatactttaacccttcctaaatggaagtgttaatcttttattaacctttcttttttgttgtgcagggtttttatcttccatgggctttgctagctctggatttaatatttggaaatcctataaagccagacattgtgggtatgattgcaggacatctatactacttcttaacagtgcttcaccctcttgctggaggaaagttcaagttcaagactcctctct

SEQ ID NO: 97148 - DNA, 474 bp, Glycine max
gcaggatgaaattactgattcaagtggcaatagaagttctggtattgtagccgataatgaaactgtacttgtcaatattgctgttagtactcagtcaaataaaacaacttcatttcctgcggttattcctgaagattgggaagagagtgctcaatcagtttcaaccaaagaaaatcttgacctgaacaacatgccacaggtcttacaccagtcatccttggcagagcagagcttttcagaaaatgacctgtttacaaaatcatttgtttcatcaatcgatgcatttttagacgagcaggttaaaaatgataataatgaggttgatatatgtagatctgaaacttcaaactttggtgctttttactctgctcctggtattcctgccccatcagcagtttcttcagttgtacaggtgcttcctggaaaggttttggttcctgctgctgtcgatcaagttcagggacaagcattagc

SEQ ID NO: 97149 - DNA, 417 bp, Glycine max
gacccataaagagtgaagttaaattacaactggttgttagtccacctccacaaattatacaaaaattgatttgatttacatcatacattccaaaattcgctgaacaaggcaacgcacaaaaaaatggagatcagggcttgaacttttgagtgagcttctcaactccttttttacaatcacctgcaactcgctttgcctcttctttgatagtaaatccaaattcaagagcactttgctgcacctcatgagctgacttgcctgcctttgagatggcagattgtttcaattcttcagcttgttttccagttttgcatgcccattctctcaatcttgatacaaattgggaaattatgtggataatcttgtcaatcatatctttggctcttcctcccacctttactgccattttttttagct

SEQ ID NO: 97150 - DNA, 108 bp, Glycine max
aaaaagtctatttattttgtttcatcaaagttggtcttcgaatgtgggtttgagaacagccggcatttgcagaccaactttgatgaatcaaaaagtctatttattttg

SEQ ID NO: 97151 - DNA, 102 bp, Glycine max
aaatagactttttgattcatcaaagttggtctgggaatgcctgatgttctcaaacccacattcgaagaccaactttgatgaatcaaaataaatagacttttt

SEQ ID NO: 97152 - DNA, 146 bp, Glycine max
tttagcttacctgtctttcttttaagttaaatatggatttttttttgtagcaaaggagcttgtttttctattttgttatgagtggcagaaatattattattaacatggtatattcgggtaagattttattatgttttgatgcagtc

SEQ ID NO: 97153 - DNA, 281 bp, Glycine max
ggagaaattgatcataaatatatgtagaagataatgggacgagcactttgggttaaaatttataaagctaaataatactaacaaaggaaaaaataaaataaaaaccccctactataggaagaggatgattatatgaactgagcatgctgagctttttttttattatcagcaaactgaacatgctgatgattatcatttatctacatctagctgtggagatcattctagatattgtgatgaactttattagaaacctctggttgattatccaaaggcttgta

SEQ ID NO: 97154 - DNA, 455 bp, Glycine max
aaccaagaaacattagctaaaaatctttgggtagctccgtcagggaaactaagttttcgcgaacttgtaaaaagtaaagaaccctgcaacatcaattgagcatgtgtaggacttcaactcttccgctggttttacccctacttttctattctcagacacttgtgccatggccctttttctacgtccaccaaaaatattgttaaaaaaacagggtacacaattaccgcatctaccagaattctatttttcaaccaatgaaaaggtttactaatccactggcaacgatttctccagatagcaagaggcaaccgtatgtacttgctatagtcattcaatagcaataaacacaccataatactatctacagcatctaatcatatgatagcaaaattttaaaagcaacttctagagctcggaaattttaaaagaacatgtgttccagcaaaacatgaact

SEQ ID NO: 97155 - DNA, 217 bp, Glycine max
aacaaccctatcattatttttataagccccatgatagggtttaatattagtaacatttgacagggaaaatatttgggattttcaaaaattttaaccccaattaaaccagaacaacaaacaaacagtaaagcattaaaaaattgggggtttaaaaagggttgacaaaggggaacagcccctttaattggagaaactttttggggggatgcaaatttag

SEQ ID NO: 97156 - DNA, 496 bp, Glycine max
aaattaaaagatcaaaacttacaagaatatcttaaaatttcatggatcaaagtcaaaccaccaaattacaatggttgaaaaaaaaaagattgaaacaaaaagctcaacaagtacattgtcacataatccgtaaattgatcaaatttaagaacaaacttaacaacgttattgcctaagtaccattatgaaccaagctagagatctcacgtttatatttatgtagtatttttaacaaaaatctaaaattaaatccttgacttagacataaaatcgcaagcggagatactctagtttaaaaataaaaaataaaaactaaaagagtgtccctgctcttttatccactagcaactctgaataagactgaaaccttcacgcaacttttaaacttccattagttatccaatcaccatctatagttggaaacctgtcatttttcctcacatgtagtgaacccgaatgggtgcctaatccttctcgtaatagtaccataattcat

SEQ ID NO: 97157 - DNA, 333 bp, Glycine max
gacaaaaataacataactatgattaattagtcagggtcagtccattaagttcccctcgcatgacatgtgtcaggtagggaaaggctcttaaactgagtacacacttagagaccattacatttgcccacactgattatataaccataactgactaaacccacagagagtttaatacataaactacaattaataatcatagaatgataaccaaattatgcaaggctatcattatcatcttataattaataagttgagtatatatatatatggatgaggtacttaatcataatctggagacctgcgagtgtaggaattgagactgagctccaagga

SEQ ID NO: 97158 - DNA, 373 bp, Glycine max
aagcagtcaaaactgtttccaaaaccttttataacataatgggtaatccttagggacataaaacaaaaaatcccttgaaaacgaggtttttgagttcacaaagggatcccctataaaaaaaacctatttatagccctttccttctgctttacctccaagataaaataaaccccacataagctttaagcaggttttttgttggggactccatcaccaacatcacgatcacaattttgggggctttatttacaaaaaaggggaaataaagggggttcaaaaaactcctgccgtggaaggggggtcgtcaaaactccaaaggtttatagggtttccgggggcgtaatgagttgggtttccgccgaccaaagacccc

SEQ ID NO: 97159 - DNA, 237 bp, Glycine max
aagaaactaaacttacttattttttattaataaagcaaagggaccgaacccaaaatgtaaaaaacccaaaaaaaagggcaaacattttcctttaacgatctctactacataagggccaaagatcataacccactacataaaacccaacaaaggccgcaagaaaaatgagccctggaaaaccagatttccaaaaggggccctccaacgtgttccatgaaaaggaggaaagggagctaa

SEQ ID NO: 97160 - DNA, 433 bp, Glycine max
caaaagaaagaggaaacagaaaacggtagaaaggaaacaaggagagagaaaaaagagagaagcaaacaaattcaatcagatcgaatgctatcttgacgtccgcagcaacagaccactctctctctccccttctctctctattttctctctctaaaaagacctcaacagaacagagccccgaagaagaagtagaagaagaaaccctaaaaacaaaggaccagctcaactcaactcaactcaactcagcaactcttcatattcttccacacaattcaaattcttttttcattttttctctctctaaccactgtttttctcttcggtttcaactcgagactcatgtggaaggtgtttgaagagtgcacatttcagtgtttgggtttgttttggaggcacagcgagggtgtggaggagttttttgggttgaaatgaa

SEQ ID NO: 97161 - DNA, 495 bp, Glycine max
gaattccttaaaattttatacattttatagtgaataaaaaaaaacattatatacattatatattgaatccttggaaggggttggatgatttcagttagattctgaattattagaattatacacaaatcaaatgataaacgtctatcaccagtctctacaagacccaccaccccactgtaattaaggggtataaattaccatcaccaaaggattttcaatacttcccttgaacttaatcgcagtgtgggcacaaattgagcgctaatataacttcagcacccttggtggactttgccatcttttctcactaccacctagctctgacatcagcagctccaccaagattctaagcccctgccttcaccatagttcaacatgcaattcactgcctaaactcatttccacctcgtttaatttaaaacccgtatttcggtaaaggggcatgcatcattttatttcagggaccaactctcaaattgaaaaacctttttacct

SEQ ID NO: 97162 - DNA, 416 bp, Glycine max
catccaatcgttcgtctattattaatcaaaagatttacaggggtaaaaagagattacggtatatataagcgtactaagatgtctagaaaatgagtttccaaaaatcattactagctgttatataagtgagaatcattacgaataagggagaacatagtgtgtttggtagacgagtttaatgcttattacagtacccacggaaactaaagtgacaattcaggtttccatattcatcaccaagcacagcacaacatcaacgccagaaacagagaaacattaaggatatatgacgtagtttcatatatagggacacactgcatgcatgcacttgaacacaaaagcctgtttagttatggttctggaagtagatgtagtctacgtcagcttcctccataaaccttctactggagcacttt

SEQ ID NO: 97163 - DNA, 304 bp, Glycine max
gggttcataacaaagcattttccattatacattcctttttatggaaattcggttacaatctcattgaataacctttataccaattggatttggtgcaacttaggaagcccaaacctttttgatgaaagtccggtccacatgtgtgaaacccacattttttaaacccacgacaaacagggttaaccatgtttttgttatatccggagaccccactgggtattttccttagccattggggcaaaaacgtttgcagccttggtttttttttctagttcgctaacttccttttatttggggggtttaa

SEQ ID NO: 97164 - DNA, 478 bp, Glycine max
cgctacctccgatctcccgccgccgccgcatcccgttcccgatcttccacctgtttcagtcgcgaaccgtcgcgccaacagcgctttttcgccgcgcattccagcaggtcaccaccgcgccacacaaccatacccactgcgccgcccatttccggagaagtacacttggagcaaatcttgagagaagaggagctcttaactcttgagcccactttaacgccacagcacggacggtgatagggttttgtggaattttctgggaaaaaatttcctagaaaatggacgatggcatgcaattgcaaatctcccttgacaagctaccaatcaagcgcttggattctattgaagaaaatggaattgaacgattcccacttgacgtggattacgatgagaagcggctctccctaattaggcgaattgacttcgcttgggctgttgagaaggatgaggagaagaagaagaagaagcagaagagctc

SEQ ID NO: 97165 - DNA, 469 bp, Glycine max
cgttgatctgcagagactcattactattagttcttaaataacaatagacagcagagttacatcccgaataagacaaccttggagagaccaataaagagggaaaaacaaattataagacacaactacaacaagagaaaaccctcaatttcatccctgaagtattactctctcctaaatggttagtaagaaaattatacaagtattctctcacattagaaatcataataagtaatccttcaagtattgtaaaatctatcaaattggtccctaaaggtttgtaaaatatactaattcaagcactaaactgatggatgctcaatacttagtggattactaatataattttattacttttagagagtaaataggagagaatgcaatacttcggatactaaattgatggttttattcaatgcaacaatatccaaaatcttctaatcattcttaggtatagcttatgtttccctca

SEQ ID NO: 97166 - DNA, 442 bp, Glycine max
ggtagttggaaatctttttatttacaaatctaaacagatacatacactgggagttttatatgggaaaaaattagagtgaaaacatgtcaactgtggatccacgagtgtagtttctataaatctgtgattataaacatggtataggtcagtccgtgcaatgtagtccattaaaaggaatcattcttctgtcattaaaaggaaccattcttctgttatgcgtctcttcccaccaggtcagagccactagttgtcgaggattctattgatttgtccaagataatcccttctttaatctcatctgaagctgccagctgttctaccgtcctcccaccctcaagacaaaccatgagatcaccaagctgcatttccaggtccgctactctatcacccatcagtctcgtggtttttttctccctctcttcaatcgcaagtatcttagttt

SEQ ID NO: 97167 - DNA, 465 bp, Glycine max
actcaatatgcaaatatttataaagaatgcaaaaacatcaatgtgaacaggacaacatacagaactaagtaaagcatgaacaagactgacaaaattaaattgaagatcctacacaaatggaagaaccacccgataggtttacagagaattacctgttgaaatcatttgcgtttcagcatttacttaagtaaaaactgtaactcagccaattgctcaaacgcaacatgatgaaactcatagcagcaacatccaggttcagttgacctttatatagaagctttacctaaccatgacaatttcttcaattacacaagagaaaatcaacccagcataactgtatctcaaagctccaacagatttcaatgagaataacctgcatttgttttggatttaacatacccaccataccacaaaacatgagtaaacacaatggagcctatcgatggccacatcaaataatgatgc

SEQ ID NO: 97168 - DNA, 472 bp, Glycine max
ctgaatttaacattcatggattgtctgcttgactttagcatttgacttgtgaagtaatataatccaaacaagcttcaacagcattctttctgttcaacaagtcttcactgtttcaaccagtgaccttcacctttctctctgcatcttctccctcttaaattaaatttttatgaattattgctcagttagtaacagaattaaggtgcttgtgtctttgatttgcttcacttttgtgttgaacactagagctgcaagcatcatggtatgcttcagaaacaaaatttacaagcatagaagggtgtaggagcctgtcttgattgcaacatgaaccatattgttcttgtgattcaatgctgcagttaatctgtttccatcactcattcaaggaactaaaattttcctcactgtattacagctggaagtcattgttgatgtccttaatgggtgatccagctgatgaaaatcttgaaac

SEQ ID NO: 97169 - DNA, 422 bp, Glycine max
gtgaatctacaattgtcattcagtacatataaagtggaaaaaaacagaccatttccaaggtaggaactggagcttataatacaaaacaagaagagaaatttcatattgagagacacttgggttttgataatgtggacattccagtgaaaacaaaccaaggcctgagttaatgctcattggagtgcacaacaagcgcacctttacatgtaactttttattttcacttatagaatagggaccccaaaagcactaactagcacaaattaaaggccactagtaacaactttttgtagtgaccatgctctcttgacaaaggtaacacagctgaaagccacaggttggtctctaccaccccccaacttcattacttcacctcatttccatgtccactatggcaaaatcacattttccaaatttttttt

SEQ ID NO: 97170 - DNA, 452 bp, Glycine max
caaactcctggttgaaaggaataatatcaccttggtattggatatacaacatttcctgtacactgaagacaaccaaaactattcacactggtcttcagtcaaaatgtatatctatatatttactatagtaatccttgctgcaaaatttgtacttaagctaagcctttggctattgcaatcttctaggcatcacaggatgactgcaggataggctctgttgtaatactttagccaaagcgttggaagttgaaaggatgtgtatgtacaaatagcaagttgctcttcctatagagggatccagcccttgattagtcccgtctcagtaccacaaaaaattatgtcattggctgcgaggatgcttgttatcttgcttccagctgatattctccccaactttttcggtgcctccctcaaccatatctgaatgttgttcggtgaagagctggagatta

SEQ ID NO: 97171 - DNA, 251 bp, Glycine max
aaaaaacccaaattttattttatgggccacaattttaaaacgggtaataacaggtggaatttcactggggaaaaaacaaaaatccaaaaaaacccggggggaaaatatttttaaaaaacttttccaattcgaatgggaaactttttttatcaacattcaataaccaaaacttcatgggaaacaaaattttccatccccaacacaaggatgaaccgaccggaacaatttttacccccctttttaaattatgg

SEQ ID NO: 97172 - DNA, 487 bp, Glycine max
tgaagctcttagacaagtatttgagcatttgccgcgctgctagggttagggcaagcgttattgtaactgaagctgaccaagtccaaaagggaattgttgatttggttattaagcataatattgagaagcttgtcattggagcaataccagaaaattgcatgaaagtgaaaaggaattccggtaaagcaaattacactgccaaaaatgctcctccattctgtgaagtatggtttatctataaaggtaaacacatttggacaagagaggcttctgaaacaccatgctattcatcctcatgtactcaacccgagattgccaccagagaaagcttgagatgtagatcttttcaatatggtaatgaattatttgactcagaatatcttcaaccaaattcagcaagaactactactggttctggaagtagaagttgggttcagggggaaatcattgaaactgaagccattttttcatccagttgcagcagtca

SEQ ID NO: 97173 - DNA, 126 bp, Glycine max
cggctcgagtcgttttgtttctggtttttaaaattgttgagagctgaattttatttgattgtgtgccaaaatttggaaatgaaatgttgattcaatttcagtaaaattatacgcttgtgttctttt

SEQ ID NO: 97174 - DNA, 126 bp, Glycine max
aaaagaacacaagcgtataattttactgaaattgaatcaacatttcatttccaaattttggcacacaatcaaataaaattcagctctcaacaattttaaaaaccagaaacagaacgactcgagccg

SEQ ID NO: 97175 - DNA, 315 bp, Glycine max
agaataaacctggggcatacccattcacattccctaaaatgcctttactttcaacaaacttgacttacaagatgggggttgctggaaaagcccatggaattcccaaggggtaccttttactttcaaaaaccccaggggcttaaaacctggctgaatttttcaaaaaagttccccccccctttggaaaaaataatcccaaaaatattctaaaatttagtagatggccccgcccctttttaagaattttttaaaaacatttaaccctttaattttaacctttccgataccggggggggggcaaatgataataaaagg

SEQ ID NO: 97176 - DNA, 190 bp, Glycine max
ggggcaactaaattaaaattttttataaacattaagttcaccaaataaatttagcctagggccttatgtttccaattttgaaaggggagggggtctttgccaatttcaatattaatgcaatcaagggccattttttacaaaaaaaccccaacgaatttcaatttaacccttttacaaaaaacctttttaa

SEQ ID NO: 97177 - DNA, 339 bp, Glycine max
aataaaagaataatagaatatcttcctcatgttaatgctgagttcttcgcagccatcttttcatcgtgtaagggcaaaaagataaactcaaatatattacttacaatgcaagatataagataaaatgaatacaataaacatgtacatatatagcagggtgaaaaatgctgtcgacttctttctaagccaaatggttatttgaacaatgcccttattcagagatatgaccgtttgcttcttcttccctcttttcttcagagacagtcttagcaatggtaaagctgggctgatttgttgaagacagaagcctagcccacattctatcagtaattatcactt

SEQ ID NO: 97178 - DNA, 472 bp, Glycine max
  unsure (1)..(472): unsure at all n locations
ctctcgccgtcaacaatcactgatgttaagcgctttttctccttgcactaagccaccacttcctcatttatcatctccaaattttgtaacccttagtcgcttggtttgtcagttatttttatcaaaacactatctacgccaatagccttaatctcctcattatccttatcacagatttgaaacctttccaacctctaccaacaccaccatacatatgaaactccctaccaatttctttaagaacaagcccatagcaaagaaaaatccaagcttcaagcactaggtgataaaaggcccgacaataatggtgattgtgacttcgttgtggtttgcacagtccggccacaccctctatgtcgcttccatccttcgctccgactacttggatctttgattttggctttcgatttttggtctcatatttttgttggttggattntgggtctcgaattatgtgttatcctctattttg

SEQ ID NO: 97179 - DNA, 445 bp, Glycine max
gtccatctttcgataaacaccattttttctcttcctcttttgaccaaacatgaaacccacggcaacattcttctttctcctatccacaacaacactccttgtttgtctttgcctcggaacaacaacgttccaaaccactctctttataaccttcttcactatttcccttaactatcactcttatcacaccaacgaaaaaccaaacaaaaaacttactgggtgacgacatggtgaagagcgcgtggaaggagatggagatgaaaggcgtggtggaggttcgcggtgtgtttcaggaagggtctctttgtaatattctggagagtgtttttgggagtaatgataagagtgaagagttgggggatatggttagggaaaggtacgagctgattgcgatgttgaacttggaggattattttcctttgaagtttatggactttcatggggt

SEQ ID NO: 97180 - DNA, 377 bp, Glycine max
aaagagacataagaccttcttaatcgatccaatcttttcttacattcacctctagtcctggcactagatatttattttaataatttgatacccttaaaaataaagtgaaataaagcttagagataagttccataattatacgataaactcatctctaaatatttcactaaatatttgagtaccatctttaacatcaaacatcagatacaagctcgatcattctataattgcacatcaaacatagttcagctaaaaggcttactttattatattttttatctacgaacaactagacattgcagaggtggcttcatttccatggaaagcctaagacactccgaaagatccacgggttgcgcgggaagccatttgaagtg

SEQ ID NO: 97181 - DNA, 459 bp, Glycine max
cagtggcacttttgtgctctactgacacaagacttggactggaagatttacgagtaggagacaatgaggaactcctacttctatgtcttctgtatcgtttagcagatggagatcggcttctaccacgtcttggagttgtagaaggacttctgtgacctcttggtgaaatagaacgactttttcgcctgtatgatgacaaatgatcataagcaatgaacctcagcaactaaacagctatctttagagaatataaatgcttcccaccatctagcacactaaatacaaaaacatgtacagttacctcagaaattgctaagattaaccattgtgtgctccatcttttatcacatgaagaagcaaatgtcacaatcgagcaatgaaaaaacaccctatcagcacccaccacctgttcatatccctcacttcccatgttatgggaagaaactgatcttttttatt

SEQ ID NO: 97182 - DNA, 514 bp, Glycine max
actaaaattaccaattaaatggtggtcaaattcatttaaagcaaattcatctaaataccaaaatcttcctttgtccttgttagcaacaacataaaattttccatcagttactttactcttatcttcaccttcagccttctttccttcgttatttgctttattattgtcaacacattttttcatatcttttgatcactttccttggcaccatagtttcagacgcatttttttttacctgttttggagagaacgttactatcaccggcatgttgatcagtgttattttgttcttccgaatgaacttcataaaaaatggtcaatatcttactttgcttctgtatctgtgtcattatggggatctgaacccataggtggaaggattttttcatgctcttttaataagccaaaatctgccgcctccaagattaaaattagtcaatgtggaaagaaaaacaccaaaagaaaagaaaaccataaaccttgtactaatccataatttgcatatatatttcat

SEQ ID NO: 97183 - DNA, 376 bp, Glycine max
tgaagacctcatcgtccaaaacctccgagtcctcgactcagttcgactcgccccactcgcctctccgatccttcccgctcttcgacaacgccgaccccttccactcgccgcaaaatgacaactcccgcgccatcgtcatcgtcgagacaacttcgactcaattcgcccaggccgcgccccccgcgccggagtccgagcaccggaacccgccttcggaggccgtggtcacccgccccgtttggccggagacgaagtcgtcggccaccgttggtcggacgcgaccgaagccggtggcgccgcccagttcggtggtgccgaagagagaaatgatggcgaaaaaagttgcattagggtttcgggtaagcgaagtagtgct

SEQ ID NO: 97184 - DNA, 295 bp, Glycine max
ccctaaatgggccgtatccaagtttttttggcccggaaaaaaaaatcccggggcccaacactcatgaaggcattcctccacaggagtaaaaataggggaataaaaagaaaaaaaaaaaagggggtagtgggggggccaagggaaagaccgtttatccgggggtaaaagggggctttgaaaacagagggcaaaggttgtaccccgagattaacgggcttatagcaagggcaccaaaagccagaaggggcaacccaattgaagcactcgccatttttgggaaaacattttttcccca

SEQ ID NO: 97185 - DNA, 508 bp, Glycine max
ctcgagccgaatcggctcgagctgaaagtcaaaacagtaatagttcaagtagtgacaaagatactttgatgtcaaatgagaaaaacattgcaacagcaggaccaaagtgtgataacgaagccactgagatggatcaaacatcaatcgatgatgatggctcagatgaagaaagtggttcttgtaatgtcaatgccaaaacagctgagcaagaggtggttgaaccatctcataacaaacaccattctaacgttgaatctaagcagccaaaaacaattagaaatataatgatggcattgaaggaaggaaaagttagagaagcaacttctccaatgagaggcaaccgcataaagcctagtggcctatcaacacataaaataagcacagagacattatctaaattgcctaagcctacttttattgctcctagtatgaagcctaatttagaatcacatgctgcacttgcaagggcaagccctgaccctgcataaagaatgatgggatcacatta

SEQ ID NO: 97186 - DNA, 380 bp, Glycine max
gtccatacaattgatcgtaatttgatgttagtaatttgtatggtcactatttacaacagcataaaagcactgtaagaattacaacaatgaaagaagggacaaagccaacatgttctctcttatgaattcaagtggtacttgaatagctatgaactatataaagagcaaattttaaacataaaatacaaagtgaaacttatcacataagaattgactaatggagatacctcatcatgaagagcgtcccccactttccttagacatcattcctttgagactcttggctaaccaaatggctggctcccttggagagaccttggctttcccaaagggcttcagaacaacttgaagttcctccaatctgttttgctgcagcaact

SEQ ID NO: 97187 - DNA, 202 bp, Glycine max
aaaaaacagcttttataaaacggccaacaagaaggtttttatccccgaaatcccatccaagggtaaagcccaaagtttgaaagcccccaacctttttaaaaaccaagggggctggtccaacaatggtgaaaacccgggccaaaaaaccggggggaaccaaaaacccttggggcggattaccccaatccggtttcaaaaattc

SEQ ID NO: 97188 - DNA, 503 bp, Glycine max
taaattctttaaatacatcattgcatacatcaagggaaatatcattcaagtcccttcatataattgtagtttctagtaagcttgcaaatgaatgaagggcttggtttatggaaatttagatttatttctacctatgctctttggattatgatacactctttgaaatttgaatattttataaagcatcaaagctggagttacctgccatcagggctgtaaatgaggagcaccataaaaaatcattgtcattccaaattggagaaataatttttaagaatcttgatttcacttaaaataatagcatactttctaaacaacacaaaaccatcccagaaactccattttttttcaaaaccttagttgagttgacaccaactcctaacatttttatgcagagggttagactgcctttttgtcagttatatgtagacaggtttgtggtatgattattgtctccaaattgacttatttgatagcaattaatccccccactggtgggatag

SEQ ID NO: 97189 - DNA, 288 bp, Glycine max
gcccttaatttttttttggtcaaaaaagtttttaaaattcaattctgggggggaaagtttccattgaaagctcccaatgttgttaaaaagaaaaggctaaaatggaattttcgcccctttattttttcaaatttgggattttaggccccccattttttaattgggacatttcatcccccattttaaaaaggtttcccttttaagcccccattttttaattaaaacggcccccacttttaaaaaaattcccaattttaggctttgggggtaatttcaaaccttggttta

SEQ ID NO: 97190 - DNA, 485 bp, Glycine max
gggcagagcaggaaggtgggggctgaagaaagaacagaggatacgaggagcaaaccacacacaagtgtggtgtgtggtggtggcgcgccactcactgcccccattttctatcttcaatttctgcactcaacaatttcacaagtaacgtaaaaacccaacactttcaactcactctcctctcaaatgcacgatggaggaacaacagcggcaacaacaaaaaccaaagagtcctctccccattgactggagccggcagttccaaagtgactcgccgccgcgcgactacgacatcctgccggcctcctcctccgccgatcaggacgacctctccgctattcccgatcacaagctcagggagtcgattcagagcaagaagagaaccctcgacgttaccggcaagaatttgcccgacaaaggcaccaagcttcgcgctaccatcgaccgctaccagcaggaacttacccaccgggagcaacaacagcgtc

SEQ ID NO: 97191 - DNA, 457 bp, Glycine max
gggataacaccaggcttattaatttacataacctcacccgagcaaaagcgggtttaacagataatggtccagtacgtgttaggaatctaacatgctggcaatgtcaaaaaaataacagcattggatggtgtaagatctaaaatacttacaaagctaggaggaggacaaaatggatacatatttggatgtacatgtaataactctatctagacaggctagttgagatacataagaataagaacgtgtctgtctcagtaaagggcagacacaagtagaagtagaagaaacaaatagcagtgccaatgtacccggcacgatgaaatcatccgagatggagcagccgaaggtttgtggggagctcttccagcaacagctggagcaactgcatgcccgttcgttctttgttgctcatctgtaggcaatgggtttgatgaagtctcatttggagaaaggggca

SEQ ID NO: 97192 - DNA, 455 bp, Glycine max
aaaagcatacttcttgaacattactaaaacaaaatagaaataaatcgttatcatcataaatcactgaaagaaaaccttggtacaacagttagatttgcagccaagtgactaggaggtcacatatttgcatacgaaattagcctcttacaaatgcaaggtaatactggctacaatagatccataatggattcaaccccatgctggaccatgtcatggcgagagcctggagttttatagcaccaattttccctttgtcatcataattcattatccattgcctacaaacaggtcctaaagaagacagcttccatgtctagttcatcaagatattatgcttctacatctcacccacaattagtataatcagatgcttctactagcacttcattctcttttgatatgttgtgatctaccacaagcaagaacaaagcccaatgatgcaaccaatgccacca

SEQ ID NO: 97193 - DNA, 226 bp, Glycine max
ctaaaacccccctttggattcttttttttaattctgggtttcttttttcgggcggggttgtggataccggggtataccccctaagtggacctccaaacttaacgggggaaaccctaaagacccaggctaaatttctccacttggaactttaatcccgctaagatggccaattttcccctcccctcctaactttgggcctccaaactcaggttccccatcagggggg

SEQ ID NO: 97194 - DNA, 485 bp, Glycine max
  unsure (1)..(485): unsure at all n locations
ccacaatctatcactcatacaaagaaaagaaaatgatgtctgttactatttggtgatttaggcaacatagcacttcgtgttaaactttcttttgcaatgttgtcttgaggcagtgctatggacctcagcaagctaccaccatgttaaaaaaagggctaaaagcctggaatagcggctaagtgtaagtgacatacgtcgagctgggggtgattaacctgaactgtataaattctctctgaaacagtatcaaattctgctgaggtaagcttgcaattaaccgagagacacgcttcacgggaccctttttcttttgtgaaatgtcacccttggttgtctctgcttctctccatatgactctattgactactctcactatagagtgaacacagccgttggttggtggcatattattgntgttgatttattaccttttttaacttgttctcaacatctttttgctttgcaacttgtggataactctggtg

SEQ ID NO: 97195 - DNA, 81 bp, Glycine max
aaaaaaaaaaaaaaaaaaaaaaaaaaaaaaaaaaaaaaaaaaaaaaaaaaaaaaaaaaaaaaaaaaaaaaaaaaaaaaaag

SEQ ID NO: 97196 - DNA, 480 bp, Glycine max
ttttgataccgagagaggttcatgcttggtcaaagaacaaaatggagaggtttccacttctttagcattcagtactctagagaatagatatgaagaacattcttaagaagcttcatatcatgtccaatcaatcagaagatgcccaaggggctacttcatcaaagagcaacaagtccagtagtgatggttcatcttcatccactgccccaaagaagctttccaattggttgcattcagtttctaataggcagagtcccagtcctccatctcccaacctggctagaggagaaataatggacccgtctgattcagtgagcagtggtggtttggatgttgtgtctgattcagcgaggcgtgattcggagtctagcacgtcgagggatcctgaagtggaggaggagtatcagatacaactggctttggagctgagtgcaaaagaggatcccgaggctgtacagattgaagctgttaagcagatca

SEQ ID NO: 97197 - DNA, 304 bp, Glycine max
ttctgataaacggcctggcccattttcatttttatttgagagtagtagacatgcagcagtgtagttgcggttccaggagctgactccgtcactgcatttatgtaccaagcaaacggatgtaatcacgttggaagttatgcaacatgaaaaattaagtgtgattggtgtgcaacatgggatacatgggtattcactgatatctaagacccccgtgttctgtaaaaaacttggaagcttctactattagacaaagtgaccagtattgtaggaagtttgtagagacgtttaaggaacatgggtaaag

SEQ ID NO: 97198 - DNA, 285 bp, Glycine max
aatgaattgttattttcaaatgcattacgagtacacgtaatgacacagtatcgaacaaatattgaattgaaaaattaaaaagaaacaagaactgttgcagaaatcaaacacagttggctttgaatagtcaaagcagctcttgcatcacacaaattcgtactataaataacacattaacactaatcggaatgaagccccaccagaaccatacttatttcccaggacaagtacctgaaggttgggataaccagaaagcacacctgcaccagcaactgcacgaaggat

SEQ ID NO: 97199 - DNA, 480 bp, Glycine max
aattaaactctatataaatttatggcgaaagaaaattatgatcgggaatggaacaactaacaatatccgactaatcacagagcctatgcatacccagctataatccactagcataataacatcaatctctttgtagatttacactagtgtgccaacaaaatttatatattttacccaatcactgttaatagaaacgcaatatgcatcaggcaggcaccttgaaggttcatcgaccaaacaataccatcagcatcttctaaaccgcctcctgaaggggaatgaaaaatgttcaacgcaaccaaaatctggaatacgcttaaaggatagataaatcacattccatgtattactagtaaacttactatcagctaagtacaagaaaaatccaactgggtccctcggtgccatgcagtacatatgtgtattatggggttaaaccagtcaaagttgaacaccaaagaagttattcatctttcatgt

SEQ ID NO: 97200 - DNA, 266 bp, Glycine max
gggatgatgtcactcaccacatttttgtttttcttcagccgctatgttgaagttggtggagtcctggaagcaattatggtattcgagattatggacaattattgtgttgtgagggatgttgatgatttgacattctgctgttgagtgctattcgtaacacatggtacgactcttgatgcttgtgattacttgcaaggcgccaagaaattggcacggccggataccgatacttatgcgatgttaatggaggggtggtaaggggagaa

SEQ ID NO: 97201 - DNA, 489 bp, Glycine max
gtttgaagttcattgacactgagcagtttcagaggcacgtttgaaactttttgtttttcttttgttccgtttggttatttgttaattgtgtggctttgtcttttttttttttttgtttatattgcaggcttcgcgagttgaaacaactaggtgagttaatccacgtttcttgaatccaattaataagataaagtggtttagaaactactttgaaattaaatactcttgcattgtataattacttgttctaggttatgttttgtggcattttgaagttttattttccgtatgaactttaaaataatttgtttgcttttagatgattgaattgtttttgtaatgatggagatactgcttggaatttgtgtaccttatgaaggaacttaagttagagagtggaccgagattttcaattgtagttgcaggtgcagttttgttgccatccttgacactacgggacattataggcaaatgtggttcatgtggctg

SEQ ID NO: 97202 - DNA, 316 bp, Glycine max
aagacccggggggtatttttgattttgcaaattaaattacacaattacagccgggcattaaacatgaattgggccttttccaacttaaaagccgaggataacattgggccttgacccgacacatgccccacctaaaaatcataattttacatttttacctacaaaaaacaaagacttttaatttttaaaagaaaaaaagagataaaccgttcttttttatgaaatgaaacccaaacccccaaacattgggttgatttttggtgggggggggggtccccacctggttaaacatgaaccctttgattgaatcacttgg

SEQ ID NO: 97203 - DNA, 147 bp, Glycine max
agcatcaatttgaggtggacatatatatctacatctcgcatgccatatttggtcctttaacattaaatttctctactccttttagctaaaggagaagctttctcgttattcacataaaactcggattccatttaatttttaccaaac

SEQ ID NO: 97204 - DNA, 362 bp, Glycine max
aaaatgaatttatttcagtgaagggtgacattaatattagggaagacagaatgacgagaaccaccgaacattaccatatatgatgaaggatatagaatgacaacaatcttaagagatgcaatgtaagatgacgggcccacttgcatttgccttactccaacagttgtgaagcatttgttagagattatgagcttacagccattcctcggctccacattttttagactgtcagccaattctgggtagagctggaacacatgcacatgcaccagtcgtaaggcagtcattgaccaaagttcttctggaagctttgacaatttatcacaggatttaatgaccagatgtcgaagtcgaggcattgc

SEQ ID NO: 97205 - DNA, 371 bp, Glycine max
gataaaaagggaagctagatggggaatttggaagaccctacggaaaatcagaaaccaagtgatcaaaatacaacaataacataccaaagccacagaactttcctttacagaatgggccactttatatgactaactacaacattactttcacgctgtggtatgtcaaggctgtcagatattccatccatggaagccgatgcaaatacattctaatgctttttagtatcccttatttgaaattgatggagcataaaacttttgcacataagcaactattggaataggtaaagaattacattaaattcataagcctgccacagaacctttatttacagaatgggccactttatatgactaacgacaacatttct

SEQ ID NO: 97206 - DNA, 390 bp, Glycine max
caaagagaaaatgttactcatttcacaggctattctgaaagacaataaataccgttatgttccaacaatattctctcaatcctaaagctttacataagtgaaaatccacaaaaaaaaaaaaaaagccaataaatcatcactccctgacaaagtctacacaaaaaatgggaaaagaaattaaaaaattacatttgtttgtctatgatcctcaaggctaattatcattattattctttatatttttatgaggggacaatcaactttactctatatatctcattgtcttgccaggggctatgtaatcttacgatggtatcttgatgaacttcaactgaaatttggactcaaccaagttttggtgtcaaaaacaagtaaaacaattttcaactt

SEQ ID NO: 97207 - DNA, 391 bp, Glycine max
aaaaataaaatgacttatattttggtctgggttttggaacttgttgactcggtaataaactcgagagtctaccgaatttacttagaatttataaagtttgctcagaatctactaaaaacagaatttactcaaaagtcaattcgcagagaacaagtcaactcggaagaatttgatatccatgcctttagggacacttcctacttcgctggtcgctcgctcctcaaactaatatcttcatcccatttacttttgaatagcttaggctgggttgtttgttccttaactcaggtgtgagggttcgtccatcttccacagtttgattgccttgggaaaaagtttgcgtaagggatgatagttttctcaactctacctccatataaatagaatctga

SEQ ID NO: 97208 - DNA, 520 bp, Glycine max
caaatattgatcatgggtagaagcttagaaaaacccacaaagatggaaattgatctctctttgaagatagatactgatgatgagcataaagaagaagaagatgagcgagtgaaagaggatgaggagcaagaaatggcacagattcaggataataataaggaagaaatccctgaagccacagctggtgaaatagaagatgatgcatcagtcatagaaacatctttgcaagataacacaaaaacaaaagagttaagtgtcttacaaatggagatggagagcatgaaagaggaaaacaaagttctgaggaaagttgtagaacaaacaatgaaagactattatgatctgcaaatgaaattctcagccatccaggaaaacaataaaagaaaggatcatgaaatttctctctcacttcaagacattgcgaccaccagcggtgaaaggccatcgagaattcttgagatctttaacaaacaaatgcaaagtgctccatcttctccacaccctgatcatgatgatgata

SEQ ID NO: 97209 - DNA, 290 bp, Glycine max
acaagggaaacagaggaaaccatccccctgtaagattatttattttaatatgaagatacatataaaatgtaattaatatacctgataataagtctattgaatagtactggggtaaacattggcgaataacattcacttttttttttctcttcatacttatttcttggatcatcaaggggaaaaatcaaacggggcttaccatttatcgagatagatttctacgacccagttgctgttactagctagagctatagctagctaccattttggccactcctagggccaaagga

SEQ ID NO: 97210 - DNA, 245 bp, Glycine max
aaaaaaattaaactacccttttttacattggattggaattttaaaaaaaccccttaatttccgaacggggggggacccaacattttccatttttaaggaacaaacccaaagcaaagcctccaaaattttactttttcaacccttcccaaggggggcataaaaaaaaaatttttttttttttacaccccctcaaaaaagggttttttaaacggcccacgaagggggggcctgaaaaactcacccta

SEQ ID NO: 97211 - DNA, 232 bp, Glycine max
cacattcaaagtcaaaccttggtgttgttttgagagagaacaatgaccaaaaaagagatgaggtcttgttgactcatgtggagctgatagcacagggattggaaaaggtggaaggtgatgagggtgttgagaatagtgagttttgggagaagccagatgggttgggatacaaaccttgcttgagttttagcagggattattgaacatcaagccaaggggttctgaaggatag

SEQ ID NO: 97212 - DNA, 402 bp, Glycine max
agtgtcatgctcacaaaaactcaactagcctggtggtcaaacaggctcagtcaatattttcatcatacaaattcatccttctcattcttgcattgtctactttgccatcagatttttactcttgcgaccaaagtcataaaattcccataaaggaagcagatatggcaagagaatgatcaagctagccaatttttcatcccatttagaggataaactgtataaatgttcaacttgctcaattcacattaaaacaatctaatgagatactacatattaacaacttgagcttggtacaccataatgtccaagttaagcagaactttcaattgtaccaagcagtgttgcagaaggggattggctactcatcatcctcagggtcaaaatccttaaccttcacatctg

SEQ ID NO: 97213 - DNA, 506 bp, Glycine max
ggaggctgctgaagagggttggtgacttttggtggtggctgaaatgggttaggaggaaatatgaggttattagggtcaagtagtttctgatctgaaggctgaacatttggggactcattagggattcctgcagggactagtggtgacaatattcctgaaaggggtggcaacaatggtgggaggtcgggtaatccaggaatgggaggaagaagaccaccaggtgtttttggattttgaagtggaggaggaaatgatggatctatttttggaggaaatatgtgtttcacataatcagggcccttgatgttttgaatgcttggtttttggttgcaaagaactggctgtctaagaggcttgaatgagaaaaagccggctgagaatatgtgtagtccttcctttctggacttgaagcacagtgatgaagaagttgctgctgaggcaacaacacaataaggctcactgctatttattagtttcacagtgcatccttttattcttttcacatg

SEQ ID NO: 97214 - DNA, 232 bp, Glycine max
atataatatttcttgttatttggcgggctataagaagttattggtttgattctctttaacaaagacatcaagagggaacaaagaaaatatatgttaaagaaagaggtataaacattcttcaatagtgtacaagatatatagctgaatcaagcactttagcctttagttctttactccttgagaatgtcttggttccttgttattctatttctcaggctcacatttggtttaa

SEQ ID NO: 97215 - DNA, 316 bp, Glycine max
attcttaccatttctcttttaaccaaataccaaagccaagccaatggtggaagacgcttacggtacaccattcttgaaaaaatccaacttcacaatatcaatattaactcataattatattcaattatcaagtaaaatgtccgcctaccattataaaagatcattttatctatatactataaactataagtttcatgcttcaattgggtcaacttttcacattaacacaagcccaaaaccacaccagcaattctttacagctaatcacagtcttcagaaattacattggacgtcaacctgccatgttgaagtcgcc

SEQ ID NO: 97216 - DNA, 367 bp, Glycine max
gctactagtcggggccgccctttttttttttttttttatattctaatcgttctccttttgaattcacctcaacccaacaatggaccagtgtacgaaaagtacagaacatacacatctatcgggatctaagtgaagcactcccatcagggttgcatcaaaaaataaaataaaattgtatgtagctcatttcttggttttatcaagaacttcaatgtatgtctttggaactccatattgatcaatcaaatgcctagctaaatcatcgatgactgctccttgaaccaaaacttcattccctttcttacctggaagttctgcaacagcggaactgcgagcaaacttgttctgcagttctgatgccaatgct

SEQ ID NO: 97217 - DNA, 278 bp, Glycine max
ccactggaattttcactttagaacaggtggggtatatgtccgttatttagaatagtgcttcacatgtactaattttaaaatcagaatagagaaacggtactattttagtcactaacaactatttcactgtggaattccacagaataaatgtatgcattaatagcatattcatcataaaatcaattacacttaaaaaaaaatcagttgaggctttgaccagctgattgatatgttttggtgagatcaagttgttaagtaagtggaaattggaatgtcaa

SEQ ID NO: 97218 - DNA, 252 bp, Glycine max
cttgaaaaagacattccgattatttttttgaactctcaccaaaaccattttttttgtggaccaaacaagatggccaaagagcagtaaaagcatgatcccgcggcaatcaccaactccttccaaaaccaaaaccaaactcaagaattgctaggtaaaggtgaagtggaaaaggaggaggaggctgaggcccctttagctctaagcgttacatacaagggtttgcacatgttgggagacattacagcatggcct

SEQ ID NO: 97219 - DNA, 402 bp, Glycine max
attcaaaacataaattaactgcccatttactaaaataataagttgataatgtttatggaactatccggtttataaaattgtctataattaattatagaatcaagagatgcatctaatatttgcatcaacctgcattactcttttttgactcctcgctttgccattccaaatcaaatcctcaaagccgtggaatcaaactaatgtactatgatgattttttatggctggttacttagtaagtgtaaccagtccaatatatagattataaacagcaataatcagggtagacctctataccacgtgccaatatactactattaaacacagcatatggctatctaatcaagcagattaacactcgtattatacagccaccctaatagctactatttgatgatcata

SEQ ID NO: 97220 - DNA, 327 bp, Glycine max
ctctcacaaccaacaactgggtgattcaactcacgagaacattgacgagtggagatggaagctcaccatgcttatgcgcaacaaagacgaccaagaagtggtgtccagggagaagaaggaccgtcgcgatttcgagcaactttccactgtagcttccaggatgggtttgtatagccggcagtatgcaagagttgttgtgtttagcaaggcgcctttgccaaattaccgccctgatttggatgataagcgtccgcaaagagaggtagtcttaccacttggtgttcataaagaagtagacgctcatctccttgcccatctttcacaaaa

SEQ ID NO: 97221 - DNA, 402 bp, Glycine max
agcttccaattcttacactgttatttattcttcttcttcttctacccagtcacatataggagcaatttgtaactgaggttaccgagaattatgagacaacatgctggggttgtggactgcgtgttttgcttccatcatgtgcatctgctttcaaatgtggctggtgtggggccattacagatcagaacaaaatgaaacgggaccagaagtgcatcaggtggagagtagtccgtgatcgatgctttgtttctgttgtcctcgtatttatgttttttgtaatatttggtggggtgtggacagtttatcctgttgtcttttctatcagtattctttgtggagtttttcactcaatcgttacagcaatcttgtccatagccaccatttcctttttcagctttgcag

SEQ ID NO: 97222 - DNA, 270 bp, Glycine max
ataaggtaacctaaagggaaaaaaataaaataaagacccatcttttttctttaaacaaagatttccctcatatttacaaatgaatctataccctctttcaagattaaaaaaaggaaaggaaaaagaccttcctttaggaccccagacctgcaggacaaatctaccataccttcaaaccagctgtccttgcatgatccacagctgctgcaagatcactgtctgaagccaatacaactttatcatgatcttcggttttatacaaaatttggg

SEQ ID NO: 97223 - DNA, 199 bp, Glycine max
ctcgagccgttcaacttcacccattcatacgtggtgttgttactgctgctcttttctcttttcttttctctttagttctctcttcccctttctttttctttttcttcttcttctgagcttgtttaagcttttcttccattaacatattatcacaatgtgtggtattcttgctgttcttggttgttctgatgactctcga

SEQ ID NO: 97224 - DNA, 169 bp, Glycine max
agacctcaaacataagttatttcagtttttggttcagcgagatccaccaaaaaaaagatttgattttgcagttcatgttacatcttattgttaggacaaacctctgatcaaaagagtcaaatttggtaattgaattagaggaatttgcaaggcctaagaaggggggggg

SEQ ID NO: 97225 - DNA, 371 bp, Glycine max
gaaaatgtcatccataccataaaacttacgcatgtgagataattgcaacctacctcatcaagtatattataatgttatcagtaggcgaaaaagaaagtgggtgacaacaccagttagtttttattgtcataagcagctatattctggggctcacattcaggactaaacaaacgaaccagcaaagccgtgccagagctcgcagttacagctccacatgctgcccaacgaagactcctaggatttgtaattcgaggacctgcataaccaacaaagattgagagaatacataaggatgaattacagtcagaattttttacactgtttaaaacctcataaaatcatctcaagagagaaactccatcacaagaaac

SEQ ID NO: 97226 - DNA, 350 bp, Glycine max
ggcggccgcctttttttttttttttaatttagattatatatattttttctgagataaaggggggtgaacatagcagatcattgcaatgactccacatggagatacctgaaaaagacaggcctgatctaccatttttacaaaaaacttaccaaccaaatgcttctttcagactttttcttatgtatcactgaaagtgaccttaactgtcaacgcctagatttattcttgcagcagcgaaactcagctaagagagcaatgtgatctgaggaccattcaggggaaggaagtgctgtgtccttcctcaaactctcctcatacagcaactccaataatgactccacaaccaatga

SEQ ID NO: 97227 - DNA, 356 bp, Glycine max
ctcgagccgaatcggctcgaggcaaaattagcaagaacagcttgcttaaccaattgattttctctattacggacattttcataacaggagaggctctctgcttgatgaacagaccaaaggaagcagctgagcacttgtcattctatttgtctgggggaaacaatgttgacttgcctttcagcctagaggactgtgagaaatggcaaccggagaggactgccgattttgaagaggtgaatggaggatccacagctgctaagaattcttctcttgaaggcactcagagtattgttttcctcaagccagaggaggcacgagcaacaatttatgcaaattttgctgtaatgtcggcgatg

SEQ ID NO: 97228 - DNA, 206 bp, Glycine max
  unsure (1)..(206): unsure at all n locations
gcggctctttattcccacatcccttttaccttatttttgcgccattncttaaatcgggatttatgcatacttcagacacctagtttcatatcatcattctacacacacacaccttatatatatatatatatataaaagagttacagagcaagacaagtgttgttgatgatgttgaggttggaggaaggaacgataatggaggattc

SEQ ID NO: 97229 - DNA, 362 bp, Glycine max
tcggcggccgcccttttttttttttttaagattcaaatgcaattttttctagattagaccaaaaaaaaaggaaaggcacatatctagagtttatttgtatagaggtgtctaatgatagaacttgatcaataaaatgttatcctccatcccaacagggctttccaagaacttaatattataggattgagtgttaaccctcgtccattttttctcacttgaaaccaagtaatgagaagaaggcttttccatttataaatgaaacttcaattatatttaataatttataacaaatacggaaatacctaattaaaccatgaaaaaaaggaaataattaaactaaaggatcctattttaaatattac

SEQ ID NO: 97230 - DNA, 256 bp, Glycine max
gtaccctgcactctgcacattatagttcttctctcgtcaccgttacatggttgaacgaattcaaagatgaagtcagggaagttgggaattttggttctgctcgtcttgttcagctcttctacttgttccgcttggtttggtagtaaacacaaaagttcaagtggaaggagctcctttcgtccaaatgaagcatcgtcatcgtcatcgtcgtcgtcgtcgtcaccatacatactaaaccgttttcgtgctggctcat

SEQ ID NO: 97231 - DNA, 331 bp, Glycine max
tttgaggaagataaagttctaagagaaatcagaacaccaaacacaagagaaaacatttttatgggcaaattatgcaaagaattagaggtccagagtagaggagaaacctcttaacaaatgttcttatatcctgattcccactttcactctaaatgcttcagagggagaaaagctgtcagaactgaacaatccaagttgcgagagcagttctataaaatctatgggaagtattgccagaatgtggacaggaattcttttggtccagattctaatttcctctgccagttcctctatttctttaaggcagaaaatattgaggacttcttagttc

SEQ ID NO: 97232 - DNA, 233 bp, Glycine max
atgtattcaatacataatcatttgtcaatcggattaaataaattacacactaggacctcatctttttggggccctagcgatttacataagccagcgtcaggaactttatttgtcggaacactaacatttcgaataaagaaaaccactaaaaaggaaggaatagcgagcggaagttaattccccccatgcacgggcaattcgaaccacactgtgatcaatgcaatgtgaagaag

SEQ ID NO: 97233 - DNA, 432 bp, Glycine max
ttacaatgattatttcttttattctgcttgattttcattttaaatcaacctcttttaagtttataattgccatctctcaattgcaatctcaggcacactgatgcaaaatgactttctgatatttactgttatattaaagttagagccattctagtgcacaactttcttatgcattcttgaacagtatgttgaggcattagctgttaactaccaagggatatttgtgtcaggtagataacacaatgtcgctgaggcgtttcttaggctattctgatggtgaggtcatgaggtctgatgcaaaaccttgttccaggctaatgaggcacacagctgcaatctttagtgttggtggagcattaggattttgggtcctttgccgaatgcactatgggttgtgctacctttttccctcacttctttcttgttctatct

SEQ ID NO: 97234 - DNA, 469 bp, Glycine max
ttcctcttctcctctcggggtgtcccctctcactctgtgactgtcgctggcagctcaggtactctcttctgtctttacaaataaaaaccagctcaggtacccttttttaattcaaatttacttgtaaagtctcaaaatttaaagcctttttgggttttcatctgctgaaaaataaagggcctgagaagaaggtgttccttgttaagatctgtggtttggttttcgggagggaacaagaaaaaaaggaaaagatgaatagctacagctactatgggtaccaagagaagaacaccttgacaagctgtgaggagacgaggatggaatcagtgatttgccccaaacctcgccgattgggtctcataaaccactcttccatcaacacagaagtcggaccctcgaggcaccccatcatcagcttccaacctgaggtggaagattcaggagttggggcagcgcttctggacatgct

SEQ ID NO: 97235 - DNA, 328 bp, Glycine max
gacctgtcctcttcaataagaaatgcacattattgagccaacagagaagattgcatgtaggattgactgagagcccttccagcactatataaggaaaggtggagatggaaagtggtgaactgagagtggcaagtggaccccttagggagctccagcgtgtggaggagcagtggtggcgttgatgtgttttcagggtcttcaagaagggatgatgatgaacaagagcttaaatgggctgcaattgagaaactccccacttatctacgtatgactaggggcattctcaccgaggctgaaggccaacctacagagattgatataaacaaac

SEQ ID NO: 97236 - DNA, 445 bp, Glycine max
gctatcaagaaagatttggagtacctagttcttggctcaactcagttagaaaaaaatgataagttgcttatggatttccataaacgattccatctcatatattttcttcatcaaatccatagtgatgcagaagatgagatagtgtttccagccatggaggcaaggggtaaacttaaaaacattagccatgcttatacctttgatcacaaacatgaagttgatcacttcaataaaatatctcacatccttgataagatgtctgggttacatctttctgtttctacaattgatccaaatgtcaaggagaagggaattctaaggtatcaccatttatgcaggaagctgcaagaaatgtgcaaatcaatgcataagtcactttctgatcacaaaaccgtgaggaaatagaaatttggcctataattagaaaattcttctcaaaccatga

SEQ ID NO: 97237 - DNA, 339 bp, Glycine max
ctttttcaccttccccctttgtttctcaacatcattctcctcattcccctacctacccccaattttcccttctgtatttctctttttcaattctcgatttcccttctcccttttgtggcttcataatccagatcctctactggctctacgtcttgtcatgaactaactccctctcaatcccctaccctaattcctccaatttccccatttttttttctaattaatcagatttgcaaaatcctaatttctctatcctaacaaaacccccaaattcaaacaaatccaatggcttcgattccgcgtccggctgcgatggacgagagaaagaggaagcggatg

SEQ ID NO: 97238 - DNA, 208 bp, Glycine max
ggcttcagatgagtcttactctctcattatttaataagatgtgcataattaagcatacaacataagttttgtgagttgtccgtataggaccaatggcaattagttttattgagagcggattatattttggagcacgcaaggagatactaaactcgatgaaaagaaagatctgagatctaaggtgcataagtgcataactggtatatat

SEQ ID NO: 97239 - DNA, 404 bp, Glycine max
cagaaaatagattctcgtaaactaatacagaagaaaataaagttttatatcgaattaaatcttttgccttcacaaataatatggaatcctctatagacacaaacacaaacacaaattatgccaagtgaccaagcgaagagaaatgcagcctatacaataatacaaaagcacgctccacacagagaacaccctaggcaaacttcaaagttgggaatcacaaaatttcagaattgcaagctcatgagattgattacaccacttctgtcacactgttctcttcagtggtcggagtttccatattttctttgtctccctttggagtgatagcagtaactttaacatcagatttctttccctgcctctttaccatgcccttttccttatttgggtcttgcttgcttggc

SEQ ID NO: 97240 - DNA, 129 bp, Glycine max
caccaggaaatggacctgctattgtatcatacttcttctggagatcatcttgtttgtggtgctggacactgtgaagccgtcagaaaatagcagtagtgtcagcaatgggggtggtcagcctgcaccagc

SEQ ID NO: 97241 - DNA, 463 bp, Glycine max
tgatatcatctggacgagaagcatggaaagctgagctcacatatggcacatacattgtagatccatcatttccctcccgcataatcggatcagagggcatatgaggaaaagatgtctggcacatatgacaatcatttaccctttgaaaactttcagccatagttacttgttgataaaaacttccatcggggagaacaacatggttagatggtggaacttgagacccgccataaccatcaaatggtataccaggagaaatcgtaccttgatatgcagtgtttcttggctctgtaggaagcggtactaacttttgagcagcatgatagttccccaacagattttcttgggtttgcattaccgggttaatcaaaactggtgtggaactaatctgagaattcaagggagccattgacatgtgagcagcaggaaggaactggtgggatgagacacttaaaggactatc

SEQ ID NO: 97242 - DNA, 398 bp, Glycine max
aacaaaatgagttcttcaagcccacattgacattgctacactataacattatagaataattttattttaatatttatataaacgtaataaaaagaatccctataaaaatgagacccttggacagtcgtccaccgtgcccgtgctcatgccactgcagaatatgcatctaaaaatctcgcatataggttaattgcatagtgaggttgacgtgtgtataattgcaacaaattttatctaaacttcagtcttgccattgatggggacaagctccaaagtctcttcttcatctaccttatcactcgtgttctttcctgaaacctcaaaaggaagcagttcctcatattggatcagtcttagggacaagaaaaaccaaagcaagtgtagcaaacctaagcatg

SEQ ID NO: 97243 - DNA, 151 bp, Glycine max
gctccttacacaccctatcatatgcatatgaatgaatctgcactctctttgaaaactgtcacgctgacaccggtgtcagaaacattggccgggtagggatcccgctatcgctaagggcacggatcgttaaatctttcagaagcttttatgc

SEQ ID NO: 97244 - DNA, 220 bp, Glycine max
atggactttgacatggacaccggacacggacatttcgacacaactaatgtctaaaatataggacacaagaacaccacatacacacacaaactgaaagattctaattaaatgaaatatgaataacataacaaaatatctaagctgatggtatatacatctttttaaataattttttttatgttttttcaattgtattaggtgtttaaaggtgacaacttaa

SEQ ID NO: 97245 - DNA, 232 bp, Glycine max
agaaaagaaatttcaccgtaccagagaacaaggaaggatagaagaaagtgaaagaaaatggcgttgtacatggacgaagaagagatttggaagtgtccgaagcatccatcaaagagaagaagaagcggaatttgccctacctggctttggagaccgtctcgtaactctttgccctgactgtgctaacgtgcgcccctgttcctgctacgcaaccagctcctcctcctcttcc

SEQ ID NO: 97246 - DNA, 240 bp, Glycine max
ctagagcattggaacatgactacatagggtgggcagagaatccgtcaatggatggttaaaactcatcatcactgaacttgatggagacagagctgaggcttggcctccctggctgcgagtctacagagagaaaatcaggttctgcactctgtctttttggcaaagagttgcagaacatcattaacagtgtttgttctttgaaggctggggccacgaggggcttttttgttgccattgaca

SEQ ID NO: 97247 - DNA, 494 bp, Glycine max
gatcgcgagcgcccacgcgtccgcaaatgcaacgagatgccgaaggatgctccgacacttacagcagcaggtgcaaatcctgctgaagacgaagcttccctgaaagacctctctgtgcagacagagaacaaggcttcttctgcctccccagctcctgatgatccgaaggccagcgacgagaagacgctggcagaagagaaccagaagctgaaagagcttctgcaaaagcttctggcgtccggcaacgatcagatgggggtcatcacggacctaagtgagaaggtcaaggtgctggagcggaggctggcacgcaagaagagaccaaaggtgagggtgcacaagccatccaggcatgcttcctgtgtccactgaaaggataagtctgtaaggttttgaggttttatgttgtatggatccccatgttgcttcctgtgtccagctattgtgcactgtgtaggtatagccatgctgtggcactgtgcttcgtcttggac

SEQ ID NO: 97248 - DNA, 556 bp, Glycine max
  unsure (1)..(556): unsure at all n locations
cgtctactcgatgaagaaagggcagattgtgcgcgtggacaaggagaagtacctgaacagcatcaattatctgtcagtgggacacccgcccttctacaaggggctggactacatataccaagaccgcggcgaggtcttggatatcaggaacttcgaaacaggagaatacgccctgatcgcttgggtggggatcccgacgccaccggcatggctaccaacctacatgctcatcaagtcggacaagctcgactacgagaggatatgatggccggccggcggcctcgcagggcaccgtagcgccgccgccgaattcatgcttcatttcgcatcaggagtcggccaagcaggacacacctcttgttgttgacttgttgtaggtatatacgtacatgccagtattgccagaacagtcgacagaggcaatctgagacctcagctgctggaataatcaggaagtagatcgagagcgacgtacgatgacgagattcataattgctgctgcacatcacttctttatgttatntaaactcacatttcataattaatactaataata

SEQ ID NO: 97249 - DNA, 426 bp, Glycine max
cccacgcgtccgactaaagaggcaaatggagctgctagacgacgacaccattgtgcctgatagccagcccgcggatggcctttggggctgaacatggttatcgtcaagagaagcgccgaccctgcttcatccttttttgccattgtccacctgatacgctggtgggctttataagttgtctaaaacacatgcccgaatgcgtgatgtcgctgatggcattgccatacgccacacgcagttcccttattttgtcgggcttaagctgtgatctgcctgaggatgaatcgatgatgttcatgatacagcttaccagctatatatatgtgttaatgtatgtaagaatgatacgcacgcttagtctctcacccatgagccatgggtccgttgagtcctgactgaccatcgccagaagttgtggtttgtgac

SEQ ID NO: 97250 - DNA, 70 bp, Glycine max
aaaaaaaaaaaaaaaaaaaaaaaaaaaaaaaaaaaaaaaaaaaaaaaaaaaaaaaaaaaaaaaaaaaaag

SEQ ID NO: 97251 - DNA, 282 bp, Glycine max
ggcagcattcaatgagaaggacaccgcctactctgggtcggcgactttcacctacgaggccttcatgctgaccgtgctgcctttcctcattgcgtagtggcagtccactccgccgctcaaaacaagctttataagcttttccaatagtactgtaatattatgcctgctgtaaagagatttatgttcgcagagttgtttttagacgagttgttttgattctggatttaacttgtgttgtgaatcataaagttgctctgaaatggagaatgtacctgttggttg

SEQ ID NO: 97252 - DNA, 187 bp, Glycine max
ctgaggcaagatcacacaccgtttgacccacaatggcagtggcaggctccatgttcccagggctagcgacctggttctcaatgtagtgacatttgtgatggatctaggggtctctttgtcgattcagcccataaataaagtgtgaaataaaagccgcaggtggaggcaggaacctgctgattgaggg

SEQ ID NO: 97253 - DNA, 347 bp, Glycine max
cacatactgagctcaagcaaccctcatacttagctcctggttgctcaagcaaccctctcaagcaaccctcaaacttagctcctggttgcattccctaaagttcatgcatacatatatagccttccactcatcatatgctggtatccgatctatatatagacacatatgatatgttgcatatcgccaggttctcagatcaagtcccttgtgtagtatgagtggaaacctatctaaataatgtgtgtggcttctgaaatatgtggtgttattgtactgagctatgctcaatagtaaacaacaaattattgaaatatgtcgcgtgtgcgataataaagtgacttcgacag

SEQ ID NO: 97254 - DNA, 338 bp, Glycine max
cggcgcgtgggcaccgttttatagtgaagaaaacaatagaagagagcatctacaaattgaacaggagcagagctgtctgctctactataaaccgtaaatccaaaaacttcaaagatgagcctgttttgacgctgaaggatgtggagtcgctattcccgatggcaggacctgatgaacccctagaacaggcagatcaaaattacggcgatagcttgaggagtttgcctccatctgttgccgctgggttagctgctgaaagaaggcgactaatggagcaataagttaatggagtttgcctccatctgttgccgctgggttagctgctgaaagaaggcgac

SEQ ID NO: 97255 - DNA, 417 bp, Glycine max
agaaaccttccagcctcagcatgagtcccattagttccattggtcatttcttgatcctgttctggttgataattttgttgaccttgcctcattaccgtaatctacaataaggaaaaaaagctattctttatttcctttgggaaatattctgatctgactagccaagcgatagaataattaactcttgaggttaagctatattattcttaatagggctgacatagggaatagttagggtttcatttcctttccaagcttcacattgcctgtcagaatatggagtcatgtcgcccacgattatgcattgatttggatccctctaagtacaagtgactggtatttggctgccctgcagtaatatatgatgttcaagatagcagccacagccgccgccaagcatgaggcattatattccat

SEQ ID NO: 97256 - DNA, 111 bp, Glycine max
cccacgcgtccggccttaccagatccatcgactcgcttgggccgcccctgccgatgtgcccgttcgaaggtgcggtacctggcaagcgagccatttgattcgacatgaata

SEQ ID NO: 97257 - DNA, 351 bp, Glycine max
cacgcgtttctttcttttcaacactctctctctctctcgcaaccactgctattagcttccttctctgactcagtctttcgaatcctctcacccagaggttcgattcgtaccatgtagtggtgggatttcagcttcgccatttcttgattccaaaaaattttgtttctttttttccccctaatttgatttccccagttagggtttttaattctactcgatcgccggtttcgaatacccggaggctcgaatcgtgttgggggtctttggtttttgattaaggaagtttccgttttttgtgttgggtgatcaaggggttgtttgatttttttttgcgatcgagaatgggtgagg

SEQ ID NO: 97258 - DNA, 295 bp, Glycine max
ggaggctgtgagggctcacatggcgttctgcaacatgttcaagttgaaccccgccgtccgcgtggccgacggcatgcgccagatgctccggaggcggtccggtgatatgtcaaagccagaatcggccaagaagtacgaatcatcagtgacactgtattgaagagttcatccatcctaaggcctgtagaccgtctagccctcttctcaggctgaaataccttccaccttttgtcagtttgctgtatgttcttcttatcatgcctatgccttcttggaatgtacatacgattcatgc

SEQ ID NO: 97259 - DNA, 458 bp, Glycine max
attttgcttcatcgcttgcttccaagtcctgtctcgtttatatttgagactcaagctagtggaaaaaaaggtcaattaatttctccatatctttcttttggaagtagaagacagaaatttgttgcagtggtaattgagttaattcctcatttattgttttagattatcaaagtttttatagaagctagcaaatatggaaggtggtttttttacaccttggaagaatgagccttggcaggagttagcttcagaggacgtgaaggaaagtgagcaattgatatcgttgccacccttggctgagccaccgacaccccgtgaacctatggagttcttatctaggtcatggagtctctctgcctccgaaatctcaaaggctctctcagagaaacaaaagcaaactttcctcgataacaaggccccagacacattgcccgaacctatttccgctcctcaattag

SEQ ID NO: 97260 - DNA, 403 bp, Glycine max
cttttgacggccatgaaaccccctcagctgccggccggggagcgctcctgggctcacgaggtcaagcaggccctccgtgagaaactccggcgctcctacggcgccgcctccgccacaccggcggccggtgaaccgagccgtggcgccgactgccgcggctcggccgccgaggaccccataaggagagtcatgttcttggctccctggggccacacataaaacacagacccagatctgggcttgcaagagcatggccggatctgcagagaactgctcaagctcaaccatacttaaaaggaactggagcttgtcttgtaaactatggagcatgctgcttgcaccacgaacatgaacgcatggctggttaactaggtagatatgggtgtggatgggagagagagag

SEQ ID NO: 97261 - DNA, 439 bp, Glycine max
actggtcacaccgcgcagcgcaacggcagcagcagctcatcgctagctccacggtcgtcggtgttccctgtgcctgtgcgtgcctactactctactctacatggcggcctcgctaggactcgcccacgaggcggccccgttctacgccgccgcctacccgccggccggcgctgcttacgcttacctcgcaccaccacccggcgacctcgtcgtcgagttcccgccgcgcgccgccaccatggctgacgactgctgctaccagttcggccaggagatgggcggcgcctactgctcgccgccggtgttcgacaatggcatgacgagcctgctgaactatggcgtcgaaggcgacgggaggaggccggtgggcggaccagctggcggtactgggaacggcggcggccggccccggccggcgtcacggatcgggttccggacc

SEQ ID NO: 97262 - DNA, 143 bp, Glycine max
cttgtgatggcattaagactttcagactttgtttttgggtctgatgcatgtaaaaaggattcccagtgtttctgttgctcttgcgatcctgtgaggacacatatgagagaaatatttagtttgttgatggcaaatcttgtctt

SEQ ID NO: 97263 - DNA, 454 bp, Glycine max
gattcaacaaagacgtacgtacatgcacaaaactagagcgagctgtgtgtgtgtgtgttcgtcatttcctcgatcatggcgaaggcgcaggcgcaggtggcggcgaggttcatgatggaggcgccgccgccgcaggtggtgtcggtcatgcggcggaggaaggcgccgaggagcctgagcaccatcgccgaggacgacagggagatgctggcgccgtgcgggtcaccgtcggaccacggccacgtacatacacataactagagcgagtagagataccgtctcttactgtgtgtgtgtgtgtgtgtttatcaactcctcgatgcatggcgaaggcgcaggcgcaggtggcggcgaggttcacgacggaggtggcgccgccgcaggtggtgtcggtcatgcgacgaaggaaggggccgaggagcctggacaccatcgccgaggacgacagggagca

SEQ ID NO: 97264 - DNA, 414 bp, Glycine max
atacaataaaaaagaatcgtataatgtccgataattccctattacggttagggttacttactcgaatatctctggaggtgtaggtccgatccgaaatctgcatatctgtgattccattggcgaccttgtcggcagctttggaagacgtggcggccataacagcagcggccttcttcttgctggcgttggacaccatcttcgatctccaacggtagatcagataagagagaagaataaaaaaaaaggagatctgaaacgagccgagggtttcgcgctgcacgaacccaagcgagtgcttagtgttttgaaggagggtagagttcgatgtgtgagggaagtttgggatatttatagaagagggttgttgggcttcttccgctttggttgcgtgttggtgtttggagttggactcag

SEQ ID NO: 97265 - DNA, 419 bp, Glycine max
agaagcgaaggcggaggcggaggagcggaggtaggagatctcgagcaagccggaggcagaggagatgaagacgttcgacccgtggccggtcttcttccgccgggagtggaagcgcaactggcccttcctcacgggtttcgccatcaccggattcatcatcacgaagatgacggccaacttcaccgaggaggatctcaagaactctaagttcgtccaggaacacaagaagaagcactgacgaaccaggtgaaggagttgtcagaaacgcatgtttggccagccagttctgttatgcttttgaatgaaaaatttagacccttctttctcgtttccttaatcgaaatgcttgcactctatgttccatttgtaatgtaataagaggcaaatggattgaaccaacaacaatcaacttctgattg

SEQ ID NO: 97266 - DNA, 458 bp, Glycine max
tcctccaccaccggcgaccgcgccaacgccaacacctcctccacctgtactacgcccgcctcctcccagtgctgtcccggcgtcaccaccacctcctgactccgtcccatcaccgcccccgtctcctaacggcgtcccggcgtcacccgcgtctccgccgtcacatcagttattggctccgcctccaccggcctcgtcgaccggaacatcatcaacgtcgtcatcgccctctaaatcatcaagcaacgccaccgtggtgggcataggcgtcgccgtcggggcggttgttctgatcggcctcgccgtcggcctcatttactgcttcgcgggaaggaaacgacgccggcggtcgccgctgccgtctcaggggtttccaggcgagttctacgacccggccggggtccaatgaccccgctgcacatgtcgcacgtgcaatcgacgacgccatcctcgacgcc

SEQ ID NO: 97267 - DNA, 204 bp, Glycine max
cggacgcgtgggctcttgtaacctcttggccgttgcttggggccctaggttttttcttcaggaaaaggttgagtaattctctgttatctaggaagctgaagaaatcgtgaacactgtgctaacacagatttatttggtatgtaagagcatgtacagtgatgtttaatatagaggctcttgagattatctaaagagagcatttgc

SEQ ID NO: 97268 - DNA, 342 bp, Glycine max
ggccgccctttttttttttttttttttttttgaatataatataatatactaaaccaacatcgcgggcgtgttattgccaaacattttttttgggttcggcaaatgctccaaactaggttttagcctgctcttcttcaccttcaaaattgtacttacacaatagacacagatggctgaacctgatgattgcggataccagagcggaacaatgcccttcttaccttctataggcttcagccttcagatgtcaccacctccgcaccagcgatgtgagtagctcaaaaagctcaaaaggacttccacgcccgtagacatcatcctgctgcttttgctggttggaaa

SEQ ID NO: 97269 - DNA, 261 bp, Glycine max
cccacgcgtccgcggacgcgtgggcggcgacgagaagtggcgagccccgagagcgggtttagttagaggctacgggcggtcgggcgcggcggcggcggcggccatgagcagcgggagcgagagcactaccgccagcaggtggctcgagctggccacgctgcgcgcgctggcgcgcgacgccgcggagcagcttcggctgccgcgggccggcacgtcggcgtcggcgtagtcgtcgtcgccgtggcgcgggcgcgaggacca

SEQ ID NO: 97270 - DNA, 370 bp, Glycine max
cccacgcgtccggaagcatccggactctctcgctcgagggtagggcagggcagggcagggcaggcggcgatccgaatccaatcgccggagggaggaagccaccggtggccgcagtgagggcggcggaggtagaggcaaagggatgacgcgcgggaagcagaagatcgacgcgcagcggcgtaacgcggagcgaaaccagaaatccaaggggtctcagctcgaggcccgcgccgtcggcctcaagatcgtctgctccatctgcaaggtacaattggcaaatgaaaaacagctgaccgatcactatggatcaaagcatccaaaggagaaacctccgagcacatcgagcaccgaataaccatggctggtcgtg

SEQ ID NO: 97271 - DNA, 367 bp, Glycine max
ggaggctagcggcgagaagaagcaccaccacctcttcggctgaccgtagtaccggccggcgcgcgaccgagctagctagctccggcgcacacaaccacacacctgtttaattctgtactgcatgcgtgtgtaatttgatggttcacaataatgagtccctctccggaccttggtagctgcttgcttgtggtgagtgagagtgtgagactgagggagaagaggtggtgggcgtggggctacgtcgagagaggcgtgttcctgtactcgcttcgttttctctgcatgcgtgtataattgtgttcaataataagtgagagcggtgtgatgtgtggctccaaaaaaaaaaaaaaaaaaaaaaaaaataaaa

SEQ ID NO: 97272 - DNA, 111 bp, Glycine max
acggaatctgattccatagcctcacacattcaacgtgaaatgggcatcctcggtttgtaattttatgaaatgtactgtaacaagcactgacctttcttctgtacctgtttt

SEQ ID NO: 97273 - DNA, 461 bp, Glycine max
cgaaagagatcgatcgtatctgcggaacaagcagcgaaggatcggagcctatccaatggccgagggcaacagcagctccggcggcgacctgttctccagcggcaagctggtggcgggggccgccgtgtcggtgttccagcagaagagcgtggagaacgtcgacaagcaggaggtcgccggcgcggcggccgagctcctgcacgcggcgtccgtgtacggtaagctcgacgacaagccggccgggcagtacgtcgagaaggccgaggggtacctcaaggagttcagcgcgggacacgccaccgagcaggagcagcctgcggcggcaccaggcgacgacgcggcgcccaagccaccggcgccggaggcgcccaaggagccggcggcggtgcctgcgccggccgcggaggaaggcagcaagtcgtcggagggcttcggcctcggcgacgtcatgaagggcgccg

SEQ ID NO: 97274 - DNA, 339 bp, Glycine max
cccaactgcccttttcggagatctcgccgcctccgccgtcgacttccgtcgcccccctatcccgcgtccgggcttacccgatggcacggctgcactggcttgaggccgtcctgccgctggggatcatcggcggcatgctctgcatcatgggcaacgcccagtatttcatccacaaggccgcgcacggcaggccgaagcacatcgggaacgatatgtgggacgtcgccatggagcgccgtgacaagaagctcgtggaacaatcctccggcaactagggtattgatcaacctcaaacttttctggatgttgacgaacctcgttcaaaagcacagaagtact

SEQ ID NO: 97275 - DNA, 101 bp, Glycine max
gatgtcaatcattgttctctggtttatggcacaaatggtcggatctattcaatctgtctctgtgtaaatacttcaactatggcaattctcaccttcgcatg

SEQ ID NO: 97276 - DNA, 355 bp, Glycine max
gaatcatcaatcatgtaaccaagaaatagtataaaaggcagatgccaccttcatctagaataaaacacttcgaatcatgacctcctgagagctatttcttgaagaatcagcgcacaatctggccgagttgccatatgcatacatgggctaatagcaaaaatgcaaaatgtatgaagcataggaaagggaaaaagcgaatgatacacatcttatggatcaaaaaccaaagggcgaagtctcagtcttagataccataatcaattatatccggatcatttttgaaggcactggagatgggtgctgcggaaacactcattgtatggggaaactcggatattaatgggcatgtgctgaa

SEQ ID NO: 97277 - DNA, 475 bp, Glycine max
cttaaagtgagtgattgggtggtgctgagtcaggaaagtggctgagattgggttttggttttggtgtgattccaacaaatccacgtttgagccacacacactttgtctttctggctttgttttctttgtcccattcctatcccaaactttcttgtggctctgagattcaattccccgttttgttttttactctttagactctccgccacctgaacattacccatccatctcatagcactcaccccagaaaagcaccgtcacttgttcgtttcaacgttcttctattgatacgttaatgctttttgattcctttcagatttttctaactaactaactatctgtgaatcaaagaaatttcagtgtacgtttcgtctgattctttgggatactgcttgagctcggaaaactgtaaatcatgaagattttgatgatatcaagaagaatttgcttgagaaagagggagatgtaaatcatg

SEQ ID NO: 97278 - DNA, 332 bp, Glycine max
taagcattcaaattcaacctcgactcactactatagtacagcctggtcctggtctgaagaactttggaagctgctactcttctcttctcacagctcacacccacccaaccaataaacaaaacaaactcccatgccacaagggcaaaacggtaattccacattcccacccccaaccccaacaacggaaccaaacagccaaccaaaaacctttcttctcttcttccccaatcccccattcagatccgattaagccctaaccctaatttctcccaccaacaatgggggacttcaacctggcgctggtgatcgtggcgatcgtggtgtgcgtcatc

SEQ ID NO: 97279 - DNA, 406 bp, Glycine max
tttttttttttttttttttttttttttttttttttttttttttttttttttttttttttttttttggggggaaaagaaacaatttaaattccccaaaatatattttcaaactttgggggagctttttaaaaataaacccatgctgaaaaattgttcctaaggggccaataaatgaagtgtgacctacaaacacatttaacaccttcttgtttttttcccagctaaggaatgaaaaggtttaaactttacgagcccgggccccttggtttgttccatgctggactaccttttcctccacaggaaggcccttaccccgggggactggattaaaaaatttttttgccggttttggaaaaaccctaaaaccctttccaaacttttaaatttccttttccgttttagggac

SEQ ID NO: 97280 - DNA, 402 bp, Glycine max
gttaaacattatttttatttgggtacaataagggttgaattaagaccttagacaaaaaactctcttatcccctcccccattagactgaccctagtggggaatgggttcaagacatgttaaacattacttatataacattatcaccaaatcaataccctttgcatatataagaagcaatcaccacatacatacacatgaaaccaacaacttaaatgacacgagagaagtaactgtgcaattacatagtattattggcttgatatgggagcactatcttcagtagccataggctccacctggggaggcttctttgcaattgactttggtatgtcaacatactcttggatgcaacgctgctgaggatgtgacaatagtatcagcacatgacggaatagaacacgt

SEQ ID NO: 97281 - DNA, 451 bp, Glycine max
aaactttgctagcttgagaaagagcatggtcttcatgttgatcatgatcaatattcagatttggctgcagaagccaaaggtatggagatttgtgtgtttcttttcatctgttgttggactgctctgttacgctttcagctcttcttttaataatctatttggaaagtggacatggtgcaagatattactttacattggttttagtttcattatctgccttactgtcttgtttgcaaatgtttgggagtgctccacctctcctcgggtggaagctcacatggccttttttattttgatgatcacttctgtgtactcttttttcttcgataaagtagtgaaagggaaaccagacgcatatagccttgtttcatgtgctgcatttgctatcatgtctttggctttatcaagaatgagtcattttggttttgagggtgatctcttagtctttttc

SEQ ID NO: 97282 - DNA, 335 bp, Glycine max
aaaaataatccactgaagattaacacttgcttttcttctttcacctatcgcattctaccgccgtgagagcgtagtgcaggctgctaaggcgaaagcaccggtagctgaggcaccataacatcatgagcaagcgcgattaatccccgatacagagattcaaccacgattcaggaacaaaaacgaaacaacctccgattcgtattggtagcagctggaatcgtatcgaatcgtacgatactaactactatgttgcgctatgttagaactgtagagtaaacagcagcagcaggatctgcatacgatatgatgcttcttcggagaattatcgctgcatg

SEQ ID NO: 97283 - DNA, 301 bp, Glycine max
tttttttttttttttttttttttttttttttttttttttttttttttttttttttttgttttttttttagacccaacttaatttttttccattttaaattaaaaaactccatttaaacccttcttttggggcgggggcaacaaaaaatcattctggggcaaaatgcccaaaaatttctggggtcatactaaggaaccctatgcaatattcatccaaaaattagcctagcccatccacaactttaacactttattcttaccaccagggggtacctttttttcatttgggctccaatcgacag

SEQ ID NO: 97284 - DNA, 380 bp, Glycine max
  unsure (1)..(380): unsure at all n locations
agnttcccttttccgtggattncctaacatancccactttatcgcgtactatatatggattcgagagtcgagaacttttacatantttacagcatggcaaggaatattagttaccattatnntacataccaacccttctatcacnagtaaaaanaatgccantcatctccaagagaaatatatccttaatcatatagaatgggagagcgcatttattaagcacccagacaaacannagctaattggaggggcattgtctttgtaccacaattatgtgcaatgggccagcctggtcgttcatggtttngaaacgcaagtcctatatnaaattacacttttcttttgtnttttcctgattattggggaaaatacccagaaaa

SEQ ID NO: 97285 - DNA, 200 bp, Glycine max
aaataacaacactccagcatccatcggggggaatcatgttgcatgcatcgcacgatgccattgcccattatgactgacctgtttttagttcccacaaattttacattgatcagatctaaacacaacctttgtaagttgcaccaccattgaaagttaaaacccttgtcacaatctggttgtggatataagactatccggac

SEQ ID NO: 97286 - DNA, 200 bp, Glycine max
aaaccagaacaaacatgggagatattatatatatatatataaaaatatatatataaacgcacaattttttattttggaagcccagatttgccgaaaaattaaaaacatcaaacctttttgatgagaatatatcaactatgccccctggtttattactttttcggcactctttcctaaaaagaatatttattcttctctta

SEQ ID NO: 97287 - DNA, 445 bp, Glycine max
acataaaaagctccatgcttattcttttgcaattgcacaacagttttcttggaaatcttggaaagcaagctttctgaagcagtttcagtcaaaatctatgtttctgataaaaaatttaaggggaaaacaatatagaatgtgttgacaccgcagaagatgccccatctcttgtaggagaagtgaaggtgggttcgccataaatcttttttcttagggcattccttccatccttaatgaaggacaagccgtgatttcccgaatttatgctgttggatcccagctgttgtattcccatagaaagtcttctgttcaggaccgcagaactgtctagagctccattcatgcttctacttggaagacgccggctgctggtgccgggtcttgacacataagtattatctcgctcaactacttggctttgaatcctctttttctcccacggctg

SEQ ID NO: 97288 - DNA, 498 bp, Glycine max
gttcaatacacttttaaataccatgtgtgtgtgtgtttgacatgaaagattttcctccagctttgaaaaattgaattgacacagcaatatatctgacatagattcacaatcaaacaaagattacaagcaaaaactagaaacaaagaaagagggaaagaaaaaagaagcaacaaagccatgagcttgaacattcaaaataaatattgacagaaaaatttgtagttgaggaagagcacttgcacaggtgtgactgaaagcaataatttctttcaagtgattcagttaccagaaaggaaatggatactctacagcagagaagagttactgagaagtgaactagtcttctaacttttgctttagtgtgccctttttagacttctttaactcccatggtggtaggcaacctttatagtgagagtgcataaataatgaagacattgacacttccttctgaggcattgagattgacgacaagcaactgaaggcagttcgtagtct

SEQ ID NO: 97289 - DNA, 222 bp, Glycine max
aaagaagttgcacctgagaaccctgcatattcaacctgtgatatggagtgcctcaattcacagctgtcctctacaagccaggctcatgctgcataagattcacctgacactggacggggcctcactctgaatggaaaagccagctatgggaatgctagctcccctggcaagagatcttcaatggaagatctttatgagacttgaattgatggtggtgatggt

SEQ ID NO: 97290 - DNA, 451 bp, Glycine max
ggcaaatgtacacatatacttgcaggtattctatagacaccaagttcaaaaaatatacagatgaagttaaaggtgggcgagcatatgcatgttaattgaaatttagagacaaaaaactgatgtgcaaagcaatcttacagggaaaaaacagattgaaacaactattgattttgatgatggctattgtcattcaactcaagatcggttttgcagttctctctcaaatttttaagtgtctcaaagcttgtttcaagttggctactttcttgagtatacatattctgcatttgaagaaagagagactttcactgatgcacaagggacaattctaacttcaatgattcctcacttcggtgctggtcatgcatgactgtattctctaatccagaaaacttctgaatgatcatttttgcttctttctgactcttctttatagcacttaatctacctt

SEQ ID NO: 97291 - DNA, 278 bp, Glycine max
gcccaaactaacaaggaattttttccattcacttaagggagtctttataccccaatccacaaacaaaatatttttatattataattattattatctcgatcaaaaaaaacaaaccccgggtttgtaaaagacatggttttggcccaaactatttgggggggggcgcaatgaaatcttccatttccccgcgagaaaaaccccctttatccctggacctggaaaaagcattttttagggtcattgccctttggctaatttaataacctttttttggggcc

SEQ ID NO: 97292 - DNA, 438 bp, Glycine max
gttgatttagttttgtcaacttcgttgagattgcgcgcgcgtgagagagagtttgtttaggttgagctagcggtttttgaggttgtgagatctgtgtgtgttgtagtgtttgagacttcgaatgatttggattttgttgttgtgttgcataatttgatttctgtgctgtaaaccttgttttgtttggaactggagtcggtgcagtcgatttttcatgcatttacatagtcattgaatgatttggatttgttattgtgttgtctgatttgattgctattttgtaagccttgatttgtttggaactgtattctgtgcattcaatttttttcatgcattcaggcaagttgttgcatttgtaactgactattggatgaagattggacgactcggatttgaatgtgtattttatggtctggtttatcaaaataagcatgagtc

SEQ ID NO: 97293 - DNA, 312 bp, Glycine max
cgtggagtttagaagtgtgcgttccggagccttttcgctttccatttctctctctcccgtgctttctagagttggtgctctgggaggagtaacgattcagcggttgaattgcgagaatggaaagcgttttagaggttgtttcctttttgtagcattttggtgttttttgtctctttattttgacctatttacaaaattcgttgatttgtgctttgttctgtgttcagagtgtcatgggggcacaaaaaaagttttatttttgttgataaagggttttactcagttgaaatgttgctgcttctgctcgctctt

SEQ ID NO: 97294 - DNA, 362 bp, Glycine max
aaactacaaacacaacatttttattttcatgcatggcagttaataagtactgcaacaatacaagagtttaacattacaatgagtgactgagcatacgacaaaggcaaactagtgtgcatatatagaatcattattcccaaaacgaggtttcagatttttcacctcaaccacgcattggattattggttctaaacatacccaacacaacataaattaaggataataaaaaacagttttcacttcctgcaaacgattcccaacccatttgaaaacttggtgcaatcaagggtgccatattccatggtctctttctcagcagaactttcctgtgagaacacacaagatacacaatcaggagagag

SEQ ID NO: 97295 - DNA, 435 bp, Glycine max
  unsure (1)..(435): unsure at all n locations
cgcagttccacaatattctttggttttgcacaatgggtttagaaaggctctttcaaatccaactcaggaaatctagaaatcacaagtatgaaaatcgatgagagcgcattgcgtgtggatcctgtggttgaggaaggagagtgcagaggatgagaggtgagagtttcaactatgagttaatcatatttttagttcctaaataatttgatcatctttagatttattcctcaacttgtaatatacacttcaaattcagttaatcatagttttagttcctaaaaaattgttcatccttagttttagttctcgacttttcattcatgtatttttgaaatactcaaactttatttcctatagctagctctataggggttgaaaacttatgattttagagactagntgggtatttgaaaaatataggaacaaaaaattatg

SEQ ID NO: 97296 - DNA, 497 bp, Glycine max
gggatcatattatagattaaaaattcaagaagtaaatatcacatattagcatataatataaggagcaaggctcagttaaataattaaaaaaaatagtgcttctcatagtgatagatagataatatacaatggaaacccatcaagtttcaccccattagtagctatatattatcaaatattcaccactcaaaaggaaccaaattccctaaccttttttcattcttttttcttaggagtaggaacagaacaaaaacaaagaggctaaagtgggggtttgcttctggatgattccaagcgatgaaattacaagaacaccccttctacagtgtggcaaaatctcatccacatataaaaacaaaccggcccaaaagtgtgttttttttttttttacttccaagaactgtaccacttgttattagaccctcaacagcactagcaaaagggtgagaacaagggacactagcaacatgctcgtgtcttgcaaatgaaccactcct

SEQ ID NO: 97297 - DNA, 334 bp, Glycine max
tttcttttttttttttttttttttttttttttttttttttttttttttaaaaaaaacaaatttcatattttataggaacatttgtaaccccaacttcccccccaagaggacaaagaacttcacaaaactaaccctaaaaccactttacccaccaaattttcacttcctacccccttttttagccgtagcctttttagctggaaacttaacactttttggtttaacacttttaactggcgcttttttaaaaggcgctacttttttcgctgccggtttcaaaaaaagagctgtttttttccctggggaagcccgggaaaacgtccttgaaaccttg

SEQ ID NO: 97298 - DNA, 522 bp, Glycine max
gagcggattctagttcatttatttctctatattgatatcgaactctataatgtcatcttatctaaataaattagaagtcccctatgcgaagggaaactatcatacaacaaatctggttgtatcaactattaccatgctataagcaaagcccttgcacggacctaacttttgctgtagttgctacttggaattgctcacaagacagcaccacaaatttctgtcttcttcacatcaccacattatttctcaactttatcacatcaaccttcaactgtgttggggacgaagaatctgatcaacaagcttctctggaagctttttagtagcctggaagttcctcatgtgcaatataggttcacatccaacatctgccactgatctgccattcggtgtttgcaacttaaatcgctctgccttgtatgcagaaaggatattttcttcatcgggtaggtgattgctaactttcaggagtgagccaagagaattcatcttcatgtatggacaagatgcacagccaccatg

SEQ ID NO: 97299 - DNA, 409 bp, Glycine max
catgtaaatgtaaatgggggaagataccaatttcaatggaacaaaatggaaactgaaattttgaacattaaaattaaagaccgaagagccttctttttggaaaacttttcagccaaacttgacaaatatttgaattttctacccattctactcaggctttcaaaggaaatttttgacaaccaaatagggtgtaaggcccaattagcaagaatcctgtgtcaatggatgaatcaatgttgtgcacctcattggatttgaagtcttaaaatgtgtgatacctttcacaattcaattttttaacatcccatcacagcacacttattgacaaagttgccagaccgttttttggcgagtcgattccactgaggaggtcctttattgggaacccattaattgagtttaataaaac

SEQ ID NO: 97300 - DNA, 165 bp, Glycine max
agcgtgtccaaaagtgtcaacttgaaacttaaaacatgacatccattttatacaccatttgcgatccatgtattgtaaaatgcaaacagaaggtaaaaagcggggagaaaatacaagcatataatgttattttaacccccacccaaccccttaaaaaagaaagga

SEQ ID NO: 97301 - DNA, 226 bp, Glycine max
agaaaataaaaaaccatggatttatgattatccacgcttattttcatagcaaggtttcataaagttaaaaaaacccttaacagatctaggggtgaaatggagaaaaatccccagcccccaaagatggggaaaaacagagtagttacccgttttgataaaaatatcaaaatccagagaaagcccgtttaacttaaatatgccaaaagttcggccaaaaaactttggg

SEQ ID NO: 97302 - DNA, 321 bp, Glycine max
actaaaattaaaggtttattatttttaaattaggcattgggaattttactaaagaaaaaagagccctagtcaaaaatcaaaaccaaattgattaaagaatccaatgcaaagtttccaagggtagcctttagcaacaagttaaaacccattctttttccttcccacatagcaattatttcttcggctaaaatttgaagcttacccccaaaattaaattgactaggataggacatttaaaaccctgaatttgggggggtattggacttatggcctggtcatttattacaaaaattgcatcagccctactttaagggttttggc

SEQ ID NO: 97303 - DNA, 406 bp, Glycine max
aaagagaaatattccatttccatgggtaaatttttattcatttaagtactatcacaacatatactacataaccacaaacttctttcatatacataactagaagctgtagaaatttagattttattccacaaacatagcacaacataccaacacacacattcaacttctgatatattcatcatcatagaaaccacacaaagactttcttcatatcatacatattttgtacacctcaaataccgcagtatgccttgatcctagaagcagattttacagcttcttctgtgaggaagaaacgaagatatccataatggtcaaatggtttataacgaagaggatgttcctcatccactaattcttcctctggttccatcaccttaccagcatatgaaagtagccccaaaca

SEQ ID NO: 97304 - DNA, 372 bp, Glycine max
ggcttcaaaaacgtgaaactttcacttgatatattgaattccctgtataagaacaaacactcgtacaccagtagctgtatgtaaaataaaaatataatagattgaaagccctattatgatgaatgactagacactcacaagcaattagcatggaaaatgatactttgatagcatacaactagacgaattagggaagcaggatagaaggagaacaaccggaatggcatgctacaaggggacatggaaactttgaatgaaagcaacactggataaaataaagcaaaaaggccatttgcatgaatcggaagttacaacagattacgtacatgattcaagattgagtaacatataatacaggaaccagtccagcca

SEQ ID NO: 97305 - DNA, 186 bp, Glycine max
ggggggccaaccaaaaataaatttttgaaccgcccttaactgggttttgggtgggttttaaagaccttaccggacattggacataacaataaattatttggctttaatgggggccccagggacccttttatgagtgggggaacagccccattcccatgtgttttttctggaaaacaccctaaaatt

SEQ ID NO: 97306 - DNA, 492 bp, Glycine max
gagtggaaaaacatgttctgtattgtcaaacacaatatagacagcttacccaagctagtctgactcatgtttgacgcccaagagacatctcaatatatacagaaagcaaactttcaagaaaaaatcaaataaaataaataagcactgcagtaggtctttaaatcactattgctcggtatctgtagtaacttaattaatgaataccattatcatatatgaaaacctaataaattatattgcaatgcaaatgcttctaaaattttgtacatattaaggtacatgtaaactcacaaggtacaatgatctttgagaacttgcctagcaagatcaagagcaccactttttttgtagattaaatgcaaattgtaagctgcctctctgcgaaggtcacagtaaccaggtttgtgagtttcgatgctatcgggattttcattgggaagttttggaattggatagtctttctcacaaatagcaataactttctcataataa

SEQ ID NO: 97307 - DNA, 247 bp, Glycine max
gtagaagtcattatttattaaataatttaaaaattacatatttgaatacagacaaaggaattagaagaaaaaaaatctgtaagcctcccataagtagtttctggatctgtcatgcatgtgaactactggttacttcatgttacttaatttgtcacattacaaaacaataaactaactaattaacgggccttgagcctattttaattatttttaattacgtgttatcggtctaaaccacattacataa

SEQ ID NO: 97308 - DNA, 352 bp, Glycine max
caccaacaaattatatttaattgaaatggataattgacagtaccaacaaaagctgctattacactacaaaagctacttcctattacaaattctttaacaaaacaacaattgacagtagcaacaaaagctggtattacactacaagaagctagctccctactacatattctattcacaggcggccccacaatatcaaaagctgttattacacattttacctaaagcacattccccctaaaactaacattacaattaaaaatgaaaaacctaacaacacaatgtttggtaaatttctcattttcttctgcaaagcttcaatttgtagcctcaaatcagccactaccattgtttt

SEQ ID NO: 97309 - DNA, 390 bp, Glycine max
aaccaaaaagattatgcatgtattaatagttgcaatatgtacaagcacatccactgtaatgtaagattagtctagattaagtggtcgtgatcatcaagtggcacataactaacaatcttatcttgtctgtgaacactctcacaagtaaatgcattttcttctttcgatggtgtctttcacttttcaccatgaaaagttgaaaacatacactgacacgatccctatggcccagtctttttcctcccatgacatttcccccatctaccaagcccagcaaaaatttctgaaattcaatggaatgctactttcgttacttatcctttcgctttctactgagcaactggtttgaatgagaactgaattacataactcattcatcactatcatgta

SEQ ID NO: 97310 - DNA, 157 bp, Glycine max
agcagaaaaatagagattggttattactcataattgggcttggtacaaagggggggggcttttctctttattttggggaaaaaccccctacaattgggcattggaaactggggttataaaaaccccttgcttcagggggggggcattcagccttttt

SEQ ID NO: 97311 - DNA, 367 bp, Glycine max
aattaaactacctaaatattattgctcttatcatccccttaaaatccaaaattcattaatcattagcatataatattttatttatcatatatgagcatataaaactttcagtaacgtgttgcatgtgctacaagcaatacagcacttattttcttgtaaactacacctacactgaatgattagaaggtttacatcctccaccgcagaaaatgacaataatccacatagaagttctatgttgttttattttgttgtctaaacacgtacatactcttatcataacaagatttctacttaagatgttgagcaaaccagtttagcatgtcctgatgggcctactctgcagcctttacaggttgtgcatctt

SEQ ID NO: 97312 - DNA, 392 bp, Glycine max
tttttttttttttttttttttttttttttttttttttttttttttttttttttttttgttttttttttttttgggaacaaaacccccctttaatttttttaaaggaatttaaagcaccaaaacgtccaaaagctttttattttgttttggggccaaccccccttgctttttttttacaacaacaacctacttttacgatttccacccgggggggggggaaacacccttctttccccgtttttttggtccaatagaagggggtttgaggggaaatcctttttggtttttgccaaagcttgctttttgggaaacattgcggaagcaaaagtcaactaattgggggaacccccccaaaatttagccccgccttagggttttaaggggtatttttt

SEQ ID NO: 97313 - DNA, 353 bp, Glycine max
  unsure (1)..(353): unsure at all n locations
aaaccattcaaaatatctcccctgaaatcactgttcaaaatatattgttcaatatacaataacaaatagaaaggcagctccatgccttaccaactaaggctgttcctataactagaatccgtgaccaccaccaagtcacaggcatcaaacatccctttgacatcttgagaggagaggagaggagaggagaaaaaggagaacttctctaccattttctccatacctgacttggcatgtcaaaataactatacaccataaaacagaactatactttatacagtcagcagttactgtgcaatgtagtagactatacccaccacanagattaaaagaccctatctaaaaatcctatc

SEQ ID NO: 97314 - DNA, 236 bp, Glycine max
aacagcaccaacaacaactccctcgctttctctctttccaatcactttcccaacccttcttcctctcccctttctctcttccactccttcacctatccatctctctctctcacaggcagcaacacggtggacgcaccgcctgagcccaccgctggagcaggaccgaccaacctctccatattcaccggcggccccaagttcgaggactttctgggcggttccgccgaaacagccac

SEQ ID NO: 97315 - DNA, 432 bp, Glycine max
atggaccacaaaactaaataattcaatttcataagtgtaaaccaaagttaataagatacatacttaaatctcacaagtccttagttaaacaaagacatttatgtaattttattataatgaatatgtacgaaacaagtactctaatatttgtcttcatcatccatgaacactcatttaagtatttatcttctatccgttacgaaattttgtccgcaaatatccaagagtgagggtatttttgtcatctcaaaccaaaatcgcacgactgcagatttaaaaagggcacacacattattcccatgtcaggcaactcgcaaggtccatgcttagcaaaagacggtgacattgacagacagaagaaagttgaaattaccaccacacttcttttttttatttatggaaaagcgctctagacaagagcctagtaaactc

SEQ ID NO: 97316 - DNA, 164 bp, Glycine max
gaaaacatgtccatccagaaccttcatcattccaaaacccaaagactaaatcgaactgaacatgcattaacaaaattgcaaggcaaagctactaacatgcagaaaccgattggccaatacaatttatcaaatcataggttttatagaaagttaaataaatagaa

SEQ ID NO: 97317 - DNA, 222 bp, Glycine max
ggaagggaaaaaaagtcccgggacgggccttgataccttaagggtttaaaaaactttccgcagttgggatcccaattgggaccatttcaacaggatttgtttgggatttcaacaggttttaaaaccttggatgcgggactcctaccccccattttattaattaaaacaagggaggggtgaacaatttacggggccttgaaagcatgctccccctcctaaacc

SEQ ID NO: 97318 - DNA, 350 bp, Glycine max
gattgtaacttgtgaaaaacaaaatatggaggcaatgtcgatatacttccatgaataattacatcattaaaagcaaaagtaatgcaaataagagttaacttgtttgtaaattgaaacttctagcaaaaaggcataaacccttgctcatgcactgtaatgtgccatttagcgtctcaaatattgcaagtctcgattattaattcaaaagaacttatataacatgcattgactaaacaataatacattgattacctttctatatttggtacccttttaaccacgttctatgagcaaaaacacaagttcccttcatcaaatcttcagaaattcatggcattcttttggcaact

SEQ ID NO: 97319 - DNA, 434 bp, Glycine max
gcgactcaagaaggagaatggggtgctgaactctgagctcacaagcatgaaaaggaagtgcaaggaactgcttgatttggttgccacatattcatcacatgcaaaggaggagaaaaaggatgaaaggccaatgttgtttggagtgagattagaggttcaaggagggagggagatgaagaggaatagggctgagatgagtgaaagcacaagcattatgttgtctcagtcatgcaaatagctagatatgatatcatacatagaggctttttaaaagtattgggtatagatactgaatagtaataatcaaatatttgattaattagcttgctaggcttgcaaagagtattttcgcccagtgttgtagttattttggctatcatattgggtgcatcaagaaactaattaagacacccctcaagcatatgctgtagtta

SEQ ID NO: 97320 - DNA, 156 bp, Glycine max
agcagcaaaaataattctcttcacttgaattacccaccgggcaagcctgcaaaattctacattgaaaaggtggtggggccccccctaggaccctattgggattgcattggatggccccaacgttccaaaggaatatttatttttcttcaagggaaa

SEQ ID NO: 97321 - DNA, 420 bp, Glycine max
aataaaacgcatgctttattttatactaacatacgttgtactaaaagatcatcctacaaatttcaagtataaaattcagctcatctttccgaaagagacactgtttataaaaaaaaaaaaatatacatattccacaactcgcgtcacaatcgaaccatcaaaaccaattcaatccaagacctaatcaccatgtgagaaaccaaaaaaaaattggtaattccctacgcatatattgttcaataaagtacctctcactttaattgaacttgtattaaaaaatgaagccgccaacattaagaagtaagaactcattatcgaggtcccaacgaaacagtcatatcaggcattttaatactatctgaccagatccttgacgtcaaataaaacttggagatcttgccagcgacgcgtcccatgttc

SEQ ID NO: 97322 - DNA, 274 bp, Glycine max
agaaaacccccaaaagccccttttttggaatttaaccaggtcagccccgggaacttacaaaaaaaacaatttggaaagaaagccccggttggaattccaacttaaaaaaaaacgggggcaaaaaaagagggggcccctttttcctataaacgggaaagggtttcaatcataaaaggggccattaacaaatatgcttcagaacgggggcttttttttgggggggaagccggggcccccttcccagaatcatggtttattggggggccccccaaaa

SEQ ID NO: 97323 - DNA, 485 bp, Glycine max
aaaaaggaattgtttttttataaataacatgagaatgtgaaagaaatttgagtatattgaacataaatttctaggttgagggtgttaaagcgctatacattcagccgagctacacttagacttttggcatggggcaacctcctcactggatttcttgtcacagggaagatcaaattagagcctgaaaatttgccatacaaagggataactgctggtgctggaaaaggttaaagaaactacttgaaccaaggattctcctagtgtagttttaactacaatgaactcagcaaagcaaggaactctgagggttcctcattctctttaacaaccttgatgactgagttctttggcaaactaaaccgagcaaggagatcacatccaatttgattccagtcgacagctcctacatctgattgtttatcaatatctaagtgaacctgtgaagcgtcacaactgaaagacctccctacccaaatatataaaat

SEQ ID NO: 97324 - DNA, 263 bp, Glycine max
gtgaaggcggcgagagggattgctgatccaaatatggggtttgcttgccagctgttgcagtgccagaagagggttcatgctgtccctcttagccctagctctttgctgaggatgtatagaattgctccccattcgccgtatgatcctttgcatcttgttccaaaaatgttggtggatccttcattagctgcattggactccagaggtgcgtttatcgtgcacattccttcagcaatatatgtttgggtgggtaagaactgtga

SEQ ID NO: 97325 - DNA, 419 bp, Glycine max
gacaaaatctctcttctttgttgagtaacaaaccgtgatagaggagaaattctagcagtaaaataatggttgcgcatatccatgaaatatgaatacatgttgctcttctgaattgaaaatgcaatatttgcaaacaacttgaacttgttgggttcatttaaatcttcaaattgcttcaaaaccctggtagtatactagtattccgtctctagcaagcagaaagcaaggaggcagtgacatgcatttctgttgaactaaaggggtgatcatcttctgttctgatgattccaagcttggagtcctcttcaccccaatccaaaattggtttggactccccattcaagttccatagatggaactcctccttgctaggctccatgttttctttagaacttgtttcagatttctgaagcatttga

SEQ ID NO: 97326 - DNA, 259 bp, Glycine max
gaaatctgctgagtttcttactttcatgttaaaagccttccctttcgtctcgaactcataccgacccattaccgcaacactattatctctctctcacactacatcgaaattggaaacacacctagtaacttgtgagtatcccgcgatttgtttttccctttctttcactcatcaagttttgtttcctcgggaaaatcgacacttgtgcttggaagacactctttgtgttttggtgtgttgtcgtcgaaagatagcaact

SEQ ID NO: 97327 - DNA, 334 bp, Glycine max
caaaagaaaggaacagtagatttccgaaccactttgacaactgttcatacaaaagtaaccccaaacaagttttttggtggcattttcatagttgatacaccaaattgtccatgttttgttgcccagcttttaatgaactacaaactactttaaattacaaaacacaggggaaactgggaagaaaaacaaccccaaaaataggggttaaaaaaacacattgtttgaaacacacaaaaaaaaaattgttcaatttgaacacaagttaaatttcccttttttaactttgctggacagccaataaaatgtttgcaagctttatgtttgaaactttgct

SEQ ID NO: 97328 - DNA, 405 bp, Glycine max
caagcttccacaacggccaaaaacacaacttgggttgtggtatgaaggaagaacgtgcgaatttgatgatgggttttgcagcagcagcaggagggggaggagttatgaacaacggctcttcttcttcgtgttgttcttctaactcctcttctgtttcttacttggatcctgaatcgtctttgcctttgaaccaagccacaattcaggttattaacaatagcaacaacaacaacatgtttctctaccaagcacagaacctgagagagtttgatcagggttataataataataacaacaataatagtgaaatcatggtgtttaagcccgagcctttgtctttgtctctgtcatcacacaacaacggtgtgaatcttcagcgatatggatctgtggtttatggtgata

SEQ ID NO: 97329 - DNA, 389 bp, Glycine max
aagaaaaactcatgatagcaaagatgtatacaaggatgtggacagtcagtcttctgatgaaaagtttataaataaaacaaacagcttcttcaaaagaatggaaggtatgttcatagtattacaaaaaaataagcaaccttaaatgatttgattctaatttgatttcttctgtatggaccatcaactgcacataacttaagcctgttttcttctgtatggaccattaactgcacatacttaaacatgttttcctctgtatgaaccattaactgcacataacttaaacaagcagaagcaaatatcaaaatctgtaaacaaaagaattggaagacaaacacaacattccatcaggcttatgttgttggttgacacacgtgagtggaaagctg

SEQ ID NO: 97330 - DNA, 387 bp, Glycine max
attattactactatgccgttcttattattattatttgactgcaatttttttagtgttctgaatttgtgtatttttataaggatgaatccgcccttcgtttgattttgcatatagatgtctcttcttctttggcgcacagtgagtactgagtgtattttactttttcctgctgttgtttttattgttaaattcgctgaatctttatttgtcgtgttttgaacgttgtgtattttataaggatgaatccgctttgcaaatagatgtccttttcgtttttggcgcacagtgagtactgagtgtattatactttttcctgctattcgtcaagctgatgcatgtatgctatgttaggcttatcattggttcatatgcatttgaccttttgca

SEQ ID NO: 97331 - DNA, 104 bp, Glycine max
cttatttattttatgttacatggtttgaagtgagatcagcgagcaagtagtaggggatgatttgggagcaaagaagaaagtttttgtggctggagccactggta

SEQ ID NO: 97332 - DNA, 151 bp, Glycine max
acggaaagggtccatgggatctacccggtgcacgatggtcatctccttcgagaaggggagctacaacttgtttgcgaatatgcaaacgagccccttattgaggaggcaaacgtgcagcctgttaaccgtccagaggctgcttgtggtgata

SEQ ID NO: 97333 - DNA, 311 bp, Glycine max
gataacaattaccttcatacctttggatttcaaaagaaaaaactacccaacaaggttcaggggcatcgacttttaacagaagacaaccaaatatagcttcttacatgtttcaaataaaaatacaagttgcaaaaagggaattcttttcacaaaggttccagatgattatcacctatccacccatgtaaaagatgatcatgcagtctcccctaccaattttgttgaaacagccttactacattgagtatttttagaagaacaaggatgctttactgaaaaccattgcagggggtttcctggcttttttttga

SEQ ID NO: 97334 - DNA, 180 bp, Glycine max
agaattaaaaattctttccaaagcttggccctgcaaaggccaaaattaacaattgtttcatatgtacattgtgacaaatatgttcactacttatagactatgttttgttgggcccagagatccaacgctttctcctcaacatacagctttgatttggattttcttgggaccaattacata

SEQ ID NO: 97335 - DNA, 108 bp, Glycine max
atttctcagtctgcggaacttgtttctaccttcactaagcacatcacgaaccctctctttccggcagctaggttaaagaacatcaatggcaggtcgtggcaaaaccct

SEQ ID NO: 97336 - DNA, 402 bp, Glycine max
ggcagattcatgtggagggtatctaactataaatttgagagttgggttttgtcagttcagtactactcttttgagctacttgatcggtggtgtatttgacttttcaggtgctcatattcttatgatgatcatcaaactgcaaatatagtgagcccattaagctattactgaaatttgttgcagatttgaaattcttctaagatggatacttcttataggactggtggagtcaagtacgagtgcttgctttttgatatggatgacactctttacccattgagcttaggtctcaatttgttttgtcgcaagaacatacaagagtatatgttagaactcttgcatattgaagagagtgaagtgccaaaatgtgtttggatttgtatagggaatacgggacaacta

SEQ ID NO: 97337 - DNA, 346 bp, Glycine max
agcaaggaagccaatggcaagtgaccattgtgattaaaatacgaagagcattctcctctcagcagatcggcattctaattcgaaagcagctatgaatcttaaaccaacatacaagacgcagatgactattgcggccacacaggaattaaatattgctagaacaaggcatatgatagcaatgaagcatgtcaatttttcttggcaatgaacaagccccacatttgctctttagatgcacccctggtctgatttgccttccatctttcgacgatatgattggaggcttcctcgctgaagtgaccaataaaaacggccttcttgttctcaagggcatttaactcctgct

SEQ ID NO: 97338 - DNA, 111 bp, Glycine max
atccgaaagattcatttaagtcatgcatgaaatacgcagaacgagtgatttccaattcacatagttttcaatttttagccccctgtttccggggttgggactgtatcattg

SEQ ID NO: 97339 - DNA, 415 bp, Glycine max
ctcgagccgaatcggctcgagcgcaatttcggcttctgtgtcaacaacggagccacacactcaaccttacagaaattccgtcaaacttggaagctccaaaaccttctcctccgcaagaaaagcagccacactcgaagttcggaacgcttctgatttggcctcagctctcgcaggtaattttcagggtaggagacgcgttgacggtcaaagacctcaatgccgctttgtgtcactttaaaaagtcaaacaaattcaaccatatctctcagctattttcgtggatgcaagagaacaacaagcttgatgccttgtcttattcgccattacataaggactcatggcaagtcataatcttgacgctgctaagatgctacaactctaccacagcattcaaaatcagtcagccaagataaat

SEQ ID NO: 97340 - DNA, 450 bp, Glycine max
tttttttttttttttttttttttttttttttttttttttttttttttttttttttttttttttttttttttttttttttttttttttaacaaaaaaaggggaacaaaggccccacttaaaatttggaaaaagggcggaaattttacttttaaaaattgggaaaaaaaaaggtccattttaaaaagggttcccttaacaaaaagccccggggttttttttgaaaaaatggggcctatttaaaaaggggccaaacccttgtttttttgaaaaatttgccggggccggaaaaaaaaccttgggtgggaggggaaagaatattcggggggaaaaaaaacaaaccttttaagggcccccccccctttagattgggcacccccttttttagccccaaaacttgggctgtccccctttttgaaaaaaacccaggcgaaaaaaacttttttttaaccc

SEQ ID NO: 97341 - DNA, 288 bp, Glycine max
gggccaaaaacaatatactatttttgggaataacatcacatcacatacttatgggatgctttacaaatacatagtttacaaataggatacatcaatctcagcaatttaaacagggacaagtttttgttaattatgtacaatttgggtcccacaaaaacatgaatcaatggctggtcactgggacaaaacaaattttgaccctatgaactcggtgctactttggaaaacatcccttacctttagctttacttttgaggggggattgagcggcttttttggacttaaagg

SEQ ID NO: 97342 - DNA, 355 bp, Glycine max
tgcacctttctctttctttactctttccagtattgagaaattttattttcatgtttctttccttattttgtttaacagctaatgctcttgttacagattcaaaacagaagctatgaaatcgttcaatataaatggaaccactctttctgttgcactctacactgacgtaacaaattcaaaagaactcttggaaagtatgcaagccgggacattggagccagaagttgcattcctcaatgctttacttattccagatattttccctgttctagcagctgcacacaaaacacttgtagccaagtctcgagactctttgaccacacgcactcttcattcagagcttgtttacaactac

SEQ ID NO: 97343 - DNA, 424 bp, Glycine max
ccgtaaacctttttactctttttccaacattttctttccacagaatcaacgcacaaaaaggaaagaactttcaatacaaaaagacagaatccaagatgaaatcttggggcagtaataattcattcatttcataacctaaaacaaataaatctaaaagccaccttccaacaacgaaaacggataaggcggcaccgcattcccctccgccgccatttccccaaaaaaaaccccacgccccaaataccctcctcccatcgtcggaaccgccggcgccaccaccgtcaacggcgccgtcacggcgccacgattgtacccatgacaaccctgttccccccaataccccgccgccagaggcgaacaaatattattattatcgatttccaaccctgtctccggcgacgaagacatgatattataattacct

SEQ ID NO: 97344 - DNA, 241 bp, Glycine max
atccaaagccaaaatttgacacataaatttggttttttaaaagcaaaccaagcaaaaattggacacaaatttaaaggtggcatttaaaaagcaaaccaacaacgcaacgggaaagccctaaaacttggtgggcttaaaaaaaatgtaatcaggggttctcccaaaccccccccattaaaacagaatggtaaaaggggttttgccaccggtgataaaaaacccaattttgggaacaaaagtt

SEQ ID NO: 97345 - DNA, 324 bp, Glycine max
aaaaaaaaaaagaccctactccattcccggggttttactacaaaaggcccactttaaaaatttcttaaaaagaacaaacccttacaaaacatttttttttggaaacccggaaaaaaaaaaaaaaaaaggggggcttaaaaagaaaacccattggcattggggggagccccttttcaatttccattacccaaggggggcgcaaaccaactttagtttcctaaaaaaaacaacaatagtcccgggcaagtctttttcaaaaacccaatggcccactttgatcccacccggaccccaacccaaccccataaatgcccccgggggggg

SEQ ID NO: 97346 - DNA, 409 bp, Glycine max
acgacaattgtatgtagaatattgtttagacatactatgcaatattccagtcaagagttattattaatcctatattatttacagttgctagcatttttcttagaaaggccaagtttggacaatgtgtaaccctcaactaactgaacaagtcgtcttggctggttgtatcaccatcgacatcatcttcgttagaactgtcactattggcattgaatgtcagtatcaatggtagaaggtctcgaactgtagatgagttttctccattgcttactgtcctgacccttcgtcttggaagtgaaatcagttgcattaggtcttcaggataagctatccggtacatccagcccttagccttcggtttctgtcggacataaaattttcatcaatttgcatcattacaaccaccacc

SEQ ID NO: 97347 - DNA, 420 bp, Glycine max
aggagtaatggtgattgataattcgacaatagtgtgatcacacggtaacatgaggtaacacagggaacaatgaatatatcctgtgtgatataaagacatatatccacacgcacacacaaaacaagaaacagaagtttcaaacttgaattgatactatctaaatgacacagtaactcacagtcactaatgtgcaatgaccgattccatgtaaagtttgaatactaatactaataggtatggcttatcgtactaagaagctgaaaccaagctacgattactgcctacaaaacttggaaatcgtatcaagcatgtatctactctctgaagagtagttcaccttatcagccttgaccacagtaatcttcaccttctgttcatcgccatataattcctctttgattttcagcctaaacatgaact

SEQ ID NO: 97348 - DNA, 444 bp, Glycine max
gttaaaacaaatcaaatttaatactttttcaaaataaaaaatgcagacagacagcagttacagcactgtgtgcctgtctttccgctagtttccaacttaatatttgtttagattttagaatgttactttggggtttcaaaactgattccagttctgtaactgttgtggagcaaaatcatggtctctgtcagacatattgaaatggaagattggttgtgattgtattattatgttgctattatggaggattggggggagcaggtttttggtaataatggtgtgggaagatgttgtgctggctggctggctggcaatgcatgtactcccccccacccccaaaaaaatactttttaatgagattgtaactcattctgtttttttatttttccagggaaggggatttttcttcaattgcatatcatgatatgctgggacaacaggcta

SEQ ID NO: 97349 - DNA, 459 bp, Glycine max
gaaacatccttgaagcagaccaccaagaaaacgaaaactaattgcatcactttccacttaaaaggaaataaatgaatgataaatacaagaataacaaagcttttatcataaaccaatttggatcggtgaatgtataacatcatgatatatgaacctagaatctgtatgttcatgtaatgatgaacgatttgtgtaatctgaattttgtttacagtgcgaataaaatgaataaaagtgaatctataatctcatttagtactaatggatctaaatgactttgaatttatcaatgggttgagtataaagagattaaatataataaatcatatttagtatctaaatgtgtttggaatatgattttcttttaagaaaaagacatgtgagaaaaaaaaatgaggttgaatttgaaaagttgaaagctcagaatccagcgaggaaacagaacaagagaagagcaac

SEQ ID NO: 97350 - DNA, 136 bp, Glycine max
gttttgcttagttaaagtagccaaccagtcatggtgctctacaatgttgaacgcgtatagaccactcacttcgatggccagaagcctggaacctctggtgtacgtaagaaggtgaaagtgtttgtgccacctcatt

SEQ ID NO: 97351 - DNA, 315 bp, Glycine max
gtttcatccttcatctatttgctatactctctttccttttccatttccaatgccatctttctcgttcttaagaacactcaggctctctctttttccgccttatcccccaattgcaattccaactgcaaccctccattctcaacctcactatcaccatcatgctgttgcctcattcaatcgcatgcttcttatgcgccctcccccacccaccttcctttttaacaacattctgagttcccttgtcaagaacaagcgttatcccactgtcatctccctttttaaacaattcgaaccaaatgggattacacctgacct

SEQ ID NO: 97352 - DNA, 203 bp, Glycine max
gaaagacacagccattgtttgtttactttccattgattgagcgaaagctttgttttttctgcgatcattttccattgggtggaagaaagtctcaacctttagtcgaaagagcaaggatctgagtgagtgagcgatcatgtgtggtggcgcgattatcttcgacttcattccagcgggtcccgccggcggggcgcaacgcgtga

SEQ ID NO: 97353 - DNA, 367 bp, Glycine max
tttttttttttttttttttttttttttttttttttttttttttttttttttttgtttgggtttttttttttttttttgggtattccgaattttgggccccaaaacttggtttgaaaaaacaatggggggccttacttggggcccaacttggcaaaaaaccaaaattggcccaaatggttggtttttgccttcccccttattaaaaaaagcttttggtttttaaaaaggtgggggggctttttgggggaaaaaggcacttcccttttcccggttatttactaaaaaagggggcccaatattggttattttaaaaaaaccccccaataaagcccttgttaaccattgggttttaaaaaaacgttttttt

SEQ ID NO: 97354 - DNA, 139 bp, Glycine max
ctttcgataagaggagagaaagagattgaaaaaaaaagttgcttttttttttgttgttgcatgatttggatcttgattggaaaagcttcgaattggggtagttttacccatcaattcaattttaagccgtgccttcttc

SEQ ID NO: 97355 - DNA, 325 bp, Glycine max
ataacttgcctaataaagcttaaggtaggggtacaccacaccagtaatagatcctgattctgatttgtgggtccacctaacccgacacacagaacttgtggccgtctcttttggtggttggccacaccatcccccctaccccaaccccaacgactacacacccaaattacccatccccttaattgtggatgtgaactaatgcatcaatctctctctctcacacacacactcatattacttactgcactacagaagtattctagttacattacaattttagtgacccttttacttcacacgaaacaaaaggaaaatgtgagaaggg

SEQ ID NO: 97356 - DNA, 505 bp, Glycine max
aaaaaaatttggagtaacaaacaatttaaatatacgtgtgtgtcttattacaaatgcacaatgtcaaataaaagaatctgatgaaggaacaaaggaagagcaagttaccaccattgccaaacaaatgactgcccatggtataaaaatggaaagtataattatgagaggaaagcttagtcaagatgcaaacaagggaataatggatgagaatgatcgcttgttaaatattttttcaaaggaaacatcaacaagattgttgtatgtggagaatccaatttctttgtttggggctcttcgaacaagaaatatagctctggttacagttttcagagggcatcttgaaatcagtccaaaactgagcattaaggtaatggtatacaagaaaacaactgaagagaaatttccttctatgaagaaatattctgataaggctcctccaaatgataaatttgctaaacatgaagtcaaaatagattatgaacacaagagttctaaagatcctgac

SEQ ID NO: 97357 - DNA, 513 bp, Glycine max
caaacctgttccttcttttttaatgttcacaaacatcctccaagcaaaatggaaccggcactccgaagaagacgaagatcacaaagacaatgagcaacaagaagaagaagaagaagaagatgaagcattgtcactctgcgatcttccgatcaacctcgaggacccaccgggaaaccaagaacactctcgccccaacgatgaagaattcaatttccggttatggcgtgctccctttaacaaagagcccgaaatgtgtgcagcggatgaagtcttcttcaagggccaaatcctcccgttgcgcgtctcgttcagctccgaggccgggttgttagccacggtgtcccaatctcaacaacattacggtaagcaattcgttaggtcagaatcgttggatcgcaattctagcgattatcgtggtagtagtaatagtagtagaagtagtagtctcagaagtcaaaactctttcactagcactagcactagctccacaaccacaaacacaacaatttccaa

SEQ ID NO: 97358 - DNA, 506 bp, Glycine max
ctttcctctctctcattgctgccttttttcttccctgctgacccttcattttccactgggccttcactttcctctctctcattgttgccttgtatctccctttttctttgtcgtaaaccctaacgtggtcaggtgccgaatctctgagtccgagaggctcagctccatctgggtcggcaccaattctttcctcctccttgactcctctacccgcagtttcttctgcttcctcacctcgctcttgcttagcgccgcgatgccggttcctgggatcggcaccggtttcagcggcatgctccagctcggctcgaaggtgtgccccacgtgccgctttgggagatcatgcgggaacagaacgtgaatttcagaggatgaggtaaggggttcggtgatgccgaggctgtggagcttcttggcgattcgttcaatggcagaggagatcgatgggttccggtttgaatctcgggagtggagcaacgaaagtggaatctggttttggatttggg

SEQ ID NO: 97359 - DNA, 358 bp, Glycine max
cataattgaaactttaacaaattaattaaatttaatggcaaacaaatgaatgggttgatgtattcggatattcatgaatctcatgcaagaaatataccataatttaccaatgaactcaattatgtgtcaatgtttgacaccctgtgtttgcatttgtttggaaactcaccgtccttaattgtgtattgtttcaggaagtatttttgtatgatgtatgtcctttacataatttgattttatttttccattttcattgtattgatttgaaaattatggcatatttttatgtattgtacttttttttaatatcaaaatccaagcactaaagcctggaaccaactatattaatatgagaaat

SEQ ID NO: 97360 - DNA, 325 bp, Glycine max
gtgaaatggcataacattttgcatttctagcccaccacaaataaaaagggcgaactaaggacttacccaaaatccaaactatttagagactccaatgccatcacacatgaacaaaacacaccaacgttaaaaaataagctaaccttaccttcaaggagagttgccaatacatccaaattacatggatctccaaagtcaagccgtctgaattgcatttctgtgccttcacaagatgctggtgaccactccaaagaaagcagggaaggaaaacctatcaatccaagtggatcttcatcacatggtactaagatgactgaaattatcc

SEQ ID NO: 97361 - DNA, 193 bp, Glycine max
gaagaatggaatcaacggcgaggggctgccaccgtatggaacaggggaagagtgaaagcgggaccttccggtgactggaagggcattgaggcgatctacaacaccagacctgggcctatgcctgaaccgaccatgactatttcttctttaattgcacctagactggcgcgtaaaggcggagaggacgaacctt

SEQ ID NO: 97362 - DNA, 439 bp, Glycine max
caacaaccaaagcctcttacaagcttaggttgatctgcacattaaggcccttatcagattaatttctatcatggctcttcctcttcttccacctctttcttcaatcatcaacacccttttcttctttacactcttcttcccaaaatatgtttcgagtgatgttgaagggtactcagcatgtgaaccttttagctgtggtgaaatcgacattcgctacccattttggagtagtgatcaccaacaaagttattgtgggcatccaaagttcaagcttgattgccaacaagacaacgtgacaattgacatgatgtcgcagagattccatgttattgatattgatcaaacatctaaggttttgaagatggcaaggttggatttatgggatgacccttgtactgatgagtatagcaatgtcaagttggattctgatttcttcaac

SEQ ID NO: 97363 - DNA, 240 bp, Glycine max
ggggaaaagaaagccctatctttttatatatacccctgcctgaaaaaaccacccagggggccaaatttttatttttgaagaataagggggcattggggactcgattaaaaaaatatttggggtctggggcaaccaccagttttgggtgggggtcaaaccacctctatatggcaacccctagggggaaaacctccctctttggggggaacttttttgggtctccagctttgacccggtttc

SEQ ID NO: 97364 - DNA, 310 bp, Glycine max
accaagggcttgggaaaacattaaaaattagcagagtcctcatcttttaaaaaaattaatctaattaacataatttgaaacaaaaaagaaaaaatatccgaagcctagttgtatggaactaaaactaatgcacaacggatgccttttcaaggggtctgaatgttgtaggaaaaaatgccaacgggagaatctgaaatgaacctgaaggaaactgtgggaaatattgttgaaactgtttgcgctctgttgttggggctttgttgttctgaatgaacttaaaaaaggagccgtcactaaaatccggggccaa

SEQ ID NO: 97365 - DNA, 287 bp, Glycine max
ggttagggcaactacactggcttttgatttccaaaatttatttgcttaataaaaaaaagccgaggtgaagccttacattaaattacatccctgaaacattaaaactcaaaatccttaggggatgtgttttagggggggaaaaaatcccagagggggttgatcattttcatggcattttgggtttggggattggggatgtggaaaacatgaacctcgccctccactttaaacaattccggtttaccttgccagccacttttttttacaaccttattttacccaacccc

SEQ ID NO: 97366 - DNA, 313 bp, Glycine max
aaaaaaaactatcttggccttacttaaaaacttgtttttgaggccattttcttatttgaaaaacacatcaaaaaatttgttacaatcacctcagaattatttcttgtcccctttaattttttttcatcacggaaacgaactacgaaaaaaaaacaaaacactgtatgctgaaaatttgacggcttgttccaaatcatcacactcaaaggatgcttcaagtcccccacatgaagcagatgctgtcctaaggcaacttttctgctgccaagttcgctaactatactcaaatctttacaaacatcctctttgaaac

SEQ ID NO: 97367 - DNA, 436 bp, Glycine max
aaaccgataattagtaatatttttagaaatgggtatggggaggagtattataagatcctatctagtgtcattcctaatttaaaaaaaaaaaccctaaatcgcacagaacaaaaatattcccggattacattcagaacctacgtggtttccaacgttaagcaaacaagattaactgttttaattcttttgaatacaatcacccagagaggtaggtaatcttgaaaatgtcaacagcacatttggttcaaggtaaaactgagaacgggagctgaaataaactgagggtgtcatgaactacggacttgtttaaatgaattttacaaaacttttctattgacagcaaaacatttgggaattaggcacaaggaacaaataatttaacaggcaaaacaagctatatgaataactgaatggaatcgtacttcaagtgagttta

SEQ ID NO: 97368 - DNA, 393 bp, Glycine max
cctcggggaattccaattccacattttcaagaaatttggaggcaaaaatgttcatatatgaattggaggtatttgttttcttattaggcctatcctgaagccaaaggaaatgagatcggaattcctcggggaattccaattccacattttcaagaaataaggaggcaaaaatgttcatatatgaattggaattatttgttttcttattaggcctatcctgaagccaaaggaaatgagatcggaattcctcggggaattccaattccacattttcaagaaataaggaggcaaaaatgttcatatatgaattggaattatttgttttcttattaggcctatcctgaagccaaaggaaatgagatcggaattcctcgggggtaccgagctcgaatt

SEQ ID NO: 97369 - DNA, 478 bp, Glycine max
gccaaaacgcggttgtatactgttttattcacggggtgtttttcttttgcctctatgacttgaaaccttttctctctcacaccaaccaccaatatattaacccctccactctctttcattcttcacacaacatcaaaagcaacaacaacatgcaagtccaagaggaattacttgtggcttccaaggatcacacccaccaaatgatgatgatcaagggcaagcgaaccaagcgtcaaagggcaccatcccctcttagtctagccatgccttataataattcaacctcaagtagcaccaacaattccattgatagtgccacaacctcaccctctcccaccaacacaattgaattgagagaagacgaagacatggcgaattgtcttattcttctcgctcaaggcagacaccacgtggcagcaccaacgtcgtatcacaacaatgacaacaacgataaccacaagtcaacaagcctatacct

SEQ ID NO: 97370 - DNA, 456 bp, Glycine max
aatactcttatttgaataacacagcaattattattactcgttggaaataaattttcctgtcaagcaatcgaattgaatacaattgcatttcagttatgttaaagtttcttgctaacagctaagattacgacgaaaaaattacaaagaatgttggatagtcgcattttagctaaaaaaaacctaaattagtcatttttgtcatttgcagcattttcagaaagcgtcggtcctcataaccttgacctcctagttctagcaaataatttacactcggtaaatgaaaataaatgaaagaaaactaagcgcataaaaggttgatgtagaaaagattttggtacccggctcattatgttttgttgcagccactgccataaagattgtaaagaaagtagaacccgctaaatggccaaaacgaccttttagacttggcctagaccagctttatgaaagatgagc

SEQ ID NO: 97371 - DNA, 400 bp, Glycine max
accaaatttattaaaatcttgttttcatgtttacttagaagcttgtttcatggggcgggctttgggggccaccttgacaccattggaggaaaaaatataagacccttcaagtggtcttttctgcatcattgattgtgccaaatgacctgtaatatgctaactccctccttcggtgctaataacaccaccacattttacaacatcaccttccgtttcatattcttcaccactatcttataaggcaccacctgcttcaaaatcacaattaccaccacctccaccaccatcaaggattgctccaccaccacctttcaagttctacaacacgccaccttcaagtttgacacagccacaacctactgagatctcagcgccacatgacttttcctatccctattac

SEQ ID NO: 97372 - DNA, 468 bp, Glycine max
gtatataatatatgctatatacgataatacagtgcacattacatgaaggtttgttattacatgcatactaaaacacgcaatgatttgagggtttgaacggagacaacattgtttatacaggacatgcaggataacactgttcaaacagaatttggtgcacaccattgttcaaacggtatatgcagtacaagttctttaccctgaccatcccctctggggattatgcacattcaaccggtcatgtacagagttaaaatctataggttgctgagtttcctccatcctctggataatgcttgctacatgattgcctctaaatcccatgctcacaaatttctcgatcaaatcattgtagggatggctacgaataaattgtgactggctaggactcgggaccataagattatgtgatgcagggttgtgaagggatgcactagttggaggatatccagcttgagcataatgaga

SEQ ID NO: 97373 - DNA, 294 bp, Glycine max
  unsure (1)..(294): unsure at all n locations
tcnnntttaatttttttttttttttttttttaacaaaggactcataataaaggggccggtaattttttaataataatcaaaagctgtatcaaaacacatgtggctttgtatacaaaaaggtcatcccaattaaaaccatcaacgttgttccttcatatctaagacccaaaaaccaataaaagcaaataacaatacatatactttggcgttaattaacattaatttgtaactgtaaataataaccatattaggccgcaaaaggagctggcacaaactgaaagcccccagcatcca

SEQ ID NO: 97374 - DNA, 383 bp, Glycine max
  unsure (1)..(383): unsure at all n locations
gaatacaagatttgttgttttgtaaaaaaaanacatctccttggggaaaagatgacaaataacatgaactagaagcacatttttatccaccaaaatattttgtctcagactaaccaaacctcatcaaatcaaggactcaccacttatataactatggaatctcacaaaacaatctatgctaacaaaagaacactggctctacttgatggataaggatgtaatttaaccactttttgattttggttcatcttcataactgcccttaagcctgtgaaatgcaatcctagtgataacagcacttcgcctgggatgattcgcatctttttgatgatggatgacaacgaaactctggaaaggactttatttttcttttcgaattgaaa

SEQ ID NO: 97375 - DNA, 273 bp, Glycine max
aaacggcgatatgggtcatgttattgaattataaacttataaactattaataagggtggctcctgctaaaaatgccaacatcggataaacacattttccacaaatttcacaacttactcacaagcccttttatcaagaacaacataacaaaccccatttggaaaatgatgggaaaaagctttttgattttcacttaacttaatggtaaatatttagacccccaactttaaaatacacatgctacatccgtgagcaataataataatttaagta

SEQ ID NO: 97376 - DNA, 332 bp, Glycine max
ctttttgtcatgttaagtttaacatttggcgcggggctgtgttagtttctggatccgccacttcatccgttgattgcacagaattccctaccaatcgacgccaccacatccacgatgcgcctgcgcagccgggcaatctttgccctcgttcgcaccaccgccatcaccacgtcggccgtgtgttcgccgccggcggtgctgagcgtatgccacgcgctgcgcgagcgccggcgcttcacggaagacgatgtggcggcgtacgcggcggtcagcggcgaccgcaacccggcgcacctcgacgacgccgttgcccgcgagctgagcgggttcca

SEQ ID NO: 97377 - DNA, 439 bp, Glycine max
caaattcaaagtcattcgattgttctttcattataataatctaaaaaaccaatctgtaatgatcatatgcagttcaatagtttcacgataagtcgataaccttgcaaccagaaaaaagatgaggagaagaaacatttctttagaagaaaacaaaagtaggccatttaatcatacccttttgaccattgcacccattatgtcatccaaggtcccaaaagtattctgcataaatccatcttgggacttcatttgctccaaaatgtaggcttcatttggcttcagtcgaatgtctgaagagaatttctcaacttcagtgcacctgctgattgatggggatgctccatttagttggccaaccaaagatgcatcaactctattgctacaaattgtattatttttggtttaaaccatgccccatagaacttttcactccactgga

SEQ ID NO: 97378 - DNA, 480 bp, Glycine max
atgtaaaatcagttttaaactttaataaagtacaagtataatcgtttagaggttctagaaaatttatttccttgatttttctttggctaacaatccaaggcagaagatttcagttcaaagattttaatcataggaagtgtacacattgacaagttgtatgctggcaaagctttgccatggtcattcaggtaaactttgtcacttcatcagagatcataacttactaggaataacttccttagaaatcactccactttttccagaattgaaaatgtcctttctttcagcaataaactttagcaaaccgagaacccttctctttatttttattggctgtaacagactgaggtggatcatgcataggatgaggattaggatatgatggccgcatcaatgcccatacagatgaaaggtattcgttcggttcatctagaatccgtagaagtgataaatcctgcatggcttttgagaatttgaaga

SEQ ID NO: 97379 - DNA, 383 bp, Glycine max
ataaaaatagtacctacaataaacaaaattttatttcgaatatgagaaggttggtgtctcgaaattagaaaacactagcataaatggaaagaaaaagaaagttcaatctgaagagagaaaccacgcggcgtacacgagcacccattccgccattattgagtattccaaaccaaaagagagataagttaataataataactaaagtgcattcagcaaataccaaggcatatcggtttgggacttgcattgattagaacatgctgtgttccgggctggaatatgcaaggaacgtggacttggctgaggagctaaacccattgaagttagtccccgacgacgtcgaatatgcacccatgttcgggaacactagccaatcgttcact

SEQ ID NO: 97380 - DNA, 149 bp, Glycine max
aatgggttgatgaagatgatgatggtgctgatatcaacatggatgggatggacttctcgaatttcggtggcatgggtggtatgggcggcatgggtggtatgggtgatatggctggtatgggtggtcttgatggcatgggtggtatgggt

SEQ ID NO: 97381 - DNA, 294 bp, Glycine max
aaggaggggacggcatccttttgttgaataatgaccacatacagggataggttttgataatggggacaaacaaaaacaaaaacaaaaacaccgggggagagggaattattgggtttttgttgaataataactaaaacataaaattcaatctaaaactggagtattaaacaaaacaggggaaggcacccaccatttattatgttgggaattttttatgacaagccatccattaaaccaaaaaagaagccaagcgtttgatcatggctttagcaagaagagtcttaggcttgaaaa

SEQ ID NO: 97382 - DNA, 448 bp, Glycine max
agctgagcgagggaaggtatcgaagttttcggcaagtttagaacttgcggcgccggcggcgggtggcaccggccaggagtgtcgtggttgtgtagcggagcttcgcgagatcaggttcggatcggacggtctcgctaggtgaccgttgacgagaatttgaacttgttgttacgttgaatgttttgtagtttgtgcacagcaacactctgcggtttaatgcatcaatcgtagtaatactaatatctacaaaaggcacttaactaacattctgtctcttccagcaaaagcttctggagggagagaacaaagaatctctagtttgttaacaatggaagacgggaacaacagtggcggttccaccgcaaagaaattaaagcagcggcgaaagaggaaggattacttggtggacaaggatgggcaggtggtggagcgagagaagctggcaaaa

SEQ ID NO: 97383 - DNA, 274 bp, Glycine max
aacccccaaaaagtcacaactttgaatttaaccaaaacacgggaaatttaagggggcaatggggccccctgggggactaggaggggatactatgggctatgggtgttaaaaattgctgcttgatacaacttgttttaaaaaggctaaggggataccaaaaaatttattggacaacaatatttacactttgggaaaaataacgctgtacaatggggctacaactcaatttttggggctttattaacagatatcggctttgaaacttaaatgcttt

SEQ ID NO: 97384 - DNA, 256 bp, Glycine max
gtgaaaaactaaatcatgctcgagcttctcaaattggctctaaaacagctagtggctggaaaacaacagcattacaagaatccccagaagaagggggacaacagtatttgtgcacttttcatttccacgtgaaatatgttacaagaatcctatgaatagagtttacaatttttatctttcaagagaacagggaaaactgcaggtagtttcaatcaacagggacttcaacatccatttttaggtcagattgaccaag

SEQ ID NO: 97385 - DNA, 281 bp, Glycine max
ataaaaaaacgggataccctctataaatggaaaatattacatatttcttgcataaaacttgggagaacatttttttttggttgacgatataaaagatatatgttctgaaagaacacatacatgttcacaaaaaaaaaggggggaatttatataataataccgaaaaaaaaaaaccgatttgcgtctgagggaagggaacatagagaaaattttagcagtctggttataagaagccggtggtggtgcaaaagtgccttgccaagaggggtgggacccctttt

SEQ ID NO: 97386 - DNA, 453 bp, Glycine max
gatactcaagaacctaatgggtaaatcaattcgggatgacaaaaggcttacaacaataagaagcaacgaaatcaaagattcatacttatatgggctaaaaatgttatactttacaagaataatagcttatgtttttgttaattaacagtcaatagaagtaatcactaatctaaacatggctttatctgtcagtacgaaatagtagtagtaaccaatagttttgttggctttaatacgccaagaatgatccagtgccagtgtaacttgttgccaatgcctttccagctgaggttggctgagagaatgctagttgagaacgttcaagctcaagatccttgcagaaactcttcctcacggcatcaagcaatttgcttgcaattccttttcttctgttagagggagcaacccaaatggccctaatgccacaagcagcggtggttggtttgctatcac

SEQ ID NO: 97387 - DNA, 339 bp, Glycine max
ggggaacccaggaagaaccatttgctaattctcctcatttttcgggaaaattgcaacctccatacaatcattctgaaaacaaaaccatccaatcattttaacatccatctaaataaaaaataattcgcccaaaccagaacccagaccgccattaatttcaagctttaaccgaaaaacagaacaacccaaaccattttcccatttgggatccacaagttccacactttctatttaccaatggcctaataattaattattaatccactagtttacactactaaaagcttgggatagattacacttacactcgctatgttacaaaaaaagttttcccaaacc

SEQ ID NO: 97388 - DNA, 308 bp, Glycine max
aaacccgggtttattaataattgggccctataaacatttgaaaaagaccgaggccactggaacccttgactactttggaaaatagactagggaattttgtcccattttcaaattagagggcagagggaaaactcctataatatggccaacgataattttatgggcgggcaaaaccactttttttcagatggggggggggttcattcaccaagtaccaaaactgcagccaaggggtttttgggggaggacttcaagacgatctttcatgacagccataaatgaataagctgggaaacacagccggaaaa

SEQ ID NO: 97389 - DNA, 227 bp, Glycine max
ccccgcttgaattttttttcgtaaaatttaaatacagcccaagcttacataaatatccattagcaatctaacttttgcttatgtttattctggccccaattttaataataatacaaggcaatctttttacggggacaggcaaaaaaaacactggggagggtacataaggggataacaagccaggaccctttttttaaagaccccatttttttttttttttcaaacct

SEQ ID NO: 97390 - DNA, 470 bp, Glycine max
aaagcgaaaaatatcctgtattgaatttcttcagaagcccaaagtgtcacttgtgatggataacaacataataagaagtaatcctcactaatcactacaaattcattttcatcccaaaactctgaaatcagtacttcaagtttcaacttgcctattgaggcatggaagattgaaataagatacactgatagtgatagtttaaatacaaataaatcaaagtaaaacagattcttagttcgtttaaaaaatcttgcttgctctgctctcaacctgtgtatcttattcaacattccattagactttacaatcagcagagacagaaagtaatatttagactagcccacgatgccttgaactttctataaacataaaaattgaagaagattccaacaattccccatgtaatataactcagatctgaatggtgggatattggatgcacatgcagtgatgatgggaaagttgatgag

SEQ ID NO: 97391 - DNA, 254 bp, Glycine max
aggaaaggccggaattagaaataaaaatgggcttcccttgctggaacaggtaatattttaagacaacaaaaaagggatggggccccaaaaaggaattccgggagaaccaaagggtctaccctcttcccttggtctcccctgcagtatagagatatctcggggtgccgcgctttacatttgcttcaaactcaagggaaggtcaccgcctatggggtgcgggggaaaagcttttgctatctattctctctttatct

SEQ ID NO: 97392 - DNA, 360 bp, Glycine max
ggcatgattgggaatgggatttaccaatgcttttcaacaagaatgcattatgtacaagattttattggaaaaataaaaaagaggacgggggtttgacccttttgttattttagaatataaattctttcaaaaggcacacacatttgtttctgcaatttcattcgggggggcaacttctaatatcttcatggcaaggaagttgggggccttacagaagccaaactcaaagatggaacacgtgtccaaaacgaacttttgagagtacttatggggtaaaatccatgggaaggtacttgcttcacaacttagcaaaaatagtcaaagcttttaatctgcaaacttttatgggttgatacaaaa

SEQ ID NO: 97393 - DNA, 305 bp, Glycine max
gggaacaaaaaaggttaaaaaaccccttcccggggaaaaaaaaaaaatcccccccggggaaaaacttaacctttcccccacaaaattaacccttcaaaaaaaggcccttgcagaacccgccccactaactaaaaaccggggaaaaattggaagcccttttcacaaaaaaaaaaggcccgtttaatagaagccccccccaaattacctttgggattccccccctttggaacccccttagaaattcccttgggcgcccccaccgggggggggttttggtccccccctccccgggggggaaccccccc

SEQ ID NO: 97394 - DNA, 478 bp, Glycine max
atcaattaataaagaaattaacaaaacaaatctgactaagaggttcattctgctacctgatataacaacctcattaaaagtaatgggatagaaagaggtaacatatgagattgtaaacagatccgaaaactcacaaaagggtaaaaagaataaaattacaataagacttccggaaattcctgtaaaattatatacttagtctcgtctggttatatatgtttcaattctattccaactaaagaatagaaaataaatgcaggtctttcaatggcagaatagaactattcacttcgtgggcttcatcttgaagatcatgatcatccaatatatagaagcaaaagtagttgccatcctgcagcacttgtttcttgtattcaaaagtaccttctaccaatcaaacatttgaccgaaatcgtgtcaatgatatctcctggagttcacgcttcatgcacagacgttcaccgagcaaagccatcac

SEQ ID NO: 97395 - DNA, 383 bp, Glycine max
aagttcaaaaaattgctgtgcttgtaattaaggctcagtaaaatgtcaatcaataatgttcaagggctataatcattacaacacatacctaggggtttgagggagatattttcaaatggcaatttagtaaccaagtagggttttatatccctggctgagttgctcattaaactattttcaaactttgtagattacaaattatgggcatcaaattaaatcatgtcctctaattggatttgggccagaacacttcgtcaagctttagtggagaaaaaacgagtaacatgttcatccactagtcattcattctatatactgaatctccctgcaatcagtcgaactgctattgtgccaatctagccatagcacccatattaagcaaa

SEQ ID NO: 97396 - DNA, 502 bp, Glycine max
aaaaaaaattctatcgaattggttccaactgcagttgttttgaccagggatgagtttgaaggagaatgtagctaagacaggcaacactgaggacaatgctagtcaaatgtggaccttatgcaaacatgctttctatgatttaactcatgtttctccggtggtgtttctgttcctgctgaaagaatgttattattatggcacatgtaaggcatcaacaaaattccgagcccttcaacatcaagtacatcttgttcttagtaatgatccaaaacccgaaccagcaacttttattgttcagtgcatgtatgtctctccattatttgaagatcatagtcaaggatttactcatctgataatatctgctcttcgccgattcctgaaaagatcaacaaccactacagaagactcattggaggtgaaagacctagttgcccatctacttgtagatattatttggggccagatcgatcatgatgaaaagattgtcctgaagctactcgag

SEQ ID NO: 97397 - DNA, 451 bp, Glycine max
ggttcaaaaattaaaactatatatagtttctctttaaaaaaaactacatataagtttatcgcgctaattttgggtatcaccctatacaactgtaattgcagctagtaaaatatagcatgtacaaaatgccaaatttcaaattgtatgtcatatacaaaaaaagaaaaagaaaatattcaatgaaattaattatcatttacctcttgaaaatttcttatttttctataggaacttttccatatacacatgcaatcagttaaaaaattcgatctcaattcatcagaaatcaatgcttgctggtctccttgtcaagtgtctacaatctttggtacacatttcttgaatttcttggcgttttcggtgagggacacgatgcaagacttccactcagatttatctttattatgtccttgacaaggaagatggcggaatatgtgaacaagtacaacag

SEQ ID NO: 97398 - DNA, 372 bp, Glycine max
acacaacatcaaacaagatttttacataagcatgctgttaaaagcatagaaaagtagaaaacatcccaggagaatcttcaaactataatattcaacaaatgcaaaaaacttgatggacaaaatagaaaaccaaatgtaaaactttcctctcaagtttttttcttttcctattatctgattgtgacccatgacttgggcaagaaattcacatgtataaaatgtatcaactaatctatttactcaatgaatacacagcatccaacaccaacagccagaagacacgtagaactcatctaattcagcagtggccttttcagggtttatgttgagcatatattgaggtaccaacagcttgttgaggagtcaaagctt

SEQ ID NO: 97399 - DNA, 302 bp, Glycine max
atcgtcgtctgaacctgaaaactaacccagcgcccagaggcggagtcaacggtggaggcgtcggactcatcgcactccgggatggtggaggtggcgaggtggtggcggcgagaggggctggaaggggcggaggtggcaaaaagagggtggcggagggaggcgttatggagggagtcgaaatcagccttgcgcttagagctacgaggagaggagagaggtggggtgacgggggcgctgttggatatcctgagaggagggaggttggcggggatggaagttatgttgcggatgaatgggatgag

SEQ ID NO: 97400 - DNA, 438 bp, Glycine max
aagttaacgatgatttgtaatttccaaaacgagaaaaataacaatagagcatcacggatgcatcaacccataaaggataaagggggtgcagaaacaaaaaatgcctctgcaaatccgtgcatcgcactaaatccttaaggaactgctactgatggatcatggatataactccagtatccagacatgttctttctacacattcttccggtcggcactcattggcattgggtaagtttcacaaaggtgattttagtcattcagtgtacatcagtatgcttgttgaacctttttttttccttcatattctgaacacccacacttatgtacaaaagccaatactagccccatgaattagtttgtcaccaatttacaatccccctattgagaattaacatcctgaaatttggatataaaatagtacccaagaaggcaagaacc

SEQ ID NO: 97401 - DNA, 317 bp, Glycine max
gggtaacaagcgcctctccggaaaaaattttttttgttcccaagtgggaatttgggagggacaaaagggtaggtcagaacggtcaagacttatttcggggttgcttaaacaatagaaattaacttatccttttttatcaaacactttgggggtgggtttgggctaaaaagcaacaaggaaggggcatggtttcaagcaaaaaaaatagatttggggatttttacaaccttcattaagggattaataaaactttaagatttgcaaagcccgccttggatagcaaggccaagtgcctgatggggggggggaatcagggg

SEQ ID NO: 97402 - DNA, 275 bp, Glycine max
aaacgggggggggggggggtaaacaaccaaaaaattaatttggttttggggggaaacattacaacctaaatccataaccattcggtaaacccagagggaactccccttggattcaatcaacaagggggaagggggagtttcgggtcattttacgaaaattcaatcttgaattaaaaagacatacttaaatcccgcgggggaaaaaaaaaggaaaacccgttttggaaaaactttttaagaaaggaccttttaagggggggaaaagggcacttttc

SEQ ID NO: 97403 - DNA, 321 bp, Glycine max
ggttaaaaaaaaaacaattttcattgctcccctgatttatgaataagcgtattttatttcccggggaagggaaaaacaaaatacctgctccaggcccccaaaaacagtattgggttgtattatctgcactggggcgaatcgggggaatggataaaagaaaaaaaatctaaaaatttggatgggtaaaagaattttttggccggacgcccgggattcaactgaagaggcccagggggggccaagggtctttttttccatagaataaactttttccgggggtgcccattaagaataaacgcccttggggcccccccaacggta

SEQ ID NO: 97404 - DNA, 474 bp, Glycine max
aattcagtattcctactaaatatgaagtttaatactatttgtactccacctaaatatataaaggtgggttaaaaaaatccacttgcatcgcaaaaatgggtgcacatctgtaatagcaaacaagaaaaaacacatttcatctctgcgaaaatctcaaattcacgtacccaattaagcacccgagcctataataataataataataataagtaaataaataaataaaaagacaataatgtaactaaaatctacaaacaaacacggaggaaagcaccaacaccaactctgtcgttttcgttaaatctagcattacttccgacaacagcatgaagtggtctgttttccagagagcatttcagccctttagctcaaaacccaaattttcttcctttaatgtttcctctttcgcttcttcagtctattggttgttctgctaccattactagagcccactacttgctctccagttttatc

SEQ ID NO: 97405 - DNA, 498 bp, Glycine max
atattaatattggatttgattcaaataatgaaagcgtaattgtgaagagccacaaatactatatttaaataataatccatgcgataagtatcaaatcatataacaactgaattctacgaattcatactaactacggaataccaaaacaaaactggggagccaacactacaggaaagtttagaaaataaatattaaactttaagtatctgctagagttgccaccctactcatcatcagcaaatttggtctttttccctgtgccttccgcagcaaggttgggtctatttccccgaccccttccaccaccacccctttcaccaaatcgaccaccaccacttccaccaaatggaccgtcaccaccaattccaccaaatcgaacggcaccacccctagcaccaaatcgaccaccgtcaccacccctagcaccaaatcgaccaccaccaccactcctaccaccaggacctctacccccagaaccctgattatctctaggtttgg

SEQ ID NO: 97406 - DNA, 449 bp, Glycine max
gaacaaatactccgggaaacaaaccctggttatatatttcatagggaagaaatttccttatttcttctctttaacattctgaatacagaatgaacttggagaggcgatttgaaatccaaatctacaattactcttcttttctctcttcacttcaattttgcttgttaattaattctctaactttacaattacaacagaaaatcctcattcattcttcaattacagttagtacgaatcaactagccagtctagcctagtgtaaaagtggtgtgactactgcactaggagccaacaaattgatccattcttctctgcattcaagctttcccaaaagaaccatgctgcaacacagaatttcaattttcaagtttcaactcttgatgcgtctcaaggcaaggtaggccaataatctgtagaacacaaacatgaaaagcaacaccccaatgcat

SEQ ID NO: 97407 - DNA, 517 bp, Glycine max
tagacatctaccacgaatgactactcaaattccacagtatgctttgtcagatacaggatatcatccctctgatccacctgctaggacatctgatgtgacacctccaccttcaatacaaggggtacacttaccatgtacttcacaaccaacaaattcagatgcaggacgcacccttagatcatctattgcattagagacacatagcaatgatgggaagccaattctatgccttgatggacaaggattcttaccttcacgccctgctgctaatgggattacggatatcctcacgagtcattatattgacccctggccatcttggaagaagataccgattagctcaagggactcatggtttgaagaatttttgattaagttttctattagtccaccagattacaattgggcaaaaaagaattttgagatgcgaggttcaatattgctgacaataagctaaataaggctcggaccacaatggataaaccaaattggattaaagatagtgtttgggagatat

SEQ ID NO: 97408 - DNA, 336 bp, Glycine max
gtaaaaaaatttccttcaatttttaaaaaattgtcttctgcagacttactgatcaacttgatccgcaagtgtgcgaggaactaggggcatttttggcatattttaggaatgctgggtgcacctagcaactccccaaaattttgtggcactaaagctgccagttagaatttcaaaacggtccttggcaaattcttcggtatgagctacaggagaagaagataagtatctcattgtgtcaattgagtgagagcctaactcgttgtacgagttattcaacactttaagtgacttgagcaatctgagaggccccaaagcagtaaaactaccaaaatttat

SEQ ID NO: 97409 - DNA, 437 bp, Glycine max
aagaattggaaagggcttgacgttcaaccttctctctctcacacacacactctctcttagaagatcctctttcgtaatctcgcgccgcttcttcaccgttctcgcctccgtcgagctgcttcctcgtaggttccccgccgacaggtacgatgtctcctgcgatggatcccaaaccattcacacgaagcccagaccgttgaattttcgagcgtcgttggttccgcgcgatgcagtccgtcgtcgagcgcgattactctaactacaaggaggttagcggcgcaaacaatgatgaaggactagcgatcgcgaatctcaggattgctctgcagatcatagatgctctggccaagaaagggattgcggagctcttccccattcaggtaacgtgtatttgttgtgttcattagtttttgtttggaaaaattgtgacttctttt

SEQ ID NO: 97410 - DNA, 511 bp, Glycine max
ctcgagccgattcggctcgagcgaaaaccaacccagtttattgcaaccaattcctttcctttgttcttgacatcatggctgaggcagttggtggtgcattcctctctgctttccttgatgttgtgttcgacaagctgtctacagatgaggttgttgacttcatccgtggaaagaagcttgacctcaatttgcttgagaccttaaagagcactctgagagtggttggagctgtgcttgatgatgctgagaagaaacaaatcaaactctccagtgtcaaccagtggctcatcgaactcaaagatgctctctatgaggccgatgacttgctggatgaaatttctaccaaatctgcaactcaaaagaaggtaagtaaagtgctttctcgctttactgataggaaaatggccagtaagttggaaaaaatagttgacaaattagataaagttttaggaggcatgaagggtcttcctttgcaagtgatggcaggggagatgaacgagtcatggaatac

SEQ ID NO: 97411 - DNA, 353 bp, Glycine max
aacacattattatttctttcttgttttgcctattacctttggtttctctctgctatagtatgtttttttatgtcagatttcgattattctctaagtccaagaattcagttcaataacccttcatcattcaaagctacttaactcatttcacaggtcacacaccatcctaacccaaccaaacgaaccttttttctttcccataatttaatatttgaaatatactaagcagcacagcacagtaactgtttcttgctcactgggtttccgcaatctacatgcattcaaattgctactagcctctgccaatgacctcgtgcatttaacaccctaaacttaaaaagctggttaattta

SEQ ID NO: 97412 - DNA, 396 bp, Glycine max
attataagagattgttgtatgaatattatattccaaaaagcaataatattatattgccttgctacactagggaacatcagcaatcacaataatgtgtcgatatggagataaaactataaaagatattagtatattacagcaaactccacagggtagatgctgatgccaccctacatacatataaaggaacatatttttcagttatgcaaggtgtggttggaggagggggggcctttgggtgggcattggtagcacttgacaaatagcccgaatgtgtcaacctgcttgatgaaatttgtcatgctggcccaccctccaaacccaaagcccactaccagaacccacaccaccacaaatgcattcaccacgtacatcaccgtccagttagggataaag

SEQ ID NO: 97413 - DNA, 535 bp, Glycine max
caatatggtcaggaggatcttgtcagtgcatttctgaaacagcaagaaagcattggaacttctgaaaatgagtttgactttgatggatattccttagacaacattccggtttagaacagattcggccagttctcttcctaattgcagtcgccaatgtaaatagttggcgttccatatgaaccaaatcacactgcaattagttagtttggatcttagtttaaaattttcaacaaataaaatttagttgatgtaaaaaattcaggcttcagggagtagtatgttattatgatttagtctggatgctcaaagatcatttaagtgatccatcaagatgaataacaacaaactttaaatgcatgtatgcaaaaggcatatttgcaattttttggctgctttccattgcaaaggttctagcaagcttctattgttaaggtgtacatgaagacattggttaagggtaaaactgtagagggcaagactttgatacacctgcagacttgttgtaggagctttttaacttttgatacacattatg

SEQ ID NO: 97414 - DNA, 495 bp, Glycine max
ccatcttctccaccactccacacaaccttaaatccaaacccaaaccaaacgaaaaacacacacacacacaccccaagagaaggaacagaaaaaatgggttgccgttagtatctatgagtttcgatgttatgtatgtgtgagtgcgatagcaagttagaaactactacaacaactcatgtttttcttttttacttcttttgatatgttttttttcccttcctagcctattaattcgatctgttcctgattccgaggcaacccaattcacagttgcaagttaaattattaatcatctagatttggggtatgcttatttcattttttagatatctggaattgttaagctgaaagcttggacaaaagaattttctttcttcaggattccgagaagttggtgtgatctgatgcgagtgttaagaagataatctgaggagaaaaaagaaagaaaaaaaagtttcattttttttttttttcaatggagtcagatcttcagca

SEQ ID NO: 97415 - DNA, 262 bp, Glycine max
tggcaatggcaagaggtatcgttaggaggatgaggaatacggttggtgctgttcttctactactgctcttcaacaacaacaactcattcacactccttccatttttataaagattgtctctctacatgggaatcccacctttgagacttcttctctactttacttcgctccttctctcaccatttcccagatgagacaactgatgaaggtgcaagctcagatggatgggaagaggaggatgacgttgaacccaagattggtg

SEQ ID NO: 97416 - DNA, 224 bp, Glycine max
cttcaaacatggcaatggcaagaggtatcgttaggaggatgaggaatacggtaggagctgttcttgtactacgctcttcaacaacaacaactgattcacactccttccatttgtataaagattctctctgtccattggaatcccacctttggtccttctcctgtactttccttcggtccttgtctcaccatttcccagatgagacaactgatgaaggtgcaagc

SEQ ID NO: 97417 - DNA, 134 bp, Glycine max
ggaaagccagaacaaaacctggtaccgagcccactactagaacttaaaaagaaagatatcttttcttaaactacttccacatatcatatctaggcccgaaaatataggtaggcaaaagggggaagggaagagag

SEQ ID NO: 97418 - DNA, 453 bp, Glycine max
agagagtgtggggttcgtaaagttcagtaacaaaaaaaaggttgacaaagtgagtgcaaagccaaaaacaaaaaaagatgtgaaaaatggtaacactctaaacatccataacaccatcacatcaccaatgcctactctttctccctcactcattcttctttccttctccaaatcgcaataaataaaatctcgcggcaaaatctttttctcttttttctctcattcattgattttccgatgggattgtcgcgcaacgcggcgtcgcagccggagatcgatgacgccggcggcggcgacattggattcggtgcgatccgcggcggattccccttcaagcggaaccctagccaccaccggcaccgcggctccttcgatcggcaattgccgcgttcgaacaacaacagcaacagcaacaacaatatcaaccgatctcacctccacaagcgcaagggc

SEQ ID NO: 97419 - DNA, 271 bp, Glycine max
gaatcatcattcatcaaataaagttcccctgctagttaagagcttaaaaaatagttttatgcttctctcaagtctaaaatgctactaccgttacaaagacctttcctgttattgccatgttactgctataggacttctaacagcatatttacctgatacccaagtaagtgacccaaatgatgaacttccagcaactgctgttcttccatatgaaacaaaagaaactttataactcaatttgacaccaatttttgtgaaaccaatattcctt

SEQ ID NO: 97420 - DNA, 401 bp, Glycine max
cagttttgccttttttgtgaaaaagtgtctacagagaacaaaacagaacggaacagagagagagaggagcttctctacttgactttctggagagacatggagggtgcaaactggaggataacagatgaagaagcagggccatcctcttcttctgggattgcttcaactaaacaacaaaacccacctgaaacttttcatcataggaaggaggcagaagaagaagaagaaaccgaggaagaggaagaagaagacgtttgtcagcataaaaatatcacctttgttcctggtcctctcctttctctcaaggatcagatcgaaaaagacaaggaggatgagagcctaaggagatggaaagagaagctgttaggatgcatggaaagtgatttggatggtcagataca

SEQ ID NO: 97421 - DNA, 105 bp, Glycine max
accattcattgggaaccaacacgttgattccttttgatccaccaagttaagtttctaaccccaaagataccccatggagaaagggacaagacaatatgactttgg

SEQ ID NO: 97422 - DNA, 495 bp, Glycine max
gtttcaaaccatatagacatcaccgtgaaagaaatcctaaggaaacagttggaagactaaggaggctgaaaaataagttaggactaatctttcaccaccaccaccaccatcaccattaccatcatcatgatgatgatgttcatggtcatagacatactatgtggaatcagttgcagaatgtcttccaccataaagtcaagcatggggtgacaacaaataaagtagacaagacaaggagaggggctgttgcaagagtgttgcctcagagaaaccatgtcgggcagtttcatagacttgcggaaggggtcctgagacacatccggcattcaaagaaaccaaatcctttcaagcttgatgggatgaaacagttaaggaatggacattctcagaagaagctgcgttggtggcaaaaccttcgaccgcaccgtaaagtgaggctgaaaaagaaaggccgagttaaaatggggtttatgagccaaaaatcactaaagaact

SEQ ID NO: 97423 - DNA, 251 bp, Glycine max
gggaaaaccaagggaaaattttcccctgccactcaaaaaaaaaatattttcaaaaggaaaatttccatcttggagaaaattaaaaacgggttttgggacaaattccccttttggaaatttattaaacaaaatttgggggggcaattaggctaaaaatcttggaactcaaggggtttttttatcgccctttaaaaacaaaaaataatactggctcagcattaaaacttaagcccccccagagccgttctttt

SEQ ID NO: 97424 - DNA, 485 bp, Glycine max
ggatgttgcttgcttggggagcagatagacttcaattagattcttctgggtaagaaaatgtcatttacagtttcaagatccattgctgtcagtgtagatcactaaggaaaagacttgaaggttcagtcatcaattatcagtataaagatgctaagttcctaaatatgcatatctaatttttaatttgctaattaatttctctttattcatttaaacaaggaatgaatcaattgataagattcattttttttacttaagtgaatttcccaactgtcttgaaactttgaaatttgcttgctggttaagaaataacttttatagactcagaatgcaattcttactccttaaaactgaacttcatttgctgaagaagcaaattcattattgaaatacttaagcttatacttcagagactgtttgactataatttgtgcttgatatctacattgtgcacctcaatatcttaaaataaggcttatgaaaaa

SEQ ID NO: 97425 - DNA, 447 bp, Glycine max
gaaaataactgatgaatatttggctggaagcactatattcaaaacaaatggtagtccaactcacgtccagttactcccagcaaagctcaaatgagaaaataaggcttcataatatcgattaatttttctttacaatccttcgaggaaacaacaggccaagtgaactttgattttcaagaaatcgtaacatcagagcactcgtgctaagaaaaattatattttgatgaagcagtaccggttacaccgaaaggagccatcaaattagagcatgctaatactaagatttggttaacacataaaaatatcatcgaggagcaccataaacttgggttgagtcgtattggggataagcagcaggctggggcgacaatgttttgccatacgcagccggagcacttgccgggacagctgcataaccagctggttgcgtgttagactgttcataac

SEQ ID NO: 97426 - DNA, 401 bp, Glycine max
gttgaaacaaaaatctcaaaaacttgagatggggatttcatagtccactaaaatattggcattacaaataaaccaaaacccaaacttggaaaactacacgccaccaccttcagggatttctaacatttcagatcaaatcaaaggactaaaaagacagaaaacgctatagggtccctgccaaggccataatcaattcccttctaaattcttgaagaatctcgcattacaatctagagaacgaaaatacatagcttgaaaatatttcctctgctccatcaagtattttgggggaactgtgactgcagaatcggagctttatgttggacaagacaactactctatggaaaaagaggcaggtaatgaagtcccaaattttgtggaaatcccattaacaaattaag

SEQ ID NO: 97427 - DNA, 348 bp, Glycine max
gaagtaaaggaatttagttatttaacaaataccacatattccctacaagctcgaccatgccccacaaatgggatggatggtcttacaaaatgtaaggtaccgattaacacgttttcatcatcactttcactagcactagaatcctccacattaatagctgctactttggagacactaatcttaaaagaagcagatcgaatcttatagggcaactttgcattgatagcagccaccccacactcttacacccttttgtattcctctctcttcaaatcactaggtggtaggaagcaatccatggacaaccctttgatgttaaaaaccactttttcaatttgccaaacctct

SEQ ID NO: 97428 - DNA, 394 bp, Glycine max
ctaaaatgttgccaattttggtttgaaatttaatccacaatttttcttacaaaagaattaatccaacaagtaaagaatcgacataaagttacaaaatgaaaaggggaaaaaatggtcaacttacacattgaggagccataaccggcttcaattgtacccgattcaaattcaagtcctcttttccatctgtccatagtaacataatggggtctagtggatgtagcatggtgaaaaaaatatgcgctttaaatcctgtgcagagtcctcgtgactgtttccaatgattcatagggtacaagcttgtccacctttgttttttgtgtaaataattggtgaatgtatctctctacaagctatagagtcttatctttttcttgtgtttttttttttacct

SEQ ID NO: 97429 - DNA, 286 bp, Glycine max
gggggaaacctttttttaaaaatgggggggcttaccaaaagaccccattggaaaaaaacagcaatgtttgaacttttagccccaaggaagaatttttcacatttgattaggtccaaggccaccccttttacctacaaaatttatgttttttgaaccaagcaatttttcaaaaaaaaaaaaaaaaaaacaaattggctttaccttcatttttaaaggttaactcgcccccccaattaaattaaatttaaatggccaaaaaaagccgtggccccaacctttaaaattt

SEQ ID NO: 97430 - DNA, 130 bp, Glycine max
aagaacaaaaaaacatgtctaagtatagtatttcataattccgtgtcaaatttacataaaagtccttatccatccagtagacgactcttttggtccacaacaaagcaaaagctgacttggcttctttttc

SEQ ID NO: 97431 - DNA, 511 bp, Glycine max
ctcagatcacacaccaattgccccatgtgccgtgctcccatcgtcactgaccccacaagggttccttccatggaccctactgcgtttgaagcaagttcttttgtggaggaggttttggaaaatagtgtggaagatgctcaaagcagtagtgatgatttggtgaggaatgaggaagaggaaagagtgcaagaaggtgaagtgtgtgaaaatgagaacttggctgtgactgtgcagccgagaagatcggtgtctttggattcttcttctgctgctaagatcagtcttgctcttgcaactgttgtgtcaggggattctcatgggaatcattcaaagagggttgttgggaatgtgaatgggaatttgtcaactaaaggtggttcttcttcttcttcttcgtctagttcggtgaagaggtcacgatcattcaatgccaaacacttgctatcatggtatagccgtagtcagagaaagccaaatgctcctttgagaagcttctgattgatttcgagtt

SEQ ID NO: 97432 - DNA, 201 bp, Glycine max
gcttgggggagcaagctgagctgcaccaaatgcgatcatgccgaccatgaatgtaatgggcttgactatggttgatttgacgagtcatcttgctaaatacaggcttggtaagcaatcatggaaggatgcagtggaaggatgcaaagatgggatgatggcaaatcctatgtgtggatcaaatatgttctcatccctgacacc

SEQ ID NO: 97433 - DNA, 314 bp, Glycine max
ttttttttgttttttttttttcttttttttttgttttttatctttttcgaaggaaggggtccatcggcttattatttgataagaaacaacaccaggctaaaagtctatttgccctataaaatcatgctttttggggcattggaaaattctcttttttgagcccagtttgacagggaacacctgcaaccactgcaacacggggatgaaaactgcgcattatgggggcccaaaagcgggccaatccttggcccccactacttcaaaaacccgtaccattttttccttttattaaaaaattaacgccccccattttt

SEQ ID NO: 97434 - DNA, 406 bp, Glycine max
ccaaaatcagaactaccaaagcttccatctgatttgcagagagtttttttttttttttttttcttctcaagggaccaacagaggcaaccaaggacactgtagagagaggaaagtggttctgttctttctgtgagtaacataacatgcaatagatactattatgtatagagagagaacagaagagttgaagaaagattgttgttcagttcgaaaaatttgcccatcaagtaccctttttctgttttcattttttggttggttttgcttcctatccaaccctgttgtggcgttcctggatcgttcttctctgtggcggagacatgttggacggtcgttcctgcgttgttccgaggatgttttccggcacttgccaggcagagaacgattggtcttacatgaagtgctt

SEQ ID NO: 97435 - DNA, 248 bp, Glycine max
aaccaggcacaaaaaggaccatttaaaaaaaataaaggatttttcacgagttaatacaacatcagcaccagagcaaaaggctttggtaacccatttgagaattgagcgctttcaagccttaaatacaactacatttcccagcacttgtatgcctcagctagtaataagtaactacaccaatatagccgaaattccttccaacacaacccaggtatggaaaactatgtatttaactaagccatattcat

SEQ ID NO: 97436 - DNA, 160 bp, Glycine max
gagatattaaatgatgtgcgaaggaagtgggttgaaaggatatatgatgatattaatgctagtatcacaaagaggagtattcgtgcggacttacaattaaatagattggctcttgtgataactagggtaactgcgttgctgggtatcctgaaggagactg

SEQ ID NO: 97437 - DNA, 367 bp, Glycine max
gaatctgaaacgttaattaaatcagatataacttgaaatatattacactttttaatcatataataatatgggctaccctatgatcaggaacctcaaatcaaactttacagtggcgaaaactaatgcatcagaacaccttggacttgtaactttgacttaaaataacagaacaattaaccgggaaaataaagcatggaacttttattggtttatcgggttgggaaggaggcgacgaacccaggtattgaccttcaccagcagtaaccaacatttactcaccacaattctctttattcccaaggcttactgctttcataattggtggtgctttgtggccacaattccacatttcattccaacttaaatt

SEQ ID NO: 97438 - DNA, 186 bp, Glycine max
gtaacataatacagctttatattaatagacttcattacatatccagggagcacaacatgcacaggaagattgatcctccctcttcagcgaaaatggtataggcctgccgggcatacataaacgcaaacacacgcctactgtatcattacacaacacacacgagggattagagacggaactgaccct

SEQ ID NO: 97439 - DNA, 312 bp, Glycine max
gggaacaagatatattctttcgcccaaaagcttaagacattaatatgcctatattttcgatttagcaaaataccctgacggtttttgatacactcgggttgaagaactgagaacgattatcacacaaatggggacaccgccgatgaccattttcacatcttgaaaagggcacaatgttcataagtgtaaaagacatctgagggactctccaggggtcataagatcgaaggcctggtttatctccttgacaggaagctcgtgagtgatagaaatcatataacttcaccactccattcatgcattctttggcaa

SEQ ID NO: 97440 - DNA, 193 bp, Glycine max
acaaaactagggagattagtgaggataatatgtcccccaaaccatcaacatgtattggtcttgcagatcaggaaatcaacacgtcagagaagcagacaaacatttgtgatgaaagctctaacaatagagtccaagaaactaagacggagtcgaatctctaccatgatgctgatcatgtaaatacatatgaagc

SEQ ID NO: 97441 - DNA, 119 bp, Glycine max
gcttatcatgttttttgttccagctgataacagagcagactttggctatgctacggatcatggcatgcaccccttatgcatagctcacactgcacatgattggagggaaggatctgaac

SEQ ID NO: 97442 - DNA, 359 bp, Glycine max
gtcaaatcctcgcacaacaacataaaacatgtttcattgagaatcttcaacttcagggtttcatgacccttctgcactgacttttcttgttggtgaattgtttgattagtaaaggcagagtgatgatgttaagagttggtattgttcatatctgaaggttaaaaaagaaaaaaaaaagtgagaatttttcagcttgttaagcttgattttgtgttgttagtgtaaaaaagggtgtgtaatggaagaagggttgtgtcaaaactcaattcctggttcaggttttgttgataaaactaggattgtagaggctaaaccccttcgtagtttggcacctgtgttgccaaaatctcttcaatctt

SEQ ID NO: 97443 - DNA, 377 bp, Glycine max
gaatgttaatgaaattttcaagtactcatggccattccctacaacaataattttacacaagctgctcactaaaactttttcccctcaaaactaggaatggggtcagatgatcaaaagtcactaactacaagtagaagccaagaaagagccatgcctaaggactaacatggttaacttttaatcgagtacatccacccttgacaaccatatttggaaacaagcatcagcgatgttggaacttccaagctgtatctggccttcacattgaatgtccccatcttttagctgggaatacatttgccagcaccatgcctgtccatcagcatctgcgacaaaacatcaaccaaaagaaccacggcattttgatgatccacatg

SEQ ID NO: 97444 - DNA, 298 bp, Glycine max
aaaacaaacaatggagcaagctttaattaccattttgctgtaaccacttatgtagaaatatcaaattgagttggataaaagcttcaagccttcaactaaggaaaatacatgctagatgcatcaaactccaacatattgggttgtgagggccatacaatgccaagaataatccagacaatactatcattccaatccaaggctttttgccagacgggtagggaagagccaaatacacttttggggaaatggggctgtcttaacaaaagaaagcgttgcacattaggtgctccccacacat

SEQ ID NO: 97445 - DNA, 318 bp, Glycine max
gttctagatcgcgagcggccgccctttttttttttttttatcacaaccaattataaaatcaaaccaacttaatcaaattacatggataccaaaaaaaaaaagctgttgaaagttgaaacgaattgatttcacattaacagaggtattgctaacagtcactaactttgacaaatttcataaatgtggctaatctacacttttcactatacactttgggaagaacttttcctacccttcacaaaaacattgttagttaagattcctccaaaatgcaccaaccagttcctcaccctccaaagaacaatagattgttgaaaa

SEQ ID NO: 97446 - DNA, 365 bp, Glycine max
agacaaggctcgtttcattgggtttgagacgtgacctgatgaatccctcattccatgttttgattctccacaagatctcattcttaccacagatacaataatagccatcaagccaaatccagccgttggatgccaccacttgaaaacccgtgttgttcttttccgattgtcaataaaaatttcaagcatatcaatattctagtgcacacataatatcttctcggcttttgcattacatgctccactttgttcttgcttttgttgtgcctcatggctgcgactgcaaccaacaaccctcaaataacaagggaggaaatccaaactgccatagccaaagcagaggaattaaggggccttcatgctgc

SEQ ID NO: 97447 - DNA, 432 bp, Glycine max
ccaacggtggccggaaaacccatttgagcggtgctgccagccaacttttctcctttctctcacaatcaactgggaattgttccctttcaatccctctttttggttctctggataagaccagataggaaatgcaatgcagaagcatgactcccctgttggctatgtgtcagacctgaaaatcctgtttatagtgaaggtttcttctcttatcagccttgcttatagtaggagttggtcttctgcttcttcaagtggtgttatggagatatctttgttaaaggtgctatctgatgcgatatcctcattttcgcatttatcattttctgaaagaatgaagtcagaacctgtatcaaagtattaccaaaaggcagagaagatgcttaagttgttgaagccgattattgatactactgttttttctgatttagcttc

SEQ ID NO: 97448 - DNA, 480 bp, Glycine max
gtgttgtttgcactcgtgagcgtgatgctgagctgaatggtgatgtgggttttgatggatcaaaagaggagggtaaaggtgtggatccttcaggtggagaagctgctgaggctcttggtgaggattctcaagttttgagatccttagaaagtaagagcgtgaatgagattgctgagttagatggaaatgaagctaccttgaaaacattggatgagcagaagaacattgatgacaaggaggtcaataagttagtggagaaagaagcaattagtgatgttattcaggctgagccagatgttacgcaaagcattaaagaacatgctggggatcttggtgaaggttctcaagttgtgaggtccttagaaggtaagagtgagaatgagactgctgagttggatggaaatgatgtcaccttgaaaacattggatgagcagaagaacattgatattcaggttgagtcggatattagtcaaagcattg

SEQ ID NO: 97449 - DNA, 371 bp, Glycine max
agttacaaagaattttcatttgttatatggtttaacaatacccacaccctaatagggttaagggccatgtaccattactgccctttgcaaaaatgcataatgaaccaacgtaaaatacatttttatacaagctaagatgtcatcgaacttaacctatattgagtccttaacatttgaaaatcatttttttggcggcagagaccagcaatttgctgtctacgaggacaagaaacaaaaaagaacctatcaaaatacaatcaacattaggacaaaattacatgaattgataatgactaagatgtcgctcacaacgccgagaagcaccaagtagaatagaagtattctgataggtggcaatattagcatatctc

SEQ ID NO: 97450 - DNA, 297 bp, Glycine max
gctaaagaattgatcacatgttccaaaccgcataacactacactttccatgatacaaatttgtccaattgtctatgattgctatggctgatacaagtacctattttcagaccacacattctaaatttgacggagctgtccatgaccataagacaacagattggttgttctacactatatgacatattcactgttgcatgctacattcgaactcatataggacaacttgtatatcactcaggtcacatcctcttcaacaggaaactcaaaatgatgccaatgatgccaacaacaacta

SEQ ID NO: 97451 - DNA, 288 bp, Glycine max
ctgacatcctattcacagcgtgtttgggtgggcacttacaagcgcttgaccgaaaaccttctaaacagaagctgcaaatattcatgggtatcttctacctgcatgcgacgggattctgagtgaaagaatacatgtgtgtgtcagtgagaatgtgagatgaaatgaagcaggaaacaagaatggaagaatataagaattatccattttttgtttagcttataagcgttccagaaagttaagtgtgcagtacttatggaataaagtgacaagaattctatcttcggcttc

SEQ ID NO: 97452 - DNA, 267 bp, Glycine max
ggaagcccaaaataaaatttttggcactttattccataaggccgggccacttaattttttggaacgcttataagctaaacaaaaaagggataatccttatattcttccattcttggttccggctttatttaatataacattttcactgacacacacatggattttttcactcaaaaacccgtcgcatgccgggagaaaaaacccatgaatatttgcagcttttgttaaaaagggtttcggacaagcgcttgtaagggcccccccaaa

SEQ ID NO: 97453 - DNA, 433 bp, Glycine max
ctgtcccattctgagcgcgtggggcccatgagtcgaatacggcaattaatccaaagtccaaaacccatttcaaacccgccacttgtgtctgattggtgtgaccaaagaaaatcagaaagcaacaatgtttgctgccagaaatcttcctagacattgcttcaagcccctctcatctctgcttcaacttcaatccaatctcgacaaaaatgttctaccttcaggtctcacacccgagtgcggcaacactgttaaagttgaagaggcataccatagagttggtttgtattgttatgttaagcagttgaatcttttgaatggatcgttgtcccgggcaatgtcaacttccaaaggtaggagcatgcgcagcaaggtggaaaggcgaatgcagaaagagtctggtaagactctaagggagattcgcagagcgaaaaag

SEQ ID NO: 97454 - DNA, 425 bp, Glycine max
aattccaattgattaattcaatgcctagactacaaaaagtgccacagaacaaatttcttttgcagatagtcaaagttggatgcttcatactctcactgagaacatgccacatacatcacatgactattaggactcaggttggctattgatcacatttgcatttgagcagataacatgagacagcgttgagaggaagcaccgtgtgagaactgaataaacgagctgtatgtagggcttcgtttcatgtttttgtttggaccaattatttgttctaagtctttcttgtgaagcagtgcttaccacaatgcaaggtcgtcttgcatttactgggctagtcactgccccatgcctgatctgtctcttttggtgttctcctattagtcttagggatatcacttttgatcacattattactattttgattt

SEQ ID NO: 97455 - DNA, 261 bp, Glycine max
aaaaaacccaaccccggaacaagggttttaaacaaaaggggcccccccaaataaaaaccccccaaccccaaatattattcccccgccccggaaaaaccattcaaaagctttttaaaaatttggggaaccccccgggggcccttaaaacccccgcccctaaaatttttggaaaaaatttttggggccccgggcctttccaacaatccccaaaaagttgttttgggtttaacaacccccagctcaaaaagcttttgggggccc

SEQ ID NO: 97456 - DNA, 292 bp, Glycine max
caaaaaaagcccccctttccatcaaaaaaaaggattttttttaggttaaaatctttagccctttttcccttttaggaggggggccaaattttttccttccccatttggaaaatggctacccttcccaaattttggggggtatataccataaattggaaggggggttttttttggggggcccggaatcacccttaaagaacgggtttttttttgggggccggggttcttccttcccagggaatagccaaatttttttttataaaacccccccccgggtaaacccgccgggggg

SEQ ID NO: 97457 - DNA, 192 bp, Glycine max
aacaacccaaataatgaatgggtgcgagtttgaaactatgtaatcacaataatatcacttgctaagggcaattcttcacttcaaaagatttttttttacagggccaaacgactattaagggtttattactgttctcctattcaatgaaggagtcattcccaaatcattcctcctatggggggggattgaaaa

SEQ ID NO: 97458 - DNA, 215 bp, Glycine max
atttatcatacatatataataattcataatcagatgcagtagtctaaaactacttgagcattagtgtataacctattttctccttcatttgtattcatttcttcctaatgtaatttgctttatatcatgagaaagtgaaaaacaattcatactatacagggaatagcacggatgtaattattatttttacataggtatacgtcatcttgattcat

SEQ ID NO: 97459 - DNA, 361 bp, Glycine max
gcctaacgtcagactactgttcgcgcttgcgctattcttcgccggagcacaatctgtgccattcatcgttttgcatggtattggagatgcatgcaaacattcgggcattagaaactttattaaggaactaagcaagtggtctggttcaccaggatactgcttagaaattggaaatggatcctgggattcttggactaagcctctattaaaacagacatctattgcctgtgagaaggtggtgaacttgcttgggaatcttctgtaccagcagctgaatcataattcgcttttgcatgagtttttgcttccatcttactgtatagggaaagaagatgaaggatctaggtcagggatacaacat

SEQ ID NO: 97460 - DNA, 414 bp, Glycine max
gaaacttaattgtttattaattaatggaagcagtaactaatgacagatgatgattcattctacaacaccgtaagctacttctactaacttgtacacattaacattaattcctgacgagttaagatggactccatattcaatttagcaactgttatgtacttcaattgcaattataatatgcatgtaatcacaaatcatcagtattgggcacgcacggaataatctgatcgtgagtgcaaatttacatccaaaatttgcagaattcgtgctcaactcatcccatttcctttctcctctatgtcaagctcagccattttattacataactctgtaccacgatcctctttgtcattaatctcactctgcggttcaacacctgaactaataatatagtcatctgatattagccatttt

SEQ ID NO: 97461 - DNA, 372 bp, Glycine max
gaagaagtaggaggaagaaaaggggaaaacgcaaagaaaaaaagaggaagatagatcaggatctcccttgcgtttgtctcagttgaagaaattcaagagcagaacgagactaactcaacggtatcagacgtttcagggtttcagcacttccattttttttttttccggatttgagttggaagaagatcaaagagctaagtccaatttgaatgctcataacttgagccaggaaaattgtttttgattgaaccagtggggcttgaaagataataagttcttggtccatgaagtttcagaattctttaaccacaggcccagggattgctcctggtgcataaaaatgcagaccatagtcgtgctgaattctgatgt

SEQ ID NO: 97462 - DNA, 392 bp, Glycine max
aaaatacaaactgggccatcgacccttagaataaactcaaattaacaacaaaggtaattacactgggccattttgctcaatgaatgatagaactaacatttcaataatggggtcatgacaacattaaagatcatccaaggtaattacattggcattataccaatgaatctcaaaagattttttttcacaattactctcaatatcacagcaagaacttttcaagggtttttttaatgattttggaagaaccatttcccacaaacctaacctacatattggggtggagggctcataactgggtacccttatgccatttgacactaactcctttaaggctcctcttatttcttcactattcaaaatgtctagaaatctttttgataccccaaatt

SEQ ID NO: 97463 - DNA, 444 bp, Glycine max
cttatcagctcctcgcccgcaagtattattctgatgttagcaaggatccacaggctgctgaattattcaagagcatccatgatgcatataaagtactatctaatgaagcagcaagagttcagtatgaccaagaacttcaattcggtcacaagccttacagagaaaaatggagttacggcactgaatttgaagatcaggctagattctataggtgggaccatctgaggaaaaaaaatggatagtgaaagatagtgggagaattacaatgtcaatgaggactactacaccagtgaaacagatgaggaagaagacgaagtagtagatttagatgaagagaggggttcttttgttgaagtgcttagatcagcattcgtgccattatttttgcttcagacacctggatcccgcttttcactcacattcagcagtctgacagcattgttt

SEQ ID NO: 97464 - DNA, 358 bp, Glycine max
gaggagtcagaaataaattcttattatgatggaggaaaccaacttacacaattgacatagaactaaatgctaaaaaaaagagattttaaaagacatacaaattgtcacactaatttaaagtttaaactgacaaccttgctttctctttacctattaaagaaaccaacaactattattcttggaagaattaacatagcataatttggctgtggcacagaactttttaccccatcaatttattgcagcacagcggggagccaattcttccacaaattctgcaatatttttatcagaatttcctccctcatcaacataacttttggccagattcttccatttgatggcatttttctttatt

SEQ ID NO: 97465 - DNA, 132 bp, Glycine max
aaaaaaaaaaaaaaaaaaaaaaaaatttaaaaaaaaaaaaaaaaaaaaaaaaaaaaaaaaaaaaaaaaaaaaaaaaaaaaaaaaaaaaaaaaaaaaaaaaaaaaggggcggcccccaattattgagtttttc

SEQ ID NO: 97466 - DNA, 291 bp, Glycine max
acgggcccaaaaaccgagtttccctccgcggggagtggcaaataaatatctttataggggggccccaaaaaacaaacaacgggccggggtttaacaacgggggggggggaaaaacccgggggtaccccaaataaatggcctgggaaaacacccccctttacccggggggggaaaaaaaaaaggggccccccccaaacccccttcaaaaaaagggccccccccaaaggggaaaggggaccccccccggagcgggctataaagggggggggggggggggggtccccccagggg

SEQ ID NO: 97467 - DNA, 312 bp, Glycine max
agaaaccatactttttatattaaattttgcataaccccatgcacccaaacataatggagttgacaattctcacaacaaaaacacgtgaaaattgatcgggataaatgatttcgaggctttgaaataaaaacaaatgaagggggcacaccttcacatgctaaaacaatttggaataccgagtttgctggagaacaatattttaatattctaaacggctttataagggaaaattacgggccattatgaaaaaaggcctgtaaaaaacgccttctaatggagggacaaactaaaatagcccaggacatccacaat

SEQ ID NO: 97468 - DNA, 180 bp, Glycine max
gcaattttctattttcttctctcatggctgcagattccaaaaaggatttccctgctgaacaataagggggtaattgatttacacgttgcggttcctgctgattccttccatctcattagcttctggaaaaaaagtttgcatttgcgtgtaggcatgacaaagaatgacaaagctggaaca

SEQ ID NO: 97469 - DNA, 239 bp, Glycine max
aaaacaaataatttcatggtactttttaaaagtgatagcaaaaaacacaaatggaaaacgagtttgcaatttgcacaattttaagaagtgaatcatacccttggcccggctatagcctacagatgtcacactagtttccctcctctttgaatatggaatgcgcaagggtttactttatcaaaacctgacattatttttgttgaaggcacttcattacagctggattttttttaccaaaa

SEQ ID NO: 97470 - DNA, 471 bp, Glycine max
gaaagaaaaagagatgcagtatttcttatatcttcatgaagtacaatcataatacatcaatagtatggcacaatcagtcatcacaatgtcaaaattagcacaccaatttttttttggaattgtaaggcaagtgggggaagccagctttaatcaatggattgaaacgaattcaagtgaaataagaaaaagaaaaaaaaaaagtaaaaacatgtggatggatacctttcatgccccttctggttccctcatccttggaaaatctgtgtttagataagaaggcattggcctgccaaattgaccatccaaagaagtaggcaatttccccttctttggccacaaccagattttggacacagaaaagctgtcacctttactgacactactaatcttctttgcttccacatccccctcctccactgaaaccttcccatcatcaagttccattcctttggtgagccttgtgacttgacc

SEQ ID NO: 97471 - DNA, 241 bp, Glycine max
cactctacgaaccaccgtatctaaaataacaaccccacttttcttctagccaaagctgccaagggatcgaattttctcatcttttgggaaaaggatcaacaccgcagataaaagtcgaagaaagccttttgtgggttaatttggtaattaggattttgtcatgggtaacataggaagcagggggtgcaacagccgctggagacaccgaggaggcggaggcagcgggaggcggattcacccg

SEQ ID NO: 97472 - DNA, 212 bp, Glycine max
cgggtggcgcgggtgctgctcgagccgaatctggtgcagcattcaccacatattatctccacaaatcattggtggcctttgttgtctcctgaggtgttcttcaacacctttttatcataatcgccgtgcttcattggggcgcagcagcaagaatgctgggtgaggaggaccaacaacaacagttgctgctacaataccacagaggtcctctt

SEQ ID NO: 97473 - DNA, 157 bp, Glycine max
cagagatactgtggtgccagattggctggattatagttctgttctgaaatggtttataggtctttcgtttttggctgtccctttatcttcttgcacatttggtgaaggatggtgttggaaagtattgctaatagcaaaattaaattattcggatgtt

SEQ ID NO: 97474 - DNA, 427 bp, Glycine max
attcttcaaaattcttttactatgtaacaccccccccccccccaccccccccggaaaaaaaaacctttgctttttctctcttcctctgcacccatcccgaattttgattggtaaggttgttccacatggtgttccactcaacacttttcagcgaaaattccatccggggtttttgtggatccgacccagatcctgtttctttctgatccagctatattgtcaagggattcagttagtgcacttgcttggctaagttgctaattgagggtgctgctttgtatgatttgaagagtttcagtaaggagtgtgttctgacataaaaaacttttgttgagccaattttaagctatgatcaagcagatattgaataggctccctcggaagccctccaaatcgggggaaagttgtgaaggaggggcaatattga

SEQ ID NO: 97475 - DNA, 429 bp, Glycine max
gtatggcacaaaccacatgagcctaggccttggtgctcaacttcagaaccaccaaatctcagccactaacagcatattgagccttggaagcgaaccaaagtttgagcacttgatctcaccaaatctgcaccactcatcatcatcatcatttggagtgcaatcaccccagtcatcatcgttcttcatgactgatccaaaccatgcatttcaagacctccaatctcagaaccaaggacacttattctcaaacaagcaacttcatggtctcatgcaactccctgatcttcaaggaaacaccaataacaactccactacttctgcttcatcattgtctgcttcagctaataacaccaatctcttcaacctaagcttcttccctaacaccaacaccagtggcagcataatcaatgatcaattcagcaacataag

SEQ ID NO: 97476 - DNA, 392 bp, Glycine max
aattggcaaagtatgcccatgttaattaaaaagtgacatacttcagttcagaaatttacttgaacttcaacgcaatgtgaactccaatcacatcattgcacattgtcagagttgctaagcataaacacagtaccacagtggtcataaacaacacattctggggtcattagacttataagtcactttttccagcttatgcaaataatccatttcactgaggttcctcggtactagtggaggcttcagaacgccttctctttgcttcattgtcacccagctgcagtgaaacacacaaatcttcatcacagttattcctcaatgaagacaagttctctgttgcagttctgtcctgtatgctgtttttgtgcaacggagaccgcccaatgaagctc

SEQ ID NO: 97477 - DNA, 340 bp, Glycine max
cacatctatttcacaagtatgacagattcttgtaaataactacactggtttacgagatacaaagtgacctcatcaatgtcatcaaggtgacaaatttgcaagactaattacatgatcaccaatcctgcagatatacatgattgacttttatttcagacctacgtaccttgttaatcagggaatttgctcctcctggagaataatggcaaaaatacaaattacaaggtttttttagggagatcacaaagtgtccctaataagatatgtatatatatatatatatatatatggacggtgctgattccgataatgactaactagctggcagccaaatgggatc

SEQ ID NO: 97478 - DNA, 361 bp, Glycine max
gtctttctgtagcccttattttagaacttagtggttttggttttgtatatttgaagagcggggattgtgtgtatcggtgttgtgctgcaatcaatgcactcttccgaaagacttccctgcaatattattttgagaaagtgggcagttgtgtttcatctttttttgaaaatcacaacaatcattttccctacatctctgtctttttaatccctctccctctctttcattttactttttttaaaaaaataaaaataaaaaaactcgcattaattctggtaacttacgatatagtcctgtactgttgccattttgtggatgttttattttcaaaatgaaattaaccaatgtcagcgcaactaga

SEQ ID NO: 97479 - DNA, 413 bp, Glycine max
aacaatcggtcaaaaaccttagttgagatactcttttaatcagtacacaaactattaatgctgtcatttgattcctctctttctttgcctgtgtaccttgttatagtctttgttaaaattttcttgtattaacacttaatttttttattaattttaatattattctttttttgtacatatatatacaaactaattaagttaatagatcaattatattaaaaaataattaatattattatatataattaaaaattttaatgtatatttaatacatataaatttatttaatgaactttataataattaatgttaatttaataatgtattttttatataataaaaatttatatatgatcaaaattaattaatataaaacttatgtatgtgttaataattgatttattagtttattc

SEQ ID NO: 97480 - DNA, 463 bp, Glycine max
tttggttgttatatacataaaattttatttgttgtttgagttttgatttgaactatattttttttccaatgcttaagcacggttggtttcacaatgcaaatgattactaagtattcaattcttttaggatcggtgaatggtaatgatatcaatgtccgagtcttctgaaatctgaattaatagaatttagttgtggtctttatgatattaataaacctgctatgcgcttttatatatgcaccttagatatacatgctgctgaattgaattctaacttggaaagtatccgagtgataactgacatcttgcatcgttacaattatgcttattgttgagttcttagagccattaggaacactggaaaaaaaaacccagtgagccaacctcatttgaaggcttgttataattattcatcacccaaacttgttttctcttttaaacaagaaaatagattgcatgacag

SEQ ID NO: 97481 - DNA, 505 bp, Glycine max
caacacaatattcaatatttgaagttacttgaaaagttggtcaaaagagtcaaacattatgattttaaaatcttacaatttcaataacatcctgctcataaacaagtaaactacgtgctccatcaatgcttacaacattgtgacaacaaaccaggaaaaaaaaaacctccgactgatgattcggcgaatccacggttattgcaatccatatagctgttgagtagagaaccacaaccgaatatcttgcctcacaatgatcctccaatccttggaacatcgaataatgtaagttgatagctatttcaaatgaggataaaaaaatcactagaaccacgctaccaatgtccagtttcattttattaaataccattttcaaattgaggaaatgaaacaatcaagaaaaataactttaaaaagcataacatttaacccttgaacctcaaaataagcaccacagcacaccacgccatgccatggatcaactttgaataaatcgaaaaaaaga

SEQ ID NO: 97482 - DNA, 320 bp, Glycine max
gtaaaataatgttattttagatgctgaaaataaatattcatacatcttcacatatggattactaatttactggttacattggattgcatggtctcagaataaataaatcccatttgattgagtgttgtgtagtctttttgttttacaaacctcgtcaattgattcaaaaatgataattttgaaccaattaaatgacattgacaacacttttatttttaaatggaaaataagattcttttatttgtaagagaagcaaaagtgcaaaactactataaaaaaaattataaattgtccttggtctttcagagttcgtccttgac

SEQ ID NO: 97483 - DNA, 263 bp, Glycine max
aaacaattggaaaggaacctttctttcccaaattaaatcccttggtttaaaggggaaggtttgtttacatataaaaatgttccccccaacaaagtttttgggcgggaaaaagttccccacccccccaaatttttttttaaaaaaaaaaaattttttttttcaatttttttaaaacgttaaaaactttttttttcaagtcctttgcgggtcccattagcaacagattttgaggggggggccttcccggtttttttttttttttt

SEQ ID NO: 97484 - DNA, 425 bp, Glycine max
tagtgatgattccaagaaaactcgaaggactcggaaaaaaggtgcatctagttctgctggcctggaagaaaagaaggaagtcaaggaagagaaaaaggttagaagacgaaagaaaactgaagaggagaaattaattgtagaggataaaggtagtgaagctgaaatcagtgaccaagatgagccttcatttcttgaaaatgtggaggacgatagtgacagtggcttggaactgataaaagatgatggagaggacattagctttacttatggatggcctcctcttgtttgttgctttggagctgtgcagcatgcttttgtgccttcagggagacccgccaataggcttataaatcatgaaatccatgaaagcatgaaggatgccttatggagccctgaaaatttgttagggctccagggggctctgc

SEQ ID NO: 97485 - DNA, 215 bp, Glycine max
cggctcgagcgcgagcggcgccctttttttttttttttttaaatgtaaagtgggggaattgagcttggattataatgcgaatgccattaataaaaaaaagaatgggaaatacaacagcctaaggtaatataacctctagaaatggaacacacagaaagaaacaaacaaataaaacactcagttttctatacaagggatgaagactttcactgtga

SEQ ID NO: 97486 - DNA, 249 bp, Glycine max
gctaaacttaaacaagattataagcttaatcataaatccaaaacctcaacacaattgggattgctgcaagtatccgtatgcatgccccaagagacacttggatctatataaaacagggatcctacatgattgttgagtgagtggatgtctaccaacaaaaatcctgacagcttataaaaagaatgtaaattgaactcttacgctagctgttcacgagtttgcattatttggcatcatttttgctgacat

SEQ ID NO: 97487 - DNA, 492 bp, Glycine max
cttcttcctctctttctctacacaaacaaacttattattctctctctcttaagcagccaatacatactcacacacacacagtaacatgcaactgtgcaaatcattgggtttctctgcacaaaaccaccccaccccaattcatttcacatcataaattcacctcctttctccactctccatactcaatttgaaagttcgcgtctttctggattttcgctgcgttttaccatctggggttgccgcccgatcatgcctccggcgctgtcggatccgctgtcggtgactccggcaagctccgacgctgttctgcagcgatcggcgccgccggagaatcggcgattcggtgatcttagagggttgcagtggcggataaatcttggggtgctgccgtcttcgtcttcgacttcaattgatgatcttcgtcgagtcaccgcgaattgtagaagaaggtatgctagcttgagaaggcgccttctggttgaaccacatgtt

SEQ ID NO: 97488 - DNA, 342 bp, Glycine max
cctcgaatgacatgaaatttgaccattagaatgattgtattttacataacctgttttcccaccgcattgcagagatgaacagctcacaaatacatacaatgtagaatggaattttatttggaatatcaatgcacaacagaaaaaggatcgtgtcactccagcagggtagacaatcagacacagtggcgagacttgtttactcctgaatttgaacaggctcaaaacccctctggatagaagccttcacagcatccaataccagctgtgttttgctagtaattgttggccacttcttgtcaggcttagagtttttgaatttgatttctgcgaccaaccgggcaa

SEQ ID NO: 97489 - DNA, 402 bp, Glycine max
cctccttccctctctctccgttttttttttactcatttttatattttatctatttcgtcttaacgaccacagtccacagaccaaaaacacgaagccttctcacacataccataacagaaccatatatctatctctctgttctgtcaaaacctctcgtagctaccttcaacaataactcacggtcatggcttgtcacagttggctctgtaatatctcactgctgttgctgctgctgagtttagcttcgcagagttgccacgctctcaattccttcggcttcgacatccaccaccgtttctccgatccggtgaaggagattctcggcgttcatgacttacccgacaagggaactcgcctgtactatgttgttatggcccacagagaccgaatattccggggccg

SEQ ID NO: 97490 - DNA, 392 bp, Glycine max
ttgctgtacttaatttgctgaaattgaaagaaagaagaagaagaaaaaaattaaattatagcacaattgtaggaaaatggctacaacgcaatcctacgaagatttggaagcgaaatatgaaacagaggaaacgtctgaatcagtcatcttggttgttcacatgcctgatggttttgcaagagagcatattggagctaaaattgagtacgattttggaagggtgagagttcacggtgaaagatcacttggaaacaatagaagggcacgtttcaatgcattatatcaagttccagaatattgtgacatcaacaaaattaaggggaagtttgatggcaaaactgtcatcattacaattccaacgattccagggaaagtacctaagaaagaaacac

SEQ ID NO: 97491 - DNA, 467 bp, Glycine max
gtttggcccagctgcctgcatgacattagagttagccgaatttgggaagccatttatcatttccattataaatggttatgacatagtgcctacattgtcagcttcttctgttcatgatttcgtttctgagggtcgcgatcggaataatgatcaaatcattccaattgccaaagccattgcaaaacatgcagtaacccactgcaccgagggtgtgaagaagtaccaacacagaactcacgcgttgcttccatggcaccgacgtgagaataaattagataacatggctgaattagcttctggatcatctcatgagacaaattttgaatctctcttgactgaagagcaattaatcatggagtctatgtcagatgatgaggaatataattcttctagtgaaggatctgatgttgatgacgacgaagatcaattgtggaatcaagtggggaagcttaaactaggaaaagaag

SEQ ID NO: 97492 - DNA, 426 bp, Glycine max
gtcgaatagaaacacctcaccttccatccctccgtttcgtgacgcttttttggcggttttggcctttttcggtttcgaacattcgcacgaatttctctctcactctctctgtcttcaattcaacacttcgaggttccatcttcgacctagttctcactacttctctccctgctttctgctgcagattagatcttaatattctctgtgttcgtttttttttacttaattcagttctctctgtcactgtttaatttctgagcttagcatcgtatagttcggatcgatgaatgaacgaggttcgggttttcaattttcacggctcatttcttaatctctattttctcggttacttcgctcacgttgtcttaagtagctcgattttactgttaaaaaaaactaaagcagaagattgcgggcgagaataat

SEQ ID NO: 97493 - DNA, 428 bp, Glycine max
cttcagtttcttatatatgcaagagcacaccacttacttgatcttctgtttctctctgttgttataaatttatgtccctttctcattattcttttattcttcatttaaacaagaaagaccagttcaatccctcttttacctttctttaagcagattttgatatttatatcccccaccctactctgttttattactatatgatacccatttctaatttgtttcatacatattatttaatttaactatgatagttggtgcagattattgcatagtatatatctcagttacaatataatttggcatctcttcttctcctagcttagcttcattttttttcaagagaaactaaacacttcacagaaaatgaaaaaaataaaataataatcaagctaaacatgctttagtaactcattaaaatctgtctagtg

SEQ ID NO: 97494 - DNA, 348 bp, Glycine max
atgtgacatgttgagctagcaatgattagaggactgcatttggtgtaaaaagtgagaaacagaagcgtggcagcgattgaagtgaagaaaataatggctcgatgtgtgggaatctctaatcatgcgtgctctttttttaagctttttgggtattagaggcttagctttttttatataagcttggaatcttgaaaaggtttggttgttttagtagaggccgggggatgatttgcattttgataatcggatcggtggaggtgagattgatagctgttgaaagttgtaaattaaactgtttatcagttttgttatcgttattcaatacaatgtatggaattttgttatgtg

SEQ ID NO: 97495 - DNA, 321 bp, Glycine max
cttttgtggctagctgcagccaaattccgggaaactataatttctgagacgttacaaatgatttactatatttaaaagattcttgggaatgtacggctgaaacttcaaagaatcaacacccaagattctttacccattgtaaattttttgttataggcttcttttttcccccttcctcaaatatgttgcaattatttttccattatcttcttttttctttctagtcaatgccggaggcctaagtcttccacttgtaatttttgtatcaggcaaatgaaaagaaaatgcaaacgaaagcagcaaagtatttcttccacattt

SEQ ID NO: 97496 - DNA, 177 bp, Glycine max
gcccaaacccttggcggctgcgagacccgttgtgttctctcttctctctcttttttttctctttccctctcttcttcgccgctctttttagggttttctcaactcttcgatttggggcttaaaccctcgcttccgattcaggttcggatttagggcttccgtttctcgattctgcct

SEQ ID NO: 97497 - DNA, 312 bp, Glycine max
gagaatctgatctggatcacgaaattcggtattcgaaacctacgttttttgttttttgttttttttttctaatttacgttatttatttttaattttgtaaattttcctagggcttgaataggcttcctgtttctctagctgtgaaatgattggatcttcttcttgctgttgaaggaagtcgcatttggcctttccctgaaaatcgatgactgcattcatttattattttattcattcattatattattacacttttttgcttaaatttcctaaacaaacaacggttgcatttcagcaatttctattatcaca

SEQ ID NO: 97498 - DNA, 357 bp, Glycine max
ttttttttttttttttttttttttttttttttttttttttttttttggacccaacactgaagggaattattttatatatacctatttggggccaaaatgttgctcgaaaagacaattttttatgggtggcctaaatgggggggcttgccttttctttttaacagttttgaatttaaacccagcttttggaaaaagaccttttaacacactaatttggttttttaaaccaccttccatctgatctcaacatgcattactccattccttgaatttattagagggtacttatagttaatgccaccattgggcaccacatctcttaggataatttccacatgccccaatgatttctttggc

SEQ ID NO: 97499 - DNA, 105 bp, Glycine max
caaacaactaatttcatgccaaatttcaaaagaccaatatcatagagtgcgttttaaaatccaaattgaaaattgttttagctataaaataaaaattgaacttta

SEQ ID NO: 97500 - DNA, 233 bp, Glycine max
ggaagacaaaaaccagtttattttacatattgggaacggtacataaacccttcaggatgaaagggcattgccataaaaactttctacaaacaaaaaagtccaaacctttttgggcggcctccatataaaaaaccccccctattagatttaagccccccttagttttccaaaggccatttttaggggccctcaaagaagttgaccccaggggttttaaaccaaaaattgccttg

SEQ ID NO: 97501 - DNA, 221 bp, Glycine max
ggacgtgcaaagaaaaaattgttttttaactcaggatttaatctgaagcatttacccccctggttaccaaattacaagtttccttcccttccccctcattgcatttttgcaagggaaggcacgtcatattttggttttgacccatgtttttcataaaaaccctgttgtttttcgagaaaaaaattttataaaaacaacttttaagagacctaatcaaaact

SEQ ID NO: 97502 - DNA, 375 bp, Glycine max
ggaagcaaaatgcaaaatgagcaaatttattcatgccgaaattttccatcctctgatacaaacaaaaaaatttgcttgtgcaaaaaagagacaatccccttttccataattattaataaaaaggatttgttaaaaccacaaacattcttcatatttacatttcaaagtaaaccaaacaggtaattaatgtgagcagcaagagcctgcaccaaaaaaagagccaactcttatgctatacttcaattcccaagcataacaaatgaatgacctacttgatgacattttttttaatttgccggcaggaatcgaagacagataccaggggatttaaacaactcacgcatgatacttaactaactgagctagtcccctgag

SEQ ID NO: 97503 - DNA, 270 bp, Glycine max
ccactctccattcaaaaaccaaaacaaaaaaatcatggctttctcaatggctatgcattaccctgtctctctcttacaactctgcatgcttctgctttcattcttatttatcttctacatatccacttgcttcatggccaaactcaaccctaccaccgactcactctaactctatttccctctcacctcgatccctctatccacagcaaaacctctaaatactaacccgaaactcataaccctttcatcttcttcttcatataacataaa

SEQ ID NO: 97504 - DNA, 441 bp, Glycine max
gacaaaagcaggaagccgaagagtcgtctaaatatcatctggttttatgattttcttctctatgtttggtatggtagaccaatatgatcttataccattcataatttcagagtcttggtagtatattagtgttggagattcaacatagagttgtaatatgccccaaaatagtgtataggagaagggtgtaactttcaccttatgagctagatgtttaggttgagttagtctgtctaatatgataggattagaaactaatgttcatgaaccaatgattagaattattcacgaaccattgttggctgtcttatactatttataatttcagagtcttggtaccatcgcaactctcaccttatgggttgagttagtttgtccaatatgataggataacaaactattttcatgaacaaatgaatatcttttcttttattaataaat

SEQ ID NO: 97505 - DNA, 85 bp, Glycine max
aaaaaaaaaaaaaaaaaaaaaaaaaaaaaaaaaaaaaaaaaaaaaaaaaaaaaaaaaaaaaaaaaaaaaaaaaaaaaaaaaaaag

SEQ ID NO: 97506 - DNA, 282 bp, Glycine max
cccacaaaacgagggcccttttttttttaaaagttggccccgaatggggaaaaaggaaaaaacctccttcccacttttttcaacccactgggaatgggcctcacattttaaataaaaggcttttaaattttccaatcaagggatcccaaaaggcaggctgttcctagttcccgtttttaaaaatcaacagaagggtttttttttatctattaccctatctggcttttcccccctattgggcagccaacatttgggggggcgggagtccttttttggggcaat

SEQ ID NO: 97507 - DNA, 413 bp, Glycine max
catatatatgtttttgcttattattcaacatcatcaacaaatcacacacacacacaaacacagagtgatatatatctccggagagaagaagaaacaaagagattcatttttagttactattatttttattataaattaaataataataataacaatgccttcttctcttcagttggataggttcaatcctatcaccgacgccgtcaccaccgccaccgtcgccatcgccaactgcgttaactgcccgaagcagcctcaagcgccgccgtccactgcggcgcgtcgcctaatggtgccctctctctcttctggcaggggaatcgcggcctccgacacggtggcgctccaccactcgaacgtggttgggctcaaccagtgctgctccgtggtgacgcagcacatcaacgcccccg

SEQ ID NO: 97508 - DNA, 119 bp, Glycine max
ctggtggagctcgagccgatcgagccgtgccaagaaaatctggagctatggccctgagaccctggtacccaacatggggcttgatatgggcaagggactgcatattttgaatgaaatga

SEQ ID NO: 97509 - DNA, 402 bp, Glycine max
gccggtgaagaatcgtgcgattcgtctggaaatcgcgattcaagcacgattcaggaacaaaaacgagacaacctcggattcgtatcgaatcgtgcgatacgtatcgtgaatcgtacgatactaactaccatgcttaaatgtataaatgtgtacatgaagcaaatgaagattgtttcagttgcagttaggtcaatcagtgctaatttgccaaaccagtttcatcagagccacttgctcagaagtctttccacttggaaatttacagataatgcaactggtaatcggcagtttaacaattcagaatctcctgaggagtctgagcagtttggtggaaatcgtgggaaatatgcccaacttgattccatatttgaaaagtttaatcaacagggaatggcaagacaa

SEQ ID NO: 97510 - DNA, 466 bp, Glycine max
aagtgatagatgttcatttatcattgcttatcaacaaatttgtgtcaatcaaactattggtattgcctaacaatctgtgaagaccatagcccaacaccagaaacctccctagggcttatggcacttatactacattacatatctgtagaacaagggacaacagaacatcttttggatatatgaatgaattatatccaaatgcaataaactaaatcaatctgtacaaaataacaaaacccttggtctctaaagactatctttgtcttcctatattcatcttctgtatcttttcacttctcttctttacagagtaattccagcttctaaacctttagaaatcatgaaccagtgtatacagatcataaatcaaagcttgatgacatcttgccctttcctcagtcattttatctgaggttgcagagaagttcaacaacggaaccagtcaactacctcaaagaagcttatt

SEQ ID NO: 97511 - DNA, 450 bp, Glycine max
catatagttaattcaaacacaccaaaaccttccttcttagtagaaaaagtacgcttaaacactaggggtgggatttaaccatatcacattagaatacatacatctactacttttctacaaattcaactattaattttctcccactataaatcattcttgaataacttctaactccaaaggtcgtcttgtaactcttgtgtgtccactagtaatagttgaagtggttgagtggaatggattaggaggcacatttaactggctttcccctccagtctctagcatttgtatgacagattttatacatggacgattcaccggctgccattgaatgcaccaaagtccaacaattgctaatttctttgcaattttaatatcaccttcgtcctcaacatggatatgaacatctccatcaacaggttatggatccaatctggatacaaaacatggaaa

SEQ ID NO: 97512 - DNA, 290 bp, Glycine max
gggaaaaagactggccgttcttaacatatggtctttcattaatataaaatgaatcaaacttggtccattgccaaacttttactattttttatgaattacatttactagaatggcactatgtgggttattcaaaagaagaaagcatgtccacccaaatattacaaatgagtggatattaaaaccaaaactctgcctgtgtttcttatacagaaagattggtttcagaatgaacttgattgaaattgcaagagctcccgctcagctaaaacttttggaactgttgactttaa

SEQ ID NO: 97513 - DNA, 290 bp, Glycine max
aaaaaagaagagccttttttttcctttttttaagattaaccaaaataaaatcccataattttttgggaaaaaaaattccttgccaaaatgatttttttaaacaacaaacaaaagggccccccgcttttgagggctttggcccattggggagaacaccctaattaaaaccccccaaataagggggaaaaaaccccttgccccccctacttttttttaaaacccctttcttaaacctatccaactgtttaacccattttttgggaaaaaagggctcttttgggggggggggc

SEQ ID NO: 97514 - DNA, 489 bp, Glycine max
agctatcatctctaaatgcgctacaaaatctgtctaccatgaaagaaaatgtgcaacacttgatcagttctggaattgcaggatctctgctacaacttcttttctcagtaacatctgtgctcatgactttgcgcgagcctgcatcggctattcttgcaagaattgctcagtcagaatccatccttgttaatgaagatgtggctcagcagatgctttcacttttgaatctttctagccctataattcaaggtcatctgttagaagctctaaataacatagcctctcatcctggtgcatccaaggtgagaagcaaaatgaaggaaaaaggtgcacttcagctgctcttgccctttctgaaggaaaacaccaccaaagtcaggagtaaggtcttgcaattgctatacactctctcaaaagatctaacagatgagttgactgaacatcttgatgaaactcatcttttcaacattgtcaatattgtctcaacat

SEQ ID NO: 97515 - DNA, 367 bp, Glycine max
aattctgcacctgcccaacttttgtattgatatcatttttttatttcctctatattttccatatttatatattaattctatcactttcctgcaccccaataagtcatgctccaaatattattgttttggataagtatattgcacaatctattcttggcttcttcatgaccatgacacggcaatggagacgaacgataatgaaaggcgcgtaaatcatttgaaaggttgaattatgtaccaaatgctattatattagcatttcatacgtcattctaacaataatgagaacgagttgccccacaattgatcaatatttgtatccttgcacggcacaaacttgttagatatggccccaacttcgtcaccc

SEQ ID NO: 97516 - DNA, 372 bp, Glycine max
ttttattttttttattttttttttttttttttatttatgctcgatttatgggcttagtctatacaatcttgtatttttattgaattgtgcgattacgtattcgtgaatcgttcgatactaactaccatgcttaaatgtataaatgtgtacatgaagcaaatgaagattgtttcagttgcagctaggacaatgagtgctaatttgccaaaccagtttcatcagagccacttgctcataaggctttccacttggaaatttacagataatgcaactggtaatcggcagcttaacaattcagaatcttctgaggagtctgagcagcttggtggaaatcgagggaaatatgcccaacttgatttcatattagaaaag

SEQ ID NO: 97517 - DNA, 450 bp, Glycine max
catcaggaatgttatttattttatttattttgaaaaagaaaagaaaaacaatttagctccaaactattgtagtttcaaagtccagaatatcctatttcaataaatatctggaaaaaaatctgtcccgtgattggggaaaaaggtacactatccgttcctccaatgcatattacattcagccctgcaaggacactcaataaaaaaaaaaaatccatgttataggcatattccgttacaataattcaacctaaaataaccagtggttgaacacaaagccaggggaaaattcctttccttcaacaaggtatatagactgaatcatttatgttctcactatctggagaatcatgagacccctgctgttcatgtatcagtaccacttagttaacttgcattactggccatctcttgtttgattagtttttgaatcagaatcatgttcatcatcat

SEQ ID NO: 97518 - DNA, 183 bp, Glycine max
cattcacgtcttgcgttctgagacagcttaaattgggtgccacctcacactctcatcaccatattccaccacttattatgttcctgcactctcgaggaaatccgcccttattgaccacaattgctcgcccactgatgtcatgtaagggctatctgttcgaatgggggctgctcattgaaacgc

SEQ ID NO: 97519 - DNA, 267 bp, Glycine max
gggggagaggaaaaatgcttttaattgggaattacaatgaaaaagtccctctattctaaaaaaaaagacttaaccttctttaactctgctggggggagcacaagaaattctgctgttttttgcgagagcctgatcttccagcaaaggtggaaattaaaattacattgggaccttctttttccaacacacattcaacaaccatgccattagggggctttttttagttgacagaccccccatgggtttgcttttcttatcaaaaaacat

SEQ ID NO: 97520 - DNA, 129 bp, Glycine max
aaaactaactgcaaatatttataaatttaaattacaagtcccattttcctaatatatagggacacatcatggatgggtatacatgaatagctaaaacaccacaggtaaaacattagtgctcaccatgac

SEQ ID NO: 97521 - DNA, 271 bp, Glycine max
tttctttttttttttttttttttttttttttttttttttttttttttttttttttttggtgtttgttttttttccaacaaaaacgggaaggaattcctttttattatccccggtcccttaatggcccaaccatttgaggccctccccttttcacagaaaaaaataaaccggggggaaggcccccccacaaagggtctagtccgtaaaaccttgatttaaaacaaaaacaattcccccaaatccaaaaaaaaaaaaaaaaaagaaggggggg

SEQ ID NO: 97522 - DNA, 322 bp, Glycine max
aatattgaaatttaacttctatatttcggggcggttatacaacacatgaaaaaggagggaggaaatctgccccctttcaatggtcaaaataaataaatgtccgatcctctaacccaatatttacctcacaaaaaaaaaaaaaaaaaaagattgacacatcgcgctcttcacataccaaatctcacttttcaaacgaattgactaggcaaagaaaaaaaaaaaaaaaagagacctctgaagataaaatacagagccactttcatcatgatccacctaccaacaggtaccgggggtaaaaacacgctcaaaacatgacaactag

SEQ ID NO: 97523 - DNA, 372 bp, Glycine max
tttgaattcaagcgatggagtcttggttcattcgaatccgaagatacgaaacgcttccaacaacggctaaagacttcgagtctcgttggaaggccttctcccactgaatccatccaacggtggcctcgactacttgcaggcacgtgtggactcttgcacggtggaggctatgctatctcaatctgcaccctttttttatggttcctcttccattttctaccttccttgatctttgtaagaagcggatgcagatgtaaagtaagcaccaacaatgccttgatcattgtcctgcctcacatacacaaactcatgatgatacacaacatgcttatttggccttggaggatgttcccgaacaaatttatttagcac

SEQ ID NO: 97524 - DNA, 122 bp, Glycine max
aataaattatggtgtgttgtgtatgttgtgcaagacctggaacttcacctttctacgtacgtgtgctgttaggatgcagtgtgctttgatgatgctttgatgaatatgcagtgtgctttttt

SEQ ID NO: 97525 - DNA, 233 bp, Glycine max
tttttttttttttttttttttttattttttttttctttaaattatagggtcaggactgaggatttagaatcttttcacaaataacggggctttaacggttatacagaagaatcagtgatcttaaagagttaatggaaaataaagacttttgctatggggaagatttaaaatttaaagctataaattatgctttccatttgggataaaaaccaagcttacgtgatacaatgaac

SEQ ID NO: 97526 - DNA, 273 bp, Glycine max
ggggccggggcaaatcattcaaaaagaaaaatttccaggcatggaccttttacaacatcatgagtctaatggctttgacatttctctgacactagagaacattggccttacaagatccgactcgaattgaagggggatttccagtccaaaattcaatttaacccttgacaccataccaaaaaagttccccccgatctggcttgcctaggacgctttccatttcagacccaaaagatcccaaaacaattttaaaattaaacttaatgcaagtta

SEQ ID NO: 97527 - DNA, 210 bp, Glycine max
caacttgaaaaccaactaacatgtgtatgtcatgtgtcaaacatgcaatacatttcaaaaatcacacaactaccacttcactcccacgaagaaaacaaggcacacgcaacacaactagacagaaatttccaaaccaaaaccaagaccaaggatttaaaactattttcctaacaattcccactaaaacattcccattggctagccaactga

SEQ ID NO: 97528 - DNA, 392 bp, Glycine max
aaaacaagtaaaaaaaattgcaataatgttaatattggaagaggttaatcaagaaataaggaaacagacatgtctccatctctaaattgatcttgatcactagccattaccatattggtaaagttctttcatacaattacaaacaaagaaaagaaaaacttagggtatgtttgcttctcttctcagtttttatttttttatttaacaaactgtgttttgaaacaattctacttaacctatcaatcaatttatcatctaaagtcacttaagctttgacacttattttccaaattccataccaaatgttttaaaaactaaaaaacagaaacagacaggagatgcttctttcccttttcatttctcaatggcaagcagatggagagaaaagaact

SEQ ID NO: 97529 - DNA, 131 bp, Glycine max
ggggaaaagaaacgcagatttaacactggtggaaaggttaaacgcaccggtgattaaccaataaccatccttttataagctgccctggctttgttttttacaaaaacttctgggggggctcaaaagggggg

SEQ ID NO: 97530 - DNA, 370 bp, Glycine max
cacaggaagccaaagcaatcctcaaaacggtgcgtttcgctcctctctctaaaaacaacatactaactcctctttctctctcttaaactttctcccactaaaacacactatctatatggaggcgccggaatacttcgtcggaggctattttggcgccggaggagccgaacagttctctctgtcggaaaagcgccactccgaccagaaaactggcgagcctttcgccattgacgacctcctcgacttctcccatgcggatgccattatgtccgacggtttcttcgacaatgtcaccggaaactccactgactcctccactgtcaccgccgtcgacagctgcaactcctcaatttccggcagcgacaaccac

SEQ ID NO: 97531 - DNA, 313 bp, Glycine max
agcatatgggggacggcaattactagggttaataaaatctatttcaaaatattcacgagatactagattgggtttaaatgaaaaacttgcataacttgagcaagaggccccaacacatgaaaaataccaaattaatccccccgtgatatttgaaatagggaagtgcttttaaatgatgcccccaaaagaaaagaaacaacactggccccagtttattgccactaggacactgttgtttgagacttatgaataatagaagttctaaaacaatgggcacaactcaaggtcaattttctgacttgcttttttttgc

SEQ ID NO: 97532 - DNA, 332 bp, Glycine max
atggagaatgagaagtttctatacaaataacaagacaatcggggttacgtgacaagttatgggataattcacaccttctcactggccactctgatcacttcactagaagaaatgatatattttcaagcaccaactgtgttagaaactacaactatcaggttaaagcctagaaattatttccataaatatcttgaacatcttgcttacataccaaacgacacccacacctcactattcccaatgattggcaacaataacttttttgtacaaattcaacttcactgccatcaccaccctcataaatcatgtcacggtatttatcaatggacaaa

SEQ ID NO: 97533 - DNA, 243 bp, Glycine max
aaaaaaatgggactcaatcctccttaataaccctggggggggaaataaaaaaaaacccggggtttattttccctcctaaacaaaaatacttttttgttcaagagctccccaaaaagaaaaaccccaatttaactcccaaaaagcaaattccttttaaatactttgacaaactagcccccccacacacaaatcctgaaaaatttatattttggttggatacatgaatactttaacccttgcccc

SEQ ID NO: 97534 - DNA, 423 bp, Glycine max
gaaaacacacctttttttattttggaaaaagaaaaaaaacgaaagcatattcagcaggcaccccgaatcagcaaattaccctcgccgatcctttttatttacacataataataattaccagtagtaacgtgacccaacaaacttagcatcatattcatgcaccatcgatcacgcaacgaggagagaaagagaagtaggtttaacagcatcaccggaggcgcagaagtcgccggagattgttggttgctccgtcatcaacgccaccagcggcggtttcggcgttgcaaccgagtttggatctcaaagagaactttggcagcggcaaactactgggtggcggagccagattgaaaaccgcccccgaaacgacgtcgtggtggttgtttcccatccctagcaccactttgggaaggtctttgggat

SEQ ID NO: 97535 - DNA, 215 bp, Glycine max
ggattctcatgaataactatcacatcaaagtgttgttggtgtcgcaacatcagcattaaaagcatacctaatcagccaactcaaattctacaagaacaggaagctggtaaacctctgaaaacaatgctggtcccggtagaaagtcaacaattacagacacaacaaacaacggaaagcaaagccaacaactaggaatccatcacattacaatgttg

SEQ ID NO: 97536 - DNA, 361 bp, Glycine max
aacattaaaaagttataaaatgcggcacagtaaaccttgggactgagcactatacctcaacttcctaattagtttttcttttctttttttcacaaagggctccctaatatttagtctagataatcaggtaccaattccatttctttacagccaagaaaggataagctggggggattgaattaagcagcattacttcaaaccagtgaagaaagcaacctatgcaagaggcttgagtttcaatcggagcaaatgaaatccatagggagcacctcagtatcacaaacccaaaacttagtaacatcttttaatacaagtatacaacagcgatcccccaacataattccaaaatgttcttgaaaac

SEQ ID NO: 97537 - DNA, 398 bp, Glycine max
aaacaaaaaaagaaggagaaatcttattatctgatgtaagcgccccacaccatttaattctaattcccccccctcaaaattacagaatgaagccattggcaatggctctattggtattgaaatgggtagtttcatacacaggcaactcttccctatacctttcaatcccaattgctgatagattatccaactcaaaaagatcagaacttgaacaactagccacatcatcatcatcttcttcttcttcttcatcttcataatgcatgacatcatcaaactccacttcactctttttctgataattcttcaacaagtctcttgctaactcctccaccctgcgactctcctgcatgacatgcagcctaagttcctcacttctgttctttccattgctctct

SEQ ID NO: 97538 - DNA, 171 bp, Glycine max
gaacccactaagaaaggactgggataaattgatagttaactaaaggatccatgccctctatcttttcaattattaattgtaaaaaaaaaattcattttcccttaaaaaaactatttgccttaatcaactaaatactgaaaactttgaggcacaccacctactgcatttaat

SEQ ID NO: 97539 - DNA, 497 bp, Glycine max
gcaattacacgagcatgagcctttctttatactttcaacagataagccttaacaaatcctagtctcatcacaagtttgttaccaggttggcacactgatttttttacaaaatcttacacttgtattaccttttttcaagataatgccagatcatagaaagaaaactttgttaatccttataaaaataagaacataaagtagcataaaaatgatgaatcaaaggcaaagaattcacacatgacaagaattatacaaattgatgaggggcagaggagcaaaatttaaagccgcagcaagcaataacagacacatcactcaggcaagatgtttgtgtatatatctccacagaactgaaacctttgcctcttttgtcttaaatcgagtgatggatgttagcagtgaatgacccgatgaacctatcaacttaatgaaactccaatttacataatcgcacaggaacaagttctgtcatttccactatcaaattcatcatctga

SEQ ID NO: 97540 - DNA, 262 bp, Glycine max
cagcagtactagttgttattagtgttaaatttcacggttcttcaacaggtatacaagatacagagagtacctgagagaggatattacatttttgctctctaccgacaagtattataacaatacaaaattagtaacacgagctgaaacttctctttgcagtgttctccctgttctataaatcactttctcttccagaaaacattgctaaattgggtaggtgtgtgcatactattggtttaatgtcttgtgatatgcaacagat

SEQ ID NO: 97541 - DNA, 453 bp, Glycine max
gaacatggaaacatctgtgattgtacatatatagttttaatgaacgtgataaattattatataaataaggtttgaaataattgttagacatgattttgtttgatgggattgttattgggataatgattacaaatattcatactattgacaaatagtatgatatataatttctatacaattaatatgattaatgatttaaggagaatgaattgattttgcttggaaatatgttaggagaaattaatttgttatatatcaggttgaagattctttatataagataagttttatttaaaatgttagcgaagtataattcatgtatttatcaacaataattgtttttaaaatttttacaaaattctttaaaatcttaaaaattcataatatttgttcaaatattataaattcattaaaatataaactacaaaatcctaatcataaaaatcttaaaaa

SEQ ID NO: 97542 - DNA, 252 bp, Glycine max
atgaggttagaatacactgacgcgttccgtgtgagtaagattataatagcaaacaaagttacaacccattttattgataaatgagagaacacatgtctcagattatacaaaacaatgtatcccagtaggggtcacgaatgaatagattgaacccttcagactaaggaagctcaatagtagcaaatgattaaacaaggacaattggcaaacaagcaaaaaatagcaaatgggaaatcgaccgaatatagaatc

SEQ ID NO: 97543 - DNA, 357 bp, Glycine max
gcaaaactcttcttaataagtaattcaatctgtacaggatgggcgggtgacctacatacaatttaccatctcaacttcaccaccaacccacagtaaacacagggctggatacttctggaagacgtgggaagcaacaatacaactctatataaactaaatttaccaaattgcattcggagtttacgttactaaatagaaaggaaccacccctccaagaccacacaccagacagtaaaatctgtctgttgcaaccactcatcttaggtgagagtcatatgtgtcaaagagaaagtctggaatgaccaaaggcaacttatctatgtacatgaaaagccttctaagattctcccttgtcac

SEQ ID NO: 97544 - DNA, 372 bp, Glycine max
aacgaaaaatctcaagatatcttcattgaagagggaggtaaaagatcatgtctttaaattcaaatagacataattaactctaattgcagggtaggaacaaatggttctacgtaaaatttctccaccaacctgaccctgccacccaccccaattcactggcatgcgactgggttccaaaacaaatcaaaattgatctaacaattttttaacattacaaccagttcttccaatcacaaccaccatatcaatatcacagaactcgtaaaactacgcaagaaaatgccatggcaccccaagcatccaaagaaggaccctcatattttacattctgtcttctctcctccttggagcacaagtgatgatttcatcaac

SEQ ID NO: 97545 - DNA, 225 bp, Glycine max
tgtcctttttttttttttttttaacacgttttaatcggaggaaaataaaatttacacgggagggtggattggggggttacatttaggggattgaaaaaagttacacgggattggcctgaccccgctttcatagcacgagaggaagggcaggaaactctccctggaggggacaagactaattaatccttaataatgtctacataacctatttctttttggggaaac

SEQ ID NO: 97546 - DNA, 114 bp, Glycine max
atggggtccacaagcccttctctggccaaagaaccaaagacgctatagggacatggattaagaagaagataggacctggtgtgcccaacattactactgtggaagaagctgaac

SEQ ID NO: 97547 - DNA, 363 bp, Glycine max
  unsure (1)..(363): unsure at all n locations
gatctaatggaattcaatgattactgaatattgtctcgttggccgagactgagaatacctgaatggcgcatcctgtgatgcagattgagtctatacaaagaaatagacatgttaaataactgtctgactaggagtaaacacagggaaacttgaaaagggtacattaaacagctgaaggaatgaaacattatttatgttcataacataaaacacgtatccttgggtctatgatctatgtagtagaaccgcgatgctgttcataacangancagagtgcatgaataccttccttgttgaagtctctagaagttgttctgaaacccgaatttttaagcttagcataagtctcatgaaaggcacatt

SEQ ID NO: 97548 - DNA, 208 bp, Glycine max
caaaaagggaggtcttttatttaaaaattgcttcttagggaccatagcgaaaaaattgaataacctttaaagcaaacctggacagggtttttccacattttattggcaacccctaacatagggaagcttctattttctccccccctttaaacagttttccttgttttaataaaaagcttattatttccctaaacgtgcatataaaacc

SEQ ID NO: 97549 - DNA, 392 bp, Glycine max
gaaaaatttatagagagtttcatcgaataacactggatcggaactgagcgggcatgtataaatatcacggcaatgtcaaattatgatcttcctacaccggctactccttcggaaccaacggtcccccaatggacaccacctttgccaacaacatatccaccaccaacgtcttatttttcatcaacatttgatgattcatcttcatcttattccacatccacctttggcatcatcatcggagtcttggttggggtctttggacttattttgttgtcccgcatttggcacaagtatcttaagaagagatgctcaaaggaattaatcatcttctagatatatatgttgagtattaattatttcatttcaacaacataaaagtttcctttctttgg

SEQ ID NO: 97550 - DNA, 291 bp, Glycine max
gttatgaaacatatgatgagtattgaatagagtaccagagtgggtaaacattcaagtgcattttcacctataacaagattgcaagaatatagacacatttgaactaacaatttcagttgatacctagattcggatcctagtctatgacagactcgcacaatgtttataatatagtgggcttgtgaagggtaaaaaaacaagagcaatgagttgtttgctcactgacaaatgaaccagttactgtgaaacagttaaagaaggtactgtatatttggtcatctaaccatgact

SEQ ID NO: 97551 - DNA, 101 bp, Glycine max
atataaaagtagtttcactagttacacggttcttgctagttgggcagcgcttgtaacctgtaatgttggcacacacacacatggacggagatagcaatgat

SEQ ID NO: 97552 - DNA, 275 bp, Glycine max
tctctctctctttctctctccctccaggctcaaccatggcttcttccacttgctggatctctctctcccaagccctcctccgccccaccaccacctctctcccctcctcctcctcctccctccgcctcacccccactctccgccctaccccacccgccctcttcctccgccgccgcctgaccacctccatccgcgccgccgcctccgtcagaaccgtcgagaaggcaaccgcggacgccgcgctggtcgaaaaatccgtcaacacgatccgcttc

SEQ ID NO: 97553 - DNA, 267 bp, Glycine max
aggggggggagaccttaattaataaaaattataactcatcagtagcaaaaacagttcaaaacaaaaattccatgccactttgcgaaggactacccagattatttgccctaaacgatgtcctggggcccaaaacattaccttaaagggtccccgccacccattaaagcttcttaagccctataaaaatttggaaaacactaaaattaagcagcaccctttcccttttttttaggggggttttttatgtaaaactccaacttcttacct

SEQ ID NO: 97554 - DNA, 330 bp, Glycine max
ggcaacacaaaaccacaccctctggcatggccaaaaagcgcaagcccaagaagaagccccagaatcacaatgtaaaccaaagccaaaacgtggccgctttgatttggcgagtaacacactcagcagagtccttcctctcccaaaacgaccttgttctcctcccttcccaatccctccgtctcgaatccctaatctcatccatcatctcccactctccctctccgcctctctctccgccgcaccgtgactcctggttcagccgcttccgctccgtctccgattcccaatggctccacgccttccgcatgttgaagcccaccttctcccatc

SEQ ID NO: 97555 - DNA, 236 bp, Glycine max
gggaaaaaaactgaattggttttgtaaagttttttttgttaaataccttaaagaatcaatttattttaacaaaaatccttgactcaaagaaaatttattcctgtttttaatgtttggggccctcattttgctacccaatgaaccacccttttggcccatacgtttacgaaaccttggtttcaactcaatcacttgcttctgaaacctactttcccatttttaatgttcacttctaa

SEQ ID NO: 97556 - DNA, 366 bp, Glycine max
gacacaagtgagcttcgcccacacgcatgtgtatagaggggggattaaataatacaaagtcttcacaaaacatccatttgacaattctacatagcttggcaacaaagatccaaaagaaaaaatctaccactagcaaaggcaaactacacgtgatgcctctttgttgacaagctatcatgcgtgtagcttagaaaactataccaggaattatttaacagattcactcttgtgggtgagctatatcatcaacagatttcaaaaaatgggttcaacattaacaatataaggcaacactacaagaatttctatactttcctcaacgaaaggttagaactcaaaaaaattatgtgagcgagctcttaccag

SEQ ID NO: 97557 - DNA, 305 bp, Glycine max
aattacaatattacgagataaatctattatgagaacttgagacaacacaaatacattgcaaatacatcaaaatgatggaaggaaaacaacatataactacatagacagagattataatttctactatacatatttgactgtgaaaataaccatagagaccctgctaagatatccaaaaagcagcggaaagaagattaagtgatgaactcagtgtttacatcttagatcgatcttcccatcactgctcagatttggaaaatatccgtttgaaatctctcatcatacaaactccaatgaccatacct

SEQ ID NO: 97558 - DNA, 307 bp, Glycine max
tgtccttttttttttttttaaatgataatcatgttttcctttcggatcttttttggggggtgaaataacacaatcttttgagagaacacgagatagaacggacacacagcacaaactagcctaatgaaaaaaaagcatattgcctgccaagaaacatgttgaacaaggaaaatgttgagaagctacctacacgtaggacacacccacattacagaatcgcggggtaacacaatagcgatggtcttacatgcactgagtttcagatggaccaaggtacattctacatacaccttaattagccaggcct

SEQ ID NO: 97559 - DNA, 217 bp, Glycine max
aaataataataatcatcatcatattcatataaataaagggacggtctttcaaagttagtccaaaaacccctatcttaaacttttttatcgaaaaaaaataaaactccattacttaattttcaaaatacaaacaaataattctcgagactgctaaattttcttagccgaacagaagggctttttttaaaaaatctacctttaatgtcctatagaggta

SEQ ID NO: 97560 - DNA, 520 bp, Glycine max
aaaagaacaatattagaaggatttgcatgggaattattttacagaggcatgagacctctaataaaaatccataactaaacatgaagagttgctaaactacatgtttatgacacataaaaaggtatcttcacaaattaaaacaaataaaatgagtgactagcccttacaacatctagcaaaagaatatgccaacctttcacagcccttgaagcagtcagtaagtatttacctacatgaattaaggttgaaggacccttttagtctgtcaactagaaattccaccattgcttcctttaagacttgacgagtcgataacatcctgctgtacaccatgaagtgatgtcacattgccaggaacaaatccattggcattaaaagcttgatcaaatttcaaatttgttgcaggtccaagaatgccactgtacccccaagatccagcaccactacctactactccaatcctaccccccacatacacaacatgcggaacagcactagtgtaaggcacctgacatgcctg

SEQ ID NO: 97561 - DNA, 230 bp, Glycine max
aaaaaaaagtttttttttaaataaatgaaaagggccgggacgggtcgggctcaattgtttcccaaaaaacctggggggggcacatacaccccccaccaattttaaaaccaaaaactgggaacattatttttattaaacccctttccaaaaaattcctcccagcttttttttaaaaggggttttttttcccccttttgggggtcccctcaaagggtttttttttcccccct

SEQ ID NO: 97562 - DNA, 402 bp, Glycine max
  unsure (1)..(402): unsure at all n locations
atgctcactaaagaacatctggcaacaatataatgcaacgtaaggcaattgcacactgaaaggtgtacataaatacatgctatcacataactgacattttgactgaccacaacaagtattgcataaataaataaaaacaaacttgtctcaaccaggcaaatcttattcctatcacaagtcacaacccaagccaatctcaaaactgtaaaaccatattcaccgtcttcaactcttcatggatggactaggtacaaagccctaaccgcttcacattatatgcacagaacaacaaatggccatatatatcaatagagaagagagtgatttcccttatttgagattctcgaaaatacatatccgngtgtttatgttcgcatcctttcttccattcagctatggaac

SEQ ID NO: 97563 - DNA, 373 bp, Glycine max
ttattttttttttttttttttttttttttttattttttttttttaacaaaataaaagggattaaggttttactgccccaataaaaaatacttgaatggccttggacctaaaaaagaataaaaaaaaacttaacaggcctaaataatgtttacaagctccctttgcaacattggcccttcctaatgattagattatcaattaaattttaatcaacaggatagataccaatttagcaccaaattgcccaaacaaattacttacatgttgaaggtcgtggttttggcggcatataataagaattaccccaatcaattggggtttgcataagtggattccatcggacaaaaattatacgggcacctctacccatttt

SEQ ID NO: 97564 - DNA, 429 bp, Glycine max
acccgaacaaagtattttacagtacattcctcactcaaggtaaaatggccatccaaacagtgtagattaaattaaagacctgattttaaacaaactacatatcatagttgtacagagtgacatttatgcacaaacctaagtaggtgacttgactgacataacgttggttaacctccaagaaggaaaaacgtaatgcttccatgtgaagataaagaaactaagaccacaatatatctaagacaattaaccacatttctcgtctgtttcacatctacaatgtcttcaataaaaggatgaatctcaaccggaatttgggcaaaactctcatgggctgatttctaagatgaagggtgagctaacatgctatcatggtcagaatgttatgcatcagcatgctccggacataaaggatcacattcaattgatttg

SEQ ID NO: 97565 - DNA, 266 bp, Glycine max
gagatcaattcaaattgcatatgggttgggaagtcaaggccgtatcagcagtaatttaacctaactaatgagaaatattcaaagcattgaaggaatacttcttgttttttgtgtgtgattgaaggaatacttttaaatacagataaaatatatgcgataaaacttaaaagagatacctacatttagcaacataagtaactgctggagtcgatggttaaaaccttaaacatcaaattttcaacctaaactgacggatgataaaaccc

SEQ ID NO: 97566 - DNA, 251 bp, Glycine max
gaaaaaggggtatatcaccttcatgatttccctttttttaaaattttattcctcgtttttcataatttattatttatacaacatcccaagttttcttcctctataggctttaacaaaagaaaattaacacgttttacacttcacactaaacgacaaaagcaggcttacagaattttaaaaatttaaaaacacttcgaagtcccaaccaaatccatcaccacctttattatccattccctgtttccgttccc

SEQ ID NO: 97567 - DNA, 286 bp, Glycine max
gcaagttaactggtttttaataacattaacagtaaaaaaaataacttgcaaaaaaatttggttcgatcaatatcaccacttcaatttttcaactaaaaaggaaaaataaactgattgcctgatccaaccacattgcattgtttttataaacaatttacatggcggattatacaggcactttctcttccttctattatcaactgtaggattcctcatgtcattttttgcaaaaccagagccagggggcataccatatggcattggaaaaggagcttgaaaaggtgtt

SEQ ID NO: 97568 - DNA, 284 bp, Glycine max
caacatcggagctcgaaggagacgggaagggagagagagagagagagaggttgctttcgtgtcctaccatctcgaccagcacgcacacttcattttcgcgaccttaagcacgtctctaaatacactgcatacgagaagccagctatgttcagaaaacaacatatactgcatggatttttccccattaaacacaaatcctattgtgaactacactcacttaagcatcagtgacaacagaaaggacgataattccgcagtgtgggttgctaatagaaatcaacccg

SEQ ID NO: 97569 - DNA, 228 bp, Glycine max
gcatgttgaaactaggaagtgtatatattatgtaattaactacaagggtaacttaggtttctatatggaagcattaatatatatataactatgcactatatatattaaaattaaaaactaaactttctacttacgtgacacctaattaaatgcacgtcctccatgattgaactcaataaactttgccatatatcataccaaatcatgaagcaagtgtgtccccatgac

SEQ ID NO: 97570 - DNA, 450 bp, Glycine max
gtccaaagcgtttcaccaacaccaagctgttaccgaaaccacatccacgctttctctttctctcccttttgaggttcaattagactatggtgggagtggtgcaccctcaacaattcatcaagttgaagctttttcagttctgattcatctgggtctcgcgattgctcggtgctgatttagtattttagggtttcaaatttagagaagccccatagaagctttgtactctgtctatgttctcttttgcaatgaaatgcttctgggtggccttgtactctgtctatgttctcttttgcaatgaaatgcttctgggtggccttgtaatttcttgtttcgtgtttttgtggtctaagttcactgctttgaacgtttcccccaaatagtgtacaatcgacaattatcatggcgttgctatagtgttctttttttttttttccttttaattttttc

SEQ ID NO: 97571 - DNA, 415 bp, Glycine max
atcgaaaatgcttggcaattaaataaagctgctggaaacagcaactttaactacaaaaggaaatacggaatacaacaattcttcatgacatttacataaaaacactacttactcactagaagaattcaatcaaccattaactacaaaacaatggggcgtacgtggaaatccacctcgttacaataaatcgacagttgaagaaaactacaacatcatcaaagtttcctgatttatgccaacagctacgaaccaaagcatccatgatccaacggcttaattcaaattcaatcaacactggggagtatatcttcaaacgtgccactgtcgccataacctacgacaaccatatcaaagttcaaaccctttggcaaaacacccttaattgaacaactacccttcattcagagcaagcata

SEQ ID NO: 97572 - DNA, 434 bp, Glycine max
gaggaataatccatgtaaccaacaccactgtgatggaaactcatcgacggtgggtaggtctgagtttcaaattaaagatcagaagcagatcatttaaaacaaagaccattatttagttaacagaaacctccaagtaaactagcttctactggatttgcttgcattaaagctcttcatacatatgaattctgaattctcatcaacttaaacaaccaataaacttgagaactacctacccatcatcaacatattagaatagagaataatatcaacaataacaaagtaggctgcaggcttgagacagggagctaatagctcacatggcacttgcggtttcaatctttaccatggcgaacacaacgcacaggttcaatccctggcctgtcccctttcccttccctactttccagttccacaggaccttcctaatattt

SEQ ID NO: 97573 - DNA, 406 bp, Glycine max
caacatcggagctcgaaggagacgggaagggagagagagagagagagaggttgctttcggttcctaccatctcgaccagcacgcacacttcattttcgcgacctcaagcacctctctaatccttccgcattcccttgtctattttttttttctttctttctggggtaattatgggccctacagaagttgtgtatttatctagtgatgatgaaagtgaaaaggaagttgctttcaaagctgttaagttggaggaagattttgttttggatgcaaaacaatataatgagactaacaaaggtcaactagccaagcacaagagatctcaaagtcatactactggacaagattctgaagaaaatttaagttctaatggtccaagtacaggtcatagtaactccagtgtgtt

SEQ ID NO: 97574 - DNA, 454 bp, Glycine max
ggcataaattcctttaaaaattttattgtaatagggagcccagaagcaacaaatacaccccttatgcttagcacaattaacatcatcctaaattctgaagacactcctaaaaacctatgggatccattcaacaattacaatcctaatatacacacaacaatctcaaaaatcagaaccaagaggtccaattttaattctttagggctagctccatgatccaattagtaccaattattttttcatctgctattccttggctcatccaccacgatatttgaagctgtctttctctagttgattgattaattgttgtaacatcttcagatactggttcgtcatatgatcaagtatcatccctctagaaagtctgagctttccatacagatctctaggcgtttcatataggtagacatgtttctcatcagaaccattgtggtttgaattaggaatattt

SEQ ID NO: 97575 - DNA, 232 bp, Glycine max
aaatcaaatttttgcacggggccagcaagaacaaaaaaataccagtcttgatccaaaagtttttattttccaaatgaaaacagaaaatattaccataaaatgtcatttaaagaaaaagaaaggaaaactacatatataaataacagcacgaagaatgattgattgctctaacatacattcacgttggccattatttgtgaagcctcaggaggattcatcgtattgaattttt

SEQ ID NO: 97576 - DNA, 272 bp, Glycine max
ggaggaaaaatgtttgaattaaaaagcttagtaaaccccttttccaagttccaacatcctgaaggcaactaatttacatccacatcaaagggtacttgtttttccccatcctctccttggagagaaaaaaaaaggggagagaaggggggcttactaaggtacatttctataatctggataatcccaaaactttgttattgaacactaacattgacattcacatccaaaggagaaaaaacattccctgtatatgattcaaaatcagcagttga

SEQ ID NO: 97577 - DNA, 387 bp, Glycine max
gataataatactaaatatttacattgtttcgagaagaaacacggctcggtattgtgaatgaacttcaacagccatcatcatactcaaatccatctggtattttttttgtgtagaagataataatcacactcttgaacaaaatgcagttcaaggagctgaaaaaacaagccatcagctcataacacaaaataaaagaagaaaaaacacccaataaacaaaaaattcaaagagtgttttgaatcaccacataacctttaaccaaactcattccatccaagcaccttcaccttccttcaaatcaaataaccacacctaaacttgtgcatcctatatatgtaaaaacaactaccaaaaaaacgtacaccaccgtcttcacatgctttcatg

SEQ ID NO: 97578 - DNA, 438 bp, Glycine max
gaactggaacataagctctctcatcatcttaggggggcagggactaggccttgtctcaaacacgcataaatgtaatgacaatcatcacacaaacgctataaacaaagaatagtagtaatgtgcagaagagaggaagagtagataatatggagttttctattgaagcttatttgaaatactaatataatcagatgagatgagcataaaagagaatggcctagtatcggctataaacaggattggatgatgaattttcaacagcgaatgtgaaactttgaacagttgccttcaaagtactgaggactatagacagaagtaatggaggcttgtgaaatcacatccaatagataatgagttattttcaagtttgcattcccgtatctcgcggctttgtctggtgcttctgctactgcttagagggggcggaactctgacttg

SEQ ID NO: 97579 - DNA, 181 bp, Glycine max
aaaaaatggggtattaagggctcaaatcacaattgtccaccaaactcaaatcacggaaagcaacattattaggatctttttgcaataagacccacttccaacatgtaacaatacaacatttatttttttgcaaactacagctaccttgattgaggaccattttacattacatccttcactc

SEQ ID NO: 97580 - DNA, 433 bp, Glycine max
gtcaaacattgtgcaatgcaagttgttgaaatggacgcggaaagttacgctaattacaaccacttccctaactgcccttttattcttcaaccctacttctcctattttcctttttttcttttccattttctactctcaataaagtaaaatataggtaaagtctaccgctatttaggatattagtcaaaaaaattaaaaaatattttttttattaaaatacataaaatattattggttataacttcttttgaatatttttataatttttacaataactttgaatttataattaatgtcttaacaacggtaaaacaaaaaaaataaaaaatatctcaatactaaaaaggaaaaaaatgctggtatctttttctcttgtggcgcacgaagaacgcgtctaacaggcacctctagattttctactttttttcttttc

SEQ ID NO: 97581 - DNA, 133 bp, Glycine max
aaaaaagagaaaaacccactctctggactacccactggaataacaacatctccggtaaaatggcggttcttggattcgactcagctatggcgagctagactcggagatcactgtctcaactcggaactatatt

SEQ ID NO: 97582 - DNA, 120 bp, Glycine max
gtggttctatgccacttcttgtgacagccacgctttttaatataatgtcacttggctttgaagaaaaaaaatctgatttatcaaaggggaggactccatctaccattcttggattaatat

SEQ ID NO: 97583 - DNA, 132 bp, Glycine max
ttcttttggtgtgttgcccatcaccctttttggcatgttttttacttgtattgtctgcatgaattaaaatttcaatgcgttttatgtgagctgaaattctgaattgcgggtgtggtggatcttaattaagaa

SEQ ID NO: 97584 - DNA, 268 bp, Glycine max
ctctactagcatttatccatgcaaagtgaactgatgaactaacatagctactattaattaatcaaatactacagtgataaaacaacccaaaaacaaaaccaaatttcaagcattccaatcaagattacattacaaacttaataacaaaatgatatttaaaaaaaatagaaagaattccacaaggatgctcactattcagcatccaaattatcatattgccaagggttgaattctggtctgatgtcaggcacttcaatgcactcagaac

SEQ ID NO: 97585 - DNA, 113 bp, Glycine max
ggcaaaagagcatgataaacggaggctataaatgcaaatatggggaaaatcaatccaaggtttcctcctgaatccatgccccaagaacttactgattattctatgaaagaatt

SEQ ID NO: 97586 - DNA, 357 bp, Glycine max
tttttttttttttttttttttttttttttttttttttttttttttttttttttttttttttggaagcaaaaccccttgaaaaatatttttattcattcattcctggccacaaaggttacacagggggccagatctcaacaaaatcggtgatcttattttggggaagatcatttaacgagtttttatacataaaaagaccttttaaaacctaccttacccgcaaaaaaaaagattttttttagattaaattaacccccatattgccgctttttttaaaaagggatgaaagggcaagttgacaaccctattggttaggtttcttcatcacgaggaaggggaacatgagatcggtcaatg

SEQ ID NO: 97587 - DNA, 146 bp, Glycine max
ccttaacatacccttagagccccttattttttatatatatttgttccaggggtaatacaactataggagatgattcttgtacattcttccactccattatgtcactagacttaactgttttaccttatagcattctttattattaa

SEQ ID NO: 97588 - DNA, 115 bp, Glycine max
gtaggttctatcaaacaattaatgccctttttaatcagaactattacagaattgctgggttgtaattactccaaatcgcagttttaaatatgatggaaacaattataactttctg

SEQ ID NO: 97589 - DNA, 418 bp, Glycine max
aacataacttttaagggaattattattaaactcaacaaatttatcgttcatacatttataagtaatgacagtattacactatcggggcatttccaaattggtctaaatttattatacataatctcatcctttccgccttccaaaagttttaaaaaaaaatctcatcctttccattctgcttcagctatttcatgacaccagcaagtttggattggaccttcttaaggatatttattaagccctgcagttgggccagaaagcaccccaatatgcacctacatcttccgattcccatgaaacctggccttgaaagtatttgatctctggcactacgactgagagaaataaaagcttcattaatgctcaatgcagcccttgagcgcttctgcaaactcttttaacgattccaacccatttt

SEQ ID NO: 97590 - DNA, 251 bp, Glycine max
ggggggaaatatgtcaagatactaaaatgagaaaaggtctttttaaccaaaggcaacagagaaatcattttttaagtccaatgattcatgggaaacaacatacattagcaatatcattcataataaagagtttttttcaagaggaagcaaacaagggcttggggtataacacatacccaactgagagtcttagggtattaacacaacagatcctgacgtttttcgattctccagggcttcgggggcttttg

SEQ ID NO: 97591 - DNA, 486 bp, Glycine max
catcgaacatgtcataataaattaacaaaccacaagtttccaagaggagtaccaaaatctgagcagctgtgtaaacaatatcaatctccatcaaagttattgaaagtttcccactaaagagaaaagatactgaacttctactttaagtacaacatttgactttaacacaattgaaatttgatatattgcaaatgatcttcctatagtttgcttttactgtacattgtgagggaagggtatgcttgtgagtgtaagttggccaaaggccatgcaaagtggcgtgacagtcatggtttagttcctcagaaaaacctgttatggccaagtgatgacataatccacatttttaaacaactggagctttatcatccaacatctcaactacaggagcgttctcatcattctcctcaaaatacattccatcaacagcactgttctgctgaaactcccaccctagatttctctccaacagctccttaaatttcc

SEQ ID NO: 97592 - DNA, 479 bp, Glycine max
acgttactataaacagcattttttttctatccttcgtcatgggtcaaaatacataatttgaacaaagcaacagacagggaaatcaagtgagctactatcctaatatattacctacttgttatcagacactaatagtctactcaggaagaataattcattgtgcatactgaagggcaaagtctcacaaaacctcaaaaaagccaaacatggtattgtgtcactcattgaaaagttctcgagccagaatcaaccataaaataaaatgcattgtagaaatgacttaatacacaaatgttctgaccagagcaatactcatcaagagttatcagtgaccaacacaaaccttttcctccttaaaatgatttcctgattttagcattcctttgcaacagcatgcccgtttattaactgggtctagatgacagaacttgccaaggaaagttcatggagctcacttagcatccattcctccccagttt

SEQ ID NO: 97593 - DNA, 329 bp, Glycine max
aaaaaaacaaaccgggtaatttaacaaaagaatatagatgtacatgattcatcaagtccttcccctcgatttaaactttgaagaatagaaagaaaaaacttacaccgaaaaggcctggatttcataaatttatacaggggttgtgtacccaagaactttccctatgatgatgtcctaatgatgggtatgatcatgtttataatgataattaaaatcagtatgtagaagactgttttaaaaatccaacaaaaaaaaggggacgggattactaatttactatgcacgatgcttatgatcccacaatgaaaaaaaccatgggtctgcaaact

SEQ ID NO: 97594 - DNA, 482 bp, Glycine max
aaaggttaagtcaattcataaactatcattatgttgtaacactggcaatttggaattcatctgattctcctcttgaacaatataggaaaaagaaagtagcacagacagtaacaaataggtcttgctactaaggtgcagataggaaattctgatgatcccaggaatgctaattaaatttaaataggaacaggtcgatcaagggaacaatgaaagcatgaagtacggtgaagttgctcatagcatactagagtaaatcgcatattccaattaccaataccaatatctaactctaactctatccctctggagccaattgccctgcagtaggcacaggagaaaatcttaacatgcgaagtgatcatttcatgacatttgcctcaaccccattcgacagtatgtttcttcgtttgagtggaataatagctactcattatcataaatctttctcccctttagctgggtcaataatccattctgaatac

SEQ ID NO: 97595 - DNA, 291 bp, Glycine max
aaaaaaaaaaaaaaaaaaaataaaataaaaaaaaaaaaaaaaaaaaaaaaaggggaagggtcgttaaaaatatagctaacataatcctctgcgttgaccctctctacaacgattcctacgccggcgcactcattcacacaggcctcctccatgactccaccgatcgcgactgcctccagaactaacccaaatttatgaccctcctttcacctcacccatacatacttcaaatcttccatgttttcgaggacgaccaatgtctctccatagtaatggatctctgccaacccc

SEQ ID NO: 97596 - DNA, 157 bp, Glycine max
aaacaaactacatttgcagcctttgtcggcacacttatatttttcactccgggtcggatttttccaccaccgaccttctacatttttcgggagaattgtgtcccttcctgctcactcgctccaacagaccacctctttctatcctatccctggtctt

SEQ ID NO: 97597 - DNA, 275 bp, Glycine max
attcgtcattcatcttccatcatccatccactttcctcaatcttccattccagatcgctcaccttcttcttcttcctctgtgccacccttttgttccatgattgttttttgtgtctgtatcagcttgatctttttgtttttttccttgttgtaaaaacatttcaatctgcaaggtatgtactgggttcttgtttgaattgttcttccatcttttcatgccacaaagtatttgaatttttagattggagtgtctgatttgcgttgcagttttccat

SEQ ID NO: 97598 - DNA, 300 bp, Glycine max
  unsure (1)..(300): unsure at all n locations
gggttggacacgtgtacgctcagaatcggaaggtctttctgggtcgcgtgagtcgagccgttgaagatacctctgagagaaagtcatacactacttcacggctttagccttttaagataggggctcgtgtgacatgaagacatttattgggccgctttgtaattcttagtatgttgggctctgaagtccaatagttcagtgattgttttaacgtttttaatcactctgggcctattttatttgtaatatgcactgttgcttgttgtaccttcctggcnncccccattacattacggatta

SEQ ID NO: 97599 - DNA, 294 bp, Glycine max
tacagagatcactattacaatttccatttccaaggacattacatatacacagagagtgtgaaaggaagcatactagggaaacgcatccgcttccaagttacaaacttcagggaggctttatatatatatagaaagtgacaactatatatatatatatatattggaggtgaaatggtgaaggtgttgtcggtgtttctcctttgctttcattataattagggtgtttattggtgccgtctatggtgacaatgtcacctacgacgggagatccttaatcattgatggccaacataa

SEQ ID NO: 97600 - DNA, 306 bp, Glycine max
cgagggtagggctcactagccatttttatcttacccgtactctcttaggttggtctctcttttcacaaccttcactttactctctctgacagctaaatgcacggagagatttcaatatttttgcacacgggaatgtcattagaaatgctgttctacaacgggtgcgcatggtgaaccccctagtacagccaatggcctcttagcggtttgaactctgttacacctgcttgcattgaggagcttggttttgagagcaccacaatttcacacatcttgaatgataaaggcaagggtgctgatggctcc

SEQ ID NO: 97601 - DNA, 398 bp, Glycine max
atatcatcgaatagtatcttccacattatacacatgaaaatttaaatagaaagttggaaggttggaaggccagcaaggattcaaagcttacctccctgcataaaaggaactgcagctcaatttcgtcagggaagaaaattccctgacacatatcttacaaaggtgaatcatgccaagaatatttgaaattacgcaacaagatctcccttcaatcatcaaaagttgtaattcatccaactacggcatctgagaagtcaaaatcaactagaatgaatattaacaactctcagctcctttgcaagaccttttatgggttattacaatatcaggcaaaatgtgtaatccagattcactttccaaccttaattggagagagagagactgagcgatgatatacc

SEQ ID NO: 97602 - DNA, 387 bp, Glycine max
cctgaatgcaccaccacaaatagctttaatcaaaataatgcaggcccaacgtatcaaacaactgagggtaataagtagtggaaggtgtttattaggagaaaggggtgtaaacagcagatggcccacaaggaccttactaatggaaaagctacaaagtctatattttcgggaattaaccctcacacagaatccataggaacagccacatcaaaacgatcaaaagaagccgactcacagatacctataaaatccattggagctgatgaagggcagattgaagaggcattaacccaatgggagcttgcaaaactcatgtgggtgtctacagattcagagcagacaacaatcatccataaaattattgacatggagaccacagacaagaaa

SEQ ID NO: 97603 - DNA, 253 bp, Glycine max
gggagatggagaagccacaaaacggttaataaaaggaagaaaccacggtctctttgtgcggttacgattctcttcaccggcttctcaaggataatcttaacccccatcactttcaggaaagtcaggcgtttgcttactgggcttaattgtggaaaagcacttgaagcaatttctctcccagaatctgcaacttccctctctgcagaacatggatttgacatccatgccttttccttatgcgctgacaaggaac

SEQ ID NO: 97604 - DNA, 416 bp, Glycine max
gttcagaactctgacccaatgaaagcatctcagttgggttatctcacggtcaaaactggtaaagagaagggtagaagaagaaagaggaagagtctcggtgccaaattagcggcattgtctgaagtttcaagtagtcaaagtggtaattctacaccctcgtctcctttatcccctactccctctgctacacctaaatgtaactggccaatgtctccggacgaggagcaaccccctgaggctcctagttcaatgacacaggtggctacccaacattctgccaatgatcaagcttctgccgctgttgctgtgtcaaatatattgaagcctgcttctacacaaaggtgcactaatagtaagtcttctcaagtaccacattcagcttcaagaagtgctactagtttacctgttcagaaacc

SEQ ID NO: 97605 - DNA, 293 bp, Glycine max
gtgaatatgaaaatggaaaatggaagaagtttttaatttcactcacatcaatgttggcaacattgtccacgtaattaaatcagataggataggcaaagaccagaaacttgttcttggaaagacagtgcgcagcagcgatagccagcggagtcattggtcaaggcctaaggagacgttgacagaaactatgctatttagtaaatgtcaactataagataacatagttacaaatgttggaaacattgatgtgagtgaatatgaaaatggaaaatggaagaagtttttaatttcct

SEQ ID NO: 97606 - DNA, 382 bp, Glycine max
aatgaaactaaattcaccgtgccaccactcatatcaatttggtaggtagggcttgtgtgtggttgagaaagaagctttacttgtaaaaggagtgagaaagatgaccactagagaatagagagactcaacaatatagtcataggctagtctgttgtggaatcatgtaactagcaatctcttttgttcaaacatggatagttacgaagctacaagagttgtgttttcaaggatccaaaacttggaccctgagaatgcttccaaaatcatgggtttacttctgcttcaagaccatggtgagaaagaattgattagattagcatttggtccagaagcacttgttcactctgtgattctcaaagcccgcaaggagttgggtttacct

SEQ ID NO: 97607 - DNA, 219 bp, Glycine max
ctggtctataagaaagaagaaaatgaattggggctaacttttctttatttggttttgggttggtaaccgagtcttatgacgtgaatgggtgatctatctaactaatctcacctcatgaagaaaggctattgttatttatttatttggttaatttttgtatggacaccctaccctcatcttgaatacctcacctaatgagagaaaactattgctttcttt

SEQ ID NO: 97608 - DNA, 432 bp, Glycine max
agattttataatgcatgtattgctttgacatctggtaataggttttgtttttaatgttagtatcacagacagtaatcgtagtttgacatcgtgaagactctattattatctcttctcattttctagaatttgtattgattgatacccagattgacctttatctatatgttgttaatgtaatatacagactattacttcattgattttgattgataatttcttttgaaggaattctgtgtcaacaaagcggtgcttctgtaagttcgaatcctccaaagcttaggaggaatgcctctgcttcatatgatataagtagcacctcttcccaatgtggtccaacatttccaggttatactttagaactataggttaccatattaagaaagtgtggggttgctaatccaactcaaagattaatttgaacatctactt

SEQ ID NO: 97609 - DNA, 399 bp, Glycine max
cacaacacaacaaacaagaagatgaccaccaccttcctctgctccttactcttgctgttgaggacaaccttatcagagtcccaaccagaccgtttcatgagacgcaaaccccttagtggttctcaacaagaatacttcgaagtgagttaccctccaaactcacacgaacccacaacaccttcatgcacccaccgaataatccaccacgccttcgccaacaccatcgattctccaccgtacaccacctcttacacaccgcccccgcggtgcggggcaccgtggtctcgggtggtcctccacttccacgcgcggtgcaagggcgagcagtacgaccgcatcgccgccatctggctcgccggcgccgagatccttcgcaccagcaccgccgagcccagcccc

SEQ ID NO: 97610 - DNA, 155 bp, Glycine max
ccaccctgacgggatagcaaatcttttatgaaattgagaattgctgctgctaataagcaagctttcattgagatggcggagttcaccgggagtggtgagtttgcgactatcggcgaaattcctttcttcaggacaaatcactcaaggaaagtttc

SEQ ID NO: 97611 - DNA, 413 bp, Glycine max
  unsure (1)..(413): unsure at all n locations
ctcattttagcgatagatatggataacgcggcagctacccccactcactaccaccagcgacgcctccgatactcttctcttttatcaattcggatatgtcttctgatagtgcaaaggaaaatgcatcagtagttgattcatcagtcactgaatggaggaatgacattggaaattcagatgatccaggttttgataatgtttctcttgtcacatgcgtatcatgtgaattaaggagcttacattgcgggggaagaaatggaattagaaaagttataaatgcagaattacaaaacattccaaataaagtgattggcaaaaaaaaatgtgtccagatgatcatgacttcagcaatgatagtggagcaaggatanggtgttgatcacatactcaaaaacatttcatagatgcataga

SEQ ID NO: 97612 - DNA, 241 bp, Glycine max
cggaagctaaaacttttattgaaacccttttagggggacatatactttatatagctccccctttacattttacaagatgggtgaaccaacaaatccctttacaaaatttgcttgcagttgccaaaaatccaccacagccccaacttttaaaatatgtcaaaaatttgggattaaaacacttgaagctttttgcaaactaacagcatattggcgagcccattgggcatagggaaaaattttt

SEQ ID NO: 97613 - DNA, 289 bp, Glycine max
aaaaaaaaacccccccttaaaggaatttttttttccccccccaaaaaacccaaaaattctgccaccggaaaagggggtttttttttaggggaacctcaaacaagaacccctccccccttttggggcccccccgggggaaaacggggacaaaacccgttttttggaaaacccccccgtgggtttttttggaccccttggcccggggggtctttttcccccggtttgggcactaaaaaaactgggaaggctttgggaaaacccaaacctttttttccccccctttttaggg

SEQ ID NO: 97614 - DNA, 110 bp, Glycine max
ggtcccagttccacctattgttaccggtttcaacgttcctagaacacctgaggaaggagtcaccgatctcattcacaggtggcaatacatagcacatgacttgcatgagg

SEQ ID NO: 97615 - DNA, 136 bp, Glycine max
gtcaactgcctccagtatattcaactctgattcactgggggctgagacatcggttatagcatcatcgtccaaaacaggtgcaggctatttttttttacactcacgcaggagtgctttcaagtattctcttcgatct

SEQ ID NO: 97616 - DNA, 413 bp, Glycine max
tttttttttttttttttttttttttttttttttttttttttttttttttttttgtgtttgtgtttttttttttaaacaaaaaaaaacccccccttgaattttttcccgggggggcaaaaaatatttttcccaccctttttttgaccccgccttgttggcaccgcaaaaaaacaaaaaacttgggacctccccaaccaaattttaaaaaaaaaaacccccccccccttgggcccccaaaaataagggcaatcttttaatttattccccccttgctcaaccccatttgcccccaaggccatttttacccccctgggttggtttttgttcttggctaagttattgaacaaaaaaacttggcttttcctccttttaaacccttttgactcacaactttaatatggggattttggggg

SEQ ID NO: 97617 - DNA, 284 bp, Glycine max
ggggatggaggtcgaattataatttacataatttttacaagcggggaataataaataaagggcccgttaaaaatgcaaaaagccttgaagcttgagacattaaacggggaacaaagatgaaacttggaggggccggacccacaagtgaataaaacaagaagtcatttttttcaagttgaagctcaaggggaggttttaaagggtgggacagccccatatgaaccaatgaagaccttttcataaattaagccagccaaaccttctccaataaatgggcccaccca

SEQ ID NO: 97618 - DNA, 349 bp, Glycine max
gacgtaaaggagaaggcagaacacacttgaattgaatgcttctagaaaagacctacaccagattagtgaataccagtattgcactaacaaatatcaaattacataataaaaattttataaaaaaaaaattaaatactggcagtataattttttgtcgattagtgattaataaaaaatatataataaatataatttttaagataataattacaaaaattaatatacttacttacaaaggattgtaattactctatgtaatcaaataacagtatcattgccgaagcataaaaaagcggaaaattagaaatacaatttatgtggataagccatctaaaatggagagcgcaac

SEQ ID NO: 97619 - DNA, 347 bp, Glycine max
aatgagtaaaccaagatttttcaatggtattgtaattatttgatacattactcaatattatacacaagtttgcgaagtgaaaaacactggataatgagttcttacaaaaagtggcatatcaaatcaaattggtgggtacaattaaaatttatattcatcctgttattataccagccagtacatcacttttgcctcgcacataaattgtgtaaactagacgaagtgcatccagccagccatccaatgattcccaagagtcagcaaccaagtaaactgatccataacttgtatctatgcagaggcctgcaccaggtggtaaggtaagatcagcacatgctgatacagaa

SEQ ID NO: 97620 - DNA, 163 bp, Glycine max
  unsure (1)..(163): unsure at all n locations
acacacaaaaaaaaactttagttcgttcacacttcaatgcacatagtcagatcaccaaatcgttaaaaaaaaaaaaaaaaaaaaaaaaaaaaaaaaaaaaaaaaaaaaaatatataatttaatttttatnaatataaataaaaaaaggggggggggccgcttt

SEQ ID NO: 97621 - DNA, 367 bp, Glycine max
aaacaaaagagcaagggtttccttcatatgaggaaaaaccaatattaaggaatatccattcaaggttttacatctagtacataaaaattcaggggtggttttcaaagtaatcacgaaccctaacaccctgggggaatgtcaaatatcaattcgggggtggaaaaacctaattttttaacgggatttaaccgcccaaaattaaataaataaataaataaataaagggagaaaaaaaaacagagatgccccaccaaaaaattttaactcttataatggaaatcctgtccctatggaggggtccattttagcaaaactcaagcttaagtgacgatctctattatccccccaacctcccaaacctttaaac

SEQ ID NO: 97622 - DNA, 342 bp, Glycine max
aaaccaacaactgggataaatttccccattaaaacaagggaaagcccaaaaaacattttttaaaccaaatttttggggccactgaatggtgtccaaagggggtgcacacatcccgtaaaaacataaacttttttaccgaccgacccttttgtccaaaaaaaaaatacctgccaattttttgaaaggaaaaaaacacaggcttggacacttaacagtttttgcccgtttcacaattaaaacctactccctaacaaccctttttttgaataaaaaaaaaatttggataaaaaaaaaccattcggagccccccattattatttttaaaacccccccccccccccc

SEQ ID NO: 97623 - DNA, 400 bp, Glycine max
ctgataaaacctacttgataatgaaagccaaattagaagatgcagaacccaaactttccaataacgtttcatattgaagacaggatagaagagtctgcagtcagaagtttgtcgtatgcacaaaacctaaataattgtttgccatgtgctatggattaaaagctaataccacaagcataaaaggtgtcatgaatttaatcatcatcctgccctactgctcattggagtcgtctgaaacatcaaatccaggaggtataaaaataacatcatcccagttcgatgtagaattttccttcatttcttttattacatcctctagagtggcaacctggatatcgccttttctcatagtgggatttaatttgttctgctcacgggctgccgatttaagtgtattttc

SEQ ID NO: 97624 - DNA, 360 bp, Glycine max
aatttagtgacacttaactagctacctttacatttcttcaaacatcaaaattgttgtgtgcactggcattccttgagatggatttagattttgattccacttttttcctaaaccaaaaccttagtttcttcccagaaaactcctctatttttggagacactttttcttgggactacaactttgttttggatgatatcttcaacaacttgagcgacaattcgtcacaatcacaaaccaaggaaacatcctcagcgtgcaatgtttccagttgtattggtagcgttgagttacaagaagtctcatctaacaccacttacaaggaagtgaaaaaagtacgaccaccaccaccatcaccaccac

SEQ ID NO: 97625 - DNA, 279 bp, Glycine max
aggaacagaatataacgttggatcctagtgatgaaagaattacaaagtaaaaaattgtttacgaacaattcgaaaaacagagaactggaaaacagagaggctgattaagaagtcaaagtcaaaagctgttttaggtactcagcacccaaattcttgaacacaagcacattttgcgaagttctgctgaagtctaattgttccctctgatcaaccttggtcttcttcttagaattggactttgttctcatagggtggtttctcttaagagccaaaacaggg

SEQ ID NO: 97626 - DNA, 282 bp, Glycine max
gcagtaatcttcttaatgagaatcacttttcaagattcatagctttagaagggtgtagtggcagtgcagctgcccagcttcttaatgatcgttggacagctgcaatacaatcctacaataatcccaaagattcatctgaaaagccagttatgtattcgagtgggacttcagtatggactgccgctacaagtgcttgctcttccgtatatcaacgggacttgctgggagaacttcgtatacaaatgcacagtgcaaatcccagtttcactacatgatggctga

SEQ ID NO: 97627 - DNA, 443 bp, Glycine max
acaagaataaaaaacaacatattcaagcgttggaaatataatgcaggcaatcagaagagagacatcttcaacatcaaagtagagcagaaagagaataaatttaatatgcaacacaaaacttccctaacgggaaaaggtaaggttgggaactttaaactactatgtatctggggatcaatcagccacactaatccaaaataaacacaacctcatcatgactgagagaaacattgtattctaaaagctcaatagataaagatgctgctccccttgaaagaagtccaagtctaaattatgtacagaattgtccccatgatcaaagaatttgtcctaaatgaacgaaattctgacaaaataatatcttactggattttgaaataccagtacgagtgacaaaacagtcatcaaaatcccagttaaaaccacaatgagcagctcaagct

SEQ ID NO: 97628 - DNA, 383 bp, Glycine max
aaaggaaaaaaaaatggtttgttcaatgcccacaatttatttacacacgatccttacacaaacttgggtacaatgaaatgaaatagcaattttatattgatgttattcaggtattggcaaggagacccttttttttcccccgaggacaatttacattgaacctttatttgctgggcgttttacaaatattataggcgaaagggggaaattaatttttgaagtaaaaaaaaaaaaaaaaagtaaatgcagaaggtagaaaaagagttcaaaaaaactaatttgttttttttattaacaagaattggaaaaacaccctttggctgatatttttcagggagaccaacatttttttggggggggcaaattcattggattttatcact

SEQ ID NO: 97629 - DNA, 379 bp, Glycine max
caaaaccctgaggatatcttctatgattggcaaaaattcatacaataaagggttctactgttggtccatggccatgcaatcatagaagaaacgacaagcataaacaaacactgaaaatacggggggccaaagataccatacactgttgttttaaacaggaacaaatatgaaaacaccatgtgaagtataagcccaaagataaacgatccttgaggaatataatagtaacagaatatcgtacatcaataaactactctggaaccagaattccttatggcccaaaagcaaagaatgattctcaacaagtggtggggatgaatcttggccaatcaaatccatgttatatcattccaatttccaacacatgcacatatacata

SEQ ID NO: 97630 - DNA, 379 bp, Glycine max
acgatgttaaatacattttactaagttcaacacagttagcgtcagaggaaaaatttaaaaagaatcaaagaaaagccaaatttaatctaatctaacatctccaaactcattttcttgagtatttttttttaactagaaaggaaattcatttagcaaagtcctcagaatgaagggaatgccttgcccaaacgattagtgcagaacccaaccaagccaggcttatagggcaaaaacgactttttcttatcaaccattctcaattctctgtttctaagatacaaagcctcgtgcggcgacaccgccaccttcttctcgccggcgaaaccattccccttcgattttccggcgacctcaatgctccaccgctcgttcacatttt

SEQ ID NO: 97631 - DNA, 276 bp, Glycine max
aaaaaaaacccggggggaattttggatttggcaaaaaaaattacccaatcccggccgcccataaaaaaggaggggggccctttccacctaaaaagcgggggaaaacttgggcccagggccggacccaggcccccccaaaaaaaaaaaatttaacatttttcccaccaaaaaccaaagattttaatttttaaaaagaaaaaaagggataccccgccctttttatggaaaggaaccccaaccccccaaacctgggctggattttgggggggggggggg

SEQ ID NO: 97632 - DNA, 165 bp, Glycine max
aacttacactaaaatgattagcaataactggtttggtcgtttattaaatggggtacaaatccaccaaagtgcacacataactgcggggaggggggggttacattatttagatgtctctttaaatttttgttgttctttttcttgtttccaaggtcttctaaagat

SEQ ID NO: 97633 - DNA, 453 bp, Glycine max
accttaaaatatatcaacttttctttgttccatcacttaaaatttagtgtatacaatatacaaattatatagactagatcttatcatttattattatttatacaaatttgtgaacttgccaaggaattaagaaaacaatctgaatagaaaaaaactggtgcacataacataaaacgagggaatcgttgatactatctttaatttatcttttggcgggttaagttgctcacattcatctgaaaagcacatttccacctacaaattccattttgagtaacatatataaacaccaacctaaattacctaatgtaacaggaagacaccgcatcttctgcttattccatatcttgcaaagcgtttcttatcatattactgagaatttatcactctgcagtttttcctaatctctccatcagtcccaggcttaatatttatattccccatcttgatcat

SEQ ID NO: 97634 - DNA, 424 bp, Glycine max
gtgaatgctggtgtatctaagagtgcgttacgttaaattttgccaaaggattttacatgaggagtgactcagatatttcactcacgacagagccaggaggaggaggaggaggacaagttcactgtagcattgctcaactgttttgttgtgtgtacttgtgttcaaataacaacaagaaagactgaaccagagctccataacataagtttcttcttgtttttccttgtgtctatttccccgagacaaaggaggttgaacttgaaagttgaaactctcttctgttctgttctgtcttttaacacaaaaattatggttataattttttctggttctttctgaggggctgtttttagcggttgaggttgaagctgtaaatgccgctgagatagatttacatggggaagaagggaagtggtagttcatg

SEQ ID NO: 97635 - DNA, 419 bp, Glycine max
aatctctctctctctctctctctctatcccctttctgccgacgattttgtttgtcccctttggatcaggttcgttcgtttgttcgatctctcggatcagatctggattccttttcattgctgcgtcttcgatctcctttctttctttctttttatgcattattgttattactattcgcaatctcttcggtggccaatgatttttattttatccttagatttcggatttgatttagctctgctgtatctctttggtttggatcttctggctgttttctgtgattccaatgacagagtttcattcaatgtgttttgattgtttcaagtttgacatgccacaaggtgagatttgagatgtgatgcgggataatgatgctatcctcctgttttttcagaattaagattgatctcagcagaaga

SEQ ID NO: 97636 - DNA, 312 bp, Glycine max
ggaaaaaggcccggtttaaaattgaattgggggggaaaaccccccaatttgaagtttttccaatcaaaattcaaatcttgcaaaaaaaaaaaagtaaagggcttttttttttgggttcccttttttctctctttctggcttttaacgaaggcttaatcccaaaattaaaatctttggggcccttttttttttagaactcaaggaaaacaaactccaaatggaaaaaaaaaagccgggtcctccatttttttatccaactttttattctcagtttactcaacaggagggggcccaaactcggccaatttgggg

SEQ ID NO: 97637 - DNA, 395 bp, Glycine max
aggacaaaaatcaattacaaatttgggacggccagaaatcattagatatacaaaaacaaaaagaactggatcaactcctaacacaatcccaacacctgcacacaacaacccaaaaaccagaagaaacacaacaacaaaaaaagctatcacactgaagcatacagatttggaacaaaagaaaaccacttgaaaccacagctacatttgagaggcaaagaggggcaccttggaagccaatgccaagtcctcctagaaagcaagtaatacaaaatctctggccaagtgtagcagcaaatgcagatcatcccttcatgccaaaagcaataaacatgttcatagttatggtaacacactgacacaaactttctacacataagatcaggcaaactttgaac

SEQ ID NO: 97638 - DNA, 287 bp, Glycine max
gtaaagaaaatttcttagtataatctcgactcgagcaatgagtacatgtgacaccacatgtcgtttaccgtttttggttaacggtcacgtaaacaattaacggatcccaactaatggcaaagactaaaacaaaaagttaatacaggttttggaattaaacacaggcatacattgtatcttcaagtgacttaaccaagggcctagacttttggttgaactgtcaccctctgcgagggttcagttcctcaaatcttgtatttatttagcgggctaccatgtaatagttc

SEQ ID NO: 97639 - DNA, 322 bp, Glycine max
aatttgctccctttatttcatctcacatgagccatttattattgatatcatcaaaacttatataattactatatgatatgatgtgttgtggacgtacttctattttttgcgattgatatttggaattcattctgatttacacaagtcattaatggctctggagatgtcatcaattcagggagttgctttgttggaacgaacaattgttgcttatacctgcccctgcttgaccatagtctgattcaaaagtctttatatactactattattccagaaataatgtagcaattgaaatcattctatacttacattttattaattc

SEQ ID NO: 97640 - DNA, 187 bp, Glycine max
aggtcaaaccttttttttgaaggttatggggatattgtattatgtatttccttaacatacccttagagccccttattttttatatttatttgttccaggggttttacaacttttggagatttcgattgcatgatcttattacttgggatctttgattggttggaatcccatgttgggaaagatgggg

SEQ ID NO: 97641 - DNA, 320 bp, Glycine max
atccaacgaaatgggggatatgggcaagacaataatagtgtactgccaaaaacaagtgacatttgtttggattctcaggcaaaacggtaccacaaagggcggaaacccctatgctgaaaattatttgagggagggaaacaaacaatgccccgataataaaaagtgggactaattattaacttaaaaagcctaaaaaagaaaaaagaaaaaagaagaagatgattgattctagatagatctacagtttgcaaccgaacccaataatccgttgggcaattgaatcacaaaaaaaaagtgtaattaaattgaggaaacggaaa

SEQ ID NO: 97642 - DNA, 153 bp, Glycine max
attagctaatacttttagctataattggaactcttggatcctcttgtgcgtgccttgggtgtgttcattttgttagtttgatttttggttgaatatttccgtgcgttttgttcttggagtgcttgttggtgatgatagttgaatgaggattag

SEQ ID NO: 97643 - DNA, 168 bp, Glycine max
gggggcaattttttaatcctcattcaacttttataaccaacaagccctccaagaacaaaacgcccgggaatttttaacccaaaatcaaactaacaaaatgaaccccaacaagggccccccaaaagggtccaagagttccaattattgctaaaagttttagctaatttt

SEQ ID NO: 97644 - DNA, 178 bp, Glycine max
atgcctcccaatctccgattcttcggcttgaggcgcgaggcatcaggttcagggatggctgcttatctaaaacggtaccactcccacctgcctcgccgacctcactccgtcggagtctatgccgcgctatctagcaatggacgccctaccaaatcgttcgactacgattcgatgataa

SEQ ID NO: 97645 - DNA, 169 bp, Glycine max
cgggcgactggctttatttcatcatctctgacggaaaactgtttagtggtacatacgggttcggtgcaaaactagtagcgctctaaaaaaataggccgctgtccgaggccttcttattgactattgtttaaaaaatgcaattatgaagattagcatgtttggctggcgc

SEQ ID NO: 97646 - DNA, 453 bp, Glycine max
caagaaaacaaaaaatctttaatactctcaaactcctttttttctttcaaacacaacacagacacaataatcaatggcctccgctgctgtcttgagaagaaccggaactatggagcagaccgctgccgaagcgaggggatctccttttcaacgcagctctctggcgccttcctcagcaaccatctgcggttgcaactccctcgaagacaaagaagacctccactaagaaggcgaagaccacgaagaaggtctcgcccaagtcttctccaaaggcttctcctcctcgctctcgctctcccatcaagaagaagacctctcctaaggcttccaccaccgctaagagcaagtcctctgctgcggccaagacttccgctgttgctgcggctcgtggacccgctgccttcgtggtgcctttttccgctcaggatgaggaagagaagaagaagcaactca

SEQ ID NO: 97647 - DNA, 335 bp, Glycine max
gtgttattacaaagaggtggaggaagctgcgctagcttcccgtggagaaatggaggtgagatgagtgagcttcttagtcgagcttcttgtcgatgttgtcgtcgacgatgactccccaggaacccttcttgcagagccaggtgatcttcttgccctcgcgagccatctgagcgtacttggtgttgcgctcaatgttctgctggatgaagaggagtccgtgctcgttgattcggacgtagcggcatccagaagcgccgaaggtgaccgggtaggtgactccgttgatctcgacgtcgtcgctgagatcgtggatggcggcgtggatcttcatcatg

SEQ ID NO: 97648 - DNA, 452 bp, Glycine max
gcgtacaaactttattctttgtatttaaggtccaataaatgagtggctataatcgaaataatgtacagtagcagtggtcaagttcccgttagaatctaaacagcggagactcgtcatacccaaccttgtcacttacattacaattgcatacagctttacgcttttggttgactaagaaaatgcttaactgacagactaaagaatgaattttagttaattctaaaaaaacacaacttagaagtgaaatatcaaattgatcaagcctcgtgaattggtcttcgaagaccagaataaacagctgaccgaaaaagaagaggtgcatcttctgtcaatacctctgcatccaacttctcaacatggggccatatctcagcagcatactgcctagagaaggccttcacatagcccaaagtggtgatacaccactgctccttttcacctacattataagc

SEQ ID NO: 97649 - DNA, 291 bp, Glycine max
gaagataagttatgagggaattattcggaacacccccacaaaaatttcacaccagcaagctagcattggaaacgggggcagagttattaaaattcaaaatacatgatgggggatatatgaagtttcgtgaactttatgtttttaagccccccaaaatgacaaactaaacacaaggcattacaagcctataaaagcacggataaaattgttggatgatatctgtcactgtcaggtttctttgttgtataagtaagatggctttgtctgttcagcagcaaaggacctcaacct

SEQ ID NO: 97650 - DNA, 306 bp, Glycine max
aaaaaaaaaaatctcgtttcgtaaatcaaaccctttattaacatttaaaagcctttgggatttcagtctttaaaagcccgtttttacgggacacccattattggaatgattcccataaaaaacccttattttaaaagtcctaaaaagaaagcgtgggtttttccccaaaaaaaaaaggaaaaaagggtggaggcccctttgtccccccacaagcttcttgacccaaagtgggaataagggctaaccggggattattttcttctttttccccctttttccctttttctttcccaaaaaaaggggccc

SEQ ID NO: 97651 - DNA, 193 bp, Glycine max
ggaaaaaatgcgatatacgaatccatttttttattggcgtcaaatattacagccgcacattgccgaataaataaagaatttccccgcccataacacaaaattcaataaggggtttcctattgataatctaccctataaaaaataaataaattaattccttgaataaaaaaaaaaaaaaactaaaacctttttc

SEQ ID NO: 97652 - DNA, 400 bp, Glycine max
gcataaaaaaactctgatatcttttgtggtgttctgtttacattttaagtttgaaccacacaagccgcagtaaatatctgtttaggtgtgcgaattgcgattacattcaaacatggtaatagcatacttaaatataatacaaaagacacgagaacaaaaaaattttcgacgccgcaagctttggctttacctcaaacagtctctaaagtagcatccaaaaaaccaaccagaatgaccatctttcgcagcatgcaaactagagatggtatttctcaaacctcatctttggctatcttaactttcttgttagcagaatccttctgctcaataatctctgggatggtgtcttgcattatctttggggaagaaaaatcaaaattcgaagcagacacacctttga

SEQ ID NO: 97653 - DNA, 402 bp, Glycine max
aatcacatatttatggtgtcaatctaaagtaaagagataagtagttgacattggcaaatgtagagaaagaatgtaattgttacgaaatcagagaacaaaagttttcagcttcgtactactgtcatctacactatttgtattctcccttcccatgtcaactttttctaacaatggatttagcatatcagtatatcactatagcctgtatgtttctagatcatgaaaactatcaaccaattgaacaatatagctctacagatccatcataattctcgccaattacttatcatggatggcaaagtgggaagtgatcacttggttaaccaagaatagcagtacaaatcatgtttgaacaaatagaaggcaaataacctgaaattcgttttccagagcatatgaaga

SEQ ID NO: 97654 - DNA, 333 bp, Glycine max
ggaacaaatttggttcccccatctttttctttagatgaattaaatgggtcaaatcaaaaagttttttaaataataaatagcaggtgggaatacaaaacatgtggaacaccctcaagacaaaaattgtttacaatcggttgccaataaaatacattaataattgaatttaaataaaatttgtcatccccatcgaactacaatttcaacagaatttttgaaactttgccctttgggggctgacgatgcctattttatcagcatgacttttttccattaaggggggtttacaaataaaacagggaaatttcaagggtttgatttggggggaaaaac

SEQ ID NO: 97655 - DNA, 338 bp, Glycine max
ggccctcgatatcagagtttattaaaaacatagcagcatttttcactcaacccgcaaacataacttaaaggtagagcgataatttttcctcaaaacaactttaaaagaataaacttgcctttaacaaaacccttggttattgggccccaaaaaaaaaacccatttaaggaatctgccctctcacaataaaagggagacaaaatgcaatgggcccattggactatgagttttattacaatggccttggtagacacaggaatcagagacaggcatccacataatcacctttttgcccttaactttttttttctccatgctttacttgggggaaacaaaaa

SEQ ID NO: 97656 - DNA, 351 bp, Glycine max
cgaagcaattaactaaaacccaaatacttcagaattctctcctacaaaatctcatttcaccccatccctagcaacagggggtctagcttagctgtttgttgagcaggtgcataagttgttgtaaattcctagaatttgccttcgatttctacttgttagaaaaatccctaccaacaccaataacaaaacaccaaagcaagaaaaaaatatacaatcttccgcaaatgtttctatctttctttctttctttttatgaaacgaaaccaaacgagagagaaagcactaaattatttcctctccagtatccacttgctcgctccaacaaacaccgattcaagcaatcacaaaacc

SEQ ID NO: 97657 - DNA, 421 bp, Glycine max
aaaaatcaatgaattaccttctttattctctatttctttcatctcatgaacttttttattttgcaatagggaattacaacttcatttagccgatggggtgaaaggttttaaagaaaaacttcaaattgtccgctgtggattgaattgaaaatccccgttcaacccacaagcattgagtacagggttcttagttctcacgatggttgaaagtcagcagcacatactggcaattgtatttccttactcatgaatcttgctttcatcaaccattagaaatagaactcccgttacagctaacaaaaagctaagcctatcaatttttaaggtccatagtttgttaagaagctagtaaagctccatgtactttgggtctacaggtatcacaacttaagattaagattgtcctgcgattccttgatct

SEQ ID NO: 97658 - DNA, 342 bp, Glycine max
cctgatttggtggctcttttgtttttttcatatatacaagagcattttgaagttgattagtgtcatctagaaaaggactctcatgttactcaaatgcttagcagcaatcagcagcagctacaccaccacggtcaatttcgcttatagagtgtgcttcctgttccctctccagtcctgccaaaaccaagttcctgccctcactttctagattttctgtcaagcgtttctggttcctttcccaaactcgttcgcacatttccgtgaacaagccctccatgaacctgttgaacagactcgggtttggcagcgcaagagcaccagagaacatggattcatccattc

SEQ ID NO: 97659 - DNA, 167 bp, Glycine max
gaaagaaacgaatcctgttgcgtgtcactcccactctcactcaatcagggggccggtggtcttcaattttagggttttctcacagactaaaatccttattcttgggcaccaaagttacgagaccctcccatgctgggtcttggggcaccggctatcctaaccggttt

SEQ ID NO: 97660 - DNA, 119 bp, Glycine max
agaacggaaaaatatgatattattttcttgaaataaacgttgtaaggtgtccaaacgagggtcatcccactaaagtgaagtgtgatcaacccttggtttttaccagcacgactcaaatt

SEQ ID NO: 97661 - DNA, 471 bp, Glycine max
aggataatgaaatttatacagattatttatcattagggtagctccgctgaatttagttggtaaacgtgtaaattatttgttttgccgtacaaatggcacactcttacacaaaatataaatgaatatgccagagtgaggttaccttttaactatcttcgatcgagacagtccaacgttaaaaaagctacataacctaccccatcttttaaaaattacataaatgtttattttctgtttttattattttttattttcagaaaacaaattttatttttaaaattttaagatttaaaaaatatgtattgaaaacaaaaaaaaatcttaaaatactactgcatttttacttattcaaacaattcaatccaaacaccaccttattttgtcattggtggaagacagtggtcagacacactttgataagctaaatcaataataacgatatcaacatcaaatcaaacatttacataacat

SEQ ID NO: 97662 - DNA, 431 bp, Glycine max
gacgttcgggtataacaaacaacctttatacattcgtttacaacccaacccaccagtccttgagttgggcactttaaagaattagattatatagcctcagaaaaaaaaggctcgcgttacatagtaatacagacaacaatttaacttacaatttttcccctcaaaaatggatatacaatttaacctacgacatagttttagaggggtatagcagaaacaattggtctaaacttgctttttgaaattctagaacagaacatgaacagtaataacactgaagataataaaaagagcctaaaatatgttcttatttcttgcattccaagctcaagcacctccaacttctttccatatctatttcttctttccatcaaatacccatctagatactcatctatcgataccaacttatccggcttcaaaatagacgc

SEQ ID NO: 97663 - DNA, 458 bp, Glycine max
gctgttccacacaaagattaaaatttcccagatgacagtaaaagtactaaataccatatccaatatgaaatttaacaaatatgattatgaaactatatcttcaaattcacaaaacaaaccgatcagcactccaccctgacctagagaagaacaaaataatcaacacacctctgaattaaacaatagttttttaaggccagaccaaagcagccaagccatctggccatgcaattccacctgtatatggagacttgagtactggggagaagaaacaatatggggggggtaaaccaaaggggtaaaccaaatccagctttctattgaattctctgagacacctattttttttttccctcacagtctcccaattatacaatacaaaagccattgtagaaactagaaacctcagccagcatctagacaatgatgctactttcttttcctttttctttctttca

SEQ ID NO: 97664 - DNA, 116 bp, Glycine max
gtcgagtccatagcttatttatgacccttttgaaatctcaacacaagcatgcgcgcccgtgggaagttcacaaggataagaacacattaacacctaaaactcccgtgtgggctaaa

SEQ ID NO: 97665 - DNA, 489 bp, Glycine max
  unsure (1)..(489): unsure at all n locations
cttctctgttccacaaccttaactttctgcattctgagaaaggtgatgaatcttctacttctaccatttcccatcttctgaactttcaaaatcgccatttcttcttctttccgtgtttagttgcacttgttccgctagtgggtatgagtttgtttatttgcggatagggtcaaattcctttttgtgttatattgtttttaagaagatcctagtgttcacttatcatttggtatcagagcataagaaagtgatataatcaggtgtaactcttaattcacattaatcttctttctcttgcttgcttcatccccttagtcatatgatctccaattccatgtaaaggatcatcagacaggttgcttgcacctctatcacttgtgcttagtacaactagcaatggaggatccgcatccctgtatgncgagccatctctttttctttttcttttgggtatgatttcacttattggttatcacctttttgggtttc

SEQ ID NO: 97666 - DNA, 128 bp, Glycine max
gagagaaacactttttcagttctctctctttctctctaatatggccgacgatccaatgcccacgcgctgggctttccaggacttcaaattgtgttatgatgctaagtttggtagaaagaaagtctcgg

SEQ ID NO: 97667 - DNA, 144 bp, Glycine max
gtgtgttaggcgtacaccccctccgtcgttcctactcttagctcctctgtagcgacgcggcggcgcttctcttggatcctccgtccctccgccgatggaggcgtgcttgcggcgagacctacagccttggaagagggttttggg

SEQ ID NO: 97668 - DNA, 366 bp, Glycine max
cttgattgcaaaattaacatttgcttgcttttttgagaatccacgctttcgcccaagtatggaacaagtgcataacgagtttgtgatgccaaaatcatcttctttggatccactccccatgatcacacttggtcaactatctaaataatcgaaacttgttttctggggtgctatgtgtttattagttttttggtgtacagagtgattaagccttttgggatattaatgttcttctcttgcatattctgcatgtttctaattgagtggagtgctttgtatgttctgttccgttaaagacttggaaaataattgtatgttgtcttatgtctttgtgcagatcaaataaataaagtgtgattttgaagg

SEQ ID NO: 97669 - DNA, 117 bp, Glycine max
cgaacgggtggtatactcacaaacaaatatttcactgattcaccgatgcaactcaccagcggggtactgagggcggcgaacaaaccctcatgaccgttattctttaaaccccgattc

SEQ ID NO: 97670 - DNA, 379 bp, Glycine max
aaagaaaaggattagcagttatgtttggttaaaatttcaatatctttcaactgattttacaaaaaaaatatacatcaaagtacaaatctttgcaacacatgtttggttctcattggggcataagttgcccttgggggctctcttgttcatcttctaacatccgattatgagaaccatagggaagattcaccacattgtcaccactaacataaactactcgaaaaatatcatacttcatctcaggggagaatcgttcaagatatggcatcatccactttctatggtctgagttgagaatccatgagtaacaaaattgtagggactgccacacatgaatgcataccactcttggtaagcattggcctttcatgcaaaggcc

SEQ ID NO: 97671 - DNA, 403 bp, Glycine max
aatctataaaatatttcatacgcacgttaaggactcgagtatacaataagtagctcctggtacgattaacaaagtgttttcactttaaaaagaattccacagggtaagtaagagtatatcagaagagaaacagtcaataaaaagtagaatacatcctgtaagaatataaaatttcgcagcagatagaagcaacataacttcttctgataaatatgtacaggttttgatgctaaaagcatcgctgtcttgatatgtctgtaaaggccgttggtttttagaattgctcacagacaaagcatgcaaaaaatatctaattcaccaatttgttgctcctggattcttaagcacaattcctcattgcatgtgactttttttttgttggattaccatgtatgctcaacac

SEQ ID NO: 97672 - DNA, 332 bp, Glycine max
gcaaaacaaacttcacttttttttgttcattccacgtactgtagccttcctgatgaagtatttgtacttactttgctcgtgtttctcattcattggcaatcttaaatattatattaattgtcaaaggaaggtaaatcaacacttgcgagaaccacatttctaagttaaagcgacttaaaatttcaacaaatattgttattccaaccttaccggtgaagggaaattgacttactttcgttgctgtatatcaccaacattgttctgttgcccaagcatctgtgcatgttgcatgtttgttgtatttggctgatgccccataagttgttgttgct

SEQ ID NO: 97673 - DNA, 357 bp, Glycine max
ttatagaatagactcatttggataggtctctatcgtccaattgtgtgattaattttcttcccacattgctctttattgttctccaataatgagaccttgagatgaggattggactcaggatacttgaagactaaccctgttcttcttaggacagtgtatgggttggaataaatgaagccgcagctcaaaattgctcttgctttagttgttagcttgctttggattcagcaatcattttgtgatgaaacttctgatacatctagcttaaacaagtggaggtgtagatgttctttccaagggaaccaaagctattctcttgctaattgttcaaaatcatgtgattgcttctcagattct

SEQ ID NO: 97674 - DNA, 123 bp, Glycine max
gccattggcaatggcaatgcactttttcctcatgcgcgattaagtgctatgaagaagagcacgctttgctctaaaaggcctggctcttgcactaacacgagacctggaacgcctaattatctt

SEQ ID NO: 97675 - DNA, 366 bp, Glycine max
ctccattcattggactcttgaaagaagaggaagaagctcatcttctaaacatgccacagatacaacataaccatgttggcacaaagaatgcagtgtcatctacttcacataaaagaaaagagaagcgaaagcctcggtcttccttcttcagcagctgcatatgttgtgcaactgtgccttgagaattacacttaccaattaccattctattttacttttctcctttgtgttgtgagtttctaatttatcaaggttttaaaaaactgtccacaatcgcaattgtggccacaacatcaaggttttggagattccgtgactacaattgcagccacatcagccacatttgtctgcaacttccccaacatc

SEQ ID NO: 97676 - DNA, 282 bp, Glycine max
ccaacaagggggtttaataagtttaaatttccaaagtcattgggaaaacaaccaaaaattgttacaacatacaatcaagggcggaaagggggctctttttttttttgggaaacttttcaaccaaagtaaaatttgacagggaatcactttattttgaactggcttaaaaaaatacccagggaaacgaatgatcattgctgctggagggcactcacaggtgattgaactaaccttgaggcaaattgccaatggatcaaaactgccctttcaaaaaaacaaatt

SEQ ID NO: 97677 - DNA, 449 bp, Glycine max
gcttccagagattcaaaattgacatccttttgcagtgagacaaactattggtctttctcatatgctccattccacatttcaagtaatctattttcatggaagccagccaagccaccaacttataatatcatatacaacatcccatcccctccaggttttgataaaccaagtccaataatatttaatacttataaatatttagtgcccgtgtattaaagttgagtagaattgattgtgataaaattaactttgaactgttttgtaattgagatgtgtacccaaattgagggcagagcttacagcaaaccaaaatttgagtacaattctctatggtaatctctgataagcttagtaccaatgctatttgtggtaaacattcacatcccttcttctatcagtctcaaaagctagggtagaatgtcagatattatctcaacagtggcaccaac

SEQ ID NO: 97678 - DNA, 176 bp, Glycine max
ggcaacaaagcatggctttttgaaacttaacaaccgaaataaattgcattacttgtttaatgttcacatttttgaaaaaaaatccaggtataatgtttggtacaaattgacccgtgggttcaaactttacatgaaccacatggaccctaaatgtcagaatgggccctgaaccaaaa

SEQ ID NO: 97679 - DNA, 172 bp, Glycine max
atcgaagggggaacatttatctccctttttcggtccaatttccattcagcccttttagggatcaagagttttgtcttcctgtacattaaccaaaattattgcctaaaaaccttgatttaaaaaaaacagggaaaaaaaccgggtcttagttttttcccccatctctacttgg

SEQ ID NO: 97680 - DNA, 323 bp, Glycine max
tttctttttttttttttttttttgatttatctgttttgaatataataataaaagaagaggtctttttttaatatattctcggaattacaaaaatccattttaaattggacgcgaacaaaataactgctgagatgaaaaggcccacctaaatatccccatgcaaacactttgcactatgaataaaatcttgaaccttcaaagggaaaaggagggatgtgtggtaataaagagcaccaaaaaaaaaaaaaactcaatgatgaccatgaaaactacaattttaatgcttccctgaacttaacgctggagctattttctaggccctt

SEQ ID NO: 97681 - DNA, 344 bp, Glycine max
ctcagaccaatccccttttcaattctcatagcatagatctccattttccaattcaaaccttttcccctttcttccctttcttttcatcatcctaattgttgttggagttcacattcggtgttgctttagttattattgtggaatagttagcgttttagattttgaatgtttttttcttcttgtgattgattttcaggttggtacttatctacaatctgcatcatggaaggtgttattctgagaagggtcattccttcggataacagttgcctcttcaatgcagttgggtaagcaaagcaatggaatacaacccccttttagtttcatgttgtatcggtattact

SEQ ID NO: 97682 - DNA, 481 bp, Glycine max
aatcataacaatgaatatattgaatcactataattagagcagcatcaactaaccaatagttagatctatgatacgacccagcagagccgaaattactatgacaaataaagggctaacaagaagcccataaaacatctttaaaacatttaaagaaaaaaaaaagagtaacaatgctatgcagtcaggaaaaaaatataaccagaaacttagtcaagatttctggcaaaaaaaatacttctgactagttagcattttcacaacaaaaataatgcttaaaaattacatataactgtagctgctctcagatttgaggtgaagaagcactcagcccaagccatggcatggactcagctgccttgttagaaggcccatttgctacttgatatggtgctttcgaagcaattctgtagaaacaacacaaggaaacaatattatcaactgggcaaaaacatctaaaattaaaacttaagaaaaaaaaata

SEQ ID NO: 97683 - DNA, 405 bp, Glycine max
cacatcatatcttcaagtttgagattatttagtgctaaatttttccaacaattgtcagaagaacagcgataaatcaattcttactctgatagcttccattcaaattaaagttcatttcaattttactccctctgatgaaacataaagcaagccaagtaataaactaacttttgacaagggttttacacatccggtgtctctacttctgcaaatggtgctaagtttcatggctacaaggtatatgaaatataacatgaaagttgcataaacttacaaccaacagctaagaacaaatcctagaaccataaatataagccatttctgcatagatacctggtatgaagaagaagaagaagcaccgttgcacaaattaaatccataccacgtatctctggggatatatgt

SEQ ID NO: 97684 - DNA, 118 bp, Glycine max
cgcggggaatacaccaaattttattttaatgccgaatttatctgtgcacaacattaaggactcccgtctcattttagacagcaggtttcaatatgaatcacccctcatccacaataca

SEQ ID NO: 97685 - DNA, 210 bp, Glycine max
gtggacggggaacaaatcttgcctaaatgatacagaatcaaaacccgggtcccgcatgtacaaccatgccttttttttaattaaaaatcaatttggcaccaaaaaagtaaataactttccccaaaggggccaaaacccgcccccaatttttaaaacaggaataatcatcccggggtttgcccttggcatttgaaacactagcaaggggac

SEQ ID NO: 97686 - DNA, 202 bp, Glycine max
ggatgatgtgtgggggaagcttgagttgacttaagttggtgttccttttggtgagaacaagagaggctgcatatgccagttgttggtcacatctagagatcttaatgtgttgaatactaactttgaggtggataaggcttataggcttgaggttctgtctgaggatgagagttgggagttgtctgaaaagaggggaggggat

SEQ ID NO: 97687 - DNA, 484 bp, Glycine max
atcctccgtgcaacaatactaatcttcatattatatttatgtcgcaattttggagtcacaacagctagttgtttcaagggaaaaagaacaattaggaagggacctatcccaataactaaatttcatcaactctctaatacaagttcaaaattaatcccaaaagtaggaggatttagtagggtaccaaagatttcagacgctaaattacaatctgaatcaaaaccagagcgttttaaagtatataatccctcccttttaatcatctcatggagttgactaacatagatacatagtaaaatgagaaaatgtgcctctcataccagaatttcttctacacaacattatgtatcattaacgagccacatctggcactgattcattgctttgtcaccatgaagctcaccattttccttaatggacccattttgttgaagaagttcctccttgatgggactactctgcttcatctcctcaacttttgcag

SEQ ID NO: 97688 - DNA, 458 bp, Glycine max
gtaattcaatttgcttcaaaattatatatataacatatacaaatcttattcacccctcgttgtcgaaattcattaaaccgtgtagttctttgcaccgacaaattgaattgaaccgaatggatgaaattcgatttttgtaattggctccattgtcagattcatatttattgaaaatgaaacgatccgtattattttagaaaaatatatttaaatgatcaattgccactacacttatattttaaatggttttttaaattcaaaccaaaccggaccatttgattttgattggttgagtttttttattttttttcccaaaccaaattgacatgttctgtgcaccctcaacgaagagggtgagtattgttctccccttcacaagacaaactggcttgatcgcgcaaagttaaaacaaacaggttatgtgattgatttgcatgacaaatgatcacagactgaca

SEQ ID NO: 97689 - DNA, 384 bp, Glycine max
aacaaacctcggcagtaggtcactatctcattggcaaattagaattatacacggtacacttgaagataaaacaagcaattatatactaagacacgaaaatggcctctcgcaacaactaagggggaacaactaaaagacaatatttgagcacatttacctctagacattagcagataagatacatttttttcttcacaatatacacaactaatattccaaaaggaaaataataagcaccttggaacaggaacaagggagcagaaagctctggatagaaaattaaacaccttggaaagacaaccgatctcgaagagtatcaaatattgatgaagctgctgcattttgtgcaaaagtcaatttcaaccgaccaaggaattcaccatc

SEQ ID NO: 97690 - DNA, 460 bp, Glycine max
tcgtcggcatgtcctggaccgacgatcaaactcttctctgcgtcgtccaggacggcaccggttaccgctacgacgtccacgcgaacctaatcgaaccaaacctctccctcgggaaagagtgcttcgaagacaacgttgcggattgcgcgttttgggggcacggtttggtctgcatcaccgaggcgaatcagttgttctgtattgctgatttcaggaaccctagcgcggtgaagctcgcggatcccgggatcgacgagatgccgcattgtatggccgtgattgagccgcagtacacggtttcggggaatgtcgaggttctgctcggcgtggatgatgctgtggtgctcgctgtggaggaggatggcgtgcagaggcttggagagggattgttgcgggggccgctgcagaagatggtggtttcgcgcgacggcaagtggctcgcttcgtttacccatgatgg

SEQ ID NO: 97691 - DNA, 111 bp, Glycine max
acatcataaggaaataatgtgtaatttatttcaaatgagagacgacacgcatatgtgctcatgtgagacacattcaagtattcaaagccgaggtgaatctggaataggtgt

SEQ ID NO: 97692 - DNA, 368 bp, Glycine max
acactatcatctaaaaaaattaacatatatgatatatttattttatttttacaataactgtcataccaattataatttccaattggttaacagtacaaaaaaattttacaccgataatacattgaaatcaaaactcttaactatattgtcaataacacctcaattttctatccaaaatggactggagattacacctatgacataagatttgtaaattacatggtattctcatcatgaattttctaagtcttttgcaacatgttgtgacccttgagcagatccgttagctcttgtccccttgaaggattttaaactaatcagccgagcaaaggcactctttgatctggtcattattggacctccatgta

SEQ ID NO: 97693 - DNA, 534 bp, Glycine max
aaataaaaaagctggcagctaaaatcttgatcgaatagttcacagtttacacacatggaccccttttatgggtctcatttatgaaatcacaagtcattgccttacatttatacaaatatacgtcaattcaaaagaaacccatgaaccgaaggcaacttctggttgactacttgactaaaaacaatcccccccaatacatgcacactgctaaagagcccgggcagtgagattaatcgagttagaaggcaaagcatatctccatagaaaggctaaaaaacactaaaattacatattgatgacattcatcaggcaaatcaattgaaaagccaaggtcttgtattctaatataagtcaaatttctcaagaaagagagcgcagtattaaatcatacagaaaaaatactcagctaacagggagaaatgcacaagaaaacaacaaatgaaataattattcccgggagagcgagaattgtggagagtatagaagaagacgaccagttcaggaaactaacaatcacagagacataaatggatg

SEQ ID NO: 97694 - DNA, 363 bp, Glycine max
  unsure (1)..(363): unsure at all n locations
gaaagagaaaaaaacaaagacactatcagttatcactactcttctatcaataaaaccgcaatggtagacgtggaccggaggatgaccggtctaaacccggcccacatagccggtttacgccgtttatcggcccgagcagcagcagctccgtccgtcccggtccgtaacggcgtcgtctcattcgcttccttagcagacaaggtcataaaccaccttcgcgactcaggcatacacgtgcagcatggtctctccgacgcggagttcgcacgtgccgaggctgagttcgggttcgtgttcccgccggacctccgcgccgtcctcgccgncggtcttcccgtcggtccgggattccctgactggcgc

SEQ ID NO: 97695 - DNA, 201 bp, Glycine max
catcccctaacagtattttgttgaatccagaacctttaggaaagagaactagtgaagaatttttaccaaagaaaggagagttagatccttggatcagaaaaagcttgggcattaacacttaaaaaaatgctaaaaaaaaataattaggggcggcgggaaacatatgggcatactcatatttccggggaaaaattcacataa

SEQ ID NO: 97696 - DNA, 476 bp, Glycine max
ctcgagccgaatcggctcgagcttttcactcacacaattcttcaaacaccttgcaccaaaaaaaaaaaaaacaacttcttccagtgcatggaactccggcgacaccggtggcggggctagtagtaatggcttccacagtcgcttccgcaatggcttccacctccgccgccgagcccgaccccgactcggcggcgaggaagcgctacgagggccttctcacagtgcgcacgcgcgccatcaaaggcaaaggcgcgtggtactgggcccacctcgagcccatgttgctgaacaacgccgtcaagctcaaatgctccctctgtgactctctcttctccgcttccaacccttctcgaacggcttccgagcatctcaagcgtggcgcctgccccaatttcaaccactcttcattaccttcaccttcccccatttccaccgtgctttcccattccaacaacggtagaaagagaacctcaagc

SEQ ID NO: 97697 - DNA, 544 bp, Glycine max
ggagcttgaggaagttttttccaacaagaagaggaggcctattgatcaagggcctaatgttgttgaagttgccgatgacgatgatgagttattaggttgtgctgaagagtgttcagatttcgttaaacttgaaccgcaggaatattacagtgatgacaaggtattagagtttgaggtacctgacttggaccttgctttgaatctcgatgaggagaatattgaaagccagaagagaataatggaggaagaacatgttcaactagaaaatagtagagagagatatattgatgaagtgttttggcaagatttgctcaatgagggtatagaagatcaaggtgtactaggtgttgaagatgtagatgtattggccaagcaactaggttatttggcctaaataggagattatcaaggctgtattttctattattcattgaactagctgggtgacagtatctccttataattccttagatgtatactttctgaccagtttttgtgtagccagactcaatttcttggcccaaatttaaagcacgtggttatc

SEQ ID NO: 97698 - DNA, 558 bp, Glycine max
agaagattctcctgtagatcaattctatcagatttccaattttcaaccctgaaaaagcctaaaaaatttccttgattttcattcaggaattttccctccctcctattttctgggtttcattgataaacccctctcacccccaatttttttttttttaaaagttcattctctctctctagtacatacctcacttttttcttcttcttaattttcaatatttttgagcttcaaaagcctttgaattggacagttccctggtctcaagttttgaactggtgaaatctctcctcatccttcttcttcctttttttcttcttcaattcctccaaacggtccttcctctctctagtacacagctcacttttttgtcttttcaattttcctaattctctatatctgagcttcaaaactcaaaatcctctgaatttggcacttccctaatctcaaacttcacttttcctcctcctcctccttggtcttattactacaattcttgtagctgatttgatgggaatctgccatggaaaacccattgaaacccaacaaagtcaaagagag

SEQ ID NO: 97699 - DNA, 471 bp, Glycine max
agtaaggaaatttaaatctttatacactttatgtcaatatgctcaatttacaaattttgaagaagttgcaaagttgtcagtggatgccagcaagttgatccacaagctcatttagcaagtgatcaaatatttctgactcaaaatccgcacttatgctacctaaatcaccttgtttattggtccatatatgtatcttatttgattcagccaattcatcttcaactattctgcaaacttcaacccaaatatctatatactcctggccattcatctcttttttctttgacccttcatgtttgttgttgtcaattgcctcaaccttactctcatcatcaatcatcaagttaccatcagatctcacaggaaggtgctgatcattgtcaagctttggtgacaattttcttcttgcactcaaaccaactgttgcacaagcttcacgctcaaaatcaaggacagaaactgggcttgaat

SEQ ID NO: 97700 - DNA, 326 bp, Glycine max
gaaaaaaaggggtgttttaccaatttcatttataaaatcttaatacaagatcgaaatgggtccttcacaaatcacaattttttactaaaacagaataaccgggcaaaccaatccttctttaaatattcaaccatcctgccaatacaagggtaaaattttaaactttttaattgggcttacatttcactggttaaaaagtaccgtttgctttttgccatacagaccacagaagaaatttttccccattcatcttaaactgggggggccttaatcgaagaccccaaatttttttaccagggtttttggcctaaacactgaaagtaaaa

SEQ ID NO: 97701 - DNA, 295 bp, Glycine max
ggaaagaattccctttcaggacttgctattatccttcaaatttagttcttagggcttaaaatgttgcgttgcgtgatctagtattcgcagtttattatgggacatatttccatatactgaaattctgtcctattaaacaaaattgatccaagtaggaaaatatgctacattctttccattcacagaattggcccataagagaagctaagaacttgaaattaacatcttcactggttcatgaagtcgagcaatatctcattcacaccggtcataagttttatttttgtgggtctcg

SEQ ID NO: 97702 - DNA, 523 bp, Glycine max
ctttgtttgctcacataagatttgggtttcttcaaaattatctttttttttctctcctaaaaaaaaaaagagaaaactttgtttgattctttgaaggaggtttgaagaaagcaaaaggtgtagttttgttttaagtttctttgaaatggttttcatgtctgagatattgttccccgaagaaaaaattgaggaaggagagtgggagaaggagagataagaagaagagaagaatacctacccagcaagcagaattagagaattttttttcacaaactgttgatttgattcattttcatctgcttctgctgggtgttgatggtttcatgacagggtggttggcaatgtctgctcctatgatcattgaccctatgatgatatcggcaccagaaactcaatcagcagcagctagcatactagttgcacaaagtgaagttgaatttgctgtatgtgactgttgtggactaacagaagagtgcaccccagcctatatagaaagaatcagagagaggtactttggaaaatg

SEQ ID NO: 97703 - DNA, 388 bp, Glycine max
  unsure (1)..(388): unsure at all n locations
gttcatttacagcatttggaggaagcaaaaaagggttggtagctgaaattcacgctcacaacagcaagactttgccttaaaataaagaatcaaacgtttcctgaattgggttctcggcaaatcaggatctgctgcttcagtgcttcactgtttttttttgtcttgtagcttcttctggaggtttttctcatggagagtagtggcaagatggaagactatgaagtggttcagcaaattggaagaggagcacttggtgcaacttttcttgttctacacaagattgaaaacangaggtatgtgctgaagaaaatttgcttggccaagcacgcagacaaatccaaagtgacagcacaacangagatggacctaatagcaaaactacattacc

SEQ ID NO: 97704 - DNA, 431 bp, Glycine max
gatacgaaacataaattttctcactaatatagatgtttttactgttgtatcaagatcagcacaatatagatgccattacttgccatcatgtaacggataggaaaatatgataagagaagcccaactaaggtcttggtgattgcactgcacacattgaagtgatttacaacctcagggcctcaaaactatagtcttgctccggcagactgcattgtgactaagaagcaccaataagtaaggaagcatccaagagggtaaaaaggcaccaaacttttgaacagccacacccttggtgctgcctaatccaattaaaccattgaaagccaaagacaaactatattggttaaattcatgaatgaaggacactaggtcatgaatgatgtacaggtttatcagatcctatgcatgtgaaagaattgaaaaatgagatt

SEQ ID NO: 97705 - DNA, 360 bp, Glycine max
cacggttaaacatagcattatatagctccgttgaatgcaaggttgcaaaaacattgagtttaaaacataactattttgcacaacttgaagcctatcatcccctaatcagaatgtcgtttacgaattgaaaacaagctatattaattggcaatttttttaaaagcaaatgaatgatagtattgattcctgcggctaatattacaaaagacaattcaagaacattcaaccctcccatgaaaggcaacaataagcagagaaaaacaaaacgaaatatctgaagaacagccgctataatatttgcggacggggaggtgaaggatgagtgagggttgattagtcaaagtcaaggaattccattct

SEQ ID NO: 97706 - DNA, 132 bp, Glycine max
gcatagtaaaattgagccatgaaaaacttcatattggtgctattatcatactccacagcattttagggtcctgagcatacacagtgcgaaatgaacactattttggtgtcctaaacccaatgatttgccccc

SEQ ID NO: 97707 - DNA, 291 bp, Glycine max
gagaaaagattattttaatactacactgattagttacattgggaggatcatttaaaatagctataaaaaaaagtatcattaagaatagctgtaaaaatgcacaatgtacattcactagtaaaacttgcaaaaacctaacttcctttttccactaatttattatttttttatctggcttggaagtttactgttctgatggcgaaggcaattaccaaggcaaagaagacaggacaagcgaccaatacagcagccactggccccatgaagtctggtttaaacccataatggtct

SEQ ID NO: 97708 - DNA, 480 bp, Glycine max
gattattaataaataattttattttttaagcatgggaagatgaattccattttttttcttcactggtatgaaaaaacatttgtgaaaaatcaaataccttaaataagtaaacggtggtgccccactataacaggtcagtccaaaatcaagtgtcgcataaaaatccaaagcaagttcaagtttaagattactatgccccggcacgttacttctcacttgttggaagtgatgatgatggcaaaagaggaacttcatgatcatggaccgtttgatttcttttgataccatccatctttgtgcagtttccaaatgctttcggtttcccacagtacgtccaacttacgacacaaagaagccgtttagtttaaccacttctctttgcgatgtttcgttcacaacgttcatgcctctaaacggccacccagtttcatttcaatttgtgaaaccactaacccaaaccaccccatacccattattaca

SEQ ID NO: 97709 - DNA, 494 bp, Glycine max
cgagagccactcagtgatcgcttcttttcttcttcatcttactgtgtcaggttcgatcatcgtttggaacttgttactatgcaccgtttgtgttcaatgcagttcgatcatcgctcgtaactaggtgaagttggttgcatatgttcgtatttggctattgaatgaattgcactagtgttctgctgcaaattttttgacatatattggtgacgggatattttctagatggggggagcatgttctaggaagcaagagtgggataacgaagatagtcttatcagaggactaccacgaagatattgcaaaatgcggaagtttgaaatggtggacatcatctttttcttatccatctgtagattttcacctacgaaagggagattgtccgtcactgttggacttatgcatacagaaaataaacgaggatattgataaatataacacattttctatgctaccacgagatataagtcagctaattttcaataatttggttt

SEQ ID NO: 97710 - DNA, 333 bp, Glycine max
caaacgatcatatttcgtaccatttagcatttactcaaagaaactgtgaagtgcgttacttgatgttatctataatacaaccaaacagaatgccgcattcaatgtcccaaaaagatgcatctgctggatgccttaaaataatgggcttctcatagctaaacatattacatcaaaattgcagttatatttcagctaaagatttttggaaagacaaatgtgaggtgtggaaaacaaaacaagcattccataaaaccagagaaagaaactcactcctccgttgcccttcctttcggtttacagagctatctatttaagaattgaggaacaaaattg

SEQ ID NO: 97711 - DNA, 308 bp, Glycine max
gggggggtgaaccaaattaaaattcaaaagtaacttataatgggccttacagaggaaagacagaaaattggccaagaagtccccgaaatcaatggagttgggtaaaacaaactattcaagtttttaaatgggtactatgggtcaaggccttcacaaaaattaaaacaattaaaggaaaaatctcttttccatgattggaatccatcataattttccccaatgaaaaacaagaaaaagaaaagtttcacttgaattaatacctaaccaatctcacattggcttgaatatttggccggtttttccattaa

SEQ ID NO: 97712 - DNA, 344 bp, Glycine max
atgatatgcatttgtctattatttaaaaggtcaactgaagaatcccaacgtaatctccacattttggcatagcagtcaagcccttataagttacaattcaaacttctctacctcttcaaccataataattaaacttaaccaagcctccaatgcaaaatgaaccaatatttcataccttcattcaaattcatctcctttttccttgcagtgattctccagtttcaggccttttctgtcactatttacaaacatttgatgaacatccatgtttaagttctctcttctattatttacaatctctggccaagtttttggtttaagggtgttattgttatttacgaaag

SEQ ID NO: 97713 - DNA, 489 bp, Glycine max
tctgaatcaagcttcttgtgatcttgtgtcatggtcatattgagacatgtgtgtagtccaccccattgcgtgacttctcatgaatcatttttttagataaaatttccctcatatagaaagggcaaagacactctgcacttttattcaagcaacaaacgacataattgttcgatttgctttcaacaactttgaaactttgatgcaccttcataacatattgtttgactgcatttttgaccgcatctttactatcaaaatccatgccaacatattattcttggccaacattaaaactcgatggcatctccaaaccacaaatgtcctcctcatcaggatgactctagttgatattgttataatgcaaagtatcattccaaaatggattttgaattccttgtacacctaatagttcaaaaataaattcaaatcatacttatttagcattaaatacaattgtcatcaaatgataaatgtattcacctatttttt

SEQ ID NO: 97714 - DNA, 349 bp, Glycine max
cggggccagggaaagggcattcttaatttcttattattgaaaacaagccaaggggtctggtgggtacaattcaaaagccagacaagcctttaaaaacaaggacttgatttaaaagggaagaaaaaaaatagcaccaaatggatgccctgctaccacaccaaagcccttgaatatgagttacctacccttaaaattgcacaacataacccccctgacaagaccggagtaaaacaagctaaagcctcttccacactctaaggcatggggaaaagcgattggttttaactaaaaagaccgaagacttaaaaagacatgaacttaagcttaagtctaagtaaacattatgcaa

SEQ ID NO: 97715 - DNA, 405 bp, Glycine max
ctaattggggcttattacttacacgttgatgtacagtttttaattactaacttaggccgttatttacacaacgaattaagtttacaatacaaaaaaaaggctaaagaaaatgaaaaatagaaaatggaaacaatttttggagggtagttccattacccattatgccacagtacttgatctaatcactaaagagtacaccaattttcacctaccctcccaaagagtctccttaaggatcggtttaaaaacatcttttggtgaataatagtctacaccacccatcatgctggtacttccggatgaattctggtaatttgtatctgatcctttgatttcaatgccagtcatgaagctgctcacattctcaaatttccagtcagataggtatccgggctttgaagttac

SEQ ID NO: 97716 - DNA, 363 bp, Glycine max
aactcctagagtataaatatttgttgggggctcgtatcataaataatgtttctcccatataggaaaaatgttatacactacttcaaagttcaaacacattacacttaaaggagaaaagacgtgtgtttgtgtgtaaggagattcattaaaatagatagcagatgattagatttagttaggagggattctttttaacatataaagaaaacaaactgcaaagaatgatgaaaaacaacactgaatgaatgtatatgcatgagtatatcaacatatattggcaacattttgggttctggcatgaacataaaatgtcatatcgtaaatgagtagataaaggatcaagattccattttatgttgcaat

SEQ ID NO: 97717 - DNA, 510 bp, Glycine max
ctcgagccgattcggctcgaggagggatctgagaccagatttgatcaggatccattacttggtgaaaattcaaaatgctgttcttgttgtaatgaacaattggttttaaaaggctatgatcaaaggttggtaattacgaagtcaattgggtctggcagtgctgattttgatggatcgaatgctgttggaaacaaatttcacaagaaaagaagagttaaaccatttgtatcatccagagctgcacaccttagaaataaacatgaagatcctttgtctcatgttggttacaccgagctaaagattacttctgatactgagtctgaaccggatgtttccttatctgatgatgatggtacaagcataccagttcagggtacagatgacaccaaggaagatatagaggtttcatgtgaacatatggagcctcacatccacgattcaaatgagaatttggcttttgagaagctagggacttcagcttctggacttcaaccatcattatcagagtca

SEQ ID NO: 97718 - DNA, 309 bp, Glycine max
gggggcaaatagcccccatggccctgtttaaaattctcgcaaatgttaattcactttgtttccaaactaatcaatccaattccagaagacacccccaattaacaagcccttccttatttacaaattacaatgcaaataccggaaagggagaattttattgtaaaaaaaaaatttgaatgggccgataaaaaaaaaccttggcaactcaatgcaacaaaacgttcaatgaaacccccaataaaaaaaccgggggagaaaaaggaaaaaagtttttttaaaaaacactcaatactttttaaaatcctattt

SEQ ID NO: 97719 - DNA, 414 bp, Glycine max
aaattaaatcattttgcatttctcttgaacaaaaaaataaaaccctatttgaagctaatatatgtacattggatctctctacaataatgacggttacatgttcttttaacatgtgagaacaaggttaaatgctcaacacgaactgggcatgtaccatattttcctgcaagtgaattaagctccatgttggtttgcttctgttgatgtatatggttgacttcttggcgttgaaagtttcctttgtaattcaagagttgacatccgctcagcctccagtgctcgctcaagcttggcagcccgggtactccattcccctaagatagctcttaggctttcattctcttctacatactgattgttggtcatgcgaacatgttggatctctgagtccctttcagcaatcaaagaccgggc

SEQ ID NO: 97720 - DNA, 233 bp, Glycine max
ctataaagtgataagcaaacgagtactctaagtcttacattcatagatctcaccttgttcattgccttcaatccttcaaatgcaataacaaacacaacccttttcaggaatcctcaatgttgatcactgttctgcaaaaaatttacctattgggaagtgaagcacagacccagatacttctttcaggccctccggtgcttgctggagttattggcatcatagcttatgctata

SEQ ID NO: 97721 - DNA, 431 bp, Glycine max
ataaaagcatgatcccattccaaaggatctttataagagtgtcttgtatcaagtgctcagtaaataaaacagcacaagcattattaacgtgtccgttttacatggctacagccataatgcacaagaaatgacttaaaatgaagcaaggtcttgtggtgagtctcgcatccttcttctgtttacagccacatacaagtttaagctctttaaataaatgaaaggatggagcattttaaatccttgtcagactggtgtgttgcttaaaatttcatccatgtagtctccacttcggattggagtgaatcttggaggacatgattcgctacaacaacttttgaggcattccaccacacagtctggatgagggtctaagaagaatgccatcgaatagcgttcttttccagttcgtttaacccggtgcattgttgacc

SEQ ID NO: 97722 - DNA, 254 bp, Glycine max
aaagggtgcatgacccaaattgggtcacttgaaaaaaattgatattcccctcactttttttgccaaccccacaaaatggggggggggggggaaagaaaattccctttttttttggggggggcagcaaattcaaaattaccattgaaatggaaccctgacagataggaacttccccaacttgggaaccccccccacattttttttactcccgattccgggggaagaccaagaaagaaagaaaacgcccatatttt

SEQ ID NO: 97723 - DNA, 429 bp, Glycine max
tcgaagtctgttccgttctgatcagaaagggaataacggtaacggagatatggggcttctgtctaacagagtaactagagagagcctgaaaccaggggatcacatctactcttggaggactgcttacatatacgctcatcacggttctctctctctctctctcttcacttttctattttaatttcctttatatatatatatatatatatatatatatatatatattgttttttcgggttctcttgtggaatttgtttgtggttcaaaggaaaatgaagtaggagttgcgaaaacagttaatgatttagaattatagattctgtacttgtcttaacaccaggagattcatagagtaaaatatgttataattttatttggaaaaatatgtttttagcctacgtactttcgataaaaaatgttattagtcat

SEQ ID NO: 97724 - DNA, 70 bp, Glycine max
aaaatctaagggcccgtttggagtggttgagtttttgatttttgggttttagagtttaattgttgacttg

SEQ ID NO: 97725 - DNA, 336 bp, Glycine max
gatgtccaactttagcaatattttagagttatagctgggggagtacacattcaataataccgcgcaagaaattatccttatttttggggcacctaagaagatcttttgctagggggaaaaaaatcatatataagctatacaagaagaaatgaatcattgcattacagatgtgaaatcagtgatgctaacagagcctgagggagagagaaaaacttaattacgaacgcccaggtttcctgaaaatacttacaatcatacagttgctgagcggacagggaagaggaagatatcttcaggttggctggtaaataacacaactggtgcgaactacaccat

SEQ ID NO: 97726 - DNA, 517 bp, Glycine max
agacaatatcacaaccattgatttatcaaacaataagcttattggaactattccatcctatttttctggtcttccacgtcttcagaagctgtcaattgcaaacaattcattgagtggaagtgttccatctaccatttggcaggacaggattttaaatggaccagaaacacttcacctggacatgcaaaataatcaacttactagtatatcgggcagtataagtcttcctccaaatgtcacactctggcttttgggaaatcctatgtgctcaaataataacaccttagttcagttctgtggacctgaaactgaaagtgacggtagcatcaatggtaacttcagcgttagctgtctcagtcaagcatgcccctccccttatgtatccgctgtggactgtttctgtgctgcaccgttggttgttaattatcgattaaaaagtccagcattttcagatttccgcatatacacgaatgcatttcagagcttgatgtcaagtggtcttaaaatacatattagt

SEQ ID NO: 97727 - DNA, 309 bp, Glycine max
acgaaaagcagttcattttggattgtgagggtacaaatatgctgttttatggaaaatctgctcggagggatgaggggtcattaatagatgcacattttctgcctcatactagtttttatttcagttcttcattagcattcatattaagctttaaaagcagataatcttctcattcccttgtgccaaatacctcaaaacctaggatttcttgggaaatagctcgctttgtaatatgtgattacaggtcctacttcattgggtagggtcttgagaaaattatgagaagcatgtagcatgtgttgtacttgt

SEQ ID NO: 97728 - DNA, 514 bp, Glycine max
gagagagtatgaggacccatccaccgcccataagcacgcagtctttctgcaatcaaatctagtttggatctgttcttctcctcagtctaaccctaacccaacactgcatcttctctccaaaaataagagaacaagcttcaacctttttctcttccctcttcaacggaaactccaatttacaccgctttcaccattgaaagccccaccaattgaacgtttttagaggcaagttgaagtagtagtacaagtcaagttaatctcaatcacgactttggtgacctggcctgcaccaatctcaatctcctatttccgtttctatcatcacttgtcactgctactcgctacaagttggattcatcaaattaacaagattgatcttcaagaaaagccaagcctggtcaaatataacagtttgttctcattaatttcctttccattttgatccatcccatattttgtttctctcatttacatatacacacatactagaatagccaaattcatttctactttt

SEQ ID NO: 97729 - DNA, 447 bp, Glycine max
ctttgttttccgtggaaaccaacctatcttcctttgttattttcattctgataaaacaaacatattttcttccacctttttccatctttgcaaaggggataaagggttgctagttgctaccatttatggttttattccgccatttggaggaaccttatgctcttaaaacaaataaaacccaaagggttctcttgaaaaacaccagaactttcatctaatcaaaacacgtgttggccaaaaacatcaccttctctttattatcgcatgcaagagcttttttagatgctcctttgtgttcaagattgagagaaaacataacctggaaacctatgtcgtctgtgccggcacgaacagggcgacaaagacagcgttatgaggacaatttgcgccttgtctctggatgtattccctatagatggacaaaggacaacacagatcaaatggggg

SEQ ID NO: 97730 - DNA, 449 bp, Glycine max
ctcaaaacaaagagttcttacaacgcataattaatttgtagaaaaaacgtagagagagagagaggaaaaaaggaggaacaacacaacaacggagagagagaaagagaaagagagagtgggttcttcacactctcgcattccgcagatcagatccaaacattccgaattcctagatctatttccgctctccacccgcactcgaatttccgattagcgatttcaatttcgtgttttcggcgctattaggttttctgagatcgaatggcttgcatcaaaggggtgaatcgatcagcgtcggtggcgctggcgccggacgctccgtacctggccgccgggaccatggctggcgccgttgatctgtccttcagctcttccgcgaatctcgagatattcaagctcgatttccagtccgacgatcaggaactgcctctcgtcgcggagtgcccgag

SEQ ID NO: 97731 - DNA, 111 bp, Glycine max
attccttaaaaatcaattagcaaatgaattggcatggagatggtcaatggacttggcacaattccaacacacaatattgaatttaacacgatgacctattggtcaatcata

SEQ ID NO: 97732 - DNA, 385 bp, Glycine max
aaacaaccaaaaaccgaaagaactcgtcaaacccatctcaccttcacgctcgaagatgcttttgagttgtttttcttttcccccttccaaaatgccttcttctcacattcttttctccctcctctctttcctctccatcataatcactaccttctcttcatccacacccaacaccatcactctccatctctctcccttattcaccaaccacccctcttcaagttcacacccattccacaccctcaaactcgccgtctcaacatccatcacaagagcccaccaccttaaaaaccacaaaccaaacaagtcactcgaaaccccagttcaccccaaaacctacggaggctactcaatagacctcgaattcggaaccccgtcacaaacc

SEQ ID NO: 97733 - DNA, 327 bp, Glycine max
ataaaatatttatatcattcaaatgtttgaattggtgcaggaaaattaatttccttatctaatgacttggtatctctgcaatctcatacaaggattctgtcacatataagaccttggtaatttccaacttgtaaatgtaccagaacagaacatttcatactgcagtgcatggtatatatacacaatgccactcgtgccctctaaaaggaacataaaatgaaagctatccatggatgatgaacaactttaattaattacccaatcagcacttcaaccccgcgagctttttgttgatcatctctctcggggcaaagctatccacaattg

SEQ ID NO: 97734 - DNA, 433 bp, Glycine max
gtgaattgaatgaaggatgctcgaatttgagttattgatatggcttttgaggtgctgaatttagtaattaggatgctttttatttcatcactttaatgagctgctttgggtttataaggttgtcttttgagttattgagtttccttacattatggtagttaatgtcttgcaatcatggcttattaatagtgggcaattgcaagagttcgtttcgttataattcctgcattcactttcattctccaagccttttgtgctttcactttcaagcttctgtcataaatcctagcgagttaagcttgtattaagtcatgtacagaaatttcttgcaataatgagctatgttggatcagcatattctatgcaacttcttgattataaaatggatttttttttctctatatggagaggtttgttggatgtggtacagtta

SEQ ID NO: 97735 - DNA, 346 bp, Glycine max
aaagaacccaccacactatatggtggatcttttaacaactccacactatattagttatcagaaaaggcaatgaatactccataccgataacataatatatataaaatggaaaaacttataccatatttaaacaacaaattactctctacattaccaaatacaaatggaaagaacaagaacaaaaacaagagtttgattgtaagaaaaaaaaaatgaacagtttattactgcacacccataacccctcgctagtcggtgctatatattatattgcacaaggcaataaaacatgaacaaaaatcataattctctgaggggataggattcctaatttaacttcctaatt

SEQ ID NO: 97736 - DNA, 343 bp, Glycine max
ggaagatatgccttttaagcaagcaatcatttgttatggatttgataacagttcaaataaaatgtacagtgtccccccccccctcccggatatatctaactagtagtgagaaaacaaacaacggttgtgatcacaggtgttgctgcatgtgcaaactcaatcagtagtacatttataacaacgcaataataagaggaaaaaggaaggaaactttttctttcttcctttcctttatgcttttctctgcctcattttttttaaaggattctttggtttttttccaattgggtttaatctcttttggttgtagtagtgtgtttgatattaacacatgacacccctg

SEQ ID NO: 97737 - DNA, 321 bp, Glycine max
gggccaaagtcaaagtcaaaagcttttatttataatgacatttgtcaatggaattggcaccacattacggcacaatcaccagcttcactgcattcatacatctagttccaatgcagacttgacatttgcaaaaacatttattgttaaaaatgaagtacaattcaaaggaggtcggagcaaacctcttcaatccgacgaaagaacaacacaagtgaacccattttgcacaagctggttaaccgcatccctaaacttgtaatagtcatcaaccttgttatacacctgatgagaaatcctcgcatatccagtaaccaccccaac

SEQ ID NO: 97738 - DNA, 511 bp, Glycine max
gctgactgttgcaggaaaaattaattggaaggtgaaactcattataggtgttgtttctggagtggtgggggcacttgctgtgggcattatcggctatctctgttatcgtaaaaagaagaatcgttatacaatgtcatatacacaatctcggagcctctcttctgatccatcttcaaaagacactgagaagggaattcaacgctttactcaaagctttgtacctggagtgcacctcttcacatatgatgaacttgaagaggccacaaattactttgactcatctaaaaactaggagaagggggctttggaacagtgtattttggtaaaagcaaaaaccctttgttgtatctctgtcgtttttgtgctttcgatgaccattaacaaaggttcctgtcttgtgatgtttcttgtctaggcaaactgcgggatgggcgttctgttgcagtgaagaggttgtatgagaacaactttaagagagttgcacagttcatgaatgaaattaaaatcctag

SEQ ID NO: 97739 - DNA, 500 bp, Glycine max
ggccgcccttttttttgtttttttacttatatgaatgttcttttttaatttaatattttcctactcaagaaaatactataacatccttgcaatgtaaagacgcccattaacttaattagacatcattatgataaaatactttaaaaagtacttaattactacaattaccaaatatatttggctctttttaatcagagactttcagagacattggttaagaaattaaaagaaaaatgattttttataaaaaactggaaatcacaagaaaacataaaaaaaatcacgaacagaattttgcacattcctgttaaaaaatttctccttttaatttcttaaccaacacccgagaacactgattagcatttgctaatatattttagtttaaaattcatttgacctatccatatgaaattatgactactaaaaacaaacacattttattaaacgaaacaaaagagaaacgctaaaatcagagactccactccagaccaagatcacat

SEQ ID NO: 97740 - DNA, 202 bp, Glycine max
gaacgttctatgttcttgggatcataataattccgtgagcgacaaccctttgtcacttacaaaaaacatgcaccaagattaaacttatgacaacgctcaactatcatgtaatgaagtattaaacttcaatctcaaggcttcaggggattcacttaggacaacttacaaaaataatagaaaaaataaccgacacttgtttcaa

SEQ ID NO: 97741 - DNA, 150 bp, Glycine max
gggccaaaaatggtgtgatttttttttcccaagcctttgacaaaagggaaaaacaaatcaatccgcccccgggtttaacatgcaaatgccctttgaaaaaccaaaaaatggggcccccctaaattccccttgggttcaaaacaaaagggg

SEQ ID NO: 97742 - DNA, 328 bp, Glycine max
gagaacccaattgggggtaggcgtttcaaaaaaatcaaagtccaatttccccaacaacggtggttttcattcaaaacacacccaaacccccccgaaaataacagaagggtttaatctcctttacttaaaaaaaacctaaaggtttaaaccaacacaaactcctcaaaactcgtcaaaacttctttagaacaggaactcaaaatgccagacccaaaatttcttccagcccatatcaaaatatggggatcacttcttaaatttctttggggcttgccccggctgggatgctggaacaactgtttcactgggggcaggggaatcttttttt

SEQ ID NO: 97743 - DNA, 225 bp, Glycine max
cccccctcctgggtttcaggaatgtttaaaaaactgggggccacatattttacaagaggaaagtggaccaaaaacaaggacagctaacaacaattacataagtcttttattttctaacaagacatcatggttcaagaattattttttaaattaaaagaaaccagaaacttttacaccggggaattaggaggctcccattactaattccacaatacccaaggaaat

SEQ ID NO: 97744 - DNA, 451 bp, Glycine max
gctccactctgggtttcaatggcggtcttgccttgggcactttaaaaccccactttgtcgtctaaatcttatccaatctaataatttgtatacatggctagggcatgaaccaaccttcaattctgaaaaatcccattgccaatgttgaagctcattgcatcctcctcgcgcatccaccgggtgcaccccacggtgctccgtcccgcacacgattccgcctcgccgctgctcagagtgctgagttctctcgtcgggttaagctggagaaacactaatgttggaggcaggtattttttctgttccggttccagcgacagctccatcgcgtggttgacgccggagtccaagccgccgatgagtccgagtcaaaggcctccgctatcgttcccacatatcccagacccgaagattatctcactgttttggcactaccattgatacatagaccact

SEQ ID NO: 97745 - DNA, 271 bp, Glycine max
acccaacttgtgattcatgttctattttataaaatataatggtttgaaacattcacgattgattcaaggggaatacgccgaattttattttaatgctgaatatatctgtgcagtacattaaggactcccctctcattttagacagcaagtatcaatatgaatcaccactcatccacaatacataataatttattaaagatcgagaaatcgtaaaacatgtccatatgaatcaccaatcatacatgatacataatttaatattaaaaattca

SEQ ID NO: 97746 - DNA, 250 bp, Glycine max
gacacgtcccaagagtttcaccaattttcatttcctctaagagagtacaaattactgtaacttatgggtttgaaccatcttattcaagttcaagttgggcaggtctagtaaagacaacaaagctttcgacccaattattgcagtttcacaagacgaaaaggagagaatttctgagtagaaagattgtgttcactaaaaacttgttattgcttataaatgagttggaagaaaaatatttggttcaacgatt

SEQ ID NO: 97747 - DNA, 256 bp, Glycine max
agcaaaaaggaagaggaaaatactggcccttatttttagggaaagaggccctccattttttataaaccctcggccggcaattaaactggtcaaacgggtaagcttcttacaaaaaaaaaaattgaggcccaaaaaaatggtggccaaaaacctaccttgaaagaacaaccaaccatttcctttccccaaaatgaaaagaaactggtgggcaccctaacaaatttcctcccaaggtttaagccaatccatttttttt

SEQ ID NO: 97748 - DNA, 408 bp, Glycine max
taattgtttacaaaaaaaaaaagaggagtcaacaggttcattgaccggagccaaggcattatgagcatctttaataatgcatcttattttgggatcttggagcagtttatggtggatttctggcttcttctcggctaccttttgttccattgactgggaattcgcgatggtgtatcggtgtctggactgatgacgagtaattcttggaagcagaaacctttgttcttttttgaacaaatttttgtgcattgttgtaaccatttaagcttatcttttagcagctgtcacacatgctaaagtaaaattgctttccttatttttcttccaaatgacatatgcatgtatcatgacatcatttttcgtgtaactcaatctcttcaaatcaatagtttgcttgtaatgatcaac

SEQ ID NO: 97749 - DNA, 334 bp, Glycine max
aagaagaagaagtaggaggaagaaaaggggaaaacgcaaagaaaaaaaagaggaagatagatcaagatctcccttgcgtttgtctcagttgaagaaattcaagagcagaacgagactaactcaacggtatcagacgtttcagggtttcagcacttccatttttttttttttccggatttgagttggaagaagatcaaagaggttcctagttgcttggatttttcctctgggtggtggagactttgtgtatttttaaaatattgacaattcaaaatgccaaaggagagaagggataggtctttgtcacatgaaagttgcagagcctcaccttacc

SEQ ID NO: 97750 - DNA, 109 bp, Glycine max
agctagatcatgataagatggcagtgtgcattggggaaattccttccattactgggaaccttggtgtttggggaattcttacttggctaaagaaccatatggataaatg

SEQ ID NO: 97751 - DNA, 198 bp, Glycine max
aatgtaaaaggaataattcttatttattaaatgaacaataatattgtgtaacaatttcattattgaattggagaagcatcacagttctttcattataattacaaacatcattacaagcttagccaaatatgagcaagatatttaatgactcccattccagcagccagtttacaaaatcaagcctacccaaaaatgagg

SEQ ID NO: 97752 - DNA, 394 bp, Glycine max
ctccctctaaatacaaattttgagattcatattcatcagtctgtgtgcaaaatggcagggtacgaagactgctatggtctatgtgcttctttttggtttctaattgcacagcttcaaattcagcgtgaagcaagtaacaggaaaatcatgtcattagttaggtctgctgatctagctccaacatcatatgaaaatgctaagctcttctcactgaagggaactgatgttcgaccggggctgtcctcacaaatttttggtcctgataagcatacgagcacgtacatgacggatacttaccccagcgagagttatgagaagtacttccatgactcacaaacagaagaaataatagaaccatctatttccagcatctatggaagttcaattcaccctg

SEQ ID NO: 97753 - DNA, 410 bp, Glycine max
agaaaaaaatagactagtatacattgaaaatgctaacaactgtcaccgactgaatcccccggcaaccctcgttgccatttacacgcattcaattcaagtaattaattatgaatatggacaaataccaaaataaaaagaagctaaaaggaaaaagtaaaaacaaaaaccaaaggcaagaagaagaaaacaaattaataagaccattaacacagtacacacctctgtgctgttgttgtatggtggtgtacattattacatggatcaaacggtccacttccagatcttgaaccgaacatcgacgtcacatttggcgttagaagtggacgccgtcgccggtttcttaccggagggaagactgactctgattccgtcgcaggagactctgattccgacttttggggttttcaaat

SEQ ID NO: 97754 - DNA, 392 bp, Glycine max
aattaattagttaactaccttgtggtggtaacggtctatttggataaacttctctgtcggcttcttgtgactgacattaatcatgatgtcactttgggggcggcaatagtaatgtaattgtctgtaattccgggtgggaatcagtggtttcgtggcgttggggcttcctctaattttctggggattggtcatgactggatggaatcttggggggtcacagattgggaggttttgtgtcagtattcatggagggggtggcaaaagccgccaatttggtacttgtgtctgcaggtggtaataaccatgcgttacagttggtagaaactaatggaggcgtatctgatcggcgtgtttggttgtgaattcttcgactaaattcgggaacctctact

SEQ ID NO: 97755 - DNA, 267 bp, Glycine max
gacgagagacggcggccgccctttttttttttttttaagattcccaaggagtcatagttcatgttataatctgaaaattgtagtgaaagaaaaaatacacaattaagtaaacatgaacttattgtttttgctagcagggtaatcctagaaattatggaaactagtttacttgagttcatctagcatatagaccccacaccggagtaagattagaattttaaacggttgcctcacattaggcattcaagtcttctatagaatcaaaca

SEQ ID NO: 97756 - DNA, 233 bp, Glycine max
atattggataccaaggataagtttcaggttcaagtacaatatttgtagatcaaaacactgtacatacctaaatagtttataaaagaattgggatgcagttttctgcatcactatgacatgaaacttaatagactaatttattaaatattgacctttagaacaatggtaaggaacacaaggccctagaaattaacataaacctcagtcggcaacatatttctaccactgcatta

SEQ ID NO: 97757 - DNA, 107 bp, Glycine max
tagagtcggcggccgctcgcgatctacaactagtagcaccataacatatttcaggcttggaattgatggcaacattagggggtacacttacttccttgatgcgcgtg

SEQ ID NO: 97758 - DNA, 501 bp, Glycine max
ttccattttccttccccttttctctccaaacccaaacccacttacctcttcacttctttttcttcttcttcttcttcttcttcttcctttttctcttccaccacgccaccgcgatccaccatgctgcaccacgaccctcttgtctctgacgtctacgccaccgccatttccggcgtcgttgccctgtccttcctcagattgttccaagaaactgcaaaacgagacctcttcgaccagtactgaaacttgggcatctttctttgctgctctcattccgggaatcaatatatttcggatgcttgttattggacttggaatattgaaagatgaggccacagtgaaatcaatgagcagatttggagattacaggttgcaatattgtacacttgaattccagagagaaatacttgaatctgtgaaacaatgaaaagtttgctcattctatagttaattttgtgtagaaaagtatatattattctctcaaatgattaagcagatgct

SEQ ID NO: 97759 - DNA, 144 bp, Glycine max
ctgaaatcttagtccataagtcaatacccaaattaagccgaatacgttcatattgatgaattttcaagtgtcatctcacggccaagagaaatcaccttgaaatttgagcaccaggacactggaaaaaataaatacatgggggaa

SEQ ID NO: 97760 - DNA, 369 bp, Glycine max
gcgagaaacggtgtgtgggttcccggtaatccggaggcgacaaggcacggacatctaaataggggtatttccttcatttcactcctcaccctgttgccccacactttccatccaaccaacaatggcagatgtaaccacctacctccgccaccacccagactccgaccccaaccccaaccccaatgccaaccccaaccccaaccccgacaacgaccaaaccctagttccctttccctatagggattaggacttcgatctcgaccccgaagtcccctcagacactctctccttcaccgaccgcgaaaatcaggtcaattacatcatggatctctgacaccagagcgtggagcagtcgcaactcaccgatcc

SEQ ID NO: 97761 - DNA, 196 bp, Glycine max
agaggataaatattttgttgtatttgattgtagaactatttgaattgtatacatgtacaaattgacgaggcaaaatttttcaatcctcagcggatccctaaaatttggatgctctgcaggatttggatagaaaatcatgactctctaatcttattgagtcataatgttcaaaaggcaggctcttgttttaaccatg

SEQ ID NO: 97762 - DNA, 291 bp, Glycine max
gacttatctatggctgagaactcgagtgtgacttgggtttccttcgagcccagagcttctctctgcacgtacatatggtgggtcttaatttccactttcctttacttccttttattctctctagctttgccctgaacaaccggaatgcatgcgtttcaacatttacgggattaattaaactactcacataaaatttataaacaaatatttttagcaacgacttaccgagataaagaaaacaatagagaattaaacattagcatggccaccacacaagtaacgtggtgacat

SEQ ID NO: 97763 - DNA, 376 bp, Glycine max
  unsure (1)..(376): unsure at all n locations
ctcgagccgctcttcccatccttcgttcctcctgtcctggctcccctttcccccaatgctgtaattctctttctcttcccacatttttcttctattttttaaacctaatcacccttctctttctcttcctcattcttattccattcaactctcattcgtaacacaaccaacccttttcgccctcttaattttccctatgaattctctctccccctctctctctccacaccccattcagcctgcttcattcttcactcctttttcttcatccggnttcattgcaattttctattgaatgcatctgatttgtgtttgcaataaagaccacataccttgagttcacaaggttttttggggtggaggggtgcctgtgttt

SEQ ID NO: 97764 - DNA, 182 bp, Glycine max
gtgttggaaaaccttgaaaaacccattctcttgaggggtttgaagactacaattaaacttcaatttaactgaaactagggttaccccatttctatttcctttatggggggtgggtgaaataattaacaccggcttcaactaagttttcattattatgaacctcctcctttaaaatgaaaagg

SEQ ID NO: 97765 - DNA, 397 bp, Glycine max
aagcaataaaaccgtatgataaaatatcattccaagatatatacatgtccaaagaatcttccaatcacattctgtcagttcagcagtgctggagcagaccccatatctatatcactcccatcacaaagcactcacaaaactccccaaaaaataaaataaaaaataaaaaaaacaaaatcctatattgataaataatgctagacactactttgcaatgtttgcatacattaatacaccattttattattagagattagaggaaatgataagagagatgaacaaagaggcaaacagagtgggttgcaactaattgtgaggaattttgggacccttttgcttgaagctgaagctgaaactaaaacatgacagctctaaatacttctcatgccccatcatg

SEQ ID NO: 97766 - DNA, 411 bp, Glycine max
cacaaatctcagcattttattatatttaataataccttggatggctcacaatcacataacataatgaagagcaaaaccaagtttgaatagaacaagttcgccgaaatgccatgctaggttagtttctactagcttgttgccgacttgccgccaacattaatttgcttcatgccttcgtctcttgcccattttattgctttagctgtgtcatatccaataatttaatggcaaattagcatcagcaaaccacttattatctccttctgtgacagttgacccatgggatgtcacaaatttgtttgtatagagtatagtagtagaagcaaaaatctgtatgtgctagacttgggtccaggctcatcaatgagactggtgtttcttagctctgccttgagaagctgttgattcgtc

SEQ ID NO: 97767 - DNA, 130 bp, Glycine max
atctcctatagttgcattacccctggtttaatttttataaaaaataaggggctctaagggtatgttaaggaaataaataataaaatatctgaataaaattcaaaaaaaaggtttgacctacttaatgtgc

SEQ ID NO: 97768 - DNA, 460 bp, Glycine max
cttcaaacatggcaatggcaagaggttttgtttttaggatgaggaatacggttggtgctgttcttctactacgctcttcaacaacaacaactcattcacactccttccatttttataaagattctctctctccattggaatcccacctttgttccttctcctctactttccttcgctccttctctcaccatttcccagatgagacaactgatgaaggtgcaagcacagatggatgggaagaggaagatgaggttgaacccaagattggtgatgggggtgatggtggtgcgagttgccttgcaaaatgttccttggggacagcgagctctctctattgctgaggaggtgcttatgcagttcagtgaggacatcaaactctttgctttcaagacaactcctcgtggatatgcttatgtgagattggacaaattaactcatgaatatgggtgtccaagcatgg

SEQ ID NO: 97769 - DNA, 228 bp, Glycine max
  unsure (1)..(228): unsure at all n locations
cccactatggagcttgtaagaatgtcatgtttttctttttcattggggaggggtaaggggggttcgttcattcagncctactagatggtatctaatnataggaaatacgttcttcattggaagttcttaaaatggggtttattcaagggtgatctgactcttttatatgatgaaatgactccttttgaagattcaccggctaatcaggttgttggtcctttatttttt

SEQ ID NO: 97770 - DNA, 509 bp, Glycine max
gtgcaatccctgagcttattgttcgttatccacgacccttcatagcctctcttcagagtatgaaccgctatggtgtagggaatacaggtgttaacttgcgtgagattcaagcacagaacggttctcaaatggggtttcaaattggaggtcatggcaatggtacttcaagtgttgctactgcaggaggaggagtggagcagtggcggttccagcagtttcctttcttgaatggttttgagtcaactttagctgtttctaattcctacccttttcaaagtgaaagtgttgaaggtttggttggagatattgccgcaagttccagggctactcagctcccagcacgggttaaaatggaatataacggtggcttgaatttgtcaagatctcctttgagtgtctcagaaaatagtaaccattactattcatggacggatttatcagggcttgtatcttcttcagcgagtcatctcttgtaactttgaccactcatatgggtcataattcatatg

SEQ ID NO: 97771 - DNA, 326 bp, Glycine max
gggtccaatacgaaagcattatatttaattttcgtaccagactagactattacaaagacattgagtagtttacagtgtcattgaactttaagatacgtaattttggtgtccaggtattgatggacacaaccaaaataataaaagaaatgctgcaagttctggttctggtaaagaaaaatacgctactttggcagaattaaggcttcagatggttcttcagataccttgttaggtgataaaaaaaagaggagcataattcaatttacatttgaccacatatggatgctgatggaaactgagcttaatacttaataagtgtgaacaaa

SEQ ID NO: 97772 - DNA, 395 bp, Glycine max
ggtaacggcaccaaatgctgttatcgttgatcatcgccctgcagtcaaacaagatgaagaagccaattcaggaaatcatagcaaaggagctgcggctggaagctcaaaaacatgggtagcttagtatagacctacagattcatacacagaaaaaccatgaggaaaagtatcctcaagagaatggagattagtctaaatttattatgtattggcagctcctgcaagattgcattccaagaagataatgttccttcagatgctgctcttgttcacatgtcttgtaatttaaaggatcctctaaagtttcgtttgatggaattttgagaaaactcttcatcatctggagatcaatagccaactttttagtcagtatgttgttaattatctgatatttt

SEQ ID NO: 97773 - DNA, 294 bp, Glycine max
aaccttaaaataacaagatgaaaaaaagcttttgccatcggcttaaattttgtttgagcagtagtaacagttaaactaaaatcgtatgattctaatttgtacaacacccacaaaagcaaacgacaatgcgaatgcaagttagcataagcttgcacctgtgtgatacgcatgcacatgcaatgcagaattattaaaggatcaaacagagaggccaatagtgcaaaacaaatttatataaaagtattattcgttccacacattatgtctgataataaaatagatgaaaaaaacaag

SEQ ID NO: 97774 - DNA, 427 bp, Glycine max
aactgcggttgaatcaataaaccttgatcaaatattgtctcccgattcaattgtcagtccaatttttaaaacattagttaaacctaaaatactagttataattacagttaaagcttaataggttggcctaatcattatagtagaatcactctaattagtatatccatgtgattcaggatccaaccaccagctgaatggctcagcaacccaaaagaaatagaaaactcacaaaatgaggcactgggaaacaataatagtaataaatgggaaccaaatatagaaatctagattacatgatttgtggaacattgagtagtaaaaccagtccttcatatcctttaagtttcacttttccccctttctgtatatctcatgccaatggtacaggagggacgagccaataattggtgtaaccatcaaaaccaac

SEQ ID NO: 97775 - DNA, 369 bp, Glycine max
acataaattatgtttcatcggttctgaatcacactacatatataattacagcatatgctatatatgcttgaggtgtcttaattagttccttgatgcatccaatatgatatccaaagtaactacaaactagggcgaaaatactctttgcaagcctaactatccattaattaatcaaatatatgacttccaaatatttgattattactttttcagtatctatactgaatactcttaagcttctatgtataataacatgtctagctatttgcatgactgagacaacataatgcttgcgctttcactcatctcaggtctatgccttttcatctccctctctccttgaacatctaatctcactccaaacagcat

SEQ ID NO: 97776 - DNA, 376 bp, Glycine max
tttctctatttttttttttttttttttccagtgaaaaggctttaagatttcattatataatatgaagacaactatctaattgtcatatatacattagatgcttgggcaacctatactactcataaactcaacatttgatgcttgaaaaataaataaaccataacatccaatcttaaactggagtagtaaacaagacaggtgaaggcccgcacgatttattatgtttggaatctctcatgacaagccatccatcaaaccagaaaagaagccaagcgtttgatcatggctttagcaagatgagtctcaggcttgaagagctggaaagcatgctcctcatcgccagcatcaaagagttgaagttcaccttgccagccac

SEQ ID NO: 97777 - DNA, 223 bp, Glycine max
cttgttcattatatcataaataatggcgtattaccaatccacatattttaatcctttttggagaaccagcaaatccaactaatcagctagagagctacatacttattagggcctaaatgctaactatcaccaaattttacccaaagagaacaaccattgtcatcaaataaccataacttcacaagccacttaatttcaacaatgtaagctataaaaactaaaa

SEQ ID NO: 97778 - DNA, 386 bp, Glycine max
catctgaatacatctctgaggatactccctttatgtctgatgcaagtactcacattcctatggcttcctattgggccatcagaagtattgtggctcgttcctcacaaatttctagtttcataggcatgagaaatgagtccatttcatcaaccacagaggcatgggaattatctagtctggctcacaaagttagtagtatatatgagcacctcaagaaccaactggttctttgctaccaatatatagatgacaagaggcatatagaggccttccataatctgatacgtcttttcgagacagtccatgtagacaacatgaaaattctcagagcactgatatatgcaaaggatgatgttcttccacttgtagatggaactgcaaaatca

SEQ ID NO: 97779 - DNA, 253 bp, Glycine max
aaaaaataaaactttaggcgcgacatattattcacatacagataggtattacatctaaggtcccctgttatttattatgctgatcggcaactaaaggattaaaattcaaattactgctatctaacgggggaggacattatttccaaagcgattactttgcagagccatttaaataaaaaaaatccccatggagaaatccaactcaagcagcagtacgtaacgtagtccttagatggggatatgctggagtgtc

SEQ ID NO: 97780 - DNA, 254 bp, Glycine max
tttctttctttttttatgatttgttcccttatttaattaggatctttgtaattataggcatgttttattagaatgtgatttataggcatatcaaatcatgtttataagaataaaatctcctatcattatattcattgcaattagactgtataaagcaaactttgttgtgtatttaaaacacatttcccatgtctgttgtatttgtctttctgactttcagcaacagtttttcatgagaggaataaccatataaa

SEQ ID NO: 97781 - DNA, 358 bp, Glycine max
aaagaacaaaatatactctaaatacaaatgcattatatattaggccatcatcagttttttagtactataaacagtcaacagataaggaaccaatttgcagctcaagatagtcaaccattgggtcactgtaataactttaaatgaataaaatgaagtgatttccaaatttttttcacccttgggctctcaatcaatgacataattaggagccactgctaaaattcggtaatttcttggtgcgcctgggggttttgttgttgctgccgcggcttccccattatctacaactatcaaatggccctctctccgaattaagctctctataatagctttaattttggaaattttagcttgcacc

SEQ ID NO: 97782 - DNA, 256 bp, Glycine max
gggggataattaaagaatcaattatgaaacacgtttagctatttctgtaacaaaattcttcatctatattctgaaggtacaatcatgctaattagatcctatagaccatcacctagaaatatgacacaggattggatgccctgcagctttgaagtcatcataaaacctctgctcggaaaacctccctgcccgtttccttgcaggtgcagccatcttaagtctctccatctccggcatcgatacaattctcaccatg

SEQ ID NO: 97783 - DNA, 171 bp, Glycine max
ggacattgggggcccaaccaaaccatgggtacaatattttatttcaaggaaagattttatttaccaacctaacattcccaaccaaaaaataggttagataacattgtttaaaaagattggaccacttgcaaaaattttttttgacaggtgggtgtttcccttgccaatttt

SEQ ID NO: 97784 - DNA, 444 bp, Glycine max
gaaggggaaagtaaacttgtaaaattggggcataataaagtcaataaacatacatgaaagaaaaaccctgctctcacctaaacataaacagctctccacatgccaacattttgtacagtcgcgtcaacttataaactacctcaccgttcgttttataaaacttaacatccttaaaaaggctcgtattgtcgctttatctcctctgctgcaggggggcatcaggtgagtattacacatctgagcctcgcctcacttaaattcttcttctatgtataaactttggactacaaaatgtacagttcttcattaaaaccgatagtgtttttatttccaatcggccactacccatcacgacagattgagataggaataaacataacctccggatgcaggaaaagagaggaggaagctcacactaacctcagttagctgtacaaacaactt

SEQ ID NO: 97785 - DNA, 327 bp, Glycine max
aatcatcatcccaaacatgatagggagtaattaagtgcctaagtttgaaagaattcaaccgtccaaaacagaaataaccaaagccagagaagaggcaacacagcagaagaaaactaagaacacaaatgccaacatagctatatactacaatttataaaataaaactataacttatgaaaacgccatttattaattattagccttgtagtaaattaagtgacggttgggcacaacgacgtcgcccatcatacgcagggcattcatgttgtcccactcagcaccaatgttggtgctagacaggcagttcattctccaaacctagaaacc

SEQ ID NO: 97786 - DNA, 319 bp, Glycine max
gactcgtataaacttggggggaaatataggccatttgtattacaacgtaaaatgtaacatctatcatagagaattgtactgtgaaaatttcaagttcggacactatacaaagccgtaaccaaaaaatattttgtaaatcaattgtaatttttaaagagtacaggctaccgaaaagttaatctaggtagactgatttaatttgtaatgcaacagacagaacagacagcccttctggagacaataatttatatcatttccacctttgcctaaaatctgaaagataaccgtcattttcggagtcacaaattaagggcacaaa

SEQ ID NO: 97787 - DNA, 211 bp, Glycine max
gggggggaacgcaagaacccccttacatgcatttgatttgttgggaacaaaaatcagcccctgttattttacgatttcccaacttaggaaaagagctcaacatggtgggaacatttttgcccacacaacaacagaaacttttaccaaaacttaacttaaaagatctcaacaatgagcagggcaatattttgcataaaacaaaacacttttt

SEQ ID NO: 97788 - DNA, 351 bp, Glycine max
gggaagaaaaaaacaattttaatttaagcctgtactgaaaaaacacgaaagggtacaatcacaagtgtggaactcaagaagtcacatgaacagaaatcctagaatctagtgagaagaagtaacttaaaaaagtctggcctaaattaagtatactatttgctacatccccaataaaaacggaggataactatctaattctgaaccttttattggccatttgatacagtctatcaaattcaaatgctcagaatctgaactcaaaggggtacacagggtaagccacacccaggcttcacagagtatttccttttacgctcttttttcgctaacgtgatttacaatttctccttg

SEQ ID NO: 97789 - DNA, 507 bp, Glycine max
tctgcatcattgaagcaatacttgaaattcatcaaagcagaggaaagaaacataaacaaaggtgcattgcaaattaatcacggagatgggtggaagaaagtggagcatcttggtggccatcttcatcttacttcttgctatggaagctgtcattgctcaaggtcaaggaaatggaaatggtaatggtaatggtaatggtaatggcaaggataaggataaggaagagaaggagagggagaagagggagaagaaggagaaaaaggaaaaggaaaaggagaagaaggaaaaagagaaaaaggacaaaaagcaacgtgatgaagccacaaattatgacaagctgtcatctctgccaaccggccaagaaagagggttctgccgaacaaacactacctgtgagtttaagaccatcgtgtgtccatccgagtgcgcatccagaaagcccaagaagaacaagaagcagaaggcatgtttcattgactgcagcagcagcacatgtgaagccacttg

SEQ ID NO: 97790 - DNA, 320 bp, Glycine max
aaacaacaactaaataaatcgaggttgaactcgaactttttttctttacagaataagaaaatgtaaaaaataaaatacaaaaaacaccaattaataccaaaaaagaaaagaaatcaacgaaggaacaacagctgttttagctggcctcccaagtaaagaatgtaaatcttctccttctcttcttttcttttcttttctctttttttccccctcttttctttcttccttttaatccagtttcccttctttttcttgaccagggtctttcttcttctttttttctatctgggacttaaaacctaccacactaaaaaagaaaa

SEQ ID NO: 97791 - DNA, 322 bp, Glycine max
gatgtattaaacccatgaacatatgaatttccaaggtcatataatagtcaataaaggatataattgatacaaaacctcaatgatgaaaacaaaatgcaaaccaaaaaagccatagaaactaatagcacgacaaaaggatccataaagaactgcaagggaaaatgggatagcagaagaatgactgtgagagctgaagtatgaaaatcagaattatgtagaagattgctccacaggggctggtggagcttccttctggggtaaatctgtggcagcgttattggtggtggcatcctttggttgtgatgcaggtgcagctccattt

SEQ ID NO: 97792 - DNA, 484 bp, Glycine max
atactctttcagttttgttataaaaggcttttatataagtatggctgtcttgggcatacacttgaagcaatcatgcggtgcaatcagtcaaggaattttcgaggcactccctgcagtatggaccagcacatatgttgtaattagtagttagattagatcatagattgtactaaaccttggcaactatgaggatttggttgtattgggtgaggtttgagagctgagagattactccttgtaattttcattgatcatggtgaattatcactgttttatcggtggatgtaaacctatagtttgctgtaggttgaacagtactaatgtattattttcttagtgctatggtagtaaggacaaggtattccaagaatggaaatcaagttgccggtgacatacttgatatctaagagtggcaagcagagaatttacctccaaggacttttttcaccgtacctaaaaaggatgctattcaactagtctctaa

SEQ ID NO: 97793 - DNA, 292 bp, Glycine max
aaacaaagggaaagggttctttcaactaattttttacaaaataatttttcttacaaatttcaaaaggggacccaaattcacccctgtgtcacttatttgacagggcttacgagagaataaaaattaaaggggaaaaaacaaaacccagaagcgatgtttttttaaagcaaataaaaagaagcgaatcattacaatcccaacgaatgctgttggcccccccttttcaaaagaaaaacttccagtaaaaaaaaacacttaagttggcttccgcatgttacctccaacacaaatt

SEQ ID NO: 97794 - DNA, 195 bp, Glycine max
  unsure (1)..(195): unsure at all n locations
atgagagtccctagcgttcctctgnatgatcacttcccattgggtttgccgtcttcagtggttcacttggctacaatccctgtcactggaaccggcattaaccctgcaaggagtttcggaccagctgtgatcttcaacaacgacaaagcctgggacgaccaatggatttactgggttggaccgtttgttggagct

SEQ ID NO: 97795 - DNA, 269 bp, Glycine max
gcttcggaattttaaaaataggctttcaatttaaattttgggatattatattcctctgataatacaccgacaaattattaaatgaagttgtctatgagactataaaactagttttttaaaagcactctcaacacatgattcacggtgaaaaaaacttctaacaaggatcaaaattagactcaaactttggctatggattcagaatcttttaacatagtccaaaatgtaaggttccagtcttttattgaccaaggagacgaggacacaaa

SEQ ID NO: 97796 - DNA, 332 bp, Glycine max
ccatgtaagatctacaggtgtataatagtagtaagtggagaacaaacaagggttggaaaaaattatttctgaaaaagtaaaaagattgacttttttttttctgaaagggccgaaacacagactcagggaatatttgtggctttccttttctgggcttgggactagggcgagaatacttaaaatatccatcccaaggaacctttttaagcccagcccgatgggagattatgtctctaactctttctgcaaattcaatgggggtctctcctggcttaaaattttgtggctccaagtaccaaacattacaaattacagcccaagatgtgtttaat

SEQ ID NO: 97797 - DNA, 292 bp, Glycine max
gtctgaaaaggaacaatacatcttcaccgggctagtttcagttacaagacttgaaaaactattttccaatatatcagtgtccttttctcccaaaaaaggttgctcatcgtgttgaatttcaaaacctcaaacaataaccacattttcctagagacaacacaaatttcacttatacaacacaagccaacgtttttgacaatccataaaatgtctcgtttcaaaacctacaaaccttatgagaactttaagacactgattttagctttcccactcaacacaaaaaatacccact

SEQ ID NO: 97798 - DNA, 454 bp, Glycine max
  unsure (1)..(454): unsure at all n locations
gccgccctttgttttttttttttacaacaatgtttatatttttcagnataccatataccaatctaggggtgtttaaatatacaataacaatacaaaattaaaaaaatggatgaaacttaaatgtaattttttaaagtatttttagtgttattcttctgttaaaattagagtttcaccttaataactcatgttgaattctaatgcaaatttttgttacataaattatataggtgaatctctgactctaactgacaaacagaaattaaaatacctaagttataaataaatggaatgaaccgggtatcttattatttaagtaaaatcctaaaccaaccccttccaagaattccaaccatccaaaactatgcataagaaaatattcttttagcataggaaagagtcaagaaacgagtcatcttcaggctcctttttggctctagtgatgaaaacattg

SEQ ID NO: 97799 - DNA, 295 bp, Glycine max
gggggtacaatatatacctaccacaaagccaagtcatacattacatatgcatactcatataacgatgatcataatattgattacatgccagcctccccttattttattttttttagaccactagttaatatacagaccagcctttgttctagttcttcatttaaagtaactacttaaccagaggtgctaaagggacatgtacatcaagcaccatggatatttccttatactaaattcactcttctaagttctaaccggagcttttacatgttgatggtatccacagaatgcttat

SEQ ID NO: 97800 - DNA, 415 bp, Glycine max
ctcgagccgaatcggctcgaggcttttgtttctttctgtatatggaaggcccttaaactttctttctctctctctctgcttcactttctcacttttgcattttcttgtgaaaaaaaaatcctcagaacccaaaatcggttttcttctgtctctgatctctcaaagcttcaaattctccttggtgcgtacttcaaattcatcttctcctactcctaactgctcttcttttttcaaattctctgcgcgtttctgtttctcagcactttctggtagaacaatgcacgacattttgttttttcttttaaaaaaactcggtaaggattttgtgtgaatgtggatctattaagcttttttatttttttatttgcggaagaaactgaagttatgaagaaagctgaactagaaacagaaaaga

SEQ ID NO: 97801 - DNA, 433 bp, Glycine max
agcccttcctacctcttctagctgcacaagcctttctctttcccagaatgatttttttccatttcttgttattaattattactccttttggactttctatataatgcttttctatatatgtttccaataataccacattactgtgccaggaaaagaagccagcagtgagcacctatagtactctcaccttctctcaatcatttttcattcatttgtcaacttttatagacctcgattagtgtatgcaaatttctttaggacatgtggcctacattagtggctaataagatattcaagaagagacttggaagcagcaattttatagcggattatcctagttataaagaacccttgctgggtattgtagacattgatcagaactcaaaaaccattcttaatgatcacaaggactcacacaaatacaaggtatttg

SEQ ID NO: 97802 - DNA, 432 bp, Glycine max
  unsure (1)..(432): unsure at all n locations
ggcggccgcccttttttttttttttttgattgtcccttttctttttccacagnaaagcagagaatatggagtaggtttacatcacgaaggatttcctcccaactaattatacccaagcaatcatacaaaccaatttacttaactgacattacattaagtgcacaacatgtatgcatacactgatgtttcttgaagccatgaatgtccgaactatcagatatgaagccacagtagcattcgttttttcaatgggaaaagcccaaagatccaatatctcatctgtctcctgtaacacagaaatactagttcgtgcttgcatggaaacattgcgcaagacctttattgtcatcatgatccatttgtttggttctcttctccaagtagctgttcaaaccgagccacaatgtgttttccataagtgtattttttcaa

SEQ ID NO: 97803 - DNA, 389 bp, Glycine max
gccgccctttttttttttttttatcatataatatttactttttactctctctttctcaagatggggaattgcgcatgtatatatttgttcattattattcactttagacatttatatatatatgcactatttatcaattctgcaacataccccaaatagacgtggaaattaaaaagtaaaaattactagtattactcgatgggtaattaactgtatatatcagtatgtacatattactatataccttgaatttgcgacagaaattaacatcactccaatgtctctcgtctagacctacttccatggtcttgcaatcttctctccaaacaactgcggtagctgaggatgttaaaaccactttatccatagtttctgtctgagcacatgct

SEQ ID NO: 97804 - DNA, 307 bp, Glycine max
cttgtctctaactccaacataatattttccactgtccaagccccaaggtatggtggtgctgtcaggggaagcttagatgcgtgagttccagaatttagtcattgttgatgacccatctctctccatggcagaacctgaatattgtggctctatcagtgatgatgtgttgatcattaaacccctaacctccgctgctgtcacttgttctttcgacctctgcttgtttatgcagccacctgcttggatcattttcccttccattcttgtctccattgattagcccatttgcctcttccatttttttctc

SEQ ID NO: 97805 - DNA, 265 bp, Glycine max
cggccccctttttttttttttttacattttcctttgcgtattcccttcccaattcggcgaatagtttaaataataacacatcactaaacaccatctttatttcaaattttctacaaccatattttctttctcgtcaacctgcatacttctttaatctaaacattcacaatgaaaacattctttattaatagaacaacttaaaatactgacaaagcaaaacccaaacatggctaccaaacaattttaacttacaaactgtaaaatt

SEQ ID NO: 97806 - DNA, 386 bp, Glycine max
atatattatagttttattacttttatgataaatgaaagtggagaacagaataaccgaagtttgaagcacctaatcaatgatcaagttgtcatgaaagtaagatatttgagctgattaatacccttaagtagatgaggttttctcttatccacattatgaatcttcctgcattaagaaagtggagccttttgctgctacgcaagggaaattttgatagctttactttactgatcatcaattttgcttcatcctcttccctattcacctatcacaagccactaacattaaatattgaaatggaactaagcaccatgttttgcttgtttgctccttttctctttattggtctgctcaagcaactgctttaatccttcccctacaaacct

SEQ ID NO: 97807 - DNA, 482 bp, Glycine max
gggtctgcaaaatatgtatatatttatatggatagtataccaagagatacaagaagtatctctcacattggggtacacatgtgtctacaaacgttacagctcaacatattaatcataataatcacaataaatatggacgatgtcttgcataatcctagaaatagaatgatcaaaattcacgttgttgaatacctcattttttcctgaatctcattaaattccagctgaccgatccctatataacccacgcagcttctccaaaattgtaattcgcattccaagatccgcaataacttaaccatgaaaagcacacaaaatacaactacttaaaaacaatttaagaaaaaagctatttacctaaacctcactcgaattttcccagtgacgagccaattgagacagggtttgtgttgaagagccatctttcagtgcattagcagagaaatcttttaaattcatctttctttcacgttttcctttac

SEQ ID NO: 97808 - DNA, 228 bp, Glycine max
gtcggggcccccgtttttttttttttttattatttttacattgtaaacttatgaccaaaaatgaaggctaagtttaattataatcaccaagctaatcttcacctccccaaaaaataaagaaacaaactcatcagcaaaaactaaattaaatattacaaacttatgtttctcatggctcctcagggatagtggtggtaagatgctggtggtggcggtggcggtggtgga

SEQ ID NO: 97809 - DNA, 435 bp, Glycine max
  unsure (1)..(435): unsure at all n locations
gcccaaactcatctctttctgcttgttcttttcactgtttggggtgtttatctgttacgcttctgcacaacacctttccctttataatccctccttgaattttgtgcaaccaaggtttccttttccttcccgtttgggttccttctcagttctcacgtgatccttttcatttttttcatctcccataatgattctctagcatctcatatcaccttgttgactttgttctctttcaagtaacaaattaattgattatggattcgaattcgcgctaccaagttcagcagcaacaccaacacaattctgggttacttcgatttcgttctgcccctcccgcaaatctcaaacaacaaggcgaagctgccaataataatgggagcgcgtgggaagggttctgaaccgcttttgagattcttgaattccggngacacccat

SEQ ID NO: 97810 - DNA, 287 bp, Glycine max
atctttgccttagacccatacctgtttccactctctcctattctctatttggaacagttgaattctttctcaactcgcaatggtttttcccttactcaaacttccacctatcatttatccttataattatgactgctatataattcttgatcgaacacaacaaataatggggcgctctattaatttatatcagttcctgatttggctgagctgacctgctaaaggaggagtttgcgtttttttttttttactgacaaagattgagttattgatatggggggtctttg

SEQ ID NO: 97811 - DNA, 523 bp, Glycine max
  unsure (1)..(523): unsure at all n locations
tcggcggccgcgctttttttttttttttttttatttatacttctattaattnattttaaagcataggggtatgaaaaccttaatcattgacgaaatgccattcccattatcaacgttcactcctgatcaaggagagacatgaagaaataaaaattgggaaacttcttgtctttcaagctttccacagtctcccaaagacttacttccaaaggaataaattcaatccccaagctccattcaaattcaagggaccaccctaaaaatgcctctttttctaccttaaagatatagaaatttccacaattgtaaatgcaaagcaaagtcataagttcaaaacaaattcaatccgacttgtatattttgattaatacaagccttatttcgcattaataatttccccttaagcatggagtttctgaaaccaaaatcactgactagacaaagttagtgttatcaatatttattcttcaaggagatatcacgaactagaagtccacaaacttcttttcttttaaactttcaa

SEQ ID NO: 97812 - DNA, 293 bp, Glycine max
attttctcactccccatcttctgagagcgatgggtgtatgctaccgatgatcccacacctgccacaggaccggcatcatcatcaccagcttcttccgtcacaagccttagaattatactattcccaccctgcctctctcttcaacatcaaccgttgactacactacagtgcacgtggtctttctctgaggatccaaccatggcggctggaactgtcttctgcgctgctgctactgctgcttctaattcgacaacaaccacttttattcacaaccaagcaccttcttccacctc

SEQ ID NO: 97813 - DNA, 476 bp, Glycine max
ttcaagtggaactcaccattctggtgtccttgaaggatggtttggagttcactggtggactgggcgagcttttgttcttttgtttacgacacttgctgtctttgcacctttggtcagctttaagagaattgattcattgaaattcacatctgcattattcagtggactagcagttgtttttcttgtcattgctgtgggaatctcaattttcaagattataatcggaggccttgagatgcccagactcttcccgatcattacagatgtagcatcagtttttgaactgttcactgttgttcctgtgcttgtgactgcctatatctgccactacaacgttcacagcataaataatgaacttgaggactcctcacagatgcatggtgttgtacgcacttcccttgcactatgcgcttcagtgtacttactgacaagcttctttggattccttctatttggtgaaagaactcttgatgatg

SEQ ID NO: 97814 - DNA, 465 bp, Glycine max
agactaacaaagatgtaatttgaacagttttaaagactaaggtatatttagctgaaactgttgctaacacaaatactacaacaaacctttgataaacctcatgaattatgtagttgggtctctgcccattattctttggaaaatcttaacaagaaatctacattaaaatatcaaaaaaatttctcgacgaagtactcctatgtttatataagtttgatccatcagatgatatcctcgatcgtgctagtattactgaacttatctgttggaacctgacagaacatcaaacagtccacagcaactcaaccaggaagtcttttgcaccacaggtggaactgatgctacaagtggctgattatcagagcattctggagtatcagaatctttaacatgttctgcatcaatagtagattcagggataggactctgagacactgatgctgatacttcactgtcaaattccct

SEQ ID NO: 97815 - DNA, 475 bp, Glycine max
ctcaacttgtagctgttctacgtttagggggaagaggtgcaaggtatagtgctgcaaaagccttggaaagtttgttttctgctgaccacattagaaatgcagagattgctcggcaagctgttcaaccgttggtggagattctcagtccaggtttcagaaaaaggagcagcatgctgccattgctgcattggttgggttactgagtgaaaatccatcaagagcacttgctgttgctgatgttgagatgaatgcagtggaagttctttgtaggatcatttcatcaaattgttcaatggacttgaaaggggatgctgccgaattatgttgtgctctttttggaaatactaggattcggtccacagcagctgctgcatgctgtgttgaaccacttgtctctctccttgtaactgagctcagtcctgctcagctttcagttgtccgggcattggataggcttgttgatgatgagcaattg

SEQ ID NO: 97816 - DNA, 329 bp, Glycine max
agtaagaaaagacatcaaatggacatttattcgatttctcactcttctatcatccgaaagatttctttacccttgaaagtcaagtctagagaatggcccccctaaatatttttttataaattaaataaatcaataaaacgtaagtccaaaaaaaaaaaaatcaaaacagtgagatggggactgcattcccatccttttaaaatacaggaaactccttaggccggcttaaaaggaaacaaatgaaaaaaagaaaaataaaaaagaaaagaaaattcattaccccaacgaatttatgagggctttaaaactgaaaactagccaatcagctt

SEQ ID NO: 97817 - DNA, 459 bp, Glycine max
aaaatcaaaaaagaaaaaataggcattatattgacatacaaaatatttacttctcatcatcatcatcaaagaaatgcagaatttgtcttatcaaagtcacaaaaaataaaagcaaaatccaatttcagtggttactctttctgccattcttgccaacatggtgcaaccacccaatgcctttgagggccttggaaaatttgagaaggttaggcctccccattcctaaattcatcttccctgtggagaatttcaaggcctgtaagcagcacaacttagcctccatgtcctcttcttcctcttcctcatcctcctcactattctcaacctcacccttcttcttccctttcttggtgttgctcttcttcagaaccttgttgttggactctgtctcatatgtctcccaaagcatgtccattccttcactcccatctgcattgtgcctctcctcaaaaagcttac

SEQ ID NO: 97818 - DNA, 156 bp, Glycine max
atagcagaagagttcctattgtttctagccaatagccatatcatcataacttcgaaaaatgttatttttagttattgttgattgatttttttacgtccataccacaaaaatcaatcaacaataactaaaaaaaaaaaaacataaacttcctatcat

SEQ ID NO: 97819 - DNA, 234 bp, Glycine max
gggtataaacattactttaaaatggggcatggtgaaaacagggtttaactcctatgaaaattggacattacattatcagtggcaatggaaacaaatagcatttgccacccccaaaacattcattcactaatcataatccactaacagcaaaagctttctattcaactcatttcattaatcctcaaaatgtttttacctggacaacaagggcaaattataggcccctaaaacaat

SEQ ID NO: 97820 - DNA, 329 bp, Glycine max
aggaaaaaaaatttcagatcatttttaacaattttttacaaagctcaatttgaggaattcctctaatgaatcagttgatccgcaaagccaaaaaaaaaaaaaaaacttatttcatgccctaggcaactcccatgttaaagagaaaagaggggattttggtggaagtaaacttgacaacctggccctcataagggttatcttactggaagctacttggaagacttttcaaaagatgtagaacccttttcaactactttgggttcaaaagatgccgaaccctttccaatagctttgggatcaaaagatgttgaaccctttttaaccccttt

SEQ ID NO: 97821 - DNA, 375 bp, Glycine max
aaggtttcccgtcatcactgtatgacgtcctccttctttggggggggggggggggggcatgagtttaaaagctcggagcgtatggacaaaagtaacgccggactatacggacggacgaagcgggacggtaatgagatcacaaacaagtaagtaattactaaagaaagacaccaataccgcagctgccggcgcaagttttgaatggtagaaaggaaggattagttaccatgtagggtagggatatgtgcacgtaacccagtttggtactaagcaccgaggtaatcgttgttgggtttgccccagaataatggacttaagccaagtaatataaagaagggtcggatagggaaaccatataaatcccagttgtgaatt

SEQ ID NO: 97822 - DNA, 396 bp, Glycine max
ttccgttccaaggaaggtttcccgtcatcactgtatgacgtcctcctgtctttgggggggggggggggaatgacgaatgatctaaggggaagaattaagagagagaccaatgctaatataactgcctaatgcatattaaaaaagagacaaatgacgagcgtgtaggtagaataaacaaaaacgaaaattattaggaaacgagagttaagggataggactacacagatctgaagcgccacatgataggagtagcaccagaagaaacagtaaatatggcggtgtgagggaagcgatggacacagttatgcaacgttggtattagattttagtgcgtccataagatgcgtatagccaaaattgttaacccatcaataggccacgtaattaaaggaattg

SEQ ID NO: 97823 - DNA, 123 bp, Glycine max
gagaaggagaccgaatactatgacgtgcagcgagtcagccctacggcaaccatggcctacagtaacaaagctgattacattaacgcacggactgagcatacagataaaaacccagatgaccct

SEQ ID NO: 97824 - DNA, 497 bp, Glycine max
  unsure (1)..(497): unsure at all n locations
gaaattatggtgtcatatttttttaagagttttaaaacgttataatactagaatagttcactttttagcaatatcaacgtctaactcaattgattaaactaaacattatttcaaactcttgttacctttgtttaattcctatatataaataaaaattatatagattatttactcttttgtttatcttcaacttttatttatttgtcataaatggagacatttgctcttgtgtaaattaaaaagtttcttagtacaatttgtcttttttttttttgaggatgggtggtgttatgaaaaggtgagatgttcattaaatggacgtgcacaacgtattccttcacgatgagttgcaagaagtgttcatgaaattgcgtctcagtttccatgttttctaattaaccatgtatggtttacaagttgagtaagccattatacagattaaaacaacctccctattattttntgttcacattgcatcattctaatttaaagggact

SEQ ID NO: 97825 - DNA, 293 bp, Glycine max
ttccaaggaaggtttcccgtcatcactgtatgacgtcctccttctttggggggggggggggggggggagtgaaaaggtgtcggagggcaggatgacgatgaaggtaacaatcacacttaggactttatggagagacaaacaaagacaaaagaaaccacgaaaacaaaatttgtacaaatgttaaggagagtgtttgaaatgcaagtggggatgacccttgaaaaatagttaacatagtttcgccgcgttatataccattgtaaacgtaatgggtggtagtggttagtaaagtt

SEQ ID NO: 97826 - DNA, 329 bp, Glycine max
ccaaggaaggtttcccgtcatcactgtatgacgtcctccttctttgggggggggggggggggcaaataaggggggggagggtgccgggctaatagagaacatatagagaccatagagcgattggagtatacgatgatgatgattgtgatgatgtaaaagtggagacgaagaagaagaagcagacgaggagaaaagtgagaaatgacgttttgaccgcaatgaaaattttgaaggggaatggaacacaagaaaacccagcaaacaaaaagccaaaagcagatgataaaggaaaaatgtaggcgtaggccgagaagaagaagaagaggaca

SEQ ID NO: 97827 - DNA, 449 bp, Glycine max
ctattgtcttccaatgtcagcaattttgacctcaaatccaatgtgacaccacctctacaagtcctccaaacagctgttacccaccctgaccgattacagttcgtcctcagtggccttgacattgaggataatgaatatcgtgtatatctctacttcctagaattaaatagcactgtcaaagcaggcaaaagggtgtttgacatctatgttaatggtgagattaaaaaggagagatttgatatattggctggagggtccaactacacatacactgtcttgaatgtttcagcaaatggattacttaatctaaccttggtcaaggcctctggagctgagtttggaccccttttgaatgcttatgaggtcctgcagatgcgatcatggattgaagagaccaaccaaaaggatgtggaagggattcagaagattagagaagaattgctgttgca

SEQ ID NO: 97828 - DNA, 328 bp, Glycine max
ggtttcccgtcatcactgtatgacgtcctccttctttgggggggggggggggcgggcttagttcagatgtactcggctgacgaagaactagcaaggaacaataggccaggacatattagacagaaaaagaaaaagaaaacctggcctgctactaagggcacagcgcaagggtataccgtttttaaaaaaggcaatagagacgtacaagagtagggggtagcaatcacaccacaagatatacgagattatagaggctggtctatagatgttatacgtgtagtgggtcatagagcccaaacggtggcccgttttatagtattagggttgg

SEQ ID NO: 97829 - DNA, 280 bp, Glycine max
aaggtttcccgtcatcactgtatgacgtcctccttctttgggggggggggggggggggatataaccaaggacagggtagatgacaatgagttagggtagatcgatgcgtatgtaggaggcgcgagcagtaaggtaactttcacttgataaatgtaaaattataaagaaaaagcaagataaataaaataaccttcaaacaactaaaggacacataatatactgtgagtagagaatggaaaagaatggcaaagagcagagagttagaagggtggctagggaa

SEQ ID NO: 97830 - DNA, 353 bp, Glycine max
caatgaaggtttcccgtcatcactgtatgacgtcctccgtctttgggggggggggggggcggaagtacaagatggtagcacaaacaagggcggaaggtaatctaaattaaagaccgaataaggtatagtgtggtgataatacaatccacaaaaaaaaaacaagtggatagagtggctgacttggtacatgtggagtgtaatagattaaacaaaccaaaatataaaaataacagacagaaaaccagccgaaacacgaccaaagcaaacggttgtaattatgacagccgagggggcgacgagggcgagaaagacgaagggtttgccgttagtgggtatatgttagcgaggagaat

SEQ ID NO: 97831 - DNA, 300 bp, Glycine max
ccaaggaaggtttcccgtcatcactgtatgacgtcctccattctttggggggggggggggggggggggggggcctatgtaaatctaccgtcgagaaagtataaagagaagaaaatatatgccaataactaactggcggaaaacgctaagacaagggagcttataatggcgcaaaaggcatacgggcccattagaatgatttaacggcattagtttataaatgaccagaggggttagcacgatgaacctggaaccaacgtggtgtttattacaaccttgatgaggggtgagaagtagggga

SEQ ID NO: 97832 - DNA, 334 bp, Glycine max
ctcgagccgaatcggctcgagagctatgtgaaaactatgggaatttggaagcagtgaaaaattctaatgattcaggtggtgccattttggatgatgagggcgggtcttttgattctaagcagtagtgttgtgatgagtgcaattatggttatggttgtgagtcacgatgtcgaagtctactgcacagtaaatgtgtacctgtggtgcggcactttcgaatgggatataccctgacctttaccattcaaagccttgatgattctttcttgattagatatttggaatgtggctgaatcagattttggctaaaaaaaaagacagtaacgactaatat

SEQ ID NO: 97833 - DNA, 412 bp, Glycine max
aaggtttcccgtcatcactgtatgacgtcctccttctttgggggggggggggggctatctagataaacgcagggaggaaaagttaggtcagcggtaaagccgaagacgacaataagaaaaccgttaaatctttgaataagccgtgaatagaaaacccaaaaaatattaaacaaaaataagtatgcgtgccaaaattccatggaggggtctaaccatagaagaaacatatggaacaaaatgatgtggtggtagtggttgtgggttaatatggtacacggcagtgacccgaattatacgtataacgtggcctaaagggggccgccataacacaattatttaggttaagtttggccccatgttgtgtggcgtcatacgagtttggaatagttacaaaatatcgcgcagtaaataa

SEQ ID NO: 97834 - DNA, 450 bp, Glycine max
aaggtttcccgtcatcactgtatgacgtcctccgtctttgggggggggggggggcaaaaaagatgaatacaaagaataggaaaaagcagaaataggatggtacggggcatgcggcaccgtgtatttgttgggaggttggttaagagcttacgggctgcggatagtggggtggatacagtggggataccagcggtaaaaagcaaacgaaaaaaaaagctgctatgaggcagcacaaaaagaaccggaaaggatgtacggcctggaaagcgggtagaaggggtactgtttgaaaggaacggggggggacggcaaggttgaaaatggagaaatggttagaaagcgttaggggtggagtgcggagaaatgaagttgacccattcgtgaggggacgtgagccagttaaaaaaacaatgggacccatggcgggcaaaggggttaaagaagggacac

SEQ ID NO: 97835 - DNA, 181 bp, Glycine max
aggtttcccgtcatcactgtatgacgatccgccgtctttgggcgtcggggtggggaaaaacgtaagacatatcgaaaagggtactacagggcaaaaaagcccgtttaaacgggaagatagggacaaatgtgaaagggtattaacgtaggggtaaagaaacaggggtattatatgggataga

SEQ ID NO: 97836 - DNA, 305 bp, Glycine max
cgattccgttccaaggaaggtttcccgtcatcactgtatgacgtcctccttctttgggggggggggggggggggggggggggggggggggggagccaagggaatgagcagattagaggcagagggaaggtggggccctcaaatcactgtaagatagtagaggaaaatagaaaaacctctattgaaattacaatcctaaataacggtaaccccacaaaggcaatagaatacatacgatagataccaatatggcaaaaaacatatctggaaaataccaatatggcaaaaaaaatatctggaaaaatt

SEQ ID NO: 97837 - DNA, 408 bp, Glycine max
gttccaaggaaggtttcccgtcatcactgtatgacgtcctcctgtctttggggggggggggggggggggaacaagataagccaggtaggtaaggcgtactaacgttattagtggacaagcatctgcgggcgcccaacgccatggccggccagggtaacaatcgggcttattggagataggcaagaagcaaacgttagataaacgtatgatcaataagaacacgttgaagccatgaagaagaagtaatatttaatgaggtataaacggaggcaatacgtcctaataacgttggaggtataaggttagcagccaaagccgtttgaagtttgaaaagcaagtgataatggctcagatattaccgtgtttgtttttagggtacagcttcgtgacgctagggggcacaggttt

SEQ ID NO: 97838 - DNA, 475 bp, Glycine max
aaggtttcccgtcatcactgtatgacgtcctccttctttgggggggggggggggggaaatgaaagagcaagagaggtaagccccataaaagaatgtttagccccacaatgaagttatgtgtttatcgtaattactagttcacgtgagaggtgcagccgtaaaaaagataaaataaatgtaatgggtttggcaagaagaattaggggatggtgtatcgcgagggacggggggttgtaaataagaattagggtatggtgtatcgcgaggggcggggggttgtaaataagaattagggtatggtggtacgcttcgagacggtgtaataccctgtgtagtataagagaagggtaaccgagatgtaagcagtgtaacgccgtaaattttgaacgtggtaaatgggaggggtggccgcatacggccagcggctttataagtgtaccctaggtagaagtaaccttactacttgtgagttggg

SEQ ID NO: 97839 - DNA, 444 bp, Glycine max
caaggaaggtttcccgtcatcactgtatgacgtcctccttctttgggggggggggggggaggtaaaccatttgggtgaggaaggaagggaagctagttacggtacatagctaaagagaatactaacgtcaatgacgaaaaagaaacgatagaagtgaaaaggtacaataggagacgactattacaaccaataaccgaaacgattgaaaataaccgaaaagattatcaggatgcttggcagtggcatgtgctttcgtgcgtggtagtgccgcgaccaaccaaatcctgttatagattggcagttgagccgtaggggagttggccataggcatttgtggacttgttggcgtacaaataaatgttatagaccttgtgttacgcctgggtttagtaccatcatatctaacgcggatttgagtggtgagtactggcaaagtgggaaaca

SEQ ID NO: 97840 - DNA, 267 bp, Glycine max
ttccgttccaaggaaggtttcccgtcatcactgtatgacgtcctccttctttgggggggggggggggggggggggggggggggggggggggggggagtccggtaacacacggaaggcttataactttaaaatgagcaaaagcgtagtagacggtaaatatgggttaaccgggattagcgagataggacagccctaagacccccaaaataaaagggcatacaattgaaagtgattaatggatatgaacaaaagggtcccgagaaatta

SEQ ID NO: 97841 - DNA, 311 bp, Glycine max
ccaaggaaggtttcccgtcatcactgtatgacgtcctccttctttgggggggggggggggatgcggaataaagagggaggaaatataaatccctacagttaagggatcgatctagctaggtaacgggggccgtgtggatgaaaacgaatagcagacaatccgtggggggaagtgaagctaatatggaatgtggtggcacatggcgaagagaagcgagactaagggtaccgttagtgcccatggcacagtagaagattgagtgattgggagttacaagtaccatgcgtagtgttagaccaaatgaaatttgg

SEQ ID NO: 97842 - DNA, 336 bp, Glycine max
aaggtttcccgtcatcactgtatgacgtcctccttctttgggggggggggggggaaaacacaggggggggggtaaggaatcaaaacaaaagtatcggtaaagagtagccaatcgatgccatgaaagaagcaaggaagaacctaggggaatggatagtatacaccgaatactgtaataggaaaaaaaaaaaaaatggagggctaagatatcgggagcagcaaaagcaattaattgtgagaggtataaacagaaggaaagaaggaataatagacaatgtgaagtggatagaaggagtaacgttccgcagagaaagtgatatgttaatacgaattgtag

SEQ ID NO: 97843 - DNA, 428 bp, Glycine max
aaggtttcccgtcatcactgtatgacgtcctccttctttggggggggggggggggggggggggggggaaccacaggcaaagcctgtcagtgaggggtaggccaagttaaacctaaaagaccaagagtgaaaagttaaatggcatgacataataacaagtacgacccctgatggatatgccggcgtggggcgtactcgggagattagattatcgtgcaatggcaaggtgtgtgggtagttaaggaggcaggcgttcgagtcgtcacataggataacgcagacgcgttagggttatatcgcgcataaaaaatttagagccggcggcgtcctgtgataaaggggccgtgtaataatggtatgcgttgatgaagtggcgtggggggtttttaatactaattggtggtcaataataaggggggtggggttgaa

SEQ ID NO: 97844 - DNA, 259 bp, Glycine max
aatgaaggtttcccgtcatcactgtatgacgtcctccgtctttgggggggggggggggcgaagggagggaaggagaggcaggacggggataattttgctaactctactacggcaaaatgatacaactagctggcgacggcgatagcagtagctacacacactctacaacgtgggataatgcggaaaagatattcaaaggtggaaataacacaaaaaacatacgaaattaagttgagtagacaaaagaagaagggaatag

SEQ ID NO: 97845 - DNA, 257 bp, Glycine max
ccaataaggtttcccgtcatcactgtatgacgtcctccgtctttggggggggggtgggggggggggggggggggggggggggggggggggggggggggggaatggggaaagctgcatactggggaggaatttgtggggtggggagccccccgaagttagaaagaagccgatatcccaataaggaaggacaaatttacggattaaatgcccaccaaagttttccgaaaaattccctaaccttaataaatgaatggaaa

SEQ ID NO: 97846 - DNA, 406 bp, Glycine max
caaggaaggtttcccgtcatcactgtatgacgtcctccttctttgggggggggggggggggggggctgcgcctaaggagaatatagtaagctaggagcgccaagatagcgaattataagactgttgggaaaaaaaaacaaaaacggaattatagtgtatgactagcgaagattaagatcgatgcagaagggaaaagggggagggtgtgaccagaagagataagtaaatagaatttaacgcaccccggataaattaattaaattatacatgaagactatgcgaaggagtaattacagatatgtataagggtgtatggggccggggtgtatgtagaaagacagtataccagacccaaaaaccaaaaacacacacacacacacacacacacacacacacacacacaaag

SEQ ID NO: 97847 - DNA, 245 bp, Glycine max
aaggtttcccgtcatcactgtatgacgtcctccttctttgggggggggggggggggggggggggggggggcaacacgaaaattataataaaaggtatggcaggaggcacgagcgcacataattgtagatagaagacgatagttatttaaatttggatggatggggtagagacccgcgataaaaatgcggcgtacgaaggtgaaacccgggatagtaggtgatagtaatggctgtaggtgtgggga

SEQ ID NO: 97848 - DNA, 386 bp, Glycine max
cgttccaaggaaggtttcccgtcatcactgtatgacgtcctccttctttgggggggggggggggggggggggggggaaggcgttaaaatatatcttggccaggaggggactagaaaacgggccggattaaagatatatgcgacgacatgcacaacgaaaagtgaatactaggattgtacactatgcgtttgcaaacgacaatattgaggaaggatggataaatgaaaatacaaatatgacgtaagtcccaacccgtaggggacatactaacaccgaaatttaggccgggaaggggcccaatggtatggttggccgtaggatttgggagggcgtactgctggggttggcagtacagaggttatattagtacaaccaggtttaagagg

SEQ ID NO: 97849 - DNA, 320 bp, Glycine max
tccaaggaaggtttcccgtcatcactgtatgacgtcctccttctttgggggggggggggggacaacgagaatgaaagtagagacaagcgggtggggtgcggtcacgtaacaaagctataagcggtaatacgtgggttataacgagcaaaaacaaattaccagtaacccgaaggaatgtatgaactagcatattaaaaagtgaaagtaggcgggggcaagggacaatgacaatgaaagaactgaatagtagtaggataatgtaaataatgccaggaatcaaataaaaggtataatatacgtatgaaggaaaaagacacggc

SEQ ID NO: 97850 - DNA, 393 bp, Glycine max
  unsure (1)..(393): unsure at all n locations
ccaaggaaggtttcccgtcatcactgtatgacgtcctccttctttgggggggggggggggctggtggtaaaactggtgggggtacttgtgtgaggaggacttagaaaggtagttataagggctgggctagatgcgcccgtagtataaaggaacagaggcgtcgaaatggaattgcttggtattgcttatatggtaagctttatagatgggaggccgggcacaatagaaacagtaccagtagttgtaaaggtgcccggagtaagttagccaagtggttatgggttgggcgacggccccaggtggcaggggtgcgtcgggttagccgttgggcgagcgtgccaggcccaagtggtccccgtggttagangttagtagtggtagtagtttaggtaa

SEQ ID NO: 97851 - DNA, 260 bp, Glycine max
caaggaaggtttcccgtcatcactgtatgacgtcctccttctttgggggggggggggggggggactaataagaaaaaagggagaaagtatgaaattataggtggtgtagttagaaaatataggacataagttatggaaataggcgaaagtttacgtctaatctctatggcaaagtagaaaaggtaggaagataagaagtttatgaccgtacgttataggccagttagaggagtccgaagatagagttaagtaatgattat

SEQ ID NO: 97852 - DNA, 456 bp, Glycine max
aacctgaaatgatgtgtttcaatagaatatctccatctgttcaatctatgcaaatataattcacaagagaatgttttgtcctagttcttatacacatgtgctagctaatttaattcattttcagtatttgtaagcaggaaagaatcatacaaaaaagaattaagagtccaattcccaagacaaaagaccagtcttatagcaagcggtaccaaaatctaagacttatctatggtatcattctagcataacacctgcagtaccaaacgagataagttatagaaccagcatagaaagccaatacttctattgattggcgcaagtttaactttaagggacacaaaaaaaataaaggctagcatgggtgtcacactatgcccctataagtcaaggtcactgtcattaaataatcttaagcaacctccaacttctctactgatacaaatcagcaatcaaact

SEQ ID NO: 97853 - DNA, 415 bp, Glycine max
gacatggaattgtttccattctcaaaccaattagtacaagtacaactactgaattacaacaatatccttgacatcttattagcacaagtagcatcatatttagcatagggcaaagcattaagaaaaagcagtagtagtggtgtaaatcaggactctgatcatagaagttgaattggaccaaattaatctatcagagccgaagatctaagtcaatcttcttaacatctgatgattcttgctttggcaagtccacccgaaagctacctggccaatacaaatccacagcttgttcaagcataaagggtgtccatgatgatgccactgatccaattccaaccccattattggcatcattactactgaatctagccaccatagcagacctttctctgataggtttgtgcacaagagagtg

SEQ ID NO: 97854 - DNA, 352 bp, Glycine max
ttccgttccaaggaaggtttcccgtcatcactgtatgacgtcctccttctttgggggggggggggggaatcaaagagttatagaagagagtagagacaacgaagggcggatggggtgaagggtggtattgccgagaaacgagtagagatataatgagtgggggatgcgtggtatacagagacgataaaagtcaccaaggcctaaggacgaaggtgtgttaggtagaaagataaaccaagttattgagattaacgtaaggggaaagagtctcgtgccgacaaaccacgtaaacgaaagtatcgtgggtagtacacactttatatgtagagcagcagggagcaagtaagtaagt

SEQ ID NO: 97855 - DNA, 338 bp, Glycine max
acactatatgaacttcattattagcatggccatgatattaaaataaaataaatttaaaagggtgtgtgacacaattcaccgcttgtgtcccgctaaagcttgaatctgattcatgctccttgccgcgaagtaacatttacaaattacaagcatgcaattaattgtaaacaaatttcagaaaaatatgccaaatgagaatgaaaaaaaaaatgtaaaagaaaaaagaaacacaagaaccacaacatatataatatcaaacgtgtgcatgtctaaaagcttctgatcatccaacggtccatttccagaccttaaacctcacatgcacctggcacgccgta

SEQ ID NO: 97856 - DNA, 322 bp, Glycine max
ccaaggaaggtttcccgtcatcactgtatgacgtcctccttctttgggggggggggggggacaaaagtaagataaatggcaggaacagattagagagagaccgatgacagagaaagatatagagggtttacaacagtcataattgaagaagacagatagtagatagctagtaaatgacggcaacaactacgccctggtaagggtagatggaaggtttatttaaaggaacctatggaagtggttacgaggcgttaaaggaaggaacgcgtttagccgcgttggtaaaaattggcctagacgaagggggtggggtggagggggc

SEQ ID NO: 97857 - DNA, 449 bp, Glycine max
gctaaaagaaatattgtggaacgtgaattctgacgatgcacttcaagggatgtacaaacccatcaaactactctaccatcccaaagaccttttcgttctcatcaggcagccacaaagaatcatagccgtattcccaattcgtttcaaagaaaagtcagatgttatcattgcaacgaatttctttcaggagtttgtggatgtgggaaattcagataaatgagccaaggtaccaccttgcaactggtcagccattcctccaccagagttaagaggagaagcttttgaggatttgagtaccaatggagggtttttcattttcgatatctcttctcgccgtgttgaaggcaataggctagacaaaattgtctggaatgtagaatctattaaattttaatgcatatgttagctaccatgtaaagagcaccaaaggttttattctaagaaggatg

SEQ ID NO: 97858 - DNA, 330 bp, Glycine max
tcgccctttttttttttttttagtagaaagtccagataaattttatagttaagcatgtgaaaatagtgctagtaaagtatttattttcttggagtgtctttatgaaatccatatattacataggaaataatatttgtacaaagttctactctatttttgtatatcctgttgaaaattttgggaacctaaaccattgttgccgaaatcgtgtaaatcaatgaattttaagtcggaaacggatcatcttcattttttttgccaaaggtgctccatctttgtttcaggacgacatattttgctgatcttactagtttcttcgtgtacctacat

SEQ ID NO: 97859 - DNA, 443 bp, Glycine max
ccaaggaaggtttcccgtcatcactgtatgacgtcctccttctttggggggggggggggggttgttgtgcgtgccacgcagaattaccaactggtgtggggagtggggtgaagagattgggtggtgttggccttgtgttggtagcagcactattggtattacgtgttaagcagctaataccgccgccgccaccaccacgacgactgcggccttgttgtgcgtggtggcgctttcgcgcatggtgttggaagtggcgtcaccaattttggtggggttgtaatacgcgtcggggtaataattgtaatgggtgtaatacccatatggcgcggttgtagttggcgcagcagcagcagtatttgtgaggggtgttgtcagtggtgtgggtactttgggtggggttggtggtggtggtggttggggtgtgttagtggtgttggttgttg

SEQ ID NO: 97860 - DNA, 307 bp, Glycine max
gggggggcggggggcggggggggaacctatagaggggccgccctagcaagaacaaggccataagacccgatagccagagtatagcaccaagagagacctagagaaacccacgtatccccccagcagcagcagcaacagacacgcgcgctgtataaagtagacccatgctggcgttagcgaatgcgattgtaagaccatgaataggtggattaagccattgcaacgggcgatttattttggcctcgttcacggcattggtgtaccgaaatattagttggaccgctaaagatgcgaattgttttaggac

SEQ ID NO: 97861 - DNA, 389 bp, Glycine max
attgaaaaacattatgcacctagaacttgataaaagtctagaacaaaacttatcaaattatacatgtaccaaaaaatcacaagctatatcaaattatactttgttgactaggttccttgtattctaacactatcactggcacacacaattgcaattagcaggtaactctagtttaaaaggaagtccaaaaagttggaagaactatgagcaatcttcaagacttccaagttgagttgagacattaactcttgaatctagtttgtgcaaaacatgtctgtttggacatcagctacatgttgcttccttcatatacttggaggtgcccacttgccagctttgaacttgccataaaagctggatcgcttagaaacaacatagaagactgggat

SEQ ID NO: 97862 - DNA, 332 bp, Glycine max
gaaacatgaaaggttcaacaaatactattgggggccctttttgttcaaacattaaaccccccttaaactgaaaacaaatttaaaaaaaaaagcccagtaacttttgacaagggttttacccatccggggggtttttacttttgcatatggggctaaatttaatggttacaagggatgggaaaatttttaaaatgaaaattgcataaacttacaaccaacagttaaaaacaaatcctaaaaccctaaatttaagccatttctgcattgatacctgattccaaaaaaaaaaagcccctttgcacaaattaaatccctaccatgtatctttgggg

SEQ ID NO: 97863 - DNA, 359 bp, Glycine max
ttccgttccaaggaaggtttcccgtcatcactgtatgacgtcctccttctttgggggggggggggggaaagtggggaaaaagatgtgagaaagcgacgcgcttcgttcaacatatcataccaaaaatgtaaacaaacaagtagagcaggtccgatagaatggccgaaatggaactaaaacgaaagttaagcgttatgcgaaaggcaaagaatttgaacgcgcggtctgcgtttagtggtctaccagaagaacccgtattataaatagcgaaagaaaaagtatggttataatggttctaagcatagcgggggggtacgtgttgggggtagtattggccttatagttagtgtaaaagttgt

SEQ ID NO: 97864 - DNA, 348 bp, Glycine max
tttttttttttttttttttttttttttttttttttttttttttttttttttttttgtttttttttttttgaaacataaaaggtttaccaaaaactattgggggccctttttgttaaaacattaaaccccccataaactgaaaacaaatttaaaaaaaaaagccaagtaacttttgacaagggttttacacatccggggggtttttacttttgcaaatggggctaaatttcatggttacaagggttgtgaaattttttaaaaagaaaattgcataaacttacaaccaacagttaaaaacaaatcctaaaaccataaatataagccatttctgcattgaaacctgatacc

SEQ ID NO: 97865 - DNA, 394 bp, Glycine max
gactcaaaaatattctgagtttgattacctgaaaatctacattagttaagaaagtgacacaaatatgaaaagaactacagagggaagaagaggtggagaaaatatatgtgcaaggcctcgccaaaatggaaaaaacaatctaaaagataaaccagaagataacctattctatgataaactaagagatataatatctgcatcagacagaaatctaagcaattatctcggacactctttttctaacattatctctatggttgactgaaatttattaaaaataataaattttggtgtattttacttctaaattaagatagagaatcattaaaccagaagtatgactcaccaaaattgattatttccaatgaatttcagccaataatagaatgagtgt

SEQ ID NO: 97866 - DNA, 264 bp, Glycine max
gattccgttccaaggaaggtttcccgtcatcactgtatgacgtcctccttctttggggggggggggggggggggggggacaccgcgtaaggagccagaaagggatatgcaaaatgtgattacagcgatataaaccaagttaataactagtataatataaaattaaacagggggtggtacagcgaacatttgaatagggagacgatgggataataagaatgaatgaagtagatggtgtttgttatagggatataacaaacaaaac

SEQ ID NO: 97867 - DNA, 443 bp, Glycine max
agttaaccaactactagcatatataatagaggtcactttacatgcattagtaaccagaggctgaaatcgaaatcctacaatagcaacctcgaagggtttgatcagacaaaatactgtagcccttaactgtacttcaaatcatccaaaaagactatatatataacctgctatcatagtaaactattaaattgactagatgcccacttcctaagaattctcattaactgccttgtcaatttcttcaacatgattacgaagcacattccactgcaaaacacaagaaatgaattacaggacagtggctcgaaaatcatttgttctagatcattagaaccaacagatttaagacagaggcatagaaaaggaactcataatatacaacatccatatatatagtttcaagatatacctgatccatggtcaacgagatacctgaaaacaaa

SEQ ID NO: 97868 - DNA, 281 bp, Glycine max
ggggggaccccaaacccggctttttttgatggaaaaggggaacgggccctggggggaaaccgcaaaatttttttttaagggacaaaggtccccccccaaaattccccaaatccggggggcccccccccggcccttaaaaaacaaggggcccaaggggggcccttaaaagggtcccccccaaaagaaaaaagggggtctcccccgccaaaggggaaaactatggggggggtacaaaaaagggggggccctccccccgggagggggccccccaaaattccccc

SEQ ID NO: 97869 - DNA, 364 bp, Glycine max
aacaaagaccgaaagcagatgtatcaactcatctattttaaaacgtatatcatacataatgggaggacctccctctcatatactgtaaccaatgcggttctgtaaaggctttattaccaaaatacttggctgcaaccatttaaacaaaatcggagtaaaacagaaaaattagccctttggtaagtgcatggtacaaatctgaagtagcattaatttaaagattttttcgccctaattgccaagttaactgatcagtagctgccatagcccgagatgctggaccaatggaaccttcggacctgtgaaactaaaagatgactattccgagagagtaaagtgcattaatagtccatgataaatatgc

SEQ ID NO: 97870 - DNA, 202 bp, Glycine max
ccgattccgttccaaggaaggtttcccgtcatcactgtatgacgtcctccttctttgggggggggggggggggggggggggggggggaaaaaccaaacaagaaaccgcgtgatgctggagaaagaaccgtaaaagatgggataaaatcctttcacaataacccattacaccaccaaccgcatataccaagtgagtatgaaag

SEQ ID NO: 97871 - DNA, 316 bp, Glycine max
ccaaggaaggtttcccgtcatcactgtatgacgtcctccttctttgggggggggggggggggggggggcgggtagtagagaaaagagagagcggtgcaaacaatatagataacgatataaaaaaaacccccgaaaggtagaaaaaaagatacaaaaaaaaaaatacaaggcacgaacacccaaccaaatagacacaaaaggggagtaagtacagaagaacaacttaggacgacggtaaaacgtttgggttaacacgcggccaattttggggacggaaataccgattggtgtttttggcacgcctggtattatggtt

SEQ ID NO: 97872 - DNA, 340 bp, Glycine max
aaagtcaaattttaaaattaaatgcccaatactatcaactgtataaaaaaatacatgtaatactgatgactaagggaaaagcagggggaaaaaatacataaaatgaactccaccaaggtcagttacagacagatttggccagcttaattgtagctttatcaggaatttacctcagttgctcaaacctgtcagattctgcaagaagacagctaccatcttgcactggctctaacttgaatctataatgtttatttacacgttcactgcatccctataagttgacaatccatttgcagctaattgcctgccactttaaaaaaatgctatgctgacatccctc

SEQ ID NO: 97873 - DNA, 128 bp, Glycine max
gttctaaaatacatgttgacttattgggtgaaacaacagtacaacgcttcaaatgcatgcacaaccctttacatgtacttaagggtacacgtgtagatagattgaataagttgtgacattttattctg

SEQ ID NO: 97874 - DNA, 403 bp, Glycine max
cagaattaaatacgcagcaaggtctttatctattgtcgatagagatcgagcgtaacaaatttcctttactaatctattcatttgatgtcatctgtacaataacaatagccaccagccaagtagttataccataatactacactatcagcaaagatattgtacaacctagttaatgatctgagagaaacgtcgaatactcgttttatatatttggttagtaatctaaaattggtgcccgcaaatctaagctaggctatcaaaagtaatttaatcaaaattgtctgtaatcacctgtgcactctctccattacagcaaagctcatctccaatagaactgcataagcataacctatgagcagaagagacatgctaggatggtgggggcatgcttaaactcagtatg

SEQ ID NO: 97875 - DNA, 424 bp, Glycine max
aataacaaaataacatacatctgaattagctttttgtgtctaccgaaatcgttcctctggttaaaatcttatagactaatctccttgtaattagtttttctacgtacacttatggtatttaactgaacgacggtcccagaaattagcacaaaccttctgtctttaacaaaacatactcaggaaaactaaaccaaaaaacaaccttgtttgagcaaacacattgaacatatttcaatttataaacattattttggctttgatcagtattattgatctcccctatcaaaaaatgagggactaagctcctatcaagttctccattgttatgattgggacacaaaatcaggggctgtgtcaaatcaccttcatataatgcattagccgcaacctgaaatattaaatgtgcagctctaaacttaaaact

SEQ ID NO: 97876 - DNA, 407 bp, Glycine max
cctaaagatttgtagatgttgaaggccattcttaaaactcccaaattgacaatattgagaataatattacaaaacccaacacctcattttttttttaacatccgtaagacccccaaagtttataggggagtaatctaatccaatttgccttataccccatacaatgttcagtgaaaggtgaaggagcaggaagccaaagatgtaaacggaattttaaatcgtactataatagatagcaactttacgcaacaactacgattatgtaaacagcacagaaaatatggttgatccataattatacaggaccataaatggttatttaagaaacaaatcacccaaacttgagatatttggcttagatgagaggaagctaacgagaaaaatagctttacttccagctgaagcct

SEQ ID NO: 97877 - DNA, 387 bp, Glycine max
acaagtcatcaaccgtttatgtactttagttataataaaaaaataacagttatttacatttaccagagtatattataatgtacaaacaccataaaaagaatatagtcagaactacagattcagagaaatgctagttgcaatgcgagaatgtctttatattaggtcagactgtagcttaatggacatgtagagaagagctaatagagcaccttggggaagtggtgcataccttgcaaggtatgagccaacccacaaggccaccacaactagtgcgacaacactactactggttttcccgcaaacccaacttgcaaatgacaagcatagtgttagcaatatgccacccctcccacccaaaatccatgctattacatagcccattttata

SEQ ID NO: 97878 - DNA, 261 bp, Glycine max
caaaacaaaatggcataacataaactttccaggtaacataatcataacattggaggggggttataactcgaaaacagccaacattgccttttttttaggtttcccccacaaaaccccaattttttggagcatgtggccttttttttggggcggaaaattattatcataaagcttttaacaaaagggggagtccttgtccattataaagtaatagggggggcccaaaaacatggatctctcactaagttccccattggcccc

SEQ ID NO: 97879 - DNA, 439 bp, Glycine max
gaagcttaacaatcttcacaataaaaaatgcattagttgatacaaaccataattccctcgtacaacctataatagattcataaatcattaagccaacgaacgttcacaataaaactaattttaaacccaaaataaattctttaatgaaaccaaatatttaacatgattctagatgatggaacatcaaaagaaacagagacgagggtgagtgtgagggagatctgtctttgaacacaaatatgccaaaaggagagaaggttgatacactataaatacctaccctcctactgtgctctgtttggggctgatgatacttggtgcattagtgtgattagaaatataggcatttgggaagctggggtttcaatggaggtgatagcaaggtaaagaccaaatagcaaaaaattgtaatcagattgaatcgaattaacctaaccct

SEQ ID NO: 97880 - DNA, 386 bp, Glycine max
caaacagaatatgaaatatactatagctatggtatgtaaacaaggtcaatgaaattatagaataccccacttctatagtatttggtattttacaaggcagcaaattttatgtaaataattaattttacatttaatttaacgtaagacacaccacacagaagagtgggataaaggactgagagcaaaccttgtcttgttggttcttcaactgcaagggatgaggatcatggggtctaattctgatgttctctatacaacttccattatttattcgatgtaatctatgcttctgcttcctatacttctcacctttatctttgacctttttgttcttcctctcatgatctctagactggttctctaatttgggcactgcatttggtagc

SEQ ID NO: 97881 - DNA, 345 bp, Glycine max
gccaaaagtaactaactgagtgctgatatagtatccctttgtttaagtttattttaatatgcttgtctaaactaattaggatgcatttgtttcagatttgttttattcccaggaggttgaaaaactttattctcatatttattacaacttacaaggtgataaaataattattcccagatatataacattttttaaaaatatttgaaaataatattaccatgttatattatcagaagaaaatattttcaggattaaaaaaataaaccgcccatcttcaattgtcccgaaataatcatcatataaactaggagaagagcatcatattactaggtaggtctttacaac

SEQ ID NO: 97882 - DNA, 204 bp, Glycine max
ggaaggcataataataataaagtagattatgtatgaattgattcacatacatacaaacaagaagaaaaaaaaaaaatggcatccaagaaggggtgtcggttatttacgcattaagacggagaatcaacataaaataaaatttaataaaaaaatgggttgtaattacagtatgagaccaaaatgacagaaaatttgtttttgtta

SEQ ID NO: 97883 - DNA, 260 bp, Glycine max
agaacccaatattcatttttattggtatttttttatcaaatcaaagggcataccagtttccgaacccatcccgcttatagactaatggcccgaataaaaagccgatctggcaactgaaatctaaaaatcgccccaattaaaaaaaaaaaaagaaggcccaacccgaggttggggttaattaattggaataaaaaaagaagccccccccgggtggggggggggttttggaagaatgagccgagcattcaatcctctggggg

SEQ ID NO: 97884 - DNA, 173 bp, Glycine max
atgacaaccatggggaaaaaatttttatttgagaggataaatttgtcacgctaaaggaatgggatccacctctctagagaggaaaatatgatacacccatgttggtaccggttaaccattggtcaccttcctcttcaatttcatggagttgaaagctatatgcttaaaatgaa

SEQ ID NO: 97885 - DNA, 230 bp, Glycine max
caaagccccataatttttttttaggaagcctttttttcataaaaaggggggaaattttggcggtcctttgacagtacctttttcttaccgggacaaaaaacttgcaaaatttttttgggaaagtttttgacccattggacaaagttttggggggatgaaaaaaaccaaaaaaaacccccgaaatcggggtttttccttcaaaacctcggggaaaaaaatccccccgaggt

SEQ ID NO: 97886 - DNA, 333 bp, Glycine max
gccatgaaataatgattcagaaacattgatcgattatcactggcgtcgcgtatattaactacagttttttacacttgcatatatatatatatatatagctgaaggacctacttagcatacaaatggaggttcaaaaaattaatatctcgcggaatagaagggatacacacattacacgagcagaagatacaagttttgggaatcaacacgggccatctcgagaaataaatcacatagggcctcctaagccactggcacttacaccatccataatggcaaatcgcatgtcctctgttggtttccaatgccggttcctttgattgatgaaccaat

SEQ ID NO: 97887 - DNA, 392 bp, Glycine max
ccccataatttgcttaggctctctctccccctctctgatttcgttcaatctctggaatttgatgtataatctagtaacaaagaatatctgattctttttttattttatttgatgtgtgatagttgttgatgtggtgttgcggtagaattggcatggagccggttacaattcttgtccttcgtggccaatgtggtattgctacttgtcgtcattctctttttcttagttaaagctgccagccttctcaattggtatttcacttcctcaaaatcatgttgcatttgttagattactgtctctgctacattcatatgcttgatttccgatattaaactgttcatgattgaatgaaaaataaattcattttggggaaaagtactttgattaacaca

SEQ ID NO: 97888 - DNA, 497 bp, Glycine max
ctcatacaacgtagaaggattaacttgtacattctccataaccaaaagcaccggaataaattcagacgaggagttaaagatcgagatggaagataatacatgtcgagaaaaaatcaatcgccatgcaataaaacaatattcaagtggctttacccaaattgtgggaagagctgaagccggtcttcttgtagaagatatgatttgtttccatgcaaattcaacaaaagacgtcagaggatatgtcaaaggggcgtcaatgtatgttccctacacaagaaatacaactaattcatcgggcggtgtgacttcaacgaccatttgtccttatgggtcgtctggaactaggaagggtctttatgttaccgagtggaagaagaagaaagagaatgagaagccttacatggggaccatagcacattattatgctaataacggggaaaatttatttactagaggaatcgatgttggtctttctatgatggtaaagattcgagtgt

SEQ ID NO: 97889 - DNA, 273 bp, Glycine max
gggctcacttttgattgaatgattttattccttaatgttattatagcctctgcattgtaggggcataatatcaagtacagaactagtttataaaaaacatgatatttctctcatagttactaccgttaccatccccgttgaatactccatgatttcttgcgttttgcgagttgccatgaccatgacctggtgctacaggaagggtgtcactgtcgtcgctctcaaactgccatctacgctgtctttggatattggcacagtgagggcatgccc

SEQ ID NO: 97890 - DNA, 211 bp, Glycine max
catggccccaaaagggggattccatttttatgaaattggagtttccccctgcagtttaaggaatttttggggggtaaatgaaaggccccgacttattgttccagaaaccttattaaacaaattggatttaccctctttactagttccctaaaattggaaagaaccccaaattttccaaatttttaaaaagactgggggcctgtcctttaaa

SEQ ID NO: 97891 - DNA, 254 bp, Glycine max
gcttggccccaaaaaggggtttccaattttataaaattggaatttcctcctgcagtttaaagaatttttggggggaaaatgaaacgccccgacttaaagttccaaaaaacttattaaacaaatttgattaaccctctttactagttccctaaaaatggaaagaaacccaaattttccaaaattttaaaaagactgggggcctgtcctttaaaaaaacaaaatccttgcttaattttttagtctaatgattttcc

SEQ ID NO: 97892 - DNA, 356 bp, Glycine max
agaaaaaaagaagctcaaaacacagtagttattattattagtttattactattattattattatcataataatactgatgaagctaacaacaactcactacaatgttaggacttaataattaggtctaaatttcattaacattgcctctgattcttccccattatcatcatcatctgttttttttagaaaggagtactaattaattaatggtacagaaatttcaaaatccattgttggctccactcctagttacattattattctgatcttgatggaagtgatgttgatgttggtgttggtggtaccctcctcctggcaaggagctgctactctcacctatgtcaagttctggcct

SEQ ID NO: 97893 - DNA, 357 bp, Glycine max
ggacccaggaaagcacccaaaaagaaaattgatagcattttactacagtttgtttttacacaccttgcacattaacaaactcatgaagtggatagcaaaagattcccctgttgcttacatttgtaaaatcccccaagattcattagattaatccacaaaacaatttttaagaaaatttaactccttcatcatcaggggaagttcctttaaagaccacaagctttcccttctgttctaatagtttcagggctcgattcaaaatagttcgatctattccatgaaaatctgttccttgagattaaaggcctgatcgtttttcttttattgtgacaacaccatctttcagcccattttttt

SEQ ID NO: 97894 - DNA, 252 bp, Glycine max
aagggtcaaatcctcaattggatacctaccttttttcccaaaattttttcaaattttcccagagaaagaaaactttaaaagccaaaatatttggcaaagtaatttaatctatccccaaattaacaatggggggccactccaaactcgtttcacttttatttgaaggccaaagtaattgaagtattttggctacttggggcctcctttattaaaaattttttgcaggattcaaaaatggaacggccaaaaatt

SEQ ID NO: 97895 - DNA, 227 bp, Glycine max
aaaaaaggaaagcccctttgtaattagaggggaaagtccttcttaaaagagtttttgaaatttttgccccccccttttttaataaaacagtccttttaacccagttaacaaagacccccaaacacctttgaagccctgggaaaaaaaacaagaagcttttgggggcattccccttttttttttaaaattcaaaggggggggtccccaaagctttccccccttttttt

SEQ ID NO: 97896 - DNA, 480 bp, Glycine max
  unsure (1)..(480): unsure at all n locations
gggaaacatattctatcagcatgtgaggactctaacgtatatctatggaatgttagtcaagaagagtctaatcctgtgaaagctaagaagattacatcttgtgagcgttttttctcaaatgcgtccatagcagtaacttggcatggtttgaaatcgcaaaatattgaaatccaacatcaactggatgccttggataaaagatcatctcaagttatacaactcagtcctcctgcttcattctccctgagtcaagagttcttcttggagtcttttccaaagggatctgcaacttggccagaggagaagcttcctgtttcaagccccaaggctaaaacatcagtgatgcgtaaatccgagtacaagttcttgaaatcttcttgcaagagtacctnctctgctcatgcatggggtatggtcattgtcactgctggctgggatggtagggataaatcattccacaattatgggctacctatactg

SEQ ID NO: 97897 - DNA, 497 bp, Glycine max
ggtgtcaaatcagaaaggataagatagttgtaaataactcaaataaaaagaagaaaaaagtggtgtcagcctaacattgagaccatactcagaatgtttgttagtaacaataattgtcagcactgcatcagttgccatagactgtgacagtcaagtagactggaagccactaaacagaaagcaacaggattggttgttggtactgtttgtatgattggagcaacaggcagctaaaaggcacctattcaaacagagatgaccgccacacgcatcctcaccacactttgcaagtattaaccccaggcacaagaggccctaccatgagatggacgggaagattggcagacaaagagattcatttagttagtcctgccaataataaaatcatcatcaccccccagcattttgatcatagtgagagtctcagccactagctcttgaatcttctcctttcatcttggcaaaataatagccccacaacacatcaaaataatatc

SEQ ID NO: 97898 - DNA, 150 bp, Glycine max
agcaaacctcacattcaaaaaaaaaagggagcctaaaaatttccaaaattttaagctaaaacccccaaaaatttttctcaaaaaaattaaatagaaaccaaatacttatccaaactttcatttggaaaaccggtcaaggggaacagtttt

SEQ ID NO: 97899 - DNA, 298 bp, Glycine max
accagaaatttcttaattattttccattgcgtcaaaactgcaaccttgcataaccaaaaaataaattgggagcaaaaggagaaaagggtaaaataaaaccttttaagctttgatgagatgacctccaacctcttacagaagataaagttgtcatggaacacccttattattcatccacacctaacaagacatccgttgaagggactgactaacttcacaacaatgttaagcttgaggcttctcaaacttgagtggctccacaccttccccggtgaagccagggtcatcccttccaaag

SEQ ID NO: 97900 - DNA, 114 bp, Glycine max
gaataagaaacttaatcgattttcacttcacttcactaatacatcatggcagacgagacccagaacaggtatgagagctctgatgttgaggtccatgatcgtggtgtttttgac

SEQ ID NO: 97901 - DNA, 403 bp, Glycine max
aagaccggactaaaatatgggtccaggccaaaataatgatacgttactatgtttgggaaaaatgtttgaccgcagggataaataataactgaagatgggcaacattttcaaccaaacttctaggggggttccaaaatgaacagaagacacatgatcaaaatttgcccccaaagacaaacttaaaacagaaaaatactgcaaatagcatgtttattaccagaatccattaaaggggaagctttttcagaacctagggattttttaccttcgctgaggactgacagatgtgcagcataccaattgtgtccagtatgggctggttttaactttccttttttctctcttgatattagcaggatattttgctggagagttccatttttttgcaaccttttcttttacc

SEQ ID NO: 97902 - DNA, 250 bp, Glycine max
aaactataaatccaggtgctttgccctaaaagtacagatttacatttacatgtaaaaatggacctgaggactaactatactgttgtacagaagaagaaattaagatttacatgatacctatttttttcactacttataaggctaatacggtcttagagctgaagcagtgctttgaatgggcctggcaagcctcaagatctaatgctgaattgcagcaagcctttctttgtaactcgatttgtccatccta

SEQ ID NO: 97903 - DNA, 353 bp, Glycine max
attaaagagtaaaagtgggtcgggaatatatttttcagggagtacaattgagagcgactaccctttaacctatagcaatggaacaacagagtgggttgccacatttgaggaatttggtcgcaagtgacaaccctgatgtcatgataattatgggggattttttactctatttaccacaaaaaataattacgatgaacgaattgcacagagtaaaaagaatgatttgggtagggggaatgccaaaaccgaaatgatcaatcatttaatcacccaaacaaaactggataatttgcttccatggttatatccctgccttcggccacaactttgcgggggcgcctaaaacctggtct

SEQ ID NO: 97904 - DNA, 514 bp, Glycine max
cagccacggggtgcctaaaacagcaaaaggacactaaaaacatgtatgccactgggatggtgaagatgatttgctgtgagacagagatttcatctgggaagaatgtcaagtgcttgggtacaagaagcagtgaaaatggttgctttgtgctttggcagatgcaacctggtatgtggtctcttgaattggtggttggtgaccacaaggtggttgcaggcagcaatggcaaaaccgtgtggcggcacacaccatggcttggcacacatgcagccaaaggcccccaaagaccccttcgtcgcctcattcagggcttggatccaaagaccacagcgagtttattcaccaacgcgcaatgcttgggcgagaatcgaattgggaccgtggattgcttcgtgctaaaggtctcggccgatcgtgcggcagtggttgaaaggagtgagggccccgcataagtgataaggcacattctatacggttacttttgccaaaagagtggactcctcatatacctaga

SEQ ID NO: 97905 - DNA, 273 bp, Glycine max
ggcccaaatattttgtttataaaaagggggggggggtccaatactggccggactaatttggcatgttattgttgtttcaggtaacatttataccttccttccagccgcaaatgtcacaaactaggtcttaaatctcaatctaccttttccacttatttggggctcccaaactcattatatgcccctactaccctaggacacaattttttataaaactaaaaaaccttacctttttcaactccaacaaccctggttaaaattaaaaaacaaacc

SEQ ID NO: 97906 - DNA, 259 bp, Glycine max
aaaaaaaacgggcaaccatttcaaaaaagctcatgccatttatcggttcataatatgttccaaacttcgacttgggatcattaccaaatcttaccatcaactaaactcatttttagataccttccaacaaaagaggactcactttccaagcaatttatacagttaaaacattcgctttaacatcccccatagttaaatcaaaacaggctatgcagtgtctggcctaatacgtttcctccccaacagcattggtttcttc

SEQ ID NO: 97907 - DNA, 310 bp, Glycine max
ggaaacatagtttttataattcttttgataaatgatctcatccacgtttttcatcttagataactgaagccaaaagccactttcctctgcattacaatgcaacacaatagatagatgcaatagccatttgaaacaccaaagcaaatcactagtgataatacttcattacttttgtaattagccgttacttaatctccactagataacttagattgatctcaatgatagctacctaatacatgaaggcactcttttcatacaacttgattcattctatccagtgttaaacttgatgattgaaaaatgaaag

SEQ ID NO: 97908 - DNA, 389 bp, Glycine max
attgaacccatgcatgcaaaaggggagccactttttttggaaatatgccaatcatgtttgaatttaagataccctgaggcataaaccaaccattgggtgacaagctttcggttttgctaaaagcttaattacaaattttcaggtaattaacaaataaaccgaaacttaaaagtactggggggccattaaattaccgaatcccttgaaacgaaaccttccaaaaactgggccttaaaagtaaaaaactcctccaatttaatttatatatatatgccacattatccaattttaggggaaacacacattttccaaagggagaattttcaagaaaagtggatggaggaggaggttgaaaattcttccatatttccctttgggggctttttttt

SEQ ID NO: 97909 - DNA, 403 bp, Glycine max
acctccaaagatatttctcagtccaagccgcaaaacaacgaatcaattcttgccatgtcatcacccccataaaccacgtcaccattaaatactcgaagaaagtcttgaacctaatctgctgctacttgggccccaacatgagtcagtaaattccaggtctgaagaaattccagctatttattatcgtcctgcagcgtgtttttgaaatgtcatcttcattaccaccggtgagtgaagaagtaaacacaagtgggcgccgagtttaactttaaacccgcttacgtgtcaaaatccaattggcgagaaaccctcgagcttctgaaggatctatcaagcttttcacttaaagcccttaggatctgccacgtggcatcccctttctggacctggctgttgaaaagta

SEQ ID NO: 97910 - DNA, 414 bp, Glycine max
gagaaaaatgaacatcttaagcctgattttatacccttgtgcaccaaaagccagcttcaacagagatcaaaatcaccttgaaccatattcacaactcagaatattacagagaaaaaaaattaacaatactactttacttacaaataaacttagcaatactttaacaattttcaaaaagtaaaaaaattaattcttccatacacatatatagaccctctcttccacttgccagtgagaataatggcaaggcaaataatgaagaaactacagtaagtgatgctcttttatcaactgatgatagaactgcaggtggcatgctcatggtcggtgataaacatattttgttcttggatccacaatgagaccttttcctccattcacttctaagtcatgctgaaagacgaaatctgggat

SEQ ID NO: 97911 - DNA, 425 bp, Glycine max
gtaaagtaagtaagcatgttggtctcgtgcaatttcatttaattgatatgattctatgcttttcagtgttttccttacaagtactatttataaaagtatgatactccaacaatgttcagtgtacacaacaatacaaaacgaattttgtagtgatgcaggatgcacatttcattggctagtgagcactgaatacgaatagcagcagttcaacaaattgaaattacaccagcattttgtcaaaattgtaagcgtatgttctgatttctgaagtccatgaatggtatctacagttttttccacctgaactcattggcatggtgtgaatcagtggttgcactccatatgaacttcttgtgcgaacaaaaaacatggaagtagtaacattccgcatgttgtcagacagtttgactaccattcggcttctt

SEQ ID NO: 97912 - DNA, 480 bp, Glycine max
aatcaaacacgctaaaaatactactaaagactaaatgaattatcccacatcatgtacaagcaatatttcaaggattcccttttcaacatgaccaaacaaagcatagaaatcaacagcataacactacatcttacatgctaaattacatcattgatgggaaagacaagtattaccaataaaaccaaacacctttcaatgcatcatcatgcaggaatgtgaaagtgcacaactcctctttccatatcatctctaaaatagataatgaaaagctgcaaccatgtatggaggtgcctttccctttcaatgattaaacttgcccagcttagggtaatattgacactatcaccaagagaaaaaaaaacctccaaatacttcaagatgatattggttcataagggtatgataaccatgggtgcttcagtgcttcggatgcagaaggtcgcttcttcgggttaacctcgagcaaatgagcaacaaagt

SEQ ID NO: 97913 - DNA, 172 bp, Glycine max
attgatgctgcctgaagtgccatatgaatatgttgagaataattgactattgtcttcgagtcggtttgcttttataactattattgagtctgtttgaatgatttcagaatggatttggagtttgtaaaacatggacgggttatgtgtataaatgaaattgttgtgctatcgt

SEQ ID NO: 97914 - DNA, 483 bp, Glycine max
actctattgatacaaattctctattatagtccatcatatgcacgatatttcattcgcatcattggctacattctggttccgcatattgttgtccactaattggtgaagtaacagaaactaaaggtgactaagattttccattggtactaaacgaagcttatacctttatttattacatggtgaattagtacccctaaagagatgtttgcacttgccagttgagaatatgctatcaaggttttaaaaaacgatcgcgatcgcagtttatcgtgttccttgatattacagaaaattgcagacaaatacaactaatgcagtcaccacaattgtgactgcattgcagtagcagacactccaaaaacctttatgttgcggctgaaaacacagttgcagaccgttttttaaaaccttgaatgctattatactttagagtctaggttaagccaacagagcatagctcaattgatccataatcaagcaact

SEQ ID NO: 97915 - DNA, 274 bp, Glycine max
gggccatacaaatttacaagggccaaccattggataaaagcaatttacagggttttccacgggcctaccggggatgaaagattgggcatgtttggatacccgttgaacgggaaaatcacacttttcaaagcaaccatgttttagttttatctgaaagtttgttggcgttagatttaactggtaccaaacatattggaaattcatccattattagcttgggcgcaaatttttatttatatatatatatatatatatttatatatatatatatata

SEQ ID NO: 97916 - DNA, 425 bp, Glycine max
acaacaaattctatactagcgtgctttattgacatcaagtacaagaagtagcagcttcactctaataattgcccccaccttattacctcaaatatataatacaagtaaaaaaaaaaaaaaaactgttggtaatgggatcaaaatttcatccataataaaaactttcaacataacccaggaaaaaaatgtcagcttaaactcactttaaaaaaaaataaaacaagtttgatatgaatcaagtgtgcatggaatcagcactaacccaagtccaatgatgctttttaacagaaacagctttatccgcaacaattttgtcttgaaaaacccctccatactcatcgacctcgtagggggaaaaatccccctggggcaaacccttcacgggggcactgagcgtgtgcaaaacgtatcaaccgggcaaaccc

SEQ ID NO: 97917 - DNA, 231 bp, Glycine max
aaaaaaataagggcctacatgaactggttcccaatatatttatgggaatggggaaattaaccaggggcacatgtttgcaaaaaatattcccaaaaacccccttaatttattgaaaaaagcccattggttgggacaagcaaatgccctaaaccccattccatactttggggaacaccaaaccccttaaatacaagggccaacttttcttttaactgggggcattttaaaagc

SEQ ID NO: 97918 - DNA, 345 bp, Glycine max
tgaagagactgcatagtttggggttggatctgctgagtctatcaatggaagatgctggaggttccaaattgcatggaattaagcagattgagagattgaaggaaatgtttcagaagtggcaaactgtaactctgggctcaaaagattccaacaatcattctgatgtgactcatcatcatggggtcttatcaccaatgattaacaaaaggctaactgatattgtgtattgtgactctgatgaggatggctgctacagccctcaaccaccacatgatgttcccaaagggtacttagccgtctatgttggtcctcagcttcggaggtttatcattcccacaagctacc

SEQ ID NO: 97919 - DNA, 312 bp, Glycine max
ccctacaaagaaaacagattactcttgttgatggtgatggagtcaaattaaagtttttcttgtggggagagcagattctccttgccaatcttttcagagagggaagcatgcttgcactggacaaaccatacgttaatatttcagtggactgtgatactgagacaagtgaagacttatgtcttgaatacggaagcgaaacacaactatatttggtgccttatattcaacatgaagaacaggtgtgcgtaacattgactccaaaccgccgtcatggttcacggaccttgggttcttttaattccaggcaggatc

SEQ ID NO: 97920 - DNA, 475 bp, Glycine max
gaaagagaaaacgaatatgccattttctacagcttggaaactcacagaagcattgcttttacagaacagacagagactcctttcccccgctgtcaaaagccacaacttgcacagcacgtaattaaacaaaactccattcccttccccattaccctccagcaagattctcacccctcctgtttctcctacttacatgcaactccaagttcacatgcaaagattccaaacatcacacaaaccctagctacctaactaacgcactcactcactaccataagaacaaactaaacaaatgtaagagaaaataagctatgcaataatcatgtaaaacagttttacactctcattcaatcacaaataattacgtctaataagtttgtttaactttaaaataatactcataataatttttgattgattgagagagtaaaaattgatttatgattagttgagagtgcaaaaatgtttatatttg

SEQ ID NO: 97921 - DNA, 306 bp, Glycine max
caaaaaagttcatttaggcttaaaatgtttttgctttttagcaaaaaaccctttaatttacataagctaacaaaattttgaaaccggggagaattaataaaactttaaccttgggataaatttgcaaaagagaaaaaaaaaggaataaattctttatagtagtaggaaagtagtttttggccggccaaaatttaaaaattagggatttgggaaggttcgggcccaaaaattgaaaccccttagcaggattttggagcaatctttggggggaattccctttaatttaccccaattttttaaaactac

SEQ ID NO: 97922 - DNA, 135 bp, Glycine max
agagagaaatttatccaaagaattactatgtcaatccatttatacaaggtaaaatttggctgctggctggccaatgatgaaaattttgtttatccatatttttacaaggtcatttcattttacatgaaaatttaa

SEQ ID NO: 97923 - DNA, 341 bp, Glycine max
acacaaaaccttttttttttataaaaccggttacaaagccagaaataaattaacacaaaggaccccttatcaaaacaaaagaagaagaaacctagtaaaagaaacccagcatggcatgcatacattttcaccctaccctttacccataaaccagaaccttaattaagcccgagggaattaatacatatattactcgatcacaaaagcccaacaaaaattatggaatccctttatccatgcacactcaccttacattaaaacaccacccaccaaacccaccatttctacaacaacaacgttattcacccacttcatcggacaccctggaaaaacacccgccg

SEQ ID NO: 97924 - DNA, 117 bp, Glycine max
gataaaagaaaacagcatgcattgataattggacttgtcatcgataatgtatttaactatgcatgggtcgctgcaccttattgtctcgtattgtcactttgaaatataaaaactact

SEQ ID NO: 97925 - DNA, 131 bp, Glycine max
aatcttaagaacaaagtagtttttatatttaaaagttccaatacgagacaattaggggcagcaacacatgccttgttaaataaatttttgatgacaagtccaattatctttgcatgctgttttcttttatc

SEQ ID NO: 97926 - DNA, 240 bp, Glycine max
ctcaaacaccaattcccagtgttcagggtgagcttactactaatatcggaggattgacctctgcaagtaagccaggacactagctataatataagcagtgaatcttctgcccagatgtctgaccaattatttgagaatattggtgatcagaaaagctggagtgctacacttcctgagcaaattaatgacaattaccagaaggaaacattgcctgtatcagcttctgttgaaggctcacta

SEQ ID NO: 97927 - DNA, 61 bp, Glycine max
aaaaaaaaaaaaaaaaaaaaaaaaaaaaaaaaaaaaaaaaaaaaaaaaaaaaaaaaaaaag

SEQ ID NO: 97928 - DNA, 239 bp, Glycine max
gttctagatcgcgagcggccgcccttttttttttttttttttttttttttttttttttttttttttttttttttttttttttttaagaaatttaactattggttttaaagttaaaaccgggtcataattggaacatacatttaacaggacttgggaacagcatcattttttaggtgccataaaatgtaaaagggaaagatgaactaattatacatttgggttcataagggacaacctgg

SEQ ID NO: 97929 - DNA, 240 bp, Glycine max
gaaggtttcccgtcatcactgtatgacgtcctccttctttgggggggggggggggcgggggggtatactaataaaggcaaaaagggaggcataattataacaatagagtatctaaggcgtagaagatacaaaaggcaaacaggagctgtggtgagacgataagcaatgaaagagcttaaaatgggaggtggtgataatggcgatacgggagggaaaggttgagccataggcaaaagtgta

SEQ ID NO: 97930 - DNA, 228 bp, Glycine max
gaaggtttcccgtcatcactgtatgacgtcctccttctttgggggggggggggggacgggggtacttaatttaaagagagagagagagagaaaacatagcagaggacggtgcccctcaactaggagccggagaaagtaagccagattatgacgccgtcacgtattgggcgtacgtataaagcgtggacaaaggggtgggcagccccgtataatggctatagtagagcg

SEQ ID NO: 97931 - DNA, 409 bp, Glycine max
  unsure (1)..(409): unsure at all n locations
cgttccaggaaggtttcccgtcatcactgtatgacgtcctccttctttgggggggggggggggatgtaatgacggcaactggcacggtagtggaaggggactgtacccgtagatatgtaatacaataagcgaccggtaagtatacggagcaggcgataaagaatgtagtaaatgtccgtgaaatggcgcgtcatagaggtaaaagggaaacgtggggacaagcgcataaaaaaaaaaatgataaacgaatgtttaccaaaaagggcatacattagggtaaaaagcacaacacgagcagacgagtaatatttaaacgcccagcacgcaataaaaagaaaatgaatttagttattaaacgacgacgacgtgtgggacgatagaccntatagcagcaacagagtaaagatga

SEQ ID NO: 97932 - DNA, 443 bp, Glycine max
ctagtagtgtagttagcgtggtctgcttgtgccgccttcgcttcttatttttcccgcgaatgtacggccaccctttccagttccgcggcggctatcgacacccgccgccgccgcagcagtctgcaaaccctaacaacaacttcttccaacaaccggcgctcccaaatgtcccgaaccccaacagcgtcttcttccaaccaccgctgccgccgtctttctcattcccaaacacctcttgccctttccctcctcagaacccatcccctcctccgtctgcgactccaaaccctaatctcgcaatcgaacacgccgaccgcgccatcgccaacgcctgccgcgctcttctcgccgacggcgactccgtctcggcgtggacgggttcccagaacgctctcctcacgctccaggtggattcatggaacacgttgggcatcaaaatgcag

SEQ ID NO: 97933 - DNA, 334 bp, Glycine max
gaaggtttcccgtcatcactgtatgacgtcctccttctttgggggggggggggggtgaccggctgtatgaaagttggggggaaccggctgaggaataaccccacgcttttcttagagtatgttgtattttaacgtcacttggtgtggtacggcatagagccccgaacccataatgatgtatgtcggtgcaatggtgacgcaaggcgcagcagcccgggcatgcctgatttggaagcagcggaggatgggcggtagtgcgacaacaagtatgagtggtagtggtgcaccatgcacgatagaaagtggggacttgggttataaaaacatgggggga

SEQ ID NO: 97934 - DNA, 412 bp, Glycine max
caggaaggtttcccgtcatcactgtatgacgtcctccttcgttgggggggggggggcgggaacttgcgaaacgggacaatgcgttatgatgggcttaggcagggcgtgtattagagagaataaacgggccagatatacaaagagccatcaggggtaaagccatgaagaaacccacaaagaaccagtaaagcaaagtcggaatggagggaaaacagtgtgagatccaattgggttggtggattgtgattgggggtgtgatgcaagtaaggaactaataaaataagcatcgtgaaattcagtaaaggcccacatcggtgaggggggtagcgtggcagaggagtgatagagatgtagtactccggcaaaatttgcagtgcgggagagaagaaaatgtactggcagagaagagagt

SEQ ID NO: 97935 - DNA, 220 bp, Glycine max
gttccaggaaggtttcccgtcatcactgtatgacgtcctccttctttgggggggggggggggtagcgcaaatacgtatctgtgcgataacataaaagcaccaactggacttataacaacctgaacgagaaatggggagggcaatcacaaacaaaagaccacggagacgccggggtttgcgggtttaatgggttagttgttgtgcggggtagcccgctaag

SEQ ID NO: 97936 - DNA, 482 bp, Glycine max
ttccaaggaaggctttcccgtcatcactgtatgacgtcctccttctttggggggggggggggggacataaccacttgggcgaggaggtataacgaaaacaggattaagaaagagataaccgacacacagaccagaaaaacaacataggggaataatagaaaccaaagataggaaacggaaaagcccgcaagtaatgtgttgaccggggacgtatagacctgcacgtgcacccggttgtgcggcaaaattgggggctttgcccgcggctgcaggccgggacgaatagcaaccaaggggtaaacgtagtgagagaggggcaagaatggcgactgttggtttggggcacaaaagacgtccaaaaattgccattaaaggcaggcagcataataagacgtgattggagcggatggaccgacggtggtaaaaggtggtaagattaacgaattataatgcgtggttgtgcccaaggtaagttgtagaaa

SEQ ID NO: 97937 - DNA, 388 bp, Glycine max
tgggggtggggggggggggtggggggccaccacacacagaaagtaagggaggagtataggtggaagtcgacagaaaggaataggggaaacggggaaacgagggaggagtaagaggaaagtaggctaggaattggtaatgagtgggatgccacgtttcaaccgatgggcgggcagacaaactaaggtaagcgttaatgtgaggcggcaagcccacccagggtggccatgttgggctggttagacataacggtaccaccaataaggaatacgtctgcgttgttgatttctagcgttggcgatgttgaaagttaatttgggaacgatgcgggttttgtgtacaacccttgatagtaaagttagaccgtcggttgttggtaatgtttaggtt

SEQ ID NO: 97938 - DNA, 288 bp, Glycine max
tccgttccaaggaaggtttcccgtcatcactgtatgacgtcctccttctttgggggggggggggggggggggcacgaaggggggtgagggaggagggggtaacgaagagacggaaacagaggaaggcacggaataaaacggaatagaaaccaaaagcaaaacgtaggaaaatacagacaaaaaggacaccaagcaaacgaccaaggaaaatagataaatagcaaacgattagcaccattttgggcagcgcagtagaacgaacagtaaggcaacatcaatcagtaggtg

SEQ ID NO: 97939 - DNA, 304 bp, Glycine max
tccgttccaaggaaggtttcccgtcatcactgtatgacgtcctcctatctttgggggggggggggggaaagaaggaaatgcacagcgtattagcggagggttaccgtgtaagggcaccacactgagactgaaaaaggaatggaagaggagtggcgcaagctagaaagacacacgtgttagcaacggcaagtcgtagtggaaagaacacaaaagcaaaattagtgaggcagtaaagcagaaatggttggcccgggaaagcgtgcccttatagcgttactctttggtatcagtatagagcggaacg

SEQ ID NO: 97940 - DNA, 315 bp, Glycine max
gaaggtttcccgtcatcactgtatgacgtcctccttctttgggggggggggggacgatcgggcaaggtcaggattagagaggaacatgacaacgttatcgagcgtgatagggtcgggttagataacataagaataccgaaggaaaaatataataacgaaaatcgaaaatgaagacacgtgcagacatacaaaataaaaaacaagtataggcggtgcacagtaaatcaggagagtaacgtgccacgcgacaaatacgtagaattcggcgatggcgataaaggaggtaggcgtgataacacgcagcaagagcagtat

SEQ ID NO: 97941 - DNA, 328 bp, Glycine max
gaaggtttcccgtcatcactgtatgacgtcctccttctttgggggggggggggggggggcaacacgcaccaccgggatgtgtgaaaggagataggggaagggagatgagagagaaggaaagcggagacagggggctaagcgctaaaagaagaagaaaaaaaatcagggttgtggagataatcaggaataaatagatgagacaatcgctaatagcggttggctgcaaaacagaatgggcccatacaaaagataattgaggtggtggtattaattcatagcgcgtttagacgtcgcgtattgcaattaaaaaaattagacaaaggtttag

SEQ ID NO: 97942 - DNA, 494 bp, Glycine max
tccgttccaaggaaggtttcccgtcatcactgtatgacgtcctccttctttggggggggggggggggggggggaaaaaaaaagccgaacctagaagagagcgttgggcgctgaagtgaagtgaacccaagaggggaagcgattttacgccgtaggatataccattacgccatagtgtaacacgattttcgcatttgagtagggtatctgtatatgtttttagatagatacaaataacaagtttgtaatcctgatacaagagcataatttagtgggtgaaggtgaaaggtgatgaaattgcggatatggaaattacctaaggaaagcgttgaaggattgatagaattgaaatttagccgagagagggagggggttaaagtagaaggaaggattaggagatgtaggaaggtaaagagttttgcttgttgattgagaggagcaggagtgggtcgaagaagtaagaaagttttaatatagagtgcgaagggggttttt

SEQ ID NO: 97943 - DNA, 296 bp, Glycine max
ttttttttttttttttttttttttttttttttttttttttttgtttttttttttttgaaacccaataagaattattgacattaaaagggaattgcccaattggggagcaatttattgtcccaaaactgtgacaaaacttgtttgacacattcggactataaatttagaaatgcccaccttgggaaaacttttatgtgaccacaagtgcacagcttttggcccccaataaattgtccgagcaatatgttgctaaagaaagaaaagaaccactcactgaaatttgtgcccatttgaag

SEQ ID NO: 97944 - DNA, 186 bp, Glycine max
gatatgacgctcctccttggttgggggggggggagggtgaccgtagcagacgttaagggaggtatggcaggtaggttatgggcgtcggtaaggtacgccgtaccttaggatggaagatagaggtaatgtataaggagggtaatgttagagcaatcatgatagcagaattagaatggaggtaccccc

SEQ ID NO: 97945 - DNA, 331 bp, Glycine max
gaaggtttcccgtcatcactgtatgacgtcctccttctttggggggggggggggggggggggggggggttaattaaagggaaactataacagacagtgggttgcatggttccgtgtgaaattcaaatagtggatacctaaatgataagaacaagtagggcccgtaaaagagccaagagcgccgagatgggcatatgggcgcatggagagctgtgttaaatggacgaattacataattaggaaaatacctgataatatacagaagcggccgagcaaagccataaataggttaatagatgggtaggagtaaccccaggggagtccggagaagg

SEQ ID NO: 97946 - DNA, 387 bp, Glycine max
gaaggtttcccgtcatcactgtatgacgtcctccttctttgggggggggggggggcaaaacgtagagagctaaagccggaggcctagaagaccatggctacgttggggatagcgcgtgatgactaaggataggatgttcacggttgaaagtttacgatagacgaaaaatagggaaagatgaggggaaaagacaaaataatttacaatggtacaaaccattaaaccgaaatcaacatgatgaagaaccgaaggtaccaggaactattagtggttgaagtaacaaggtgggcagtaacccgttaaatattcgcatttgggttaatttggtgtaatgcagttatagatgtgcaaaggggtggaaggcaggtaattgcggtacataaaaat

SEQ ID NO: 97947 - DNA, 362 bp, Glycine max
  unsure (1)..(362): unsure at all n locations
attccgttccaggaaggtttcccgtcatcactgtatgacgtcctccttctttgggggggggggggggcgaagtagggtgggggcgattgacggggttcggtactagaatgttaagcttcaataagaggaaaaaagggtagaaagcgaaattacttgcgtaatgcacggaacaagtgtgttggtagtattgaaatatcccagattgggccagggacagaagaaagaaataaaggtccccgacccacatacccgaccccaaattgtgcgtacgtaccgatgataagggatgacgtgacaaatacacgataccgtattacgtattacaagggttccncgaaagcncgttaaggggggggggttgg

SEQ ID NO: 97948 - DNA, 261 bp, Glycine max
tccaaggaagcgtttcccgtcatcactgtatgacgtcctcctatctttggggggggggggggggtatgaagaatgctaacacgaaaggaaaatgtgtctaaaataggcagagtcggataatatatgcgagttaacgcatttggaggggacaagatagggatatgtatacgcgtataatataccattagaccgaaaaatagaagcctagcaataagcaccgtaaacctaagccctccaataagaagaggaatgttattatta

SEQ ID NO: 97949 - DNA, 337 bp, Glycine max
aataatatatgtaaatgcaatcattcacatgctgtctatatttatgctgctgatgtagtttctgacagcaaatagtgtactcacccttaatatccacaaatctgtgtatcttttgcataactctactcagttaatgtttggtttgcatcctctcccaacaagtgattcaaactaaagaagatagcttctttgaacttgtatcttaacatgatcaagacgaacattctcaaacagtataacaaaatgccacaggggcatgaaaaaaataagtgtattccgaggaacacttaattctatgcaaaaagaccagcttctatgagggtgtgctatgtgcttg

SEQ ID NO: 97950 - DNA, 326 bp, Glycine max
gaaggtttcccgtcatcactgtatgacgtcctccttctttgggggggggggggggggggggggggggggggtggggataagggggaaaagattcaaagggataaccggagaacaagttgtatcggtaaataggtttgtataaggaaggcctgcaggtaagagtgaagcatggccgtcgcgtagcgacaaagagctacatagagagtaggatgtcacaaatgcgtataagaagaggcgaaaaatcgcgcgaataaaggaataagttaatgatgatgtgaatgagaaataaaaacccgggggtacacgccccccaaaaccgaatggtt

SEQ ID NO: 97951 - DNA, 222 bp, Glycine max
ccgtcatcactgtatgacgtcctccttctttggggggggggggggggaagttataaaagcaaatgcggaggcagagcctacgtgataggcaatggcagtaggaggtggggctgaacacaaaaggatcgggggttccaaactgggccaacgactattataattataattgtaagtgtaaaatttaaacgtactggcatacgaagttagcttaaacaatggaaa

SEQ ID NO: 97952 - DNA, 134 bp, Glycine max
tttgagttctgtgctcctgacctacttaacaattttagcctagtccttcagacacaaaggttgtctttgccaatataccatgaaccaatcatggatatgccggatcctattgagaaaaacctacaggaatggaa

SEQ ID NO: 97953 - DNA, 532 bp, Glycine max
gttaagatgtgtacagatgtgatagaattacttatacacaatatctctaggttttcccttaatggctagtgaagaaactatgatgccttaatcctattttagaattaaattgtgttctgctgcatcttgttggttaccagctagtctttcattgaaaattgctttatttttttgacagttgtgccctttgtatccacacaatcctcaagtcctactgactgagctgagatccccatctgagcttcttgactttggggaattctcagatttgatggattctgcaactggttctggttctcttcatgttgttaacccagcatttgattatgtgccaccaaaccttgttagtctctttattactgacacgtaagttaaaccaacattaatgaagaaaactagctttacttcatcaatgacttgagaaagtgagttgtattatttggtttcttttcttgcacttcgctggttttggaacttctcagtggagggcataacccgtcatatatgtaccggctcatagctgattactact

SEQ ID NO: 97954 - DNA, 486 bp, Glycine max
gaaggtttcccgtcatcactgtatgacgtcctccttctttggggggggggggggggaccgggtatagccagacatgaccgaccggacacatgcgaacggcgtataggcggaaccgcacagcccaagacattacggcaacaaggaacgggcaagggacagagacaaacatgcgataacaactataggtatgcgaaaaacccgttggatctaaaatcgaagagcgagcaaaagacgtggggggacagcaaccagttaaagcgggagccagaaaggatgcgcgtagggtaacataagttggttatgcccagggagcgggttaaaaaaaggttggataaaaaaaacggatgcgcgtaattatatggggaaataagcgaaagaaatgacataccagcgggagtgagaatcatgaacaaatgaggagtagggtgggagcgcgaaataaaaagcgattcgaaaattaataattataaaaaaaggccaaggggt

SEQ ID NO: 97955 - DNA, 283 bp, Glycine max
tccgttccaggaaggtttcccgtcatcactgtatgacgtcctccttctttggggggggggggggggggaataccaaggagcatgaaagggggggaggaaggtaattgcggggtaaaagaggatagcgacatagggagtggcaactgacccgaaataaaacgaggatgagtaggtgaggttgttaggggtggtggtggtaaacaacccgataatccctcacgagcgaggttcacgtagacatggtatatgtggttgggctggctgtggcctggggtttttaaag

SEQ ID NO: 97956 - DNA, 408 bp, Glycine max
tgggatttgagtaaaggcagcctcaagccctcaaccttgtttcttcgtctcctctctcttcacttttctattagtctgtctaatttccacaggcggtttcaaggcccggctaccctgggcaattgcccaggctctggcccaaattcctttgcacaacacgtctctgtttttgcgagcatcagtgatgagcaattccaatgttatccttgcactttgattaccagtgaagaagctaatggggaatggttactctgagatgctctttttgcaatctctctctttattctttttctaaaaatttcagctttttgacctattcgcacccgaaaattttgatttttttttttttgcattttagctggttggatttatggatcggtgatgtttattttaaactgcgttatctat

SEQ ID NO: 97957 - DNA, 353 bp, Glycine max
ttggggggggggagggggagaaccacaagagaaaagtgagggagggagatgtatacggtcgatagagcgagagaacagaatagacccgtgaatatagaaacgacatatagaaaaacccaggataggagccccaatatttagcagggaggaatttagaagagaagcgttattacattagattacattggttaacgtagaaaagagtgaacattgaaatgaggatagcccaacaaaaacgtaggaatgctgggggcacgtaaccgatgggtatagcatttgtgggaagcatataagaaaacgttcgcagatatcacgggtttgtggcgtaggggtatgccgattaaagggaaatt

SEQ ID NO: 97958 - DNA, 289 bp, Glycine max
aaggtttcccgtcatcactgtatgacgtcctccttctttgggggggggggggggggcgtgttggtagaaggtatagccggcggtagggaggttaaaaggaaaagtagaaggaacgaccccattaaatacaaaccaaaacaaaccaaacctgagagagtgactgaagggcaaacgaacgggaagtagtaataagggttgtacgcgtgctacacgtgaaaagaacgtgccccggtggtttggttaatggtatatcggttagtaaggctaggcggttgttttaatgttggta

SEQ ID NO: 97959 - DNA, 293 bp, Glycine max
gttccaggaaggtttcccgtcatcactgtatgacgtcctccttctttgggggggggggggggttggaaggggtagtataggggtagacaacaagaataaaagagagagacagcgaaagcgacgactaggttagggtgcattagctcccaggtaaaaaaataattaagcaacaacgtaaaaaaccggtaagtgtaacggtacgcaccaacttaaatcgtaccaggcgttagtgccgtaaatggtgacgcctgatagagtgagtgatagtaacaacgtgttataatgtacggtat

SEQ ID NO: 97960 - DNA, 79 bp, Glycine max
aaaaaaaaaaaaaaaaaaaaaaaaaaaaaaaaaaaaaaaaaaaaaaaaaaaaaaaaaaaaaaaaaaaaaaaaaaaaaag

SEQ ID NO: 97961 - DNA, 234 bp, Glycine max
aaggaaggtttcccgtcatcactgtatgacgtcctccttctttgggggggggggggggggaagaagaagaaggaaagataggtacttgggtaacaggaaaatatcgtatccctgcggggcaagcatacaaacttagccaccacctaacttgacaggataacccgagaaaaaccgttaaaagtagaacataacgctgcaaaggaatgggggcctagttaaagacgcgttatgaaa

SEQ ID NO: 97962 - DNA, 310 bp, Glycine max
ccaggaaggtttcccgtcatcactgtatgacgtcctccttctttgggggggggggggaggaagcttaaagatagaaaaagccaaatggggcgggtgaagggcaacccgtggcgtttaatagcttggcacgtgacaggcaacgtgcggccaaagagcgaggcggagtaaccgttatgggtaatatacaaaggtccagcaaaagcggtggggactaatgggcaggatattcacataaagtaagcgttatatacggccccccgaaagaaataaagataaaccgtaacatgtaatatgatacgatggaggagga

SEQ ID NO: 97963 - DNA, 482 bp, Glycine max
tccaaggaaggtttcccgtcatcactgtatgacgtcctccttctttgggggggggggggggggggggggcaacgagcacatgcgaggggaacggcccaaaaccataacattattaggttaccttatggccaacagcccgcctacgtccatgtaatgagtgttattccacctaatataaccatcacaccggtagtaaacggcccccgaaatgaaaaagagagataggcacccgtgtcgaaaatttatggtttacagtttaccgtagtaagataggcaagtaccggcaaaacaacgttgctacgatggtttgcagcagttacgcgtaaggcgtatagagagagtgatataatcccaccatgataaacgacgaacaattgcgaaagttgcaaatgatgaattgatgatgagagtacaaacggaaaaagtattcagaaaagagcggatagaagatcaaccccaacgccagaggatagataggagtg

SEQ ID NO: 97964 - DNA, 294 bp, Glycine max
gaaggtttcccgtcatcactgtatgacgtcctccttctttgggggggggggggggggctaataaatggatagataacggagatacgataaaggatacgaagacctcgggtggaaagagttacttaccggcaaattactataaatacggcgaggcaagaggggagggaagaagggcaatagaattatcgacacacctacagttgttgtaggggggagttgggtaaacatggcctaaggagtttaggtgcaagacatggcctgcctacgttaggtgtgggcgtagttaaagtatgg

SEQ ID NO: 97965 - DNA, 290 bp, Glycine max
tcccgtcatcactgtatgacgtcctccttctttggggggggggggggggggggaattatgggggattagagagagagacacacgacacaagatcaacgtatatgcgagtatacccagcagcatgtgtgggaacgacccgaactacagtggagtacgatatagaccgacccgcgaaaggtgactgtgactaagtgactgacacaaccgacgatggctataatatatactatagcagaagtgaggggagatataagtgtaggtgtaccccgtgtaacagctagccatgaagg

SEQ ID NO: 97966 - DNA, 408 bp, Glycine max
aagttcaaaatcttttatatagccataacaacttcactttatattaattatacaagtgattcaacaaaccaactaaaaaagacaatacaagatcctgattcacaacactgaaaattgggatgggtccagccgctagctggaacgagacatgaacagtttaacactagcggggacataaatctcaagaaactactgagatatttactagttttcacagttgcagagcatctaaatgagacaaaaaaacagggtaggcgatgttctatatatagcacaagatggagtagttaagcatgagaattggccagctgatttatcaaagccaaggcattactagtcaattgagccacctgaagaatttggcctctcaccgtgttctttacatttgaaccaccagcagcagccgtc

SEQ ID NO: 97967 - DNA, 302 bp, Glycine max
tttgtttttttttttgttttttttttttctcttttttttgttcttacttctttatgcttaactattgctcagttttgcactttgaccttactcatttgaagtttctttactttacagtcatattggctaaaaaataataaggtgcctcctaggatggaagatcatgaaagcttccgcaaaatctagctgcctaagactttatacattcaaaattaccgctcaatgttaaaccagagccgcagctcacttctccgccctcatttggctcttcaaatttgcatgtcccgaacatagacaaaact

SEQ ID NO: 97968 - DNA, 348 bp, Glycine max
cagtcaaaactaattttgttgctgcaaaatattttcaaagatgaactacctgtcaacactgactactcgatttccatccttacaagttacaacgaaactcactgagctttgtacaaaattccaatatcatattataagttcacaaggcgaagggtttgcacatttttggaaaacgagatgaaaaaaaattatttacatgtcataagcatggagtttatgacatgcaataaaagacggatactagagagatcagctccagtcattgtaggcaagctacgttgatgattcagtatctgatagacttgctcaaagatggatcgtgtgtgcattgcaatcgtcaggtctgac

SEQ ID NO: 97969 - DNA, 464 bp, Glycine max
ctcgagccgaatcggctcgagctatcatgaaaatttttatggacgaattaaggttgtaattccaatgtcacaattaatttaagctttttatgtaaattattaattttaaatttagggacgaactgttgatgctttaacagttgcaattgtggagtccaatctttaatttaccctttgtctttcattttttttgtggccttttgtgtatgaatgtatttgaacaatctaccaattttgtctccaaagtgctactgtttcttgattcttctaagttgtttataaggtaatagaactatttaagtaattttcaaaatattcagtattgaatattcatcacttagtacctatgttattttacttaatatgcgttagtctatggtgtttttgctgcaattgatggcattcaacatgtatcatcacttgtgtgatttgctacttgtgtatgtgtgtttatgtggatgatc

SEQ ID NO: 97970 - DNA, 122 bp, Glycine max
acgagataaccactcggtaccatatatatatagttagtgagaaaacgacatacactgttcacaggatgaagctttatttcagtgtggaatccattatacacagaacacatacgtaggttgaa

SEQ ID NO: 97971 - DNA, 309 bp, Glycine max
attttctgcagttctaatagtgtaataagaattgcacaaacgattttctttaggtttgtataactgtttttgaatatttaaggaacttcctagttaccaacatcttgattgatatctttgaagcaaattttcttcatccaacataatgtgttttggagttatttctcaatattcaggaaagataaaagaaggcgaggatgggtgtgatgcaaaggatttgaaggagaatcgtgaaaaacaagcttggaattttttttgacatattcatatttgtatatatctgacatcaataacatcatttgatttcat

SEQ ID NO: 97972 - DNA, 345 bp, Glycine max
atcaaataaaatatcaaataaaattaggttaataaaccttatttacataagctcttattaaataaaactaacacacgtttccttgctatgcaaaaatatgtaaaaggatcattgtaagcaacattatccttatatgggttcctacactcccactattggtttctgcatttcccattgcattatggaaagctcattcaagaatgtaatcaggaatagacttttccttataatgggaaatgcaagaatagtaagagtgcaaaaagcaccaacctccttatatatgcaatgagacttttcaaatttgaactcgggactaattagtcatcaaggcacaactttaccatt

SEQ ID NO: 97973 - DNA, 475 bp, Glycine max
gagtaaaagtaaaaaaaaaaaaaatatagaaaattagtagaaaatatttacaccaagcaacaaaaaaataaagacattttcacggaaaatgtcatcatcactatgagagaaaatccagagaatgcaacaaactaagaaacgaatccctaaagctaaactatacagctctatgatttaccatttactctatctagatttattactgtgataactattagacattcactatacaaggtagtttgttactaaggtcatataaaaatgatcaaatgtgtagttgtgtgtgcagacaagtttttacctacgcagagcaattcacatatacaaagggtatataacaatttaaaaactgttttagagattcatctgcggccctttattgtataactttccctaaacattgaatggcaatttgaagtcatagagcagctttaagcatcaacatcagggcctggatatgctggtaaactcatta

SEQ ID NO: 97974 - DNA, 154 bp, Glycine max
gaactgtccaaggtcctgtcaccctactcggcttaatataaggtctccgtgtacgtctccggggccaagggttattccaaggaggccactggagccacagcattattaaccttactgggggtgtattaatagcattggtaatgtgcgtcattgt

SEQ ID NO: 97975 - DNA, 415 bp, Glycine max
aactgtccaaggtcctgtcacactggcgcgtacgaggttggttaagtttgcgcacggtgtgctaaaccccgggtacgctagaagaatgtttgcgaagcgcgtatgacgaaacgattaaacgagcaggaggcggataggagcggatagccggcgatggcgagagatagagtgggcgtttatgtgggcgaaaagataaggccccatatgatgacctaggcccaacaaaccggtgggatagggagacgggcgctaaagacagaggctaatgattgggcgagaaggtgagggtgcaccaagtaaggataagggataacccagcgcttagggatcgtagaaccaggaaccacccagaaacccattaaggctgggccaagagttatgtaggataacgtagcgagcataatatagacgaaga

SEQ ID NO: 97976 - DNA, 320 bp, Glycine max
aaggtttcccgtcatcactgtatgacgtcctccttctttggggggggggggggggagaaccaaacaagagtacgtggtaggaaggcgaaagtggatacggatacggaggtatagccacacaaaggggataaaacaacagtaataatacgcgacggtcaggaaaaatgaaaaaaaaccaaaccaaaaagagtacaggagccatgaggttagcaagggaagaaggtgcataaaaaagcatataggcctactaacggagaggtatacaacgtgaatattaaaacgaaaaaggggcatgccggtttggtgcggcgatataggtt

SEQ ID NO: 97977 - DNA, 258 bp, Glycine max
aaggtttcccgtcatcactgtatgacgtcctccttctttggggggggggaggggggggcgtatagataccagataacaaagtgtaggctagtggcaggcaatgtattgcgtatagtgcaggtagccgtgcaaatgcaaacgtttaatttatataaaaggtaaatatgggtgccaggggataaaatgatcggttacggttgttgtgacggagttttgggagtggtctttgggcaatgataaaaatgaaaagtgagggga

SEQ ID NO: 97978 - DNA, 131 bp, Glycine max
cgaactgtccaaggtcctgtcactaaacaaagcctacacatgataaacgaacatatgccgcatacaaaggagaatatggtgaacgtacaaacagaggtggtacaaccggccgttaagagacacgttttgaa

SEQ ID NO: 97979 - DNA, 330 bp, Glycine max
aggtttcccgtcatcactgtatgacgtcctccttctttggggggggggggggggggggggggggggggggaagaggatagtaagacagaggtaacgtggaatagtaggcgtacagtagaagaggcggataaaggttaagctttggtacgagcgaaagggatagggattacacaggatagggattatggtttaggatatgagcatggagtaacctaaaggcgacagttgattatagtatgggaggtatcaatacgggcgcgtagaatggataacgtttaataatgtgccattggttaaatcaccaggaggtgtaaacggaggtaagccaag

SEQ ID NO: 97980 - DNA, 160 bp, Glycine max
tcgaactgtccaaggtcctgtcactaaacgggtggttgggtgtgctgtgggcttggtgtgcatatagggccgcattggcgacactcgcggggcctaccaaccgccgagcctcaaccatcggcaccggctgcactcgcctgttggtgtgcccaaccatgat

SEQ ID NO: 97981 - DNA, 262 bp, Glycine max
tctcgatcgaactgtccaaggtcctgtcacaaaagtttcagttggtgttatttatgctgttggttgggttgtttgtggtggttaatttgaagggatttttgttgggtaagttgtttggtcaagtgaatttgtttgattaataataataatttgagggtgtattagagcagtactagtaaatcttgcttaattttaaggttatgtttgatgtagataatttgcgtttggtgtttgatagtgatgttccatttgttgttcggtt

SEQ ID NO: 97982 - DNA, 272 bp, Glycine max
ttccaaggaaggtttcccgtcatcactgtatgacgtcctccttctttggggggggggggggggggggggggggggggggggggggggaaggaaatatgtggtaactgtctataaaagggaggtaaacctatatgaaaaagcccaacagaggagacacagatatacctagccccagatgggccattgcgaagaggaaggagagacagggacgattacagcccccccttggtgggttagcaatggttgtagtggtgggtggaatggttgggggt

SEQ ID NO: 97983 - DNA, 168 bp, Glycine max
tcgaactgtccaaggtcctgtcactgcaatatcaaaataataaggcgggaatgcatggttgtggcaggtagccgtataaccccataaccaccaaagttaaccggagccgagatggagagggaggggttgtaacggcatggggcggcctaattgcgtaggtagcaggtg

SEQ ID NO: 97984 - DNA, 262 bp, Glycine max
gaaggtttcccgtcatcactgtatgacgtcctccttctttggggggggggggggggcttattagaagtacgggtaatggtgtaggtttccggtataaaaaagatatgagagagaaacgagacctataaaaggagacaagacaaaaagcacgcaaaaatagcaagacaagacaagtataaaaagggccccaagagagtacaaagaatgagtacagcacacgggggggaccattgccagaacccgttatggaatgatgtgtaaa

SEQ ID NO: 97985 - DNA, 159 bp, Glycine max
atcgaactgtccaaggtcctgtcacgcacaaatgatgcgtaccgccttaaagttaagttgcacaacgtgagtttgggaatgcggtggaaaacgcgttaaccctggactaaggggaatacggctgaaactgccgctatgccgtgtggataaatgccctat

SEQ ID NO: 97986 - DNA, 391 bp, Glycine max
ggaaggttggccgtcatcactgtatgacgtcctccttctttggggggggggggggggaagaaagagaaagagagcagcgagaattcaaggagcacccacagtttgtagttagagcgaattaaagagacacccatggtgccaaggatagggtataaagttaggtatcaatgacaatgcgagagatagtacatatgagggagtatagtatgcagctacaattgacaagtcgaaataccaagagacggtggcaacatgcctagatagcccggcagtacttgggccgtgcgttattaggtttacgacaagagtacagcgccgcaccgaaccgagtattagacaagtgtaaagccgtagttagttccggctaatgagagggttggttaccaaatgt

SEQ ID NO: 97987 - DNA, 142 bp, Glycine max
cgaactgtccaaggtcctgtcacaacacgggcagttgcctgtacaaccaatctgactgagagctggaatatagctaacgtcaatcggcggggtcccactgccctacaaccaaaacacctgttgactcgcaaccggctggcgt

SEQ ID NO: 97988 - DNA, 302 bp, Glycine max
gaaggtttcccgtcatcactgtatgacgtcctccttctttgggggggggggggggacccctgcttctttgtttttggattatgtggggttatttgtgggttatggtatattaacttatctcggactgcccgttttgcgagttatcggacattaacccgtcaatatgtagtcgggatcaagccatgattcccgagtgaagttcggtgcgtgtagacgtccgcccatttacaacctgcttggtctggggcctcggttggtcgacagtgctccagggtattttgatatatcaaaggttatgtgtt

SEQ ID NO: 97989 - DNA, 435 bp, Glycine max
tccaggaaggtttcccgtcatcactgtatgacgtcctccttctttgggggggggggggggctagaaaaggagtacccagaagaagcataagtgtaaaggatgggataagtggaggagtaagagaccttaatagacctagataggagagagatctaaagagagagagcaacgaatattagacctagaaggaaatatgtggtacgtgtctatcaggaccttgaccaacagagcagacacagatatacatagccgcagatgggccagtggcaagaggaaggagagagcaagagggagtagcggtagttaaatccaccgccgcatggtgggttagcagtggttgtagtggtgggtggaatggttgggggtgtaccaccggtacgtaacataaaattattcgtattaatacgcgtgcgtgcttctaagtgttgtggtgat

SEQ ID NO: 97990 - DNA, 114 bp, Glycine max
tgtccaaggtcctgcaccctcaatatatgagagaatccctttacttaagtggtccacaagtttgccttgggtgcgatcggtaagtttgtgtgggtgtgaaatatcctccaaaat

SEQ ID NO: 97991 - DNA, 162 bp, Glycine max
gatcgaactgtccaaggtcctgtcactgtgtgtgtgtgtgtgtgcactgtcgtcaaggtcaaagtgcagtgttaatcaggcagtgtccgacacctgacggtatgtgttaagtgctaaaaagcttgtgtacatgtcaaagtaactctaactggctctaaacag

SEQ ID NO: 97992 - DNA, 354 bp, Glycine max
tcatcactgtatgacgtcctgcttctttgggtgggggggggggggcccaacaagtaggaggggtgtgaggaattagttagggggatagagttacccaaaagagaaaaaggaaaaaaagcagtaacaaaaaagaggaaataaaaagaatgagtgaaaagggaaatacctatttcggttgagggttttggggtgagatgtagggggcgaaacgttttaaaacaactcgtgagagagaaatgtgacgaaagcggaatggatttgaaccaagaggcagtagattatttgtaaaacgataaaaggtaccgtatgataaaattataatattaccaaatagataattacgttagaaaagtg

SEQ ID NO: 97993 - DNA, 158 bp, Glycine max
gaactgtccaaggtcctgtcacgggatgatagtggtccaggttgtgggggccgtggtagtagttgtaggcgtatggcgctgcaaagaattcgggcgctgtggtgatggttactgcgctacgcaccgaggatggcgccgccgcctccgtcgattggatt

SEQ ID NO: 97994 - DNA, 249 bp, Glycine max
aggaaggtttcccgtcatcactgtatgacgtcctccttctttggggggggggggggggggggggggggggggggggggaaaattaattgaaaagtggctcgaggtaaatcacaagttgatggtaataaacataaggaaaagaaaagcagatggaaataaaacaagaaatgccgccgtatccggtaaaaggcgagacaagaccggatagaactgtagagaaaagttggatataaatggggggtaattggg

SEQ ID NO: 97995 - DNA, 243 bp, Glycine max
gaaggtttcccgtcatcactgtatgacgtcctccttctttgggggggggggggggggggggaaataggccgtggtaggtgagaagggtgcgactaagagtatatggaaaagacgaatgaggacaaccactgagtgtgaaggaagggaaataggaaaatagggaaattatagtactgtaggggtacgaaaagcatacagttcacagtcgagtacgggtaaaggattaatagatcaaataggttg

SEQ ID NO: 97996 - DNA, 165 bp, Glycine max
cgaactgtccaaggtcctgtcactgtaattggcgtcgtggtggtggtcgttgccggtgttccaagtcggtcacgttccgtgggttaatacgcgtaaaagcgttaagaatgttcttcggctatttgttcttcatattcgtccgttttcgtcggtctaaaaagtacg

SEQ ID NO: 97997 - DNA, 421 bp, Glycine max
  unsure (1)..(421): unsure at all n locations
agctatctcgatcgaactgtccaaggtcctgtcactacaacaacacccatagaatgggggcacggcaccaaccggtaacaacgtataagccnaaccgaatgcccaacaaaagaccggcagcgcctacgagtacgagaacgggcaatgaggaggggagagggaggggcggtagtaatagcggctgacgcgggaacgagtaaagcaagggagtggaaacgtgagattaattacggcacgaattgtatatagtgtattaatgacgccgtggcgcgtgatgggggggggatgctgttgagcgggggtattatggtgttgtaagcgcaacacacgtgccagaaaaagagacagaaaaaagcggaagccaagatgagtaagcatatgagtgcgtagggggcaaggtcggtaggtaaagagagatggg

SEQ ID NO: 97998 - DNA, 344 bp, Glycine max
  unsure (1)..(344): unsure at all n locations
ccaggaaggtttcccgtcatcactgtatgacgtcctccttctttgggggggggggggggcaagaaacggcacatgacgggaaaaatgcgaggaaataaggtgctgagggtaaaccactaggataaggcatgactagagtagcgtgcgtaggggagctagttggttagacagtgantgagcctgcacgagggccgtgatcacacaaatttcgatgggaaaggagtgaagttaagaatataggtgctggtaccacaagggatcagtaggtgtcaaccgctggccgtatccgtataatagtggcttggtggcccgcgttggggttggagaagacaaccaataggtgt

SEQ ID NO: 97999 - DNA, 172 bp, Glycine max
tcgaactgtccaaggtcctgtcactgtcacttcaagtcctgtcactcctgtcacccaaaacggatccggcgcacgatcaccaacgacggcggcagcaccgatgcccaaattccaccactaccggctaccggtgctgtaatcacctgtacgtcggctgggtccacgggggtgg

SEQ ID NO: 98000 - DNA, 274 bp, Glycine max
tccaaggaaggtttcccgtcatcactgtatgacgtcctccttctttggggggggggggggggccaaaaaaaagggactgggacggaggtaaatggggacgatacaaagtgaagaagtaaagaggataggggatcccaaaatcgtacatagcacggcacagctggagcgctaggctatacttggtgtatggtgtatgatttaaacagtgctagacgctggagatatctaggctggcagtgttataaaatggaggtacgggataagataaaggatt

SEQ ID NO: 98001 - DNA, 174 bp, Glycine max
tagctatctcgatcgaactgtccaaggtcctgtcacagtatgaagtactatgactaatacttagcccacaccgacatatactgggtagttaacaattacaatataccttaaactgtgtgtttaattaacctacaacccaaggtttagaaggcattgtgtgttaagaattaatta

SEQ ID NO: 98002 - DNA, 364 bp, Glycine max
ctagctatctcgatcgaactgtccaaggtcctgtcacttgtctacggttggcagtgtgttgtgtaacagctacagaggtcgcaaaatgggcattcctaacattagtatttggcaccgccaagttgttcatattaggcataatcgaaaactgaacaggtaacataaccaacccgagtttattgcattactacacatggagtgggctcccgaaataatggcaccagccgtctatttggcttgaggataatagttaaaaccaagtaatttgttagtgtcgctggtcttgtaccgcgcctacgtaaagtgggcgtaacatgggcattccaacattagtatttggcacgccaagttgtcatattagcag

SEQ ID NO: 98003 - DNA, 404 bp, Glycine max
  unsure (1)..(404): unsure at all n locations
gaaggtttcccgtcatcactgtatgacgtcctccttctttggggggggggggggggggcaccagcagaagccaggggggaggtggggctatccacattcggctagactaacgtgagcagtataccatagaccttggaaacatgaacaaataggaaacgtagtattgaaagaatacntgcgtaattaatcaccggtaatagatatgccgatgttaaagatggaccatagaataccatccatgtacaaattattatcaacctccaccataacagctacccgccaggttggtgcaagaggcgaagttcttaaccgatcattagtggttaagcgtggtttagtaaaaagaagttgtcatgcagtgccgccaagatttgttgcggttgcaagtgggctgggtataggag

SEQ ID NO: 98004 - DNA, 162 bp, Glycine max
atctcgatcgaactgtccaaggtcctgtcacttacgggtagaaaggtgatattagccctatccaccggtgatccttataacaggggggtatttattctagtctggggttattcctccccggggtttccacaacaattgtcccgatatataataataaggatg

SEQ ID NO: 98005 - DNA, 272 bp, Glycine max
aaggtttcccgtcatcactgtatgacgtcctccttctttgggggggggggggcggatgggggacagggagcggagcgggtggttagcgtgaagctgcacaaggagtaattgaacatggcgtttggaataattaattgttattataataattataacagtggataagtggataacagcgtagaaatgaagttaaatggtggggaggaatatgggcttaggtagtagttgtttgtttggggaaaaaaagtatccgtaccgtaccatgttaaaag

SEQ ID NO: 98006 - DNA, 357 bp, Glycine max
gaaggtttcccgtcatcactgtatgacgtcctccttctttggggggggggggggggtgaacacgcaaaagagatgaaaagaggaacaggctgacggcgccagatgggatgaatagcaaggcatgagagctaagtacccgtaataataagtctatgccggaatggtcatcatacaaaaagagggacaaagcaccgtgccgagaaaaaacaagagacgagcttaaacggcacgacgagaaggacacgtattagttaatgaaaagaaagccaaaaagaaagtcgaataaaataaaggatatgtggagttgtgcgggaacagtaaaaaaggttattgcaagaaaagtgacagatgtacaga

SEQ ID NO: 98007 - DNA, 138 bp, Glycine max
atctcgatcgaactgtccaaggtcctgtcactggtgatagcaggttaaggatagggagagtgctaggaatgatgggccagaagggccgcaaagagtgtttaggtagaaacttaaggcggaagagaaacctaggcaaaa

SEQ ID NO: 98008 - DNA, 176 bp, Glycine max
agctatctcgatcgaactgtccaaggtcctgtcactgtagtatggatgcccaacttggcggcgcacgaacacaaaacctggttgctattcactatattaatggcagattgtgcaggtgggtgggctggacaaggttatacaagagccaccatgcggtggggtaagtatgttttatt

SEQ ID NO: 98009 - DNA, 273 bp, Glycine max
gaaggtttcccgtcatcactgtatgacgtcctccttctttggggggggggggggggtatattaaaccagtgcaggtaggaaaactaagacaggtggtataattatatattatgtatggcatagagagccaatatagatagaagttagagagtaggatggagccgcccctagggtggatggggagggaagctataaatgtcacacaataaaaaggaaaatcaacagtagagactgcggaagaagaataataatatagcgtaatagaaaaattat

SEQ ID NO: 98010 - DNA, 269 bp, Glycine max
aggtttcccgtcttcactgtatgacgtcctccttctttgggggggggggggggcggataggtagaggtaggcggtacaaaagtaataagagaacgctatgggaggtgaacgatattgttggaggggaaaaaccttaaagaacaaagaaaagcagcaagtatgggtaggcaggtcataaggagggagtcctaataggagatcatgaggccgtagcgagataacgaaatttcaagagcaaaagggaaaaaaaaaagccaaaagaagaaagg

SEQ ID NO: 98011 - DNA, 200 bp, Glycine max
tagaaaccatacattaaggagggaaacaataaaaaaaatgaaaagatataaaataccttaggggtgaacaactgacgttaacgactacgcaaaagtagggttttgggtggagggaatgcgtaggctgataggtttagggacaacgacccatatagcggaaggacgtgatattaagccatacgccgtagatttgggtgtat

SEQ ID NO: 98012 - DNA, 220 bp, Glycine max
atagacaaccacagcagttaagggataaatgataaagttggtattataatacccaatagcaccacgtatagaaaaaagagaacaattgtttatacataccggaggccccgcgactaaacaaactggatgcaagagaaatagtacgataatccaatatattcagacgaaagaagagtagcagtaataccctaatgggacgattaaaggtgagttacgttaa

SEQ ID NO: 98013 - DNA, 167 bp, Glycine max
cgaactgtccaaggtcctgtcacttactgtgttttgaggccgaccttggggtacaccgctggtgggtgatagcaaccaccgttggcagcgtatgctggtaggtaaagctgtatacgggtagcctgggggtcttaaggacgggtagggggaaaaggccagtggagaac

SEQ ID NO: 98014 - DNA, 227 bp, Glycine max
aaggtttcccgtcatcactgtatgacgtcctccttctttggggggggggggggggggggggggggggggggggggggatggtttagcggaaacccatagatgacgaagaggacaatgatacaagccgcaggttaatttagctcggaaaaaaatagggcccgcggccagtgtaggtaagaacgttgaaaggatataaataagctgacgtccgaagctattgggaaaaa

SEQ ID NO: 98015 - DNA, 157 bp, Glycine max
ctagctatctcgatcgaactgtccaaggtcctgtcactgaaaaataacgtggtgagtaccataagcgtacaggggcagaaggtaaaggttgagttgggcgtagttatacaaggctaggtaaatttgcaaagcctgcttaggcgggctaaaggttagg

SEQ ID NO: 98016 - DNA, 288 bp, Glycine max
gaaggtttcccgtcatcactgtatgacgtcctccttctttgggggggggggggggggtactccccgggcagtttcctaatcctaacgggtggggggggaaaataaaggatgccaggcagggttacgagtagggggatagatacaaaccatgcgaagttacaagacaagtagggtttgtgaaggagtttaggatggacatgggcgagccagcggataaacgagcaggttaataggagtactaagtagttataggggtggtagcgtgataagagatataggtggggcatg

SEQ ID NO: 98017 - DNA, 169 bp, Glycine max
  unsure (1)..(169): unsure at all n locations
tctagctatctcgatcgaactgtccaaggtcctgtcacaatttagtgcagagttgtgatgtaacaatggtttaatggaagggtggggatagttaggcctaacgcgcgaagatataaaacggaagcccccggccaccaggaggngcgtgtagggaaggccaacgccgtaa

SEQ ID NO: 98018 - DNA, 157 bp, Glycine max
tagctatctcgatcgaactgtccaaggtcctgtcacccataaatgcctaagctatagcaggtataaggcgtagtatttatggtgccgtagagtagttgccctaacaaagtgcaaaggtttatacctttggccctggccaccactataatagaatgtt

SEQ ID NO: 98019 - DNA, 132 bp, Glycine max
gaactgtccaaggtcctgtcaccgccaagtaaacccctaactgcacaacgcgcttaacgacaaacaccaccaattacgagtctcccaagttcgttactcgttagcccccaaacgcccgtgctgcaccaggtc

SEQ ID NO: 98020 - DNA, 275 bp, Glycine max
  unsure (1)..(275): unsure at all n locations
gaaggtttcccgtcatcactgtatgacgtcctccttctttggggggggggggggggggaatagaaggcagaagttggagccatagctaaatacaaaagttttgcaaaatcaccgtgtggcacgggtatataaaccagatttgagaaaaattgagagagacgttgagatgctaggantgataacagaaagaaatgttatagagctgacacggtggaccaggttagtattaatagtatcagtataaggtggcgagtgggagggatagaaaaacccag

SEQ ID NO: 98021 - DNA, 348 bp, Glycine max
gaactgtccaaggtcctgtcactggagagctccagcagtgcaggcaacgtggcaacaaaaaatagctggtgccaatcgagaaaaattgacgaggggagtgccacctagcgcaagtgcccacgagtgggcaaccgtggtggtttcaacagagtaagagggagctaattatactgggtaagctacaacaaacgacgcccccaatagaggctttgcccacgagttgacgttgttttacaagaggtaattgctgcccgcagtgcgatagcggctggccagcaacataccatacatataagggatcaatcaaatgtgctagtaataagagaaagccggaacacaccatgagag

SEQ ID NO: 98022 - DNA, 447 bp, Glycine max
tcatcactgtatgacgtcctccttctttggggggggggggggggggggggggggaaataagaatggggatagtagaaaggtggttaaaagaaggagataaaacgcataaccgcaaaatttcagtgcgttacggcttgatggaagaaaaatatatagtaggatgagcgcgagcctagatatctaggattgggctgcacacaggcactaaggcccgttgggagcttgttggaagttggaggttataaaacgtgagtagtttggcaaacggcgaaggctggtggtaaaaagccagggagataaaccgacgcgtaagagtgaggcgttaaatgaaaaagcgaacgatttggtggtttaagttgacgacgcgtttaagcggagggataaacctccgataaaagagcgagagataacgataagtagagactagaacggaataagaagtagatg

SEQ ID NO: 98023 - DNA, 383 bp, Glycine max
  unsure (1)..(383): unsure at all n locations
gaactgtccaaggtcctgtcactatagtgaggccaacgcacaaaaggcgagtacctgtttggagagccaccaacgtttatcggataggcgaaccgactttgagacggagtaataagttagaaccggatacggactaggccttgaatgagctgtagaaacggcttggtcgactatgcagggggtagaagcgaggcagcataaggggcggagtagcgcaggataaagagtgtgcgtacgtgcgagttaagataagtcgtaaagaaaaagccgcggagacgggtataggtacgtggtaccngaacgttaaagacaccgtagcgagacaataaaaggccaacgtttgggcggaataggggaagcacgggaagggagccaggagaggg

SEQ ID NO: 98024 - DNA, 353 bp, Glycine max
tctagctatctcgatcgaactgtccaaggtcctgtcacaataaaataaaaaagcctgcaaatgtgaaattgtttagggtgatgtgtacgtgctagtagtggtataatttgtgtgtggataattgtgtctatgagtataattttagtatatattaagcggtgtcagcgtgtggtggtgtgttattaactttattaaagttgtgttggtaatttataatggtgacaacactaagtggtacaaatacgaaatgtttatggtattagtggtggtggtggtggtaggtgtgtgttaatgttatttaccacaaatttgttgtaatgcgtaatattttaatgataaaatttgacggtgtg

SEQ ID NO: 98025 - DNA, 358 bp, Glycine max
ccaggaaggtttcccgtcatcactgtatgacgtcctccttctttgggggggggggggggggggggggggggggggggggggaaggagtaaggagaaaaatagagtgcaaccgggaaattgggagttaataccccccgaggtataatgcgtggcaacgtgtggtggagttccggtttaaaattttgcctgaaggtaaaaatctagcgttatcgtgtacggagacgagggatacgagtacaagttaagtcaagatggaatacatgaaaaatagggtaaaaaaaaacctagggttgtgaaaaaggtaaattaagatggactaaatgaaaaatagtataaaaagtcaaaaagtttatcgccg

SEQ ID NO: 98026 - DNA, 488 bp, Glycine max
ctcgagccgaatcggctcgaggttccatagactatgcaatgtagctgttcaacttggatttgagaggtcatgggttgatgaaatgcatcaacgtgttgtagcgagggatcctgagttggacaatgcacgagtagcaatcccggaagcttcttaagaggcgtgatcatttaactcaggaactacgcgacatacagaatgaacttaagattcttgatgactttcttgatgcccagacaaaatgtttcgacttttgatgatttagaagttctagccctacgtgttggacgtgtcccacttgtggggattttctgtttctccatacaaatacactttgcaattcttctaagaatgagactatcagtttctgagtctaccgtgttctttgtgacgtgtaatgctagcaatttaagtttgctatgcagcattttattatgtggaaaatggatattattattggtttggacttttgcaacatggtgttatatata

SEQ ID NO: 98027 - DNA, 427 bp, Glycine max
atatagtgcaataacagaattttttttggctccattggcacttagcatgggtttacatatccagctagttttcgttaaaacacaagtactcctacatttacgactagttagcttatgtttgtgtagctgttatcaatgtaatttccatctttccaatgcacaaaacgaaaaagacgcagttttgttactttcggaatgagagaaaatctgttgcaacgtacgtgtactcaaacatgcccttttagttagccttgggcggcatcgttttcaatatggacactaacacttgagccatccattattaatccatcttcatgcgccacccttctgctagatcccttttcggttcgttttctctttgacatgatgtttttttcttcctcttcttctctttcattgacaaaggttaagaatgatctaagacgag

SEQ ID NO: 98028 - DNA, 422 bp, Glycine max
  unsure (1)..(422): unsure at all n locations
tagctatctcgatcgaactgtccaaggtcctgtcaccactagagggcagtagtggcaacactgctcatacacaagtgggcgaggtacggtgccatacaggccacgtaacgtaggggccccagctgggctaggggtaaaacaatgcagaagcaggtggcaagtgttgcgggaaagtataccgcgaacagggtggactgagtgttccgcaagggggtggtatgatgggaaaccgcgtgccagatgcagccttggtgtggcccaaggttgcgtagttgtgagcaaagtaganttgggcgatggttaccatggataaacgtgcaaccaaccgggtgaccgttaaggcggggacgtgtagtccggtggggtgagcttccaagaatgggtgttgatggacggtgcatattgcgtagtaggaaagggtg

SEQ ID NO: 98029 - DNA, 312 bp, Glycine max
gaaggtttcccgtcatcactgtatgacgtcctccttctttgggggggggggggggacaagagacaaccacgacggctgtgccagatcgcgaaacaagagagtctgacagcgtgagcgccaagcgataggaatagtgcggtagatgcaaaaggtgcctataggaggagcagctcctgacccgtattcgttacgacgtggcatgtgtatgagaattaagaacccgcttctgacaacaatggcacgcgacaccagtacgacaccacagaatgagactagtgcttatgatcgtattaattataatagattgttaaa

SEQ ID NO: 98030 - DNA, 80 bp, Glycine max
aatacaacaaattttgaaaattaaaaataggacccccggctaaccctaagaaaatccaggtttaccttaaaaaagctggg

SEQ ID NO: 98031 - DNA, 450 bp, Glycine max
aaagcataaaatttcttttaaaattcactttaaacctcgtttatcgttgggtcgacattaattctagggaggggctttccccattaacttgtgatgaaatttgccatatgctcatttctcagctaattgctaccaaataaattggaatagggtacattgtagttcaagggtgtgtgtccagcacatagatgaaaaataattcaagcattcgagctttctctggaatggttgtgatattgcagtgaagcctctcttactgtcttgagagccttgtcatatgctataaaccccataaaatagaattcataaccatccactgtgacaagctgcatgtatttttctgcagggttaaatctatttgagaaaggactaaccgtgcttaactgatcgagttgcaacacgaccttataatgcacactctggttttgctgcagcgagagtggataattg

SEQ ID NO: 98032 - DNA, 487 bp, Glycine max
gtcggcggtcgtcctttttttttttttttttttttttttttttttttacacaagagcaaccaagtatagcaaatcaaaaaaaacgttataaattaccaaagaaacatactagtacaaactgcaatttcttacgggatccgacaggcaaagagatttaagaatgatcactgataaaaatacacttgaaaagagaaaattattataataactcataaaaatatgcgtagattctagtgagttaactagacatggcgatcacagagcctaaagacaagggggagtgtcgattattcttctgatttttacaatgccttaacatagagaaataattttttgggtgagggtcttcagaaagacctgcatggagtaataattcatgtagttgctgtagagcttgccttcttgagatcttggaggaaggttttcaacatgagagcccccgtcttattattggtacccatgattctttgattcaatatccttaacc

SEQ ID NO: 98033 - DNA, 165 bp, Glycine max
agctatctcgatcgaactgtccaaggtcctgtcacatggcggacatagctaaataagccacgccggtttaattataaatgtaaccgcagggacgagtgtttaccgtgccatatctgccgagtatgaggcagcaaactgccgggagacggccgccgccacagaaga

SEQ ID NO: 98034 - DNA, 310 bp, Glycine max
tagctatctcgatcgaactgtccaaggtcctgtcacaataatctactgggttaaagataaaaggaaaagacaaagctgcagcatgcaatagcaaaacggcggcaactgccagccaccatgataaagtaacacactgaaaaggtaaaacgatgagaaagctttggcaaggaaactgaatacgtatgcaagagcaaacatactaacgtagccagcaagtgccaaagggaaaccggtacggctactacatttagtaagggcaaaagcacaggagcgtgtgaaacaagcagtgtaacgtggtgaaggtgaacaa

SEQ ID NO: 98035 - DNA, 531 bp, Glycine max
ctctatcaatagacaaagttaacaaaatcttattaatatgttggtagacaaaagcacaagagaaaaatattgatacaaaacagtaaatagcactgccatatatatgcaggcagcagatccagcctagaatttcaagaaaggttaaactaacagtgagatctttgcaatttgcaataatatacattatacaaacaatcatccacctttaattatgtcagtagaaatgtttaaatttaaaacaacttgatcaagcatgaaattctggttaagcccgtctttttctatcatcttcctcgtcatcatcagaatcaccactctcacgaaaccgtggatttttttccggtctggattcgtggtcagtgttcctccgagattcatgatcagaatgtctttttgaggactcgtgtatgtggcggtcatcatctcggtgtctcttcctatagtaatctctaccatgtcgatgggaaccaccatgaccatgacctccaccatgtctaccataggaagttggaataactggtggaaaagaac

SEQ ID NO: 98036 - DNA, 67 bp, Glycine max
ctttctgcttttgcctacaagctgagaggtaggtccttgttcatagggatttgcttaacagaatatg

SEQ ID NO: 98037 - DNA, 67 bp, Glycine max
catattctgttaagcaaatccctatgaacaaggacctaaaacagagcttgtaggcaaaagcagaaag

SEQ ID NO: 98038 - DNA, 505 bp, Glycine max
atttgataaatgctaaaataatgttggtacagcagtgtaatagttttgtacaagtctcttgaagttcatatctcacatacacccttgttcctcttatccgctttctctgccaattgggacagttccatttttgtttctagaaaaggatgtttgattgagacagtcttctctttgcctgatgtccttatttgctggttccatgttttctacttcccttggaatttccagttctattagaaccttggtggcaaggaagcttctgatttggcatttttgttgggatttctagaatccttttataaatacaattcctctctggtgcatgtccaataattatataaaaatcctctctacatgtaatcaagcctatatcccctttcttttggcaccacaaccacaatttcctcgtttggtgctaatatatatatgtttctcctccatataattccttctttttggattaaagctcatcatttaattttcttctccttaattacccatatat

SEQ ID NO: 98039 - DNA, 464 bp, Glycine max
acgaagtgtaatcagaaaagctcctggcagccatgttggggaaattgcatctcttgtgggtcacagtataataggcacaacttgttaatataattcaatacacgcgtttattgtagttgctgctgctgcatactcggttacgtcgaagcgatagttgatgagattattcttcgctatgatggcttcttaatggttatgtacatctgctcattgtctaccgtagataattatctggaggcaagttggttgacattttatttatctttgtcatcattattgttctttgagggtatactgtcttttataaatccccagtatgtctcggagtacagtttgagtatggtcaattgaacctgtctccttgattgacaccgttagcgagtttctgaattcaaattgaggctgtcaccaatgttggttatttatggatttaccgctagcttgattggttgctgattctagag

SEQ ID NO: 98040 - DNA, 335 bp, Glycine max
gtaggaacattaaaaactgatgataagcctaaatcctttgaattattttcagaaagttcgtgcaagagacatctatgccttgaagttgaatgaactacatttggaagatatataaaactacaatcatgccaccaataccagaggaacgcaaaatcataatgcgaacttctgaactggcatgtgattcagcaaaaacaggagctgccaacttttaatgaccataaacatgcaggtcttgctcggactcagctggtagccactgagtcactgactattttggtctcattcttcagctgtagaatcagcaaccaatcaagctagcggaaaatgcataa

SEQ ID NO: 98041 - DNA, 269 bp, Glycine max
agctatctcgatcgaactgtccaaggtcctgtcacccacaagcgcgtaacgagcgagcaatgggtacaccgttgggaatgtgagagtaggcacctatatagctagttgggggagaggcctactatgagcagaaaggcccgccaaacttaccatatgtgtaatgcaggtactagagaagatttcacagttacaaggatgggcggaaacgttaggataaaccttaaggttaagagttacttcgaagcgctgcggtgatgaggcatagtgaa

SEQ ID NO: 98042 - DNA, 332 bp, Glycine max
caaggaaggtttcccgtcatcactgtatgacgtcctccttctttgggggggggggggggggggaaactaggtaaagcgtacacgagggaggtagcagccgaaagataatataagaataacgtagttagaactagagaccagggtgcacaccgatagggaaacgttacaccaaaaagagataacagatgtggtagttataagcgtaaaatcaaaaagaggatagcagacccggggaatgcagcagcaagtgaaagggaataccataggtaggaaattttatgaaaatagagggcgtacaagtgaacgttatggtaagtgggtgggggagtggg

SEQ ID NO: 98043 - DNA, 407 bp, Glycine max
aaaaatcagctcctaaatttagtatgcacaagaacatcccaagatgatgaatttggtactgggggcacatgacatgattgtttagagaatttgataattattctcttgattacatgttaacgttaaacctaaaatcacggcaaaaaaattgaagccactaatggagggcattaacttatgtttgttttgtttttgcactttaaaacaaaggtcctaaagcaaaggacattagatcatgaaattagataagacaagccaacattccaatctgtacacacagaaaaaaagaagttttgaaaggagttgaaatgaaaccctgcgggaaacaagcaaaatctaatagattttcctttttcatagcttctaacatgctaattcaaccataaccaatttagaaggaagaaaaa

SEQ ID NO: 98044 - DNA, 468 bp, Glycine max
acaaaaccatcaatcaggtacagttatatcgctgaataagaaaatcataaacaatcaatgaaatacaaaaaacgagaataaaattaacaaaatacaactttccggcaagaagttgaacctcaaaatacaactttcctaaagcttcagggtatctgagaagtacctatctccaaaagcaatggtctaaggaatatacatgttaagaggttaaactagccacaaaacaaccttccaatttcaccactgtctccactgcatcctaaatagaatgtgcaactcatgcctaccctgtacccaccaattggctaatgggtccattgatcagaggttacccaaaaaacaccaatcaatgacaatgtatcagaacgagacacacattattcaacacaaaattttcacacttgaacagaactacctttctcttccacaggtgaaacttgaagaccaccctcatccccatcacatcat

SEQ ID NO: 98045 - DNA, 162 bp, Glycine max
tctcgatcgaactgtccaaggtcctgtcacgctgtagtttgggaccgcaaacaacaagccgctgggtcaccaccaaagtccgtcgtgagattcaagaaccaacatccgcagctacagctgcacccatacaaaggggtccggccgcatggtcacagtaatagc

SEQ ID NO: 98046 - DNA, 270 bp, Glycine max
gaaggtttcccgtcatcactgtatgacgtcctccttctttggggggggggggggggggggggggggggttagagaatacagggatatgaagtagaataatagagcggtaattaagggagcagagaagtagtgaaagagagaccggggcaggttaaacggggtaataagtacatagggtatggtggcgaaagtaacacggtttcaacacgaggtttgagttagtatgtccgtaagagcgttaagacgggaaactaaaggttgagataataa

SEQ ID NO: 98047 - DNA, 384 bp, Glycine max
actaagaagaaaaatgccagactgttaaaagttaaagtttaacctcggaacacaaaaaattgaaatggtggccaatgcaattctttctgagtaattttgtataaacaaaaactagaaagaaataaacttctcttatttacctttgacagaaaactaaacttcaaaggaattaagcacggcttttagagtctcctcagaagtttgccactgcttgtcattggcactaaccacaaacaaaacaacagtgtttccctttgctgttgcttttgcaagattgtgtgtgcctgtgagagcatatggtgtttcgagcacgtatttgtagtatgtctgatcaccaagctttttaactgaagtctcaaggagctcttctggatcaaaagtgtt

SEQ ID NO: 98048 - DNA, 453 bp, Glycine max
caaatgaaaagagtcatcatatagattatacatgccccaacatcattcccccaacattccattccaagctaagttgttacacgagataaggaaaacgggggcaagggggtaaatatcggtttaaagtgaaactggtccatgcactacgaattagaatatgggggccaattacagccacctaatttttcataaaatcaataacctcggaaaagtagccagcaaaattaagagaaaaataataaaacttattacgataacaactattgatgaatggaaagaaaatgtcctttggttttgtcacaaattacctctatttacatgattgaaactcatcagtcaccatgtcaaagtattatactacaatctctgtgccccatctgccttctgtgttgccttatttggttgttggtatagaagatgcgaggaatgcaagaaaaatgaatttgattaaaa

SEQ ID NO: 98049 - DNA, 327 bp, Glycine max
gaaggtttcccgtcatcactgtatgacgtcctccttctttggggggggggggggggggaaagtaaaacaagataggctaaaacctactagaatgtggaaatgtggataagtagggaagagaagatagatgaacgcccataagaaccggggcatagcgatttgaattgcgggagcaatatagataataaattagcgaaatctgggctagtgcgtgagtattgttgagcacaggggctaattatggggcacagttggtaaccaaagttaaaccggacggggtgaaagtagtactatgcggatggaagcaggggcgtatggagcgcatga

SEQ ID NO: 98050 - DNA, 425 bp, Glycine max
gttgatagttgttctatatatactattgaataaataaaatcattcgagtacagagggtgaacgttgaacaggaatcctcattctatttggattagcgagacactgattttcttcactacacaaaaaaatatccaagatgattgcttatatctcaactcaaactcaataaaacgtttgagctgatgcatctccgcttgttcttctcacatgtacaccagattttttgtcataatgattagcagtgatatatcttttaaggtcaattcccctactgccactgtgatttttgcttttgttagcatacaaaactgctttatcttctgagtcctgctggagccttctacttgcaccaccattactatccactaagaaattctgatccaagttatcataggaggaagatgcccccatgttagatgaaagcc

SEQ ID NO: 98051 - DNA, 369 bp, Glycine max
tagtatttgcgttgacggtgtcatatagtatttgagttttgatattttaatttaatttgaattagttgagaacattcttgtggaatgatgaatagatcctttttgagcttcctgttattactgttttttgtttctgtgtaagattccattgtgtggactgtggagtaatatgtatgtcatttgtcatgttattctttcctcgttcagtgattaattcatattctcataattgttctcttcttggtacaaatatagatattctcatatttgcttgttaattgaatatcttgtcatttttaggagtcaagtttgttaatttgctggactcaatctataatcatatccataaaaatatgaagtcacaacaat

SEQ ID NO: 98052 - DNA, 237 bp, Glycine max
tgatgtttaaactataacttgtgaatctgggtgatgtgtgattttttgtgttactatattagcataaacttaatccttattatgattatggggcactctaaaattgattattcacttcagcagttgttctgaagtttaatatgatataggttggtacgcatgcatgtgggagatgaatatcatctttgttctcctcatgcaatgaagagatttccattggcaactggacttttgaat

SEQ ID NO: 98053 - DNA, 388 bp, Glycine max
gggggaaaaaaggagatgataccttattaacactccctgaatggcttaaaattcatacaagcacaaaattttcgattgaaagcttatttcaatattacaacaatttagtgttagagttgagcaatctagcttctgaataggaaacattgtcacaaattttgagagataccttcgaagtcgtcatatagctagcactgcttagtatgggataaacaaaacgtataaatatcctgtgagggcttaagatagtgtgatgaaatgctgcagagaactgatcaaacttggaggccagtgctttgtgtctctgacatatgaaaggtctgtaaaatggggatcaagaagagttgcaatggcaaactggttttcagcaagcaaagtggcgtgctta

SEQ ID NO: 98054 - DNA, 334 bp, Glycine max
gatgctgctgacatgtctacatcaaaactagaagtttctgatgaaaccggacaggttagtgatggaagtgcaattactgccaaaaagtactctcgagatttccttttgaaatttgcagagcagtgcactgatcttcctggagggtttgaaatcacggcagacatagctgaggctttgatgggtgctaatgttagttctcatgttattgaacattcttctactggaagaattattgataggtcaggtgggatgtctcgtcgtgggagtggtgttattgaggaagacaaatggaataaagtttctaatgcatttcattccggtatgcgattggatg

SEQ ID NO: 98055 - DNA, 281 bp, Glycine max
aacaaacattaaaatatctcaaataagcagtcgtagtctgaactttgaaacttacaaatcgcatgcacctcacaggtatggtacaataataaccatgatcagagcaacaatgtacatatataagcctcactcacttttacatatgcatggtcccaacagtcacaaccaaactgagcaccttcaaatttggggaagcagaaaagggaggcaaagaatacaaagagtcaagaaatataaagagggggagaaaaaaaaaaacatataaaacggagcagctatgc

SEQ ID NO: 98056 - DNA, 227 bp, Glycine max
gaaggaaaggacaagaacagtttactatgaggaatgaacttttagagaatgagctcgttagtaatttatctgacgatggttctacagagaaagggaaattcaatagtactacttttgtgctaaacaagaaaacacatgaacattcaacaagtcttgtgattgatgataaaacagtggacgtgacaaatgtcaagtctacttcacaatctgctgagaactatgggatg

SEQ ID NO: 98057 - DNA, 297 bp, Glycine max
gggaaaaaaatattaaccccaaaaattcatatccagttttgacaacatgacctttcctatccaagaatggttttataaggggatggaataaaaattaaatccccagaataacaacaggttacgagccctgaaaatgacaagggttcctcaatcaaaaattttttccccagttgaaaataggtgaaattccaaagaactaaaaacgcattgaaaacccggaatgaaaaacacttttttccagcttttaggacttgaaagatcagaattagcagccttagcagctttaaaaagcttccc

SEQ ID NO: 98058 - DNA, 472 bp, Glycine max
gcatatgaaagaagcattggcattagatatagaaatatagtccagcctatcaaaatatcccttgtgatttgtgaacacctcttatcttatgcatgatataaaagacatcctctttcttctaaagcatctcggtttgcagaacagctaacttcaacaatgcttgagcaatagggttatccttcgttttccttcactagcaacatcattcataatcacatgaattcgctccagtttttattccacacaaaatcggccattttgcaatatgggtatgaacctgtatatagtgtatacagccttgctaatatttacaagcatgctacatggaatttcttcaccataacgtctatcaatcaactttgcatccctttctatcagaaatcgtcatggtttatgactcagcatgaccattcaataaaatgcaaacagggaggcattgaaacatatccagagacatttaccagcgacagat

SEQ ID NO: 98059 - DNA, 459 bp, Glycine max
ctaataagtccacttcatctgttatagccttctttccatatcctggtggtggaaatggaaaacaacgcgacattgcacaaaatccaaatacgcctagtgtaaaattcttctaaatttgagagtgcttgaattagtttccagtagccctgttccagaaagggaacgaaccagcaactatgctcctgtccatgcaccatgtcaccgcattcatttccagctttaatattcctccataagcctcttactacaaacacaaattgtggaaaccaccaaggtttactaccctcaccaaaatattcaaacagctcaaactatactactaaaaattgattcaaaatcaacgcacagcacagcaaccacttgttttctaactacttaaagtcggcaaatggttcaacacaattccaatcagtacatgtttcctacactagtgttaagctcaagctaactatatcaatt

SEQ ID NO: 98060 - DNA, 423 bp, Glycine max
aagaaaatatacattaagcttatgtggcgcacacacatcaattggacaagagaaccgggccgagcaatttaaaaatcccccttcactaagctatgaagggacacatggaattttaggtttacccttccccctcttgaacaagagaacatccatgacatgttgacaacctcaagctgcaacactatacatcaattataatctcagtcattttctggttcaatccaaatctttgggctggtaggagaatacaataaataacatgatacaaaaaaaaaatttgcccctcaagcctcgtaatgaaaaatacaacccaaaacacttgaatctattgcgagaaatttactagcacaaaagtggacaacccagcaatttaagttgaagaaatggaagtctgcataacaaaggcagatgaaaaagaagtga

SEQ ID NO: 98061 - DNA, 384 bp, Glycine max
gttccttcaaaaggttttatggctttataattatgattccccattaagtttgtatggatgctcaaaaccccccatttgaccccatgaatttgatttaccagagggggaatgaaatcagttttgatggccacaaacaattggatttaccagagggagaatgaacatggctcctaaacaatttttttatcccccaagcttttgaacccaacatccattcctaaataacctttaactacaaaccctactatacatcccaaaggtaaaagagctcctatcatgttgggatggcccataagaatcaattttaccccataaaatcgggggatcccctaaaaaaggtggaaccacctttttgggggttttaccttccccatgaaaaattaa

SEQ ID NO: 98062 - DNA, 471 bp, Glycine max
gctgggttatggaaaaggaccttactattgtactggatccttctttctcgaaccatgtctcatctttctggatgattcaccggcaaagtaaaaggaaattacgtgtgagcattgaacatgatatgggcgggacaagtgctgccccaaaaacattaagactctttgtcccttactggattgtcgacgatttttctttatctttggcataccgtgtggtggaagtggaacctttggaaaatgtagagatggattctgtcctactctctagggcagttaagtctgccaaaactgccttgaaaaaccccataggctcattggatagaaggcattctaattcaaggagaagcctgcaagtacttgaagtaattgaagacaacagtccatttccgagcatgctttctccacaagattatgctggtcgtagtggagtttcaatgtttcaatctcctaaagatactaggctgggcattt

SEQ ID NO: 98063 - DNA, 262 bp, Glycine max
aataaagttattgtaattgcaccatacttgctcttcagacaaattgaaaatgatgttctgaaagtactgaacaacaacctataatggaatagaaatactgtggcagaaagcagcttattgggcattacaacccacaaatcaatgtatcaatatctagtgcaccaaacttaatgaaaagagaggggataacctgtgataacagaaaacaaaacacaaatacgaaacgacaaagtaaatagatgcacactccaaaaaccaggtg

SEQ ID NO: 98064 - DNA, 380 bp, Glycine max
ccgttgtcgagttgagccatgataccatcacccgtgcctcagtcactcatcaccattctgctcttgctcctccccaccacaaccctctcagtagtactatccctccctctcgacccaaagcaagtaaaagccctccaatccctcaacatccccagcccaaaagacccatgctcccaacccacctgcttcctctgcgacacctacacacccttgcgacacctgacctgcctccaactcacgaactgttccacttccatccaccactccctctgctgcacagccctcaaatccctctgcaccctgctcaccctacacctgctcaactgccccatcacaccctcctcccccacccacttccctccccaactcctgtccctcac

SEQ ID NO: 98065 - DNA, 404 bp, Glycine max
aaaagacaacaatcagaactgatataaatataattatacaaagagtctcaattcactccaaaattctgttatgccccttcactatttcccacacattccttattcatgtttccttcactctctcatcattgcgcagttcacatctccaatacctagctgtcatgactcgtgtacattcaattacactgtcacactacagtttcctccttattccaagcaccatttgtatttctcctcttctaatcacgtatattttcccttggcccaacacttcccaaccttcctctcttatatacaagttaaaggtctatcatcaatcatttggaaaggaaaaaaaaatgatgttttctgagacgtgggaacctatgctcataatcaaacataatggcgattataaatgaatg

SEQ ID NO: 98066 - DNA, 471 bp, Glycine max
aacaagaaccaacaaatatatacatacttcaacaagggtcttttacacaaggcaatattgtgttctacatcacgataatgaatacagaaaatatcgggtagccattgtaagcaatgcttagcaatattattaaataccatcatgcttgatgaaatcaatagaatcttatactataggtacatgtggttatgaagtactcttgctcatctaatcttcaaaaaagcagggtaaatatgctttgtttctggtggtttcaactagtagtagtactgtggttgagccaattaatgccaaattgttggcataattaatatgtgtgctgattggaagtgcgggtgatgagacagctagaagaagagacgaatcctgatgatgctgcatttggttggaatggccttgggacaatgctgccattgctgcaaagttgccaagccaagttggaaattttttgcaaaggaacattttttattc

SEQ ID NO: 98067 - DNA, 193 bp, Glycine max
ccagtaattgtggggggcttaactaccggggattaatttttcaaattccccggccttttttccatagcgaacagctacctaacattagttataaaaaattgtatcgcccatgaggtcttcatatccctctcacgtgcaaaaaaatccaacttgctgtaaggaaaaacctgaccacttccttttaaggacgttt

SEQ ID NO: 98068 - DNA, 238 bp, Glycine max
atcacactaaaggatctgattaattgaaggcaatatatgctggacaaccgcgcaccactcacttggcatatatggaacacatacataatccatatcgcattacttagtggcggggcatgtgttactcatgtctaatgcacaaacatagcaggggcatgaaggaaaaccacaaaattaaaacgaggatcatatagctgataataataacaacaacacatgcactataaaaaccacatgc

SEQ ID NO: 98069 - DNA, 401 bp, Glycine max
cacacacaaaagtcattgtgcttgtgcccaccaactagtctcctctagaactagaagaaattcactcagttctgttcttctgcttatgaaattaaagcaaaaattaatccatttcaaaattgtgtcaagaatgagattctcagcggtgtattttgtcttattattatttgtggcggcagaactagaagcaaccacatgtttcactttcaacaaagagaaaaagctgtcagaattcaagaccaaagttcatgaaaagattcaaaagttatcagcacctgcttcttcatcagaaacaaagaagagtgggagggtgctgtacgtgagtgaatatggtgcagacccaacagggaatgaagagagcagcgatggcattttgaaagctgttgaagatgcttttgcgt

SEQ ID NO: 98070 - DNA, 281 bp, Glycine max
aacagaccttttgaatcaataaatcataggtagaaatatcgccaacattgcctgttagatcaccgatgggaactattacaactaactgcaatacagatccaacgaattataggcctatgataccaaaaaccgagattttgattattcgaaggaattacttttgccttggattccaaagatgctctaggaaatggggatagcacctcataggaataattatgtcaatgcaataaaagttgctaaccaatctcctcagtttgaagcccgaaggaagaaaattt

SEQ ID NO: 98071 - DNA, 240 bp, Glycine max
ataaatcattgtactgatacagaccaagatggatatgcattcaacaatgcaccaaagtttattttgaagttggagtcaacccctcgtcttagggaaaagagacatgaaccacatgggccactcgtcctacacaacacataatgagaaccttaacgaaacacgtgctcaacaagtgagccccatgatgtcagtaatatatcataccccattatccaactttgacatccactgcttatctac

SEQ ID NO: 98072 - DNA, 111 bp, Glycine max
aaagcagggaagaaaactacctttaactgatggatactatgttatgtattcccccccaaatatcaaacataggatccatgaggtaaagcagggaaaaaaactacctttctg

SEQ ID NO: 98073 - DNA, 112 bp, Glycine max
gaataaaactacctttaactcagggattctttgggatgaatttccccccaaatgtcaaacatagaatgcatgagttaaagcacggaaaaaaactacccttctcgagccgaat

SEQ ID NO: 98074 - DNA, 364 bp, Glycine max
aaagtggccgtgttcggaaaatatcttaatcataagtcacaaattatcatataaattacatgctaatcaattattgcggctcatgctcactggccactgacttgcactctttttcgccgagtccactcagccgaatcatggcccataacaacaccataacattggacttcaactaaccatcactagccacctgcttaacaacaatggttataataaacacaaaacttaaatccagttttataagcatgtttagtaccgatcattgattaaaattgacgttctatgttactaatgtatcataatcaaaactttttattacgtaaattatcaaaacaaaactccaatgttaattacaaaactgaac

SEQ ID NO: 98075 - DNA, 87 bp, Glycine max
cataactggaatagagcagcatatgcattgtatataaaaaaacaaaaaggggcgccgggggctaatgcgattgccgtcccgggaatt

SEQ ID NO: 98076 - DNA, 264 bp, Glycine max
aaaaaaccggaccgggtaaattttttaattccaggattagctaaaatttccagatgaaactaactggtttttaaagatcatttcaggaaacaaaggcaattttaagctttggaaactcaattccccatttttcctactacattttaacggggaaaacaacagaaccttgaattcatcaagggcccattaatgctaaattttttatgcttgggggggcgtttgtttaactatgttaaaggcgggttttaaaagaaggggcaaaaa

SEQ ID NO: 98077 - DNA, 359 bp, Glycine max
catgaaaaaaatgtcaactaatagtcaaataccaataaaaagaacatgcacaaagtcctcttacactcaccctaggctcatcggtaaaaatggtacagttttcattaagtttatgaaaaaaaggaaaatgaactcacatagtaccaatttccatataaaccttccacaacagagattcgtgtaacaactcaatcgcaggaacacatcttgctcgataacttagcaaaatggaagaaggatgagaagtgcattggtaatgaaaaaaaatacatgacccatccaaaacacttctacaagaactaatgaacccactaatctttcattgaatgattgcactgatgacaatcaggaacctgaac

SEQ ID NO: 98078 - DNA, 289 bp, Glycine max
ttattgtgttttttttttttaacaccatgctaatcaaataacatggaaaaaaccgggtaaactcaaaacatccaaatagtagtgatgacttgcagcacaaggaaacccaaaacatatgacctcctactttggcaaagtttatactcatttatgccaactattatgggaaagtgaagaatggggaccaagaaaagtgttgcaaaaaacaatggccaggatgaataaaattgaaccaaactgaatgatgccttagaatgcttgagatgaaatgtttcttttatgccacagc

SEQ ID NO: 98079 - DNA, 221 bp, Glycine max
caaaattaggctctatatatttctaatggatacacgagatcatagtaagagaatcacatgagctccaatatggaaaattaaaaacaacttatttgagaataatttatatgacaagaacaattgatacaacactatatattgcaacaaacatcaaaatcgatcaaatgaatgttggcttataaacgattcttcaagttctctaaaacctcggtagacatgtt

SEQ ID NO: 98080 - DNA, 339 bp, Glycine max
gtcctttttttttttttttggaaaactttttataatgagttcacacattcacaatatttgcgggattatatagaacaaaattaattgatgatcgcattagaatagaatatattatcaaacgcgattcaaactacatttaaggtacttgaaaaatattaacaccccttcacttccaggaattgaatacatcagaggcattcaattactgtcattggccatgtgaattattctaagatcacgagtgaacggcatgtagctgatcaagcaaagccatcaatcaactaatagagcgagaaaaacagattgaaactaacggtcaacatacactatgcacatctt

SEQ ID NO: 98081 - DNA, 391 bp, Glycine max
actgcagtataataaaactcattatttgagaattccgaactttcaccatgtctgtaagcagttgaacggcgagagaaagtgaaataatgcatctggaatcagttcataatgatcggtccctttctatctttccttctagtaacttcctttgtacttatgatttgcaaccacctctataattgatgtaatttctgaacaaaatattgctccaaataattcaattactatcacccctaagaaaaaaaatatatttatcaacaatttttgcaggggaggattatcttccctggttcttccttttgcaaaaataacgctttgccacttgcaagcttctgtaccgaaacaattaatgtattctactctatcataaactgccccccaagagatgagg

SEQ ID NO: 98082 - DNA, 126 bp, Glycine max
caaacatttttggaaacgggctcactagtctgcttaatccagtgtgcggtgaaagatccacctttgaacttttagttcatgaagggcgtatcaacagcgcaatatccacctctctatatgctgtaa

SEQ ID NO: 98083 - DNA, 288 bp, Glycine max
aaaaaaaccatggggggggggtttattggaaaaagacccttttataaaaggcccttcaggaaaaccaaaacgcttggcggggggggaaaaaatttaaaggggggcaaggggttggatttgggcccaaaagggccaaaattttttttccaaaaaaaaaccttaaaccccccggggccccagcaattcccaaccttaactttgggttcgggcccttaaaattttaacccgacccccaggggtttttcccaaaaaaaaagggggggccaaccttgggcccccctggggccc

SEQ ID NO: 98084 - DNA, 432 bp, Glycine max
aggtaagagtactatattaacatccttcagatgagtctcaaatctcaatagaagaaacaatgaattcaaaagcaaaaaccactcagtcaaaaacactaatttgaatttggaaaaataagaggattacactatttgacgtctcgtaacaaatttaccacaagtacataccagacgaacaagaaaaccatttacacgagaaattttcaattccacgagcaatcagttgctgcaacacaatcgtcgttcttttttcccacattcatagttgtagaaaaacctgcctaagtttctcacgagcttcacgaaagcaaaacgcaagaaaaatcgcacaattacacaagcaactaccacctgtcaagctgcaattaacttctttaaatggagaacagcatgaacaggcgttatataacactaaaaattcttgaacatatt

SEQ ID NO: 98085 - DNA, 273 bp, Glycine max
taagaccttaccattgagttttcaatatcaagatcgagattcatcttcaactcaatcaaccggtcagtcttatccagaagttggttcagcacaatcaggtcaaatttcagtgcagtgtagcaattcttctgctagttcaacacacaacacaactgggggaaagagtgtggaaggtgtcatcgggtcaactgtggggattcaggattgtaccttccctccttcacaactgtgttacaaccaatcacttgctcatactgcattccactttgctga

SEQ ID NO: 98086 - DNA, 291 bp, Glycine max
attgcattgtactttaaatggttaattggtaaggtaagtgattattcgtctctcctcacaaattattttgttaggatgacttagctggatagtaggaaaaaatgtatgtttctgacgtaatcttgatgtacaatacaagagattgccttgctacctttttatgtagcattgtaattcgcaaatggcacctatgaagtcacgtgttatgtctgattatccatggagtccgagatgggaaccatcaatgatggctgagcgtatttgtgattgtctggcacgatgaggccttga

SEQ ID NO: 98087 - DNA, 430 bp, Glycine max
acataaagggataacttcataaaatttatatttgtatacacaaaaagtctatacgttaataacaccaaacatttgatagtataatttttacactattagcccattctattatcttatccttatcatatatgctgcaaacatggcctaataacattcatatatgtctaaatcagggctttaagaataatcaactcactcaatccgcataacatctctctcctctttctattgtgacctggttaacttattcaaacacacaccacccaagcagaaacatctgaatcaaaggagaaaattgctctgcatatctgaaccttcacatgctctttttgttaacagaatggggagagctgtggtcaatagcctgcacctgactccgaagattctgattgtctgccaagaggcgatcatattccataagaaacccctc

SEQ ID NO: 98088 - DNA, 367 bp, Glycine max
atcaaatgtctccagtataatatatgccgaactttaaaaagtcaaatttcaatactattttttagtgtacaacaacaaacttaagatcccatataaattacttaaactcgtcaacactagactgaccttaatagattcaaaactaatacaataattcccggccaaaatgaaaggagacatatatttcccttttttttgtttgccatccgatactcagcgttgctagtaataagcatgaattaagaacattggattagacaccatagataaaaataaaaataaaaggcttggctgcagcaatttgagatgtgaatttcacaggtcccccaaaaaattgaacatatagtcagaatatcatttttcatga

SEQ ID NO: 98089 - DNA, 249 bp, Glycine max
aacaaatgtgagcaattatacattcactttgatgatgaaaacatgaaaagcgccaactgttgaaataaagtaccatttccattcacagaataacaagggtccacacactttatatcctaaatttgccatttaatagcgcctttaaaagcgcgcaaatacacaaacatgaaaaaaagaaaaaaaatagccttttgatttaaacaccgaattgaataccaggcggaaacgtgagaagatgggacattaatt

SEQ ID NO: 98090 - DNA, 341 bp, Glycine max
ggaagtttttccaatagtccataagttgggggagagggtcattgaatgctgtgcaaccaaacttaaaccctacttggttcaagcagtgaaatccttggctatatctgtggatgattatagtgcaggacttgcttcaatatgccaagatacgtctgatgacttggagaaaaatgatacatgtgttactagtgagcttgtggaagataagagtgattcagcagaacagtcaccagaggagtcaacacatgtggatgaaaaggattcaagggaagttgcgccctctcaaccagaaaatactggtgtgagtatatctacaaagttggtaatgagcaatggtgttg

SEQ ID NO: 98091 - DNA, 188 bp, Glycine max
tcgaactgtccaaggtcctgtcaccaaccggctaaagttatgtactaggacatggcgggcccaaatggcttgtactcacgggaaagtttggcccaactggctaacacctgtagggggtgctagcgaattgtacgccagggaacacgaaggcggtgggtagtaccaacagggtgctaaagaactatgtt

SEQ ID NO: 98092 - DNA, 152 bp, Glycine max
ctatctcgatcgaactgtccaaggtcctgtcaccacacagttagtcagtaaggaagggttaagccttcagtactgtattgatgaatacagtgtgcacggtaaccaacttgggacttgtggtcataaccatcctcagccggcgaggattatta

SEQ ID NO: 98093 - DNA, 318 bp, Glycine max
ataaaaaaataataaaaaaatttaaaaaaaaaaatttatttattctgtgataacgtgcacggtagttatttcttttgttaacagtgcacactccttcttcgaagaacgcattatggcagaaaaatcatccacagagaatgacgctagaggactactctagccctattatacctcagtacttcaccagcatagctagaccagaggtgcagacggccaacttctcatatccatattccttgatccagctgattcaagggaatctattttatggcctaccaacggaagatccatacgcacacctggccacatacatcgaca

SEQ ID NO: 98094 - DNA, 205 bp, Glycine max
ctagctatctcgatcgaactgtccaaggtcctgtcaccaatcgaggtgccggcgcaggggatatgtgtaccatgggtggaagccgcgtggtataaagaggagttatagctaaactaaaaaatgcaactgtgatatgccgaaggagcagtaagagcggtacatatcggtgcagtgacaacacaattacagcaaatacgataacgcc

SEQ ID NO: 98095 - DNA, 206 bp, Glycine max
ctagctatctcgatcgaactgtccaaggtcctgtcacagcaaaataaccggataaggcgggtgggaccacttagattattatgccgcatatgctgaacgcacccgacgttaaaccccgaacaaacagctgctaatactatgtggtaagggcgctagggattaccataataacccaaacgtacgcacccgtgcctcggaggtttata

SEQ ID NO: 98096 - DNA, 172 bp, Glycine max
tagctatctcgatcgaactgtccaaggtcctgtcactcgggaacctcagaccacgattgcagggcacgtaactgtatcaatctgcaacgcgcgggtctgtggatacgagtatctacttctgaacgattggttgcggccagtgggcaaaataatcaaccaggttaggaagatg

SEQ ID NO: 98097 - DNA, 178 bp, Glycine max
actgagcatgcgtctagctatctcgatcgaactgtccaaggtcctgtcaccatacataataaaatacaagcccgcgccgccgcagtcatcctactattcgctctgatggtcgcaatcatcaccgtccttggtctcaacactcggccatcactacggtccccggcgtgccattgtaata

SEQ ID NO: 98098 - DNA, 240 bp, Glycine max
tagctatgtcgatcgaactgtccaaggtcctgtcacgagcgaggccccgaggccttggtgggttgcggtgtagagggcctgcatacgctggttagcaggcacgccccaccgcaacggcgaaaggtgcacttgcagccgtactatatagtaatgtaaacccaacgccgtagggtttgcacacccgggcctaaagtaacgtgatggtagaaataggtacgccggcagactgttaagaagtgt

SEQ ID NO: 98099 - DNA, 324 bp, Glycine max
agctatctcgatcgaactgtccaaggtcctgtcactgtgcagtgttgtagtaccatagcttatacctctccgcgctagctgagcccaccaagcctactatacaggttaagtaaacagcatttacggctaaagcacctactatgccaatggcgaaccaaccatacgtggacacaacgcaacctaccttatcagccaatggccctgctatagttgccgtgtaggttagttggtagccacccggggtaataataatagccctaagcgtgtttaattacagacatatacgcaaatgtcagcacgtgctaaatggaatgcaataacatt

SEQ ID NO: 98100 - DNA, 213 bp, Glycine max
agctatctcgatcgaactgtccaaggtcctgtcactataacgcgcttcttcgtattcacgtcgcgttggctactagctgataacctgggcaagcagtattagcgttggtggcacccgatttgaggcaacttaaatagccgtattttgccagtttaagtgctgaaccgggttttgtacgccggcttcactatatgcgtacagtttggtacacaa

SEQ ID NO: 98101 - DNA, 287 bp, Glycine max
tagctatctcgatcgaactgtccaaggtcctgtcacacacaagccacacgaaacaccaagagcggaatcggccactaaataacggtgtacaaacctaattaaggccgatactactgtacccgccgccgcataaccatgataaccaccgtgtttttactgttgggcgggcaattgccgcacgtgtaaagtagccagttggtgatacactgccaaggctgcacgggcacctaatgggtggcggttgtgataggattagtggaatgcgtacccgcgtaataccgtatttg

SEQ ID NO: 98102 - DNA, 134 bp, Glycine max
ctatctcgatcgaactgtccaaggtcctgtcacttcatcgtcgaagtcgtccacttccggtccattccctgtgttgctctcgatgagtgtactaacaattttcttcgcactcgccttagacgtcactacgtacg

SEQ ID NO: 98103 - DNA, 295 bp, Glycine max
ctgagcatcgtctagctatctcgatcgaactgtccaaggtcctgtcacaggataagaagcctatgctattgctaagagcggaagccaccagttaaaggtacgtggaacggccggccactcgtgccgtactagtggatggggccaaattacggttttaatttaacaaaaggtcacatgtgaaagtgtacacaaacgtacccgaagcgggtaaaccccaactgtaaaggattaacgcaaaatgtatgattaccacgtggttgagcgtaaaggggcaaatagtttgcactaaataaag

SEQ ID NO: 98104 - DNA, 302 bp, Glycine max
agtgccttaaattggatttaatatgctttacattccaaaatcctaaaagttggtccaagtgcttaacaagggccgaaatttcggacaattccaccactacttttcatactagttagggctttactccaattaaaatggtttatggaagaaaccttccacccagcaaacaataagcaatatcaccctttaggtttccttcattctttggtacttctgctgctacactgatatcagtctctggattactaaataagggcagatcgtattattcagcaagtcactgggtttagggatattttttg

SEQ ID NO: 98105 - DNA, 293 bp, Glycine max
ctgagcatcgtctagctatctcgatcgaactgtccaaggtcctgtcactatgtggttaggtacgtaggtaatattgtatgtatgcaggtgtacaatataaaacagccgcagcagcagcaacaaatattggtgtggtgtatgggtatggtgttgaagccggtgtggtatggtactgtaaattattttactattagtattggttgtacttttaatacatagtagtacaagttgtaaaaacgttccaccaggtattatttggagttcgtgttgtattataatataacgtgtaattt

SEQ ID NO: 98106 - DNA, 265 bp, Glycine max
gaaacttggggaaaaaattcttcgtttgggaactaacaatacacaaaattctcaatataagatgcgaacgagtaaagaaaaaccttcaaaatccaatacatatttcaccacagactgaattaatcaattccaaaggaagcaaaagaataattaaaaagggctagaaaaagttcatgattcccctttaatccaaccaatccccccaaaaaaagcatggagaaaattttaacaaagcacaacaacatcggaccccaagtagcatact

SEQ ID NO: 98107 - DNA, 166 bp, Glycine max
ctagctatctcgatcgaactgtccaaggtcctgtcacgtagcacgcgcagttccaacacgtcgccactagcgcaggtcccaggcgaatccgcccggcagcattatgctagggcacgatatatgtaacctgccgccatgaagctcacaaccaccaggagtttgatat

SEQ ID NO: 98108 - DNA, 291 bp, Glycine max
agctatctcgatcgaactgtccaaggtcctgtcacccaaaagcctgtgcggaagcgtgtacaaaggtatgtgactggagctgctatgtcgtccacgcccgccgcgaagcccggagggtaacacgcctactaataacgtatggggcctgccccgggcgtgctagtatgctgcgaggagcgggagatgcactgattgccaactttgcggggtctagtagtgcggccttggcctagagtgctgctatggtgccccgcagcccggtgtcgggtaacaaagtaccaaaccgtgggt

SEQ ID NO: 98109 - DNA, 295 bp, Glycine max
gctatctcgatcgaactgtccaaggtcctgtcaccaggggggtacggacggaggctgcgtggtgggggcgcgcgcttaataatatacaaacacacgacaaacatagcctgtgcaattaagtaaaccttcgcggcggcacccgcacggaccgccgccgcctctgcgcgagactacgagatagacgccgcgtttttgtgtgatgcctagggtcggctacgcaataattatgtggtagtggtgatggcgctatttgatagtgctcaggctgtggtataatttaggtgggtgaggttat

SEQ ID NO: 98110 - DNA, 352 bp, Glycine max
agctatctcgatcgaactgtccaaggtcctgtcaccggcggcctaccagttcaactacggtacaacggtacagcgttaagaggggcgccgacagcttaggcaggtgtaatagcacgtttcgcggttggcaggaaagggttgtaaccgatgtcaagtgttaataaccgagcagccgatggggcccagaaggcacccgaggtggttcaataaggcgggcttagcgtggcgagtgattaggttggtgcggcacaacacaacagtaataacggtgacgttgttgaagctaccaacaacttgataataaaatgggttgggaaagccaaacaaccatagcccaacgtgatgtgagggg

SEQ ID NO: 98111 - DNA, 223 bp, Glycine max
agctatctcgatcgaactgtccaaggtcctgtcactggggggctaaggcgtagggcgtattaaataaggcggcggactgtgtataactaactggtactaatcataagcaacaaacgacgtggatacggccatggatagccgcagcgaagtaagtaaaaagtgagcaaaatactagtgccttgggtacccggcaagtacgggtcggcagagcaaacatagcaaa

SEQ ID NO: 98112 - DNA, 224 bp, Glycine max
acaaaaagacaaagttttggcaattggcaccccccaaactttggttccctcattaaatatttccccttttgggaaacaccgggtttaaatctactaaattttttttttgcccaaccttcaatttactaaaaggggcaaaaacctagtccaaataattttaaaagcaacaaaaagactacttgggcttttatttatttatcaaactttccaaatttttgaaattt

SEQ ID NO: 98113 - DNA, 199 bp, Glycine max
ctgtccaaggtcctgtcacgctaaagtagttggactactaggtgagctacttacccgtgccatacctgctatagcgttttaatgcgaagtgccaatagtaatagtaccagtctagtactaggaaatggctttagagatgcagcgggtgacttgcgggaacgggggttggaaatgaatgagctgcgtcccaacagagggg

SEQ ID NO: 98114 - DNA, 268 bp, Glycine max
tagctatctcgatcgaactgtccaaggtcctgtcacagaccgatttgcagctaaaagtaatagccaggccggtgcgcgatttaaagggtaaacaaagcacgtgggcccatacagagcgtatgcttagcgaggccgttaggcgtatatggattattatgcgtgagccccgatgggtagctgcaaaatataacacacacgtgcgggcatagaggtgatagcggcggtaatggcccaggaattgtagatagtaggccaaataggataaatt

SEQ ID NO: 98115 - DNA, 402 bp, Glycine max
tctagctatctcgatcgaactgtccaaggtcctgtcacacaaagggaacgcaccactgacacaagcagcagcaacgtgctgagcgcgctagccgccggcgactatggtggtggtgcctccaccgccccgtttagcctgcacctgcgcatacgtattttaatacacggcacgttcgcgtggttactaagtatggttccgctgaaattggttaacgtggcggctatgaagtgcaactagtaaaaattacgtggagggccatgattgtaaaaatgtgcgtggcaagtacgagcggaatgtgttgaacttcaaaaattcgctggtggcgcccaggtttgggttaatggcggaaggaaggaacgttggtggagaaggaaacgcgccgcagagagagagagagagaca

SEQ ID NO: 98116 - DNA, 267 bp, Glycine max
agctatctcgatcgaactgtccaaggtcctgtcacggggggggggggggggggggctatcacagaattatgggggattagagagagagacacacacacaagatgaactatatgcagtataccagcaggtgtgtgggaacgacccgaactacgagtggagtacgatatagacgaccggcaaaggtgactgtgactaagtgactgcacaaccgacgatggctataatatatagtatagcagaagggaggggagatataagtgtaggtgt

SEQ ID NO: 98117 - DNA, 234 bp, Glycine max
tctagctatctcgatcgaactgtccaaggtcctgtcaccgcctgggctgaaaaaatgcaatttgatggagctacgctattacatacacggacaacttaggtgtatccctggcaaccgcctggtaacagcaagcggaacaaatgaaggcgccacgtacatacgcatgtgcgccgcactagccgccacaagccccggaactttaagtatttgcatgagccgcgtcgccaatggaga

SEQ ID NO: 98118 - DNA, 198 bp, Glycine max
agctatctcgatcgaactgtccaaggtcctgtcactactaggtcactacggtgtgagtcgtcgcactgtaagtcaatgcttattagtataaggtattaatattcgcggtgttagtctggtttacgagtcaacagttgttcgtcatctacacaagtcaccagttgttggtgctacactaaacgattttgaagggaagtc

SEQ ID NO: 98119 - DNA, 435 bp, Glycine max
aaaaagccatctggaggcattgtatattcaccaagtcaattgattacatgtgaacatggaatagatcaaactggtaagagaaatcaaaagatagtatctaatgatattatacaactaaaaccacattataataaactacataaccccacttccttaccctataataaacctatttctcaatctttatatttatattccctttgttctgctgtttggctttttcctcccctatctgacattgcttgatattttgtcacgagtattgatggggattctgcaaaattgtttggacatctacaattttttattctaaacatgaattttcttccgagattccatagacaaaagcaacagccgttccaatttgaaaagaacaaaaaagaagggaaaagagtcctaacctaaaatccaagagaccacatcgccatactagct

SEQ ID NO: 98120 - DNA, 215 bp, Glycine max
tctagctatgtcgatcgaactgtccaaggtcctgtcacgcaaaagcgaaggcttagcgcgggcctaagataaagtgttaaagaagcgaagtggtccagcaagaaagcgcgcgtgcggagttgatggtaccgcgtgcggcgacgtagctacgtgcaagtagcgattacggttgcagtagacgcgagcgaatacgttagccgggcgccataggtgag

SEQ ID NO: 98121 - DNA, 414 bp, Glycine max
atcgaactgtccaaggtcctgtcacaagcatgccggcaaatagccaccaggtagcgaaaattgtagaccaaagcggtgcccacccaaaaggcgttgagggggtaaagtacggcggtagcccgactagggtaggattcattgcggacgtgggccatagtagaagcagtgtgcgagtgtgcggtacgaccgccatagaggactaaggaggctgtaattagaagggacaagggtagttgtggcaccagtgaggagagagggagagaaagaaaaacggttgggcgcggagagcgggaagtgcagagacaaaggagcataggctgtgtaagtttagcccaaaaagatgggcgggtaggaggcagtgtaaagtgtagcaaggatatgtgtacgtgataggcgtggcaggggacaaaagta

SEQ ID NO: 98122 - DNA, 420 bp, Glycine max
acacttgatgcgatcatgaattgacttcaaaaaacaaacaaaaatctcattcagaactctaagctacagaattataatattatacaaagttagccaaatcttaaaatagttctttggcccgtgggcaagccctgaattagctaatatcttgaaagtagtaactcccctgcctccactatgttttcatgatctttcattactactagggcgagaaatccaaactgtcacaataaattacctgtgcaataacaaggtgtcattctctttcaattatttagctttctccatcattcattatcatcatccttcatgtacttctcttgcactgctgcaactgtaaattgctgaattaagggaagctcagaattcaagtgaaactttgaccacgaaaataagcaacataattgatacattcatgat

SEQ ID NO: 98123 - DNA, 315 bp, Glycine max
gtatgtgttcaacaattgtttcaatcaatgttgccttatgcctgtatagagagaaggataaaaagaataattgattttagtccaacaagaaccataaacaaatacagtaatagatagataaaacaagttatcatgtgatattttgcaaatccaaggtaaaacgataaatctttccacaaacaaaaaaatggctaatataaaatttcgattcctcatcttattttattgattttaatttgatatactaaattttaaaagttttactttgttactaatagtgtttcaagttgaacaaattggtcctttccttgcatt

SEQ ID NO: 98124 - DNA, 166 bp, Glycine max
agctatgtcgatcgaacctgtccaaaggtcactgtcaccgactcctgtaggcgatcatagcaatttgcacacacagttcgtgccctacgtttacatcacgcagttactcctaatataagttcctaaagatgcccattttatagttatacatccccgaggccctttt

SEQ ID NO: 98125 - DNA, 201 bp, Glycine max
gcatgcgtctagctatctcgatcgaactgtccaaggtcctgtcaccgtctaaggcagcaattttacagcttaacaaaaacgaggtgttcagggcgcgtattaggttaatgctgacagggcgtctaaggcaccccatgggccgggggaggggatggtgcagcaggccaaagcgataagccgccggcggcgaagctgggcagc

SEQ ID NO: 98126 - DNA, 279 bp, Glycine max
tagctatctcgatcgaactgtccaaggtcctgtcactactataaactcccggatgcgtgcggtaactgattagtgtgtgtgtgtgggtggacgcttgttggcttaccgctgcatatgtgtgtgggtgtgtgtggtagttggtgcggcccggccgacgccacgcagcagggtgcggcgctatcgcggcgtaggggggatttgtcttatacagtgcaacgcggtaacgggccaggggcactggtcgcaacggaaaagcctttacaaatgggttgaggtata

SEQ ID NO: 98127 - DNA, 336 bp, Glycine max
ctatctcgatcgaactgtccaaggtcctgtcacactgttgtggtgtcaggttctaagtttgaataagccatgttcaggagagcatgacgccgtctggcagcgtgggcccccgaacatggggccatggtaaagagtgagacgccatcgcgagctgcgagaatgcgtaaaggcaaagcgcaaagggccacccaaggcgtgaaatgagggccacgaaagaggttttcgactggttcccgattgcggaaggatgggtgggtgttcgcacgttgcagtggccaatggcgagcaaaaatagcgcagtggggtgcgcataaagggaaatacgtggtagtgttt

SEQ ID NO: 98128 - DNA, 238 bp, Glycine max
tctagctatctcgatcgaactgtccaaggtcctgtcacattctatcaagagtggcggcgggccactcagttcacaaaaatgtgcgaaatagcggccgggattacgattgttggataccgcagcactggtgtgtgcatgttggttcggataaccaaaggcacaagccaagctgcacccaacggcaccccaacagcccggcggaaaccacgtacggcagcgacataggccgctaaatttg

SEQ ID NO: 98129 - DNA, 380 bp, Glycine max
agctatgtcgatcgaactgtccaaggtcctgtcacccaagggtcagctgtacgtagtgtggggattaggtgtggtgtgtggctgtggctaccaccacacttagcgttagctagtctgattgcaccgaacaggaggcctcaactgcgggcctataaatatgtttaggtttatgcgtatgctcacacgtggtgaaacttgtgtttgctacgcggcaaagtcagcaatgtttgacgtaaaggcagcagatatacgatttaaaaataggtggtgagaacgaacattggtagttacgtaaaataagcaaacgataaggtattacatcgtttgacgtataattggaccgcgagagatagcccgaatccagaggaaacatattgtga

SEQ ID NO: 98130 - DNA, 280 bp, Glycine max
tctagctatgtcgatcgaactgtccaaggtcctgtcactctggtcggaaaggtgtggggtggtggtgctttttggggttatggtaaggaccgagagtcttcaggtcaggattaagggctggaaatgtaagtaactggtctactcgtaagtaggtgaggacacgggtccagcgtgagagggaacgacggcgacgcgacggacaggccgaaagcctagttgttcaccgacacggatcgaggtggtatgagtgacgtgacaaaatgacaagatttaggggcct

SEQ ID NO: 98131 - DNA, 222 bp, Glycine max
atcgaactgtccaaggtcctgtcactcctgtcactacacgggactgcgggatacataatacggcctagcatagcgtgacggcagagacagttgctagggtaaaagtaaaagccgagaaagagccagaggtagggggccgccctgcaggtgtgcaagccgtagacgtgaaatagtaagtgaaaaaggatgccaaccaaggcattaagttcgcatatggggaaa

SEQ ID NO: 98132 - DNA, 173 bp, Glycine max
agctatctcgatcgaactgtccaaggtcctgtcaccggggctacgcagcctatgcgttaattctcgttcagtccccaagtgtgtgtggtattaaagttatcggttgtatggttcactcagttatgtgttaatcaggttgtcgcattttggttagggttggtcttgttacaaag

SEQ ID NO: 98133 - DNA, 146 bp, Glycine max
ctagctatctcgatcgaactgtccaaggtcctgtcacgagcaattgcaaatagattaactagcacagcaaatacatttaacactggagcagagagcgggagagatgaataaggatagtataaattggaactgcaagttaatgagtg

SEQ ID NO: 98134 - DNA, 259 bp, Glycine max
agctatctcgatcgaactgtccaaggtcctgtcaccctggtggtggtccacctagggtgccgcggagggcccgttgatggttgttgtgatcgtggcgcattggttagatgatagtaaagcagcaagcgctggatgagtgggtgggatgggggtggaggtaggtgttagcaagccatgagggcgcgtaagacacagccagcgaaagcagcgaggcgagcatgtgtaatagcggagaagcggtaggttgtgtgttgaggtg

SEQ ID NO: 98135 - DNA, 296 bp, Glycine max
tctagctatgtcgatcgaactgtccaaggtcctgtcactgtagtttaagccaaggcctatgcaaaaggctgacgaaaagtcactgaacacacagggctgcgtgagaggaggggattaagcgccgttacaaccgcagttgaaaatgccccgttagctaccaaagttgtggggcctacccttcatcagctaaagcagcgagcagcggcggctgacacaaggcaaagtaagctaatggatgcacgcgtatttctaacacgattgtaagggtgaggcttggccgaagtcacaatatggga

SEQ ID NO: 98136 - DNA, 396 bp, Glycine max
aagaactaaactacaaacatagaccactagcaatggctttatttgtttccaaattggtagtttcatagacaggaagctcttcttggtaccttgcagctccaataagatgatccagctcaaacatatctgaacttgaacaactcacatcatcatcatcatcttcatcatcatcatcataaaaacctctaaaatcaaattcaccctgaccagaatttcgataaccttttacaaaaccacgcgctgctgcttcttcagctccattttcatttccccgagcagtgttcttcttcagctcctttatggaagaacttcttacaccaagattaggttcactctcgtaaatgatgttacatttatgataactagattgtggttcagaatcctcacctaggatta

SEQ ID NO: 98137 - DNA, 296 bp, Glycine max
tagctatctcgatcgaactgtccaaggtcctgtcaccgcctaacaacacaagctactggaacaatacaacgcaggctaacactagtgttgagtgggatacctaatggtgtaaacgtaatagtggttacgggctgaataatgccagacaatgctaaaccaaaagttaagggtttagtggtacggcgtaaagcaaacggtagggccgtgaagatggtgggtggtgtcgcaaggttgcgaaggggtacagccccgccattgtttgcatccgggggcaactggacgacaacagtgagtta

SEQ ID NO: 98138 - DNA, 276 bp, Glycine max
ggaaccataaaaaagggtttaatttacgggaaaaaaaaacgggaaatagcaatgaaagaaggggaatttttcataactccatacaacttaggggatcagttttaaaaaccagattttaggggcatgaacgcaacctttacgcttggacccgaaacaggactttgggcaattaaacctcaaaggggtttgggcatcgaaacctttaatttttcgcacatggggcctagcccttaaagaaatttaattaatcagttcccaaaaaacgggccaaataat

SEQ ID NO: 98139 - DNA, 314 bp, Glycine max
atagtgaaatacttttatttatagtagtgattgattggccatacagaattttctagatcgacattttccatttcaattgaagcttttacagtaagaggagaggatgattctatgtacaaagaatacattggatgatggattattttgcctcctctctacttctagaaggatgtcagaaaggtccgtagtcatatagaagatgtagttttctacgcttctaaattcttgagagaagccagccagtgttccatgtaatttttgccagcagaagaaaattcatttggaaggttcttgatggcactcaaaagctcctt

SEQ ID NO: 98140 - DNA, 300 bp, Glycine max
tagctatctcgatcgaactgtccaaggtcctgtcaccggaaagacaaaacaccacgggcgacaagcctaatcagtactctccggtacgccacggttgccacgggttatccgccggatggtattacttgttcctaacattgagggttgtcctcctcgtacccacacaccaggcatcaggcaccccaacggtagaaacggtatacgtagaccacgagatggccaccagaaccatcgcgttagtatgcgttgtgaacgccaaccgaaaatggtacaccaaggacggtatatttgttatggtga

SEQ ID NO: 98141 - DNA, 348 bp, Glycine max
  unsure (1)..(348): unsure at all n locations
tagctatgtcgatcgaactgtccaaggtcctgtcaccgttacgcgtgtgggtaaacgctgctgctgcttagtaggcgattgcacgtgacacgtaccgaattcgtagtattatgcttacgatccgattagcctgcactggtaagtgggtcgggtccgttatttagaggtgtatggttttagatacaattgctttgatcacgcggtaacttttaagttctggtgttgttgtcgtttcctcgtcttagtccacatggtcgttgtcattgtgttcaaagtgtggttntgccgtgtggtcatcatttgtgttgtaaaaatgttcagcgtggttgttacttgaagtgaaagaac

SEQ ID NO: 98142 - DNA, 338 bp, Glycine max
cgaactgtccaaggtcctgtcacaaaaagcggctactaggccgagcggaagcacagctgcgctggcagacgccaccagcagcgtgttgcgccgtgggtaggaacgtagcattcgcggcagcagtacaactataggactaattagcatctcgattagcatcgttcttggtcgcattacgtattagcccgttatttaattataattgtggtgaacgtacagatagtggtaaggttagggtgcatagcgatagagagaatagatgaatagatggaaggttgtgcgggaaggatagatgctacaaggtcttgggtagaacggtgggtggcgatgggggtaat

SEQ ID NO: 98143 - DNA, 340 bp, Glycine max
agctatctcgatcgaactgtccaaggtcctgtcacggacacggcgcagtaatgatcggatggtgtgtggccggggtggcagtgttattggtattacggccaagcctaaccgactgatggtaactaacaatagcagtggcacaacacaacactgcacctgctgaccaggacccacaaagatttgcataccaggttccgaaggcaccacaacctgcaaacaacgcatagtttaacgaggcataacaacaacgattggcgtttgctgcatggcatgcgacatacgggcgtgagggcagttctaaaccgaggaaaggaacgctacaaaacgtaagtgggagagg

SEQ ID NO: 98144 - DNA, 182 bp, Glycine max
gttaaacgtgacgccagggtaaccccgttgtagcagcggtattggtgacaacaacagactggcaggatacggacgcagttgtgctaaaatgggggagtgctgccaaagggacggaaaatacagggcgtttacgatataatagggcataggatgcgaaaatgcctactgtgcaaggtgctagg

SEQ ID NO: 98145 - DNA, 149 bp, Glycine max
aaccgactataggtgcattcactggcaattcatttttaaccaagtccaaaggttctttctttacttgcaattcgattttaaccgaatccaaaggggcttttactggcaattcatttttaacccagtccaaataacctcctcccatgttg

SEQ ID NO: 98146 - DNA, 185 bp, Glycine max
tgagcatggtctagctatgtcgatcgaactgtccaaggtcctgtcacgtggccgcccgggaatacgtggggatgtgccccagcggggcggcgtttttggggctttttaggagggggaaggggctaggagtatttggaaacgggtacatgggcggcaggggccggctagtgcaaacctcgaattgg

SEQ ID NO: 98147 - DNA, 268 bp, Glycine max
ctagctatgtcgatcgaactgtccaaggtcctgtcacctaactgacaaacgtgcgcgccggcagcaagcgccagtttaagaacgccgatgtaaggagtggtttgcagttccatacacagggcggcctcggggctagcaggccgctcaccatggggttaatcgatttgacaattgagcatggccgctagctactaccatggtgcgtttggcaaatgcacaactatacacgtgttagatggcattgcggtaggcacagacataccagatg

SEQ ID NO: 98148 - DNA, 287 bp, Glycine max
tctagctatctcgatcgaactgtccaaggtcctgtcacaggtatggcattgtggtgttcctgggcggcccagatggctagttgtccagcgggacgtaacaatgaggttggtgttaggggtatgttatacattagcggccatggcaaccttaggattatgcctgctgctactgtagacgctggcgtgtatgacgagtagtgggccgtgataatgagggggttgaataagggtaatctcctgtgctcgtgggtgagggtatgtagtggttaaccagcgccgggagaaat

SEQ ID NO: 98149 - DNA, 165 bp, Glycine max
tagctatctcgatcgaactgtccaaggtcctgtcacgcacaatcttcggggcgtgcacgggtgtgcttattaaatattgttcgtaaagatacctcgtccttcgttacagtggctagtaacagccgtcgtaatgaaaatccggccactataggcggttgcggtaac

SEQ ID NO: 98150 - DNA, 227 bp, Glycine max
cgaactgtccaaggtcctgtcacaataacggcagtttattagctaggtaccttagagaactggctcctatgcaaccgccaccaaatagctcgagtggtaggagagcgggctaagaacagaggtaagtccagtagcattagtctgcatcagcgaaaggatgagcataggacaaacaaacgcgcccacagtgcgcggagcatggtgtgcgcacccaccagggtggaaat

SEQ ID NO: 98151 - DNA, 289 bp, Glycine max
  unsure (1)..(289): unsure at all n locations
tagctatctcgatcgaactgtccaaggtcctgtcaccttatggctgcagccaagtgtgaataagcaacgtaagcagcaacgtatacggtgggctaatgcaagccagcggtaaccggctacacccggctaatgctatgggatagacacgtacggctcgcccaggtacgatagggtacagtcgccacntatantagtgagtacggcagaggcacgagtggacgaagcgctgggtgctgtgtgtaagcttaagtttgttacggtgcctgataggttaaacgcagtgggtgat

SEQ ID NO: 98152 - DNA, 223 bp, Glycine max
ctagctatgtcgatcgaactgtccaaggtcctgtcaccaccagcacgagctgctgttgttggtgccgccaacgccgctgccattttaacaggcaccaacgccatgaaagcgacgggtgggttgttagagattgcggggaaaaatggaggggatgggacgtggggggaaggcccaggggaagtctagcagggggcggccagccgcaggtaaatgagggggtttg

SEQ ID NO: 98153 - DNA, 211 bp, Glycine max
tagctatctcgatcgaactgtccaaggtcctgtcacaaggacggtaggtgtgggctctgacggtttgattgtgttgggtaacagctacagtggtcgtaacatttgtattccaaacattagtatttggcacgccaaactgtgcatattagtcataatcgtaacgttaacagttaccataccaaccaaggtttttcagtactaatcgtgtagt

SEQ ID NO: 98154 - DNA, 274 bp, Glycine max
acgaaattataatatcatatctatatatcacatcacatgtatatacaaaaaaaaaagatgctataagaggggacaatgaaatttggcaactagtgtcttaggtcctttaattgcttttttaaaagtaaatgtccataccgtatcctttcaagcctactctcaaccatgtacatttcatctttgaggcgatgaattcttttctccagccacgctatgtctgaaggacttctagtgacctcattgttcatcctgttcatgatgtctacaggagtgt

SEQ ID NO: 98155 - DNA, 76 bp, Glycine max
aaaaaaaattaaaaaaaaaaaaaattaataaaaaaaataaaaaaaataaaaaacggttcggggttctagatcgcaa

SEQ ID NO: 98156 - DNA, 329 bp, Glycine max
cagacacattgcagctccagcttttcccttgctttcctctctcacacagcctgtcatgcctaattattaaccctgtgattctcttgttttaaaatttgagccggttgttttgttgtttgtgtctaactaatgggttgaacaagaacaaacaaccaagagtttttgatgatgtttctatgagctttctccaaattccttcttgaagtgcactatcttggattgatccttcctttaactttccttttccaaccatgactcaacgagagccattgagaattggccacttgttttgttagaattggttttatattagtgaaactaacctatgg

SEQ ID NO: 98157 - DNA, 436 bp, Glycine max
atgggttcagagaagcaatccaaggcggaagaagaagaaggtgaaatcccggtgctaacggtgctgaagaacaacaccatcctcaaaaacatcttcatcgtgaacaagcccccggaggaacaggcacgtgccgatcacgtggacgtgctccttgttggtcgtcacccggactgcgacctcatgcttactcaccccagcatcagccgcttccaccttcagatccgctccaaacccttttccagaaccttctccctcctcgacctatcttccgtgcacgggacgtgggtttcggggaggaggattgagccgatggtaagcgtggcgatgaaggaaggtgaaacgctgcggattggggtatccagtaggctttaccgtctgcattggattccgattagtcgcgcctatgatttggagaacccgttcgtggcgcaattgg

SEQ ID NO: 98158 - DNA, 365 bp, Glycine max
agtaataaattgtaaaacaattatcattatactgacatctaaggagaaaacactgaaaaaatattttgatgtagctagcgatactattcacaatccctgttgcgaggagggttttaaaacgttgctaccaagctaaataaaatattgattgctatatatgtgtaggtaaatgtttgcaagatgaataaacttaagacattgctaccagcaaatgataaaacgggtcaatcaaaactgttgaacaggctcaactgaatgccactggctcagagcatattgagagttgtgaagcataatgagctttaaaccgtttgcaacaccctttgatggcttgcttaaacgaccatatttctaccttaagacta

SEQ ID NO: 98159 - DNA, 190 bp, Glycine max
acaaacaaagctagtagtcaaaatcctataggccccattaggcgtggagaagaaaagaacaacactctctaataaattgaaaacagaattttcatgtattctactatctcttattttatcaaccaccaagtgaaaccaattttcagtttcacctagtgccactgagctagctagctttagctgcatgccg

SEQ ID NO: 98160 - DNA, 432 bp, Glycine max
aaactagattgttctgttcaattatattagccaaattaaaagggataatccctacagagattcattttatgtcagtctaatttcacctttagtgtggaaactgcatgtggagatagatgacaacagacacacatgaataccctttcaaaatctgaagcctacacaagaacaaattacatttccttttctataattctacaaagattaaacacacttcaagttcacatccaccaaaagctatggtggttgatataaattagaggcacaaagactccacaaaaatgatgcaacacgattcttcattgaaaacatcgaagtgagagcccctgtgaatcttgttcaaatggcaacccaaattaacccattttgcaactgtcccagcactgctactcggaactatttagtctagaatcctttatagcatgtatttac

SEQ ID NO: 98161 - DNA, 387 bp, Glycine max
aaaaagtgatcttatctccaccttatactattatagaatgaggcaaaaacatttttcactcacaatattttcatcaattaaactctaatgtgtaagaaaagggctaatttacaaaacaaaaattatactctatatgtttatatggaaaaatcaaaaagccaatttcctaaatctccaaaacacacccagtttggacatggcccctgaacccctctgggctctccagtttcctcccattgcaactcttcacatcgaacgcataagccacgtggacttcaccatagccgctggatccaatcaacaccagcgtcccatcaaacgccccaacgtacgacacgtttcgtatctcccccgggagggacgccatcttctgccacgtgtccccac

SEQ ID NO: 98162 - DNA, 279 bp, Glycine max
attaaacactgggtttttactcattcgattacctgcagatgctagaaatattatgttcgctggctaaatggaatctgccacgctagatatcgcataagcatctactactaccttataaactaacttgtaacagggaagttatgaacccataaaagtaaaaacatggaagttagaagccaaattcgtacacaacaatacaaagaggaggctttactaaactaaattcacttctttcttttctttgggggctgcaatgcttcctcatcttcctcgtcctct

SEQ ID NO: 98163 - DNA, 270 bp, Glycine max
cattcgctcggaacaagaacgtggaacattggtatcgcatgtgaatgcaccttttccacactgtttggtttattaactgaacttcaaatgtgggaaaaggaaactgaaatgggagtaatttataattggaactgcaggaggagttttcagagtatgagaaaatatctggaaaaagaaatatgcattaactttcagatcttttatgaccctgatccccattcgccctttggatcatcagcgtttttttgactttgtgcaaggcatgtttaa

SEQ ID NO: 98164 - DNA, 328 bp, Glycine max
gcttgccaagaagttgcgcagacattgccccatctggtgttggaagtcattaatagtgaagaggacaaagctgatggtatagagattctgtacatgtatcggtctctggacgggccacgggatgatgctccaaaagttgttaccatcctttgctgattctttgaaacttaactagtttttagataaacctgccacaagattgatgatttgtactgtcaatgtcagaaaaagttgagctaagaactcagctgtttttggccaacactgttgtgaaggcaggccatagaggactatagattctattatgtggcaaagcatttcaaattct

SEQ ID NO: 98165 - DNA, 443 bp, Glycine max
atccttccccttctttgtttccgcgggatcctccttcacaaactcagattgcggctgcggcttctgctgatcacccgaaaacttcttcgtggttttcaaatccttaggctcgtcaccacccttcatgtttctcttgttccaaccaaaccataccttcttctctttaaccccaccaccattggaaccattctcatgcccatcaaaccctcctccaggctcctcatcttgacaaatagcatcagaattccccattcgaagcgcggaatccagttgcatcctctcctcagcagtcaacacatcatcatactgatcatcattgttgtctccattcaccatactctccccatcatccacagcaaaaagctcctcatcggtcattgccccgggcaccctactggactttacactcaccatcacatgaagcatgtcatataccctagcct

SEQ ID NO: 98166 - DNA, 439 bp, Glycine max
cttattgtagcataggttggaaactctattctagcttttaagtcttaccaagttgtgacacatctttgtcttcattaagcaggctcaattcaacctgaaattccaatgccagctcatattttttctaaatgctttaaaggaatctgtgttatagcgcacttcaatgtatactatttatcaggtaccaacttaattgggccagttacaagttttgtattcatatgtcactgataatatgtcttatcagtttttatattgttaagactgaagacattttcatctgtggggatgtttcttatctttttgatgaatgaatttgagtcttaaattatattctttattagattcagcttgaggctacaagtctatgactacacattggtttgtctggtaacaatttttggccgacttaatgtaattgactcgggggaatttatat

SEQ ID NO: 98167 - DNA, 493 bp, Glycine max
tgatgatctgaaagaggacaatcaattatcatttgaggaatacgagaggtcatgggaacaaaatgaagaattaggtctgaatgatatagacacctcttctgccgatgctgcttatgaatcaacaaatactactaaaacttagtgaaaattgtgtaattatttcttctcacacccccaaccaaaacaaatggagggaagaagcagtcaggaaaggaagaatttttgtgccaatttgatagcaatgagacaggaaggatggagaagtcaattgtcttaagcgtcatgtaatggctgattgatttattaatttgtaagcaagttcatcgactagtatcatccttctgaaatagttctgtcgtgaaagatgtaatctcctctgaactggcaagttaattgcttatttctgcttttgtagtcatctgagattgtttattttttaaaaaattcttcttcccccctgccccctttttttttattggaggggcgatgatta

SEQ ID NO: 98168 - DNA, 349 bp, Glycine max
gtgaaatggagctaatttttttttaatagagtttatctgtgatcttgcaccgagaaatgagtggctcagatcagcagtatctctctgttttgttaccggcgcttctcttgttttttttttcatggttgtttctgcggatgcagagcaactcatgttatacttaatgtcttaatcataaaaaacataactgatatgcacggcaaagtttgacattgtgaacacttctcatcctacttttgaaatccactcttttatctgctaatttgttatctactctccttgtaatatggatgtgaatgaataatattcggaagattagttcgtaaaatacaatttctattttatttgt

SEQ ID NO: 98169 - DNA, 515 bp, Glycine max
caggatcatgcaaactatgagtctgctgaagatgatgatggagatttctccccatacaggagtagaaggcctcagtctcaaatggagcatagtaaggaccaaaattttgggagaaacaggcaatctgataactgggagaaagttaaccttcttcgggataaatttgagtatgacagagagagaagaatgagagagaaagcatttgcgcccatgcatggaggatctgtgcctgactctcatgattcagaccgttggaaccaaccgctaaataccgaccgatatttcagccaaacagaacggcattgagaggaaaataaactaaaccttcctgccattgtggaaagtgataggatagttttccttcccactagctcaatgctatatatgctctgccaatatgactagttgcagttaattctggcatattgttaaggaagtgtttacagctagcgaaattgatgtttttggttgtgttctgaactgaaatatgataatgtattaatacactgacattt

SEQ ID NO: 98170 - DNA, 255 bp, Glycine max
aaaaaccctaatccatagatatttttatggggtcatcattatcataaacaaaccggttttcaaaagaaagatcccgcccccggggttggcccatgggggttcccaaaacccccaagctaacaaaacaaaaactaacccatcctggaaaaattaaagaaataagaaccccccccaatgggggcttacatttttttaacctttagaaccccccaatttttcgaaaatttttcaatggtccctgaaaccggttgaccc

SEQ ID NO: 98171 - DNA, 361 bp, Glycine max
aatactaatgataaataaaccaagttccataaactatcaaattcggggtaacgcgacaccatcaatcattacatcaagacaatttcagggaggaaccaaaatcctccctcctaaaacaatcaaacgcaattaattatctaatctcatcatcttactaatttaacacaacaaaaaagaaattagcaactatagagtaataaaaaaaaaccgtaggtcaggagtctacgttgttgccgagcacaaacgagaagatttcccgaaccggagagaactgaacgagagcgatatccatggcgtaaccggaaaccggaagcttgagttccctcaagagggagaaagcctcaggcattctgtttttggg

SEQ ID NO: 98172 - DNA, 311 bp, Glycine max
gaaggctgaaggggaaataaacccccttttcaatcaaactaactaaaattcttggggttataagaatttttatttccaaaatttacttcggttctttgtaacatgaccaactggccacatgatgtcaaaccaatttcgtaatttaagaaaaaggaacagaaaatgtatacttggggttccatatgaaaacattttagccaaccttttaccttagccaccatttttgaattgtaaatataggagttttcaaaaatggcccatggggttggatgagcggattaaccgaccttccaatttgggcccaaacactt

SEQ ID NO: 98173 - DNA, 334 bp, Glycine max
ggggaaaaaatatcggccccttttctccttaaattgaaaattggacccaaaggaaattttattcccattggactaaaatacccccgattaccaaccggaaatttttaacctaagggtggtttaaaaggtttcccttaaccccccataacaaacttccctttaaacagaaatttcctttgggggggccctttttttgtttaaataattcccatcttgggggccccatccaggggggcataatcagggggcaacccgacataggcccttttgggtccatcaggcctgccacaaaaaaattaaaattttaaaaaaatggccttttgtgtaagtttga

SEQ ID NO: 98174 - DNA, 377 bp, Glycine max
caaaataaaatgcttcacgtatataacatgtagaaccaatagtgcataattgcatattgataagataccatagattgaaacaagtgcttgctgagattctcactcccagcctgaattcaatcacagcataggatacaacttcaataagaggtacagttgggaaaataaaccaataacgatgtgaaaacaaaatagaagacaacattcaaaaaacgttttcttctccacctcacaaaaatggttcccaacaattgcctcccttcccacatatctaaattcatctcagttttttatagctgctggtgtttcttgtgatcagtgttcaactcagatggggggcgggagggacatcaagagtgattccagcttggatttgt

SEQ ID NO: 98175 - DNA, 379 bp, Glycine max
caagcgaaattgcagttttattattgaagacaagcaaagtggtctgctaagtacaattcaaaagcaagacaagcctacaaaaacaaggacttgatttaaaagggaagaaaaaaaaatagcaacaaatggacgccctgccaccacaccaaagcccttgaatatgaggtacctagccttaaaattgcacaacataaccacactgacaagaccaaaggaagacaagctaaagccttttccacactctaaggcatggtgaagatgcttgattagtataaactaaaaagacagaagactttaaaagacatgaactaaagcttaagtctaagcaacattatagcaaatgtgcaacagaagctaaaacatgctttttattgtcaac

SEQ ID NO: 98176 - DNA, 314 bp, Glycine max
gacgaaccacaatagcgttaatgacggaaatagaatggccaatagcaaaacatacataagggggtgcatgtgtgtcttaattaaacgggtggaaaaagcttatcaagtttgcctggtaaagaatagaattcatcattcttaacatatgagctgtacaagccgaacctctcccaccactccaaaccgatggctttaggtgccgcatcatcttcacgggacagtgtgcatccaaaatgaaagcaaccaaggcagcaaccatctaagaacttcataatgttgcttcagatgataatattctgtgaaatattgtggta

SEQ ID NO: 98177 - DNA, 344 bp, Glycine max
atgtgtgagaatcaaaaacatattaaaagacttataataatttatatatatttttaatcaactgagtcgcacttttttgttactaattcacttaatcaccactttgaatctcacatttcttttaacttacgaataagaataataataataataataacataggcccatctacctgggcctaccggcattggatccaggcccgggataaacaggcccaccctttatagcaccaccagccacttgatggaagccggcagaaccgtacacgtgtccctgatgcatcatgattccaccaggagcagcagcataactaggactctcgtaggcactgttggtagcattgg

SEQ ID NO: 98178 - DNA, 258 bp, Glycine max
gggggggggaaaccccatattaaaattttatttataatttccattggtcactgatcagctttataacattttcaacggaacactttttaatttcattgcagcccctttttttttgaatagattattaagcatgcctgatacataaagattcaacagcctttgttggaaacttttttccaattcagtttcttgagaaattaaaatactcatgcaactatcactttaaacccttttgcagcatgatttttaaacttttac

SEQ ID NO: 98179 - DNA, 440 bp, Glycine max
cccagagaaccatcatgtagatcaataagcagaagccctgtgagaacttgcagtgataaaagtgtcagtagaagtcctatgggatctcatggtaatagaaatggcagtgcaagccctgtaagatccctttatctgagtcatcgtaggagttcaccaagagcaccatcaggaagatcaattagcagaagccctgtaagagtgtcaagaaagagtataagcaggaatccagttagatcatctgccagaagcttgagcagaagctctggtagagtccctttgagaagcattagccgaagttcagttagagcaccaagcagagtcaatcgccgcagttattctaggagtcgtagccctgtttgtagggcaaggactcctcgtggtaggagcttgtctagaagtgtgtcacctgatgtttctccgaaacgtatcagaaggggaag

SEQ ID NO: 98180 - DNA, 474 bp, Glycine max
gtaatcattcctctctctgaaacttgaaatttccatttgcttcttccctggacagtttctttttctcctctctcggtcaaacctcattcttccactaaaacagcgaaaattccacatgtgagagtggaatcaagttgccctcatcgttagcttcacactgacggtttccatttatcgaatcgactctactttagcattcatgtaactttttgtgtgaaccatcctcctttcatctttccatgacgttcttttctctaattaaggaacagaaaaagagatcttatcgaccggataattgacatcccagaagagattgaacctgagttggggtttgaatgttgtatctacaaggtacctactagtcttttgaatgtgcaagaggaggcctatactcctctattgatctcaattggccctatccaccataacaaataaggactaaatgaaatgcaagagcagaaacgtaaatatttt

SEQ ID NO: 98181 - DNA, 436 bp, Glycine max
attgttcagtaccggggatgcaatgtggcgtttgctaatttgtgacatgaacgtgtcacttgcttgtgcaatggatggtgacccttcaagcagtttaggtagtgatggcattgctgatggctgttcttctgttcagactgaatcacagtcaaaattagaaacaaaaggtcctgaattgagtcttccaagtccttgtaaatcagtctcctcaggttctcaacctaagaaatcctctgtggaaggaaatactggtttggacaagtcaaagaattctcaaattcttgttggaccatcggagaaagaggctgcaaattctggacgtgattctattgataaatcatctagtacttctgggacatctcaatctcctttggtggaagaaaagtgtggaaatattagaaaggtccattccagtagcactaagagagactacatt

SEQ ID NO: 98182 - DNA, 388 bp, Glycine max
ctgtatgacgtcctccttctttggggggggggggggggggcaaactaaaggacgtttggaatgcacgcaaggatgagagcgagcatgtcccaacgtatagggcggtaggtaaagttacaataagcagcgtactgtaaacgcattatgaaggaaggagagagagcagcaagggtagtaagtcgtacgttatggagtttattaagggtagccgaggacgaagcgctagcataggcattggacagtagggcgagccaacgtgataataagcgtgaaggaaataaagttcacattgggatggaaaggggctgcatgggtgtggtggcagagaggcgcgttggttatagtatggggggtagtaccatcagccatgaaggaagttggaggagga

SEQ ID NO: 98183 - DNA, 280 bp, Glycine max
tgtatgacgtcctccttctttgggggggggggggggggctggggggaatagacctggtgtgtggaaggggaggaaaagtagggggggctaatgtgaggttaaactgcaagataccaggactaacgacagaaagaacagaaagcggcagggcgagttgggtactgaaagggtgactcgcataacaaatatataaacagtgacaaaacatacgcgaatagggcacaatgttattaggtatgtaattgcggggaagcaaaccaagagtgcgtaggaaaaagtg

SEQ ID NO: 98184 - DNA, 237 bp, Glycine max
tgtatgacgtcctccttctttgggggggggggggggcataagaaaataagtatagaggggggtctggcagcagaaaataacaatacaataaatcggtatagaatgtatacatattatggggttgatgtaagatatactgtaacaacaaaataatagaaatacaatgttatagtacggctcgctggcgttgtaaaatagaggacaaatggccacaaagccagcggtggtaaaagtaaa

SEQ ID NO: 98185 - DNA, 414 bp, Glycine max
ctgtatgacgtcctccttctttgggggggggggggggctatagaagtggagtttagggggggggagaaaagtaggggcaccaggataatagcaggggatagcaataagagtagaaaggactaacctagcagtaaggctaggttagcgtggcttataaccaagggtagttagcggtgtttacctaaatttagtagatttgggtaacgcgggctcagcgtagatgtagtgttatacccggtaatatgttactgttgggtggtaaagccccagcaggctataaaagttagagtgatttatgttattttaaaggtatggcagcagcaaggagtttaatatgttatgttagtaagtgtgtttacggaggaggttagcagcacacgtatatgtgggagaagaggagcgtgtagtaagagg

SEQ ID NO: 98186 - DNA, 351 bp, Glycine max
cccgtcatcactgtatgacgtcctccttctttggggggggggggggggggggggaaaaacaaaacaatgataggggagtgggggagttgacgcctacagaggcaatagttgggacgagggcggcgaccacactgataagtataggggtggtggtagggctaacttaaatataagagcaactaggcatgctattggtgtgggggagaacaacagatacaaaacccccaaacaagaggaccggccaacaacgccaaaaagcaataaaaaaacacactgctgagtagttcaaataaaagaccggtgcttgatttacaagggcaaatacgtttgggccagtggggggtgaaactg

SEQ ID NO: 98187 - DNA, 144 bp, Glycine max
caatctggtcttacataaaaattataatgggaaaacccaattatttctggcaaaatatagcaaatatacttttcgacacattttgggggtctacaattttttccatgggatcatagcaaattaaataaatgggtaagggctcaa

SEQ ID NO: 98188 - DNA, 232 bp, Glycine max
tcactgtatgacgtcctccttctttgggggggggggggggtaataaaacacaaggttgtaaaagaaatggtagggaggaatactaaggaagggaggataacgtaaggtggtctaagagattatacaaatagaacttgaaatgactaacttaaatagtggtagaaagaggcaagaatgcgcggggcacgttacccgaggtaatgcaatacacgtgaggtgcgaggaacaaagg

SEQ ID NO: 98189 - DNA, 250 bp, Glycine max
gtatgacgtcctccttctttgggggggggggggggggggggcagcataatcatagtaagtcaagaagaacccagtgcaaccgaataagcgaaagaaagcgaagcgcgatttaaaatacccgtaaaacaaaaacaaataaaaaaccaaaagaaagcagataagataacaagagaagaatactaataaagttgggtgacaacattaaaatacccgactttaatttaaattgaacttgttgacaattggtggt

SEQ ID NO: 98190 - DNA, 278 bp, Glycine max
ctgtatgacgtcctccttctttggggggggggggggggactgcgccaaaacccaggaggcaatccacagggatatggaggggacgtgaagaaattagacaagcttataattagcctgcggagaggaatgaacataccaatggcaaagcaggtacatgctaggatgatatacattgcaacgaccagaatagtatatatagggaggtagatcaacaggataggagggccagagggcgaggcttaaatataccgtaaggataggggtagatagaggttgga

SEQ ID NO: 98191 - DNA, 388 bp, Glycine max
aagcaaatcaatttggagcacttcctcccagccattcttttctgaaattcaggtttcagtagaccatggcaaactctttgaaggggtagaatgcaacagaatgttctaaaatctaccaacacctacctgacaaattgagaacctagcacccagtgtgtttagtaaaataaaagcaggaacttaacaggatgtctcagttctacgttggcatggttatatacaccaaaaaagtaaaatgtttaccactcttatctacagatatccattttggccaaagcataacacaattaaaaagccatgatgccagttaagcactctgaaagaaatgatatttcagtgacttccattgctgcctttcttctcggatgaaactccacaaccaaaggta

SEQ ID NO: 98192 - DNA, 384 bp, Glycine max
tgtatgagtcctccttctttgggggggggggggggccagaccagaagtacgaagggtaaaagtactctacggggcggtgtggagtgcagcagagccgaagcataacgacaagatgtagctagtttgcgtgtaaaggagtacgaataaataacgaaaataaaagggccggcaaaggcctagaaaatgaagaaaatcggtatatgaaccagcgttgagcctagtatttgaaaccacagtcattaatacgtaaaacgtcgatagtggcaaggcgattaatggttaccaatgaacgttaaagacaacggtagaaaatatgaaaaggaagtactatttgggtttggtggttgtgccacgggtggtagcgaaaatgttagtgttggattg

SEQ ID NO: 98193 - DNA, 270 bp, Glycine max
  unsure (1)..(270): unsure at all n locations
ctgtatgacgtcctccttctttgggggggggggggggaaaaaataagagggggggctggaggagcgggtccagagtaaacagccaaaccaataaaggaagagcaaactggtgaaagtagaatttacatacttctacttaaacttggaggcaaagtaagcacgaaggggccgtggaattggtactttaagcctaggcgcagttgatgaaaaaaacaaaaaacacntgttgagcgtgattataaagcgaaaggcgaagcccaaaaagttaaa

SEQ ID NO: 98194 - DNA, 328 bp, Glycine max
ggtttcccgtcatcactgtatgacgtcctccttctttgggggggggggggggtttactagacgacgggactacgagttgtaagtgcttcggctgttgttgtaactgtagtggtaccatcggcttagctggccaactgaggtggttcggcagccaccattacaacgagttacgaattattaccgtgaacaatttccgtaatggttggtagcgatgggttagtagggctattttaggcaagtacgtactcacaataagcgcttagcgtaaaactgttacaacccaacctactaggaggcggttaacaatattaagcaggctgccaatatt

SEQ ID NO: 98195 - DNA, 222 bp, Glycine max
gccaaaatgctactggtaccctccatgaccgtgagaataaaatgatgccaataaattctacatttggtccacaactagcaaactgtttcagacaagttgaaccggggtacaagcaaatacacaccaactggtccactacaagcctaagtgaggaagaaaaacattaacaaaaaaggattaacatgagaagcaatgaaattacaagagacctgccaattaatt

SEQ ID NO: 98196 - DNA, 191 bp, Glycine max
gattaattaggggcttttttttgcaaattccctatatattttggtttatatgggaatgattgggactgaaaaaaaattttcatgggacaacagaaaagaaagcataatcgggcggaaattttagacagacaaactgaaccattaaattcatgccaaaaagggaaaattgaagccaccactaccgatttttg

SEQ ID NO: 98197 - DNA, 279 bp, Glycine max
gtatgacgtcctccttctttggggggggggggggggggggggggggggggggggggggggggactacgtaaaatgggagttaaaattagagggaatagaaggcagaagttggaaccatagtaaatacaaaagttttggaaaattaccgtggggacggtataaaaccagatttgaggagaaaaattgagagagacgttgagatgatggtaggactgataacagaaaagaaatgttatagaactgggaaataccgggtggctgcgccatgttaggattaat

SEQ ID NO: 98198 - DNA, 262 bp, Glycine max
catcactgtatgacgtcctccttctttgggggggggggggggaaacccaaaccactaggaaaggggtagccgtgtaaaaatcgatggggttttcacaaagtgagcgccaaaaaatgaggggtcttgagtagctgcaacaaaacgtaatgagattcagtttgtgatataggcgaatacaaaggagcgttagagagtgcaatatcaatagtggtagactttatcacatattacaaggaggacggttgtgcgtgaggtgtatgtg

SEQ ID NO: 98199 - DNA, 276 bp, Glycine max
gaaggtttcccgtcatcactgtatgacgtcctccttctttggggggggggggggggccagaggacacgatgaggaggaagcccatataaggcacggtaatataaattcaatggaggggtaacccataggaggatacatttaggaaatagtaaacggtggtaaagcggggcccaatatagttaataggatataatcactggaaaattttttatccacatcaccataccgcaacccggcaggttggtgccagcgcgacgtactcaccgttggttagtt

SEQ ID NO: 98200 - DNA, 131 bp, Glycine max
tcggctcgagggagaatagggatgtgtatcctaacctatctgagttgcatttgggtggtgggaatggtggaagtggtggtgcgggaagaaatggggttccatcttcctctccaatgatggatcctaatgat

SEQ ID NO: 98201 - DNA, 439 bp, Glycine max
tattcggcggccgccctttttttttttttttaaaataagatttatccacctttgctttccattttgagttaataattgtagtacataagaaactatttctttaacagttagaagatagtgatgcttccttgtcactgatgatctcatgcaatgacaagggccagattggggcgagagaaaaaatagaaactaaaatcaagttgaaaaatggcagaaagaaaagagtgacatatgcaataaagatacaaagcctagaagaaaatttaaagatttttaaactacaaggtacgtcatcagcctctccaagcccatctactaatatcttgcactcggaaagacacactttcagttcaattcattggattaccatatgctgaagaaccccctaataacccttcacccgaagctgcataaacatcattaggatccatcattggag

SEQ ID NO: 98202 - DNA, 280 bp, Glycine max
attttctgtgggttttagtgttattctctttccagtttcatgtattataagaaagaggcattgaatgataaattattccctcttcaaaatgggggatcctcagtctcaagaaattacttggtcatatttttaggtatgggtcttgttctgtttaaaaccatttgtaataccgtcaaaactatggatattcttgttcctcagatgtgtttttgtgttttattatttaacactcaggaaccttttggtttgattcaattattcaatgtttggatggcactag

SEQ ID NO: 98203 - DNA, 210 bp, Glycine max
ctgtatgacgtcctccttctttggggggggggggggggggggggggggggggagataatactggtgctaagtaaaatggtcttgtacaaaaaagccacacacgagcccactgagaggcgatcgcgggttgatcggacccatattagtaaccataaacgtagttccgcagggcacaggacgcgttattatatgaaattacgggtgtggggg

SEQ ID NO: 98204 - DNA, 217 bp, Glycine max
ctgtatgagtcctccttctttggggggggggggggggactaaaagtgcaaggccgtaaggccagtaaaacaacaaaatacacgaaataaaggcaaacctaaccaaattttcaaactatgcgttgtgcgttggatgttagaatagtgttttgtaaaggtatagtaaatctaatataaacgagcccagtaaacaactaaaaaatagactaataaggccc

SEQ ID NO: 98205 - DNA, 411 bp, Glycine max
ctgtatgacgtcctccttctttgggggggggggggggacataaccaaactaggggggggaatgtaggagcaatataaaaaggataatattaaataaccaaaataaaaaacgcaaaaaaaggccgttgataacaagtttgtaaagtgaaccgagcgaagtaggggtaaggcggccgtggcgctcacgtttgatggttaagccgctgggccggctttttaagacacgtgagtgctaaacgggtaggctgtgtaatgcgtttaggttaagcgtgcaagtggtagtttgggggggcggtgttgtatgggagtaattaaacgatgtaatagcagtaatacgacgtagttattaattaacgacgtaataaggatttatattggccatggcggttgtttatgattatggggttgaata

SEQ ID NO: 98206 - DNA, 285 bp, Glycine max
tgtatgatcatcactgtatgacgtcctccttgctttgggggggggggggggtgaaaaaaaggaatagagagcagagagggaggggagggggataagaatgcgtagattaaggagaagggttaaggccggaatacgataaaaaaaagggatattcagaagataggcaaagtaaaatgtgaatgagaggcgtaagaatattgtaaggggttagttaaaagccatgccacaggatattgagcatagaacagggcgaaaggatagcagaggtgtagtagcaaggggtga

SEQ ID NO: 98207 - DNA, 362 bp, Glycine max
  unsure (1)..(362): unsure at all n locations
cccgtcatcactgtatgacgtcctccttctttgggggggggggggggttaaagtgagccttgggttaggagtgtgacagcatcggaaaagagacgaataagcgcagagagaagaagaggttcaattaaaggaaaaaaaaaaaaccaaaaaaactcacttacggaatgttaactacagctgattcgcacgcggtggtttagttaattaacgtaaagtttgttcggtgtggtgtcatttgaaggttcagtggatcgatgtcggtagatcatcgtagactgtggtgagacgcgtattgaaaggtaaggtatgccttcgtcggggataatggtgcgatcgccaaaatttccntcggatttaatgga

SEQ ID NO: 98208 - DNA, 339 bp, Glycine max
ataagcttgatatggacgccctttttttttttttttttttttttttttttttttttttttttttttttttttttttttttttgttttttttttttttttttttttttttttttttttaaaaattaacccaattgggggggtttaaaaaaaggggccttaacaaagggttaaaattgggaaatttaccggggctcaaaggggaacagtttttgaaggggccccccaaaaacagattttacccctaacggggtcccaatggggaaattttgccttggaaaccaagggggtttttggggcaaaaaccccgggaaaaaaccccccaacaatggcctaaaaagg

SEQ ID NO: 98209 - DNA, 258 bp, Glycine max
ctgtatgacgtcctccttctttgggggggggggggggggaagggagacaagtctggtggggttgtgtgaggggtggagggggtaattggacaaaggcaggtgcgtgtggaaatatggtggtaaatcctagtcgggcccattataaatgtaggtgttatagtaatattattagtattcgatagggttattcctgaatatgtaagtggagcttctaatggttaagttactcttgcatagttatcgcaatacgaaggtatg

SEQ ID NO: 98210 - DNA, 230 bp, Glycine max
aaatgggacaagaaacgtaaaggaaagcaaaaaaaggaaaagatggggagaacaaaaaaagagggggtgaggtaatcgggtcggagttaatactgtttgagatagtaaagtgtttcttgatatgggcaggggggtagtggccatcggcgaattaagaattttgtaggctgttagagggtattatgctgtaaatatgcgatgtaaatggcaggcaaaatcgttggagtttc

SEQ ID NO: 98211 - DNA, 340 bp, Glycine max
tgtatgagtcctcctatctttgggggggggggtggggtgggggggggggtggggggggggggtgggggggggtgtaaaataggaggatgtgggggagagaacgaagggggggaaccacggagaggaatgaagttgtaaagagtaagggcgcaagaagccctaaaacaaaaaaagaacctagaaggtgaccaagaaaaaagtatgaattatgggggcataataaacgaaataaaaataattttcctccttataaaaagggggagaagagatacaataagaaagttagataaggtagatccataaggggggggtggtgagaggcgttattagggttgttggg

SEQ ID NO: 98212 - DNA, 338 bp, Glycine max
tcccgtcatcactgtatgacgtcctccttctttgggggggggggggggaaaacaagtcacgagcgagtagggaaaggtgttttaaatgggcaataacgactgttgttcgtgatgcacaaacttgtggaaaaatcaaggaagtaaggcataacggataagaccaataaacaagggaaataactagagagtgggcggttagcgtaacaagatagttagcgaggaataagcatgaagaagtaaagatatacagtggtacataggaagagtgcagtctgggcggtgtcttatacgatgcagggtgcaccacttgcataaccaaaagtgacccaaatgagacg

SEQ ID NO: 98213 - DNA, 249 bp, Glycine max
  unsure (1)..(249): unsure at all n locations
tgtatgacgtcctccttctttgggggggggggggggaaactgggaaggaatgagccccagggaaaaatgacggctaagcgaatagcaaggcaaaacatactaaatgaaaagactattgaaaagcaaacataaataatggtagtaaggtgaataaactaaatgtaataaaacgaggatggaagggacgtaaatacatggaaatttagcgtagtcgtccatgtggtangccggtggttggtggggttgttg

SEQ ID NO: 98214 - DNA, 230 bp, Glycine max
ttgggggggggggggggacactaaaaagatagtcagctaccattaaagaatataggataataggtatcctaaaattataaataaaatgaatacaaaggaaagtgaaacgactaggcggtataacacaaaagaaaggtcatgaacggtaaacgaaaagaaggtagcaaataaagggaacgtggcgtggtaaatgtccacacaccgacgtagtgcggttggtacgtttggtt

SEQ ID NO: 98215 - DNA, 325 bp, Glycine max
tcactgtatgacgtcctccttctttgggggggggggggggaaaagaaaaagagtaccaagtggagaagtaattaatgaggataaatggtactagaatagaggtgaaaataaaaacccgttataacgtggttttgaaaatgtaccgagacagaattactatcatccggatttaattagtagaatgcacatagctgaaatcgatggcacggctaaagtagaaataattaaaagcaggccaacaattgcaagcgggtaacgccgtcctaatgatggggggttgaggatgatcgaaggaacaattagataaggttagagcagtataaat

SEQ ID NO: 98216 - DNA, 251 bp, Glycine max
gtatgacgtcctccttctttggggggggggggggggggggggggggtaatataacgtacacggtggcgggtattgtagatccgagaggagaagcatggacggataacataaatgagattatagagggttacgttaacaagaacaagagaacagttggaagtggagggacgggtagaaaggggagaagagttaatggagtgaagtgaggtagggaggcgctgaaagaaattatatattaaggtaatgtaaag

SEQ ID NO: 98217 - DNA, 323 bp, Glycine max
  unsure (1)..(323): unsure at all n locations
tgtatgacgtcctccttctttgggggggggggtgggggaatagaaagaggggggctggataaaggaaggatttaggcaacacgataacgtgaataaataagcgaagtactaaaagtcatagctggcgactaaaagtaaaaccggatagtggcaagtgaaaattagcaagattatatttcttgaaaacaaaagttaaaataacgtggccgcgagccgggaaaacaaatcacatgtgacaaaagacaaaacatgtacgccncattgttgagggggcggtggcacaagataaacgtggaaatatgaactgaatggtggtttgggta

SEQ ID NO: 98218 - DNA, 197 bp, Glycine max
gggggaaaaaaaacccccccaaatttttatgggaattataaatgaagggggcaccaagatttaacccctttaaataccgggggaaaacccttagggttaaacccccaatttttatacttaaaaacaaaagggggccccattaaaaaaggcgccaacactggattgacccttaaaattcccccctggggggaagggga

SEQ ID NO: 98219 - DNA, 391 bp, Glycine max
gtccccatgacaccatctcccacacccaccagatgcaaccacaccgcgttgttgccggcaatgcgtcgaccaccgagagccaacttccgccgactccgtaacgacactgaaaccgtcgtctacgacgatccctctcttttcaaatcttgaaaccacaaacacatttctcaaatcaggaaaaaaagtcacctttctctagcgcgcacattaccggcaccaaccaccacgaaccacgtcggcacagaattccgaatccaccactccataacggcgcgacactcagacccaaaccaaatgcgctcaccaaaaaatcgtgctgccagcgtcagcaccgagcaaccagcgccaccgtcttgcgcgacatcatgtcccctaacctttgtcttctata

SEQ ID NO: 98220 - DNA, 333 bp, Glycine max
tttttttttttttttttttttttttttttttttttttttttttttttttttttttttttttttttttttttttttggaaaggaaaagggatcatttttattccggaaaaatccgccccttataggttcaaataataggggaaactaatatggggggaaaagggatagattcggaaactagcaataaaaccccccaaaaccgggtttcagttcaccaagcaaacggaaaaaccctgggatcccaacttttgaaaccccgagttaaaaacccaaattttttcccacaaaggaaatttacaaacccccagccttggcaccaagaaaatttttggct

SEQ ID NO: 98221 - DNA, 217 bp, Glycine max
atgaaacctgaaacctaaagtaaaccgttcgttatgtgaaaatccaataagcactggctgcagtgtccatccatgtagagattcacataaaacttgaagtatggaagcatccatatgaaccgtctacacaatagacaggcatatgctacatatgaaataagggaccaggattgatcaggccatcatttggtaaaactgatccagatcaaggaccccg

SEQ ID NO: 98222 - DNA, 376 bp, Glycine max
aagcctcaaaactaatagtttgtgttgttataaaataaattaacaacatgcgaaactagtgttaaagttttttctagccaagcaaaattgtgcttatatcccatgattctataccaccaagcgcaaaacaagaaatttgcggtacatgattaaagttatagaatgtttatcatgttactgggtctggatgccaacaaagaaacataaagtttaagtactcaacatgagagtcagaatgctagagccattcatcaagagacttctgatcatgaatccgggacttcatgacgccttcatatcattcaaaccacaacgagccagaaacttgtgattctcttcaaagataggagaaaagtcagtacaaaatttctgtata

SEQ ID NO: 98223 - DNA, 112 bp, Glycine max
ggtcttgcttgatctgcttctacctacactccgaacggggaaatgctgcatccaccctatacatattgatgtatccaccaggtgccaaatgacaggtgcaaaggccacaagt

SEQ ID NO: 98224 - DNA, 115 bp, Glycine max
gagacagcaacgacggatgagttgtcgcaaacgcttaaatggtgaaagttctgaagccaaacaaggccgtcattgaccttcagggacgctactcaggcgagaaagccgtgatcgt

SEQ ID NO: 98225 - DNA, 446 bp, Glycine max
cgagatcggagatttgtgcgagggcttgtacggaacgggtggtggcggcggctatattggttccgttatgaaagacggcgaagggagaacgtttaatcttaacggtagaaatggacggaagtttctggtgcagtggatttggagccccgttttgaaggcctgtgctggtcccaatgctttggattgagttccttcatcctcttttttttttttttttctttttaccctatgtatcatacctaatgatgctgtatcatttttattttttttatttctctacttaacgaaattcatttttatttattgctcgatcctttctgcggtttttgatttgagtccctgagctgattcataatcaccaatgaatgggctttaatcaaagtgccatttgagtgttcccaggtttcttctcctttcaaatcacactatcacagttagtcagtgat

SEQ ID NO: 98226 - DNA, 481 bp, Glycine max
ctgataaagacaaacagacgaagagaacagaagaggagggaaacgcagggatctatgcaacttccgcggtttggcataagcgaaatacacaagaaatttttgagggacccacgctgcagaacttcttcactcaaccgagaagaaaggcgaagaaaattgtcttgttcatggcacattcaatgtttccccttcttacctcaacatcttgctttgttgggtgggtcgctaccgtcactttcaccttccttgagatgctcgttcccccgcttgctcatcttcttcttcgaccaagtctgatctattccgatctagcacagtaaaagcttttttaggtcgcatatatggagttccagatccattcaatgctcaacgttgcgccgtcaatggaggccattgtcgccgacaaagtctccaacgtgaatgatgaagtcgttacctgatgttattgcttgttttgcttctgatgggatgtcttcaatct

SEQ ID NO: 98227 - DNA, 115 bp, Glycine max
gtaacttgttgtgttccttttttgttttacttaaactaatgctatgtattcttattatggtcaatagttttatggcatgtaatgtttaggaagaaatgttgcaagcttatctcac

SEQ ID NO: 98228 - DNA, 447 bp, Glycine max
ctacttttgaagaaacaggaacctgtactcaaggaaccaaatgtaaacttcatcaccccaaaaaacaaagcaagggaaagaaaaggaagagaactgcatatcaaaacaacagtagagggcgttattttggttctattcctgctaatgtttctgaatctgggatgatgttggctccaaagcgacatagacagagtggtgaacttgaagaggaactttctgactacatcagcctagatgatgtgaatgaagaagttttagacacggtcgatcaatcatttgagccagcaactttctgtgacaatgactccttggatttacagttggacgattttgatgaacttattaaaccagttcttctgttgaaaacaaagttcacaatgcaatcacctcagtttagtagcctgcaagcttttaggcaagtggcggaaagttaggtgtttgtaaatg

SEQ ID NO: 98229 - DNA, 284 bp, Glycine max
cgacatataacagctttcgaaccaaacctgttccttccttaatggccagaaacatcatccaagcaaaatggaaccactccaaagaagacgaagatgacgagcaagaagaagaagaagaagcattgtcactctgcgatcttccaatcaacctcgaggacccaccgaggaaccaagaacactctcgtcccaacgaagcatcacaagaggaattcaatttccggtcgtggggtgcccccttctccaagaacatgaaatgtgtgttgcggatgaagtcttcttcaaag

SEQ ID NO: 98230 - DNA, 379 bp, Glycine max
aaccccaaatcaagggaattaaaaatttataaaaaaacaatttaaattacagcctcgtcctcacgagaaagcaagaacttttagttacagcacctgcactacaattttattataaaattaagtttcaaattaaaggcaatcaaaacctaatctaatctaaatctaacctaataatcttaaagtaaactccaattaagcatgcgacggaaccactcatcatgcgtttgataacaaagccttttcatcatcatcatcaggatggcttgcatgaagctcctttatccattcaaccgttcgacgacgtgacggaaccttttttccctgcttttgctgcttgggcttatgatgcttcttcaactcgaccactttttctttcgcg

SEQ ID NO: 98231 - DNA, 312 bp, Glycine max
agtacaagtatataaatcaaactttcattaagaatatttatgtgattacattatagctaatgggatccaccaatgaaatcatgtccctccacctaagtggttcactcactcagatgctgaaaccttaccaggctttgtcttgaaaagaagcacaagaaacagttcctgacacctgctggaagaataagctggcttgaattagtagagtagtgaccatagtattgatattctagtgtttttatgtctgaaattgctcctagcatttaattagctataatgtaatcacataaactttcattaagaatatttatg

SEQ ID NO: 98232 - DNA, 271 bp, Glycine max
ggctagtaataatagtggtaataattctaatggcaatagtagtgtgaagaaggatagtgaagatgaggagaagcagatgcagagtaggatgcagcatcccttgggtgataggtcaacaaatcagatgcatagagtggtcacaagtaccatggcaatgcatgctgccaacaagcagcaacagcccaatcaagggaatgaaggaactctgaacttgcagggtccgaaagtgaatggtaatggcaaacaaaaccatcagtctcaccagcaaagc

SEQ ID NO: 98233 - DNA, 466 bp, Glycine max
atctccttgtgcttctcctttggggaaggactggcaagtaatcatcaactagcaagaaaatggatgaagcgggctgcagatcgtggtcatagtaaagctcaatttgagcatggacttgctctcttttctgaaggagacatgatgaaggctgtggtatacttggaacttgctactcgtgctggagaaaaaggtgctgctcatgtcaagaacgcagttcttcatcggctgtcatcagtttcacgtgatcacgctatgcatctagctaacagttggcgcgcattgccatcaagttgacccaatccttatgctgtttgtgatgaagaagttgcatgaccttgatcagtcgtaagagtgagaaatcaacagagaatgcctaagcataaaagcaaggaaagcaggaggagctgtctaagaaactgcctttgcctactaatcctgatatagtggttttcctataatatatata

SEQ ID NO: 98234 - DNA, 137 bp, Glycine max
ctcgcgccgacatggctcgtgacacaaaccctatttttttctccacaatggatctccttcaccaagactcagacggcgacgatcccgactccccctatgaaaaccctagctcccctccgcgcctcctaccgggacgc

SEQ ID NO: 98235 - DNA, 204 bp, Glycine max
tccttttttttttttttttacacaatccccgtatagtgcattaagcgatatatttggtaatatatacattttttgaagtatgtacggctacttaaggatcacgaccctgaaaagtaatgacaaaacatacatataaagcatgaaatatattgcacgcttatgcctgttaactattgcactaagcaatgcaacactagagatgat

SEQ ID NO: 98236 - DNA, 362 bp, Glycine max
ccatcatatcatccatcttctttttgttcctttctttgtgagaatgtgtcgttaaaatagctctactcttaacgcacatgatccttaacactggcaggtacagcactaccaaacaattgagttttcttcctcagctaattgatatcagcaataagcaccaacacagaaggtgtcgtaattgttttcaatgatagatagtcttgaaaactccacccaagctataaaatcatcacccaccaaccttcaattctttagaatcaaccctttcaatgtcctgcatttttcaacaacttcacctacaccctttggtgtaacatgtcagcaactctggatgtccacaagtagtacgtccactacacctc

SEQ ID NO: 98237 - DNA, 248 bp, Glycine max
aaatccaatcatttactaattaatcgacaacgttgggaaaaaaggttgatatttacatggccatactactacagcagagaatattaaataagaaacgtgccaaatggccttattcacgggtccaacaagtgtatgaacatgaaagtaaactcatgttatggcataaatatgatgaagtaaaactactattacccttgtgatgacacaatctgcccttcgaggacactggatggatgctatttaattac

SEQ ID NO: 98238 - DNA, 103 bp, Glycine max
ctgcaaagatctggaactttatggaacatactactagaaacaaccttaacaagatcattccctgcaatgaaactacaagaattctgcaaattaattaaacaca

SEQ ID NO: 98239 - DNA, 234 bp, Glycine max
aattaaaacacttggggggaaaaccccttttattttttgaagccacaaagtgtaggggaaccaccgtgaacaccgggaaaaattaatgggtcatcccaagggttttttttaggggggagacaatgtaactcaaaattttaaaggattacaagcccatttgaacaagataaaatattgggttttatcaagggataccttctttttaaggggagaatgcttaggtcctcagggggg

SEQ ID NO: 98240 - DNA, 207 bp, Glycine max
aaaaccaaaaattgtgcacgaagcatcacttcataaacctatctgattgatacactattgtactcattacaatctgggtctcataactagcaaaatcttgactacacaataatttgcaaagtgggaacgcctctctgttaattaaaataagaactgaaggatgccagagatcaactattgcagtgtagacgtgggaaacagaaatag

SEQ ID NO: 98241 - DNA, 108 bp, Glycine max
ggctgaagttcaggagaaaactttatatatggaataataacaataattgtacatagaaaaagataatggtcgcatctgtatgtatgtatcataatggctttgaatctg

SEQ ID NO: 98242 - DNA, 328 bp, Glycine max
acggtgaaaggatttaaatctaaatggaatgacaacgaagttgagaatacctatcagggaaaaaggtcacaacacaaaccaaatattcattgaaacctattattgcgagaatcatggggagaaaatataggtgtggaatgaaacacatgcatctaatttctgcaatagcctaagattatttacccatatataattctacaatcaagcatcatgttcatctgcatcatcatccccaacattgtcagcttcctctctatcatcatcagacatgttattaattacatctggaattatatccttcacctctgcttttctaggcattaaatcc

SEQ ID NO: 98243 - DNA, 357 bp, Glycine max
acgaattatttgttgtctggtttgctgaatttcatatgccaaaagtgggaatgaaagacaatgagatcctctctgaacagtttcaatgttccgcaatatcaccactctatacacacattttcacacaagtgaaatcaatttcctcccatttatcattaacatcccaatgctcttctacaccatttaggcctacttttttctcaatttctctgtttgtaacttaacactcccgggctgcaagcatttattacagaatcagtgtagttgttaaggatctttctgtaatttcaagcctcactagttgggtagagcatcacaaaacatgtcatttatgttgtctcaaactgatcattgact

SEQ ID NO: 98244 - DNA, 345 bp, Glycine max
tttcttttttttttttgccacgtaaaataaacgcaaatattaaacgggaaacgagcattacaatttatccatcgtctaacaatcttatataactaatctatatataaacctagagaaagtaactcttgtggccaattccaaccacattgtcgttttttcttacaaaattctttgtgaaaaaaatccgggttccaaagaaccaccataatattaattaaaacttacgttaccaaccaaccaaccgagagggttgtacttacaccaatcattcaaggagccacactcactatcaacccaccaaaattttgttttcctgggcccaattcatactcaaatgcttataca

SEQ ID NO: 98245 - DNA, 456 bp, Glycine max
tgataccaaaattttctcacttctgcctccgtcacattctatgcagaccctccgaaccaaacctgagagaaagggtaaacaatctggaggtgatacttctttgtctgaagtgatactgtttggacaatttcctagtatttcactttagtgtgtcattcatttctactccttcatttcattcagcaaacacagtaatggctcaacaggaagaagggtggcctttgggattgagattcttgaactcgagaattgagctgatgagaaatggttccgggtcagcctccttcagcactgtgctcactgcttctcacaccccttcgactgattcttcctcagatcttgacaccgagtccactggatcattcttccatgacaatagcattacacttggcagcctcattggtatctctagcttcttagaactctcaaggagatcaaccaggggaagaatgatgg

SEQ ID NO: 98246 - DNA, 367 bp, Glycine max
atggggtgcagcacgtatttattattttattactatcataatgaacagctggctatgtgggccagaatggagtacagaatataacatcctaatgccttgaaatttaattaccacacaggagaatctcctgaaacggataaagaactcatgacctctgaatgaaatataaatcaataacaagggatcatcacatgttgagttatccacacaaacaagagaaaactattggtgttccttattcgtcactcttccatttctctgttaagatcatgttcaccacccagtgaagcagatggccaatgatcaatttgactccgcactaatagtgaggttgagtcttgaataggggagaaaccattgggtccat

SEQ ID NO: 98247 - DNA, 305 bp, Glycine max
aaaaaggagagacttatattaacaaactgaattgctaaggaatgactatgatcaaaagcatgttgacaaacatagaatctagatgttcttgctaaggaatgaataacttgattggtttgcctactaacaaactaaattgaacagttttcagaacttgaacatttagaaacacagagctttaggatatctccaacttcatttttttggaaatagctcgtgttgatggtgtccactagctgctgacagtcaatttccaggatgactatggtgaagttgttgttcagtaaccaagttataacttgaga

SEQ ID NO: 98248 - DNA, 136 bp, Glycine max
tttcgtcctttttttttttttttgcttaactatccaagcggacacacattatgtttatttaaggattaggggaaccagtgcaagggggggcttcttccatctgtggtcagcgaaacaagtcaaaggggagggaagg

SEQ ID NO: 98249 - DNA, 99 bp, Glycine max
gaaggaaacgcttttgattattaaactgagcactgaagatgagaccgatcaatctttcactaataactgcaagagtaaattaaaactctcgcaaaacat

SEQ ID NO: 98250 - DNA, 143 bp, Glycine max
aaaattgtatactctctataattggagattattacatatttctggcataaatgttgagagaacatttttttttgtttcatcatataaaacatatatgttctgaaagaacacatacaagttcacaaaatatagggggaaattca

SEQ ID NO: 98251 - DNA, 258 bp, Glycine max
ggacccataaacgacattgcattagccttttataagcatcaaattaaacctttaatgataaatcaacccatccaattttggccttcaaggatcaatttgaagttatttgaaggacccttttgataacccaatgaaacgaacattggggggaagggggggaaccgatttgatattgcatgtcttttagggtacaaattcatgtttttgtaaattatggggcaacataatattgttgcatctattttgaaagacccaaat

SEQ ID NO: 98252 - DNA, 399 bp, Glycine max
cattcttcacctcctgctcatatttctgtaacaaagaagtccacagagatttacactgcccaggacttctgctgatcccattagccaacaaattctgagatatttcttcccagagggccatccttcccttcacaacttgaaatctgtcattcagttccccacgcatatcaatcagcttcttaacttcttcatgtttccatttatttctctttgctgattttgaagatttgggttcagaatctgatgtatttacagaattgcattcttcagtgtcttcagaacagtcatccttcaatggggatgacttctcctttcgtggaacataaccattgttagttttaattgacttctcaactggagaggattcaacaaatggtttaaaataatcatttggatcct

SEQ ID NO: 98253 - DNA, 516 bp, Glycine max
tcacaggctcctgaattcatcaaccaatcgctcctcaccagaaactgggaactcctccaccttctcctcgtcggtgtcgccatctcctacggcctcttcagtcgccgaaacgaagaaacagacaaagagcataacaactcaaagtttgacactgcacaaactcttgtgtcaaggttccttcaggtttcttcttttttcgaggacgagggtgagagccccgtcgagtctgatgaaacaaaagtccaaacttggagcagccaacactacaggaacgaacctgtggttgttgttgctgctccacagttacaaaagtattctagttttgatgaccagagtggggagaagcctctgcttttgcccattcgaagcttgaaatctcgcttatctgaagaagatattgatgttcaatctctgaacatgtcaatgagttctaaaagattttcaagctattcgaatagaaaagcagaagttgaagctgttgatgttgatgttcaatatctaaatagctcaacaacc

SEQ ID NO: 98254 - DNA, 406 bp, Glycine max
cggatttttcttttactatagcacctgtagatggtattggcttcccagagaatgaatttgtactagaagctctgtccctccttcagcagcttattgtgcaaaatagtagtttgttagttagcttgataattgatgatgaggatgtcaactctattttcagcaccattgcctcttatgagacttatgatgctattcctgtgcaagaaaagaagaaactacatgctattggtcgtattctgaatattactgccaagactaccatttcttcttgtaatgctgtgtttgaaagtcttttctccagactgatggataatttgggattttctgttaggtttccaaacagtgatattcccccctctcagagagtcaagttcggattcctttatgtctgcattgaactacttgc

SEQ ID NO: 98255 - DNA, 208 bp, Glycine max
gggaaaaaaaaaaaaaccctttttttgggcccccttggggggggcccatgggggggggaccccttattttttcccgggttttttcccccctttaaaaaattcaaattttcctttgggggaaaaaaaccccggttattaaaaaaaaaaaagtttaaacgctttccccgggcttgggaaagggggttttcacccttaaaaagggggcccc

SEQ ID NO: 98256 - DNA, 235 bp, Glycine max
gtctcatgtagttttaagactctcgctgctggctcagcctgcatcgaaaattttccttgtaaagaggaggttgacgacgacgacgacgacgatgatgtttaccatctctcccgcgtggtcaattttcttatatattccttttggatggtccaattttcttaaatatttccttaccatattttatatatatttatattggctgttaaaaaaaaatgctgctacacctaaaaagttg

SEQ ID NO: 98257 - DNA, 205 bp, Glycine max
gaacagacaatataaatatatataaaatgtgggaaggaaatattaagaaaattggcccatccaaaaggaatatataagaaaattgaccacccgggagagatggtaaacatcatcgtggttgtcgtcgttatcaacctcctctttacaaggaaaattttcgctgcaggctgagcctgcagcgagtgttttaaaactacatgagacc

SEQ ID NO: 98258 - DNA, 236 bp, Glycine max
gtggttcaatttggcgctccgggagtgccccgcggcgttggagaacattgacctctggcgccagaacaatctagagtgcatagtgattgatgtgattttggtgcacaggcctctggtgagtgtgagtttttctcccaaaagggttattgctaggagttcttcactgaaggaaagatgcccttttggctggaacactgatcaggaagaattgcgggttgtgggaaggagtgaaaaga

SEQ ID NO: 98259 - DNA, 465 bp, Glycine max
gatgaagcttctgccttgttatatacaatatgcgactattagcagtttcaagaattcttacacaatataaggctgtaccatgccagccagccagctcagacctgatcatagatcaaaacttaacagtcataaagacttaatcatcatattcacacgtatttttcaaaactaagaacatattcttcaactggatggaccaatttatcaaggggaaaaaaaggcttaaagcttacatgtgttttactgatttaacatcagcataaacgccattgtgcacaagcttaagtgtagtatactatatgttatgtactactatatctggtgcttactacctcgcgttagcagcaagtttttcatttctttgtaaccatggaactcttccaatgcatcagctgtagttttcctagtggctatgatcccagaagacattatgctcacaggccttgatggctcacggatctgatt

SEQ ID NO: 98260 - DNA, 502 bp, Glycine max
aaaattgaaaaaagttcccaaacaaaaccacacacacatgacattattaatattaatattattaataattataatcccttcaccctctttctctgtcacaatgcaaaactcacccaccgtcctcgctgttccgccgccgcgccccgccactcaaataaacgtcatccccatcccaccgtccttcgacggagctccaaactccgtcttcccgagcaccttcctacccttcccgccgccgccgccgttcgccggacctcccagctccgtcgatctctcccctctcgaattcctcctcgcgctcctcgccgtcgtcaccatcccggccctaatttacactttcatcttcgccttcggctgcccgtcgcgccgccgccgccgggaaccctcctacggcgagccctccgtagcgtcggaggtgtcccaccaccaggaattcgaaatcgccgccgtcgccgacaccgaagtgaagtaccggaaggaggcgcacgcgaaggaaatcggc

SEQ ID NO: 98261 - DNA, 371 bp, Glycine max
cccaaaggaaacttcctagccttcattccattttaagccagtagctcaaatcggccccaagtttcattacaattacaattcaagggttcaatcactgacaattcctatttatcctctttttaaacattctaattccactttcccattactaaacattcatatttaaaggtcattaaaatcctctagaagtccctactttattccgcaagaatgaaagatggtaatataatacaaccctcaagcccattgttttcccaatagctagatccccttgatactccgaattctacttataagataataattggaatttattggataaaaattaaaaacttaatttttattgaaattaaaaatcaaatgaaaatcaa

SEQ ID NO: 98262 - DNA, 515 bp, Glycine max
caagaagcatattttcaaagtgaagtgaatagtttaaagccatcagaaacagattcaggcaactctcttgaagaaatactatttgtttccaaaccaatgaagtaattggtgaactagagctaggtacaccaattacttcattggtttggaaacaagaagcatattttcaaagtgaagtgaatagtttaaagccatcagaaacagattcaggcaactctcttgaagaaatactatttgtgttatcccgggatggaaaaattaatatagttgatggtgatagtggaaaaattatctgcagtcggccattacaagtgaaggaatcctctgcaatttcaatgtatgttatagagggtagcatctcagcatctgaagcatcaaatgacaagctgcaggaagaaactgtgaagaatactgctgatgctagccctgatgaggaggaagaacccttatcaactagggtaaattcatcagaagctggtctttcctcttcagaaagctcacactctggagatttg

SEQ ID NO: 98263 - DNA, 371 bp, Glycine max
ggccttcaatagaaacacaattgattcattaagtcatgaactgcataaggaagtaatggtgtgatctcatggaggttacaaatgaaaagtaatgccacaaaaaaatgtgattttatcaaacctttcaagcaaaatgcaaaagccttcctacaaacctaatttgccccccaattttttcaaataaaatgaaagaaaaacagaccgattaattaaaaggatgtaaggaaaggagattgcctaatccctgtgttaaataaaaacgcatttgcaaaaacaactttaaggctcaaacacttgatagatgcagcccaggcaaaattctcaagggttatccctgtacaaaagatttgaccagtgtcccccaaaacagg

SEQ ID NO: 98264 - DNA, 374 bp, Glycine max
ccaaaggaaaacagacccacaacatagttattttttccccttctttatttcatgaatgttttaataacttggggccacatattatacaagatgaaacttgaccagaaacaaggacagccaatcacaatcacgtaagtctcttatcttctatcaagacatcgttcaagaattaattattaaattaaaaagagaccagaaactttaacaccggggaattagtaggctcccattactaattccacaatacttcccaaggaaattcatatgccatatcaacaatctcacaaatgatgctactacttgtcagtaagaatgagtttgctctagcagccatgtcccctttgaatttagaccgaatcccacttaataacaaa

SEQ ID NO: 98265 - DNA, 371 bp, Glycine max
aatatgaatggaaacaataattacttggctacaaattgttcttaaacattgccatcaaaatgatgagatcaaaacttaaaagacaattgagacttcagagaaaagtatttatcatactcaaccaccaactagcaggaagaaaatggggaaagaagatagattgggttaaaatatgattctgttataatatggtagagattaaaatatgattctgttcaccatattataacagaatcatatattatcatatctcccaaatcggtatcatatctcaacaaattgtaacagtacttaggcaattaaatgtgtcggaatacataatcacattcacacaggaaattttccaaattgtgctctatttttataataat

SEQ ID NO: 98266 - DNA, 495 bp, Glycine max
gaggtattggcacacaactttccataccttgcgagtaaatgcaaaaagctgccccctgaaaagattagtcttctcatttgttatgtcttggtgcttacgcttttctctgatgagttccgaactgactacacagatattgcaaaggatctgagcatgaacatactgcccgtgagacaactctatgagcatttgggttgcaaaatttcccgccagaaaaacatattttatgccacacttcctgtccctcttaaatttcctgagttgaggcagaggaagcggaaaaggtagatagatcactatttgagtcctttttgggggtcattgactgttctaaatcttgtcttccagtctcgttggtgcagtgatataaaaaattactatccaacacttcctataggttgtttgttattattttctatctgcatacatttgaacattgtttgctgttttagtattttaagaagcgattttgaaattagcacactcaatttattt

SEQ ID NO: 98267 - DNA, 450 bp, Glycine max
  unsure (1)..(450): unsure at all n locations
aaaatgtaagggctgtcttgagaacttttaatttttagttacacacgtcacattacttttattttgtttcttatttttgaatgttaatatagaaaatagtaaaaaaaaaaaagagatcatttggtttgagaatatgttttctacttttaatacttcattttttttaaacttttaatttaaaaaatactatcttttttttcactttgtttgcaattttcaaaagtttgcataaaagatactgaatacaaactctttttttattttttttattttctgttatatacaattgttttaaataaaaaacaaagtgaaaataaagtgacatttttgtaatagaaaatgaaaaccgtgaacattntctcaaaccaaacagtcccagaaagttgnttttcacttttttctatatattttttttaaaataaaaaataaaaaaaaaaacttcttacccca

SEQ ID NO: 98268 - DNA, 246 bp, Glycine max
cttggcaaagcatgaaattaaaacaacccaaaatttcccgattaaaatcaggattgggggacagttttcccatcagagaaatgggaagagttttacccatgcaatatttccagctccaactttccattatagacccttgacattgaaatgaaaaaataaattttgccacttgaagtgagacaacaaacaatacccctttccaagggtcattacattaatcactagtcattaatcttgggtaatttc

SEQ ID NO: 98269 - DNA, 467 bp, Glycine max
aagctcgaatctcagtacgttcctttatatatatatatatatattcaacaaggacatttacaatttaaaaattactgcaaacaatatatgatatactctaatgctgggcaaatatattacatcataaccttggacctaaagtaaaggacactgaatttcgaattctgatatattgctcatcaactcctactactaaataggcctaagttcaaaatttagtgttgaaattttctggtcattttcaggtgactaccaaaggtgtaggagctcctgaaattctgaagtaagattcacttgcttgtgcatggggatatgttgcaactgaacccaaggatttattagaattgcatatttgattgaatcctgaccacttcatttgcatgaagctgctcttcctccacggacccacgtgcattttcttttccttcattgatttctttgcagcattgcacattactcgaacaatg

SEQ ID NO: 98270 - DNA, 218 bp, Glycine max
gataacgatgcacactaggcggtaggtccttaccagaggaaaaacctatagggtcagataccaactgatcatattgcactgatggtgaatgatatatcttacagcacctcaatgggggcactccgaattcacactataataaactgaattaagattaatcttcggaacggtgttgcgatgatatccaggctcagactcaaccatttaagccacggatg

SEQ ID NO: 98271 - DNA, 568 bp, Glycine max
tgctaatttatggacacataataataataatattccattgggtttcaagaagattaataatgatgaacagttacatgacaggaatcatactcatcagggtctatcattgtcgctctcatcaaattcacaacaacaacaatccaagccttgttttgatgaagggtctgttgtgaaatcaccctcctcgaccatgaagctgaatgcgctttcaaacaacaacaacaacactgtttatcgaaatgttggccctctcggtcctttcactggttacgccacgattttgaagagttcaaggttcttgaggccgtgccaacagctgttagatgaatggtgctgtcaatctggttcaaaatttgcaaagagagggatttgtgatgttccagagtgggtctctcgagatgtcagttctgcttctacttgtgctactgctcttaatgttgatgaaagtgctgcaaaaggtggtggcaattcgggtgcttcatcctctgtgttgtattgttcaatcgaaaacaacaacaacaacaataataataataataataataataataataataatagcgctgat

SEQ ID NO: 98272 - DNA, 323 bp, Glycine max
ctcgagccgctcgagccgattcggctcgagcaaaatgagtggccagggaagagacaacggagaatccagtctcgagaatcacttgcacgggaacgctgttgatacatacttgaagaacccagcttggctttgaacatcattagctgtagatgtattggatgaacagattactaaataggctccactaatatagatcattaaatcgggtttattccattcatagcttctgataatgatgaaaataatctagtttctttttctgtttccccccctgcattttatgggtcgagcgaaatatactatggagtctctggtataaaatt

SEQ ID NO: 98273 - DNA, 507 bp, Glycine max
agattttccaagtgctctgaaggagtggaactcttggaaaagaaatttgatttaaagctggaagatattgcatcaaaagaaaagcatctaacttcagatttagatggttttttttatgaaaatcggaaacatatggagcaagctcaagtcttgttgaatcagatgcaaatggagatgatggtagaaactcagaaccttgaattagaagttgagaaactcagtctgaaactttcagcagcgcatgatgagaaagagagaatagcttccaatgctatgcttgaagtatccacattacgtgctgataaagccaaactggaatctgcttttgaagaagctcaatctaaagtgagtttggctaagaaagaggttgatatgatacagtctcaatatgaacaaaagctggaagacctaacaacacagcttgccgaatacaaaattaaaatggaaatgctgatgactgaacatgaaaagttgctgaagctggtggaagactacaaatcaagagag

SEQ ID NO: 98274 - DNA, 161 bp, Glycine max
attgaagggttttgtttttcgtcaagaacaaggatgatgatttctaggaagctaaggtcactgctcttggtttggtttgtttccattaagattatactagggcttgattgtgaaatacatcaatcatttttttgttttcaagctcaagactcgatgaatca

SEQ ID NO: 98275 - DNA, 424 bp, Glycine max
ctcgagccgaatcggctcgaggcatttatgttcaatctggtcttgcaattcctggaggcacagatgatacaaatgataaaacaagcggccaacctgctattgctgcatttcagtcttcagttccagaggtcaaagaagcaacacagaatttgatgaggcagactgagtcaattttaggaggtttaatgcttttgactgcaacagtttccaaaataaaagacgaagggctttcttcagaagagaggataatcaaagaagattctgccaatgctggaggcaatgatatacaatattctactaatcagaagtttcctagcacacagaatggattagtgttggatgataaaaaaactgaggagatgaaagaacttttttctactgctgaaagtgccatggaggcttgggcaatgttggccacttcact

SEQ ID NO: 98276 - DNA, 539 bp, Glycine max
agaaggagtttgttccgttgaagaaggagaagaaaaagatgggagaggagaagggttttggtgttggagttagggatttcggggagggcccttcgaataccaaaacggtgccgttgcagcaggtgagtagcagcgaggggagctccaagacggtgaggtttcacgacggcagcgataacggctccgtcgagaaagagatcaacagcagccccgacactgttgcttccgaagagcgcggtgcgaagaaaggggttagtttcgagattgacgaagcgaccgttacgacggtggacggtgactcttccgttttgagcagcgccaccactttgtccgcacatggcacaagggatctccgcgaggttgttgaggagattcacgatgagtttgtgacggcgtcgaatttcgggaaagaggttgcgttgttgctcgaggtttgcaaacggccttatagatctagggttgctgcacttagagttatcttttccagaatcctgcagatgttagcaccttccaggctaccttcagatcttgaatctata

SEQ ID NO: 98277 - DNA, 431 bp, Glycine max
  unsure (1)..(431): unsure at all n locations
ctggtcaatcgattgcatatgtgtatctgagtgaatgctttctgaagagccagagcagggaaatacagtgtcattatgaagtgcctgtccatttgtagaggagacaagtccatcatcaataacaccatctgacttgatctgctctttttttgctccatgaaggccactaaatttcaatgtacttatctcagattgcaggtcagaatgatttggaaaaaaaattcttttgttatacttcaaatttaatggcacactttgtacatctatgtcgtgtttcttcactcccagtctagttgtcatgaatgacaacacatccaaaatcaatggaaaagaaatatggccctgcagtttgactagctctccaaagacattcatataaactctnttcaactggatgcataaaatccttggacacctagccatacttagct

SEQ ID NO: 98278 - DNA, 183 bp, Glycine max
ttctagaatcgcgagcggccgcccttttttttttttttgcttaggttttgggtaaaaaaagtaaaaaaagaaagtcttttttttttaaaattctttttgttgttgcaatattgtgtatgattggaaatctttaaattcgggttttccaccccatcaattcaatttaaagatatgccttcttcc

SEQ ID NO: 98279 - DNA, 407 bp, Glycine max
gaaagagattgagaggatgagagttgaagctgaggcaaagagaggagaaatggagcttaagagaactgaaatcattgccaatacacaactagagattgctaagatctttgcaagtgtcaataaaggtgttgattcttcactaagaattggaagaagttaattaagggtatattatgggaggtgatcacatgtttggtatgtgtacaaattttatagtcaacataatatagattgaatgagagggaaaattgtaacaagtatgtaatatgtaattggcctaaccagtgaaagagagctccatatatacgggagggataataattatctctcctaactgtaattatatacttctaattgtaaccttctctttcattaattataagaaatgaagggatacttcttctatt

SEQ ID NO: 98280 - DNA, 306 bp, Glycine max
agcgctacaacttgttgtggccaatcctgttagcgaggtgatgaagagactgaacaaatggaagttccagaatcatttacgggagacatggatctatcttactgttgaagaggccgttgcagcatgcaacttcaatctacgtccaagcggcacgaatcccatgaaagatgaatcagacggttggaacaatgtttgactgtgatataccacggactatcttaaatagctgatagcaaagcttattcgttgtgtcttaattattataccactacaacgtgtggcatgagaatttctgaaacatgccac

SEQ ID NO: 98281 - DNA, 293 bp, Glycine max
ggaaaaaccctttattttgttttttttaaattaatataaatgggattgaccaaccccctgatggggctaccaccctgaaggcctggcaaagttcccatgccctgttcgaaatcccaaggcccaaatgttccccaaaagaaaggataggtcccgtaaagggcctagggttccataaattttggggaaaaggccctggttccaaagtcctaacattgctgtccaaaattttcccgatgggcatgtcctaaaaaaaaggtaaccttggagggaaacccccatgcatcccttggctt

SEQ ID NO: 98282 - DNA, 410 bp, Glycine max
ggtccatgaaaatgctcatgttcttcttcatatatactattattattattattattaaatttctataaatttgttcctcataaaatgccaacaatctctgcttaggtttcgcggaaggtctaatctaattccattaattaatgattcatgaatggaagtggggaagtagcgctacgcagagatggttggcaatttaacttgttcgtcaaaaagagaaacaaacgaaagatacagggttattaaaacaggggaaagcctatatatgttttccataaaagagttgacattaaaggcgatggagaaaatctgagttggaatggtttgggtctggtagaagaagctgctcttgttcttcacttctactcttctttgacaaaggttccggcgaggaagagaccgaagagtcattg

SEQ ID NO: 98283 - DNA, 453 bp, Glycine max
acaaagcgatcatcttcatccaacaacaacaccaaacacgcttctccatcacccccagtttcttctgcacccgctccagaaatcgacccgacccgaactgaccccaacccggttggtggtggtgggtctttccgttcccttttggcatcgagtggccatttgggcctagggaacctcttggagggtctgaattcaagtgggtctaatctcaaaagtgtgcaaatggaagagtttggggagaatgttagttcgggtactccagtggcggttccgggttcgggtcagaatcccgggttggagatgcaaagcaatgggaatgctgagagttttctgagtttgcaaaatggtgattcaggctgttgtaatggtactaatggctggtctaaccttgctattttcactcctgggtcaagctatcagtaatgacaaattaatgaatatgattaccctgat

SEQ ID NO: 98284 - DNA, 244 bp, Glycine max
cataatacaaagcattatatgcttattacagccaaagttaacagtgatttgccccataacagaacgcatgattgacctgcaatactggagatttcgtaataaatagcataagaccactttaacttatgcgtaaggtcccttagacaactaacatatgccaccaaaacatatgaatattacagccaatgttaaatgacttgccccataattcacctatagtttcagtcgacaggggtatacatgc

SEQ ID NO: 98285 - DNA, 392 bp, Glycine max
ggcaaacaagaataagacgaattaatttttgtctttaagcaaaacatcaatgaagtgtaagcacaacatcttcatttgttacacttttccttgctgtactgcacatctagtgctgtctactaggatatgcaatttcctatatcccgtgtttccacttttgttcgttctaactctaaacaaaagggtaattgtgcactccatatatactacaactccttaaaagctactacagactaaaatgatcaagcttttgagtaagtaaataaagcaaccaaagaaacaaaattgttgcttcatatgatcatgtatttacacaaacgccccgaaacaaaactcaagtattatgcatcaataatattcagcattttaacttccaaaaaaaaaaaacatga

SEQ ID NO: 98286 - DNA, 391 bp, Glycine max
gccaaagctaatgaactcacaacatttcttgcaaatatagcatcttattacaacttcaacgtcccatataaaaacatatttaaggtaattcaaaagacttatttgttatcgatcgttgtataattcttgaataagacaggtggaagtaaagttcctataagtttcatggatctaactaaaaaataagcattccacgttcacaaaaacacatgtggagacactaaacatcagaaacacctgagagattgtcatgtaaacttggattattgggtcatgttttattgccacagctttataaaaattagaccccaaaggcaacagggcttagttgggtatggcagcctccctcccttccctggccttccatcaaaaaagggtctccaaaccaaaa

SEQ ID NO: 98287 - DNA, 177 bp, Glycine max
catccaaaaaaattctggtctattgaagttaaaaaatcgcaaaggtacatctatggctacatgctctcactttcaaatattatcctctcacggatatggaatgcataaatgttctcagtttaacaatactaaaacacagattttcacaggcaaatctccccatattccatttaccca

SEQ ID NO: 98288 - DNA, 452 bp, Glycine max
tagaattcccagcatactatgaatttgaacatacatagagcagagttgctacagtaatcggtgaagttcaggaaataaaattagaattcttgaaaagataataaatcctgcaaaatttgttaaaaagaattactgaaaagataatacctcgattgaatgtttcttttgataggtaaatacaacactaaatattttgtgtttaggactacatggattttgtgctctgtttcttaagaatttttccaatggttagaagttgcttttatttctatagtcttgtttagtataccaataggatggccttatggctaatcccgtccacaattaggttgtatagattctttggtagactattccttccaagttgtttttgagtgacctatttagctgtttcagattttgcttgtgttaaacttcatgactatacctcaatgtgatgtagtgtgagtggt

SEQ ID NO: 98289 - DNA, 393 bp, Glycine max
gatggttgttaaataccatgttagatttaatcacaaaaaccaattgtaaaggttcttaatagatatataaaccacatccaagtaattgaggcaagcatgtggaactaatttccaacaattacttgatgcggttttgatatgattgcaaaggagtatctcaattcattcacggagacaaatttcctttgaggatctgaaacactcaaaatttgagttgtccctcccaatcaaattttcttagtacacaagagttaggattcaaattcggcatgttttaaatacatgttaggcaccttcatttaacgtcacaaaggtaataaaagaagccatgccatggccttattaaaatggaaaagcttacccagagacaaggcgcaaattgtcctcataacg

SEQ ID NO: 98290 - DNA, 242 bp, Glycine max
gttacccattataaaaaagaatttcattgaacgaatagggaagaaggaataaatgccacagagaagaaagacatcgtgaactgatgaacgggttgatgcatgatgaaagtatggaccagggcgaacagcatgagcacataggcaattccttggcccactgctataccatgacttgagggtgcaggggcaggaggaaggacccgagccttgatggaaggggccacataagccaaagcaagagc

SEQ ID NO: 98291 - DNA, 117 bp, Glycine max
gggtcaaacactttttttaaaacctacacctaaaaggattgcgaacttataatttcctaaaggagcgttttccctttggatacggttaggatggcaacttacaaaatgaccctgggg

SEQ ID NO: 98292 - DNA, 276 bp, Glycine max
aaaacaaacacctaaaatgattccgatctcatattttccttaaatagggctttcccattggatacgggttggatggggatttacaaattggccctatggctattaccacaagaaagggtgccatggcattgcaaattacaacagattagggctacaaatcccccacaaaggttggcaaaatgggatttcctatgtgccattccttttttgacagttacaagagctttccagggccaaattgccctgtgttttcaaagatatacaagggccctttta

SEQ ID NO: 98293 - DNA, 380 bp, Glycine max
gggcatggatcaaagagcatatcatataacatgtatgatctgagcttctttagtagtagtagcgggagtagaaagaagcaacaaaccttaaatcctagcaaggaaaactaaaaagctatttacataagttgttaatccaaacgagcccaatcatttgcaacatgtagattatactttcgtgccaaacgatgagcagttttgtcagccataatgccctctatcatcttaaactttttgtaatgcaccttaagggtctcttcctgctgctttgctagcttctcttcggcttctagtagcagtttgtcaaggaattctacttctgcagcatgtttgcgagttagattctttacttcctttgccagctcaaaatcaggatcact

SEQ ID NO: 98294 - DNA, 197 bp, Glycine max
aaaagagagaagaaaagaaaagcccgcctgatcataccttaatccaaacaattggaaatgacttccatttcaagctaaatcaacataagccttacccaaaatgggaccatttataaaagggcctggttaccgggtttttcgttactggacaagactggtctatcgagagcagactcacaagccagttcagggggaaa

SEQ ID NO: 98295 - DNA, 352 bp, Glycine max
ggggagaacacaaaccccttcccattttcaatttatttaccctaaagccccttggattcaaaccccgggaaatcattttatttttccccccccggggaaaaccctatggggggcaaatttagcaaaaggggggggccgatttttcaaaggggcccctttggccccaaaattccctggaaagccttttcaaaccaaaaccggtagcccctacccccggccctgaaaaaaggccccccccccctttatttaaatgaaagggcccccttttatgggggccctctcaaaaaagacggggaatcccgacccaatggaaaaacccccctcggggcaaattggtttttgaaccccccct

SEQ ID NO: 98296 - DNA, 327 bp, Glycine max
agtaacaaaccattaaaataataagtactgatttacatgactttacaacgattttttttttcgagaattgatatacctacatcctaaagatcaagtacgggttagtgcattccattcttctaaagctaatttacacagatcgaaacgtgatttgaaatgctcctgctatggcccaaaagaaataaacttaaattcctattgacaacataactagctgattaatgccggagtcctcattagtgacactttgagctccagccatgagtcattgttcgcgtgtgttacttaacagcttcaaaattatcaacttactgtttagcctgtgaa

SEQ ID NO: 98297 - DNA, 425 bp, Glycine max
gggagtaacaaaataaatttattttcactttgcagacttgaagcctgggtatattgagtgtagagtcaatccaaaaattctgttgatactgtgatcagttgtacgggatagcagacctgaattatcctttcaccctcaaaggcagacatcaaatatgattgccaattaaaattgaatgttactattctgtaactattttagcagcttgcccgtaaatcatggtgcagcttcttagcagtatatacctgggaatttgttcattgcctactccactttcagaacaatcttcatgaactcatagacaaagaaacttatggaagctgaaggaagcacctgtaataagctgggaataagtcctgcatagagagctggaatgcctccctgttcaactattttggcaaatgttgcaaaagaacttaattttg

SEQ ID NO: 98298 - DNA, 222 bp, Glycine max
caaaggaagttaaactctcaataaaagcacattaatacaggagcacagatgttgaaagccgtgatatacggcagtttttgttgcgacacactaaaatacacctgatcacaagttcgatcgttttttcaagtccataaaatggcatttgatctacgcagctacttcttctgcacattatagagctaagtgtgctaggcaatggctgtgctaggatcggatgct

SEQ ID NO: 98299 - DNA, 425 bp, Glycine max
  unsure (1)..(425): unsure at all n locations
ctctctttctctctctaaatccttagagagaaccctcacagtcacagtgtgaaagcggcaaggcctggcctggcttggcttggctaccattttattctgattctgtttttgctacaatggaggagaataacaactacaacaacaacacgctgcttgtgcttacttgttcttcttccacaacatcaatgacccttttgcccttccccccaaacaggtacctgttcacctcctctttgtaaatccaacctcgtttccctcctttcgtagatgagacatgggcatgagcaatacaatgtagctctgtctcctcttccattgcgtccaaaaaggcagacaggatggagccaggcataatccatatttatatatttataacataatcttataaatactaccgnctctatatattctctgttcatttatat

SEQ ID NO: 98300 - DNA, 263 bp, Glycine max
aaaaaaaaaaacaatttaatctattaaaaaatggaggaaaaacataaatacttcatgattatgataatcagtaacgaaagagaggatagatacacatgcgaaagtcaataaattgtgaaaaatcctcgatacacttgtctctcctaggaattcattctaatgtagcactaatcaaaacccatgatcgatgaagaatcacatgctcctctttcttcctttgaatctcatcagggtagcacaaaaaaaaacccataaaaatgacc

SEQ ID NO: 98301 - DNA, 435 bp, Glycine max
ccgccccttctttctattcctccttattccatgtttagtgattaatcattcattttctaatttttatatccgcaatttgtgttaatctttaatttaaccaaactctttaagaaaaccgatgcatgtacttggatagatctataacagattcactcatcgattcatgcatgaatgcataaagcatatatattacaccaaccaattttacttcacccttaattattacatatatatggtgaaggaaaaaggaaggaaagaaatgcaacttgacatttctaataaaaataattattattgataaaaaaaactcaccatcaattttccaaacaaaaatgataataatacagatacttgattgtgtttatatttatagttgttaaaatttttaagaattaagttttaaaaagtcagagtgaataagacaaatgattgttt

SEQ ID NO: 98302 - DNA, 126 bp, Glycine max
ggagagacctatcatatcgatgacaatgaaccacgccgtactgaaatgtgcaaatgaggacagtgcacaatcactcatttattgactacaacaaggagggatggggaggatgaactaaaacttaca

SEQ ID NO: 98303 - DNA, 445 bp, Glycine max
ggtacatcttaatgtcttttgtccatctttctctaacttctcaaatttctactaagccaaaaaacttagttctcaaactacagaacaaagtttaaaaaataaaatagaagctagttatgtcgtagattacaaagaaaaagaaacaacataatctaaagatcaaaatgcttcccaccataatctttaaaaaggatgatgtggctacagcacagcttttgctaattattatcataggaatatgtaggctaaagagcacaaaatggaatcctccctccccatatgagtcctacttcaattaaagcactttcaagcttcaataaattctatcattgtaagttttgcaatgctctattcattccattcaggagaacattgccaccttattagtaaatcacacaatcaaggaggcaacacaacttgctgacacagaatgagatctgaaatg

SEQ ID NO: 98304 - DNA, 288 bp, Glycine max
ggaaaaataagttgccactttttagaggctttaatgattaaacaagagaaacatttgggaaccatggattacatcaaaccaaggggaagggaaacaatttgactaaagccaagcttacaaatggattaaattttgggacccaaaagagaggctttgatggggcaaaactttgacgtggccggggattaacattagcagtgccaccagctcctggttttcctttacttcctgggcctcctgaacttcctccaccttgggcttttcttggagaattaagaattttttttt

SEQ ID NO: 98305 - DNA, 103 bp, Glycine max
attaatggaaagcttgacttgcactattgaatacatataccttaaccatttcatttttcacataaaaggaaagggcccaaaaccaggggtgattcatcctctg

SEQ ID NO: 98306 - DNA, 269 bp, Glycine max
aaaaaaaaaaaaaaacccccctctgaaaaggggtaaataactttcctttcaaaaaacccggaaatttccctagaggcccttccaaaaactgggggggtcatggcccctccccctgaaaataaaataaaaatccgcctttcaaacaaaaagtaacccgggttaaaggggaaaaaaagggccgccctttcccccacggggatttgggggccctcctaaaaaacccccccgggccaatttaactttgggttttccctacccccccgggaaaa

SEQ ID NO: 98307 - DNA, 307 bp, Glycine max
ggggggtaaaccaaattttttgaatggggagactaaaacaaagacttttccgggtttgagatctaacaagtaattaaacttaaatcaattaatcaaaacagtctaggacagtttaaatgcaattttaccgccattgcaaaacattgaaaggttgcttttaaatgccgaatacccaacattttcgaacttgggttcacaaaaaattatttaacaacgcagactcaatcggtggtccttttgccgggatctcaaaacagcaaaaagggtgacaactaatggcaattgcctcattggttcataaggttgg

SEQ ID NO: 98308 - DNA, 312 bp, Glycine max
ggggtagaatcagtctgatatatgactatgaaaagctcttctcgtaaaagtttgttttgaaacggttcatccaaacccaaccaatttttttacacactggtgggtctacatatgcttagtttgttggtggaggaaatcctaaacaccacttactagtaacttatgcaagcccaattgttaaggatatgtaaaatatgcagaattaatcctcaggcacagtcttataaaaaattaaagttgcaataattttttttaaaactagtttttctgagcagggaaatcatttggcttttgaggcatcagggatctttg

SEQ ID NO: 98309 - DNA, 304 bp, Glycine max
tctagatcgcgagcggccgccctttttttttttttttcttcttcttctttgcagaacgcacttttgcagctctggggttcccttgtagagagtgataaccttcagatatgctacatctactgctgcagcaacaactcaagatttatggaatgaaaagctgccaaagacaaacctaaatgggcatgaagaagaagcaaaattcagatgttttcatcataaaccaatattcaagaaacatattccaattccagtatataaacctgtaccaaagccattttcagggtatagacctataccaaagtca

SEQ ID NO: 98310 - DNA, 53 bp, Glycine max
tagatattctatatcttttatcttaattaataattagaactttcttttttctt

SEQ ID NO: 98311 - DNA, 53 bp, Glycine max
aagaaaaaagaaagttctaattattaattaagataaaagatatagaatatcta

SEQ ID NO: 98312 - DNA, 370 bp, Glycine max
caccaacgaacattctaacatggattctcctgatggttgtcagcatcatttccctatggatggatccatgatcgagggtatcaatggtgtgccatctcaagttcattttgtgaatgaagccttactcattggcgctccagattctttgagttcttgtgattgtatgtctgaggcttctgagaaccaaggcaatgattccaagaatgtggaccaaactcaacttatggaacttcaatattgccatataccacagagaagctccatggatgttggagctgatgaggacttgtgctacataagaacactttgtgctattttggggaactcatcaacttttaaaccaaacccttatgctggtaactcaaattgc

SEQ ID NO: 98313 - DNA, 424 bp, Glycine max
ataaaaagggagaaacagcggctctatccaatggggagttaaaaataataatgcccaaagctcagaaaatgcatttcatctctgaacatatcactcccgtcaattatatagaacatgatgttttaagccaattttttcagcaaggaatacaaagaaaatcccaaaagcttgctctctttgttttgattcttatttccatacaagcaaaactccaagctgacagatccgttgcagaatgacaaaaaagaacatcctccagaaatacccaaagacttcttaaacttctcaacctccaaatatacggtggaataaggaaggaactctgagtaatggtctctgctcagatcgtttatagccactgccagtttggggatttttaagatttcttcatgggtcaaagacctcacatacctggctggatttc

SEQ ID NO: 98314 - DNA, 457 bp, Glycine max
acccgtaagatgatgcttcattttatttataccccctcccggtctcccctatatgtttgtgcacagtgaaggcaaatatacatattagttcttcactcttttaaatacaaaatgcttacatttaggatcagtttttgtgtgaaattgtagtagatcctttgtaaattgtctttctaacaacattaggagttgcttcagcagctgcattatcactaggagcatcctgcatccatgcttcctagttcctgggccagttaggatgaaggaggggcctgcaattgtgacataatctggcaggacctgatacgatgggatgagggagcaatggcttttcaccttcccaacacaatgtaaggagaggagaaagttacggtgcagatagaggaattggctttacagaactttgaatgcgctggaaagctgctcttactctttccttgagaccttcgttttcact

SEQ ID NO: 98315 - DNA, 421 bp, Glycine max
ccattttatctgtgattcacgtgtacttgccatgccctacaaggagaagggaaaagtgcctgacaggagacaacaacagcaacaacagctattagagaggggagatctttcaccatgtttaagcccctctggctttggctctaaagaaccttatgatttccatcttggggcaaggatgttgtattatccacatgatatcttattgagaagaaaaattgaggagcaggctgaattgcagcaagtccttgaacttcaagaaagaaggctgaagaatctacagcttccagacttcaagaataatcccattcaccatcaccaacgcagtctttcagtgggtactcctttggttttgccccatcaacttcatagtcatattaacgatgcaggtctttctcctgatagcattaaaggagatattaca

SEQ ID NO: 98316 - DNA, 471 bp, Glycine max
cgcaacgcaattttacccaacaaaactctctctctttctctcactttctaataatggagagcctcccgcttgagacggcggagaagatcatcctgcgctgggactccaccgcgtcggaggatgcccgcgacaagatgatattctccggcggcgtggaccgcgatgaggccgatctctacctccaagccgtggacgaaatccaacggtccctctcctccgtctccgtctcctcctccgacaaagtcaactccgccatccagattgccatggcccgcttagaagacgagttccgcaacatcctcatctcccacaccatccccttcgacccttccacctccgaagacgatccctcccaaaccctcccagaccttcttccttcctccacctcttccccaaaacaccctctcaccaacctcgaacaagattcaacagaaactgagccagaaactactaacaccaccaccaccacca

SEQ ID NO: 98317 - DNA, 373 bp, Glycine max
agggcctaaaccttcgttgtggagcaccacaaactgcagaacaccactttaaggcaatgataatgcagtacacctacttagttcagtgacccttatgtcttctattgttttcaactatgtaacaacagtatgataatttatatcacttgtaaagcatgagagcaagttgtcttttggattgaattgcctttagtttctctattagtaacactggaggtgaagtaaaaaaagtgatcaattaccaggacagaagaatttatcaggcaatttctcaaggggatcctgtcgtggtaaatatacctgcatcattatcaacacaagcataagattgttgtgtgtaaagaacaagtccatagacttcatacatgaatca

SEQ ID NO: 98318 - DNA, 417 bp, Glycine max
tagcaatttttgacaaggttgtctccacaactaatactatggccaatccaactcagaagaagaacttgatcaaacgatcctctctacgcaatcaaatgcaagcagaggatgaagctaaaggagggatgcataagtctgtccaaactgaagaaactaaaagcgataaagatgtgcagaggccaccccttcttcaatctgaaaccgaaaaatctctgccaagtcccaaaagtctcacttcggagcaacatgatagaagcaaaaccacaggctctttggcaattgtgccaggtaagaagcaaataggctttggttttctgaggaagctgctgtcgagacgaaagaaaggaaggggtaagggaactaagttgttagccaaagcatgaataagaatgatcttggagagaatgcgaagacatg

SEQ ID NO: 98319 - DNA, 316 bp, Glycine max
aacaaaaatcagcccaggttaattttaaaggcccaggaacttatttacccccgctttttttacaggaccaaacctttttttcacttgggggctaaaccccaaccttaattatttccaatacaagaaaaaaacaagttccccccgaatttaatttaataaaagacaaaagcttggtcccccagaagcctggtttcgcattctctccaagaacatttttattcagggttggggtaacaacttagttcccttaccccttcctttttttgggctcgacagggggttccttaaaaaaccaaagcctatttggtttttaccc

SEQ ID NO: 98320 - DNA, 175 bp, Glycine max
gcaccgacgatatttgctttcttattgggttttttacgtgagatgtgcggcaaacctttagatccagaatcaattcaatgtttaaacgataggagaagaagggaggagcgactaactcaagcggcgttgcatcgactggtcgatcattgattggatagaggggagagagagatct

SEQ ID NO: 98321 - DNA, 154 bp, Glycine max
attaaatataatataattcccacatttttgtttaatggcggggtgaatatatgactctcaagccgtgcgattgcttgcaattgtacatatgtaaggtggaaaaaaaaatgtctacttgtccttgttattaattaaatgtttgttgaataaagcg

SEQ ID NO: 98322 - DNA, 164 bp, Glycine max
attcaacaaacatttaattaataacaaggacaagtttacatttttttttccaccttacatatgtacaattgcaagcaatcgcacggcttgagagtcataatattcacccctccattcttcttcatgctacaaattatattatatttaattcccacatttttgtt

SEQ ID NO: 98323 - DNA, 122 bp, Glycine max
atgggattgaaactggttacattttagatgataaaaaaacaattgatgtgtttgacattttggacggaataccatctcttgatttatttgtccaggtatgctatgcatgtaaataaactggc

SEQ ID NO: 98324 - DNA, 274 bp, Glycine max
gaaagcccatttccaatttaaaataaagctctaatgaccagcacatagccatgatttgtaaaaatccaggacccctctttaaaaaagttatgactcgtgcccaaatagaaaattcctttccaaccatgagattactatcccaagaaaaaaaaacatgaaaaaaaaggaaattctgatttaaaggccaagccctggccactcagtcatgtaccagtattgggcagggctgccattaaggaattgtaagaagactcaagatcaaagggaagctgcc

SEQ ID NO: 98325 - DNA, 470 bp, Glycine max
gaataaattaattgcttgagtttttacatgtttcgtgcatttttttattttttttattttccggaacattagtctatgttccttaattccttaatgttgccaatgtttattaaaattagaagaaatgttaggttgggtggatgatgtatttgggtcgttgtatgatgtgttgttacctgcctctcttatgatgatgtcgtgagggttgttatattgctaatgcacctttttttttccagatttttctgcatcagtctatttgtagggtgtattcccttgattttgtgtgggtttgagtgagggtgcgtgtgaatgaaaaggaaatttgctggaggtgatgcatttgcatagatgaagacagaaaaagtttggcgtttaggcggcatgggtgatatgcagatactgcctgggtctcgccaccgtcctcccatgaagaagccgaagtggattattgtcttggtgttgtttgt

SEQ ID NO: 98326 - DNA, 373 bp, Glycine max
aataaatccaacttctccattgtttggtgtctgctatctgcttttactattgtaagtgtaactgtccatcttaaggggtattcttgtttctgtctgtagttctgactgttttaatcctctattgagttattccattcggtgtacttatttccattgaagcttgattttttatttttttaaagtttatcttgcactttgtaacttattagaatgtgaagtttcaaagttaatgaatgattcagtttatccacaggtaaaggggctttcatcacaagaatttgctgcccgtaatgatttggttcttgcattgccggatagaatccaagcaataccggatggggctcctgctgtgccaaaacaaactggaggctgg

SEQ ID NO: 98327 - DNA, 424 bp, Glycine max
aatctacatggtggagggacttgaagattgtagctcagcaccctcaacagggtcaagtgctgaatagatcgatagtgtggaaggtaggacgtggggacaaatttaaattttgggaggattcttggataggggaagagacccatttactagagaaatatcctaggctacacagtatatctcttcagcaagatcatttcattcagcaaatgggagatgtcaaagattcagggtgggaatgggattttaaatggaggagaccattgttcgacagcgaaatagatttggcggtatcattcttagaagatatccaggggcacagaattcgggccaacagtgctgaccagtgggtatgggtggcagatcctagtggccagtacacggttaggagtgcatacactgtgcttagagaggacttaatgcagga

SEQ ID NO: 98328 - DNA, 476 bp, Glycine max
ggacagaagtacaacgcataatctttttttttttggcaacagttccattgaaataattcttatctcatgctgccacagagcatatttatccaaattatcttgatatctttttttccccaaacaaaagaaaaactacttggttatgctggatgttttctaatcacaacggaaaggataactataaatattactttggtaaaaaaaaaaactaaatattactatcaatacccatgttcttcaagaatacaatttcacccgtaactccgtaagcagtgttaaaagaaagaacagaaagtaacgcgaagaaaacaaaaatgtccacacgactgtcctcacttctgaccaccagcctcagttggttcaaccacctcagcttctaaagtttctggggtatggggctgggttactgtggactggaactgaccaggtgtggaccatttaccagtgagagccatacccatcatctcatatatctt

SEQ ID NO: 98329 - DNA, 301 bp, Glycine max
ggtttcccgtcatcactgtatgacgtcctccttctttggggggggggggggggggcaaaaggtagaatgtgggcttggtggccgaagataaaaagatagtacaacggtgattttgggacttcagtaaaatggggtgggcggcgggttaagtaagtgcgtggaaggaatgtgtagagatgaggaaggttacagacgtaagaagacgagacttcgagaggaggaggaggagcgagagatcgacgagtgagaccgagaggaggtagagtggacatgtagtaagtgtgccgcaaggaagggaggg

SEQ ID NO: 98330 - DNA, 220 bp, Glycine max
gtgaaagcccaaacaaaaagtatgatgggataggcagagaagtacgtaatctggcagtgggatatagcaaagggacgttaacgtagccaaaaaataacgaataattagggggctaattagatggggaaaagcgggatatagggtaataaacaatgaacgtcatgtaaagtattagtaagtagtagtagttagagggggaacagagccgtaaaatggggga

SEQ ID NO: 98331 - DNA, 304 bp, Glycine max
aaggtttcccgtcatcactgtatgacgtcctccttctttggggggggggggggggggggggggggggggggggaatccacaaatatagcccttgtcttaggggaataactcaaccaatgcgttttgagaaaataagaacaatgcccgataaaaaaggtaaccgaagtatataggaacgaatgcccgccaaagatgccaaaaggaagaacaacgcctatgaacagagagggcttatagagaaccctcaattaatagggaattagggagggtcccgtagaggggccgttggtataggggatgccaa

SEQ ID NO: 98332 - DNA, 301 bp, Glycine max
tcactgtatgacgtgctccttctttggggggggggggggggggaaccagctagtcctagaagtctgagcggagtagaagcgaactatacccgagtgccacagtcgggacgggacaagaagtatacctgtgaatataacttaagtggggtcggtacaaacgcttaaaacggtacctaaaataaagattaggccaccaaacttgaagggacaacgtgcgaaagtggacatgaaaagatagtgtgcgtaaataaatgatagtcctacaaccaaaatatcaaagaaatccagacagaggatgggt

SEQ ID NO: 98333 - DNA, 362 bp, Glycine max
  unsure (1)..(362): unsure at all n locations
aaggtttcccgtcatcactgtatgacgtcctccttctttgggggggggggggggagacggtagcccccagagagaaggaacgtaaggagcggaagaggttagaagaaagatcaaagcaagcgttagtaaaggggttgacggtataaattagataaccaacagtaaattttacaaaaatccccatgaaatacaggtcgcggttagaggccagcatagtgacagggacggcgtaatttccgaggtaagattcgccggatggtcgagtgccgggaggctgagtaccaattaagtgggcgtagtggcggcagtagagggttagaaaaggcatnttgttgggtgaggaggtgtgggtattggggttg

SEQ ID NO: 98334 - DNA, 457 bp, Glycine max
aaggtttcccgtcatcactgtatgacgtcctccttctttgggggggggggggggtagtatatgtgtagtgtagggcggagttaaagggaaataacaaaggggaggcttagtcgactgtaaggatagggacgtgttagtggctagtggcgaaggggctgagagtgcacatgtggggcgtgctggtatagggtgagactaaaatcgaaaagacaaatagtgaatcattaaggtcgatataccggatatcgataagaataatcgccaacaacaaaggccgattgagaaaaagatatgccagtccagtcacgacacgagatagattataacgcgtaagaatagaggtgggaggatatgtaggggaatataggggggagcaggacgggaaagggaggaaaaatgagaaaagtatagaaaaaaaagaattagcaaggggttacagggaaggggtaagaaaggg

SEQ ID NO: 98335 - DNA, 374 bp, Glycine max
attaactttagtactttacatgttagcattattttatacctacatggttgagagtggtacaactttgtagcataaatcatcagtgtagctgccagttattagtcttctttcttgttgctaatcaatctttctcgatgctgagattgatgcaacatatacaaagccttccaaccagagcaatctttttagcacttagcagaccccccattaaaaaggtgcgtgctaggaggaataagagcaggcacaaagggaattgtattgggttggtttctgttatgctcgaattgaggtctgttgaacttgttaatagctgtactgtattaaaaagagatttcaaccaataagagagagagttcaatagagtatgtcagagg

SEQ ID NO: 98336 - DNA, 236 bp, Glycine max
aggtttcccgtcatcactgtatgacgtcctccttctttggggggggggggggggagtgtaatgtcgaacgtaggaaggagggggtaattaggtaacgccaataggtgatatagcaaacctaacaggatagtatagacgtcagtggggcatagaaaatataagtggttatgtgttaaagtaataatgtacaggagggaaagagttcagtataacactagtgggtgttggggaaaggt

SEQ ID NO: 98337 - DNA, 190 bp, Glycine max
ttcccgtcatcactgtatgacgtgctccttctttggggggggggggggggcgggggggggggttttaccttaaagttacaagtccaacgccaagtgtggcaagtgttgtattgtaagttagtggtgaggggacaataacagtgaggtggataagaaatacgggcctagccccagtggttaatagttaata

SEQ ID NO: 98338 - DNA, 353 bp, Glycine max
tcactgtatgacgtcctccttctttggggggggggggggggatagttcctaaatgctagggtaggaatgatatagacaaagacctaggaccgtagcgggcaacccaacagattggcgatagtaggggtgggttgaggcgtacaaggggatccgcgtacaagatttatccttatacagtaggtgaattgaacgcttgacggacataaataataatgctaccattgacaaatatagtcttatgtttaaataaatgaagacggcgtgtgaggatagtagtggtaggtgtgcgtgaagactggagtaataccaatgaacaatataaagtggagtacgtaacggatacaattggagta

SEQ ID NO: 98339 - DNA, 289 bp, Glycine max
ccgatcatcactgtatgacgtcctccatctttggcgtcggtggggggaagacggtacatggtacatgggagatatgatgaaaaagagggtgaaccaatacgctaatatgtggaatataaggtggtgagggtgaagagtgggctatagctctaaaatacttggtagtaacaatagcacatacggagcgtaacgcattaggggtaaccaacgtctataatgggtggcggggaagtggggtaggcttgaaaagtgacaccataaaaggtatggggtaaagaaaaggaagggt

SEQ ID NO: 98340 - DNA, 295 bp, Glycine max
aaggtttcccgtcatcactgtatgacgtcctccttctttgggggggggggggggggaactagttaaaaatagaggccaaaagtagataaggtcaggataaaactgctgtgggcgttaggatggcaaataaaagggataagtttagggacagacccgtgccggagaaagttaccaaaagcacgtagaagtaaggccgtccgtgtgaaaagcgcgggctgcagcgaggccagcaggtaaataagagggtatacggagggaggagtatgcacaatttagtgaagtggagatagaatta

SEQ ID NO: 98341 - DNA, 406 bp, Glycine max
  unsure (1)..(406): unsure at all n locations
cttgtttcatctgtaaagaatgaatgttataaatagatcagacccaattttatcaattccttctgtatgtatgtataatgtattgtatcacttgtttcatctgtaaagaaattgtaaataaatgagaaatggaaaggtcaaaacctgagtctggtgtaaaggttcacaggttgtaaaaatatatccaaattctgacaactttcgtaaagaacacatattctgtttaagtgccaaaagagaaataatttggattgtgccgggtcatgttaaggatgtggggagagttcatgacatgtagcctgttgtgacttgtgtgtctaaagtgctatcttgaaattggaaaggtgaccatgtntactctnaanaaaaaaaaaaaaaaaaaaaaaaaaaagggcggccgccgact

SEQ ID NO: 98342 - DNA, 175 bp, Glycine max
agacgaaccccccccccgaccgactgttatttgttgagttctcgagagagaaactcagagatctgattgatacctttctgcttcggatcctactagccaaaggtctattttagggttggatatggaacgagccctagccggagagcgcgagttccttcggggcgaccacgaagtt

SEQ ID NO: 98343 - DNA, 258 bp, Glycine max
gtttcccgtcatcactgtatgacgtcctccttctttgggggggggggggggccgagagttaactgggttgcgtggtgtagggactataaattagtcttggtgttaattaggacgggggctatggggtgggaataaaaagttgctgcggagggtgtttgtaccattaatacgtgggaagttgcagttggtggctttggtgggtgtgcttacattacagggcgttggggttggtgtgggtggcgttgttggtaggcatgg

SEQ ID NO: 98344 - DNA, 259 bp, Glycine max
taataagaagaagtgtaactattaactgaaaggagtagcgtatatccaatttgtagcggggcgaaaaaaaaaaacgatttacgcccaatagacacacttaaaatgggcaggatacgaaagtgtagtgtatcggcataggtattagcgtagtgagaatgtggagggttaagtaataatgatggttagcgtaagaaaagcgacaaatgaaaattgcgcattacaaaaggggccaaccaagataatagttagggcggatgtg

SEQ ID NO: 98345 - DNA, 364 bp, Glycine max
gaaggtttcccgtcatcactgtatgacgtcctccttctttggggggggggggggggggatagaaaatagcaaggcaaggaagcacccaataaggtaaccgctagatactacccacgtatgaccgtgaacgcaaagcggtaaccaacttaatgtagataaaaaaatagtaaacaatggagtcttccgataccagttttaggggtaacgcaacccaagtaaagcaagatggccagtatgtcagaagtttacagataggaaaagcgcaaaggtggaaagtagtggcgcaaaccaaaaaaaaaaaacgtaatgctgacacaaccaaaggtagtgcaaacattaggccagggtggtaagacgggggttt

SEQ ID NO: 98346 - DNA, 357 bp, Glycine max
aaggtttcccgtcatcactgtatgacgtcctccttctttggggggggggggggggcaaaaactgcagaaggatgaagaaaacccgtgttccaaaaaaaagaaaaatactatagttgtactgtttgaggttgcacgtgtcaactaattagggttatgtaatttgttattttagcgtgaggcttctggttgttgagtaaaaagagataatattacggcgcgtaagggtgaggccgggtggcgttaaagaccattctactactcccctaatcgtacataaatgttaaaccaaccaaggagcggcagcaaaattcgttatggaaatacgcaaatgtggtgtgttggaaacatatagtgata

SEQ ID NO: 98347 - DNA, 411 bp, Glycine max
  unsure (1)..(411): unsure at all n locations
gaaggtttcccgtcatcactgtatgacgtcctccttctttggggggggggggggggggggcagtgggaaccagtgcgagagggagaaaggctagtatttaaatacggacaaatttacaggaaaatgaaaagcttatagttcgtgcgcgaggcgcaggtagaggggaaggggaagaaatgaaaaatggtaagagtggcggggcgcgactaaagggtagtaccgtagtacaggaatgtgaaaaataaagtggtgcgtggcgccggacgttaacggtagttaagcggtaccgcatgggtgttagtatgaaacgtatgttgacnagagccgtgtattangtgggaatgcttgccgggtattatttgattaagagtgagcgacgtaaatacacatgcgacttgagtacagtggacc

SEQ ID NO: 98348 - DNA, 298 bp, Glycine max
tcatcactgtatgagtctccttctttgggggggggggggctgagagggcgttatgcggttaagggtcgagaatgccgaaaccagaacaaaagttgtataaagtatagacctgatggttttacagaaagaaggagtatgttagaggtgagattgtaaaatatagcgtcccagggagagataaaaaaaagcacgcgcaacaacacaaaggtggggcaataatggggccgcatgaaagggttgtttacgttaatagaaagaagcgagttgtacgtgaactgagcgatggaggtagtatggg

SEQ ID NO: 98349 - DNA, 306 bp, Glycine max
agggaaacaaagttggggcctaacgtaaaaaggataatatgatagcataacaacggtgatgtattagaataaagcagaaaattggtgaggtattagaaaaagaaaaacggtggccagcaggggtggaaataacaagagataaaagataaggaggcctagtgttgacaagagtagccacatgcatgtagttcgacagtgaggcgttaaaagagacggcctaaaattggcccgtgagaaatggagcaacggagtaagtagcgcgacgtaccgtaaggagtgcaacgacgcgtatggggtttgatagag

SEQ ID NO: 98350 - DNA, 370 bp, Glycine max
aaggtttcccgtcatcactgtatgacgtcctccttctttgggggggggggggggggggggggcagtaggggtaagaaagacagtaagaaaccacaagctagggaaaaccgcgtgtataggggtggcggctaagaaaacgcgtcgggaaaaccctgaggcggaagatagcgcgtggtagtataaaatggaaagcacaaataggcaggtagaattgcttgtaaaaggaacagatgagtttacaaccagacggcataaaatggagaaaaatatgttttgcgaaacgaatgtacgtgaatgaaataagtgttgcacatggcggaaccagtatgtttgtagagggtattgccaattatggtagagtagttgttgg

SEQ ID NO: 98351 - DNA, 126 bp, Glycine max
cttattcaggaattcggagagtattgatatctcaaggcaggatataccagcagccgaggaagatatggaggcttctatgattatcattggtagcaacattatgctgcttttcagatcatcatttgc

SEQ ID NO: 98352 - DNA, 353 bp, Glycine max
  unsure (1)..(353): unsure at all n locations
ttcccgtcatcactgtatgacgatcctccgttcgtttggcgggggggtgggaggggaccggtaatcccagcaaccgaggagaaggagctagattaacccgataactcgacgggcagagaagttactgaatgtagatgtacaagcaattacggaaaaatggagtaaacgagaacaaaacaatgccattaggggaaaaaataatgtgttgtattggtcgtaaagaaagcagtatgttaataccacaagaaaagcaaaccagaataaacgtgacaagtaaacccggataagtgctaacgtagcgtggttacataaagtcgcagcagangacngtgggtttggtaagaatttgagtg

SEQ ID NO: 98353 - DNA, 227 bp, Glycine max
cactgtatgacgtcctccttctttgggggggggggggggacgacgaagaaataaaagatagatttggcgtagcgtattaaggtacgggtgcaaggagaatggatgcaaatatgaagagtacgaagagcaaaatgataatatacgaaaaggctaacacgcaaaaattgatcataaagcaggtgccgcgttacagttagcaaaaggaagcatatgagggattatttagt

SEQ ID NO: 98354 - DNA, 278 bp, Glycine max
aaggtttcccgtcatcactgtatgacgtcctccttctttgggggggggggggggatagtagggatatataaagggtagggtagagtacctgagaacggctaggatattaccgaatgaccgcctgatacaacaaaatttatgcggggcgaggaatagtaaatggtaaatataatatataagaattgcctggagggattgaaatagtgtgtgaggtacagagaaaataaacgagcggaaggcaaattaaatgaggaaccagtgaacaataccatggtaga

SEQ ID NO: 98355 - DNA, 236 bp, Glycine max
gaaggtttcccgtcatcactgtatgacgtcctccttctttggggggggggggggggggggtttgttgcgcgtgaggtggtgctgaacggacgcgcgtcgaatatgtgcaatgctagcactgggcgccagagagaagagaggctaatagtacaaaaacaacaaaagaaggtaaggtgggtgccccgcggtggtaggcaggaaggagttgactgcgtgacggaaggagtaaggtgggg

SEQ ID NO: 98356 - DNA, 372 bp, Glycine max
tttcccgtcatcactgtatgacgtcctccttctttgggggggggggggggggggggcataagtatagagtagcgagaaggttaaaatggagaaatagtaaacgattacttaagagagcgagccagtatagcatgagatgaaaaaggctgaaaagctctagtagaggtacgacgcaactgcagctacaagcactgcagcagacaaaaatagtaggcgataatttaaaaaccgggataaaggttaagtaatgggtagcaacgtatggttatcgcaggaaaatattggcatagttagttaataacgtgtaatgtatggacgatggtaggaatgtacacggttaataggattgcgagtatgggacatgcttgtggg

SEQ ID NO: 98357 - DNA, 162 bp, Glycine max
gagaccaatgaaagccaaagagggaatatgatttgtaaccctagagtgatacgttaacgttaagggtagctaataaaaaaaagagagggagagaaaaaaaaaacacacacacaccaaaaaccgatgataaacgagtcggggttgttgatggtgcacaaatgg

SEQ ID NO: 98358 - DNA, 405 bp, Glycine max
tttcccgtcatcactgtatgacgtcctccttctttgggggggggggggggggggaaagggaacaagagagataggaactggagctccggtatagcgtagtaatgccataacacaattgcgcttactacgagaaaagtgtttggtatgaactgagcaacccataaagccaagggaaccgggatttggtgtttgtggcaataacacaatagttagcatatcggcataattgtatgtggtaatatgagatagtaagtaaaagtgtagttaggggtgccggtaagttaaagtgggccctgccgaccacaagataagaaagaatagcagataagacggggggggggcttttgtaccgtgtagaacgaaaaagataatttaaaatatggcaagtgaggataacaaagggat

SEQ ID NO: 98359 - DNA, 482 bp, Glycine max
gatcagccaaaataatatatatatatatatatatatatattaacaagtaccagaggtactaaaatacaagctacattctggtctagtcaacaccataacagattggttgatgaaccagaatatacatatagtaagactattacaattaataagcctaaattcgaatcctcatctacgaagaaattcttcacttaggtttgatgaccactgattatagtgggtggtgaagtccttctctaagtttttgagccaagtccatagcagaaacactgcatcatctaccaatttgtttgcattaaaggcagaattggagaaaactatactatttctatgcttccaaatagaccatgtcagtgctaaccaccaccctttccatctgtccagctgtatcccttcatatgctccatatatatgctgcagaaaatgctgttatgggtgatgtggaaagacacccaccagatttacccaagacagcattttgc

SEQ ID NO: 98360 - DNA, 183 bp, Glycine max
tcccgatcatcactgtatgacgtgctccatctttgggggggggggggggggaggctaaaataaagctgtggcggggagggagagggcaggagggcatgggcctaggttgttgcctaaaaggcgttagctaacccactgaggttctaaaataataagggttcgataccatataaggttatgaag

SEQ ID NO: 98361 - DNA, 140 bp, Glycine max
aagacaaccaatgtatattattttttttgagaaaaaaattcaatggacagttcacaagcaaacctacgacaaataatgtggctagtgatgagaaaatcaccggggactgttctgcaaatcacaaaactcctgtttcctat

SEQ ID NO: 98362 - DNA, 263 bp, Glycine max
gtggattgggtttctcttggctttgtcactcttgaattcatgtgctcttgtctactcctaccccaccccaaattctccttcacaccctcctcaccatggtgcacacaagccagggtgctaccagcatactcctccaacacataggcatcgtaagattccaccaccaccatcattgccgttcttgtcgccgctaccacctggagcattttatttcttctctccaccccctcctagtcctacccattatccaaaaactccaaggc

SEQ ID NO: 98363 - DNA, 388 bp, Glycine max
gttctctgaattatcaacatttagattcagtggggaatttaaaaacttgtaaaatggcaaacctgttcacctcaaatgaacacgttcagacacttccagattaacaatataccagacgttacgagaacagctactgttacagtttactctaacaaatcggaagagaaaaaaaaagactagagtacaagatatataattaacccgaagcactgtaacaacaagctttttccgcctaggcccgatgaagctctcagggatatatgtatatgttatttatgccaaatcaaagtacccggaaccttggtgggggtgggcccaggcccaccggccttggagtttttggataatgggtaggactaggagggggtggagagaagaaataaaatgc

SEQ ID NO: 98364 - DNA, 180 bp, Glycine max
atatattaaacacacttgtaaatccattatttaggacatatagtttatgcaaatacagtgaactttttaagaccgacatacattgtttctctcagcatgcatgcatgagaataacagtgtgttctggtcatgcatgcatgctgagagaaacagtgtgttctggtcatgcatacattgttt

SEQ ID NO: 98365 - DNA, 214 bp, Glycine max
agtactgtaaaagtcaccttcaaaaagcaacaaagatatctttctcttgttggtttttgatgggccctacatatgtattattaatcgatggttgtcactttgatgttgtgttctgtgtttgtatgtgtatactatctagtaatgcgtttgaactgccaaggacaagagtacttttattgataataaagaaacgaaaacgtttcaattgcgttgg

SEQ ID NO: 98366 - DNA, 189 bp, Glycine max
taaataagcatcttagttcatacactgttggtccttccttccttcttctgctcaataagtgtgtgccactctaattaattaccacccccttctacacatagatcttctccctctgctctctcttctctacactgcgaaaccaagacgaaggcagcatacgcggctgctctacttatatgccctgtgctc

SEQ ID NO: 98367 - DNA, 271 bp, Glycine max
ccaaattcacacgaggacaaaaaagaccccgatttattctcactctcatgtattatgcatatcccaaccaactaaagggaccaaaattttctttttatgtgatacacaaaccccacaattaaggtggtaaacataatcaggttgcaagggtccatgggggaatatttttaagggggagatatacatgcccgggagtgactgaatcaaaggcttgaaattgatgtggggatggggaaaaaaaaaaaataattaagggcatttggccttgccc

SEQ ID NO: 98368 - DNA, 238 bp, Glycine max
agggaacaagggccccttttttttttaagcccccaaagagaaaaccaccttggggagtcttttacatgacttgggggcccacaggtggaacaacataaagggaagcttgggcccctttttggacccctttttttacatttagatagaaagggcccagctttattgttggggggggaaggaacttctgaatgtttttccggggatttggaagcttaaagggcctgctttcccctttggg

SEQ ID NO: 98369 - DNA, 392 bp, Glycine max
gatatgaattctttcttcatatactgatcaaatgggaaaagagtggtctcacttccaaacccaaattgaaaatgggtgtgaagtataaaatctgaaaatcagaatgaaactagttcctcatcagaaacgattctataatagttattcactataacctttaaagtataacaacgtctgtcacaagttatgagggagaaaaaacaagctataaattatgtagtcacttctgttgagaagtctaactcactggttctcagattcccccgagcatttcttgttccagctgcctgaacacgctttgcgctccccgcgttttcttttgttcttgagaatgttcccatctctatacatacaggacttcagagttgattgctcttgagacactgcagggt

SEQ ID NO: 98370 - DNA, 409 bp, Glycine max
ctctcctagtagtgttttttaaacaatggtagaaaacgtgctttgatgtaatgtggtaaatagaaaaagaaaaaacagttttacaaaatatcaacatgtttgatgactcttgggatgtatacaacaagttgcccttctacttagtgtttgtctttatacaggagctatctttgaacacgaaattgagtctacactactttcttttttttcttaaaaaatgggccagtgcgagatgaactttttgaaaatcccctctttacaggatttgttaaaactaataccaatgttcgcacgaagggatgctgtacagtgccatccccaatttgcctgtcaatgaggagccaatcattttagccaaaggaacttcaaaagcaaatccccatacctgaagggcattatcatagtgcca

SEQ ID NO: 98371 - DNA, 448 bp, Glycine max
gggaatggaagaagaccaatggagtcaagagaagaggtcaaaactggagtgccagattgcttcaacaccaagcatggatgggacaatgatggggctgtttctgagatctaggatttgaggcttgtcttttgtccttgtgaatgagtagtggtgtcaactctcaagactttctgagaaatggggtctaatcttaatgctgaattatccaagaaaactcccatttttggtctaaaagtttgggaaatatttggaattgtagttggattgtctataatagtcattctttctgtggtctcactttgcctaacctcaaggaagaaatctagaaaagataaagacaagattccccttagtcaaataccaactgtctcaaaggaaatcaaggaagtgcgggttgaacaagtgccaactaatgtatttgctcctcgtgatggaatacttctcacga

SEQ ID NO: 98372 - DNA, 268 bp, Glycine max
aaccgggaaaaaggaaagaatttcaattcaatcgtcttacaaacagcaaaatttggagggacatgctgcagttttttgcttaacaaaacaaccaatttagcaatctggttgctggagatgccaaatttgaggccccccaactttttcaggtttataatcggaacaataactttaatgaccaaaattttgaaaacgggcccaacccctcttacttattattttactttaacatggccccaaaggggcgaaaaacaagttaatttttttt

SEQ ID NO: 98373 - DNA, 278 bp, Glycine max
  unsure (1)..(278): unsure at all n locations
atcttctaaattttacattntaatttatacgggggataatggggggctatagatttttgcaaagggcaaaataatcatcaaaaaagcgagaacctgttatccgccggttaacacacatactataaaacgtgcgacatgatcctagctgggaagataatttcggccaaaaaaaacaacctatttttgttaaccaaccaacatgcagcccataggggtgtcccctgaaccaaaaaaaccatagcacaccccattggatgataggcaccccacaatataaa

SEQ ID NO: 98374 - DNA, 461 bp, Glycine max
attttgtaattttattttttttatattttttaatgctttaatcattaataaaaggtactgaacttagtttccagaattgaaaataatgcttcatcttctcactttatatttgaaaattcattctgttaaaaaattcctttctttgctatttgtttattgcaataagtttctggtagataaaagtttaaatgtgtttgatcatcaaacatcaatcccaagcaataactaagttgaattatcagacttgatcacttcatgtgttttgttgtttaggtaatctgccagtttttccatatttgaagtaaggatattcatcttatgaccaagagtgtcaatctttcggattaagagttattgctttagttctatctagagtaaaggaccagctagtgagatgctatagatccttaattcaaatctcatcaagagaagggtcagttttgaccttcattgattatatt

SEQ ID NO: 98375 - DNA, 424 bp, Glycine max
atatggacaaatgtatttttgtagtgtacaagtgactcagcttgggcccctcagaaataaacaaatctcataggatgatgcaagaatgccacaaaaataagagaaagagagaagaaagaggcttcttacctcaatctttcactgtaaccaaaaagaaaagaaatgacgaaactagtggccctaattctgtctgtctaaactagtgctattttacctggcactggaatctttttgggaactctccagctttgcaagccagggctatgctctcacaaaatacaagtggacagggtgggtttacctcactagcctacacacacatatactcatgatcctccttttcccacaaaaggtaatgatggacacaacccaccaaaaatttgggcttacttggacttggacaaaagaaacaaagaacagagaa

SEQ ID NO: 98376 - DNA, 458 bp, Glycine max
aaaccatatatgtctatttattaagaagctttcacgaaactcagatttattgaatacatgatcactccaagtacatgcataacacgatcataatatcaaattatcaatactagttttgacaagtctctcttatagaggctcaattcatcacgactttagtacagcttaagttgctacagctccagcaccaaatactctgcatctgttttgatccagtgctcattgtttccagttgagctactgcaaattagcccatgctgtggtgggttccaattggtcatacagtgttgggaccactttcttgatttggtatctgaatgaaatcttttgcctttgtctgggtttgtgaacttcccattttcatattcctgaaagtattcatgagggacattttttatcttacctttgtgggattgaatgcaatcttttccgtctacagggctttcaggatagacttt

SEQ ID NO: 98377 - DNA, 386 bp, Glycine max
ttccctttttttttttctttcatcttgttctttttccaaaaagaacaataataattccaggcaggatgcttagttatcaaacaatttcacatggatcccacatgtttttgaaaaccaaaaaccaaacacaaataccaaataaatttcccaactgggaacatagagagccaaaactttgattacagtaaaactcatctcacgttgacgtgcaccatgtcaggtataactcttatttccaatcaaaaactacttccatggctataaaaggtagaatttttatggaagaatacaacttccatctgctactctcacagggatgccagggtgttggtataagatgttgacattgcagctagaactttggtaacccacgccaggatgccctc

SEQ ID NO: 98378 - DNA, 339 bp, Glycine max
aaaagaaggcatatgacatgatgcattgaccattgatcacaatcaaaattctagataacaactatgagaggaaaactcattcatttcagaaatttcaaccctgcttgaaccaattacaagagaagttagaaaacggttgactacagctacaaattatatacgcattacatcctaggggaaggtacattacatacaggaaaactctccaaacttgcatgacagggatgattcattgtcttgatttatcaacatgacttatgattacccttccatagtcaggatctacggctcaccagttaatccagaacagactatggctatgctgtccttagctcttac

SEQ ID NO: 98379 - DNA, 166 bp, Glycine max
agcccttgacagacggaataccattttgtcatcatcacagaagctggcataccaatttattaaatacatcaaattgtggataaagaacctttaaatctttcgaaagtgaattaaatgaattaaccaacttgccaacaaaataagggtaatttaagctcattgcatt

SEQ ID NO: 98380 - DNA, 146 bp, Glycine max
agaaaaattaatatactcattcttaatcacattgaaattgagtgtaatcagtattatcacccattctatcatttgaaatgtgacgaattgaagtgaaaccatgaaaaataatatgcatggatgtaaaatttactttgatatgcaaa

SEQ ID NO: 98381 - DNA, 320 bp, Glycine max
ggggggctcacaaagcatagcccaatttgtttcatctttgggacatgggctacatgatatttttattacagggtggttaaaaaagaccccctaaattttttatcccaatttacataaaacccaatccatacccttttttgttttgaaggatccaaagcttatgcaaatcccttcctgatctgctatttggctacatcaactaactgatgggcgaggcaatcttttggcaatttcctgggaaaagcaacatttcaatgcttaagcctaatggaatggccaacaggggggataaaattcataatgatttttcaaaaaggggg

SEQ ID NO: 98382 - DNA, 476 bp, Glycine max
atgaaagaaaggaaggatgacttttattaaattccatgtagaaaatagtacattgtggactagtttaaattgactggttgtaacgacccattatggttttttatgattacttctgtgtttaattaattaataatttaataattcactaaacgtttttttcctgcaatgaattactttttttgtttgattaaaatgtatgttaaaaaatattattttatatattttttggcatttgaaagacaaaaaaagctggttaaaaaggtgagataattggtccgaccagcaccatattttgcacttgatcacttgatcacttgattatgatcacttattgaagtagactagcatagtacagcatcagcgaggaacaatggtgggaatgacatcactgacaagatcacttcctgaaacatatgaggacatgtgttgctcctcccttgtcacatttgatgctgatgttgatgcatatgatgggg

SEQ ID NO: 98383 - DNA, 282 bp, Glycine max
aaaaagaatatgtaagctaaattggcatttaaaaagtcaaaaatagtaatagcaaagcaaaaaaaaaaaaagaaagatgtaaaaatactatagctgccataaaatgctagctaggatttgtggcagaccaccgcggtgcatgacaaatcactgtctatgctccacaaattgaactcgtcgagccatttctgaattgaattcagctccatctcacttgaccaatataccaacttcttatcccgaagagaagtttcactaccagagccaatctttgtggcaaaa

SEQ ID NO: 98384 - DNA, 444 bp, Glycine max
ataaagcaacttcaaaagtgaactattattaaaaacagcagtccagcaccttgtagaaggaaaaaagtcactgacatttccaaacacattattctcaagtcactgacaatcctagtaagttaataactagatgaaatatgaccaaatgccaaaaataaaagagtacttatggaccaagaaagaaaacacgaggaatatacagtgatcaaaatgggatttcccctacttttccaaatgttactcaaataaaaaattttaagcctgaactccacatagttgagcattaacttgctcctagcatggtctttgcatcaaaaaagaccccagtcatgaaccctgaagcttgtaacagcaagtttaaagacctcatccatgggcatgcatccggcttgagcagctggaacagctacaccagcaccaactgtgtctgcactttcactcaaa

SEQ ID NO: 98385 - DNA, 381 bp, Glycine max
cttcatctctctaggtatcaactagagtaaaggtggcttttattaattttatttagaaaacaaagaaaattacaacaaattcattttgtatacaacttaaaatttgtttggataaattttttcataaataaaaaaaaattctataagttaaaaaaaattatacataagttaatttggtggagttctttcatatttggttctccaaatattaattttaacttatgcataacctaattttaacttagagaaatcttttatattttttcttcttattttttttcttctataaaagcttctatatccctaatatctattccatatctagcttttttggtttgatgactacaccttggatgacaagtccggtctttcacatgccac

SEQ ID NO: 98386 - DNA, 371 bp, Glycine max
catgagaagtttttaaattctgtatagaaacactacattatggattatccaaatgaaataccggatccgacaaggagaaaaacctaatctaaagttgaggtattatatttccaactgaaatggacttctactaaaaggcacaggtaagctgaaataacattgtaatgatgggcagcacccatgaaactgactgagaatggcgattacaataataaaaaacagattgaggagtccaaactaaaagaactcaaagtccagatttttacccccagacttcatgttgtcagtacctgctatcctcttactagtgctgccaaccccaacaggatcaactggtcccacaaccttccctgctggtacttaattttcca

SEQ ID NO: 98387 - DNA, 466 bp, Glycine max
aaataaataaatacaattattgtattgaatcatatctttggaaatccaaaatacaaactatgtctttttataggatacataaacagtatccatcaacattcaaaaagaagaaaagcccaatattctaaacttcttagaatcttatgtaaaccaaacagcatatatgtggaaaatttgcattagtatgaactaatcatggctagcagtcaaatcttgatgccttattttctcttttgcaactactatcatatagaagtccattaattattactgcattggatctaccataaccttgatgcagctcccttgtctaagaaccatttcaactctccttctctaggtgaaaccaattgagcagggagcttataatcactaggagcttcctccagtgcagagtagactgcatctgctctaccagcaccagtcaccaccattgctatgtttgaagaagcattgatcactggca

SEQ ID NO: 98388 - DNA, 150 bp, Glycine max
ctcttcaaaagattcttccgggaatctagcacgaccaaaatcatgaattaatgaaattctaacccatcgataattaaatttgatgggaattatgatgtagcagttgcacacgtttcaccattaaaatcaaaataccaggtcaaagtttca

SEQ ID NO: 98389 - DNA, 469 bp, Glycine max
ggcctgtccacacttatttgtaataaatatcaatcagttgataaattcaacagtaacacccatttcacatgccatgtactctcacttttattaatacagatagacccacaacaaaaccacggaagagattaatccaatccaaaatctgaacacgtaaggagctacaatttttttacaaaaacaaagcaaaactccacataatttggaagtcaatattggcaatagatgccgggtcaagaaggtaatcctgttaccagtttcctcatagagctcctccatcggcttagatacccacgtggatgaggacatgagggggccccacttaaaccaccaccttccagacaaggtctccgtctctctcacccttccagctaaagtgttctaaaaacaaaaacactgataatgttttttaaaaataatttcacccaaatgacaaaacttattgtcaagtaatatttttcttttgatt

SEQ ID NO: 98390 - DNA, 378 bp, Glycine max
aaacaacaaactaacattagaagccctaaaatcaattggcaagcctttacatccatttcctttagaaaaacaaaaaagttggaatgcataaattttttgaaaaatagccattaactataacactactgggcacatatgaaaattttttataaattaaaaaagaagcttagcctggcctcctattttgggccccagggttttccaacaggtaatgaccaaatccacccaaaagcttggccaaacttgataggatcaatcatttgaattttgaaaaaagaccacttgcttactggggagagaaaactttttagggatcaggcggcatttgagcctgagtgtcactttttgtcttaaaagaaccaaaaagtttacagattt

SEQ ID NO: 98391 - DNA, 369 bp, Glycine max
ccaaagaaaaatggataattttttgggaaactataaagaattcacatgtccatattttatggtttcattaaaaaacttatcaagtttggaaaattgttttaaaaactaaacagaaacaactaggacatgttttctcatctttttgttttctgtttatttagcctcccttcgatttcacactatgctccatgtcttgtttcaccctttaccagttgtatgagcaaaccttgtttaattatattttgaaaactaaaaagttaagcacacccaaagactttcaactcaagacaacttcgttgggcacattgccatcctccatccttatccaagattgaagggaaaagggtgtctgagtgatctttaaaattc

SEQ ID NO: 98392 - DNA, 301 bp, Glycine max
aaacgtaaacaagttaatacaaatatgaagaaaatcaatacaaggtatcctgcggaaaccatgccccaggaactcactgtttatcctatgaaggaattttatttcaaaaccagactttaagctaccgggagtgttctttatacactccatataagtgaacaaatatacgaacagaaaatgttataggttttaacaaccaaactgatataagtggaatcccgaagcaaaaaatccagtctctctgaggccactttcccttacacctgctgtgccctagaatcatacccatttgttccattga

SEQ ID NO: 98393 - DNA, 385 bp, Glycine max
gaccaagaataacaataataacataacacatatacttgctagtaacaggggtatattttgattgaattacagatacaaattaaggcacattgccatttcttttgttacatagctgaaacaggtatacataccatagcattagcagcagcaataaatgatgatataaattatcagcaatacaagcaataaacccaaattgaattttgtatcagcacttaggtgtggccttcatgaaatcaagtagatgggaactttatggtagtggtaataaaaataggatatggaagcttatattaaattatatgtatggggacagaaagattactcatgagcaaagtcagtggataattgacaccaccaatatcttgatgagccaaattaaatg

SEQ ID NO: 98394 - DNA, 262 bp, Glycine max
gggggggccaactcaaaaatgttttttttccttaaagggcagcccccaacttaaaagaaaaaaaaaaggggacatggaaactttaaagctgatgaaaaaagcttggaacgtaaacaaaaacctttcaaagaaaattttgttccccttcaaaccataaaaaaaaatccggataaattggtggggtgaaaataaaaataaaattgggacatgcccacaactgggtaaaactaagggttttggggctgaaatttttttttagttt

SEQ ID NO: 98395 - DNA, 110 bp, Glycine max
gttcaagactgataataaccattaaattattgtcattgtaacaatcggaaaacgagggaaaggaatagaagaaaacaatgaacaacccttgccttgttggttggtgcaac

SEQ ID NO: 98396 - DNA, 338 bp, Glycine max
caacaaacacacacacacacaacaacagtcaccgaaacgacaccgttttgaccgatggtgaaggggttgcacgggcagaacctccctgccgacgtggcgcaggtggttgatcagctggagcgccactgcttcgctcccgatggatctctcatctccaggcctctcttcaacgatctccagcttgccagagaggaaatgtgcagggaaagactgcgttacctggaagccatggctatatattctgaggctattgcaatggtggaagagtatcagcaagccatttctgtgtccaacctcggtggaatcagagatactggcaatctttatccacagcttgg

SEQ ID NO: 98397 - DNA, 287 bp, Glycine max
atctcaactcgtaagtcatttattatttttcaacctttcaaggtggaacattctacacatgaaaggcgagattacatcacatagggattttttgacataaaacacaatttttcacttttcaaatgaacaacctagattatttaaatatccgatcacaagagcatttttctccttttaaattctcaagcgaaccgaccaagggattctttcacggtggggtagttgacatccgggtacaacttataagcctcaaccccgaaagatgggtcaatctcaaagttgggggg

SEQ ID NO: 98398 - DNA, 308 bp, Glycine max
aggggaaaaatccgggtttcattcatgaaatttaaccctaacccttaagagaaaatggtaaaacaaattttgggactttttttaaacttggagggggtcaaatttaaaaattttttcccttgtttagaaagggcaaaaagggggaaaaggttttttttagttttttacaaaaaacttcggggttgatccccccatttttttgggaacaaaacccttttattttttttacttcaaaggggggggggccccctaaggttccggtttcaagccatttagggggggggacccccaaaaaaagattttttttt

SEQ ID NO: 98399 - DNA, 285 bp, Glycine max
aacttaaattaagcttctaggtcgaaaggtcattttgaagattgattttctcataacaaagtgaaggtggatcatgttcttcagctaatgcacgcgtgaattacttggctaagctgggcatgctggaaaacgaccacataaagctgtaagtggatcaaaccagattgatagccagttagatcaaacctctaaaactgtaagttcagaaaccctctccaaccgttcctttcccctgattaacgagtgccgttaccttgatcctcgtctctcgaaaataacgctgtt

SEQ ID NO: 98400 - DNA, 453 bp, Glycine max
atcatgcttgatcatgtcagcagaatgatagctagaccaccttagccgattattaccaaaaagggatcaaattttcattcttcttcttagtttattccaccaacataaaattactttcaacataagacagccaaatatgtttcttctattcgttgctatacataatgcacactagtaactttttagcagcaaataatatcacagtcccacatatatatcagaaacattcttagatcaatctgctttacatgaataagctaatttcttatcctttaggttatcttataatgataaatctgaatgttttccacattctgtttcttgaaattgcttccctttctgtgaacaagaaacttgccccatttgtatggcctatattttgaaggattgtgttcatttgtcaactcctccaaaggcttgacttctatgtcatgtgcagggttgaagaaaaac

SEQ ID NO: 98401 - DNA, 360 bp, Glycine max
ggggggaataaagtttgaattaaaattcaaggttttttagcacacaacaattttgacagcatggaagggtcacatttttaacaagcccgactttttaggttaagtttattggtttttggccattacaaatgccccattgatcgggtccttaaaattaaaagttgaattttttttccaacaaaacaaaaaacaccggacacattcaaggttacaacactccgctccatagtctcggtgaagggcttcatatttatatatatattttttgggccactttgggacgggatttcatcgaacattgttttaggcccgcttcaacttctgcttttgcatttttccattgcttttggggcaagccca

SEQ ID NO: 98402 - DNA, 463 bp, Glycine max
agcagatccgtcggagagaagctccaccaggtttgtaaggctgccatggtggcaatcaccaccgatggatccaaccaacgtagtagtaggcttctccccaatcaaaggttgagcctccaatcagaagacccaattagaaccttgatgttcttgggctcttggagtcacacgtagctaaatagattgaaccaaactcttttaactgttttaagtttggagaaaattgaacaacaaaactatgggtgggccaaaattcattcatatatgttgtcacacatataatattatactatgtcatgcagggagtggcgtaaaaatcttataagcttccatagcctgatatatatataccatacggcagcaacctaaagacaaaaaacactctgcatatggctgcatctgcatatatatgtctgtacccaaaaaagtaaataaataaatctgtacatatatatatatatat

SEQ ID NO: 98403 - DNA, 176 bp, Glycine max
ggaaacgggaaaataggcatctcatgattaaaatgaagaacaagtagctgcacgttttggggaataatgctttctcacattccaaaaactgtttgatcaagttccctttacttttggtctcatcattcccttgaattcatcaaatttggatggctgatagaagaaatgagaattca

SEQ ID NO: 98404 - DNA, 199 bp, Glycine max
ggcggttcattcatggaattatattaatagacatgcaaaactgacatttttagattcatatggagggttacatgaataccggaatagacatacaattgatatgagagctttcttacatggggtactttttctaatacaatatggaaaacataggtttcaattcacacttgctgttcttttctttttttttaattaagaa

SEQ ID NO: 98405 - DNA, 367 bp, Glycine max
aatacaaaatcaaacttttgataagttgcaagagcggtaatcaattgctaagatgagatccacagtttaaaagttgttgaaattcaatttgtaatatttagcattactctttacatatatatgttagcttcagacctgataaacaaatcagactagaacacatcctaatttcatatacaatcattattttcatggttcgttgaagaccttctcctcagactcatcacatttttctcaagttatttaacctagcctgtagatcatcatatattccactgtcttcatttgcggttgattcagcttgagcaaccctgttctttgctgctggtgcgctgacagaggttgtggcaggtgcattcacaagctc

SEQ ID NO: 98406 - DNA, 375 bp, Glycine max
gtaaaggtcttcaatattgtggacagaatgagtacatataccaaacacttgcacggcttgaagctagagcaaatagatatctgcaggctcgatatttattcaatcaggccactaagtgtaatcctaatagttgtgctagttggcttagttgggcgcaaatggaggtggagcaggaaaactaccgtgctgctaggaaattgtttgagaaagcagtacaggctagtcctaaaaataggtatgcttggcatgtatggggcgtttttgaagctaacatgggcaacattgacatgggaagaaaacttttaaagataggagagcatctgaattgaatccaaggcaccagcctgtttggtttgcttggggttggatggaatg

SEQ ID NO: 98407 - DNA, 135 bp, Glycine max
aaaaaaactgttcgcagggcggcaacttttatacaattactttgataaccgtttaaaactttacacgatgtaagacacaacatggtggatctttcaccctcaaaaacatcatttggggcgcctcttacttagacc

SEQ ID NO: 98408 - DNA, 289 bp, Glycine max
aaagcttatattttgaacttcaaaataagttttaagggtgaacataatattgggcgaaacatagccttattcttgaatgaatcgatctaatggctacatattaaagttcacataaatttagaacgattcaaaaagttgtaccaacaccaacagagtttcacaatatgtctagctaccatgacacatatccaagcttagaaaaactaacacaagacacacaccaccaccacttaaacgagatcttcctccttgtgggtgtgaatcacacaatctgatttcgggtttgaaa

SEQ ID NO: 98409 - DNA, 432 bp, Glycine max
ctgaccaccttttttaaagagaattttgtcaaacaagttgattgcttggagggtgatcatccttgtttttgtccacatgagaaggggcctctaccagtaggactacatgttgtttgtcttttaatttgttgttccccataggctgcaagtcttgctgctcctttaaatccctccttttgcactacaagatgttgtgtccaacaactttgcagacatcacaaaagggaagaagttttcatagttaactttgacaagaaaagcatacgactctctttccaccatgacctccaaatgaagggttgtggcgaggtcaacatccataaggatgcaggagaaatggccaaaagttttggatttggtggcctcatccagagtgatgggggaacccactgcccctacaatttcgaatagaagctgtagatcccaatattc

SEQ ID NO: 98410 - DNA, 314 bp, Glycine max
gtttgaaggccttccttttagttactaatactttatagtgtatttcttttgttattgggaatacttctagttggtctagcaagaagcaaaacacttggctaactaaggttcattataggctgtgtaacatagatacttgtccacctgaggaagtcatccttacatacttactttgaggggtatttttttgcatacttcaaagttcagagcagctttctcttgagaaattatctgactgctctgcaacatttcgtgtaaagcctgtacaacatttgatcatggtatgtgaccaagtcagctgttttgtgttggtt

SEQ ID NO: 98411 - DNA, 363 bp, Glycine max
ctcgtgcctcttcttcctccagtccgccgtatcctacatctgctcccacagcctccacctgcaccgaccgaactgctctcgctgcatccgacgatgaagatgatgatgatctcttggaagacggggaggccagtcggtccagtcagcagcatcatagggttgctctgaagccacttgatgcgcctattgctgataaagagctcaaaaagcgcgatctgaaggatcttcatgccgctcatgctgctgagcaggcggcgattgaggctgtccaggatgaccacgatgctgtcactgtgggcattgctagcctgcctgttgggcttgatggtggtgatgatgctgacgctgatgtcacagatgtaa

SEQ ID NO: 98412 - DNA, 143 bp, Glycine max
tttcttctttttttttacagataataagcaaacatttgtctattattataaaatgggttacaaatgagtttatctgaaatttctcaagatccaaaatcaatcgagtacagctctttttttcatacttaagaaaaacagcaaac

SEQ ID NO: 98413 - DNA, 100 bp, Glycine max
atgattttgcgtgaggttcttagattataccctacaagagttggtgttcctccaaagggtatcaaggatgtgaaacttggaaacctatcatttcctgatg

SEQ ID NO: 98414 - DNA, 433 bp, Glycine max
aacaaacaccaaagttacaattgcaaccatgctctgctttaactctatctaactccaatctgcgttttcttttctgatatattcatatttttaatcttgactctgaattgattagccatttttctgtgtccctttgcctttatagaactcgattcgggttctcatttcatccttttgcctatcactatatgttaatgatatagaacttttagccaaaggttgggaattcacaatgtcttgttctaattatgctagaagctgtaccttcttttatctgtttcttgcagtgcttcttgcaaaaactagctcttgcttctctgccaaggtgtatgtagtgtacatgggaagcaaaactggggaggacccagatgatattctgaagcacaatcatcaaatgcttgcatctgttcacaagggaagtattgagcaagcc

SEQ ID NO: 98415 - DNA, 453 bp, Glycine max
ttcaacttcttcacaatgaattcaaactcaaccttccaaaccttcaaggacactaacatcaccttgaacagaactcttattactttggcttctacgagggagccaagaggttttgggtttgtccaatatgtggacccagctgatgctgcagatgcaaaatatcacatggacggtcgaattcttcttggtcgtgagataactgtagtgtttgctgaagaaaacagaaagaaacctgctgaaatgagagcaagagaacacaggagggatcgatcgcatgattacaggcgatcttcacgaacctattctcctagtccagactattctccttctccaagacgaaggcgacattacaggtcaatctcaccaagggacagaaagtatagggatcgatcatactctagatcatcttatgcatcaagaagccgcagcagaagtaggagttacaataggagt

SEQ ID NO: 98416 - DNA, 215 bp, Glycine max
tgggtataatgatactaataatgcagtgaaagattttggaagcatcccatatgaagaggaaaggttgccacattcgttccctttgccagttaagatatttggttcatgggaaaccagttcactggttgcttagattagccaaaaagaaaatgtggctgactcctatgatcaagcttgtggcattttgaattgtacatataaccatgtgcacattt

SEQ ID NO: 98417 - DNA, 68 bp, Glycine max
aaaaaaaaaaaaaaaaaaaaaaaaaaaaaaaaaaaaaaaaaaaaaaaaaaaaaaaaaaaaaaaaaaag

SEQ ID NO: 98418 - DNA, 136 bp, Glycine max
gctagttctaagatcgcgagcggccgcccttttttttttgtacttgtatgtgttctttcagaacatatatattttatatgatgaaacaaaaaaaaatgttctctcaagatttatgctagaaatatgtaataatctc

SEQ ID NO: 98419 - DNA, 358 bp, Glycine max
gataatcggttcaagggctgtaattttgttactgaattcattttatgattatttttcatgatgcttttgatgactgaaaatgaaaaacagcgtggcaatgtaatgaggccgtcagtttcccatcctacagctccaagcgcgctgaaatcgccgaccaagtgacaaactcattccgaaatcaccgttgcagcggcggattcggaatccgcagcgtgctcaagagagcgtcactgaacaacatgatgtggtcggtgtttgggcgggggccaaccttgacgagataaacaccgcaatggactagctatccatgttggtggaacaaggctattacttgttgggcacccttaattggggagac

SEQ ID NO: 98420 - DNA, 487 bp, Glycine max
agcctattccaaagccagttcccgtgtataagcctataccaaagccagttcccatttataagccaattcccatttttaagccaataccgaaaccagttcccatttataagccaattcccatttttaagccaataccgaaaccagttcccatttataagccaattcccatttttaagccagtaccgaaaccagttcccatttataagccaattccaatttttaagccagtaccaacaccaattcctttttttaagcctataccaaagcctgttcctattgttaaacctattcctattccagtttttaaacccatacctaaaccatttccaattgttaaacctatcccttaagccaaagtcattttttaagccagagactttcttcagaaaacctattcctaaacttcacccaaatctgataaagcacggtcttctacattttccaattcacaatacaattcctacaatttcaactccataagatgatt

SEQ ID NO: 98421 - DNA, 291 bp, Glycine max
gggggctgatcttctatgaaaatatttttaagtgcacaaaacttttatgcaccagttgtaaagggattatttgctaaattggtgattcctgggaaattaaattaagaaacaagaaattgaccttttgcatattttatcttgaattgggggaaagaaaactcctatattaatggctgaaaatagatactagatatgggaatatccacgtgttggaaaaaggactaaagagcgtagaattttccaagattgacctttgcttgtagtatggaatgggatctttgaaagcataac

SEQ ID NO: 98422 - DNA, 456 bp, Glycine max
aaatataaccaattatcgctaatataaccaaatgaaaatatgaattgagcatcattacaaaatagattacaaagccaatattggttggctcggcccagaaagactaaaaaagtcatcaattgaaactctataaatgaagagtaatgccaaaataaaatagaagaggtgatagcaccaaccaggcaagttgcaatagacattcctacatacatcctgccacatcaaaagagaccaaacaatatgatagaaaggagaaagaaacgagatttcataataatcactgaatgagcaactgaaacatgtagctaaaactgcatcaaagctcaaacgtttcattgacaaacctaaggtgaaatccttgaggttcatcatctgtgtagaaaggattttaacaaataagccaataggctatcagcaaagtatgagaaatatttatcccattgattcgggcagaga

SEQ ID NO: 98423 - DNA, 387 bp, Glycine max
cccaaaagaagatattcgaaagggtattattaaggaaacagtgtccctccaaatattaacaaaagtcaattcctctacaatgagacaaatgttatttgttctctacatgcttttttcttttttctgttggcttcaaaataatagtttagaaaacattagtgtaaacatacatatttcaaaagtgcatgaattccaaatttagagtaactgtacaaattatcatccaactcttatttgtgttataatattaatgtctcaacttgaatcagtggatgtaattgccatttctgcccaccaaagtggtgatgcttttggatttgctccatcaggccccatagctgggatttccttgagtctagatgtaacttctttcatagctggcctttt

SEQ ID NO: 98424 - DNA, 240 bp, Glycine max
gggaaggcaaactttacttggaaacccatgtttgaaacttaattggccccggtccaaatcaaaccaagaaggggttttttcagtacttataccaatcttgatttaaggcttatttaatagtaagtttgttcaaaagcatgagcattacaagccaagtgaccaaccccacaagggttttattattaacgttttctccttttggggatttcacaaattaaaagtggggaaactttttttttt

SEQ ID NO: 98425 - DNA, 133 bp, Glycine max
tacatgcaactagaactatattagagtttagtttgaactgttcgtgatcaggtgacctgtcaatcaatcctcttgtttatgttggattttatagtaaaaacctgaatttggatattccttttttttccactct

SEQ ID NO: 98426 - DNA, 187 bp, Glycine max
ttcgtcttttttttttttttttttttttttttttttttttttttttttttttagaggggaaaaaaaaggaatttcccaattcaggtttttactataaaatccaacataaacaagaggattgattgacaggtcacctgatcacgaacagttcaaactaaaccctaatatagttctaggtgcatggacc

SEQ ID NO: 98427 - DNA, 409 bp, Glycine max
aaggtaggacaggacgcaattttccctctgcaaggtcgtcaacgccagtgacatgtgagaagctcgagccctccgagttcgacgagtggatccgtgaagtcgacgtcggttccgacggcaagatccgttacgaggatttcatctccagaatggtcgccaagtaacgccgattcgattctctctttccagtgtgcttttctctttctccgctattattgctttctcgcgtatgccttttcagtggaccaaccaatagattggttaatcgtactgtgttttaattttatggtttgtggctaaccgagggaggttttaggaaacggtggctgctcaatttgccctatttgcttttgggttttatttgtattattatgagatctgactctgagctagtctatatttgcatgct

SEQ ID NO: 98428 - DNA, 208 bp, Glycine max
atggatcgtaataaagggaaaccctataggtcgaaacattaaacgatcatccctagatagacatctttgcctgttctactcacagaaatagtcaaatgtgatcgaagcaaaagctccagcttttactagcagttttccacggcctgcttatcttgggaaaacaaaaaacactgctagtgacatatacccatccggaatataacttccg

SEQ ID NO: 98429 - DNA, 380 bp, Glycine max
atcacaagatatatcaatttaactttaacattagacaatttcaacatttccatttggcaatgcactcatctgcagtgttctgccactgtttgatgccaaaaaccgcacagagggtaaggaaggatccgtaacagattcaatctcaagaaagtttaggtcaaccgcgccagatctcttcaaactcaaaacaaagacaagtgcaatccatcccaacaaggaaagtgcccagtaattgctcatcccatgaatcaaaccccatgctatagcatatccaacaacaatccccgataaatggccaagaaaactcgcctgaggaacaatgatcgaagtgaagataagtgattcaaacggtgcaaaactgataggaagagaaagaaacc

SEQ ID NO: 98430 - DNA, 343 bp, Glycine max
cttgaagttaacgtcagtgtgtaattcggtttgtcccacctgtttaagaattaagatgtttcagtatcatggttgttttgttcataatgttacttgtcttctgttaatcaatgaatagatgtcattctagtctaagatgaacatttgtacatttaccatgcaactttatatcctgtgaacagttattgacatgtggtcatttgtggtttttgcatgggttttgtcagtgcaataggtcttggtgttctaagtttctttgggtctgtttttggtgatctcactgaatcaatgattaaacgagatgcaggagttaaagactctggcacactaatacctggtcatg

SEQ ID NO: 98431 - DNA, 160 bp, Glycine max
atgacaataaacctttcatgctaatgaggattcaaattacctaaataggcccttgaaaatacaagtctcactgcacaggtcaatccccctaaatcaatagtttaaagtctgtccagaatgaaactacagatgaaaaagctttaaggctttccattgagaa

SEQ ID NO: 98432 - DNA, 190 bp, Glycine max
gaaaagaatgaacaattcccatcaatttatttggataatagttttgtttaattaacacccaaattggtcacaattttttgctttaaaccaccctagatgatgattttggctcaaaaggtctttcgccctggtccgctctgaaaagcattttattccaatttggggccctttgaacaattctggggggaac

SEQ ID NO: 98433 - DNA, 374 bp, Glycine max
agtataaaactattaaatatattcacatgaatatgaatcttgagttttccctggcaagtaaaataatttatagaactaaatgaaatatttaacactaccctcaaaggcatagctacagtccaagtccaatttcatgcaacaaaaaaaatatatttatataaaaaaaaaagagagagagaagaaaaaaggactacaaagtatcgttttcctccgacttctgagaaacttctgggaatcggtcccaaacggttaaacgacgcacgtgacgtctccgcgtgccggtctcggattccctacgccactacgtaatctaatctaaaatgtttcctttgcttaaccgtcgccgcgtgtcagttgcacactctttgatttgt

SEQ ID NO: 98434 - DNA, 449 bp, Glycine max
  unsure (1)..(449): unsure at all n locations
catggaagctggaaaaagatttgcagtgaagactttaaaaaagaaacaagagaaagacaataaatgtacctcaattttggtcactcatcaagtcaaagggttgccactacttttcattttcttaatggttgtgtttaaaaagcaacatttttttatgctttacacanaatgtgtcttctctggatgctggcttgaactaactgctagattcagtttggttcggtttctggtccttaaatttagtaggtccttttatggagtaataatataataatatataagagaaagtgtgaaacaaagaaacgattacatattttatttgtaattaaaaaaaaaaaaaaaaaagctaaaaaaaaaaaaaaataaaaaaaaaaaaaaaaaaaaaaaaaaaaaaaagaagaaaaaaatacactatcaaataaaaaaaaaaaaaaaaaaggggggccccc

SEQ ID NO: 98435 - DNA, 103 bp, Glycine max
cattataccaggaggtggaaccctgcccctacatgcgaagccttatttactacatattctttgttgggcgcactatatctatcatgctttggttaaatgacct

SEQ ID NO: 98436 - DNA, 296 bp, Glycine max
ctgagcatcgtctagctatctcgatcgaactgtccaaggtcctgtcactcaccgggcacacccgatgcctagttaaaaaagcccggtgaaaatgaacgtggtcccttagacactatcaaccttctgcgtaagagggctgcgctggccgtgggctgcgggtggggagtggggcccactagcctaaacaacgccagtgcccaacccacagaattggctaggcaaacggaagaattgcagcatgcatgctatgcggggatttaagggcacggggcaagtgtagtataagcagcgacaaa

SEQ ID NO: 98437 - DNA, 269 bp, Glycine max
ctagctatctcgatcgaactgtccaaggtcctgtcacataaccgcccatgggagaggtaataacggggtgcgtaaatttcccgtacacccacctgtacagtagcaacaagatgaggacgcacgcgcaacacccagccaagtaaaccgacaccaaaacgatgcgcttatggtctggcaagttagccggcagggtactatggttaactggccaaagaagcggcacccggcgcgttatacaacgccataaccaaatcccaggctacaaagat

SEQ ID NO: 98438 - DNA, 210 bp, Glycine max
tctagctatctcgtgactgtcaggtctgtcacaatgctcgttgcactgcgccggtacatccactgtgctggtgcacccccgattggcaatgatggtccccaaatttagttttagtaagtggaggcgcctgcgtaggctgcacaggcggtgcgcccaccgctacacgatgatacaaggaggaagccttgcaagggtcaacataaatggtag

SEQ ID NO: 98439 - DNA, 218 bp, Glycine max
cggggataaaggatgggcgaggttcgactacactctccccggggactgtctttcttttatgtattacaggcagagcagggagcataggaacccgtcggagcagaggacttcggcgctggagcaggcgctgcgcgtggcggagacggaagcggccaggaatatgattttggaggagttggaggggaatggtgaagagggggataaggtggatgcagggg

SEQ ID NO: 98440 - DNA, 498 bp, Glycine max
cccaaccaataatagtctcttaattctatttggcaatttctttagtaacattaagatattataatctgtggaaatggcaccttttggtagattcactgctgaaattttgatggctgtgatgtttgtgggcttgttttgtgtgaccaacattgtggcacaggattcagagattgctccaacagggcaattggaggctggaactgggtttgctttgcctgtttctaaggtgatcatgtgttcctctgtgttggcatctctagtggcattcatgttgcagtgaattggaagcatttgggtttgaaattaattgtcactttctgggggcaatcttactatatgagttaaaattgatatgtttatatatactgcgtgtttgcttgttgaaaatggtgatactgtattttttggcattttgtaagattagctttatgatgagctacagttacaagtatgtaaaatttctactcagctattattggtgtgagctgatatattaat

SEQ ID NO: 98441 - DNA, 510 bp, Glycine max
agagaatatatcattgctcgaagaatatggcaggctggaaacacatactattgtgtaacgaaggtatggttctaacatgatttgctataattttatggcatttcctcttgtttctgctcctctctcaatgactagtccccactcttctattgctagaaaagaaagtcttgttgacgtgatgacactaacagtgaatgtttaatttctcggttcagtagaatcaattgagtaatgaattatatggcataaaggaaagaaataagtggaaaatgccccatcccccttctcccaaaaaaaaattttttttttttaaacccagtttcacatgttgagttgataatgtgatttgaactagttattaatgtacttggatctcttttagtaatgccttccaatgttccttttggtctccatctagaggattaaaaatcatgctatctaccctcactagtgtcttcagtaacctcttttgtatatgtcgaaaccatcttaaccaattttctatcatct

SEQ ID NO: 98442 - DNA, 256 bp, Glycine max
tgagcatcgtctagctatctcgatcgaactgtccaaggtcctgtcacgtggtaattgaatctactagtctgagatgtggtaggttagcctgggctttaagtactaaattcgccaggatttgacgggtaaatgtcggagtcgtccgcagccgcctataccaaacataattgggcgcaaaacctagtgtattccacaaggtcacaacaaagagcacttaattagtcgcgccaccggtatttagccaggggggtataaa

SEQ ID NO: 98443 - DNA, 116 bp, Glycine max
gttgtattatgtaaatgatgctcaccatattgttagattagcttagcatcttattatcttctcatgatacctgtaaaattgatgaaaatttttgttttatttcattggggtacatc

SEQ ID NO: 98444 - DNA, 116 bp, Glycine max
gatgtaccccaatgaaataaaacaaaaattttcatcaattttacaggtatcatgagaagataataagatgctaagctaatctaacaatatggtgagcatcatttacataatacaac

SEQ ID NO: 98445 - DNA, 80 bp, Glycine max
aaaaaaaaaaaaaaaaaaaaaaaaaaaaaaaaaaaaaaaaaaactcgagccgattcgactcgagtagttctagatcgcga

SEQ ID NO: 98446 - DNA, 80 bp, Glycine max
tcgcgatctagaactactcgagtcgaatcggctcgagttttttttttttttggttttttttttttttttttttttttttt

SEQ ID NO: 98447 - DNA, 200 bp, Glycine max
cactgagcatcgtctagctatctcgatcgaactgtccaaggtcctgtcacccgtacccgtaaccagcccgtttacgagtggggttgtttagctgtaggtgtattcgtgttttgagctactaaagtggaatttgaaggttgtgtggtgttcgtcatctctataaggtagtactggtcttgttaaggtggtgttattgtact

SEQ ID NO: 98448 - DNA, 388 bp, Glycine max
  unsure (1)..(388): unsure at all n locations
cactgagcatcgtctagctatctcgatcgaactgtccaaggtcctgtcacttcaacaacagtctggaattcgactaacactatcaaaaaggcactcgggtggagtataattggggggtcgactacaacgggggattccggtctgtccccaaagagcggcacgtgagtacaaataaggnacacccgggaaaggccaggtgggtgccacaaggacagccgtggttgcaatacgttggggagggccgaccgaagagtcagcaagtgatgcgtcaacgtgatcaatggacaaacgcacagtaagggcaacaaagcatgggaaagtgggcgcgatgcatttttaagtcaaggcgggcccaggctcaacgcaaccaaagtaggggagtgatgaa

SEQ ID NO: 98449 - DNA, 161 bp, Glycine max
cactgagcatcgtctagctatctcgatcgaactgtccaaggtcctgtcacagataaactaggcaaggtaaaaatgaacggtagggtggcgctggcatgggaggttgtaaaattaaatagggtcaatatagctcctaatgcgcatgctctgcataacatgaa

SEQ ID NO: 98450 - DNA, 212 bp, Glycine max
cactgagcatcgtctagctatctcgatcgaactgtccaaggtcctgtcactcgtttggcaataagcactacaaccactcagcaaatgctctcatgcaacaactattatttaaatacgtttgattcaattgtggtgtgggcgggttgaaaagtaaggggtaatgtttgggttgtttatttaaattgaaatttaaattgcagcaatttaatttg

SEQ ID NO: 98451 - DNA, 265 bp, Glycine max
cactgagcatcgtctagctatctcgatcgaactgtccaaggtcctgtcacgctatatatataccaataacaaaatttattaaatgtgggtgggttcaagaagtaacaaaaggggcatgaaaaaaacacaacacaaaatccgaagtctatataggtgggtaggtagtctaaccccaactggtgtgctcatgtaattattcgtcttcaattaggttaaccggtctttttcatgctgtggttgccatcccagtttaaattacaattga

SEQ ID NO: 98452 - DNA, 322 bp, Glycine max
cactgagcatcgtctagctatctcgatcgaactgtccaaggtcctgtcacccacgcgagaagtgcactcagcgtaccagtggcaccatggtttggcgtgttttgaaccaccgaaccaaccagggcccagcccatgaggggtcggtacagggtcagccgagttggcggagggggcagccgttggtttagtgttggtattagggagggttggatagattggccccagcgaacagtgcacgccaacgttgagaacatctcgtacaaccaatagcagcacaagcgcaacaaccggagtaaatcgtgtaaatacaccaagttagtaa

SEQ ID NO: 98453 - DNA, 299 bp, Glycine max
gaaacaaaggtgtggatgggacaccacccttttcatttataatagaaaaaagacccaattaaattagggttcaaggaaagtaagacacaataaatctcttgcaacacccttaaagcttcatattgtggtaacaaactttatagagccgctttaaccaccccaatagagcactactaacacctttaaagcttaatttcctaagtacaagtttacaattattttttttagtggcaagcattgatactattttaacccaatttgttggaacattaattaagcctcaaaaatttcaggggatt

SEQ ID NO: 98454 - DNA, 240 bp, Glycine max
cactgagcatcgtctagctatctcgatcgaactgtccaaggtcctgtcacccggcgatattcccgcttagcatagaagagtgtgttgtagtagtatttgtgtattaggtagggtttgagagaacatgggttgaggttgttggtggttgtaggtgttagggttatatgtgtgtagttcaggtcccgatcccgggcgcggagtccaattggtattccaaaaggtgtacgtcatcgactcaaa

SEQ ID NO: 98455 - DNA, 276 bp, Glycine max
  unsure (1)..(276): unsure at all n locations
aaaggggtacaaaaaaagccaatantggcggtagtaatgcgccatggaaaggtatagaggtggacaaaaaacaaagcacaacaaacacaagttatcgtggagcatggaaaacggaaccgtaagtaaatatggataatacaaaacacaacaccacgctgattacgatatgtgggatggggcaggaaaagggaggcgaaaatgattaaagtagcgacggacaatgtaggaacgaaggacgacccatgaataaaaggagagaagggtctagaaagggga

SEQ ID NO: 98456 - DNA, 210 bp, Glycine max
  unsure (1)..(210): unsure at all n locations
cactgagcatcgtctagctatctcgatcgaactgtccaaggtcctgtcacccgacaactaatatggcctacgctatacgggtacattgagcaaatctacaataataacccagcgacaaaaggcaccaaccagaagagttgagccnagcttgcatgattattggccgcggcattagttacccgtgaagataaacagcgcataaacaagaag

SEQ ID NO: 98457 - DNA, 286 bp, Glycine max
catcgtctagctatctcgatcgaactgtccaaggtcgctgtcacgcgtaagacccactacacagacatgaggtcagaacagctattcgcagcgcaggcggctgcttggcgagagagaagtgaactgaaggaagctgggcaaaatacgtggcagaggggcgccgcatgatggccccattaaggtggagcacaccggggtgggcaacccgaagcgtgccggctagtagagaagtgaagaataggcgttccaattgtaggtcgtagggtaaccggctaatagggagaac

SEQ ID NO: 98458 - DNA, 355 bp, Glycine max
cactgagcatcgtctagctatctcgatcgaactgtccaaggtcctgtcaccgcattgtccagaggccatcagcaaaaaaggaaccatcgtaagctagccatcgggctagccagccacagaacgtcgcccatagtgagtagagggggcgatgtaaaccaaaccataataaacaagaaaaccaagtaaacccagccaaagaaaacggcggtttgggcataactatggtggactgtctgagtgtgttatggggtgggaggctgtttgtttgttgtgtgtttatatgtggtggtggagttgtcggtttaaaggggtttggtaaggttagggtatagttgattggtaatggttatgagga

SEQ ID NO: 98459 - DNA, 315 bp, Glycine max
cactgagcatcgtctagctatctcgatcgaactgtccaaggtcctgtcactaaaaggtgttgtgtatagggcataaggatatatctaatttcgaacgaatgggttatcaacgggtagtgtagtgtagggggaagcgtggagagaagttaatatgaggcaggttggagtaaaggggtgtaggttacgtagtattgctgtgcaagttaaggtaggtggtggtggcggtgggcggacgtaagataatagggaggatctagatgtaaacgagtggtcaacggtcgagggggaggcgtagagtagccacaagaagaagta

SEQ ID NO: 98460 - DNA, 378 bp, Glycine max
acatctccaaagtccaaaccacataatatataaatgaaaccatggcttctgatttttcgtgtactaaagctaaattcatctaggccataacacacaacaaccacttaaccacaatacacgacacataaatataaatataataataataaattaaaaataagtaacgggagttctagaaaactagaaagaacgctaagaaagaaaacaataaagataattaagaatttggcctccctcattcattccttgaataacgaatgtttcattgttcagcaagggctttgggaagtgaagatttgagggtccagcttggtcctgcaaacggggcaaagagggtgcttggagagccaggtgtcatcgcaatggacatgaaaacca

SEQ ID NO: 98461 - DNA, 170 bp, Glycine max
cactgagcatcgtctagctatctcgatcgaactgtccaaggtcctgtcacataacctcacaaactaactgtagcttgacacggggaaaaagccgtactacttgttgttagcctgtgtgtggttttagttggcctgcctaccttcgcaactgccctttagtactttttcaa

SEQ ID NO: 98462 - DNA, 457 bp, Glycine max
  unsure (1)..(457): unsure at all n locations
tgagcatcgtctagctatctcgatcgaactgtccaaggtcctgtcaccaaagataatacagtaactaaacagcgaattaaaagagtagtagtggcaccagtacccgatcggccggctacagtaggacaggtgcccatagtgaccaagaacaaaaaggcacccagaacgtcnagggacaccaaccaaaagccacaaataggacaggacaggcggcctagttatcgggcctgtgctaggctgcgtgcgggacagtggggaggagggccacacaccaaacgacacggagatgtgacagtggtttgcgttttggtcccagtagggtggtggggtaggcatggtggtgcattcagttaggtacgcccgcggaatatgggggggtgttgtaattaacatagggcatcgcggagaggtgaaggtggggtttttgagagaagaggtggagtagagtgagtaggcg

SEQ ID NO: 98463 - DNA, 291 bp, Glycine max
cactgagcatcgtctagctatctcgatcgaactgtccaaggtcctgtcacgcaggggaaccccaatgattgcaccgttatagagtggccaaattgcatgcgaagccaggcccgatacacccagtcccaggggcgaagttagcccgtgtaggggctgaaaaacgagcctgggtggttcgcgggccacagcccactataaacagttaattgcgggagcggaggcagcggctgctggtatgtatggtatgtgagcaaccacgagccgtatgagtagcccaaaaagggagcaatg

SEQ ID NO: 98464 - DNA, 339 bp, Glycine max
gcttgctaccttcatgtgacagcagttttgtccccaaggttaaggttataggggtaacaaagaaccaccgtaaaaagcggtagagagcaaggccaaggaggcggggtggaggccttgagtgcaattaccaaagcacagtccaaggttgccccaaggttaggctataggggtacaaagaacacctaaaaagcggtagagagctaaggcctaaggaggagcggggtggaggaccgttgagttgcaagttaaaccaaagcacagtccaaggttgtccacaaggttaaggttataggggtaacaaagaacacctaaaaagcggtagagagcaaggccaaggag

SEQ ID NO: 98465 - DNA, 467 bp, Glycine max
tgagcatcgtcagctatctcgatcgaactgccaaggtcctgcctctcggtggcgcgtggggatagtacagccacgtgtacgcaatatctatgcggcgtaaacgaacccgtgatgccagttcacatacgcatttacggacagcaacgggtgcagcagtacaattcgtatagtagcaccaagcggaaccattcgcacacaacacataggtgatttgatgcacgtcaacccaactgacaaccgcgtgtgaacacccgtgggtgggtggcagtgggaccgacggacgtcgctgaaaccggagcgtatttgagtggcgtggccagtgaggggtaggtcaaggagcctggcacggggctgcggggcacgtgaactggtaacggcaacgagcggggcctggaagagagcaggggaaggagcgtggcacggggccaggaagagcaaggccgtggtgagagacgcagaggttgctg

SEQ ID NO: 98466 - DNA, 365 bp, Glycine max
  unsure (1)..(365): unsure at all n locations
cactgagcatcgtctagctatctcgatcgaactgtccaaggtcctgtcaccagcaacgcgacacaaaggacggcttgtaaagcgtgagaggtgcgcatgctgaaatagtaagacgacgtgcgtgggcatgaaacacacacccgactggtaattgcgaaacggcatggcggcatgccaccaattaggccccccaagagcgcacccaagcccngacngacnggaccaaggcagcgtggggatagcgttaaccatagccagaacnggaggtgggcgaaagaacgttcgcgaaaagacccatgtccgacggggtggcatgtgcgaagccccaagacgtgagnacgggttgcgcgtttttgggcgtgcgt

SEQ ID NO: 98467 - DNA, 318 bp, Glycine max
actgagcatcgtctagctatctcgatcgaactgtccaaggtcctgtcaccacaaggcggttgtgtggtgtggttaggtcgcgatctctaaaacaagtagcatcacggttgtgctgcgttctgtgtaacaagtgcacgaacaggcttgctaagacatgttacaaacagtgtcgccacgcctaccgtaagttttttatccgggtacgtataaacgtatacataagtgttacacacccgccggcaacgtatgccagtgttcccgatatgggatgtgaaccacattgattagtggtaccggcaggggttgcacaaggattta

SEQ ID NO: 98468 - DNA, 356 bp, Glycine max
ttccaaggaaggctttcccgtcatcactgtatgacgtcctccttctttgggggggggggggggggggcatgggtaaatagagcatggtacaaccttaaagttctatggatatattagagaaagaaagacgagttgcgtggatgaagagtatatggttaaataaaccaagaacgggtattaaacccaatgttggtacggatatcgttgtgtgactaaaaatagcaggggtcggcgaaccaagggcaaattaaacggtaaggcacgttggtgacgagtcgtaccagttaataccaaagaagacaaagtgcagatgtagacgcgataagcatagttcggggaagaacaagagcaggaat

SEQ ID NO: 98469 - DNA, 365 bp, Glycine max
  unsure (1)..(365): unsure at all n locations
gtggtaaagccgaagccatagtattacataataataaacgtagttgttgggcttagtgttttgcgtgtggggttaaaggggggtacgttaatagcacaagtggccggatgccaccgagtagccaggtaggcccgtgtatggacggcatacaggcagccaaaagcaaaaaaagcaccgtaggcgcgtgcataatgatggtatgccagttaacnagaattgtaaaaacgccaaggccgtagttaacagggcagtggagttcgtagcagcgtatccacttgggaggcagtcaacggcagtacagtgattagtggctaggtttgcgttgtgttgaggggtgataaagataagttacgaaacataagaaa

SEQ ID NO: 98470 - DNA, 183 bp, Glycine max
tatgagacaacactgagcatcgtctagctatctcgatcgaactgtccaaggtcctgtcacctaaccggagctcacattttatgccaagtccgacatccagtaccagggcggctaggggtaatgttgcaccaactagtgtccgtgtgtcgcacagcaagccggaaagcaggctgcgaaaattgt

SEQ ID NO: 98471 - DNA, 300 bp, Glycine max
atgagacaacactgagcatcgtctagctatctcgatcgaactgtccaaggtcctgtcacgtttgaatggaaaagatggccagagtacaggtaataatggttatctaatcggtttgtctcttgtggtcatcgtaaatgtcagctatgtggtagtaagaataataagggttaaggtgtgggctttcacaatggccccaatacgttgcgtgtgcggcggcacgggctaaataagcattgaaaacccgcgtggttgggcacggccggaaaagcaaaccgatttggaacgccaggagtagtatta

SEQ ID NO: 98472 - DNA, 367 bp, Glycine max
tatgagacaacactgagcatcgtctagctatctcgatcgaactgtccaaggtcctgtcaccgtagccagacctggtgagtagtcgtggtatttttggtggggatagggtgtatgtcaggtcaagtgctaatgctaacaggtaagggtgtgttcgtaatatcggtgtatgtgtatggcaactcctgtgttgtaagggcggcttactacgtaaagttagtgttgggggttgtggttatgtttgggtgcgtggtggttaattattttaggaaggggttagttggggttgtggtggtacagtttgttatatgtcaagtttaggtgtgtaagtaaagtaaaattcccatgggtttaaaattaaaccgaagaa

SEQ ID NO: 98473 - DNA, 406 bp, Glycine max
cactgagcatcgtctagctatctcgatcgaactgtccaaggtcctgtcactggcactagcttagtagaacgctaaagcgcgcaggcccaactaaagcaacaactcccggcataaatcagaaattagaaaagacaactaagcgcgcaggccgaggaggagaaagcataatcaggttttagtcaattccattaaattcacacgtccatttgacggaattatttaagcgcatccaattaaatgacggacggaaggagtgagaggataggatagctcccgtgcgtcctactcttggcggggcgatgcgatggcgttaagcgcagcatgaagttaaccgacagtgcggtgaggagacgaggagtgcgtatagagagcagagacgtgacatggatcgataagggacggggag

SEQ ID NO: 98474 - DNA, 335 bp, Glycine max
tttccgtcatcactgtatgacgtcctccttctttgggggggggggggggaacattttaaagcgtaggctgtgcggctagggaaagccgagatagatgatcccaaggtgaaaacaacagtgaatggaaacggatgttttggggggggccagttatatagaaaggcatttcctaaggtaggagggagcacatgaagaggtactaacctatccctacaacacgccttgacatgagtggtcaaaatggcttggataggccagtacgtgggatgagcaacggtgggggggtgttaggggtggtaccccgagggcgcctataatgtacttaggatgtggga

SEQ ID NO: 98475 - DNA, 478 bp, Glycine max
gaaggtttcccgtcatcactgtatgacgtcctccttctttgggggggggggggggaaattcctaaaaaacaggtgtagaggcgcctggataaaagaattgcggtgtaagtgtagtttaggtatgcagttaacccgagaatgaaggcggagtgatagcaggagtagataggatcaagggataattaggaactgctggctagctgtatatggcaggtagcctgtagagttagcctacaggtcctcttggtggttgttggccttccgacagtagtgcaagcgtacggtaccgcgtggaacatgttcgataaatgtccgcaataaaccaaaacgtgtgccacaaaacaaacacatgtttaggtgagcagagcgcaataaagttaagataggagtgttacagacaggtggtgggagggcggtaaaattattgccaatattacatgtacaacaaggggcattgcaaattggtattgtagatggg

SEQ ID NO: 98476 - DNA, 232 bp, Glycine max
cactgagcatcgtctagctatgtcgatcgaactgtccaaggtcctgtcacctaccggggtactaccagaacgacgtggacgtgggttggccggtagaacgttggcaaccgggggcagctgcgggggtgctatgggggcaattgggggattgggcggggctagtgcccgcggcggggccaatgagtgtttatgcggcctagcgcacggggggggatagcgcgccaggggacag

SEQ ID NO: 98477 - DNA, 285 bp, Glycine max
tgagcatcgtctagctatctcgatcgaactgtccaaggtcctgtcaccgggagattaagcggggttaaaccgccaggtgtcgttaaccgttaacccagggaaggctactggggcctattcagcattatgttacaggctggcagaggggaacaaccccactggacgctgccaaacacaccaagtagcggagtcacgtaggtaccagagccattagccactatacatggataagttcacatgactcgttagatatgagagacagcaatcttgagctccaaagttagg

SEQ ID NO: 98478 - DNA, 144 bp, Glycine max
gagcatcgtcagctatctgatcgaactgtcaaggtcctgtcacacaaccgcattgggggcgcctccagcggaatatttacggcaacaataacaatagtattatgcagagtaaacgccatattccggttaagtggggtataatga

SEQ ID NO: 98479 - DNA, 305 bp, Glycine max
tgagcatcgtctagctatctcgatcgaactgtccaaggtcctgtcacagactgagcctaatcctcacgctaacggcgctccgagtagggaccaaatacctggtccagcgcacagaaaatgttgtccgagtggcccaggtggcacgtgtgtcgtgcaatccgttgtacaagtgctggttttaaaggcttatttatattttgtatgctggtgtttggttttatattttgtttgagtcggcttaacacacgcgcgtttggtatgccaaccaaagtaaataccgttaataaacgagtaggggtaaatta

SEQ ID NO: 98480 - DNA, 349 bp, Glycine max
ggtttccgtcatcactgtatgacgtcctccttctttggggggggggggggggaaagtaacgataaggaaaagcgcgagggaaagggttgacaaaaggggaaaattggtagttagatataacgtaacgggcaaaacatgcaaaaacccaggacctgagagataagataatagtatggggataaaacaaacacggatcgtgatatagaatataaatgatgtggtgggtacggtgacccatggtatggtacttaaaacttcgggagatgtagtggcaatggtggcgagggtatggggaactagtcgtattggcacaggaacggtggtgttgcgtggggtaaaggtgaaatag

SEQ ID NO: 98481 - DNA, 283 bp, Glycine max
gaaggtttcccgtcatcactgtatgacgtcctccttctttgggggggggggggggggccttgaaggaaaaataatggcaatgagcagaagaagcagataacgtaagcgtaaacccgacgggccgtagtgaaaaaatcccgctagcgtgtttggggtgacgataaccaataggaaacgatggttgatataggggctaaatgtatatgtagggggaccaaactgttaaacttatgaacatagaaagcacgcatggtgacacgtggggtggatgtatgaaggaagt

SEQ ID NO: 98482 - DNA, 179 bp, Glycine max
gaaggtttcccgtcatcactgtatgacgtcctccttctttgggggggggggtgggggaccagtgtaaaccaaactcgcgggaggtacgatgaaatacacggtaaaataggccttataaactatacagttaaaatgtaaaaatactaagggttcaagtactggcaaacctactaggagag

SEQ ID NO: 98483 - DNA, 280 bp, Glycine max
cactgagcatcgtctagctatctcgatcgaactgtccaaggtcctgtcaccgcaaaggaggtcaggaatgggcggaaccacgattgggtatggaaaagccttcatatgcgtgctaaaggtgagaggcgagtaaagagcccagggctataattcgcttgtggttgtatatggcgagggtgttggtcgcgtattgggattacaaggagccacatgcctaaggagcacgtacaaaagccaagcgcaaaatggtcccagagaggtggtgggatgcttggttaag

SEQ ID NO: 98484 - DNA, 330 bp, Glycine max
tatatgagactacactgagcatcgtctagctatctcgatcgaactgtccaaggtcctgtcactcctgtcactgtcacttcggtaaaatagaaaagcattacgtaggggcagcctggtgcgtacgaagtgaccgtcggtgtgtttgcgatagggggtggttaacgtatttgaaagcccctgcactagcataaatgtaagctttattaataagggcggcttgcgatgcccatgggacgtgttgaacgtgaattaaagacaagtagtccaaacgaagagggtcaacggaaaggccacatagacatagccagttacataacacgggttaggtac

SEQ ID NO: 98485 - DNA, 222 bp, Glycine max
ctgagcatcgtctagctatctcgatcgaactgtccaaggatcctgtcaccttagtgcctcaaacgttaaccgcgtatctaaaattagtagtagaatcttaaatttaatttaatttaatataatataatattattgttgagtatagaagaataattggaattggaattggaaattttttaaggggtagcgtgatccagtttcgcaggtccagttttaataaaa

SEQ ID NO: 98486 - DNA, 313 bp, Glycine max
  unsure (1)..(313): unsure at all n locations
tgagcatcgtctagctatctcgatcgaactgtccaaggtcctgtcaccaataagtatgactactgaggagtcgccccgtgtagcctaggaggcggcgggagcagcgtatggattaacacacgtgggaagaagcggaactacgcctgcaagcaaaggcattcggaggtaacgcaaaagcggaatacgtggtgacggccaaataacgctcagtgtatcctaaagaaacggcgcgttgagcacatagtaaacgtgggcgtacagcaaaggccaaggtttggtagccaaatgancgtgaaaaagcttattaagcggc

SEQ ID NO: 98487 - DNA, 398 bp, Glycine max
ttcccgtcatcactgtatgacgtcctccttctttgggggggggggggggacacacaacacaataaggcacttcgcaggtagagaagggaattggagaaagaagaagaataagaagaacaggcatgtgatgggtttggggtattaggagtaattagtgggtatggcttagagaataacaccagttgaaatacaagtataaagaagttgatagtcacctgcgcagccgaaactagatgcaaatgcgaagttttaacctgaagataagagaatagggagtgattagtggtatacagatatagtatgggaaatatgcgtagtaggccgaaaagtaagttcggcggcgtacgttgaacaagacgtggggggtatagggaggtagatattgcttatagaagtag

SEQ ID NO: 98488 - DNA, 427 bp, Glycine max
  unsure (1)..(427): unsure at all n locations
tttcccgtcatcactgtatgacgtcctccttctttctcagtgaccaatgacccccgatatctcatgtaattcccacctagatataagcgatcgcccagcaccgagtatcgtacagtacagtgctacgcttaactggcgaactactttgtatttgtaagctaccaacgtattttaccttctcatcaacttcgtcgcaggtgtattctgataatctaggcttgttcatcagaccgggtcnttaagcgttagcccatggtagcgtgtaccacggctggtcgctggctgcacagttgtacgtaagattccacggtcataaccacaaggaaggatcgaaggaagggtacgagaggaggaagtgatggttgaacgtgtgcacgccacgcggagtgtcataggggtagaggagtagcggagagagcggcagcca

SEQ ID NO: 98489 - DNA, 242 bp, Glycine max
ccaaggaagcgtttcccgtcatcactgtatgacgtcctccttcttggggggggggggggggacggcaccaagagtgggtagtggtggctaaggagaaaaaacataactgtaacgcagggctaaaaagtgtaaggatgatagaggagacgaaacagccaagccaatgtagagggaccttatacccaatatgagaatggcagtaataatacccttataaacacaattagacgtagtaaggtgcc

SEQ ID NO: 98490 - DNA, 335 bp, Glycine max
atatgagactacactgagcatcgtctagctatgtcgatcgaactgtccaaggtcctgtcacgagctacacgtgtggctatctgggtaaccacccgtattggatagagagttgggcgagccgggaccacactggttttacgtagggctatcctggacgctgcgggagccgccaatagagagcggcaagaacttgcacgctaaccgacaagggcagcaccaaccaaaccgcggccgcggatagtgcaacccaaatgctaacgcgaaaaaacggcggcgcagttagtagagggcttgcctaaccgcaccaaccgtaggcagttagccggccgcgcaac

SEQ ID NO: 98491 - DNA, 370 bp, Glycine max
ctgagcatcgtctagctatctcgatcgaactgtccaaggtcctgtcaccagggtcgcctggaaaacaaggcagaaggaatgagtgactgaccagaaggaagtaagccaacaatattttatcaaacaaggcaaggaggggtggtgggggtgcagcggctaagagaggagagagttataaaatataagcgtacggtacacgcggatcatatatgaatggagtacaacaagagtaataccaccccgaaaaaaaaccaaagaaaacaaagccacaacgggagccgaatggctgttagcgagaaccagccaaatgccggtaacaggagcaatgcgtacccaaggtacagggatagcggtgcaaggacgggaaggg

SEQ ID NO: 98492 - DNA, 324 bp, Glycine max
atatgagactacactgagcatcgtctagctatctcgatcgaactgtccaaggtcctgtcactaggggtggtcgacttaaatatgtgcaaaggtgtacggagcgtcgcctaactcgagcgccagcagtattgatgcgcgcaaagtcaaccgaattattgtatgtatcttgtgagtagtccttaccatccaactcgggccctgtacagtattaatggtttgtacggtaaattgcaccaaagaatgcttagtaagaagcatgggaagcacttgccagtatgcgtgttaatgccaggcgagagtccgccgtattaaagatagccgtag

SEQ ID NO: 98493 - DNA, 288 bp, Glycine max
gtttccgtcatcactgtatgacgtcctccttctttgggggggggggggggaaacgcaagctagttaagaagacactagacaagggcaagggcgtagcgaacgaatattaaatccgcataaaccggcagggctaatgcgtgacttgtgtaaggtaaggagtgatagcaaagggggacgggataacttcacactattaacccccgtggtttggcattacttgtaaacgacaaaagtactagccttaatagactaagttgcataggtgggagtgtacttaagggtaagtgg

SEQ ID NO: 98494 - DNA, 419 bp, Glycine max
gtttccgtcatcactgtatgacgtcctccttctttggggggggggggggggggaaaaacaataatcaaagagacgaaacgagggaccagcgtacaatccaacggattttggtcataagaagaaaacatctaacgcagatatgcggtatgggtgtataagtagggtagtaaatatgatggagtgcgaacttatatatgatacggagccaatagtaatacgaggagtagtagagtagtaggggtagtaaggtgcaagtgagtggttatataaacgtaggatggtgccgtgtatgggatttgtgcgcgtattattacctagcgtagtagttgtagtagagcgttgttgcagtggcggctgcgtggttgttgacgtgttgttgttagcggcatagtagccacgcgacgggttgtataggtagt

SEQ ID NO: 98495 - DNA, 412 bp, Glycine max
ttccgtcatcactgtatgacgtcctccttctttgggggaggggggggggtggttataacgaagcggtgcagtggctagataaccataaagacaattagctaaagcgagcgaaggtacgaaagaggccgctgattggcgatgatggcagtgaaggccgaggcgacttgggatatttagcacggataacggtgtacgagctagaataaatcagggagacccaataatgatgattaacgtgccaaatgcaaaaggtaacaagtgctaagccccaaaatacagttaaggtcagtatttaagtcagcctatgcgagaggaattttagagcgattaagtgcaagcgccggagttgtttgattaatagacaaatatacccgagataacctaagggtaaaggtaccttgtatgttaatta

SEQ ID NO: 98496 - DNA, 256 bp, Glycine max
gcgtaaccggtgaagggttgagatatgagggttactattggggcagcgctactgtaaaagaatggcaccaaagggggaaaaaaacctaaggcgagaatggttatagcggatgggtgtgaccccaccaagaaggagagaaataaaaacgcgaaaacgaaaagtaatggcgcagtactacgtaggataatggggttgatagcgattagaagaagtaccacagttaagtagcaatatacccgggtcggcataggtgttt

SEQ ID NO: 98497 - DNA, 313 bp, Glycine max
gaaggtttcccgtcatcactgtatgacgtcctccttctttgggggggggggggggggggctaaaagaaaagaaaaaaaccaaaaagaagtgttgtgtcgggggggtcccacaaggggtcattgagataaccaacaaaacaaaaccaacttagagatgctggggtgattgggggcacaatcatcaagaaagtagtataacgaaggttgggggggtgggtatggtcttaaaaagaggtagggggttcgttaacgcgatggttcggattgggatgcggcgaaaaaggcgtgaatgagtgattagaattgctattgt

SEQ ID NO: 98498 - DNA, 197 bp, Glycine max
cactgagcatcgtctagctatctcgatcgaactgtccaaggtcctgtcacagtcagaatagagggtatggcacatacggagtgggagtgatctaacaccaacaagacaaaagccagagtaccggcagccagggccatgtgttaggcggtaatatgtgctattcaagtagccagtgcatacaccatctacacaacaat

SEQ ID NO: 98499 - DNA, 309 bp, Glycine max
cactgagcatcgtctagctatctcgatcgaactgtccaaggtcctgtcacctacacgcaaaagggtacgggacctgagaaattgtaatagtaggcatagggcatagggcataagcctaagcttgcgggcaggtggtgtactatagaagtcagtgtctgtgcggcaggtcaggcaaagtcaacaacaaccacctaactggtaatttgactcgggttataagtcaggtgcagcagagagggctcgccgcgggcttggaccaggcccctcgggttccgcagatagaatggcatggcagcgccggcagatgaa

SEQ ID NO: 98500 - DNA, 335 bp, Glycine max
tcatcactgtatgacgtcctccttctttgggggggggggggggaacaaagaattataaaaggaagacgttaagattacaaacgcgataacgctttgaaaaaatgcatcacaggaccgacaagggggcgatcttaggttgagagaggacgtgagataaaggtagttgaaggaagggcaaacgaagcaagacgagagctagaagatagaagataacaatgcaatatagatcaccgataaggttaacgtaaataaagaaacaacccccggacgcacgattgaaatatatcggaacataaggggggggagaaaaaaaactatagaaacgtaaaataacg

SEQ ID NO: 98501 - DNA, 430 bp, Glycine max
  unsure (1)..(430): unsure at all n locations
tttccgtcatcactgtatgacgtcctccttctttgggggggggggggggggggggacaagaagaagaatgaaaaagtgtggttagtcgataatgaagttacgtttgaccggtgataagaatagattaaccgaaaagggtattaaaaaaaaatagaatcacccacaagatggacaaaatatagctacagtgggagggtgcaccaataggataaaaaacccgatttacaaaagaaagttgttgagggagagagagatgtggcaattgggttagcagtgattgaggcccgtaggagctagtggtttatgggtttgcggaggcggttagagattggtgatntttagcgtttgcatgcagatgaaggagcgtatggatcaccatttagtaccgtttaagtgcgaatgaaattaacgctaaattgtagttagtgtg

SEQ ID NO: 98502 - DNA, 417 bp, Glycine max
gtttccgtcatcactgtatgacgtcctccttctttgggggggggggggggtgttggcggggtggtgtttgtcttatgtttgggtgttaggggtggtgtaatggtggttgtgctgggtggtgtggtggtgggtggtgtgcttgtggctggtatgagtatgctagctggtttgcgttgtggcgatatcgctgttattactggtctgcgtgtcaatatttttggtatctggattgttcatggtggtacagttctggttctgcaggtaattttgggtaggggtgtcacgtcgtgtggcagggttcccgtctacatggtgtaacatagcgcaatgggtacaataatgcgcagaatttgccatgtggtgggtggtgttgtgccggcccgtggtgtggcggttgtgccctcggggggtgttgtg

SEQ ID NO: 98503 - DNA, 207 bp, Glycine max
tccaaggaaggtttcccgtcatcactgtatgacgtcctccttctgtgacaccagttaactgtccaaggttcactggatcgagtctcgctagctcgatcgtagactgtggtgagacgcgtattgaaaggtaaggtatgccttgcggggatatcgccatgccaaaatttcctcggatttaatggaagtcttggctactatagtttttgg

SEQ ID NO: 98504 - DNA, 267 bp, Glycine max
gaaggtttcccgtcatcactgtatgacgtcctccttctttggggggggggggggggaatatctaaaaaccaaacaggaggaggaccaggaaaggaatgataagaagcatactaggggggaaaaacccagcataacgttaacggcgtaagttgaggcgggacggggtggtagtatcaccaacgccaatagcacagtccgtaagcaacaaacgtgtagagagcgaattactaccgttattattaagcacacctttaatttacgaaattt

SEQ ID NO: 98505 - DNA, 373 bp, Glycine max
gttacaactactatgctgtggatacatgggcaaatatctacagttcaaacagtgaaggttatctgttggttggaaatttgttcctgtgtgatttgtttgtttgaatcgccctaaattaagatttctcctttgtgaaagtctctctgttaaactgatctttgatgcatgaagattgaagaacacttggattcaactcagtgcaatgcagaatgaacaagtatccctaattgcattttctttacttattaggattggttggtcccttaagccgtttttttacctgttccactgcttctaatgtccctgacaagtgaagttaatgggaagggacaaaattctcccaatgtcttggcatcggaacagattgctcctc

SEQ ID NO: 98506 - DNA, 331 bp, Glycine max
tccaaggaaggtttcccgtcatcactgtatgacgtcctccttctttgggggggggggggggggcgggactaaaagtagaattggtaacccgcgcgggacaggagacggctagttaatgaaatttctcggaaaggtaagctataaagtatagactggggttcgggccgtaggccaagcgcgaaggggggtaggtaatcgcaagacaatcttgagtgaaatatatgtgaacatggcgagatagaaggggaaaatgagcggcaggggcagcttagcaaaagtcaaggaaagcaacgtgccaggtggcagggagcaattacaaaccaaaccaatt

SEQ ID NO: 98507 - DNA, 196 bp, Glycine max
ctgagcatcgtctagctatctcgatcgaactgtccaaggtcctgtcacattcggcgtggtgtatggtcgtaaaattaattaaattttgttttaaggtgtaacttaattagcgtggttggtaacactaacgattaacagcaatgtaggcttaacgtggtggataggcctattttaccaacccgagttggctgctgca

SEQ ID NO: 98508 - DNA, 202 bp, Glycine max
atatgagataacactgagcatcgtctagctatctcgatcgaactgtccaaggtcctgtcactgggccaaaaattaattaccttaatcgccggggggggggggtattgttggaaagggtgggccaacaactggctataccgccacgtatacacataccgcggccgggccgaagagaccttgccacgcaaaaggtaagaggggc

SEQ ID NO: 98509 - DNA, 488 bp, Glycine max
ctgagcatcgtctagctatctcgatcgaactgtccaaggtcctgtcacggtgtattgggcggaggtttagatggtggtggccattagtgcatgccgggcagccagcagccacggaactggatgggatgggtggtcgccagcatgtgggggcgcagagggctgccaaccaaaggtatttactttagtaaccagcatagtccgcataacgtgcggggtagcggtaaggtgtggttgcgcatcacacaaacttgcgtggcacaaaggacaatagtaaaaaaggtacaaggaacagccagcgtgggaatgccacgcccaaaaggggcaaaccattagtgtatgtgtgcgcagtaaggagtttacgaaaaccaaagaggggtagttttgttttgacaaaggaaacagcagattatacggatgaaattatgggtttagcgtggttggcagtgtgctaaaacggatatgatagccgtgagatgagatatagagag

SEQ ID NO: 98510 - DNA, 311 bp, Glycine max
tcgtctagctatctcgatcgaactgtccaaggtcctgtcacatctattaactcaactcaaaactctgggtgaatggaacgcagcctcaatctctgcaacgggtacttggcaattctagtaaatgctagtgggcccgcaatgtgtgttatgccttatgttttgaaatgaggggcagcaagtaaatttgacttttgtgcaagtggttaaggtttaagtggtggtgcgggtgtggaattatgatggtatgcattgtggtcaaggtcatgttaaattttaaagaagtcattgttaaatgtttaaaatatgaatgg

SEQ ID NO: 98511 - DNA, 294 bp, Glycine max
gaaggtttcccgtcatcactgtatgacgtcctccttctttgggggggggggggggggagttaaagcaaataggcgagtagggcagaacgcaaagctataatagctaaatagtaataaaaggcggtacctaagttggaagcagtaaagatgtaaggcgagatagataggagagattaaaagagaggtaaaggagataacacaaacaaaatagtaaaccttaaaagagagccataaacgaagagaagtgagatataaaggaataagcacgcgttatgttaaatgtcgggtatgtgt

SEQ ID NO: 98512 - DNA, 319 bp, Glycine max
cactgagcatcgtctagctatctcgatcgaactgtccaaggtcctgtcacgcgtcagtggcctatgtatatagccccagttattggcactaagtggtggaaaaatagagagacaagtgaagtatatgggggtgttctggttgctaatgcaaaagcctacacatggttaatcgtaatcctcgtgatcgtcagcaacaacaataacaacgacgaaacggcaactacaaaatgtaaacacgcaaccaaattggcttccaccgttggaattgtagtcttgttcttaggtgtggtttcgaattgcgttgatgttccagtttgat

SEQ ID NO: 98513 - DNA, 408 bp, Glycine max
cactgagcatcgtctagctatctcgatcgaactgtccaaggatcctgtcacgtgtaagcccaaacaatgcgttataagccaacgtaacctgatgagttataccgctgccgcggaagggcatggttttacgccggtactggttggacagatatgtgaggtcaacgggtgttatgtaaaaaccaggggccaacaacaggtagtaacgcagaatgtagtttggagtactactaaggtgcacaacggtggctcgatacagagtagtcatgcaggtaattacgatacaccatggcgtgcaggagaggggccgcagccccatcccgctacgcctagcgcacaaaggtgcaggttaatagtgcgtttggtaggcttagtggggttttatgtccagaggggtttggggcagagaca

SEQ ID NO: 98514 - DNA, 202 bp, Glycine max
gggaaacatacaacgatatatgcgtgtataataaacagaagacagacgcaccagatacctatgtagaaaacgtagatgtaaacgacccaaaaggaattaaagtatactatagcaaattactagaattaaagatgagaacagagcgttggactgacacactaagtatagtaagtggttggttttaatacagcaccagcaaggg

SEQ ID NO: 98515 - DNA, 334 bp, Glycine max
tttccgtcatcactgtatgacgtcctccttctttggggggggtgggggggggaacttaacaaaaacgggcaagagtgagagaaaagtagaaagccgagtagcagagcctaaatagtattaccacagcgagcggatgagaacatagagggcggccttaagacaaggatcatagcattagcgctggctgtttggtttgaagatgcggccgtctaaatgaggtagaaaaagaggacatgaacgtgaggaaaaacgatgaccatagcgcgggccataatatggttatgggtgaaggttgtagccaggatccgtcggaatttgtgagacccatgagaaa

SEQ ID NO: 98516 - DNA, 422 bp, Glycine max
ccaaggaaggctttcccgtcatcactgtatgacgtcctccttctttgggggggggggggggcatacaatatagttcgcggtggagtgggccttaggcgaaaagttggcgctgggggtaaaaaaatacgagggaaaaagaaagaaaaaatactgggctaagcgatgcctacacggttagaggcaacggtaataaaaagcaagcggagagataagagagggcatcatcgaggagcatgtgatacgtagggtacagtaaacaaacccgaagacatgtttgaacaacactaaataggctaatgtggtagatactggttggggatgttggtattattaattagagaaacgcctaggtggtgtataggtattgatgggagtttattgaccataaggtgtaggtgtagtaatatacgtgttatgagtta

SEQ ID NO: 98517 - DNA, 448 bp, Glycine max
agtttccgtcatcactgtatgacgtcctccttctttgggggggggggggggatcgaaagtgcggagggtaggtagtatggaagagcgccatgcgcgggataaagaagggggggacacgaagagttatcagcccgttaaaaagaggcatggtaagaggggtatgaaaggccgagcagcgagagtaccgatagacagaaggataaaacacaaaaaagccggagcgatttgagcagtacaagaaccgacaaaaccatgaagaacgtgagatcgaatagcagtggaccctggttgtagtcaggtgccgtattgcagcgagcgtaggcgttaacgaagttatagcgtgacaccgtatattgcatacgtgtaggtggttagtaccccgtagcgagagagccaatacgtggtgttagtgcggcaattgcagtacccggaagttacaaaaatacaa

SEQ ID NO: 98518 - DNA, 282 bp, Glycine max
ggaaaggaggtacatacctgaaatggcgtgccgttagagttgttaaaaggaagggaacatgatggacaattgaggggagtgatacggtgatatgccgcgaacctacatcgacaagaaatgtcaagaattagattaagtggcgtgggcatggcgtgtgataagtggggggtgtggtgtaggaggtagagggggttttaggttggtggcccggccagggacaaattggccacggatgctacagcaacgataccaggtatatttcaataagacgccggggaggtt

SEQ ID NO: 98519 - DNA, 252 bp, Glycine max
tttccgtcatcactgtatgacgtcctccttctttggggggggggggggggttgggggggtccgccctagcaggacaaaggaagggaaaataaaaaagaaaaaccaaaaactgcctgcaccaagtcctcacgtcatgtaccactactaattatcaggggcgactacggcttatatccacgcctaagtacccttgagcgcttagtttaatagcacatatttagcggtgtggttatgtgagatttagttttattt

SEQ ID NO: 98520 - DNA, 274 bp, Glycine max
tgggggggggggggggaaaaatagccaaaggtttaatgaacccccacataaagaggattacgaaagagaccataagcgtgctagaaacggcgatgtaataaagggctgtacaaactcgtagggagttagggttctgcgttaataggaaacagacaccatagtaaatatggattaagcaagaaaaaaatagaatagggcgaacgttaacggttggaatacctgaccagagggtgtaagaacgggggaacttagaaaataatggaaaatggccagg

SEQ ID NO: 98521 - DNA, 142 bp, Glycine max
gagattttaatcttttgtagttctcttgttatcttcactctttgctttgtaaatcaagattgaagataacaagagaactacataatagagattttaatcttttgtagtcgttgtttgatttaatatagttattttctttatt

SEQ ID NO: 98522 - DNA, 346 bp, Glycine max
ccaaggaaggtttcccgtcatcactgtatgacgtcctccttctttgggggggggggggggggggggaagaaacaaaagaatgagaggaaagctaaataatcatgataaaaccaggaaaacgtgtgaggagcggacggtgtggcggagtggtaagtggcagggataaactaaacacgcaacagaataacacaatgataaaacaggaaaagtgttgcacttcaaggttactggatcgatctgcatagcgtcatcgtagaatgtggtgagacgcgtattgaaaggtaaggtatgccttcgtcggggataatcgtcgcatgcccaaaatttgcgctcggatttaatggaa

SEQ ID NO: 98523 - DNA, 430 bp, Glycine max
agtttccgtcatcactgtatgacgtcctccttctttggggggggggggggggtctttagaatatacaaggtgagatgagagaaataacaaaaggataacccaaacaaagtagggaagacctttgattattgggttgttagagacgagcggcgggaagggcccccacagcggtatgtggtacgtggtattaagcacttataagacttagactggggaatagtccaggtgctgggggcaccccgttaccataaaaataaaatatggcgcggcgaggcgaacgccgccacggttagtaagcaacgtaggggaaaagcatcgctagcgtggcgcacgcacgacgcatgagccgggtaatggcgcgcccattatgtcgatcgacgaaaggaaataacgccgccagacccgtttattaggggggacgtataaaaat

SEQ ID NO: 98524 - DNA, 268 bp, Glycine max
tcactgtatgacgtcctccttctttctcagtgacaattacaaacttggtagagggagaaaaaaatggggcagaaagagcgttaattaggagaatagactaggaaaagggtgtcacgttcaaggttcacgtggatcgatctcgctagctcatcgtagactgtggtgagacgcgtattgaaaggtaaggtatgccttcgtcggggataatcgtcgcatgcccaaaatttgcctcggatttaatggaagtcttgcgtactatagtttttgg

SEQ ID NO: 98525 - DNA, 302 bp, Glycine max
gaaggtttcccgtcatcactgtatgacgtcctccttctttgggggggggggggggggggggggggggggtaaaactaggttgtttattagaggaacatgagcgatggaataagggtaacaagcgctttaacggtaaaaacaacataacgggcagatttaaaatagaaagaaaataaataaaagacgtccaaatagaaatgacaaatgagaccctagagtggggtaggcaaagggtaaaactcgtccaagtagaaaatggaggtaaatttttaggccggggtttgatcaatggttgttgtggt

SEQ ID NO: 98526 - DNA, 353 bp, Glycine max
gaaggtttcccgtcatcactgtatgacgtcctccttctttggggggggggggggggtactacgacggatcatggggccaggggatagagactatggccttataatatatacaccaggtggtggagctgcgcgaatgttgcctaatatggtacgagtaagcgtggttgggggtaggttggcgcctaaggtttacgtaaaccaagaaacaacaggactaacgagaacagttaagcgtactaaagcttagaggtagattaccctataagtgatcattagtattgaagccaagaaatgtaaaagtggcgttagaaccagtgagcgtctaagggaaaaattgtgtaccgagaaatgtg

SEQ ID NO: 98527 - DNA, 431 bp, Glycine max
ggtttttccgggatacttcttcctccttggaatggagaatgtctctattgaacatcttgaatctccacactctccatatttcaaaatcaatgaggacgcacttccttatggagctgcacttcatgcatcattagctagcagctatcttctcaaattaaatcaggacataccagtagtggaggggaaacatcacgatgaattatagtttacaacgcagattgttgaaagcccttgttgggttatttgtaggtgcaatcacgacgtagtgaggcattggttggttacatccttagtgctaaatgtattgcattcaaattaaaataaatccatagtgcttccacattataatcattaaccctgtttatctagggtacaaatcaaatgggaaagaacagacaactttttattttgatagtattttctacaatttc

SEQ ID NO: 98528 - DNA, 179 bp, Glycine max
ttaaagatatgcaaggatgaaaaggcatagaaaaccaatatgaccaaaataaaaactaaaaggttaaatcaggaggtgcccaacacgtaaattataagaagatggagtaataccaaaggtcgggcgcggatttagaagattcaggttgatgcgtatgacgtgtggtaaataatattaat

SEQ ID NO: 98529 - DNA, 322 bp, Glycine max
tcatcactgtatgacgtcctccttctttgggggggggggggggcagatagagcagtgtgtgggcagtgtgtgggagctaaataaaaaccagcgtaaaagaagaagccgcgaaaaaaagaagggtttgatagataatgtgggaccaaacaccgacgataaaccagggagatagggtggatagggagcatatccgaacaaacaaagaagaacaaggcaacggataaaggctacatacgcaggggcgaccaaggtgttaaacaggaggaggaggccgagtagccgcagtgtaagtggatgggggcatcttagcggtgcagggatg

SEQ ID NO: 98530 - DNA, 289 bp, Glycine max
gtgattttagtggggcactcagctggttcacttgtagcagttaatacttattttgaagctccagaacgtgttgctgctctgattctagttgccccagcaatttttgccccacttactacacggaaagttgttaaagaaaatcaatcaggacatgataaccaaacggaagaagacaacagttccatcagaaaaaatccaattgtggggctttacaagatgttgtccaagactaccaagtacattgcagaggcaatatcacagatgatgaagtggacaatagatatcctca

SEQ ID NO: 98531 - DNA, 387 bp, Glycine max
aggaaggtttcccgtcatcactgtatgacgtcctccttctttggggggggggggggggtaaagaaataagggacacagtatggcggaaagcagaacgtgggggatagtgccacatcgtgggctgaccaggtaagcccttgatgagagcaatcgacggatacagtaggtaggtaccgaaatagaacaccagggtggtaacgatgagactaagtgactacgaagagacgcgaataagcacggataccggaggctggagtattagggggttaatggtgacagccacagtagtcagtggcagcaagggaatgtcgcgctagtaagacgttggtaagcaaggggcgttaggggagtaaatgcgtaggactcgtgcttgagaggagagtggtg

SEQ ID NO: 98532 - DNA, 239 bp, Glycine max
gaaggtttcccgtcatcactgtatgacgtcctccttctttgggggggggggggggcaaaaagttatggtaagaggttaattaaaaagggtggtagaggcgattttaacattggaggtagtgcccggatagcacagtacagcgtttaggaaaatagaagggaactgtagaaggcgaggtgaccaagctacctagtaaggatagggacttaaagagctaggttagttggcaacatcagagg

SEQ ID NO: 98533 - DNA, 314 bp, Glycine max
  unsure (1)..(314): unsure at all n locations
agtttccgatcatcactgtatgacgtcctccttctttgggggngggggggggggcactagaggagcaaatggtaagtagcggcgaaaagccaggatagcagtgaagcagggcgtagggggtgagccaaagagtaaaagggttaagataaaaacaaaaacaaaaaaccgagtgaaaggattaattttgaggaatatgggccaaccaggcactaacaaatataaacaagttgagaagccttgtagaaaacgaagagaaggcggattaaccgggaaccgtgtttataccgttagtacgttaaggtaccagtggtgtt

SEQ ID NO: 98534 - DNA, 348 bp, Glycine max
gtttccggtcatcactgtatgacgtcctccttctttgggggggggggggggcaaagaagtatgtaaaagatacgaagctatttcgagaatagagtaaacacctcgctccaaaatatatacctgttagcaagagggtttcacactatcagccaccaccaccaccacgtaaatataatataaagataaaggaaaacagaagtacgatgatgacctacaattcaagggaacacaaggtcacttaaagagtggagtgaaagccgataacactgcaaacataaccgaagggtggtactttgcgaattggtattatatggatgttgttgtggtacttgttgttagttaaggaat

SEQ ID NO: 98535 - DNA, 278 bp, Glycine max
agtttccgtcatcactgtatgacgtcctccttctttgggggggggggggggcaaaagaagccgggtatccgggtaagggctaggtaggggctagatagtaaagtcatggtgttaagtttaatgtgtgtatgcgaacacgcgaggatacagaaacaaagaaaaagagtaacgattagaggctgctatgaatattagggcagagtatggaaaagtaggagaggttgagcatcacggcgaaataaagcttattaaaatattttacgatacaaattgggtta

SEQ ID NO: 98536 - DNA, 187 bp, Glycine max
agtttcccgtcatcactgtatgacgtcctccttctttgggggggggggggggattaaataggctagaagagaggcagcggagtagtggagataaggacccgtgtaaacaggaagaacgtggagtgaatggctcgattaaaaaccttgtggaactaatttgattatgttaagatggggtaacttgata

SEQ ID NO: 98537 - DNA, 444 bp, Glycine max
gtgctaagaagcaagataaagagggtttctagagactgccttatagccatttcatggcttggttttcaaatatcaaaaagcccagacagcataagttattctgcatctgaggttatactaagtggaattgagcagtttctgcatcctgggatagagtcagaggaaaggcttctagcatgcatgtgcatgtttaattatgcctctgggaaaggaaagcaaaaactaatgcatttctcagaaggagtaaaggaatcactaagacgcctttcaaatgtaatttggatggctgaggaattacacagagtagccgatttcttgctgccaaacatatcaaggcaggttgtggcttaagcttagcagtttggtccctcatatatttcaagggattgctgttcagtggatattcagatggatcaatcaaggtctgggatattagggggcact

SEQ ID NO: 98538 - DNA, 258 bp, Glycine max
caaggaaggtttcccgtcatcactgtatgacgtcctccttctttgggggggggggggggggggggggggggggggcaaaccaagaagagtatttggagagggcagagatactagggttgcgatatgcaaaataattaaaatgaggtatattccgtggtacgtaaaagcgagagggagagagggatgagacgaagttggcacgtaaaagggcgatggaactgaacttgggcctggggcgacgtggtaccctagtataat

SEQ ID NO: 98539 - DNA, 356 bp, Glycine max
gaaggtttcccgtcatcactgtatgacgtcctccttctttgggggggggggggggagggactatgagaggaggcataaaccaagatgaaaagtccatgattaacccggagtaagtaagcggctaggcggcaaacccagcgttgtgtaagcttagaacatgctatgccgtaatcaagagggcaagtttgcgtttaggttggcgtgggccggcgaaaagcgtatataaatagccgcacgggcttgggaagtgcaccgaagtttaggtgggttcaggaaggcgcccaaagaccagccaaaaggcatgcaaaggtaaaaagtagacgtaacaagggtgcgtgcatgttaattaaaaggga

SEQ ID NO: 98540 - DNA, 352 bp, Glycine max
aggtttcccgtcatcactgtatgacgtcctccttctttgggggggggggggggaaggaaattggggtgccggggaagaccgaaaccaagaacagaggcaatgagtaatgagaaatagcttaaagaaccagtgagttgaagccctaggtgaaagaccgttacggtgtaacgaaaattatggtcgaagatatagggttagttggaggtttaggggagagacaaagcgaaaacctgaatagaaataccaaacgaagccggggttacagatagcgaaaagattgcgaaaagtagggaccgaggatgttaaggtacagcttgtggtgcaagtacataagccgaagacccgatagagt

SEQ ID NO: 98541 - DNA, 148 bp, Glycine max
agaaaaattaattcttgatctataatttatttttaatttcaagttgaaaaaaaaattgaaattgattttaaatttaaaattaattctaaattaaaacaactttgattattttatttttggttaaattaattttaaagtgatataattt

SEQ ID NO: 98542 - DNA, 148 bp, Glycine max
aaattatatcactttaaaattaatttaaccaaaaataaaataatcaaagttgttttaatttagaattaattttaaatttaaaatcaatttcaatttttttttcaacttgaaattaaaaataaattatagatcaagaattaatttttct

SEQ ID NO: 98543 - DNA, 398 bp, Glycine max
  unsure (1)..(398): unsure at all n locations
gtttccgtcatcactgtatgacgtcctccttctttggggggggggggggggcaacaatttttaggggggcgtgcagaatataaaatagggataaaggtaatgacgaacccagaacatcatgaaaagcctatgtaaatctaaaccggcgagaaagtataaagtagaagaaaatatatgccaataactaaactggcgtaaaaccgctaagacaaggggagcttataatggccaaaaggcacacgggcgccattagaatgatttaacggcattagtttataaatgacnagaggggttagagcacgaatgaacgtggtacccgcgtgcgtgtttattacaacgttgatgaggggagagaagtaggggacggcctatcgtggggcaatatagtaacatttagt

SEQ ID NO: 98544 - DNA, 244 bp, Glycine max
gtttccgtcatcactgtatgacgtcctccttctttgggggggggggggggggcagaaggagagagtactgttataaaggcagaataaatacgacgaataggaagcccataagacacggtaatataaattaaatggaggggtaaaccgtaggatacatttaggatatagtatagggtggtggaaaagcgggcccaaaagttaatagtcaatagtatatacaaagtactgttactggaaaattttt

SEQ ID NO: 98545 - DNA, 194 bp, Glycine max
gtttccgtcatcactgtatgacgtcctccttctttgggggggggggggggggcagcaaagcttcagacgctagcttacgcgaccacaattgggaatagaatgtcaagataggagataatctaagatggaaaaagaaaaaaagaacctacttgtgtatgttgtgcgatagagataaaggtatttggaggggaaaa

SEQ ID NO: 98546 - DNA, 79 bp, Glycine max
aaaaaaaaaaaaaaaaaaaaaaaaaaaaaaaaaaaaaaaaaaaaaaaaaaaaaaaaaaaaaaaaaaaaaaaaaaaaagg

SEQ ID NO: 98547 - DNA, 360 bp, Glycine max
gagatattgaaacaggaaaaccacgatattgcatataagctggaacaaagtgaactgcaagaacaattaaaaatgcagtatgaatgttcatctcctcctcctgctgttgatgacgttgaggcccatattcagaatctggaaaatcaactcaagcaacagtctgaagaattctcaaattctctggctactatcaagaaacttgaaacccaaataagcagattagaggaggaactggagaaacaagccgcaggatttgaagctgatctagatgccgtgacacgcgacaaagttgagcaggagcaaagagccatccgtgccgaagaagctttgcgaaacaccagacataaaaatgctaacact

SEQ ID NO: 98548 - DNA, 389 bp, Glycine max
gtgtacaaggggctgggtgtaccttgtagcttttaaccaaccagaattggggtaaccgtaggagaggcacttgtgaacgctggtgaatgtgcatgctaatatgtgatttcttagtgtgggggtagttggcacaggtggtagttgagggactgtagtaacgcattgggtcatggttggtggtaagaacgtaagggtatgtattactgtagcatgggttatgcggtgaggtgcgaatgcacgttgtacaggttgtaacgcagggaggtagacgtgttaacgtagggtggaatagggtgggggcggtgatggctgacacacatagcagagtgttatgggacttgggtaggggtgctggggactaggccagtgtggacacaaagtttgatgaa

SEQ ID NO: 98549 - DNA, 318 bp, Glycine max
gaaggtttcccgtcatcactgtatgacgtcctccttctttggggggggggggggggcaatgaaaactagcaacaactagggaggtagtcggatggggaaaggtatggacggaatataaaacccatggtcaattagagatggattcggatgttaacgaagacagttaaatacagtggttggtaccaccgtacacggcagcaaaaaagaatgtccgactggacggggggatgatggggtcgaaattcaacgggagggccacggaagcgcatacgtatgttatcccactagtaataacccccacgatatgcgggtagtagt

SEQ ID NO: 98550 - DNA, 282 bp, Glycine max
gtttccgtcatcactgtatgacgtcctccttctttgggggggggggaggggggggagaccaatataacctgtataaatctgcaggaaggaatagccaaaatgataggcccacgggatctaaatgaaccgagatacgccgtattaatccgtaatatggaagaaataatataaacgcacagactcttaagcaggtgataattatgattaaaaaggaaggtaaatatgcctactactacagaacggggtacgaggtgacaatatataacacgagttagggatact

SEQ ID NO: 98551 - DNA, 412 bp, Glycine max
aaggtttcccgtcatcactgtatgacgtcctccttctttgggggggggggggggggggggggcgctggagtaccgggctaattattaaagcggacgtataagaaaccacctatgaactaagaggggagagctagataaaaccaccaactaattgggaggagtaggagttctattagggatagaaagtcgagtggtgatagccaggtgatagccaggaaggatagacgtggattagcttggaatacctggaaaacgagcgtgacgtataattattatagcgttgacaagcgtataatttataaaataacggtatgtagaagtaaagggggggcaacaacgaaagtgcgaagggaagtacaagtacacgtacaggtgaagtgggcggttgtacacgtgcgtaggagtgttgggg

SEQ ID NO: 98552 - DNA, 384 bp, Glycine max
ccgaagcataaggggacgagtaacgccaataaaactgataagaataaaggaaaagttaggaacacctgtacgtactggatgcaagcagacccaacaggtatagggtgtaacctagcggtactaaagccaataagcaacggcagggtaggtgtgtaaatgtttacagccaggggcacgataatatatgggaatttgacagcaggacgttcaagaaataataattcggccacgtccagcggcggtattagatggggtagggcgagccagtggaaccgtgaaaagatcgcgtgattatagacatgtggggaaggctgtggtatgagttgggtcaggttaataaaaatgggcgttatgtaggccaagtgtaaaataatagaacggaag

SEQ ID NO: 98553 - DNA, 310 bp, Glycine max
gaaggtttcccgtcatcactgtatgacgtcctccttctttgggggggggggggggccggcaggtgacgccacttgaaaatgaggacgcctagcaacgatcggtacggggcgatcttacaatagtctagttggctgcggcaaaatatactgcgcacagtgagtagcagtacaaacaccaagaagtggtgccttagacgttgggtgttatggtatctccagatactaggctaggtggtattggaaaattaaccatggtgcgtgttgcggtgcgcggattagttgttagcgtatttaggtataggggttaata

SEQ ID NO: 98554 - DNA, 341 bp, Glycine max
ttaatattatacaacaaaaaataattaattatttttctaacaatatgccaattttataaattatattcctaattcgctaagattattgtttcgtagcatattggaatatgacccttttcaaaaggacaatgattaccttggggaagtgccttaatataatttattgtattttggtgaagaaagtaccttaatatataatgctgcccaatatctatgcttttcattctcaatcagtagtactccataacggttgaaacccaccaacttttcatcaaatctgaatggagcaaaaaggcttgcaattatatgataatgagtccaatagaaattattatatcaaa

SEQ ID NO: 98555 - DNA, 451 bp, Glycine max
gaaggtttcccgtcatcactgtatgacgtcctccttctttgggggggggggacgggagaggacgcgcgggccaaagaccaagccaaaacaaatatggacggataaagtgcgagagagcgagcaaaccaaccgtgacaccacggttattggagtttccgggcggggatagtgagagaggtttggaaacgcaagggatgcgatagattgcccggcagcgccgtgggtgagaatgcttgtggttcaccctaagacaaaattgtgtgaggggtgtagtcctaattatgtcagcggggacgtggggagaaatattaggcttcaagcctgcgtataggagaccatgtataaaggaaggaaacggcataacagtggtcacaacattgcgataggggcgcaaattaagagaagaacagacaaaaattaaaggagtcacccgaggtgactaagattggtg

SEQ ID NO: 98556 - DNA, 423 bp, Glycine max
caaagaagttggatatatatatctagctttaccagctatgtgttcagtatccagtctctcctagtcctagctaacattgccaacagaagaaagataattttttttttaaaaaaaaagattggctttccatttaaacttggtgcttatatatagtgctgaaatagctaggaagccaaattaagctttatatatattcatccccaatcatttcacaaaataactaggataattcacatatattaacccatgcattaattctcattaatcactgggtggaatcatcattatcttgctctacttcagatgcaggctcatcttcttcttcgaatccatcgatgccataagctgcatggccactcccgaatgctttaatatggtctttaagggacctcttgtgcttgaaatcggagccacaaatacagt

SEQ ID NO: 98557 - DNA, 431 bp, Glycine max
aaataataaaaactatcaaattctgatttttattcatatctcaaagccaaagaggtgaaatctagtgtgcagtggcaagtacataaactggtttaacattattacaacggtttaagcttgcaaattaaacatcattacatcgtttttctcaatttgcaaattccagattaaaaaaaagaagtggttgatggtcagcttacaaagagtggttctggctccacttttcgtctgatccaattttctggtgcccatttgcagccaactgtatccaccacatgcaagctgtaggcatgtcttgatttttgagactggttttcaaagctttggtgtataagatccccatggatgacaaccaatgacccagcttttacttcaataggaacaaaatccttttgatcataagatggtgatggttgatcgaatttgacacc

SEQ ID NO: 98558 - DNA, 248 bp, Glycine max
  unsure (1)..(248): unsure at all n locations
tttattttttttttttttttttttttttttttttttttttttttttttnggagggggcaaatccaaatattgctgctgcattgtcccataatctacaaaaccttgaaaactaacagcaaacaaatatgttcgccctttggaatttgaattcaaaaacagtgccttgataattttaccctatttacagagcccatgtctgactgaaattttatacaaaacattatctattttggattataataaaatgg

SEQ ID NO: 98559 - DNA, 194 bp, Glycine max
gagggtgacaaaatcattgactttagattctcaaggatgaaatgaagacactttatctttaaaatcacacgtgagatcctctatacagaaaaaagaacagccacttgctcaaaagttacaattaggcatgcctgggtatattctgtattcctaatcttgcgaacagatagcatgcaaactggataaaagagcaa

SEQ ID NO: 98560 - DNA, 428 bp, Glycine max
ataccaacgaaagcaactactcacgcagtttcttcttcttcttcttctcctgcgcttcgtctcaatctcaagcgtcaattctccatcgccaatcctctctttctgctgatttcggactcgtcacttacttgggttttgcatgtatatgctgatgaaggtgaaatgatgctctcagcggcaataattacttttggacgctggacataaggcgtgatgggcggttgctgttgttgttgttgttctgctaaggagactgtgttgagcgctccacctgcgtactattattatccaagagcatcagaagagcatgttcctctatcatctcaccagggtgctgcttctgctttctctgggcggctcttggtgatactaatctagatacttcatctcctgatacttatagacctccccctgctcctatccctttc

SEQ ID NO: 98561 - DNA, 238 bp, Glycine max
attgtagaaaatctcccatacaaatccaatatactcacctcttacaatgagaataagaaataataaaaacatgtgtatttttatattatgaaagttaatacatgttatgattggaagacgacttttcaccaatggatcgtacaacactagtctaacagctaaaaaatccctccagcttatttcagatgcatgatttcccaatttgaagcatggcaaagttcttatagtcagacaaaac

SEQ ID NO: 98562 - DNA, 151 bp, Glycine max
agtaaaatattagtactagatctatctattctaggagaattattgttgaagaaaaaagaagacagcacaatcttgctaggctaacatacagtatatatactaagtccaaaacaagacaacacatatatgaagacacatgggtgtctaaaga

SEQ ID NO: 98563 - DNA, 383 bp, Glycine max
gatcatcaacaaagacacatgtattccaatcaatcaattacaatacaaaagataaaagtaaaaccgtgtctgtggccgcaaagtaaaaaaaaaaaaataataatggaaaaactgtctgcaaagccagtgtcaagtgtcacccttgagcaacgacagaccacatgtatataacaccccttttttcctttttcttcattttggggtaacacttccatcaattccactatcctctacacccctttttcttatcctctttgagcagtgcagtgcaaaaccaaatatgggaaacgaacaaagaatgaatagcacaagatgagtagaacctagtaaacttcaccagccatattgctagaggggattctttgtcgtttctccacatatgc

SEQ ID NO: 98564 - DNA, 115 bp, Glycine max
ctcgagccgaatcgggtcgagggatcaatggccaactgctttgaaggagttcatcctaaaaataagggctatgggattgcggcaagaacaagcagatatagacatggcattacct

SEQ ID NO: 98565 - DNA, 459 bp, Glycine max
gatcagtgaacactctcactaatccacccatctccataatcgctccccgcaacgaaaaccttctattctattcaactcccttcacagaaccacaacacaacacccccttaaaaatttctatcaaaccaacacacacaaaacaatcatcaatcgcacttacccttcctcctcctcctcttcctccaaaagctgtgcacaacactactactactactttatagtaattttttctaccgctcgccgcgtctttgatactgacggtatagttttaaaagaagaaaaaaatgaacatctcaacatcagcctgcgcctgcgcctgcgcctgcaaacaggagctgcccctagtaagcttccaaaagggatcacttatgatggagtcgttgtttcatcatcggaataacagcaacaaggataaggtagtggtgataatgggggccactggtgccggcaagacgaagt

SEQ ID NO: 98566 - DNA, 117 bp, Glycine max
taattgccgatgaagaatttttctatgatgcttctgttaaaagggtggcaagcgaatcttatgagcaagtcaccttgatggtcagtgtggaggacactggaattggaattcctttct

SEQ ID NO: 98567 - DNA, 291 bp, Glycine max
aaaaccaaccaacctttttgggggggattttggaaccaaccaaattttaatttcccaaaaaattttccggaaaaaaattttttttttggggaaacttttgggaaacccttatcacagggggggagttttggggggtgccaaaaataaaaaaaaaattttggatttcccgggttttccccaccccgggggaaaatttggcctggacccaaggggggggggggggaaacaaattttttttacccaagagggtcagcgggggggtaaaaaagaacactggatatgggggggggg

SEQ ID NO: 98568 - DNA, 274 bp, Glycine max
gggcaagaaattaagaactggttttagtatttactagaaaaatactggaaatttgacaaaaaaaattcaattccatacttgaatgccaaaatgggaaaaaattattttttacaacctgtggggatctgcaacatataccttgttaactctaaaaaaatgacaaaatttattaactggttgagtgcgtatttttacagaatataagtgatgttgatcgcaggagggcctttttttttaaaaaattggtcactcaaagaaacttaaaaagaacctt

SEQ ID NO: 98569 - DNA, 375 bp, Glycine max
ccaaattaattatttcatctgaattcatttgtaaaagctaaacttgctccagaaactacaagaggacaaccattttgtgcattaaaatcacattatattaaatcaaattagatcagatctacaacccaaaatattataaaaatgacaataaattaagaacaaatccaagaaactaaatcaagggaaatattttagcctgggggcaagcactatcaattaatctgtgtatgtgctattgagagctttatgttgacaaatctgccacattgattgcgtgcttatggttttgggattcaacgtcgatggttaagccattttcaaggtgatgctgctcctttaccagtgaagcatactccactttttcaataccatatc

SEQ ID NO: 98570 - DNA, 312 bp, Glycine max
gatgaaggagcacctttcacttccagtggtgatgtctggcaaggagttgaaatgccacattcatactatgattctgctgtgacccacgagtacgcagccagtgggttatcactggctaatcctcaagtcagtcaagagcagccaactcgtatgattgatcttgaagctgatttgcgtcgagaagagacaggcaaagagttgttaagtaggcaattagataatggaaccttcagttcataccaaagccaggatcgaagtgtcttacttcaatcactcttcaaaggagagggattgttaccttatcatcatgat

SEQ ID NO: 98571 - DNA, 279 bp, Glycine max
ggcaaaaaccatttaagttaagaacagagcaaaggggaaagttgaaagaggaagaatttgtgaagaaagtacaagagatgatgactgaagaagagaagatgaggataccaattgctcaggggcttccatggacaacagatgaacctgagtgcttgttaaaacctacagttaaagaaagcacaaggcctattgacctaaagcttcatagtgatattcgggcaattgatcgtgctgaatttgaccaacaggtggcagaaaaaatgaacttcatagaacaac

SEQ ID NO: 98572 - DNA, 205 bp, Glycine max
caaaaagtagagacatattattacattctcaactgctgccacacacaggaaaatcaaacaaaatgaaataatatgtctctacatgtattcttatagtccatacattattgttctcattgttgacgttttcagtgagtgtggatatgtaaatcatgacttggtttgactgtttgcttaatggagtgcatgtttttaatcataactt

SEQ ID NO: 98573 - DNA, 257 bp, Glycine max
gcatgatcttctatcttcttgtgcagaaatcagaaaagtattgacttcaaaaaagttgatgctcatgttcaccagctaaagggtagcagctcaaggtattatcactcttccattggacctaaccaaaattgtgtaacccataagaatctgaataaaaaggaacctctttattttgttttgcaacgcttctgtacttgttgattcttaacatactataaaacacagactaatcgattttagatattatccttaatagg

SEQ ID NO: 98574 - DNA, 71 bp, Glycine max
aaaggaagctgcatagcagcatcaatgtactattggaagttaatgtttgagatatatccgttacgatcgct

SEQ ID NO: 98575 - DNA, 374 bp, Glycine max
aataatctataatgtatataggttttctttatagattttgttaacttatttggttaatcattttttaatgtctcaggagggatgtttactgatttttctaatttgttcaagccaaggtcctttaagtgccaatgatcagtatactatatatatagttggaacagtgaaagtactagtttctatgctcccaattttttttttctctccattgattttgtgctttgattgtctactatgttactgacagttgatgcaagggaacatatggttagtaccaaatgctcaaggttttcctcaagtcatggccctttttcttcagtttcaactgcggcggtctattgccgtatccatctatgaacctggggaaaattctg

SEQ ID NO: 98576 - DNA, 261 bp, Glycine max
ctctctctctctaactactctgtttctctctctacggtagatcggcggcgaggaggatatggacgacgacgactagatccagtcgcatccttcgccggcgagcggatcccctccgtcgtcgccgaggtcgaacggtcggataacggtgacggtcgcggctccggcgccgcaggcgcagccaccaccgccgaatagtctggcattagcgcttccgattcagcagccggcgaaggggaacggcggaggaggaggaggaggagg

SEQ ID NO: 98577 - DNA, 123 bp, Glycine max
caaattctcgtggaaagcaaaagataccaaacttcctgtttgaccatagctttgctgtgtaaaaaaaatgttgtattgttccgccattaaaagaaagaaaaaagaagttggatattaatgggc

SEQ ID NO: 98578 - DNA, 264 bp, Glycine max
ctaacagtctgctagtcttcttagcttgtgttagttgataattcttggaggtgaaagtctggaagttttagcaatttttttccatttaatttatgcagtcttttatatatgtttggaaacgtccttcactccttctatattgtattattcaacaaatgctggacggcattttatactcacatggtttaagaaaaaaggaatttgagactttaaattcagcaaaactgaatgatgatgtcaatagaggactcgtttcatatctga

SEQ ID NO: 98579 - DNA, 338 bp, Glycine max
aatactctctattcaattactactatcttaggggggatgtactagaaaaacaagtaaatggtcttagtgtcatatttacacaatcttagctttcaagctatcttaaactcaccaaactaggcgtaaaatgtgttacaattctatcgagccattgggagtggatgtatcactttccaatttgcaaccggagtgtaaagctgataaccatgaatccacctgtatctgggaactgcttgaacattcatatcgtaaaccatgacgagttaaaatataaaaggcgtatcgtgtctcatcatcttgttcacgcttaaaacttggcagtttgtctacttcaacaa

SEQ ID NO: 98580 - DNA, 433 bp, Glycine max
gaaagcaccaacaagcatgagttcctatcaagtaagagtttcagcagcttcttggatgaaccatgcgtttgttcagaatatttccctttggaaaatgattctgttgatgaatcagagagaaattttgaacctgaaagttgtgaaagaaggtgtgttgatgcagcagtggagctcaagactgtgccatctgtagaacaagctgatgaacatctagtggagaatctgaataacaatgtgttatttgaaaaattttcagctgataacaatttcctttctgaagatgatttcatttgtgaaagcacggagtcaaattctatgatcagttctataggagatgaatttttgtcagacacagattttggaaccactactaatgttcacactttgggaaaccatgatgaagaaaatgcagtgttaacaaaagaagatttga

SEQ ID NO: 98581 - DNA, 384 bp, Glycine max
agttgtaaggggttttaaacacttttcactatatccacaatggtcttctaaatggggagttacatatgtacaaaaaacaaatctagcgtataactattaacaaggaaaaagcaagaaagatggttctatatgtatacttctgattacaaaattgatgttacttagtttattatgacaccatgctagttgatccctagatatttttgacatgttcaacactctccaaaccagtttcatgtccacttgaggaaaaaagttaagcaaatgatctcttccatcttcctcatgcttttggaacttctttattatgctacttctcttcaaaagctcattaagtctcttttccttctttcgaagttctgcttgaatctccctaagaaattc

SEQ ID NO: 98582 - DNA, 456 bp, Glycine max
gggcctatacttgttttctcgtgggaaaatatctaaataaggcaagataattgtgataatccttagttccttcaagtttcgtgaactacaacattctacattaagaaatttattttattattcgtgtccagacacaacactttatggtgctgctattgactactccttaccctgacatagaggagaaaagtctattttgcccccatttgaaatggggctaatgacaactcccagcactttaatgttgtgatttttatgtgtataaatatagagcttaatatagttggaccaaaaaagttggccacaaacccaatttaacttagatgggcttaagcaatgaccaaccaaaggcaattgtttcctgcacgttcggaattgcttcatgcacctttataaccttttgaaaagcttagtccaaaatgtaattttacaggattagtctttccagaatgacta

SEQ ID NO: 98583 - DNA, 276 bp, Glycine max
aaaaacacatttcaaacattaaaaaaaaaacacctttagacacgttttctttaacctgacaccattaatcgaactgctataaaagaacttatgtacgttattcgtcggaaaccattttcccggtcaagtcatgcgtcaacatataaataacttttttttgtgacgggaatacataaagaacttgatagatgacaaattgtagatatttgcgaattgcatcattgcaatatatacacaattgaagggccatgattgggactagagagcgagtttgag

SEQ ID NO: 98584 - DNA, 314 bp, Glycine max
ggggcagaaacccataatttagtttttaataaagcaaaagcaaaatgcccacccattccccaaacaaaacatgcttattcaacccaaattggtttcatatcacagaaaccaacagggtgtttttcttcttacccgtcccacccacttgaacagaaatttttcggaaattaaaaataaaaaagctaaactttttttacctcaaatttgaaaaggctaacaacaaaaattcaaaaaaagggaaattaaacaatcaatccggttcataaaaccgattttggctttccctcactttccgggggtaatctcaattactt

SEQ ID NO: 98585 - DNA, 435 bp, Glycine max
tttttttttttttttttttttttttttttttttttttttttttttttttttttttttttttttttttttttttttttttaaaaaaaggggaccccctcacctttccgggggaaaaggggagctaacccttttttttccacaaattttcttttttaaagagagggccccccaaggggggggcccttaacttattatcccccccgcggggtttttttccccctaacttaattttttgccctaaggggggaaaattaaatgcccccctttcctggaaccccattaaaccggccttaaacccagaaagaagggaggggcccctggcttcccgccttggggccttttttgggtccctaattttcgcaaaaaaaaaaaaggaaaattggggggttaattggttacccccggcccctaaaaaagggggggggtccccccctt

SEQ ID NO: 98586 - DNA, 387 bp, Glycine max
tttatttttttttttctctattgtttctcttttagctttctctttctctgattttgtcagcggtttcctgattctcattccagagctctacctctttcagtttcatagtagttaatgaataatatatatattcagatctcaaattaaagtggctggcccaagctgaattccaaatccaaatttggcttcttcgggcttgatcctgaaagatttgaggatgaacttccatctgatattctctcatagcttaggcactttggatccatttccttctcaagagaaaaaggcacgtttccaacagaatcagtctttgtcttcccatgcaaccaagctttcctggaagaattgccccaaagaccatgatgctccttatcttgattaacactt

SEQ ID NO: 98587 - DNA, 278 bp, Glycine max
aaggggaaaaatttttaccttattccccatcaatccctgggtaaacctttaaacggggaaccccaaatgaccaaaccaagggggttggtttaataaccatttagtccatgggggaccttttaaaacaaaaacctttcctccttccccaacgtccatttccgaccttaaaaggtaaaaggaaccaggaaaccctaattgggaacaaatcctacttgagggatgggggacccaaaccggggcttcctttttttgggtttttgaggttccgggttaaggtt

SEQ ID NO: 98588 - DNA, 445 bp, Glycine max
gtttattttctccatctacctaatgtgaaaacttgttctttaattaagaaaaataagttaaaattaaatgtcattgtgcatttgttgtgatgttctataatcaaaccatctacccttggattctttaactattatcattaagattactattatttttttatttttgatatcagttatttgtgtaagatggaaagatggattacaaagaaattgagggataggatattttccttgcacaaagcagcataaatgaaaattttcaaacacattaacatggattctttaactagtgcaccaatttaggataggattaccctggctttgtgaacttggtctattttaatatctgctgatttaccattttcttctccatcatgcaaaagtaaaacatccatagcttcattgcatttttatttggcactgttttctatcttcttatgacaca

SEQ ID NO: 98589 - DNA, 324 bp, Glycine max
ggagaagccggacccattttttatggaatttaaaattttcgggcttaaaaatggcccaaaaaactccattccaaattaatttttttccagaaggtgtttcttccaaagtttcccccggaggtatgggttttaaatggggggggccctgaacctaactggggcccggtcctggtcctggggggggcggcggggggggcggtaagggggggggcaaatggaactttagcaacacatgcctttgggacaggttttttttgcccaacggggggaaaaccctttttagcgggggttttttgggggggggggggttttatttttttccaa

SEQ ID NO: 98590 - DNA, 442 bp, Glycine max
gttcaagaaagataaggatgatggtgattccaatagtaacgactcaaacagcgctgcaagagggaactggtggcaaggtaggagcaggatatatagtcttggaacagtagctaaaggaattaaaaatgttatctaagaagatattataagtcaaacaactacaatttactaactttagtgcacctctattatttttggtttctgcaggttccctttattattaacatcgcactacgtaaaaaataaaaacagcatcctgcagaccaggtatctttccctccctctctatcttctttggcttgcctagatacataaaactcaatagattaacacgaataattaactcgatgctcatttcacaaaaaaagtaacaagaattttaaattaaattgattgaggtattggaaataaaatagtgaaattggaactgtcataacaattg

SEQ ID NO: 98591 - DNA, 240 bp, Glycine max
ggcgcaaaaaaaagcccaaggccctttttttactagtcatagaacgggatcccctcatttttttataaagcaaaagcccccaggggtcccaattttaaataaaattaatcccaagcaaatgggggtaattaattttggccccaatctgttgtcgcaatttgactgctggggagtacttacccaaatttttgggacaaaaaagggccccatttggggacaaaagaggaccaaactttgggg

SEQ ID NO: 98592 - DNA, 217 bp, Glycine max
gcctgcgggctttgagcaaactttgggctaatcgttctcaagaacttactaagggagtcatcaaacattagttatagccaacaacaccttaaacttatcatcaagtgtctatatcattatcaaaaccatgttccggctgctcgcatttttccagcactgagaagttgtaaagttggttatcatgtagaatgtaaaatagtacatctacgtgttttga

SEQ ID NO: 98593 - DNA, 435 bp, Glycine max
gtgtaccatacatttcactctttgtattgattaaaatagataaaagatacattaacagtaggtagtgctcttttagagagagaaagagcttattttgaacaagccaatattactcttaacaacatatttataatgtttttgggtccaccaacatatttataatgtttttttttccaatatctagagctttatgcgaccgttttggatcatccacttcatgctccattcattgaacctacacttgtaggaccaatatgcccatccaaaagttgcacgagaatacacacctagctgtgcttgggcatacctttggtagtcttccttagtcgcaccttttacagcccactcaccagtccactcccctacaaaactcagagcatttgtggaagagacgccaccaagattagagacacgttcatttcttatgaagtcaat

SEQ ID NO: 98594 - DNA, 134 bp, Glycine max
catgcaggtaccagtatgggaaacgtggatgccccagtagatgagactatatccgatgttgagaaagaaatagacgacctgcttcctgttgaggtaaaggaacagcgtctcagtaactcgcttcaatcaacaat

SEQ ID NO: 98595 - DNA, 442 bp, Glycine max
gttctagatcgcgagcgacaagagggattcatgttagttagttatttaattaagcaatgaagagtgatgtgaaaagggtgtatgtgtgtgtttgttttggaatctgtgtgggattattcaggtagattcttcttggccatggagaagtgaaggaagaaggagaaggaggggaatgtggaagagagcattgtgatgtgagagtgtgagtttttggattcttgcttggtttcttgttgatggaaatgagtggtgattggagggtctctgccttctcaccaaatatatatccaaagcaacaaatatcagtctgaaatattatggttcaaaatgggaaattagaatttcaccaaaaaacaaaaaagaaaatgggaaatgagaaatgaaattcggacacaaccattatccggagtaaaaccacagagtatgacatgggctgtctctg

SEQ ID NO: 98596 - DNA, 341 bp, Glycine max
aaaaaacaacctttcctaaaaaagtttaaatggtttaacaaccggcaacaaaaggaaagaaacccggaacaaaaagagcaagccaatttgttcacgtgtcagcctcagagacagcccatgttatactttgtggttttactccggataatggttgggtccgaatttcatttttcatttcccatttttttttttgttttttggtgaaattttaatttcccattttgaaccataatatttcaaactgatttttgttgctttggatttttttttggggagaagggagagacccttcaatcaccacttattttctttaacaagaaaccaagcgtgaatccaaaaac

SEQ ID NO: 98597 - DNA, 507 bp, Glycine max
ctcgagccgattcggctcgagggtacagacactatactgaaagaaaatgatactcctgagtcagcagttgcaaaacattttgcatctgccaagatgagtggcacagagttccctcaatatgggatgccaagcaactgcttgcaaaatttgccttctgaaggacacatgatggcaatggctcttgaggttcaaaatcttcttgtctctgggaaaaagaaggaggctttacaatgtgcacaagaaggacaattgtggggacctgcacttgttctggcttcacaacttggtgaacagttctatgttgatacagtgaagcaaatggcacttcgccagctggtttcagggtcacctttgcgcacattatgccttctaattgctgggcaacaagctgaaatattctctactgatacctcaaatagtgggcatcctggtgcttctgatatgtctcagcagtctccacaggttggatccaatggtatgcttgatgattgggaggagaatctggct

SEQ ID NO: 98598 - DNA, 255 bp, Glycine max
ggagcagtgatactctcattcgggtgttatgctgtcttatgggggaaagcaaaagaagaagaattgactgtagtggactttgatgatatacgtcctccttcaaatactaagagtcctttgttgcagagctacaaagtgaaagatgaagataaccaaaatatttaactatattgtaattctatttgaaattccaaaaaaaaacaaagcattgtgacattttctatttctgattagagtgagaatctaatgcatatc

SEQ ID NO: 98599 - DNA, 432 bp, Glycine max
actgttctgaaatatttttttttatttctgtttgcaacatataaacacatatagacatattaccttatcacagtactactactacctctactactcaaaatcttatagtaataataataatgatagtattataaaatctataaactagtcccctatggtgaactaaaacccctaattttaacttaagaggaataaaagggatgaaagaaaaatggaaaatgatactacaaattaaaaactcatttgcattggtataataataataatattagaagatctgaaatcagaagctcgcaccgccaccatcgatcacataacattgcagcttgaggtgttttcatcgctgaaaaagtgggtgtaagggtctggaggaggataagggtaaggaggatacatataattgacggcaggagggggccgcgcgtacatcat

SEQ ID NO: 98600 - DNA, 542 bp, Glycine max
gtccaactattcaaatttatcttgggtttattttcttcaaatcttccagtttctcacttcatctcccagtggtgattctttctaaaccagattaataccagcgactcaaagacgtctaaatgctttatctcctaattattgtgtaatgcgctgactgattctgaaaatacttttcaattgttaattttagaggacgtggaaccaatagagattctcaaaggctttagtgctgttctcaatttgcagttatttggtgtatctagttggaaagaaatgctacaatttttactggttgattgttgcctcttgagttaatttgggatcaatttgtggtgtcctgctaatggtcctttttgggagtgtctttggtagatatacagagagattgacatgttgtattacatatttcatgttcatagtttttttttgtttcctttcgttcttggtgtattttttgaggattgcttgtcctcttgcatttgcatctctccttttctttgtaaattctttgtatattaaaaaaacattaataaaaaagaacg

SEQ ID NO: 98601 - DNA, 572 bp, Glycine max
aaggcctcaccgggttgatgaggacaacaatctctaagaacatgttccacagttatcaagtggggagtcaaaaggaggagattaatattctgcaatatgcagatgatacactgttttttggatctgcaactacggataatattagagtcctgaaatctatcctcagaatctttgagatggtgtccggtctcaagattaattatgccaaaagtcaatttgggtgcatggggaaatcagaggcttggtgtagggaggcagccctttttctcaactgtggtcagctggatatccccttttcctaccttggaatcccagtggggacaacatctaaaagctggaatactatctgccttcccaagaacaaatgggagcttgggattaaagacttgtccaagtttaatgaggccttgcttggtaaatggggttgggacttggcaaataaccaggatcagctttgggctagaatattaatgtccaaatatggaggatggaatgcattatgctatggcagaaacagagctgacttttccccttggtggaaggatttaagatatgttttccaacagcatcat

SEQ ID NO: 98602 - DNA, 522 bp, Glycine max
  unsure (1)..(522): unsure at all n locations
gttggttgcaaattgcttgttctctctaaccaaaaccttagttcaaatattccaaggagttcaaaatcttaccttgagagatttcatctttttgttcaggaaggagctgatcaaaacacacccctattcacgttggttccattgaaggatggattctactcagtcgaattcagttcagaaattaatcatntacgagcattcttcatgtctgtggcagttttaagcagccataacttgccaagttccttggaaatcaataacatgcaagaagcaatcaataaagaattcagtcccaagagcaacaatgaacttcaggggaaagcacctttatattataatccaattcctccatactcccctgctgacagagtttaatatcagaaagggaaggctttttcaccatcaatccatcatagatatctgttatatattaccatgaagctaaggaatttcaagttattgcactgccaataattctccatttactcctttattggttgatactatagcaataccacagtc

SEQ ID NO: 98603 - DNA, 57 bp, Glycine max
atattgaaaataatacgagatagccattttataggttagctacggacctgattttcc

SEQ ID NO: 98604 - DNA, 156 bp, Glycine max
ggactttccggcaacagagataagttcaaatgatggcgtctcactcctgcagtatatcaattgaaccaggggtccagtgggaacaatactagctacagttacagttcctgattataagcctgctcccgtggtgggtttcttttcatcaagagggcc

SEQ ID NO: 98605 - DNA, 502 bp, Glycine max
acaaaaacattcacaattgttcagttcgagataatctcaaggtatacatggatatcgattttcacctgcggtgacattgcacttaaaaactgaacacgaaatggagaaataaaaaggaacaaaacggtaaagcaaaaatttctattatttacagtgaaaagaacaatccataaaaatcttctgtgtgttgctatatatgctactgctctctacatcctacaaagatgtgagattaaactaaaatttccatgtcaaagaatgaacatctcattctaaacatataaacatttcttcatataatcttaatgtcaaaagtcaatagcaaccttgttaccacttccaatcccttgctagaaatgttctgtttctgtttcgtcagcagtcaccggaaagaaactcaagatgacatctgcccccaggtcaaaaaatcaccaatccaaaaaatgtagattatatctgtaaatatgtacgtctaatcacatcatgaacaaatattttaaat

SEQ ID NO: 98606 - DNA, 216 bp, Glycine max
acaagaaaagacaatggttgatttgctaagcatattatatgggggaaaagaattacaatccaacccgttaaatgttttggttggggaaaaaaaaaagcgttaacccccacttaatgggttggccgaacaagccacgaaaagttttccggaaagaaaggaaggatcccaaaggggaccgggaacatgtggagtaaaactttttttttctttttccaa

SEQ ID NO: 98607 - DNA, 499 bp, Glycine max
aattatagtcagagtttcgtctcaataatttgtggaatatagatttctatgagatgtcaatataaattcttaaagtgaatcttcaattctaattatacaatagtgccaaaaacacttataaaactgcatataaatattttcataagtaaatgtattctattgctgtaaaaaaaaaagtaaatctattctatttttaagtaataagtgcataaatttcggtaaaaaaaaattataagtggataaataaatatgaagagtgtgtttctttacctgctgcatgcattagaaattatatataattttgatttttaacccatgatattgatgtgaagtattaattaattttgttgatgactatttttttaaaaaaaaattgattaatcatttttattaaatttttttatcttgattacattttttttcaccctcaaaactcaaatgcaagaacttgcttaaagaaccaaattcaatatcattagatcaataatttattatttga

SEQ ID NO: 98608 - DNA, 381 bp, Glycine max
aaatcaaatgtttttagctaagttttgtagcattaaagcaagcacacgatagaatagtaaactacagcagcatgcaccgaaatctctttttccatgatattggacaagagtgatccattagtactaatgacctgcctgacatatagttgcaggccaccaggtcattttcattaagcactttgcacaaattctggttatctatcaatctcccacttaacatatatatagccccaccctaagtactgtactaattcacattaacttttcattttttgttcactgattgattcctccccgaagcaactccaagagaacaaattattatttttattggcagatccacaaaggcagagcgagggtgacaattcaccactgaaaaac

SEQ ID NO: 98609 - DNA, 418 bp, Glycine max
ataatgatcataaaaagagtaacacgttattgagtcaaagaaagtgcaccacaatcaaaggtcggctgtaatgtaattatttattacatatatggagtcttgccaagatgaatatcataaggtaaagaactcagggtgggaaatgcatcaaaaggaaaaaccgtgaccaccatcatgtgaaaaataagttcatggcacctacaagatccgaaaatggcatcccaatagtcctctgccttgccaaggtctaggtgtaatagttaagttgatcactgtgccttgcctcataataacaactggtactgcacaacccagatttgactgagcctcagaagaaagcctttggagcaaattatcacctgcttcaacattgccaaatttcaaaatttgatccccaagttgtaaaccatcctctact

SEQ ID NO: 98610 - DNA, 131 bp, Glycine max
catgaactcggtccctatgaagagccatgtaagaacttacaagttatgcgtcgaacaatatcttgagtgagttggatgcagcattcgatatttgcttggggtggcggcgggagatcccaaggttaaataat

SEQ ID NO: 98611 - DNA, 131 bp, Glycine max
ctagttctagatcgcgagcggccgcccttttttttttttttccccttggtgagactgagaatttcaacttgttattgcctctgttttcttgcaaggttaatagttcatattattatttttctcttgtgcat

SEQ ID NO: 98612 - DNA, 132 bp, Glycine max
atgcacaagagttataataatattttgaactattaaccttgcaagaaaacagaggcaataacaagttgaaattctcagtctcaccaaggggaaaaaaaaaaaaaagggcggccgctcgcgatctagaactag

SEQ ID NO: 98613 - DNA, 314 bp, Glycine max
gggggggggggtatgaacaagccttgctaaaaagggaaaaaaggcccaacttgtttcccgggcaattgggttttgcctaaaaaaaaaaaattgggtaaaaaatttaatttaatacctgggcctccggagactcaaacctttaagaattacaacattttttggcctgaaacccaaaaaatttggggccccaaattggggtctgggctctccaattctcaattttgggtttaagaaccctttggaaagaaaagagggatttttggcgattagcaaaagctggagcaatttggttaacttccccttttaaaattttc

SEQ ID NO: 98614 - DNA, 225 bp, Glycine max
aaccaattccaaccctggtaatatcaattttttaaaaaatccaacattggcctgaataggctaattttggggtccaaactaacaaacttttggaattcccccctggataggggcctccatcactggataagaaaaaaccggggggccgggggctttcaacattcaagagggggggccaagggatcaaaactccctttggtgggattatacattttacagggttaa

SEQ ID NO: 98615 - DNA, 408 bp, Glycine max
gtccttatgggttttatttagttgtgtagtggttgtttcaaaatctgcgcaaagatattcgcattacaatgaattgtatgtaaaataaattatttggtagttgataaattgtacataaataatgtaagaatttcgactctggacgcaacaattttcaacgatggatgccccatagttcaactaaagcagaactaaagggatgctatcttggaagccacgatctcaagaagtccctttgggttatctacgtgaacccaatgaccagcattgggaagaacaaagaaggaagctttcccaggagagtcagatcctccctgactggctagtttctggatcctgtcaatagcgtcttcgtcccatctatcacttttttcagcacgcacaattactatttccatacccttggga

SEQ ID NO: 98616 - DNA, 595 bp, Glycine max
  unsure (1)..(595): unsure at all n locations
gcagaaggccctgaaaacagtttcaacactttcaggtgccaaatcattgttcaccctttttctttctaaatattctatgatatctaaatttctggtttgggaatgcccaaatctggagaatgtcaccaaattttaagatctggtgaagaagagtgatagttaacctgattgctgacgcaacctccaatcattgtcacgtgacattggagcagagatctatatatatagttattttcacgagtttaatttaattatttttgtccagtaaaatattttagcactattttttaaatcatattatataatcttataatcttattgcagaattacaatttttttaatagttatcatgattgtgatattcaaacttgttgaatgtgtttcgtacatgatgatgtgataagagtataaaaaaattactctcaaatgagtgaaacaatgttattgtaattattatattagatgcaaccatattaaatatttgggccattttgttacagagtactatgtcgtgtctttgtttagggatgaagacataccaaatgcgttataattaattatgatattttctaatnttttattctataataattga

SEQ ID NO: 98617 - DNA, 531 bp, Glycine max
  unsure (1)..(531): unsure at all n locations
ctaaccgacgggcccatgtacggccccaacatagaactcctcaccggggacgggattgttccgttcgggtttgagttgctggcgaggcccgacgggccagcaagtgcgagcccggagcgagtcctacgtgtgatgattgagatatcacgtgcggtgggttcggtggggttgcaagacgcgcagtacgtgaagaaaacgttgtgggacggtggtgaggaggtgcaaaacgtggaaagcatgcagcgctttgtattggagaaaagggacggtgggttgcatgcatgtggggctgcgtctggtgccatcttgggaggtgggagtgaggaccaaattgaaaggttgagaaattttggatttcatgtggggatgatgaggggaatgctacaaatggggttcatggaaaaacatgtgcaagaggagagacatcttgcactcaaggaactgcaatttttcatggacagagatgttcatgttatttctagttntatttattaatttctagccacttttaagttttctatatatctggaa

SEQ ID NO: 98618 - DNA, 466 bp, Glycine max
gactcattctatttgatttcttttttttttcctgtcaaacaagtcttctaaagatcacttattaagaattctaacttaacatataatatgatacacatgcagatattttgtggctgcattcagtgtttctggcctttatgctcttgtttctgctcttgcatctatctctgtcatccagaagccaggattcaaactgaagttcctcctccactttatcttctgggatgcagtaattaatcaattagcctttctttccacatttttattcatcttctctctcaactctcttgctttacactgtctaccatgacacggtgcagctgatattggggataacagcctcagcaacaggagcagcaggaagtgtggcatatattggtttaaagggcaacagccatgtgggttggattaaagtttgcaacatctacgacaagttctgtaggcatctagctggctcctagcagtg

SEQ ID NO: 98619 - DNA, 370 bp, Glycine max
aaaagagtaatatataacttgtttatttcaatcatatataaattcatgatagagatacaaacatctcaattaatgctctaataatccactcatatgtatatatatatataagacaagactggactatcatatcaatatatatagcataatagttagttcaaatattcttcattggtatatccagccacacgatcgtcctatatatatccaagtttatgctgcgaacactcccacaaagacaagaccaagaacaagagacacccacattccacttacaccaattcttacaccaccagaggtcacagtaggaacaacctgcgtcgaggactccgaggattgttccggtttaggcgacggcttctccttttca

SEQ ID NO: 98620 - DNA, 479 bp, Glycine max
aaaggaactggggaatctaaagaagaaggaggcaaatgtagagagccagatacaagctgttcaactggaagtaaagaaacttttgaggaacacagaggagaaggagcttgcacttcagcgtgtgatgaaagagaaagagatgctcttggagtttagagataatggtatgttggaaatagagcatatgatcattgaactccagcaatatgtatttgactatgagctaaaggaggctgaaataaacattcttggagaagaattgcaaatagatttgataagagccgaagagttacaaacagccagggtcattgctgccaacaacaagaacaatgtcctttcttctatttcttattctggcatgtttgggaagctgaaggaggagatgcaaaatctgcgggcatcaattctcgaaacaaaattgttgctggaaggcatttcccatgccactaaattgtcgctttctgtaattaattctccat

SEQ ID NO: 98621 - DNA, 559 bp, Glycine max
ggaagagcttgagaaaacagaaaatgtgtcgaccatatgcacagagtaagtactgtttcatgggagattttaaattttataaacctgaaacagacttgttggatttgcccattcagcaagatttggtgtttctctgttgatggacccttttgtcaacttgggggctgaataaaccctgcatggttttttcgtagttttgtcaacttgaggtctaaacaatttcacttgacgtaatgcagattgctacaaaacatggaaagtaggcctgatccattactcccagaagtccatggaccggtgaacctcttatgggatagatggtttgaagggcctcaagatccacaagcatgtagatgttggatactttgatttgaagctgtgtcaattgccatgcgttgcaaataggatgccacatataactgcattaaagtgactctggagctgaagaaaatgtttgatgacatcttaataccacgcacactaattctttaatggatcccttgctttattacattagattctgatctgaatgcagtttatatataatcacattcattta

SEQ ID NO: 98622 - DNA, 500 bp, Glycine max
gtttatcctgaaacatttgcacaactaaatagtgaagcctttgctcatatacttggaacccttgattttggtcttcaccatcaggatgcagatgtggttagtaagtgtctgagagctctgcaagctcttgcttcttaccactacaaggagactggtagtggtaatataggcttgggtgcccacactgtgggtcataaggattcgagtgggaatgttcaggaaggtcttttgaaccgtttccttcgttcattgctgcagctactcctttttgaggattacagttcggatctaatcagtgttgcggcagatgctctccttccattaatcctgtgtgagcaaggcctgtatcagagattggggaatgaattgatagagagacaaccaaatgcaacactcaaatctaggctggcaaatgcattgcacacactaacaagtgcaaatcagctttcttcctcccttgatagaataaattaccagagatttaggaaaaatctcaatag

SEQ ID NO: 98623 - DNA, 406 bp, Glycine max
aagaattattcattatgaattacttttccccaaacgagattaatcaaagattcggcgttaatacttactcggcaattgaagttacagttacacgtaactgtacacattgatgagcaagaccttaacatacaatgcggacatatttatagttattacaacataattgcaaaactaatgtgaataaaaccactctaggaatttgatcttctgaagaatcaacttccctcaaagcttaagtttgcataaactttggaatggtttaacactttaacatcatctctaacagatctaaacgaattccgtgcttgtgcagtagagcacaaacatgaaagagtgtaaatatagaggctcctaccaaactaagtgatagtaatgtatatctacgcaaggatgcaacttgacagaa

SEQ ID NO: 98624 - DNA, 221 bp, Glycine max
gtactattaaacaaatttatttagccccgccgcctgaatgatttttggttctcacaagtaatacaaaacttgggaatcaaaaacctttggaataccaatcccaagttcccaccctggagtaaccaacccttcccctggttgacaaatccccctcaaaagcctcatcagaagcttatagcttcctcattggggggaaaaaagactaatacagaatttccttt

SEQ ID NO: 98625 - DNA, 101 bp, Glycine max
gggttattgaagaaaaagatagttgttttattcctcgggaagaaatgctgcttgcttgtaaccctttcattctattctaacttttgttactcattcacgtt

SEQ ID NO: 98626 - DNA, 455 bp, Glycine max
tagacatatgaaatagttaaacttgtctattagggattgcagaatctagtctgcggaaggaaattgaatttctcattatccatctcaaatttcataaaaagtatgagtggggcacattatatgtcaggaaaatttttggcagctgagaaaaaatttccctaccagaaaacctattatcttttctctaaagattcatgatactggcatgaacagttgcaatagatgcattttaaattttacttaaacagtgatctggtcattgtgtaatttatatgatttatttaagtagttataagctatacaattatcagcagatcgctgctgttgcccttcttctaggctggtgtttaatgtagtacaaatgatttcttatgttgtggtgtgtttagtcttttagaaccacacctcaaactagttattgtagttggagaacctaaggccttatgaatcgcata

SEQ ID NO: 98627 - DNA, 271 bp, Glycine max
  unsure (1)..(271): unsure at all n locations
ctgagcatcgtctagctatctcgatcgaactgtccaaggtcctgtcactaagggtgaacatgcgaaggatgcgatctactggatggtaagcagctgtacacctaccataataaaacagctgccgacaaggctaccgtggcatcgctacacaaggagtaagcacntttatgcatgctgctatgggtagagcccagcaataataccacccgtgtaggcttcgggggcattggccacgccaatagggcagcgcgttagtggacaaagggtgaag

SEQ ID NO: 98628 - DNA, 222 bp, Glycine max
aggcaaaattttgaattttgtttttcaaaccggcattatttggttctccaaaagttcttcaagtttaaaaggccttaagggaaaaaatgaactccctttttttgtacaaaaaacctttttttttttgctaaatgaaaaaagatgattcatcttttacctggggtctagacaaaaaaattagtaaaaagggggttcaaactcctccccgacttacttttttac

SEQ ID NO: 98629 - DNA, 170 bp, Glycine max
gcatcgtctagctatctcgatcgaactgtccaaggtcctgtcacaggagcaacggcagctagatgtggtgctagcgtgtaaactgacgttggagctacggttggcgctaacattgacgccgggtttaactacttagcgtaggagattatgtctgtagatgaggcactagc

SEQ ID NO: 98630 - DNA, 280 bp, Glycine max
tagctatctcgatcgaactgtccaaggtcctgtcacgggggggggaaaatgtgaaaacgggattaactaagggtcaagaaagcggtataatggtatagaaacatgttaaaacgattccaataacctaacggttatcaaaacaatgattagatatacagtatcaccaaaaaaaaaataatatacataaacgaatagaatacgctaaatggtgaagtaagaagtggtgttggtagtattagtggtggtacggcttgtgcaattgatggatgtagaagtgggt

SEQ ID NO: 98631 - DNA, 199 bp, Glycine max
gagcatcgtctagctatctcgatcgaactgtccaaggtcctgtcacatgttatgacggtaatggacgacgtgatgcatgggggaagacgaagactgtcatggctatagatagaagaagaacgatgacagaaggttataaaatggacagctaaaattggggcgggggccgagcgcggtgatggtggttagtgtaggagaa

SEQ ID NO: 98632 - DNA, 378 bp, Glycine max
ggggaaaaccaaggtcgaaaaaaagtccccacccccaataaaaaccccggggcgtaaaaaaaaaaaaaggctcacaaaaaaaaccccagaaaaaattccttttttttttttaaaaaaaaaacccccgggggaaccaaaaaccctggggggggaaactataaaaacccccctgggggggaaaaaaaaccttccttattcaccccaaaccccccccgtttggggggtttggggatccctcccaaggtccccgggcccggcccaatttggtcccgggtttccaatggggccccccgggccccccccatttttaaaaccccgcccttaaaaaaaaaagggggggggggggggaaaaaaacctcgttttttttggggggaaaa

SEQ ID NO: 98633 - DNA, 315 bp, Glycine max
tttttatgattaaggtttaggtgacttaaatgtaaagtagaatattatattttattagatgaaccttagttgaataaatgcattaaaagttatttttgtttcaatttttcagaaagcttatttattatagtgagtgtgtgagaagaaagattgtgaaacaaagttactttgttgaaagaaaagtgtctttgtgtgatagtgttatcaattattgtaactatcgagtgagatacttgaattgtaaagtgatatactatttagggtgtgttataatcttgtaattatttttgtaataatgaaatattttttgagacg

SEQ ID NO: 98634 - DNA, 149 bp, Glycine max
tagctatctcgatcgaactgtccaaggtcctgtcacataatagcgacggccgccaacttaaccggcccgagcaagtaatacatggtaaggtggcccgggtaccttaaatagggaaccggcctcagtaatggcggggtaacgatgtggtg

SEQ ID NO: 98635 - DNA, 155 bp, Glycine max
catcatctagctatctcgatcgaactgtccaaggtcctgtcaccgtaattttcttcgtattggtcctcttggtcgtcctcctaatagtattggttgtttcctagtcgtgatcgtagtctttactgttgtcctgttagtcgtcttgtttgttgttg

SEQ ID NO: 98636 - DNA, 324 bp, Glycine max
  unsure (1)..(324): unsure at all n locations
gcatcgtctagctatctcgatcgaactgtccaaggtcctgtcactgtcttccacgcccgaaaataatatggcatgagtctccagtgagaaggtgaggcatgccttaggggcaactggtggctgggtggcaaaagcgcaaaacaatggttaatatcagaaagcccggacaaaaatgttaactggttggtgggtgaaaattctgccacaaaggaacggaataaaggccacacaaccaaggtttaggagaaantcgacttgtacgtaaaaaaaccggtggtggaggtgacagcagcgagcagcaacagaaatacggatacgtatgga

SEQ ID NO: 98637 - DNA, 162 bp, Glycine max
ctagctatctcgatcgaactgtccaaggtcctgtcactatttcgcgctacgtcgacttgtttcaacaaaaacgtcaaaagcttcgtctataaccataggctacaagtaacaacaacggcctcaacaacagcaccatacaataccgtttagttttgatgccag

SEQ ID NO: 98638 - DNA, 175 bp, Glycine max
gctatctcgatcgaactgtccaaggtcctgtcactagggcgtaagtgttagtgtgaccgctgagaaacatgtgcggatgtacagtggcctggcttttatggttagggtggcatgctgcaggcggcggttttgtggtagaaccattagacgagaagataaaggtggtaggtggtag

SEQ ID NO: 98639 - DNA, 290 bp, Glycine max
tatctcgatcgaactgtccaaggtcctgtcaccaggggacgcaaccagggaaccaaggaaacattagcaccacataggtagtaataaacccaaaaagtatacgggcacgataactgaaataaataacgtaatacaacgttggatatggactgtgtttgaaatagggcctaagcattagaggctaatagcacagagttggacactagactgcacaagagaggcatagtgacagttcgcgaaagcgagaagcatgtggcaacccgatgggggggggaattggccgagggtag

SEQ ID NO: 98640 - DNA, 261 bp, Glycine max
aaaattcaaaaatgatttttgctttaacacccaagttcaagggggcgtttgtacaaaaggggttcatttgtccctcttaaatgaaaaattattttttgggccgggatcattttatttcaaaaaatttttacatgaccccccaatttttgttttcataaattggaaacatgaaattgggtcttttgaagattaacttgggttaccccaaacccttcaatattttttcaaaatgaaatacccagggtaaaaaaaaagtcccct

SEQ ID NO: 98641 - DNA, 162 bp, Glycine max
gagcatcgtctagctatctcgatcgaactgtccaaggtcctgtcactgtaacgtgtgtcaacttgtgggtgtgtgtggtgacaactgagtgcgcgggccgcggatgaacgtgttaataactaaacgatagccggcagggccaaagttaccgttttattttag

SEQ ID NO: 98642 - DNA, 569 bp, Glycine max
tgcatatacaaatgcatttgtcagcagcaatattgaaagtcaaagttaccagttgctgccaaatccagaggatgccaatcaaactgtcggtgaattctggatgcacggtgaaagaaacaccccaagtgcatcagaaggctttgttgattctttctcgctatcatccccaggtgttgtatatgaatctgttggctttcctacggaaggcaataacaatcaaagtagcactgtggaagatgttgctacaagtagcttctcctctgctctctgggcctttgttgagtcaatacctacaactcctgcatcagctgctgaaagtgctttggtgaaccgagcattgaatcgaatgtctagcttcagcaggttgaagatcaagcacacaaacattgctgcagcaggtaaagacactgcaactatgaagagagcaggcagaaagggacttccattccttttcttccctattattattgctttatgtgctttttgttgggtttttgttggaaacttaagactattggggagatgtgtctctccttgatatatatatatatatatatatatatatataa

SEQ ID NO: 98643 - DNA, 454 bp, Glycine max
gcttcagaataaagagagcttaaatttgaaatggtgattttacaagaatacgggtacaacaaagataaattattgcaaatacagaacggatttccatatgccaaacaaacatttaaaatttagccatttacaacaccacgaagaaataatcaaatttattaccaagcgcgctttcaatccaagtgaagcactagggatttttttttttatatccttgatcatggtaacaagagttgactaactgctgaatattcgcttcaaacttgaacaaattgtgcgtaatcttcccatgctcattgagcttatctttggacaaaagcgaacgtcaagggtctccagtatagagcattttgatatggcagcttcaacagcttcctcgtcaatattgcaagactgaaggaacagactggtcaattttggacactctagcttcaaaatttccaaagaggaacaa

SEQ ID NO: 98644 - DNA, 173 bp, Glycine max
ctatctcgatcgaactgtccatggtcctgtcaccctagcacaaaagcaagcagtgttagtagtaggcttggttttagcgcagctgcttattttgtgtgtgacccaggggtaaggttaagggtaagttaattcaatataaactgcttattgggtttaggtaggtctataaggtt

SEQ ID NO: 98645 - DNA, 171 bp, Glycine max
gcatcgtctagctatctcgatcgaactgtccaaggtcctgtcactatgcgccaacaacccgtaagaccaccaggtccagtgtagcggcggtacggtagccatttggcagccattggtggcagcccaaaggaaacgccacccttaaggcggtggttgcaggcggataggcat

SEQ ID NO: 98646 - DNA, 406 bp, Glycine max
  unsure (1)..(406): unsure at all n locations
tatgagcatcttagctatctcgatcgaactgtcaaggtcctgtcactgcactggtgggggcgtaagccttgggattagtcgagagtgcgtaacttaacctaatgccacagtttgtggaggcgtagccaagacaatttacaccctatgcactaaccaaatggcagtggtttacagggctagcctgcgctaggagatatatgatactccggcgaaggcgatagtaaggatgtagatacatgggggggggggccaacaaaggatgtagaagaatgaggtacagaggaccgctgaggaggagtttgtgattttaaaaaaaggaggggaggtgatagtacaaggccgagagtggcgaggggagcataaagacntcgtgaaggaggcctgacggatggggagcntgatgggg

SEQ ID NO: 98647 - DNA, 366 bp, Glycine max
aaaagtagctataaaagtaactagcaaataattagacgctatttgtcataaaatacaagatataccaattctgatgtagaataaaataatttttttggggtagagggataataatagcacctaatatctgaatagttattatgagtaatttcttccaaaaaaaaaaaagcatgtatgagtaattgatgtacaattacaaccgctgtagtgtgtataatgcacaagccatgcaaatctgggaagatcaagtttctttgctcagtgccctcctgggttcctattccatgacaaataagagggatctccaagttgccttggcttgacaagatatacgatggtaaaggccattgacaaaaagaagctcag

SEQ ID NO: 98648 - DNA, 300 bp, Glycine max
ggctagagggaaggttttccatttttcaagagaacaatttcaagaaacatcccctgaaaatttgggggtatatatattttcatttaacttttataggggcttccatgaaataaattataaaatttggagcaaaaaattttaacacatgacagcctaaataggttaccccttttcaacaacccttcaattacaattcctgccctggattctgcagaagaggctaaaatacatttgtgcaaaacctagcggatcattcacatgtcctgtgcagattccgccgaaccccctccaaagattttt

SEQ ID NO: 98649 - DNA, 159 bp, Glycine max
cgatcgaactgtccaaggtcctgtcactcattaggcaaagtagtgctgttgctgtggggtgcagtgctatgccaataggtgggacaaaaacccgcaagggctcgggtgcggagatttgaggaacgcaccaagtaggggggccatgggggcgttttgaaa

SEQ ID NO: 98650 - DNA, 379 bp, Glycine max
tgagcatcgtctagctatctcgatcgaactgtccaaggtccatgtcaccaggcgaccaattgaaccaacccaccaacctaacagccatgtgttggtaagcccagctgtgggtctttacatgcaggacttatgcagtaacttcgcgttccgcttcctagccggctgttaggtatgccttgtaacgttagcctgcctggttttattaccaacattaataagcataggattgctaggctgactaatccgccaacagctaacgtagctacacgccttattacggcctaacaccaacgggcacatgtgggttgattgcgttccattggcagcacgtataagccctaaaccaacgacaagattggtggaccaacccagccaggtt

SEQ ID NO: 98651 - DNA, 396 bp, Glycine max
  unsure (1)..(396): unsure at all n locations
tgagtcatcgtctagctatctcgatcgaactgtccaaggtcctgtcactagcaactaactgacaattgatacagccaagtgcatactaaagctgctgaccttgaatttataacccgtaggttaggagcccaacaggatgttgataaaacgaaggaacggccattaaggtactattgggcagtaagccaaacntgctcagagctgcggaatacacgtgttgagcggaatttggatatttatgtgtacatggctgcaggatggtaataggtttgcaagtggtacgcgcaagggatgttaaaatgtgtttgtaaagccgttaccagatagacgtattgtaagcggctaaatggtgtgttagcaggggagcaccggaggggttacaataatcaaaatatt

SEQ ID NO: 98652 - DNA, 399 bp, Glycine max
gcatcgtctagctatctcgatcgaactgtccaaggtcctgtcaccagggacattggctacggttgtggcaagttattaaacaaccggctgcgggcacataatggaggggccagcaggcgcacaagtggtacgaaaggacaccccaggttattacctagacacgggggcgtgctaataaatgctacagttggcatgcttgtagcgacacaagctgatgcaaataccacggctagcacgtgccaaagaacacagaggtggccttaccaataaccaggttacaagccggctcgtatggtactaccccataagtaagggttggggccgggtcgaataacggtttacgaagagtgtgtgcgtgcatgccatgtacgtagaactatttggggccatggaaattga

SEQ ID NO: 98653 - DNA, 303 bp, Glycine max
gtcttaggtcctagattaaattttattaattagtgacattaaaatactgttgtgataatcagaattcatctggcgaactattttgatatggttttaaaagtgaatttaacgacaaatattggtatatcttttaggaaaaaaagtgtccatttattctttctgtttactttgatagtctcattttgttatttatttaaggctatttatatttttatatgaatgcgataaggacagctttcacgtttatgtcagttcattgaaaaaagggtccacatttaagttaaactttgaaggtttcgcttt

SEQ ID NO: 98654 - DNA, 272 bp, Glycine max
attggattatacatatctatttgacctaaaatcagctttatataagcttgatgatccatctggcctaatatcagctttacatgagcttgatgaaaaggaatgggaccatgtggaaattacatacggaggtatcatagagacctcactgcttaaagcaaccggaatccatgtattcagacaggatgatattcgatatgatgatccctatggcaagagaaaattagagcatgatctcaacagttctgaatcacaatcactcattaaaaagccta

SEQ ID NO: 98655 - DNA, 255 bp, Glycine max
  unsure (1)..(255): unsure at all n locations
gctatctcgatcgaactgtccaaggtcctgtcacaggcaatctccacagaacaggcagcaaaagcggaaaacacaaagtaggaagtataccgtgtgaacatagttgaataggagtaccgggaaccaccagaggggaatattgatgtagtgccttaggcgaagccaagagctagtgccgccacaatgagggcacaaaagtgctaagctccctcggggaagcacagcacntgtcgggtggtgggtaataatgtagag

SEQ ID NO: 98656 - DNA, 422 bp, Glycine max
aaggaataaaaggatcgaaatataacccacaagcaacgagacgattaatacaggctcaggaaataaaattctaaggccgtccaccccattctagtaactattgtagaatcttatcacattttttttagtagcattcacagcttcgtgacttgcattgcagcacagaagaggacaagaggtacaacagtgccgaaacgaaaatatgcaaaaaataaactgaaatggtgaacaggaatgagatgttctagatcacaggataaacacaagaactcctaaaggaatggtcacaaggctgatgtatatgcaaacaagaatcctgacaccaatataactgacaagagacaacaaaaaggctagtgtatatatatgatataaaacaagtattcaacaggaaaagaggaaagggttattatgatttctca

SEQ ID NO: 98657 - DNA, 205 bp, Glycine max
gctatctcgatcgaactgtccaaggtcctgtcacaacgggggcaaagcggcgtattttggtggtgagggtgagcttgaatgtggttgggcaggggcggcagttggtggtaaagattcgaaaattggtacgaagttattatggttattaccgttgacaccttggtttagaagacccaagtggtagtaatgacagacgttggtgtgg

SEQ ID NO: 98658 - DNA, 174 bp, Glycine max
ctatctcgatcgaactgtccaaggtcctgtcacaaaagggtaacgttaatatgtatggtcgctacccgcgccgctgatgacgggcggcaaacactaggccggggtaatagtggcagggtagcacgtatgaggggcatgcaataaacacagcaccgggagcttttgggttacagg

SEQ ID NO: 98659 - DNA, 444 bp, Glycine max
cgaagtcttggtacgaattctcatatctacattatttaattagacctaatacatgtcatgacattgataatttggcatacttcaccacaaatagtatagagaattttaggtgtgttgatggtataaatttatcttgatatctgtaatcttaacccatccaaccctagtagatccttttttacctctcggatgttcatgaaacaatggtaggatgttcgttgaattgtttgattgatgttgttgttcttattgtttagaatgaccagtccttctaatacctttgtattctatacaacaaattcccacatactataacaccaatttacaaatgaaagcatgcatggattacaataattgaatgtgccctttgataattaagtttgatgttaaatttgaactatacgattcaataatttgaggtgagagtcagagtatgcaggagtt

SEQ ID NO: 98660 - DNA, 312 bp, Glycine max
agaaaggtcaaaatcatctaaaaaattagattagagaagtacactaaaagcataaatgattgtcatatttgcaacaactgacaactaaaaggaaggattgggaattgtcattgttgactagttccatggataataataaatataatagaagaaaaacaaaacttaacctaaagaacaaatcctccttatattttgtctgtaacgtttgatctctagtgagtatactgaaaaagaacatgaatctaaaactgaaaactcctagcagatagatgcatgatgtcagacttaaaaaacattagacatgcgccgtgc

SEQ ID NO: 98661 - DNA, 427 bp, Glycine max
ctgagcatcgtctagctatctcgatcgaactgtccaaggtccatgtcacccaggcattggttaaccagcgaacaacgacgtaccagctggccctgggattagcagcatgagaaccagcggaaccatacacacatggcaattactagtactggaggcaatactggttcaacgtcagggctaaaactagtgcttactagggcggggggctaatgcgacacaaacgtgagtggggtaaacctcgtgtaaaacaaaggaggggcgtttgcaagctaaaaagcaaccatccaagatagattatttacaaccgagcggagtagcgtaaaagcaagtattacagcagcgggatagaagacgtgtgcatcaacgccacagttgtcagatgcaaatccacaaacaaacaaggggacccatgtgatagatgccccaa

SEQ ID NO: 98662 - DNA, 294 bp, Glycine max
tagctatctcgatcgaactgtccaaggtcctgtcacatgggcctgtagcttaacttaaacaaggcggaaagtagtgccaaacgcgttgtctgaagcaattgctacggcggattaccccttcctagaggcggcaacgtaagttataccccggaaataaccctgccgactgcaaaaacggtgggttaagagccggaagcagccgaagttattagaggggcgcagcgcagcgcccacagcatagggttcagcaccatagcgggcacactagaggaaccatacgggtagcgtttggta

SEQ ID NO: 98663 - DNA, 390 bp, Glycine max
atctcaaaccaaatcgccattatgtatagtaaaaaaaaatagggtaactggacaagctatttggggcctcatgttcaatgcaaacaactacatgttctacagttttaggcaccagcaaatacaacaatttgatgtaaccatgtacgtgagaagaatttgtcaaagctcattcatgaaccgcactactgaacacaaaaaaacaagccattaaaaacccgttcaggggcaaagaatcctatttgcaacagcaagggcccaccatatatgtcaggggaaccattaataacctaacattccctgattcacatgggaagaatattaatcctcccaacttgagaagaagcacaagggaccaataactcaaaccgggctctcaaaagaaacttggaa

SEQ ID NO: 98664 - DNA, 314 bp, Glycine max
catcgtctagctatctcgatcgaactgtccaaggtcctgtcactcgcgggcacacaaaccggcactgagacttgaaacccacacatatagaaagacgggtgatgggtgaggtagacagacagccatgcctttaaggagcaccattgtacaggcgcgtgagggccatgttgttagaaggctaaagcactggtcataagccgccagccccagctgaggtgactgaatggcgatctgaccaacatccatagtagtggaacaccagatgtgccggccaaggtaccacccatgggccaccggggccagcaaaggggttt

SEQ ID NO: 98665 - DNA, 338 bp, Glycine max
atcgtctagctatctcgatcgaactgtccaaggtcctgtcacaaataaacctgtgctaaggctaaaggtacacccagcgtcagtggtcacgataatccaactcttcgccagcctgagccgatcctaacaatgcatggtcttaggcttactcattccaacatgtcctcggtactgttaaatgagacttatccaggggtaatctagggttaacaggtatcatacatgtggtagtctgtgtgtgccttgtcttattcacgtgtaaataggcgagtagtcgtggcggggttcatataaatgcgattactcatcgcaacacacccagagcaaattacacattg

SEQ ID NO: 98666 - DNA, 349 bp, Glycine max
gaggggagaaaaaaacgggggaaatttatttggggccattcttgtttcattctcgggctttgcatgcccgtctgcactgaaaaacattccaatgggcccctcaaattcacaacatgccccactcaaggttctccttttcaccggttatctaaatattgaacaagggaaacccccaattttttaatttcaggggcccttttttttaaagagccccaattacaagggccccttttaaacaaagggggggaaatggcttgacattcagctccaagcttaacagaaatccccggggggttattattcaatccatccttcccttcaaaaacctttccttcactttattgggggg

SEQ ID NO: 98667 - DNA, 173 bp, Glycine max
gagcatcgtctagctatctcgatcgaactgtccaaggtcctgtcacttctttaacatgcaccagccccgccataagtgcaggcacaccagccacttctagccgccagctataacttttgtcggggcatcatagtatggccccgctgccacccgataatccatgcagtggatag

SEQ ID NO: 98668 - DNA, 248 bp, Glycine max
ctgagcatcgtctagctatctcgatcgaactgtccaaggtcctgtcacactacaactactaagcaacaacaacacagcctaactatccttagtgtttgtcgtggtcttctctgtggttgtggtgttgttcgttatgtgggtgattgtttgccgcgtctgttgtctcagggttaaaggccgcatttttgtgggcgtaaacgcaataacggagtagtgattaacatgtaatggttagagcatgatgatgg

SEQ ID NO: 98669 - DNA, 197 bp, Glycine max
acgcgaaaaactagcccaattttttttgaaaaacagggggtaacaaattaacaatccaacttcttctttaacgataaacaaaaaagggtttttagagggggggggaaagggaacttcccccccttttttgggtgggggcctctcaatctcaggttccgggtggcctcatcccccattttttttgattggggcctgaa

SEQ ID NO: 98670 - DNA, 215 bp, Glycine max
gtggaagcttaaagatcagccatacttagcctaattataatttgtgtggtaaattttaaatgtgtaggtggtaatccaaactttcgtatagaggtggtttctcgtctcatttattattaaaggagttgtagttaaataacctataagggttagcgtttgaattttattttttgatcattgttacgttggtaaaggttactttagtaaccaagtta

SEQ ID NO: 98671 - DNA, 132 bp, Glycine max
cgtgaaatcttattaccaatgaagccaccaggccaaaacattatcatcttcaacaattgcactgcttgcaaaaacttgtgcaaaaaatatggtgattatctcgaaaaagctggggcagccttacaaacataa

SEQ ID NO: 98672 - DNA, 169 bp, Glycine max
agcatcgtctagctatctcgatcgaactgtccaaggtcctgtcaccctcgctacatagggggcggttgggcatgtgtggtaggcggtaggtcgacatcttaacaatttgaatacagtaaaatttacaactgcaaagtgggccccgagcaccggggctggcacgctaggg

SEQ ID NO: 98673 - DNA, 235 bp, Glycine max
ctgagcatcgtctagctatctcgatcgaactgtccaaggtcctgtcactgtcacttcaagtcctgtcactcctgtcactcctgtcacgggatacgaatacgacgcaaagggtccaaaaaagcctcagccgtgggtaacagcctcatcatgccaagcgcccggatacagcacgctaacaatgtcggtagccagagcaaagccaacaaccactatacagataggcggggtaacagtc

SEQ ID NO: 98674 - DNA, 305 bp, Glycine max
tgagcatcgtctagctatctcgatcgaactgtccaaggtcctgtcaccgtggacatcttctatcttattattcgtatgcgggtaagttgtcaatgcgcgtggtggtctgggtgccgtgggggaggaccaggggcggtagtcagttagtcttaaataggttggttacgtatggctggtgtcaccaattgaggaccagccgtgttagttggcacttagttaacttgacggggggtgtggtaagcataaacaggcggccgatttgcccattgaaagtgacagttcgtcaaattagggtgccggcttgt

SEQ ID NO: 98675 - DNA, 431 bp, Glycine max
tttgcctcacacgaagaaacaatgctgcttaagatctgaaacgatgccgtagattagattcaacccttgtctaaaaccctaatttttctaatcacctcaattcaattccaatccttccacccttcaccaaaaagcaatgtcaaattgaaaacctcagcagctgtattcacctccaatggatgtgaaggctttggcgaaatcaaagagaaaccacacgcagcaccatagcaaaaaatctccccatagtcacaagcccaaagccccaacatcatcatcgtcttcttctgtgggccccaatgacgctgcgaagaacaacccgttggggaagcagcaagtgagccagaagaagaaaagccaccgttccgcgcttccctcgaattgggacaggtacgaggatgaggaagaagaattggattctgggtccggaattg

SEQ ID NO: 98676 - DNA, 218 bp, Glycine max
cttggcatctggagcgaaaaaagaaaaatacctcgtttataattattgtgaagatcaaactaccatgctcacaaaaatcggggggatggccaccctttattacacaaatatattatggggtcagatttttacttaaccaagtcaacacgttcttaaagttcactaaacaattttggaaagcaaacccacacaggtaaattgccaccacaaattccctt

SEQ ID NO: 98677 - DNA, 182 bp, Glycine max
agaaccatttggtgtagagccctggcgccggtgtgtgcgggagcagaagccaggtacgcgggtactttgcaccggtggcagtggatgcacagcattgtaggcccaacggcgtgcatgccgcgtgtaagccggatggtatgggtagccatgagggtagagttaatatggctgctactattata

SEQ ID NO: 98678 - DNA, 275 bp, Glycine max
ctgagcatcgtctagctatctcgatcgaactgtccaaggtcctgtcaccgtgatgagcgggttcccaaggctgcagtctagcactaaccaaaggacgctgtggctatttacgactagcaaaagtaaccgccaggctattgttgcacacaaacgatacgcagtgccaggccgccaggtgagtggcctagtatggactattggttaatacaagcgccagtgttaacccgcaagagcagcaagtgcccttacttagtcggtagtccaacgctggtgaa

SEQ ID NO: 98679 - DNA, 349 bp, Glycine max
aaatgtacaatatatcatcatttttttattcataaaatttaagtacaaaatggttgagataattgtaatcatctcatagaatgctataaaatacacgttgagataaactcttgaacatgtatatcttgattgtttctataatttttttaaaatattcacttttattatggcataacaaatttcatctttataaaattacaaaaataatattgtcaatgataatttacacgaaaaaaatagttaaattaataatacttataaatttagcttattgcagatctcacgcctttcatttttaacatttttagcaagaaatcactccatgtgtctatgggtcctggcaaacacc

SEQ ID NO: 98680 - DNA, 246 bp, Glycine max
caaaggataaattattactttcaatctgttcttacgtaaaaaattataatgggaaaacacaattaatttgtggcagaatataacaaatttactctccgacacattttgcgggtatacaattctttacattgtatcatagtaaagtaaataaatgtgttagggctaaatcttaattgatgcaagccctggaatacatggggcaatattcaacacaataggctgacttgactatgtacagaatacaca

SEQ ID NO: 98681 - DNA, 183 bp, Glycine max
ctgagcatcgtctagctatctcgatcgaactgtccaaggtcctgtcaccgttggccggcagcggccaccgcctaggccacccgtgtgggtccacaggcggaccctggagttgtagagtaagcttagtaatgggcatggctggtagcgccggcttatgctgttgaacggatcagcccagtattt

SEQ ID NO: 98682 - DNA, 146 bp, Glycine max
attgaaactaggtgagagctcaaagaacggccatccctattcacatttcaatttggggtggtctttttcttctttggctaaacgttagatttggggggaggctcagggatagcctcattaaggatccgcgaagagaccttgttgga

SEQ ID NO: 98683 - DNA, 425 bp, Glycine max
  unsure (1)..(425): unsure at all n locations
tgagcatcgtctagctatctcgatcgaactgtccaaggtcctgtcaccttctcaccttaaccataataggtagttcaacggtgctagtaaatatgctggcaatgggcaagggtgaggctcaaccatcgcgtaatcgaactcgcgatcaaggctaagcggcacatgtggggcgtatggggcgcatggcaatacntgatcgtaagatgggtagggtcgacngtgcaggttagccagtgtcggcgcattaggttgggggcggtagggggggggaggaatcgcatggtgggccgcaatgtgtttggaggaggttagccgccggcggtgacgggttcacgtagagagaaaggaaggtcgtgtcaagaattccggggaaatagtcgccagcgaagtggtgtgaactgatttgacntgattgcgtggtgcaa

SEQ ID NO: 98684 - DNA, 275 bp, Glycine max
ggacataaaaaatgggggcatagtcatttcattaaaaaatttttttacaaactaataattacatactaatatcattggggggaagatttaatggcagaggaaacagagttccatttttgagtaagaggggcaataatttgaggcacaactgccccaatacctttgggggcagctccagaggcaagcccaattgcaaaagtttcaacataagcaggcttggaatcaagcttcatgtcaagaacagggagtctattgttaattgcatcaatcttcct

SEQ ID NO: 98685 - DNA, 360 bp, Glycine max
agatgtaatgaaatgtaactatgagtagcaaatctgtgagtaagaaatatgagacagaaaattacaaatgctaaacccacatttacccatcctaaacccaatatcaagtttccagcattcaacacatccaaacatcaccagctaacaattaaaaaagtaacacaagactatagcaaaatatgagaacctatctaaaccagaaaccgaaccactaaagagaattaatcaatcaccgtcaccgtcaccgtccgatttcaaccttttcgatttggaattttctacggttgcgatgaaggcgagggcgtggacttgcccttggtcctcttctgcgaaacggccctagcaaaagcctccacaatc

SEQ ID NO: 98686 - DNA, 324 bp, Glycine max
gccccaagatttgatggttaaatttccatctttgtatgcttcaacttggaaaaattgaagtacaaagagagtcagggataactatatccattatacaggacagggataccccaaggcccaaatcatcttttacaaaactcaaattaatctttagggtggcacttacatatatgaactcacatccatctaatcatctttagtttgtattaagatagtaagattttttaatttataattaaacatcacgacaacttgaactattattaatggatatccatattcctgttataccttgaaccaaaagaaaacagttagttacaattt

SEQ ID NO: 98687 - DNA, 317 bp, Glycine max
tgagcatcgtctagctatctcgatcgaactgtccaaggtcctgtcactagtacggcacggcaccacaaccaaacccaaaagcccgaaccagtgcactcaccaataacgcgtggttagcaaccaacttggtgtcgaggtatatgcatcaatcgtcagttgttgtcactgcccagttgcacacgtgtgccaccgaatttcatctacgtttaatgtaaacttagtgccagcaacagaattgtatcctttttggtcatggtttttgaggttgtcagtgaagccattaaatataggaaatttgaatttggtcagtcttaatg

SEQ ID NO: 98688 - DNA, 230 bp, Glycine max
gcatcgtctagctatctcgatcgaactgtccaaggatcctgtcacatattgtggctggctaagcgtagagctagagctaaggaccagggacacctgaacatagaacaaggcaggggctataggattagccgataactaataagcgatggggcccaaaggtacgcattacggcaccatggcaagtgcgggccttaagtgcgtgtgcagcaggaggtaggccactaatactg

SEQ ID NO: 98689 - DNA, 324 bp, Glycine max
gagcatcgtctagctatctcgatcgaactgtccaaggtcctgtcaccaatgtgttaggttggaaaggggattacatcactgacggttcatatacataaactaagcctaaacatgcacggacaccgcatgcggcacactaacaataaacaatgaaactattgccccagggcgcacccaggctgcgtgaggtaaatggggcgcaggcgcgtaaagtgcgagcacgatctaaactacaaggtgccgttgggcacagttgtgcggccaatccggcacaatatgcgaattattcggtggccgttgcgtgctaataaaggtaaccatggt

SEQ ID NO: 98690 - DNA, 226 bp, Glycine max
attgcccaaattgaaaaacaagtcaacaaaaatattggtcttatctgtgacaaacagggggaaaaatgaattctccaatgttgtctggggatgctaagtttcccaggttataggagaaagaaaaactcatgaagttctctctaatgcattttaagtacactgaattgatcagttcacaagggtgcctgcgacatcaaaaaagagcttcatggatggtttggccctg

SEQ ID NO: 98691 - DNA, 348 bp, Glycine max
aaaaaaaaaaaaaaaaaaaaaaaaaaaaaaaaaaaaaaaaaaaaaaaaaaaaaaaaaaaaaaaaaaaaaaaaaaaaaaaaaaaaaagacaaaaaaaaaaaaaaaaaactcataaacccataagggggggccccccccttttgggcttcttccccccggtatttttttcgggcccggtcccggggggggccccccttttccctttggggggtccttttaaacttgggggtaccttgggccttcctttttccctgggggaaattgttttcctttccaaatcccccccaaatttcgggcgggggccttaaaggttaaacccggggggccccatgggggggcccccccccct

SEQ ID NO: 98692 - DNA, 316 bp, Glycine max
gagcatcgtctagctatctcgatcgaactgtccaaggtcctgtcactgaaaacgacggtgtggataaggcacagaacctaaggaaacccatgggaaagggctgtgagagcagggtacgctgcagtgtatgtgaagccgcaattagtttggcaaagagccagggcaaccaccccaaaagtagtagcggcgcctaactgccattagggacaccacgcgagactgctccaccaaaacacccacaactaaggcgaaggagcgcataaatttaacgaagagggaggagccctaggtggagtagtggatacaaacgctgcat

SEQ ID NO: 98693 - DNA, 293 bp, Glycine max
accacaaatcaaaaaattttctttttttaaaaatcaatttatttaaattacccaagctttataatggggttggccccccaattacggaaataattttttcggggccaagggggtttacatgcaatttggtaacccaatcagggggtaagggacaacattttgacttaattggggggaagaaaaacaatgggcccaggaaacaaggcttggggggggggagagaaccccaattgggggggggcctttatttgaagggggggggggggagccccacataaaaactgggaattttt

SEQ ID NO: 98694 - DNA, 168 bp, Glycine max
tagctatctcgatcgaactgtccaaggtcctgtcaccaacaaaggcgcaaccaacgggtggttgatggcaacaaccgaccggataatttacataacaggttagggcggtttagtgtaccggggcacccgcataatagcaggcacgaccgttattaagtggcaggccga

SEQ ID NO: 98695 - DNA, 275 bp, Glycine max
agaagtacaacactttttgagcttgattatatagaagaaaagaagagcattatatgccgggcaaaagatattcacatatgatttcaaaacgccatctaaaatctatctcttaggttttgctggcaaaagcacggcaaaaaattggtatccatgggagtgtatcacaggggaagttaaaattcctaatttgcactaaacaggggttggtgcattcttgaagcacactcttcaatattgctggggttattagttgcatgcatgggaatgcaaatgaa

SEQ ID NO: 98696 - DNA, 180 bp, Glycine max
ctcttcaatattactagcactctatcattgatgaggtctatgaagatccattaaataacttaagcttttcctgatttaatgcgacccacactatgctcatgtaggaatactgttagttaattattaaaatttttggcggtttaactagtttacagtattaattaaatgtcttgtttaact

SEQ ID NO: 98697 - DNA, 202 bp, Glycine max
gcggccgtccttttttttttttgaagcaaaatactaactttatattctccttattgtcacaaatgaccaaggaccctgtccagtgtcgaactatcactgagataaggagattcagtactagatatgtttcttattctcatacacacttaattattgcaaaaaggtgaatggttaaattcactggcacaacatattggatcat

SEQ ID NO: 98698 - DNA, 308 bp, Glycine max
  unsure (1)..(308): unsure at all n locations
tgagcatcgtctagctatctcgatcgaactgtccaaggtcctgtcacaacttaggaacactgggagtaagcggcgttatcgcagagtggttaactaacgccaacagtgtaacagtaaaaaatcaattcacatgctagtgaaccaatggcacaaaaacatggttgtgtgctcaaattgacacaccaaacggtgatactgtagaggtgagccgaccataggacnttggttgcaggtgctattgcataagccataacgcggccacatctcgcatttatgcgtgcacaaaaaaagacaatgcctaattgctt

SEQ ID NO: 98699 - DNA, 262 bp, Glycine max
ctgtccaaggtcctgtcactgtgttattaaattaggtgtagtaattcatctgtgtgttcttggtctggtgtgtaagtttcagtgttcagttggtgtttgtcctgattgttcgtgtgtatgttcgttgtcgtggtttaacacatggtacagatccctgctgcccacgagtgagccaaagtatgggtcgcgggtaatagagccaccaagtatagccaccaccgcgaccggcgaggagcagccagcgttgttgtattggttgtgt

SEQ ID NO: 98700 - DNA, 263 bp, Glycine max
gtcctgtcactaataataaatgaaggaactaatatatatggaaggagactagcttgtcggacctttaaatgctaccactgttatacaaattatatttgcggccctacaacgggtgcatgcggtaaccctagtaatagaagcattatactgttaaggagcttatttaaattaacgcgtgggtttacgtacccgtacccggacattttggtattattaaaatgtaaatataagcatccggctttttaaatatagtgtacgattat

SEQ ID NO: 98701 - DNA, 267 bp, Glycine max
aacaccaaaccaaacagttttttttattttataggaagctcgggtttatattataaaagaagcatttgttttttggatgtctcaatcctaaaacttgcaccataaccaaaggacattggtttttatttagtaagagcttttacttagcatcttctttggtataattttttaggggttttttttaaaaactggacaggaaaaattaccccacacacacacacacacactttttttttttggcctttttgaaactgagttgggaatttt

SEQ ID NO: 98702 - DNA, 209 bp, Glycine max
gaaaaaagaatgggaacacaagctatttataagttttggtactacagtctgcaaaattaccatcttattattctttcaataaacaaaccattagagatgggcaattaacacaacataaatgggaaagggaaaagaaaacctttgtcacgaacaaaaagccaaaattccataaaattctaatcaagggagaagaagcttttggtcattcc

SEQ ID NO: 98703 - DNA, 302 bp, Glycine max
cgttgatgcaaatgataaagataacactaaagggtctcgcagacgactacgggtattcaaactgttagagcaggaatctataacatgggttgaaggagaaactgctgatacaatattgatccgcttggctagcatagagcgtaaacgcttgagttttgtcaaaacatagaatgccctttgtaattgattatggtaaaacttggcattagggttgtgatttgtggaactattggttgttcggccatagtttcatcaattttttgtaacattttatgaaagacttaaatatgtttttgacccct

SEQ ID NO: 98704 - DNA, 162 bp, Glycine max
aagataaatgtttgttttgtatcctttcagctaaatatataggggggcaagaaacacacaaagattttgaaaagacggtacaacatttgggaactacaccgttcacgcaacctgttttaatgaaaggaatatctgtcatgaaaaattttaatgaaaagaaaa

SEQ ID NO: 98705 - DNA, 106 bp, Glycine max
gaagcaagtaacttttttgcttcaatttcataattccatcagccatgagttttcaagacatgcgggtgggcccaaccctccctctcgccggaaccagtccccgtcg

SEQ ID NO: 98706 - DNA, 186 bp, Glycine max
ggtaatggcttttgaattcatgtttaaatagaaagtacaaattctatgttgcaaatttacattacaaatacaggacaactcttcttataatcgctttacctcactaacttcttccaacttccacctgcaaatgcgcagtcagcatatcaaactgcagggcagttctttctaacacattttttttgg

SEQ ID NO: 98707 - DNA, 233 bp, Glycine max
gggcagaaataaaaacattttcccctaattttaccttggaacattttttaaaaatattttttccctcatggcaataacaaaaaatcagggtggagagataaaaaaaaggggaaattaaaaatttttttcgcccgattattattaaaaacaaaggggggggcagggtaaattattatccccggggggggctttattattaaacgggagcgcgtttaaatcaaacgggagggggg

SEQ ID NO: 98708 - DNA, 321 bp, Glycine max
attagaaacaagtttttattgtttaaaaaaaaaaaacaagttttctcttattttttaaaagggccattagtttttttcccccaccggagagcagtacatcatctcctcgaataccagaaattcgatgtcacaatgccattgactgaaataaagcttcttatattttgccggaaaggctatagaaggggcaatactaaaacaaataaaaaacaatttaatgaaaataaatggatcaatcaataataaggctgaccagagaaacatgtacaacaaaagacataatttagtgcatgctgtatacggttaaggcagtaagtaaac

SEQ ID NO: 98709 - DNA, 395 bp, Glycine max
ttcatgtttgttaagatacaaataatatttttgatctctttaggttactaacaaaatgtgcaggttgtggaggcaagtcaagattttgtgccacttattttgaggcaagtcaaaatgtgcagtggctttaaatattttagaaaagttgatgacctttggttcaaatcctattttgtgttgtttttctctatttttatattcaggtgttcacaaacaacaaaaagtagcgtaaacaacaaaaaaagcaatgtactgggctatgcgagaaagcaataaacaaacattgggcagcgtgtgagaacaataggcaggtataggactgtgtgaaagtagatataatagacagaccaaagtgtattggaaagtgagagagtacaaccgggaaattgagtgta

SEQ ID NO: 98710 - DNA, 475 bp, Glycine max
gtatgagcaagagttttgctttaattgcatattggccattgatgccattgtttgtacaattgatagatcaacaggctgtctgttccgcctattgatttggatgcataaatcttcttttcagatatgaagtgccccttactctctcaaaccaaataaagaaagaaagaaagaaagaaaaaagatataaacaactaaaagcaaagcaatagaaagtgatctaaaacgacagataaaccatgtcggttgcttctaagtgattttcaggaaaagtccttgagcactgaaactctaaaaatgggtttgacagatgacaggcaattaagctattgtatgtatgacctttctcccgctttcaatttgtgcacacggttaagccatgtctttttcatcgtgacctggtgcttggagatacgtatgaacttggttagatggagatgataataatttctaatattcattttacactacatctttt

SEQ ID NO: 98711 - DNA, 383 bp, Glycine max
gaagaagcagatatctttataaattgcaaatcacttggaaactaactatgcattttaacatgcaatccattatattacaaaagaacatcacctaatctacataacaaatattggctgtacccacttcagacccttctttcatggtacccctcattcattcctttttcacagttccggccaaaccttccaattgattcccggacttaaaatataacgctaaggtataaaacttggaaaaagcaaaaggattgcagccattatggtcatcaccaaaaggaaaaaagaaagttacaggaaatgaagaaattgaacagttaaaaaatacaccttacaatcttacaacttgcttctactttacatgccaatgaacaaagcttttgtga

SEQ ID NO: 98712 - DNA, 309 bp, Glycine max
gagcaactcagaaccagcaccttccaacgcttaaaatcacacactttgcaccttctcgaccttttgcagaaccctcacattcagtatcagaagcattgttctctcaccgtaatcccccaactccttcgtttccttcagagttcttcgccctctacgttacaacccttcttcgactacactctgtttccgttacttctgctcctcgatgcagcgatccagtgcaggtctactcagaaagttgattctcaggaaaattataacatgcctggtgttctgaaaacacctgttaatgtgagtgatggcgttgct

SEQ ID NO: 98713 - DNA, 322 bp, Glycine max
gggggacgccaaaaaccacgtccaatttttattcatatgaaaatcatggccccaaaaaaatgccctcatggggtccattggggccctcgacataaatcccggattccccggtggaaaatttttaaaaaaaaaaaaaacccaaaaagggtccctggaaacccccaggaaaaaaaacttggtaaaaacctgttttttggtaaaagggggacctttattttaagggcaaatttttggttaaaaaaagcccgtttccccccccccacaggggcttggcccattgggcccttccttttggtttgaagcaactcattcccccattttg

SEQ ID NO: 98714 - DNA, 276 bp, Glycine max
cggaaaattctacccttgggaaaaaaatttttagggggcccccaataattaccatttccccctgggccccgggggccttggaaaccatttttaaagggcccaacccattttgaaacggggtaggggcttttcaaaggtaacaaccccaaccaatttttcccaaaccagggtttaaaaacttaaacccggggggcaaaatattttttttcgcccatcccaggaaagaggcctttaaatgggagagagggccaataaccccaaggccccccccccttt

SEQ ID NO: 98715 - DNA, 420 bp, Glycine max
catgttaaaattcatggctgcttctggcgagttatccaattctcaattttttaattaagttcttgacgcttaatacatgccttttagaaggaacatttgtacatggaaataagtgaaactatcaaagatattttataatcgtacaacctatgacaaagtttagctaataagatattaaggacaatctatgcaatcaatgtttgatctgattgcgaggtattagcacgacttagacgcttcttcctgtatctccatgcaacctgaatacggtttgctgcaagggatctccagtaaggtgatacataccttagtgctccttgaacatgagggttccgcaagaatcttgtgaaaagaattgtcagttcctcaaggtctgcagctcgaagtgaaaatgcctccacgtttgttaagcatcttact

SEQ ID NO: 98716 - DNA, 401 bp, Glycine max
accctttccttggatacgtgtacataacagggttgtaaacctatctaatgaacgaaaaatatccaataaactttgttctgttattgcgtttgaggaaggattcgcgtgagactatttttttagttgaggatgatagatgaaatgatcttcaaaatagttatttcaagatttaatgatctgctgatgacttcgaagaaaataaagatttaaactgctgttattataaattaaatgactagaattacagtttattcatattatgatcatttaatatttgagtgaatcctcaatgactaaagattgctaaaaaaatatcaataatttttaagcgtcgcatcatgggatggacaagtagttgttattaatttaaattaggaaatacataataaactatattaaat

SEQ ID NO: 98717 - DNA, 265 bp, Glycine max
aaaaaataccattaaattaacaagcattaaattaactggttagatattacatgaagattttgatcatgattcatgagagttatacaaagagaagaagcaaagatgaagataattgactagttataccaaccatccctgtccatttgtacataggggttgttgatgctgaattgtcttctggcttgggaggaggctttctgtattaaaatggaaagtagggtaaaatagggtccggggggggggggctgccaaaaccaccactacc

SEQ ID NO: 98718 - DNA, 463 bp, Glycine max
aataatcataaattatataataaatttgacaaataccaatttattaccatgtttacaaatgatttagtacatataaaaatatcaaaggcaactcgtgtcagtcgagtgtatcaaaaggaaaattttcactttcaaggtagagagtagaaattccgtgacaaatcagactttttcttcttcattctgtatctctctttctttgttttccctagattatgtgctggggaagggatagcaatggaccactccatatctttatttttttctccacatcaatgttgtatcatattcaatactagtggaccatgacatattatttaagtccttgcagcgcattgaagttttatggtattaaaccatcttctttagtcatgatctcagggatagtcaccagctttaaacaataaagtcggctaagctagcccatagaagagccatagaagtaatgacaatgatcataaca

SEQ ID NO: 98719 - DNA, 388 bp, Glycine max
gattaattagtttcttctattattctgtatgagtctacaagataactgcatctaaggaaacagaacaaaccattattgtaacaaatacaggagaaattattatagatctatagaaggaatatgtgaaattattatagaagcccatacaggagactgaagatgatccactaacagacgaggaccagaataaaatattattgttagtaattgctgagcatgtaacacagcatgtgactcctcatggccaagcaccactctgggaagcttttcaaggttcctgataaatatctcagcagcattgtgttttataacatgtttcaaattttgtgagaacaaacactcaaggaaatcttgtgcagttgaagacacatcattagatacatcaacg

SEQ ID NO: 98720 - DNA, 263 bp, Glycine max
ttcacattttatttggtgttcttattatattgtgaaggaaactcggatcatttcatgatgaaggtatgcgtaacttcatctcaggccatgaaactttgacttcaaatcttagatcttatcaagcttctcagccttgacaactgggtttgctttagctatggcatcccgagcagcagtgcggtaatcaaatgggcaattatgcttgtctgaatcgcgatgtacagacttgacaactgggtttgctttatctatggcatcccgag

SEQ ID NO: 98721 - DNA, 424 bp, Glycine max
actgcaaagatcaagatatcttatacacgatattaaagtccatgacatccctacacatggtcatcttatctagctaaaaaataataatctatatattgacaacaaaaaaagcttccaaatatatggacaagataaaatatttttttgtggggtaatgtggttccctccaaataggaaaaatatggagaaagaaatctagggaaatgttttaacaagcatatcgatactgagagttctgaataatgacatgactgagttcatctttgaagcacactgaactctgtggcaaagtacatggcaatctatcaataatatcatagtgccttaattgagttcataattaaatacatgctgatcatcattataagcaaatgacattgaccttactagaaagaggtaaagcattcattctcggatgaatttg

SEQ ID NO: 98722 - DNA, 157 bp, Glycine max
gacactaggccattccctggtgtcagatgaggaagaggagagtgatgatgaactattatacagacgaagtgtttctctttagctccacaattttatttttttgtttttgctacagttggtaaaactatcgcaaagtaatactgtcatcaattggaga

SEQ ID NO: 98723 - DNA, 336 bp, Glycine max
tatttataggatttaaaaaaatgatatttttattatttttaaacacatttttcaaaacaaaagtaaaaatattttcatgagacacgaaaattatgttttaagtctttaaatttagagttaattataatccacatgtaatttatttttattacattgttcatttttttattatttctaacctcatttgttaattatgtgaattttttgttaataaatttaataaaaaaattatttaggaaataagaaacaaagaaaaattcatcactatttaaatataattcttttgtcaaaagttattttaatactcaattaaatatattttaatactcatttagg

SEQ ID NO: 98724 - DNA, 335 bp, Glycine max
ggaacaaaaggggacaaatcacccccatggtttaattacaaggggtcccaaatcatgaaccggccaatagtttattggtgaaagaaattaaagggaaatacaacgatgagggagtttgattttaagggtagaaaaaacttttattaaaaccaaacttttttttcttgtaccctttggaaacatcggacccgagtctggatgcaatagggggggggtccatgatgtaatgaaacgtgcacttttccacgggtttttttttaaggtttttggcctttttttccgggaagcaccccgttgtgaacttggatctgggccggcccaggtccaggcccatt

SEQ ID NO: 98725 - DNA, 196 bp, Glycine max
gataaatgaaaacacaaatgattttatattagatttctgacacaattgacgtgctttatacaaagatattgccttgatggaggcatgtaaaaccaatacctgtctacttttttagtaaagagaaaaatgaagactccaaaccccagttttttatcctggggagaatagccaatacaatgatgaatcaactgtgcca

SEQ ID NO: 98726 - DNA, 484 bp, Glycine max
atcatctgaatcgtcacaactcacaaccctcactctttccctcctcctttgcaactcgcactcccactgttgcctcagctaataactaagtgcttgtgctcgtgcttatctttggattactgaagatgtcaacttgtatgagcaagaaaatacaaggccaaagcctttctatagaagaagagaacatgctggtggtgcagaagcagggaatcgtgaccattttgggctctaaccacgatgctccgacaacttctcttcgacgcactttatccgcagacatgtcttccaagacatggctttctcaaaacggcttctctctcatgaaaaaaacctcttcctctgaagaactctcttactcatcactcacaaaatccactatttctgactcatcctcgtctgatgaagataactgcgaagaagcgaaacaagaccagttccaaatttggaacacaattcaaaaggagcagcagcatgaggacaacaa

SEQ ID NO: 98727 - DNA, 259 bp, Glycine max
gagttaagtaaaaagtttttaattagcaatgtgaccaaatttgagactcggatcaggtggcaatgcaatacggttcccagatcagaaaagacctcctagaatccttgcaactctttaaatcgttctccaaggaagagttattgttgttgtgttgaaaggttaacgtgttataagcaggagcaacttttgtcgtaggcttggtcctccaatagtattcataagcattgaaagcctttttatgaatactaccatgctgcct

SEQ ID NO: 98728 - DNA, 379 bp, Glycine max
ctgcagtaaactccactctttagcattgataagttattacacaaaatgtgcagcaagcgtctcaaattgctgaatctaagaggacaaattcagctatcagaatcagagagcacttcagtttcagttacgagacagtctacaatggtatgtgcatccttacattcaacaacaatatgcaaccctttattaatacattgcttagttgtgttattgatcccaagctgcttaatgagtcaggggctttgaaatgtctctaataaaagcatcaaggttcccatatgaggagccccctgcggcaatcgctctgagacacataaccttgatttctcttgccctgtctctgatctcctttccctcttggctttgaagatccataaac

SEQ ID NO: 98729 - DNA, 276 bp, Glycine max
gaaagccccaagttttattggccggttacaaaaactttacccccatttttccaaacatccccctaggaaaaacccccaaagggacaaagaacaaaaaaaaaaaaaaaaaacccaagctttttatccaaaacaaaaaaaataggccggattctaagggtgaccaacccttgggaaatcccctaaccccacatacaaaccaaacatggcctacttgttaaaattggaattttcaagttttggggcgccccgttttttcaaaaacccccccaatttccc

SEQ ID NO: 98730 - DNA, 248 bp, Glycine max
gtgaaatttctaagaataaacttgtctttttctgccaaaaatttgttaaaaaaaattatttgggttccggctaggatgaattagcttgtgggtggtttatgatgaacagcttaaaatgacatgtaatagtaggtaattttgatctgtttgtaacaatttttttttttaaataaaaaattgttacaaacagcttaaaatgacatgtaatagtaggtaattttgatctgtttgtaacaattttttatttt

SEQ ID NO: 98731 - DNA, 121 bp, Glycine max
ctcgtgaatgggatgctggttatggcatctaacgttccctagggtatatggcgggaacatactgagaaattttcgccgacatggatcagctgcaatccatgcagctgattcattcatagca

SEQ ID NO: 98732 - DNA, 316 bp, Glycine max
accaaaaaagacaaaagccaaaaattttttaaaaagggttttttggccccaaaacaaaatcatttttcaatcaaattaaataaataacccccttgttcatcattttttggggtccctagggatttacataagccagcatcaggaactttttttatcgcaccccttaccatacaaataaaaaaaatcccttaaaaggaaggaattgcgatcggaagttaatccccccccatgcccgtacaattagaaccaccctttgatcaataaaatttgaaaaaaaaaaaatgggaagccccaacttgagcaaaccccaagcaaa

SEQ ID NO: 98733 - DNA, 242 bp, Glycine max
gattccaaaataaagcaccatatttaatgattgaaatacgtgatctaaccaaagtaaaacaagaaaatcctatccaaaccatgtgctataagcccagggaaaaaaaaggctgatatacattacattgcagtacatcatgaaagtggtctagcttttcggttctacaagagcctgatactgaattgcactgatggctattgccaagacagcaaagaagaaaacgctctatattatctttattt

SEQ ID NO: 98734 - DNA, 110 bp, Glycine max
aactgtcaaaagaagtgcaggtcccaaatggcaataatctttctttcaagctccgcaattgttcttccaagggtagctttctgtctcacattatttaaccttgcaagttc

SEQ ID NO: 98735 - DNA, 255 bp, Glycine max
aaatcgaccgtgcctgtgaaaacagtttatgcatttgagaggattctgactcacaactggaaaggcatcaatttcacaattcctgaaacccctgctactgttgctgttgccatcacattcgatactcagtttgatcaaacggagttagggttttgattctcttcaacctttcgcacaatttaggatgtatgctgatcgggtggatggtggaactcggagatcactgaaggaacaccttgatgggaattttagcac

SEQ ID NO: 98736 - DNA, 407 bp, Glycine max
aagcaattaagactgtagtgactgctttaaaagatggaaaacttaaagagacaagttctccaagaagaagcaatcgcataacggttggtggtgtgttgacacataaaataaatacagagacagcatccaatttgcccaaacccaattcctggtgctgacgatgtgatgcctaattcggaggtgccaactactgcaccttctaaaacaactactgattccacatatagaatgccagggtcaaacacttcaaagcatcagtgaccaatgatagaatccacaccatatactaaacctagacatactgtgattacaccttctggtccaatcaaacaagtataaggacgtgaagttccttccaagacatggcaaatgactcctgcaagcttacttaaaccaccttattttac

SEQ ID NO: 98737 - DNA, 462 bp, Glycine max
gatcgtaagttgatggtattcattcgtatggttactatttacatcagcataaaaagaattacaaaaaatgaaagaagaaacgataaagcctgtttgttctctcaattcaagtggcacttgagaagcaatgaagtggaaaaagtaatagaaaatatcaaatagaagcaaagtagcaaacttaccatggattaaaaaaaacacccattaactgcgtcccccactttcctcaatcatcaatccttttagactcttggctaaccaaatggccgtctcccttggggaaactttatcttttccaaagggcttcagaacaactgcaagttcctccaatctattttgctgcagcaaatctgcagataattctagcagtccttcaagtgcttcagctctctgcctggaagatttaacatccaaaatttcctttgggggtgttccctctgcagctgtaggagtcttatgttt

SEQ ID NO: 98738 - DNA, 524 bp, Glycine max
aacaagggaatcttcaattaacaagtagatttgagggtgaacaaatcttaattcatcacttactatctaaaaaaacttgcaaacaatgaatgcactagacgccctcaaatccctacagtgtagttttgcattgatgcggcaccttttcctcttctgtatttgacaatagcctgcctgttcagaaataagaaagtattcatccaattaagccactcacaaaaacatcatgatccttgtaacagtggctttcttgctccttgtccactgaggctttggagaaacagaaataatggccccttagctttttgctaacagaagctctcttccctgaatttgttgatttatcatttttatgacttgagcaagatggtccagcaacatcattgtcaacacaaaaacccttttgcttattatctattgatctaggtgatgaaaatgaggatatggaaaaggaactagagcttgatcttcttgaaacctttacatgtaccagtcctgaagcaaatctcttcttagcatttgga

SEQ ID NO: 98739 - DNA, 370 bp, Glycine max
ctctcttggttttatggatatctttggaggttacttttgtttacctttgcagtattttccttgtgttatgccgtgttttctttctgtctacaaaaaaacccgtgttcttcttttttgtaatccttctatatattataaattatatcaatcaataaaagcaagcatgataaagtatagtttacaggtttatcccaaacaaatgcaagtgcatatataaacatctggaattgcagttcagctctatgactagacctgagaaggagttaggctccaccaactaaaagaatagcaagaactaatatactgaaaactattaaagcatttaagtaggctatgtatgctacaaaaagccagaattatccaaaaatgg

SEQ ID NO: 98740 - DNA, 380 bp, Glycine max
aaaaccaaaaaacattaaatagtatacaactgcaggctgatcaaagctacatggggttttcagttttaaagacaaatgaaccacaataataaaaacagaagcaaaggcaagccagctttataggttcttgggtgcacaagttatcaagcttgggaattaaggtaaaatggacatggccaatttcaatagtctccacatatgtttggtcctctaagtagaagcttcagggtgggccataagtttgtcaaaccctggttcatcaggtcttctggtttaggcagtaggcaggctgcaggcttcatagatctcagctgcatggaccattaagtctagtaagcatgggttctcctcctagaagcaccactttgacttgacaaccc

SEQ ID NO: 98741 - DNA, 381 bp, Glycine max
gaattacaattttaaattttgttttccattttaattatctatggaatcaaaatcccaaggggattacaacaaggtacttccaagttccaaaaataacacttgcccagtttgcccatgtaagcaaggaaaaccacccactcctattatccaaaatgtcgccacggtaaaaactaaaaaaaaaaaaaaaagaaagataagaaaaaggtactagaaaaagagagagagagagagaggtatgtaaacatgttttttgacatgtttggtttggatttcaaatctacaacgccaccacggtggtttaacccttggtggcggtagccacgacttgagacccagacggtggaggagccacaacttttttcttcgacgccatgacaaact

SEQ ID NO: 98742 - DNA, 449 bp, Glycine max
acaaaaaaaaaaaagttggactgttttagaataaaatatgtatcaacaaaattgaaatgtaaaatttacaatagtaacaagtataacaacgacaatttattataacaatccatagaagataaacctaatttctatatatgccatacaaacaaacaataacaagttacacatttacaatacataaggatataaccagatttattaccaagtttgccttcaatccaagtgaaaaccactggaaaatttcacagatccttggtcatgtttatgaagctgacaagctgctgaatatacgcttcaaactagaacatgctgcacgcaatcttcccatgctcattgagcttatctttggacagaagcgaacatcaagagtctccagcatagtgcattttgatatagcagcctcaacagcttcctcattaatgttgcaagactgaaggaatagactg

SEQ ID NO: 98743 - DNA, 372 bp, Glycine max
atcttgcaaatcacgctctcattagtcaagtcattactgaatgtccattgtataaaataaaccacacaagatttgcacgccacgcatgttgtaagtaaaaatatcagaaaatgatcaaagtcacgagagaacaatcaaaaccaaaaaaggccacacatacaagcacttgcttgacagaccaaaatgtatttgaaaaaggaagggcaattgaaggaaccaacattcaagattctggaacagaggccacggttgttgcagttgctgttgctgctgctgctgctgcacgtttgactgaggcagacttagtaagatgattatagctccctttctccttaaaaagctgggagaagtggtgcttgcaatacaaaatgc

SEQ ID NO: 98744 - DNA, 191 bp, Glycine max
atgaaatataaatcaatgtaaaatatccacgtatttgatgaggtttaagtagtactccaataaggtgattttcactgcctcgtgcagttgtatctgtttaatgaatgaataatgcataacgttttttagcagcacctgtatgtaaaatgatgtttaatgaatagtatatgattgcatgctttagcataatt

SEQ ID NO: 98745 - DNA, 194 bp, Glycine max
aattatgctaaagcatgcaatcatatactattcattaaacatcattttacatacaggtgctgctaaaaaacgttatgcattattcattcattaaacagatacaactgcacgaggcagtgaaaatcaccttattggagtactacttaaacctcatcaaatacgtggatattttacattgatttatatttcatctt

SEQ ID NO: 98746 - DNA, 226 bp, Glycine max
ggcccaaaacgggaaaattttaaaacaaaaagggatgggggaaaaccccaaaaaatccccctttctttggggaaaacagggtttggaaaaaataaggggaaaggggttggggaaaaataaattgttacaaaaccatcctaaaaccttaaaattttccccccccggttttggaacccccccattttaaaaaattttttttgggggttttaaaaaacccaacccaagg

SEQ ID NO: 98747 - DNA, 57 bp, Glycine max
gttctatgtgtgattatcctttgcatatttaaatcaaatgccttctttgtttctttt

SEQ ID NO: 98748 - DNA, 60 bp, Glycine max
aaaagaatcttataaggcatttgatttaaatatgcaagggataatcacacatagaacctg

SEQ ID NO: 98749 - DNA, 285 bp, Glycine max
acattcatagatgatgattaataaagctgtgataaacaagaaaagatgagtacttaattgtgaagagttaaatgagaaatgactaaggatgcacaagacagaaaaggaacacttatggaattcatacatggaaatttaaaaaaagaacaagaaaaagaaaggacacgaatgggtggccatatgcccccttggacacaagcgtgctgatctacaattagatgcatgcccccatggttttggcctttttttccaaacccccccaacaactgtagctgttgagaggaa

SEQ ID NO: 98750 - DNA, 212 bp, Glycine max
aaggggaactttcatttgaatttgacatgacacccgaaaatattggcccgttttgaagttttgtgaccggaattttaaattttccccaaacaggccaaattttttaagctacagctacctaaaactttgaatttcaagaaaagatttttttccctattggccaaagaaaaacaacaaacccccccaaaaagctggaactgcaaaaggggaat

SEQ ID NO: 98751 - DNA, 150 bp, Glycine max
aattaaattgtcaatttttgaacaatagttttcctcacctgttcaacagtcacagtttagttcatcagttcatttcttgaaatttgtcagcattgtcactaattacaattaaaattaggcatcaccacatgactacaagaacacttttgg

SEQ ID NO: 98752 - DNA, 396 bp, Glycine max
aaaaaaataatggttagaatttgtgattaaaaacaagtgcatgtataacaaactttgaaattaattacaaaaatatttatattttaatcaatgacgataagtgcactttatttcctaatatacactacactctccttactttattgaagctaaatgtatctttaaaaatactactactgaacagagagtatatccatccacgatgccaaatcattatattaatcttgcagcatgagagaaacagttgaaaacatctccaggttgctacaaagagctgagacctacctcaataattcatcataggaacctaatgcttcaagaatgctttctacccagccttcgatgcctggttgtgctggatagtacacatttgtgaaacctaaacttcttgccatt

SEQ ID NO: 98753 - DNA, 439 bp, Glycine max
ctggagttaatgatggcacatcttaattgaaaaagagaacctgaaatggacgactatgcggcacattttcacaaggccaacaacttaacaacactgcctacttaataaaaaagactatatcaataccatagacacaaaattacaatgatccacaatacatatggcaggcagtaccgaaaaggcaaaaagtgatacctaacacaataaaccctagttgttggattactgaagtgcttcaaatatcaacttaatctgctccccaataagtagtgagcgattcgcaaccagttccatctcagcaagtcgcaatttcctccacttgcccttcaactctttcctcttagattcttcaattaacgccaatcccctcttcatctcatcctcattcagttctttgaaaccagatacttcgcggtaaagcaaatttacattcccacac

SEQ ID NO: 98754 - DNA, 436 bp, Glycine max
atgttagctgtaatgtaggctttattacaactgaggtaatttgtgcagctgtcattcctttaatagatgaggaattataggatccttatatatataaaatacatcagacttattctttaaaactttctataatccccatgctgagtttccgaggtcccttttccctctctctattcaacttcttcaagtttgcgttcatttttactagttcactcctaacaaattccaacccaaataatccctttcccaaaccccaaacggctacaggtaccaatggcacatgcacaacaccaacctgaattaatttggaaacttaaatgataatgcaaggcgttgtggtattgcaataacattttggaggaaaagagatcagaacaaaaaaattaaatatctaacaatttcctgatatgtaacaaaaaataataaaatgagaatg

SEQ ID NO: 98755 - DNA, 456 bp, Glycine max
  unsure (1)..(456): unsure at all n locations
gacaaagtctcagtttctcaagtcgccgcccaaatagtcgtcgattcctcttcccggatcctcaccatcgccgccggcttcctcggacacaaatccgattcccaaattctacaagcctccactctttacaacgacatccagcagggaacccctcctaaacgcgccgtgtaatcagtttctaatcggcgattcagagtatcctctgcttccctggcttatggttccctatgcaaaccctgctcctgcctctgctgaagagaatttcaactctgctcatgaaatcatgcggcttcccgcgctcagagccgcgncgagtctaaggaattggggggttctgagtcgaccgntgtgtgaggagcttaagacggccgtggcttacattggcgcgtgctccattcttacaatagtttgctgatgagggagggatttttccgctctggcttcggagtttgagga

SEQ ID NO: 98756 - DNA, 184 bp, Glycine max
aaaaatgcccataaaattggggttaaaaatttcccgttgcaaagggactaccatttacattgttccggcctaaaaatttcagaatttaatagctcccctattagtttttctagcttctttgattggaaggggggtttaactcccatggggtttccataaacagcacaagggtcttttcccaaaa

SEQ ID NO: 98757 - DNA, 305 bp, Glycine max
aaaaaaaaaaccctcctccccagggagggccttgttttgttttttgcccccaaagctccgggaaaaaaaggggatttttttccctttggaaacccagggccctgggggggcatccatcagggaaacctgggaactggttgtttggggattgatttcccccccccttttttaaccaacccaagtgtttattttcaccccaaccccggggccagaaaaaaaccccctttttgggaaacccgaaagtgggaaacccccccttttgggggggggggcccctttcccccccccaggggtttccaaagggg

SEQ ID NO: 98758 - DNA, 332 bp, Glycine max
attttaaagacatgaaaggaatgagattggagttctcaaatgcctgaatgcattcaaaactctcattggaaaagaaatccatgtcaatgaactttggatcaataatggaatgagaagagaaaatatttgtgtaccgtatccgttgttcttcagatgagaacaatgaggaagaggaaatggaggagggaatttgcgtttcttgagtctcggaatgtcgttggcttcgactcgaagaaccctttcgcttctttgatggttccgccatttgagggagtcatttgaaatttcaatcggcttaaatgaaagagaatgaaacaaatgaagtttgggct

SEQ ID NO: 98759 - DNA, 499 bp, Glycine max
ggactcaacattgatgccctttttcttgatcaacaattgtaacatttgtttgatctctttaattccctcaatgattttcttgatcttgatttcaaaggattgtgcctccacgctttcctcccttttaaccttaagaattttttctgaactttttagtagcccatgcttcaactctaaaatgctaactttgcaagaatgatggtgcaacccacaagatttgggttcctccttccggaacacctcctccttccaagacccatcctgttctggtttgatttcttatttcttcgccaactgttgtaacattttcttaagctttggtacattgttggtcctctctttcaagaacactatggaagtctccctttcttcaatgcaagtttttgtctcagttttatcttgcttcaagatactcaatctttcaaagaagtggttaccatagcgatctctaaatcttttgatcaaggctatggaaaatgaatcccaatctgaatttggg

SEQ ID NO: 98760 - DNA, 338 bp, Glycine max
gggagcaatctggggatatcaaatttcgtacatcgggacatacatcttacattaactattttttatatataaaacaatgctgccgatataacttacaaaacatatacacttccaagtttaaaaaaaaaaaaaaaacaagcaaatcccataaaaatgtcaggccggatgaaaagaaaattaggccatcttttctgcaaaggatccatttgttaagacaatgaaggctattttcctttcagctggagggcaggaaaatcctgggaagctcatgattggaccgatttgtccccatttgtctgctcagggattttaggaggagctgtttttgtttccttatc

SEQ ID NO: 98761 - DNA, 328 bp, Glycine max
ggaacaaaaaaaaaggggaccctttcttttgggagaaaaatttaattcttgattcaaaaaataggcaaaaatcccgggaatcattcttatcccgaggaaaatcccggtgggtttttgcctctcatcaataagccacccaatcaaaaaaaaagcttgactcaatcaaaaggccttaccccccaaatttttttttgaaaaaaagaacttgaatagggcgggggtgggcccaacacaacccaacccacttttgaggcttactttaacaaaccccattcatttgggcattggtctttttcctctccaacccaaactttttccaaaggggggg

SEQ ID NO: 98762 - DNA, 352 bp, Glycine max
actgcgcagaagattagttgtgcttaattttaaagttgatttatttacacccaaactgaattaactatatatacacaaactcgggtcatggccatggattaattgaatagatgagtgatatctgaagacaagtgcaagaacagcaaagttttagaaagaaaacggtaactaacacacaatggaactaaaaatgacaagcatgcatgagacaataatcaagcgaggttgtcttcggtggtggcaagggaaggcgaaagcgaagtgcgcgagcgagcctcatcgtaatcatctcccagaggagactcttccactctgatctcctcaatcatgttgacaacctccaacatgcacg

SEQ ID NO: 98763 - DNA, 347 bp, Glycine max
aaggaagatccattctaattaattttaagctaggtaattacatgaaagtaaagagtaaacaaaagataaaataaaaaggtttggcattaatatgtacttaaggagcccttcacaaattaattacaaagtaatcaatgttctcttctgtttccttatacaatactacgtatataaattaattcagaacactgcatcacttggtccttgtgccaaataatgattttctctatattgttgatccaagaatgctccataacacaattgaagatcatcaacaccatttgcagcttgatattccatttctacatgttgcatcatcccatatccataagggatccatgcattca

SEQ ID NO: 98764 - DNA, 89 bp, Glycine max
ttaatattgtgtggagttcaccttgattttctgtatgtaaatatgatgacagatataataaagagtggcgttgcatggcctatttctgc

SEQ ID NO: 98765 - DNA, 89 bp, Glycine max
gcagaaataggccatgcaacgccactctttattatatctggcatcatatttacatacagaaaatcaaggtgaactccacacaatattaa

SEQ ID NO: 98766 - DNA, 501 bp, Glycine max
ggcaaaactagctaagcacaagcaacactgtcaaagctcgctaaggatgaagttactcgggtggatgcatagaaaatttcgccagaatagcgctgaagtaccgttcaaagacttgatcatcggaggagggaattcttgcgatgaggagcacaacaactacccgaaagcaagctttgggaattacaaacatgtgaaacaacaaagtcatctgcagaaagaggtaagaaaatctttggatcatgatgagtatgaggaagattcagcgggagctatgtatgagctgttccatgggttcctagcaattggaactcttggttcggaggcatcaacgacgccaacatttgccatctctgtggagaacataacagaaaaggaagatgaagtgaccgagaatgaactgaagctgataaacgatgagctagagaaagttctggttctgggagcggatcatgatgagtcatcatcaatatcatgtgggagaagcagtcatggaagcataat

SEQ ID NO: 98767 - DNA, 398 bp, Glycine max
actctgcataatcgtcttctaccagtcctttaaatttccactgttatactcgcacatcattatgattcgtagttgatttatacataattgacaattttagttcaaccacaaatattgtctatgattactatactggaacatatattttacactgctaagaggtaggcatggaagatgactacctctcttatttacttcttctcccaaactgttttgcatatcatatgtttaacatttgctgctggcattgagaaataaattcgtacaaacacaacattacttcttatatagcaatccaggacgatagcttagctatttattttcccttttgtctttagagctccaagactaagtaatcggcatctgttttgatccagggctccttattctcagatgaa

SEQ ID NO: 98768 - DNA, 383 bp, Glycine max
ggggccgggattcatataatttaaccttataaataataataacaataataagatgggctttactttcccttttcaccattatcaaccatttttcacttgccatataacaagagggtcctaaacagaatcacaaataatcctacatcggggctgggatgggaaagcatactgaaactgaatccccaagggtaatacaatataacatttatttaccattttgacagatacccagcactttaagcacttgcagcatttggaaaatcaatccggtgttgcaggcctaaaaatagtcttttttcacatttattcatacccctcccacataatcattcagcaacgtgatgcatggctccacttaaaaagggcaagaatatgcattacaa

SEQ ID NO: 98769 - DNA, 279 bp, Glycine max
gggaaccggattttattattctttaaaaaaccctcccccaaaaagaatgctaaggaatgatggtccaaagcgtaccgtttgggaccaaaacgaaatcctatacactacggattcggatacccgggtgcgtattaaaaacgccccccctggtcaaaactcccaaacaaccaaaaaaaaaaaacccggcctacaaaaacttacacgtgcaatccaaacccagcggggaacaaagggggggagagccccccggacgtgggtcccacgtgccgaacaccacca

SEQ ID NO: 98770 - DNA, 163 bp, Glycine max
ttcacaacttcatttctcccctgtaattgttacctcccctgcatcaccccactctgtttttgcaccttcttcctctgtttctttggccttcccctgtttcccactaatgattacatcaaagagggtccacagattcttcaagttccgtgccttagtgctttct

SEQ ID NO: 98771 - DNA, 390 bp, Glycine max
ttgtttttttttttttttttttttttttttttttttttttttttttttttttttttttttttttttttgggtaaagaaacccccccgttaatcccaaaaaaacagggggcccgggaaccccccccgggcttgggaaatttacccaaaaagaaaaagaaaagggcctaggtgggcttcaaatttcacaaaggaatatcccccgggaagggggaaaccctgagcttaaaccataaaccccccttgctttgggcccagggggcccaacccgaaaaggttaaaaagaaaaaaaaaaaagggggcgtttcatttgggaccctttcccgggggtgaaaatgcaagcccaggccaagggaagaaatttccggtaacaaacccttctttggccctttt

SEQ ID NO: 98772 - DNA, 482 bp, Glycine max
  unsure (1)..(482): unsure at all n locations
ctcaacagctcgaaaattgaataaatgctgatacaccctcttctttttttaatccttatttctgaaaaattatgaaaagatttctttttgttcctttgtcttctaaacttctgaatcaaaaacaatctcatattttcaatccttaaaaccattttatttttttgtttaattctttcattttcccacttctgtattcatcttttttgtgtctgtgaaaggaatatgtggtgttatgtgctcagaaacaagtcctccccgtctctctttctcccatgatctctctgaactacaagttttaccaatgaaacaaggtgctccttgtagagacacattgttgcatgactcaaattctgacttcgagttcatcacaagcaccgaccttgagttcgaatcgtcttcagcagatgaactcttctctatggngtgatccttccaattcaaatgcaagaaaaaaccacagctagaaaactcactcaccatgt

SEQ ID NO: 98773 - DNA, 544 bp, Glycine max
tctttttttttttttttaccaaattttccacaaggtttcatcaatgatttgtttgtttacccatgaaactgacaccttacgtcatatttatgcaattggagacaaaatgttagttaaatagatagagggggcaatattactcaaataaaaaccggtgcttatctgaataagcaccaaaagaaattatgaattgggaggaagcacagaagaaaacaaaatgggacaaaacactaaagatggattcccgttgttctgtctcccaagctggggacccttttatctgaatggacatggcatgcagaagatccataatctgttacaatagtcttttaatttctaatactaataatcattatcttcaatcttcatatagcttaatcaacttcattgattgccatgctaattagtaactagagtactagactttattaattctcactttctttgtctgttcaatagcaaacaatgattatgaaattgaaccaagatgaattcatgacatgatgatgatgaagatgatgatgattgcatatgaaaaaatcac

SEQ ID NO: 98774 - DNA, 334 bp, Glycine max
atcacctagaatccaaacagcagagatcaaagccaaaaagtgatgaataagtacatagcttagcttgaggatacattatttatgttggcatgggaggaaatttagtcaccaaaagttgttcaaaagaatttctcttcttccactcattttttttgtatataaatcccgcatgtgttttgaggtatagaatatggagtgataattatttatctggggaagtagcctatgtgatttgtgaggattttcttatccttttaccaagttatacagaaattggaacagtggacaaaagaacaccaagcccaacttattgaccaatatgaagcaatggaga

SEQ ID NO: 98775 - DNA, 230 bp, Glycine max
actcaagttccactaactgtcaaacctgcgaagccagtgaagaatcctttgtatcaaatgcctcctccaacgagggaagagatcgagatattggattcgactccaaaggcagatatagggaaccttgaagagttgctcgaggaggagaacttgtacttgaacatagagaaaggagagcaaggacggttgccggtgatgatactgaagttgaagagaagtaataagcagag

SEQ ID NO: 98776 - DNA, 341 bp, Glycine max
cctaacctaatttaatttatactctccaatgatgaaattattgtgaattgttgttgaaatttcagtgagtgtcgatcgaagcgcgagattccttctctgtatccccacgccaaaggcatattgttagctctcaaagagaaaggcatcgacattgccatcgcttctcgctcgccaacggcagacatcgcaaccgctttcctcaacaaattgaacctcaccccaatgttcgtctcacaggaaatatattccagttggacacataaaaccgatcattttcagaggattcattcgaggaccggtgtccccttcaactccatgctctttttcgatgatgagaatag

SEQ ID NO: 98777 - DNA, 423 bp, Glycine max
gttacaagtggctgacagtgcaatatatgccattgcacaatgtgctgaaactttcacacaagacatttgttcgagttgtttgtcaattgaacaaagcgacatacaaggttgtcttcccaatacaaatggtagggcattcgatcctcctgggtgctttctgagatactcggggacacccttctttgctgataatcaaaccactgatatcagtcgcttcttaatacaaggagaaagttcaagcaagaagtgggtcatttttggtggaggtgttggaggtgtagtccttgttgcgatccttctttcattattaacctggcatagaagatcccaaagtcccaagagtgttcctagagcttacaaatttggagcaactgagttgaaagcagcaaccaagtacaattatagtgacttgaaagctgcaac

SEQ ID NO: 98778 - DNA, 513 bp, Glycine max
caacaacccccaacacggagccattaccggtttcgactgcgccctctttctctttttttccccctttctttctatctcttcttctcttcactcaccctccgtacaacacatcatgtgagcgtttcgctggtttctaccctctcgtagctgtccatgctcccaaattctgcaaattgcaaccctcttttattatagttttcttcactttaacaccttatataacttttgctacctccttggaccccaacacaaaacatcacacaagtgctgatggtggtgtggcccttcttattatttcatcttacaacaaccactcattaccaatccctcaactattttagggttcagaaacccttagggttttcttgttcctcatagtggattgagtagtacctcttggtttgtttgttggagcctcttgttcagctgggttaattagctgagtgagagagttttttgcttcccaatttcaaaaaattaatggaggaatacactagtaataatcacttgagt

SEQ ID NO: 98779 - DNA, 258 bp, Glycine max
ggaaaaaataaaaagcccccggctttgtttaataaaacgtccaacatcactggggcaaactactcaagtcctccccctgcaccagcccaaccaattaatgttcccgggttatgcttgataatattgaaactagtagctagagcgttgactggtatccagtttgggcccaatctttttgttaataaaaaacacatcccttggctttaaattccaattaaaaatatttttaataataatttataggggggccctgtcttt

SEQ ID NO: 98780 - DNA, 298 bp, Glycine max
aggaaggtttcccgtcatcactgtatgacgtcctccttctttgggggggggggggggatttagtaatagtaaaggtaatgaggaagtaatggaacgatagaaggaaccgtattgaggagcattgaaatagaggggaaaatacaggataatgaataaaggatatgatgggaaaaaaaaatgaacgataggaagaataagaggagcgtactgatggacttgataacataaatacacgagggtgaagagccgggataagagttggcacacgtgaaatagaaagagcaggagcagtgcatga

SEQ ID NO: 98781 - DNA, 429 bp, Glycine max
gagggagttgtgtaaatattaaataacagtactttataacaaaaagcttcagttttggtctaaagctcaacaaggcatcaccaggataggtacaagctagttataaaataaaaaaataaaaaaataggtacaagctacacccatattgccgctaatttatccttaaaacaagacccgagagaaaagaagaaagtaccgtataagcacaatctcaagcatatatccccgctctctctatatataccataactttcatttattttatatcagagctaccgtcactcaataacactccagctccagtctggtctagggtgttgcaaaatcaatgtcgggaataagttaattaaagcaataacatatgacactttaaaagcctaaataagcataaactcatccattgcaattaaatcaatccacatgtttact

SEQ ID NO: 98782 - DNA, 365 bp, Glycine max
  unsure (1)..(365): unsure at all n locations
cgtctccaagatcaccaacatggtcacccgcctcctcgccaccaagctctaccctgagttcatcaagatccccgtcggccgccgccgcctcctcgaaaccacccaggccttcgaggaactcacctcgctccccaacatgtgcggcgccatcgacaccacccccgtccacctccgcattaaccctaaccctaacatttaccgctgccgctacggcttcccttccttgctcctccaggtcgtgtcggaccacaagaagattttctgggatgtttgcgtcaaggcccccggcggcaccgacgacgctacccacttccgcgatagcctnctctaccaccgnctcacctncggcgatgtggtgtgggaca

SEQ ID NO: 98783 - DNA, 457 bp, Glycine max
gtacgtattacattattttactgattcgcggagccatgttaatggcacactaaagttcccccatggcagtacgtggcacagcatatgccatccctgggtagcatattatgttaaaattgcttttttaaagttttaacaaattgacccattataacatcctagtgtacacataaacatgaaaaggaagggaggagttattacaaatttttaataataataacattattgatagatcagcaaaagaacaaaaaatattggcatccaatttctaacaatttcatagacaataaaagataaatataaaaattgacggacattgcatgaaattgttctctctcaatttgcagacataaaaatgctaacgcatatctattagttcactatacacaaatttcacgctgctgcatgcgtctctattcgacgtacaatttgtacatttgggctcatgccatgcaca

SEQ ID NO: 98784 - DNA, 405 bp, Glycine max
tcatcactgtatgacgtcctccttctttggggggggggggggggcgaaaaacgactagggtttggaggagtaggaaggcgagcgaaacagtggaaatgaacatgtagttggaagtattataggttgtgcaatatggaaatacatgaaaaggagagaacaccaaccgcgtggttaacaacggttaattatggtaaggagcgataagtatattaaatgtgcgtaaggatgagcggtagcccgctgataaaaccggataaagcgagtatgccgcccagtgaggatagaaggatatattagtggtaaagtaaaccacatgagttaagggggttgtggggaggatgcgggggggggggtgggtgaggaaacttacccgataaaatgcgaaatacgtaaaatgttaggaat

SEQ ID NO: 98785 - DNA, 310 bp, Glycine max
ataaaaaaaaaatgatctttttttatatttccaggtataaccaactaaactgagtatggcccatagtaccttacaacttattgacatggggcttattcaaagacatttttaccccctactagaccaatgaacatcggacaagaagtacaaactttctattagatccaattaccatcccttttcttaattccatccaagaactcaaaagggtgtcctctcctgtgatctactgggctcgaacaggacagatgctacttcctgtagatctttcgaagatgcttccttggtgctggaacctctgacctaccaa

SEQ ID NO: 98786 - DNA, 335 bp, Glycine max
aaaaacaagcattaatggggttattttactcatactcaagtttcggcaacatataaaggatttttgggcctaggcctccttagttaccaaaagaaaaaaaaaccttaaagggccaaggaaaacaagaaagggtcataacaaaacgtagcccccatgggagatatgtggaaaaattgcacaaaaactctctttatatcattttaattaggaggaaaatcggttatgcatatgctagtcttgagggactatgttcttgctgatggaaaaagcacattttttcctgccccaaaaggaacattgatctcaatactgtcaaaaatgtctgatcctgattt

SEQ ID NO: 98787 - DNA, 332 bp, Glycine max
gtcatcactgtatgacgtcctccttctttggggggggggggggggaacgcagcgaaacggaggcagaaagagaggagagagccgaaggataacggaatggaaggcaccaacaatagcccgcatatggtacgggggtagcgttatcatgagaatgggccaggtgaaggatagtacgcgatttaaaaacaaaacgagaagtaaaaataccgcaggacacaaatgttatagtagttattgagggggccaaggtagacgcgaccaggagattagcggggcggggtaaccgccgaaatagaggatgcgtgacagtctgggaacgatattaagatatg

SEQ ID NO: 98788 - DNA, 303 bp, Glycine max
ttttttttttttttttttttttttttttttttaagtaggaaagggtgactttctgcctgttaatttcattgcatgaaagaactctgtagttggatttgtgttgcttgcacaccttcatgccgtgttcaaaggatcagctgtagcaaaccctggcgcatgtacagggggaattctgtgctcttccttgtacgagagacagatacccggaccctaacattcttttgttttataaaattacaaaagttggtgggaaccaccatatacaatatcatcattttgttctcaaacaatcgaatttaattt

SEQ ID NO: 98789 - DNA, 308 bp, Glycine max
ggcaggcaattgtctctgcataaaattaaattgaagttgttggggcatcattttacatgctaatgtatgtcccaaaattaaaataattattattatcccgccccgcagatgggggggatgctcatttataaagtttcttctacagcttggaaaggatcattcttagtcaccccaataaaaaaataaaaaaaccgggcaggtttaactgcaaaagacctgggaagaaaaattaaagaaaatggggttttgtgatgaaaccaaatccttcttacataaacaagattcttacaatcattcatttcctacct

SEQ ID NO: 98790 - DNA, 412 bp, Glycine max
aaggagcaaatataaatatttacttcattattcagtacaactatatgctcaccttgcaatatttaaatgacagggtaggggaggaaaaacttgtaaaaacagtggactaatttgaaaagtaaggggattggttcactcctaagaacaagtattcaatgtagttttggttactggtgacctcttctgtacatgtacaaactcactcgtgtaaccaaaaggggaaaaaacaaaataattgggaatatatataagattgggaatgttcttgtgtattttctgcctcgtcctattgctacctttgtaatccttgtttgcaaagagggcagcatgatataattcttaaccattgatccacacattttaggtggaacaaatgggaacagggtaattgcctaacttcttctttgtcttt

SEQ ID NO: 98791 - DNA, 528 bp, Glycine max
  unsure (1)..(528): unsure at all n locations
ctggttttgaagataaacatgacttgagctccaagggtgctgcgcgtagtaggagctttcacacattgaaggaatatgatgatatggttaaaaaaatatggttggccgaatccctcacagatcagcaaagtgagtttaatgatgaagaagatgctggttcaggagctaatacaactcatcatactgaggatagggattgtgtcatcaagaagatgcaaccaccatgcttaaacaaaaattattcattggaagaaatagaagaaagaaaagtagtgaaggagaccgacaacttgagtacaacatcagaatcagcacagtagctacaactccaagtcctaaaagtcacatatctagttcaggtattaagaatgagggagtggttccaagccataaaacaagcacaattgagaagggaattaagagnaaagctgtggcaaagaggctagaatcacttagaatcccnctcggtgtcgaatatccagcaattgctagtcttagagaatggctccctgcaagtggaatatactc

SEQ ID NO: 98792 - DNA, 224 bp, Glycine max
ataactatgatgtgaaacacaccggtggtcaacgcataggatgtccgcatatgacacttacattcactgccatgtcaattggcatgccttctcagaacactcccaaattacacaaaaaattgcgacctgaaaattcacatgcatacaggctttgccgatgtgaaaaataaagaagtggagtctaaataacaatcacccccatgatatatccattatataacaaa

SEQ ID NO: 98793 - DNA, 160 bp, Glycine max
gcctgtcctttttttttttttttttttttttttgagagcaagtgggatcctatttgagcggggggattctgtatatgtaccaagaaaactatttcactccatattatacaagaagcattggatgtacatgatattcttaaaaaaaattggggatatgggc

SEQ ID NO: 98794 - DNA, 184 bp, Glycine max
ggggcaaaaacttatttcattgttcaagtaaaaacggggaaaagtccctttaaaaaaaaagagaaaaattaaatcgcaataaaaacctaatgaccccctggtatttaaacttcaaaaggggctttgacaaaatcaaaaacaacccctgaaaattttttgcttaatcgacttccccaattttggg

SEQ ID NO: 98795 - DNA, 85 bp, Glycine max
atttgagtgttgcatgtaaaagttggtcctcgatgattattgatcgggataaacctggtcactaaatagaattgttgtatgcatc

SEQ ID NO: 98796 - DNA, 88 bp, Glycine max
gatgcatacaacaattctatttagtgaccaggtttatcccgatcaataatcgacgaggaccaacttttacatgcaacactcaaatatt

SEQ ID NO: 98797 - DNA, 306 bp, Glycine max
ttcctgtcatcactgtatgacgtcctccttctttgggggggggggggggggggggggggggatataaaggtataaggaggagagccatcaaaagggatcaatagtgatattggttacaaataaactacaatttaatagcccgaagttttaatttaatacaagtcagacgcgaatacaatgcttgggttgtattacgtagtataacgtaagccgaaaagctgacaattaagggcataaaaacaatccgtaaaaaagatccccagaagtaaatacgaagacaagcaaagcaacaaaatattaggtagc

SEQ ID NO: 98798 - DNA, 301 bp, Glycine max
tcatcactgtatgacgtcctccttctttgggggggggggggggaaagcgaaaggcggggaaaacaggaagccgtacagcgactggggataataggaacatgtaacgaaattaaataggagaaagggcaagatgagcatataggatttacggcaggagcggtgaacagatcgaattaagataagacgttatcagaaccgcgaaaaaggctagccacacgagtgtatattaggtaatgtggcaaccaaaggtaagtagtcatatgtagcaccaaaagcaggcgaatctgtgagtaaaatgggt

SEQ ID NO: 98799 - DNA, 437 bp, Glycine max
tgtcatcactgtatgacgtcctccttctttgggggggggggggggcgggccgttaaggaagacacgaaaggccaagcacaccgggctggggaacctagtaagtatggcccgatagaaacctagcaataagcacgtactaacctacaacaagaagaggaatcttagtattatggcgaatagcgtatgtacgtttgtgctctactagccaaagtacatagagtttggctgtggtacatgtgttatgcgtagttggcagcagggccgtgatccgacgcaatgtgacattgaaagtaagtactgggcggcacgtagttgggcgatgcgtttgtaataatttgcctgcccgagttggccgtaatggcattatagtcgaggtacccgagaatgtacaaattggcgttataacagtatgaaacgcatcaagacaggttatatat

SEQ ID NO: 98800 - DNA, 303 bp, Glycine max
gtttcctgtcatcactgtatgacgtcctccttctttgggggggggggggggacctaacaagggtgcagggcccagggcggaagcagggttaagtaaatgaggagcgtaaccatgaaacctgattatgttaaaactaggaaaaaaaaaacgtgagcggctagatgggggtgaaacgtaaaggtgggtactggggggggggggtgaaaagctcggagtacgcgggggggaggaaaataataatcgttatacaacacgtagcgtagcagaacacatagcggtaaaaagtatgtaggtgcccgaaac

SEQ ID NO: 98801 - DNA, 445 bp, Glycine max
ccaaggagaggtttcccgatcatcacgtgtatgacgtcctcctgtctttggggggggggggggggggcaaataacaaagggcgaggcgaggggaatgaaatagacgaggggaaagagaagaccaaggaaaggtataggtataggtatgtgaaaggttgggcaaggggcaaagtttggaacgtgggttgaaagcgcgaaacaagacagggagtacgtgggttgaaagataatatgttgggtgtgtggcgatgtgagggtcgtgtgtgcgctaggaggagaacagtgtggtggataagacaggtaggtagttttaggtgcgtgcaccgtagtaagtacttggtgggtgcagagcgccgggttaagtttaaggtggtgtgggagtgcacgggtagtggctgggagtgtagggcttagagtaccgcgaacagggagggcggccgggagg

SEQ ID NO: 98802 - DNA, 293 bp, Glycine max
ccaaggaaggtttcccgtcatcactgtatgacgtcctccattctttggggggggggggggggaaaagggcaagagtcggaggtaaatactagaagggccggtgttacaacgatagcaacgaaaaaagcaatgttaattggggacgataaaaaattggagagtagagctgaaagcaaaaaacagcaggtagtgtgaatgtgacataaaagaaagtacgaaaacgccgagataaattttgttgcgttggatggtggtattgttgtcgaggtgcttgccccacgttgccgttttat

SEQ ID NO: 98803 - DNA, 293 bp, Glycine max
ccaaggaaggtttcccgtcatcactgtatgacgtcctccttctttgggggggggggggggagaagaaggaaggaaggccagagtttaggagataccgagtgtggcgttaaaacgagtagcaccatagaaaaagaaaaaataaacaacttccgtgtgcggtagataataggagagtatacaggcttaagtaggggagaaatgacccgtcaggtggaagggactataaacaaagcataggtaacgtttattgttagcacaccaacaagattatttagtaaattgagaagccagag

SEQ ID NO: 98804 - DNA, 97 bp, Glycine max
agttccaatattggctaggttttttaaattaaaagaacaaaaatttataagattcacaacacaatccttcttattcgttctggtttgactacaaatt

SEQ ID NO: 98805 - DNA, 307 bp, Glycine max
tttcctgtcatcactgtatgacgtcctccttctttggggggggggggggggggttagagtgagggggaaagagagaagcagtagcaaccagcaaaggacgcgagatgaagggaggatgggaggtagggtacgctcgcccgggaatagatgacgcagtagagagaatgctgcttggtggcctatgtacagcgttataacgttagagcggtgcgaagtgcggcttggatgggcgcaatcgtagtacgcaccactacggtggtgtaggattggtaaccattaaaccacaggcaccatagttgccaaaagt

SEQ ID NO: 98806 - DNA, 384 bp, Glycine max
catcactgtatgacgtcctccttctttggggggggggggggggaatgagctaaaaataacgaaaagcttaggggagaagaatgaccaaaaggtaggatataaggggccgaaaaagagtataacaaaaaaaggaatggaacgtataaagttgtgagcttagtagggcaaccaaaccgatccaagagaaagacatgggttctagaattgattgttaaggggtgcatacacgattagtcagaaaatgccaattgtcgtgaagaaaaggaagacctcacaatgtaagtgaggtagagtgcgtagaaggaaagaatttaagggtggtgggcgggaggtggatgaccacgtggtgggggcaggcccaagcgatgggagtggtaggtttgg

SEQ ID NO: 98807 - DNA, 365 bp, Glycine max
tcatcactgtatgacgtcctccttctttgggggggggggggggaaggccggtatatgcgaagtataggaacagagatgacgaaccaacagatagcaatgcgagattaagagagagacctaagtactataggaagttagcgttatagcgagctaagaaagaggacagaaatatatggaggtgaggcaaaaaacttcaggctgccggattacgaaacgtaagatatattaggtagatgtgacataatattaaatgatgtaaagacaaccgttaagacgttgtgtaatggaacgtagtggtaacgttatgtataaagtttcgtaaggggatgtacgaaccgaacagtggttattcggccggagtattg

SEQ ID NO: 98808 - DNA, 301 bp, Glycine max
tccaaggaaggtttcccgtcatcactgtatgacgtcctccttctttggggggggggggggggctagggggaaggataacgattaggcataaatagaaagaccgaacttgtcgggaaaagaaagtgcaagcataaagatagcatgtccaaaaacaaaaaggccgaaggcacaaaccaactttaaccaaaagggaaagggaacataaaagaaagggaacataaaacaaacccataagggtacccacgctgccagcggaagcagagtaagttggggctaaaggttttaaattttaggggtgata

SEQ ID NO: 98809 - DNA, 221 bp, Glycine max
ccaaggagaggtttcccgatcatcacgtgtatgacgtcctccttctttgggggggggggggggggggggggggggggggcaataattaacaaagtggaagaggtaagaacggtttagggtaagaagccggggaaaacctggaaacatggaaataaggcgacgaggaggaacgagaattggagaaacaagggaaaaaaaaaccggagtcggcaagggggatt

SEQ ID NO: 98810 - DNA, 346 bp, Glycine max
ccaaggaaggtttcccgtcatcactgtatgacgtcctccttctttgggggggggggggggaccaaaggccgtggtgggagagagtaggcccatttagagagaaggaggctagatattatctccgaggggttgaggaagacgctggcgaagcccaccgaagagagaacgaattaaataaatgagaacgggcggatagagagagggatagcacgtgacgaccgtcataggaagcgtggcggtatgaagtaagatggcataggggcgcccaggctgcagtgagaaggtcgcgacggcaaccgatgtgttgtcaaaataatggtagaattagtatcaaaattagttaggt

SEQ ID NO: 98811 - DNA, 438 bp, Glycine max
ataaatcaatatttattaaatgatgggagtaaaaaaagtatccttgccctttacatcaatttgcagacctagtgttgtacccaaaaatttgcagacctagtgttacaataagataaacatttcagaatttgacctccactcataataagacatgatactttttcatgcttagcttttatccaccaccagcttctaactttgatgaattccaccacccctttatgatccggatgaattgaacaagttattcttaaacttggtcagcagtgatctcaaatcatatattgataatggggtgctaattatcatgcagcagactaatacgagtagcaagactaccgcatattaatcatcatttgttataaatattgcttgtggcacaaaaaatcaactcaagtaaggatggctcaatctgtacaaactacaaagtcccccaac

SEQ ID NO: 98812 - DNA, 281 bp, Glycine max
catcactgtatgacgtcctccttctttgggggggggggggggaaagaaaaccaaaagagggaggcgtcgtgtgggtatggggggggcgtaggaccgagtaagagcggtgccagtgagtagcgaagtagccgagggtagccggatacggatatggataaaagggatggacttatccctggaagacgaccgggctagaagccgaacactaacgtacactactactgattataagtttgagtaagggttatatagggcccagagcagtgtgaagtaacagggga

SEQ ID NO: 98813 - DNA, 497 bp, Glycine max
cctgtcatcactgtatgacgtcctccttctttgggggggggggggggtagaatgggaagacaaactaagaagtagccatgcttacaagtaaatggatagttggtgggccaagcatggttggattgggtggtaacagggggagcgtatgaggtagggttttaaggaggataaaggttgctatagaataaagtaagtaagtaaggtgtaagaggaataaaggaaggaggggagaaagaaagtaataagtggtaagaaggaaaagggactggaaggtaatggggcaggtgtgaggggcggagggtggcaagggccgtgtgatcggggagggtagcaagggaagtaggttatgagggggaaggcgcgaagggcctcgtaggagtgagtgcgaaaggtaagagggccagggcatgaatgaacgaaaaagcacaggaaagaaggatcgtgaaaaagagcggaggtggaatgagcgggccgaaaaaaagaatgatgagtggagg

SEQ ID NO: 98814 - DNA, 233 bp, Glycine max
ttaaagttgagagagttcagaagtacttttattctcaaagtaacaattttttccttcatttgtgcattggaattcacaaacatacttttcaaactttaatccaacatagccgtagtctgtctaaagtctaaacgacatacttttactttttgtggaaaattttgcttagtctcatgtaactaaaatttacgatgaagatagaaaaaaacgtacagacagaacattcatcttct

SEQ ID NO: 98815 - DNA, 292 bp, Glycine max
ccaaggaaggtttcccgtcatcactgtatgacgtcctccttctttgggggggggggggggtgataagcgtgatataggggatcggtccataagcggaaaggaccagggatagcaccaggcagagtacatggagggcggttgtgcgagcaacaccgggctcaagatggcgtagacaccaaggaatggggaaaagggaaaaacgtaaagcaacgcttagcgatggtaggtgacgccattggtatgagacgtgagatatagagggggacatagcaacaaagagccaaaatatagg

SEQ ID NO: 98816 - DNA, 347 bp, Glycine max
ccaaggaaggtttcccgtcatcactgtatgacgtcctccttctttggggggggggggggggggggggggggagggaagaggagaactcacaggagaagctacaggacttcaatgggagatacaacctcattaaggattaaataggaaaaaaaaaaaaaacacctaattagcacgtggaatatatttagtataacgttaaaatatggcaatggctgcaaccctaccatagcattatgggaggtgaaccagcggccgggaatataaaatattacaccgtatcaaaattagtatccatagaagatagaacgggggcctgatataggaagacgccagtaggaggttgaagg

SEQ ID NO: 98817 - DNA, 247 bp, Glycine max
acccataaattagaaaggcgaaacccctaaacaaacccaattgttttgggggaaatttgcccccggcgataaaaaggacaacccgatttggggaagggggggcaattttttaaactttttttttaatttcggaaatctcggaaagaaaaaaaattggggccccaaccaacgccttattaaggggggggtacactgggaccctgaatggggttttcccaataaaaaaactttgaaccgggggcttttt

SEQ ID NO: 98818 - DNA, 435 bp, Glycine max
aatgttaatcaagaaattaataataatgctctcataaaagcatagtggtagataatgaagacaatcgtatatatccaaatactgtagtttttgtctccgcattatggacaccctggaagaggcgcaataacaaggtttgagatgataaagagaaaccattaaatatgtgcctgcagcaatcaacccaacaagtctttgagtggcagagcctccatgacagcagcacctcagctcgagttcgaacaacgaaagtctgcaaagtgaaatcctcctccttttgggttcgtgaaatgtaatattgatgctgcaatatttcaggaactatatactactggaaaaaaaaggcctttttcccaaaaaatattattagttaatacatacccgtgtatatactatgataaaaaaacaactttaaagatgcataattttatgaat

SEQ ID NO: 98819 - DNA, 320 bp, Glycine max
tcatcactgtatgacgtcctccttctttgggggggggggggggcaaagcagcaaggaataaaagaggtcggataaatacgtaataaggtaagagaataatactaattgagtgggaaagctaagataacagggagaagcaaaagcaactaattgtgagaggtataataagaagcaaagaatgccggaatagcgcacgttgagcgggggagagaaagatgtgttcgtgagagagcaagtgatatgttaatactaattgtagaggagataagtgtacaccccagcacggtaacattaccgtaataggtgcagtaacggtaggg

SEQ ID NO: 98820 - DNA, 422 bp, Glycine max
  unsure (1)..(422): unsure at all n locations
gtttcctgtcatcactgtatgacgtcctccttctttggggggggggggggggggggcgcgtccgcgtggagcgtataccataaccaaaataaagccgcggtgttcgggcgatagaggccatagcggaccaccaatttgagatagcgtagaaaggaggagtagcgttgagttgagtaaacnnggggtacgtaacagccgaaccgagcacgactaaaattagttgtttaaaaaggtaaaagatggaaagagaacaaaaaccgaaataagcgtcgaatgggaaaacaagaggagttaattaagtggcacggttatgtacctaatggtaggtagtacgttgtgagggagggagccgtttgaggtatccgtgggtgaacgggtcgataataggcggcatggcgtagtaggccataggtgagcttggg

SEQ ID NO: 98821 - DNA, 242 bp, Glycine max
tccaaggaaggtttcccgtcatcactgtatgacgtcctcctgtctttggggggggggggggggggggggggtaaaccagaggggaggatgggtaagtgcggtggatagaagaaggggaagccaaaaataaggaggggtggggcctacaagcgagtaagagatgtgtgcatatagggggcgcgcagttataaggtgggttgggcgagtagacgaaagaaaagcgcgatccctgcaagtggtag

SEQ ID NO: 98822 - DNA, 395 bp, Glycine max
caaggaagcgtttcccgatcatcagctgtatgacgatcctccttgctttgggggggggggggggaagcaatcgtaggttaggatggataacggataatagcgcaataagagatatctaaaggtgctgcgtacagagtgtggaaccaataaaaggtgggatggagggatagtgggcgacggaagaagttaagacaaacaagtggaggaaacgggaatagaaaaccgaaaaaaaaagtataagtaagacgccggtagcgccaaccacccgtcgaaacagcgcatggacagggcgatgtgcgtaaaatatacggtattttggtatgggtttatttgcgaggggaacggcgtgtagtataatagtgattggggttatagtacaggtagggtgtagggta

SEQ ID NO: 98823 - DNA, 424 bp, Glycine max
ccaagggaggtttcccgtcatcactgtatgacgtcctccttctttgggggggggggggggcgcgggtgaaaaaaaaagagactatagggaacagaaaagagactatagggaacagaaacaagaagagagggggtgggagggacaaaagagttaaatggcgagtttgaaaattttagaaagacggtcaatgcgagactaataagaagtcaggggtctgtcaagccgggcgacaccaatgtgattggtgtcgagttaggtaatacgcgtaagggtggggttcgcgagatggttcgtaagggcgatggcaatgttggggcgatttgttcggtacggaaggtaagcctggggggtagcgtgggatcaaatcaaatgtgaggtgggaaggcgttactgagaaaggtgctaagaagaggacccgcgggag

SEQ ID NO: 98824 - DNA, 100 bp, Glycine max
cttaaccccaactttacgttgatggaaaatgtggttcatcttatcaaatttgcagtgggctttcttggaacatataccttgagtagacttcttcaaatga

SEQ ID NO: 98825 - DNA, 226 bp, Glycine max
gtttcccgtcatcactgtatgacgtcctccttctttgggggggggggggggaaagaaaatgcggaaggagaggaaacagagagtagagagataacgtgtctccgaaaaacgatagggcgatgcggaggcagaggggtgaacctgacgaagcgagttagggtagcgggctggaagtgaagcaagtcggccaatgttcgggcactagtgggcgtagaggggagtgtag

SEQ ID NO: 98826 - DNA, 171 bp, Glycine max
gggaaaaagacaaatgtaaatttttttttattaatagagatgcttaaattttgagatagttgtggctagctaactaaactagctttacgaagtagccaccaaacgaggctcactccaatttaaaaattcgtggttgtcgtggtcaccaccttctttgcaccttttgagcct

SEQ ID NO: 98827 - DNA, 217 bp, Glycine max
tcatcactgtatgacgtcctccttctttgggggggggggggggtaccaaaaaggaattaggaagaaaatgacgcaagcgggtagagagatagcgcacttctaataatgcaagggggggggagtaggctaccgtccaaaagaggtataggcagaacggccacgtgaaaagtgaggtaacaaagataagagcagggaaatcatggtagtaaatacaatg

SEQ ID NO: 98828 - DNA, 223 bp, Glycine max
catcactgtatgacgtcctccttctttgggggggggggggggtcgatggtgcgggtgggcggtttctgggaacatttgcttaccgaacatggttgtgtaacaacgatagtaaaatagaatgtaacacatgtcaccagtagtgtggatcatgggttgtaagcgttaaccgcacagaggtagcgtgcgtagagtggctacggttacgtaaagggggaggggtttg

SEQ ID NO: 98829 - DNA, 415 bp, Glycine max
tccgttccaaggaagcgtttcgccgtcatcacgtgtatgacgtcctccttctttgggggggggggggggcaatgtagggggtgctgccgttatgggacaaggaaatcgggaataggtaaggaaacgtataccgggataacaataggttatggcgggccctggggacatctctgccgccgtggacaatggccttgcgctgttattaccaaaaagaatagaatgcatcaaacgaaaagttaaggggggcagaaaggggataaattacccgttggtatgtaggcagaatagagggcaataccaatggcaaccgagtccgtaaaaccgtgaaagatagtcgccccaaaaacccgggcttttatagatttggtacttaggctttgttgtataggacaggtaaatagtggacccggtgtgt

SEQ ID NO: 98830 - DNA, 326 bp, Glycine max
ccaaggaaggtttcccgtcatcactgtatgacgtcctcctgtctttgggggggggggggggctaagaacccaaacccggtggcggggagagaggctacgggcgtagcgtgtacgtaaggcgctgcctataataacaggaggatgagtctacactggggaaaagaatccaatccatacggtaccagtattaggagacaatagacaaataaagcacagggagaaagagaaaaagcgaaataaatgcaccaacctgacgaagggatggagggatcctaccgtagtaagtaggtgcgtgagttgacaaaagaaataatcgaggaaagaaa

SEQ ID NO: 98831 - DNA, 504 bp, Glycine max
  unsure (1)..(504): unsure at all n locations
gtaacattagtacctctggtactcccatttatatatatataatacttttgctgataaaaaaaacaggagattgagtttcccacagctggactcgggtctgtgccaggttctacatgtttcagtttcatttttttggtttgagccctgttttatcattgtttcaatctaaatggaaattgattcatctcactcattacatcacaggtgatggggaaggtggaattgaaatgactgagagcatgcaattgattcgtgaattttgtgaccgcttcattagttcagagaaagccacacgaacaagaatagtaatcttcttgatttaaagaattgttcttctttgtgcccctggaatgtgtttctggatgaaaagctttctctacatgtaaaaaagggtttttgtgctccttgcatttttcaaataactaggaactttttgttgttttagttntctttttcttagcatacaatctaactatgtttaatggtagttacaagtctcttgct

SEQ ID NO: 98832 - DNA, 435 bp, Glycine max
ggcagaaaaacaagtaaaccaacttgttagttgttactaactgaattctgtcttgatcaatttgataaaaatcacatcaccagagcttcgaatggtttcattgtggttgtgacctcatataaaacttcttacttcttagcatgtcagggttagtcagtgtaatggtttatgcaaataaacttggaataaactagcaacccagcccataacacatgaccaaccctaatatgctaacaagaccaaaacataatattcggttttcaccttaatggtcattagatgctcttctggagaaacggacatacgtcaccagatacagattctgaaagcagcttccaaagcttctgcaattgaatataccctccgtataagcaaacccaagcaggaaagtatgcaagctacaatatataatcagaattagaaaacccgttagtc

SEQ ID NO: 98833 - DNA, 457 bp, Glycine max
  unsure (1)..(457): unsure at all n locations
ttcctgtcatcactgtatgacgtcctccttctttggggggggggggggggcataaataccaaatggcaagagtcagtaaaggagtaagcccacggagccagtaagtaggtgagcgcacgtcggaatgtcgacccatacgaggcacagtatgcgatcgcggaggtgccgggaggaataagaccaagaataagagtgttgaaggggtgtgcgcgtagacacaagtacggggtaaccatgggtagttaaattggagtacaccaaaacccgtgggaaccaaggagcgatctgcccaagggcgcgcgcgtaacgtaatcgagattacttagtagtaaccacggtgttatgcgaantgtaagggcaaggtcgttagggtggcacgtaagcacagcagagggtgtcggcaggtggggcggccgaataatcgtacataaggggagagttatcgaatttacatggg

SEQ ID NO: 98834 - DNA, 281 bp, Glycine max
ggtttcctgtcatcactgtatgacgtcctccttctttgggggggggggggggggggggggggggggcatataaagaatagttgcggtagctcgggctagtagcagaaaaatagtatagccggcggcaatatagggaggggggggagtaaaggaacatattgtttggtttgagttttgtagaatacaaatagaagtggatttacaaaataccaacgcaaaactaaatttataaaacggggtagagacgtaagttagggtaagagataggagttaaatataaa

SEQ ID NO: 98835 - DNA, 398 bp, Glycine max
catcactgtatgacgtcctccttctgtctcagtgacaatgacctcccccaaccgaacgaccgccgtgtgtatgtgtttattcaagttataggtgaacgaagatcttcacaagcatcgtatatgtttatgatttatttcatggacatgttcatgttcgtattgttgttttatgtgttcagtatggttatcatctcttcttttgtagttgtggtagcgctagtggtcgtcctaccagttgtttttctttttatgataattaatgttgtgatcgtccatcgccatatttgtagtcgtgttcgtaattgtgttagtatgggtgttgtttgtaggtgtaaatgtgttaaatgtgtaccgttaaagaatattatgggggtggggtaggggagggagagggagta

SEQ ID NO: 98836 - DNA, 361 bp, Glycine max
  unsure (1)..(361): unsure at all n locations
ccaaggaaggtttcccgtcatcactgtatgacgtcctccttcgtttggggggggggggggggagtataaattgagggtgggtatgataaaccccccacaaacggatacggcaaaagagcgccccaaaataagaaaaggaaaaaggggatccgaagaaagcatccnagcagaccgtaaaccaagcgcgttaaacggtgagttttgaataaaccaccagagagttcagtgcgtggtgaattgatacaagcatggcctggaatgcgagcaagaatgaggagcatcccgtgagtaatgctactaaagggtgtgataaaagagataaataggtggggatagaacataatagaagacgagaattgga

SEQ ID NO: 98837 - DNA, 134 bp, Glycine max
atcccctcctcctccttactattataaatcatctataccaccttcaccatcctgaccaccaccttatgattatgattccccacctccagctaacgagcatgtacacccttcctactactaccactcaccaccac

SEQ ID NO: 98838 - DNA, 165 bp, Glycine max
tataagaaagaccaaaactaagtagatattagtagaggaagtgagcaataaagaaaggaaacacagtatgaaaatgccatgcggatggggtatgggtatgccctagggatagggtaaagtgtgtggtttgcggtgcagggcgtgcgtatggcaatataagaacag

SEQ ID NO: 98839 - DNA, 350 bp, Glycine max
  unsure (1)..(350): unsure at all n locations
tccaaggaaggtttcccgtcatcactgtatgacgtcctccttctttggggggggggggggggcacgaaaatgcgcaacctaggacagcaaatgcgtaaataaggataactgcggtacgggggtagcgggaaacaagataacagggcagggacagatagagagatgagagcgcgagtataaaaagggaaacacatatatgtgtaacgattatgggagtaaggtggaacgtgaaagtggcacgtcagtaggccttttacgtantgagaggtacgaccgttaactgttagggtggtgagggtgtaaaatgggggggtggtaaaaggattggcagtgggtacggcagataaaat

SEQ ID NO: 98840 - DNA, 160 bp, Glycine max
ttcgccctttttttttttttttttattttaaagtttctttttttaaaatttcatttgggtaatgattgctaatttctgggacccaaccacttgtcttgtggttcctctatattaaccgaacgcttataaacattggacagtgttaccaacctgacgcaac

SEQ ID NO: 98841 - DNA, 292 bp, Glycine max
tcatcactgtatgacgtcctccttctttgggggggggggggggggcagcaccaagatagggacaggccagaccaggcccgtcaatggagaatgagcacatgagagggaaacaaatatcacggaagtaagtaagctaaatttcgcaccgtatgtcggcaacagtagcgattgaagggtgaggcaagggaaaaggggtacgtggaaaaagactttaaaaaagtataggataaaggaagagaaggttacacctgcgaggtggataaacgggtattgcgtaacgaagcgagggaaa

SEQ ID NO: 98842 - DNA, 243 bp, Glycine max
ccaaggaaggtttcccgtcatcactgtatgacgtcctcctgtctttgggggggggggggggcaaaaatttatgagcgtagggaaaaggtgacactagggtaaataggtgtaagttaacgtgccgagtgttaatacgaaagggtgcgaacctaggaagtgggttggaccgttagcgaggtatcatcaagattatgcctagggaccatcatcagggtaattggagtgttagcgagagagtgtgtg

SEQ ID NO: 98843 - DNA, 258 bp, Glycine max
aaggaaggtttcccgtcatcactgtatgacgtcctccattctttggggggggggggggggattaaacaggggatgcaataacagaggaaataagggtaaaacaggtaatagatactagtatgtaaaaaccgaaaccaattggttaaagagatggagttgtggtgaaatataataggggtgataaataggtggaaggagataatagcaaacagaggtggttattagattgggcatgaggagaagaatggggtttttggg

SEQ ID NO: 98844 - DNA, 394 bp, Glycine max
ccaaggagaggtttcccgatcatcacatgtatgacgtcctccttctttggggggggggggggggaaaaagagggtagaagcctcggaggaaccggaaaagcgtgttgataacgtgctaccgcgagtaaacgttggcgtttgtgatacgggggtttgaaattacgcggtggtagcgatattggaataatagacgtggctgacaattggcctaaatcaaactaccttaaaaaagcgtaaagaggttgggcgtatataggtagggaaacggcggcagaggtagtggggacgtagttacatgaaagtagaagaatagatgatgtttgcacgttgcaaggggggatagtaaggaaaggtgagggcggcaaaaagggaaatgaccagttaaataaatgaa

SEQ ID NO: 98845 - DNA, 314 bp, Glycine max
ccaaggaaggtttcccgtcatcactgtatgacgtcctcctgtctttgggggggggggggggggacccaacgtaatgacccaaattaagggaggcgatagggataagaatcaaaaccggccaataaacgtggagtaacggatgataagagggttggggtttttccaacgccctctactacacgggaggaggttagtagcaccgttgaagtgatggctctgcacatggcagtgttgcggattggtggggttggggtgggtaacctgggtttagaaacgtgcaggaatgtggtaatggtgttaccacagagaagaga

SEQ ID NO: 98846 - DNA, 306 bp, Glycine max
ccaaggaaggtttcccgtcatcactgtatgacgtcctccattctttgggggggggggggggggggggatgaggtaaatatagaacgctctagagaatggaagcgtagtagccgaggagatagacccaacttatatagactagtgaaagaaatactaaaaaacgagatagagtgacacaatgagagacgatcagtaaagataggtagtcacggtgcgaatgcacgtgaggcaagtgacggaggtaccgatagagagccaaaaaccatggcaacgtaaagtgatgcccgaatttaaataatagcagtt

SEQ ID NO: 98847 - DNA, 296 bp, Glycine max
ccaaggaaggtttcccgtcatcactgtatgacgtcctccttctttgggggggggggggggagctgggaaagtggcaacgctgtacttgaaagtggggccaaggacttaataggcagtaggagtatgcgtgagccagggcaggacgtagtcccgagcaggtaaaaggctgtgccgtgaggataagagctcggtggtttagtagacagacggcaagcagggataggaatagggatcataaaacccccgaacaaagtaacggccatgcgagggatggggataaccgggtaggaatgggg

SEQ ID NO: 98848 - DNA, 290 bp, Glycine max
ctgaaaccatcaaaacaaaacaaaacaaaacaaaaatctcaccacacaaggttgtatacttgtaccaccaaaagccacattcgtagtgttaattagtacttggtggattcaatcttcactctcatattaacaaatcaacacaaacatgagaggttgtgccactgatggggtggtggcatggcacagaacactgagaaaagcatttcattccttttgttctccaacttcttgtatttttggccccaacctccctgatgtttgggttcccagagagcacacaccccctcaca

SEQ ID NO: 98849 - DNA, 153 bp, Glycine max
gtaaattacatacaatgaaaaataaagtcatattagtgcttttcttatgagctagaaagagtagcatgtgaagaaaaaaaagcccttttttcaaaatttcttcaaatgcaccctaatttatcttctgacacctgttctctatttttaggtctt

SEQ ID NO: 98850 - DNA, 250 bp, Glycine max
ggcccaagccttccttaaattaaaaaggctcccaaaattttttcggggggtcccttaaaaaagccttcctttagtctactaaaaaagaggggaaaggtacttgggatactaacccattcttcaactaaactggcctaactaataacgggggaaaataatgcttgcccccagaagatgatttccccaaacgacccagtttcttggtacccggcccaaattcatttgacccccctggcccaggggagaaaaa

SEQ ID NO: 98851 - DNA, 249 bp, Glycine max
aaccccggtaagagggcaaagaaataaaaatttgtcattaatcaaaagttgacagacaatggagcaatggggttactggttacattttcctttctaaggatcatttacccccccaccacaataaaacccttttgttcttaaacaggagtgattataaaccccatttttcatttgcatcgggtcagaattttccagcttcaggatgcaaaatactcagggtttctcaagcaacagctctgcaccttaaaa

SEQ ID NO: 98852 - DNA, 411 bp, Glycine max
gggtggaataagaagctggaattaatcacaaatattacactgtaacaaaatatacaatatggaaagaaagaaagaaagtattttttttaacggcacacacctgtggtcagaactcacgagagaaaattctgacctggatcatcatattggaaaattaagtcggcaacatctttgtctctttcgttgaattgaattttccacatatattacgtacacacacgttacagggtttgtccgaaagtcactgaaaatctctgcagatccttgctatatatatcggaaagttgaaaagctggtgtctgattctgataatggtgccatgtagcacatgactcgtctgttatgaaacctgtttctggtttaacctcactatagatagattgagaggtatgaatttgatgattctgcgct

SEQ ID NO: 98853 - DNA, 243 bp, Glycine max
aaggaacaagggccccttttttttttaagcccccaaagaaaaaacaaccttgggaaggctcttacctgacttggtgaccccccgctgaaaccacattaaggggagcttgggcccctttttgaaccccttttttttcatattgatagatagggccccgcttttttgttgggaggggaaggaactcctgaatgttttcccggggatttggaagcttaaagggcccgctttcccccttggggcccc

SEQ ID NO: 98854 - DNA, 314 bp, Glycine max
agctatctgtccctcttttaaaaaccttagacaccaagaaattaaaagagcatgatcacgctttgaagactcaaacgtgtgagatgtctgtgacctgtgaatgaaggaagaagagacaaacatcaacatagcccggcacacacatgacagcatcattatgtgttcttccttcgagaaccacacaaaaaaaaatgctggatccacgaagagaccagcccacattttgttttccattgtccaaggaaataggacacatagctcatgggtatgacacatggggtgccacaaatactgattgtatggcatcaaagaaa

SEQ ID NO: 98855 - DNA, 316 bp, Glycine max
gctagtggatgtaataggttgactatgattatatgtgaatagaccttttctttgtgatttccttacccatcaccgggggcaatcttaaatatttagagtggattaaagagagcacaagggactgactatcaagtttatagcctgaggtgtggtttccagagttattctgctggtgtgttaaataaagtcagtttgtcatctatgtaaggcaatgagaatattatgtagaggatgatgatcggtcttgtattactgctagtggatgtaataggttgactatgattatatgtgaatagaccttttctttgtgatttct

SEQ ID NO: 98856 - DNA, 279 bp, Glycine max
aaaaaccccaaaaaaaagggtttttcccattttattattgcccaccctttacccccccttgccgttataccaaaccggccattatcccctacaaaaaattctcattgccctacataaaggacaaaccgcctttttttaaccccccccccgaaatactttgggaacccccccctaggctttaaacttggtaggcaggcccttgggcccttttttatcccccctaaatatttaaaattgcccccggggggggggggggaaaactcccaaaaaaagggtttt

SEQ ID NO: 98857 - DNA, 288 bp, Glycine max
aaaaaaaaaccaacaactggatttttttgaattgaatcaaaatcaattgcagataaacaaacagatgggggttgaagccctttttttcaacccataaaagggccgcacaaaaaaggctttatgacaacatacagcccaaacgtaaaaatgagaattgtttgataaaagttcctagggcccacaaacttggaataaaattgaaaagggggatcccccagcaaaatggattgttgcaattaaaaaacgtagagcttttttttaattaagacattgcccctttttggaact

SEQ ID NO: 98858 - DNA, 345 bp, Glycine max
ggaaagaaaaaaatcattgcctttccttggggggctcctccaataaagctcactcccccccttttcgtagcatttttgcaaaccgggcccagatttaaatgacaaattcttcttggggggggcccaagggccccttatttgaatatgaatacctgactttccggaaactttaaacaaagatcgctttttcaatccaggggaaggaccccaattcccccgcccatttgggacaagtttttttggaagcaatacataatcgggtaatagctggacaatactggcactggttttaccccctttatgaagtaaatggggcgcttcccttttggcccaagacatccaaaa

SEQ ID NO: 98859 - DNA, 456 bp, Glycine max
gggaattgcaaaaggaatacgcagaataacagctgttacaactgatcgtgcttatgatgcaatgaaagtggcagatgaatttgatcagcaagtagacgatgcggctaagttagaaggaagtttgctagaagaggttggtctttgtgtttgtattcatctaaacttttatagcattaggcttatatgcttttttccattctattctagttagttggtcggtccaacaggttgaaatgtctggctctgttaacaactaaggactgaagatggataaaacaaaactaatatacagctggctgaaccagctgccatgttgggcctaggaatttcttattaaggataggtatcaaactaattgttgagcttaaaattccctgttttgaacctaatatgaaggcctaatggagcctattcaatatattgggaagtatgggaatacttgtgatcatgagcatg

SEQ ID NO: 98860 - DNA, 282 bp, Glycine max
gaaactattgccctggcataatcattagatcaattttaacataaaggagacccattggtgggctgacccgaacaacactcattatttgaactcaaatgagaaaacagcagaatttacaggggaaaacgggtttttgattcaggccccccaaatttgtacgattattgggcaaaaaatgaaaaacacgacttgtgggcaacttaacgggctttttcagtacacggggatatcaacactaatttttcccaagggattagccctgattgagcaactgctttccct

SEQ ID NO: 98861 - DNA, 249 bp, Glycine max
ggcatcactctttggtaaacattactcaaaccaaaaaagggaaaaaaagccttttttttaaccaacaaagacagcttcacaagctttccattacaaccaaaaacctggttttaccccccccagcttattaaaaatttgcgtgggttccctttatgacacttgggaattggtggggtgagggaagggccactcaaatgggtaaaatgagaaaagaaatgatgattctcccgcctaagattcaactttttt

SEQ ID NO: 98862 - DNA, 161 bp, Glycine max
gggggaaagccccaccctttcttataaaatatcagggggttttgctgggcaaaaaaaaaaggtttggttttttaatccatcaagagggtacaattggaactggggattacatgggttcatcatttatttatcaggccccccagggggaactttgaccttta

SEQ ID NO: 98863 - DNA, 129 bp, Glycine max
attaatatattctcggataatgccgtctttcacatgcaagagttcaggcattccaagctccaattggaactcttctcatgtgcatctttataaacttcatcgtggaataacaccagctatgattcagga

SEQ ID NO: 98864 - DNA, 257 bp, Glycine max
aatataccttttttttatattaaatccataattcaactagacttaggatatatcaaataaagctaaagaaggaaaacattgatccttcatttcttttgcggggaggagatatcactgttctaagaaattacatggacatacgatatgtatgctattattattgccttgagtggccgattttttaaatttcattctaacacttgacaaaattagaatccaccatctctacttattgatgaaattaaactgacttggac

SEQ ID NO: 98865 - DNA, 445 bp, Glycine max
gtatgttgagaaataaaatttaacatcatacaattctgcattcccatgggcaggtaaaaaattgttgaggatgatcaaaacacatgcttcccagctgatcaaacaccaataattaggagaactgcttccctggaatgactacatatcaaaaacagcatcagcaaagccatataaatcagaacctccactgcgactagaagcaccaacagagaggtgctctggcacacctgcaaaaccttctgtggatgttttcccatacaaattattcaatgttgatgcagattgtcccacaaaactctgtccaactgacctatcatgagacaatgccccttccccaattccatgatatctatacatatccccctgatacccagaaaatgaaccacccatagctcctccaagcatattagccccacttgccactgcacttccaagatatttttca

SEQ ID NO: 98866 - DNA, 164 bp, Glycine max
ctcgagccgaatcggctcgaggttctagatcgcgagcggccgccctttttttttttttttttttttttttttttttttttttttaaacaaaaaacaaaatggaaaattaaatgtttttgtcgatatcaacaataaataaaatgttaatatatatccaactttgc

SEQ ID NO: 98867 - DNA, 168 bp, Glycine max
gcaaagttggatatatattaacattttatttattgttgatatcgacaaatacatttaattttccattttgttttttgtttaaaaaaaaaaaaaaaatttaaaaattctaaaatataaaaggggcggtcgttcgcgatttaaaaccttgagccgattcggtttgagctt

SEQ ID NO: 98868 - DNA, 325 bp, Glycine max
attaaagatatttatatcattatacatatatggtttctcttctctttcatttttttcacaaccaaactaggaaaaagaaatacggtaataacttatataatcaactcactttctattcttttttttttctttctattttttccctttcactttctttcctaaactaaacatgccattaaagaaaatgactgcttattttcttccttgaaagtaaactatatatcattccattgttcgtcactcttgagtatgctgaggtcttgtgctaatatttcatgcatttctgctggatactcccctatgataattgggtccaaaaaccaat

SEQ ID NO: 98869 - DNA, 145 bp, Glycine max
aagggggcaacaactaatattatcattaatagtgagtcaatgacaaacaaaaaccccgtttcaaaatattaaaaacagaaagaccccgtaaccattggattagactaacacccataacaattagattagattaatactaaaaatc

SEQ ID NO: 98870 - DNA, 477 bp, Glycine max
  unsure (1)..(477): unsure at all n locations
atgatttctttttcatcttaggacccagagcagagctagctagcttcctcaacatgtttttgtggctctctaatttcatccgttcttggcctctactaatctatgctgccacttgggttactgtaatgacgtttacggtggcagtggcttcactctccacagaggtggcatttgtctccgccatatcttcctctgagaagtgcaagagtgatgggtcccttgttagagttagggttccggtggaggagacaccgtgtttcccagctcatcttttcaccaagtcccacatcgatgtcatcgttccaccgatctttgcagcgctcgttgtagctgcttctgcttgcgtagtaaaagttgtgggcctatgggagcatgattaaacctactcatgcaactaaaactttctattctttgtggaatcaaatttattcatgtgaattntattctctgttgaaaaaaaaattcatttaaaagttc

SEQ ID NO: 98871 - DNA, 296 bp, Glycine max
aaagggggaaatggcgaacccaacccccgggaaattccaaataactttaaaaagaacttttaaaaagaattttttttttccccgggaataaaattcccccggataaatttggttccccaaaaaaaaaaaagttttttttgcctgagtggggttaattatgctcccattgggccccaattttttcttccccgggggaagctgtttccactggggctgcaaaaatcggggggaccaaaacctttttgggggacttggggaaaaaaagaactgggaaaacagggggttttttccccggg

SEQ ID NO: 98872 - DNA, 340 bp, Glycine max
agaaaagaaaagcatattttttttccattacgattcctgaccatttagagagaaaaaaaaagttagtcccattggaagaagaaaaagcaaccttctggtcagttggccccgccatcacctacctaagggtttttcctttcacataaaccaaacccttaaagaaaaaaatttttaaaaaaaagagtctaaaaactaggaatttacatgagaaaatccttaaaaaaaactaagggggggggggattttagccaaagatcaattttttttttcatgggttcaaccccgattttaaattacgggcgcagtttcatcgggattttttatttcatgggaaattggg

SEQ ID NO: 98873 - DNA, 80 bp, Glycine max
aaatcaaatgccttctttgtttctttttttctaagttgttacttgatgtaattgattaatacataaactgatgaatccgt

SEQ ID NO: 98874 - DNA, 64 bp, Glycine max
atgtattaatcaattacatgaagtaacaacttagaaaaaaagaaacaaagaaggcatttgattt

SEQ ID NO: 98875 - DNA, 110 bp, Glycine max
aacttgggactttaaggtagaccttgtttttccgttttcgatgccagctttactttagacggccaggcggcgaatccataggagaagctcaagaatataatcttctactt

SEQ ID NO: 98876 - DNA, 135 bp, Glycine max
ggcttatggacccccactgggcgggtttatgtttagattaataaacaggccaatttaattcaatagacaattgggtacaaaatgcattgcatggggggggcattctaaagggaacgtaacaaaaatgaagggggg

SEQ ID NO: 98877 - DNA, 488 bp, Glycine max
gacgcagtcacatttattcttgtgcaataatttgtcaaaaaaaaaaaagggaagtagcagttcatgaatacaaggcttcctccactgatgatcaattgaaactcactgaattgcagctgcctaatgctatgaatcgcgaggcgattcattgctttcactctgaagagtcggatacatcttcacaaaaaaatagatctatctataaagattacattcttcccctttaaaggggtacgtgacaatcatctattttaagctcgtggttttacaatacaaaagtgaacctctattcctgaacaaattaacacgccaactccatcacaaggctacaataactgaagatacctttgtgccattaagtgtatgttggaagaacaattcgatatccaagtaaacaaatcgtccatatttgcttctctactgcactgtataacaacatgcttaatgaaatgcaactagcctaagtccatcttaaagaatccccttcg

SEQ ID NO: 98878 - DNA, 117 bp, Glycine max
cgtagctaaaaaagatagtacttttcggttttcaattaggtagaaagactcaaatctcttaaaaccatctatgacatcttttctgtttgagatattctagaggttcacctttctttg

SEQ ID NO: 98879 - DNA, 190 bp, Glycine max
ggaaccctccaaatagaaagggggcatttaataaaccaaagcaacccaacgcagcaaagtcctgaaactcggtgggcttaacaaaaatgtaatcgggggttccggccaacccaacacatttaaacccagattaataaaagcaattttgccaccgtcgatcaaaaacccagttttgggaacaaccattgcg

SEQ ID NO: 98880 - DNA, 338 bp, Glycine max
aaaccggaaggggggggccaaaaaccccgttaaaatgggcatgaatgccccctaacaaaaaaccccaatttttaaaacctcgggccccaagggggggggttttttttagttcggaaaagggggagcaaaaaaatttacccaatcaatggcccctccccggggggaaaacaagcccaaatggctttcccccccaacaagaaaaatttaattcatttaccataaccctttaaccccccaaaaaaaaacatgggggatggttttttccaggctccaatttttaaccaagcaacaaattttgaaggggacaaacccatgggacctttgaaaggccccttttt

SEQ ID NO: 98881 - DNA, 128 bp, Glycine max
tcgcgatctagaactattgatttcccaatctaaaaaaaaaaaaaaaaaaaaaaaaaaaaaaaaaaaaaaaaaaaaaaaaaaaaaaaaaaaaaaaaaaaaaaaaagggggggcccgatctaaaactagt

SEQ ID NO: 98882 - DNA, 309 bp, Glycine max
ggtatcgaaacaatactttattcaaattcttgctcttactgcacactcttgcaagcttttttcgaaaggagaaaaccgtttaataaacaatacccactaaatataagaagcactaaaaaataaaaataaaaaatagcggaaaaaataaaaagaaaatgagtgaccgaacattgccgcgatacaagatattgatttggaccaaaagaaaaataccagataaacgttgagaagaagttaaaataacaaaaaaatttgaaagcaaagagagagaaagagagccgggaaaaaaattggtaataaaaagaaaaa

SEQ ID NO: 98883 - DNA, 460 bp, Glycine max
aacagccagaaaaaaaatttcccttagcattgaagatattaaaacttacttattaatatcttcagactgagatttagatcacatcaatagaatatacatgagccattactgtttttcaccccacaaaaaagaaagtgaaaaaatatacaaaagcaaactattgactaatcaatataactgtgcgatcttacgagtctacaactatgcacaacctatcatacttccacatgtaacaaaattggtagatatacaatttctttcccttcaccaatgagtaaattggtaacacttttaataagtgctccagcgagatatagaaacaacagctcgaaaaggacaacagttcatgacaacaatcattttgccaatttttctgattcttcggcattactattctcagcaaatgagtttaaaaactgaataccattatgcttttgagctgaacttcccccaccatgat

SEQ ID NO: 98884 - DNA, 138 bp, Glycine max
ataaaaaaaaagagtggaatctttgccacaagaaaatatcttacttgccataagcgtgcgtaaacagaaaggcataagggcacacacagggaactaactgagaatcattacctccaagatgagtattacacatttaac

SEQ ID NO: 98885 - DNA, 337 bp, Glycine max
acgttaaccaaacgttgttttaacgaggtttgaaatacttctaatgtgaaaaatgagaatacacccaaacaggcaaacatgactttagtagaaagaattttcaaagtattgcacctagcttattttttttacattgccaaagcaacctaaaattgattatgcttggtatccaaagccgcattgaatttcaacacatttcgagcacaaaattctaactaaatcttcatccaaataacaagttaaaaactggagggaaaaaaacatcgcacctaattgagtatctaattttccgtcaagtgttcgacgattgtctcaatctgcgaagctgatcaatcca

SEQ ID NO: 98886 - DNA, 295 bp, Glycine max
ggccccgaaccagaaaataaatttttaaacatgaaaaattacaagttttaaactggtctaatacataacatacattccgggaataaacacaagttcagtaatttgttcctcaacaagttttaaagtccaagggaaaagccagcttatttgcatgaagttgttaatacacaaacccctcataagttataaaatcataaacccttaaaaccaggaagatcaatcccctggaatggggttttcacttaaccacacttcaaattttgcaatttaagggtcattttttggacaaccttgc

SEQ ID NO: 98887 - DNA, 149 bp, Glycine max
  unsure (1)..(149): unsure at all n locations
acaggtacataatcattaaattactatttcaaattgatatgggtaactaaatacacacttagacattgaaattacaaagtcgaatcaccccccgaaaagaatctttctttgnaaaaaatggggtctgacaaaataaaaaaataaataaa

SEQ ID NO: 98888 - DNA, 371 bp, Glycine max
ctcgagccgaatcggctcgagaccaagttgataaaagcttggtgatcatggtcaggatgcataatcatttggccatcctcttgggtagtagttatattattatgtatcctgaccatgatcaccaagttgataaaagcttgctatcgcttgttaagtccgatagggctggtttacatgtaagagactctcagggccggtggattcttgtggacggagatctgtgacctcaggaagctatcggttttcctgggcttgctctttatcaagccactgctggatatgtaaaccctgcattgctcaaaactgagattaatatggaggctaatatgtatggacgatgttctttagccttcaaacttttggctaaatca

SEQ ID NO: 98889 - DNA, 485 bp, Glycine max
agcaatgaactaattattatataaagaagaaaaatgtaatgcaagcatacagcttaaagaacaccaccaattatcagttcaaaatgttttatctactgtcaacattaagtaagtctcaaatgttgactaaaacagacatcgagcaggatacaaaactttaatatacttatttttgttcatccagtaatccatggacagttccttttatttatcacctaactggaaaatcaacatgggcatcatccaaaattaaacatgttcccaaatgaagttttggagaatataaacaagcgccctatcgtccacaaatcctattccacatataattagaatgttaaataccatcatgtgttggttggaaattgaagcactgcaaactaggcctgttaaagagatgatctgttgggtgagatctttgcataaaatcatccactgggacaggaagctgaaactgagcttcaattccgtaacctgctgctcgcatt

SEQ ID NO: 98890 - DNA, 118 bp, Glycine max
aattaatttagttctttttttccattttaattattgtactaatagactttgtttattagttcaatgttgagtgagaacaatatttgggttttattaattgatgaatgttttgttggtt

SEQ ID NO: 98891 - DNA, 118 bp, Glycine max
aaccaacaaaacattcatcaattaataaaacccaaatattgttctcactcaacattgaactaataaacaaagtctattagtacattaattccaatggaaaaaaagaactaaattaatt

SEQ ID NO: 98892 - DNA, 314 bp, Glycine max
acggggacactggaggtccacaactttagccaacaaagcagggatcgtatatgctttgctccattaacaacttacttaattaatttatacgggatacgcttattaagtattccaaatactggtggaaccctaaataaagaaaaaatacattaattttttccatagaacctggcaataagttaaacaaaatattatattcatatatatatatatatataggcctttatatttatatataaaaaatatatgggagggaaaacatttactactaccaatgacatgacctgaaattttttttaaaaaaagatttgcca

SEQ ID NO: 98893 - DNA, 345 bp, Glycine max
aatcatgaatttattaaaaataaattttcaacaagttatacaaacttattagaaaaaagtttaaaaagagtttaggtgatccccaatttatttttacatatataggttcaaacagactctctaaactcttctacacactctaccaatgccctaacatatggaaataacaaccaagcaatggcacacgaggatacaattaacaaagtataatgacactaattttaatgcatggattgaagtgatcttgaacagtgatgctatattctcatgacttctatgtaggcctttccatcgagtttgcgagaaaataagcccttgaagtagtcctttactcctatgcttttg

SEQ ID NO: 98894 - DNA, 266 bp, Glycine max
caaaaacggggggggaaggacccaaagcatttccatacttggttacatttaaaggggaaccagccaaaattaaacttattaccccgggaaaaatagcccggggtaaatcaaaaaacaattggagtttgcaaaaaggtcaactaaataaaaaccacctgaacccatttactggaaaaaaagcactcctccaacccaatttccgatttaacaatatgaacaggtggaaaaacagtcctcccctcttttttatttatttaaccccaggg

SEQ ID NO: 98895 - DNA, 248 bp, Glycine max
aaatctgggcccctaccctatttaaaaccaaaggcctttattcaatacttgggtcaaaacatgggctcaaaaggtcattggtttggggcctctaagaaatataaatcttatggaatacaagaagaagctttaaacccaggaaaactggaattaaataccaagatttccttttttatcaaacaaaatacttaggcaaactttggcccacatttggtgaatacattcaaaaggggtaaatttttttaaaa

SEQ ID NO: 98896 - DNA, 242 bp, Glycine max
gttgacgaatgtcaagtccttgagacctaaacactacaaattttgtacactagtagtcattgtattttgtggtaccattatactatcaagcaattgaaagtatttaacttagacataatatactccaaatatgggagtcttattggaaaaaaaaaaaaaaaaaaaaaaaaaaaaaaaaaaaaaaaaaaaaaaaaaaaaaaaaaaaaaaaaaaaaaaaaaaaaaaaaaaagggggggccgccg

SEQ ID NO: 98897 - DNA, 278 bp, Glycine max
ccccaaaaaaaacgggtttttaaaccggccccaccaggttccaccccccaaattggggcttgggaaccctaaaaaattttggccaggcttaataaccgggggccccaaacttaaaccagggaaaaaaaggcctcccttttttttttcccctaaaaaaaaaccctttccgggaaaaaaggaatcccctttccaaaaaatcccaaaaaaattctcccgaaccggaaattaattcccccccccccccttaattttaaaaaaagggccttttccgggggggg

SEQ ID NO: 98898 - DNA, 185 bp, Glycine max
accaaaccatcattttctattatgtttttattagtttacaacgggtatacctgttatcaaactatcaccaatacactcaaatcataatcataatgtaactgatagcaccaccaacatggacaaaataaaatggttaaaaaaaaaggaagaaaagaatagaacagaataaatcacacaaatcttgt

SEQ ID NO: 98899 - DNA, 266 bp, Glycine max
gggccaaaaacaatatttttgatttcactgggggatctgatatggggctaaaacatttacagggtattggtctcaaccgagacaaaaatgccgaaataattttccacccaatttgaaagtttgaactacagatttggatgattaacttttcaacaaacccgcccttttcccccagcaaacatttggcacaggggccatttagatttcaagagcaaagaatcttttgggccaacatctttgccaatggggtaggggaaagcattttg

SEQ ID NO: 98900 - DNA, 370 bp, Glycine max
gaatcaagtagcttttacatttctccataaacacacaatgatctcgcaagcatagatcaatataatatttatccaaatactgaatgtaattgaatgacttaaaatattccaacaagaaataccaacacttgatgacaacgccatctcatcccttttggcaaaagcaagctttaagtccaggaggaaaatggagcaatccaaaagtcagttcttggctttccccttctggtcagaatggccatagtaaagttgcaagcggctgccatcaaaaacagaagagaactgatgctggtgatggttgttgttgttgttgttctccatggcaggagcagcaactgcagcagcagaagaagcagctccaatgaagaaa

SEQ ID NO: 98901 - DNA, 447 bp, Glycine max
aaggataaaccactttatgtcttacgcaaatataatgagcctgtcgagaatatcaactgttttttactggcaaaatacacgctagagaatcaaaaacaaaactcagccaaactaggggcacgtgacagtaatataactaatgaattcatcactacacaacgttaacaggttgatgggggccatcctttgagttttgcacctgcaaatgatgagcattggttattcagtgaagcgtgcaacagaaaatgtgaacgtgtttgatggcttcaaaatgagttaataacgggcataattttgtctttgctttaaggacattcaatttgctccctctaaacatagaaaaaccatatggatgagagaatgacctgttacactgtagtcttgaagcataattatgattgttgcaatttgagcacatccaatctccactacgccattgctttgctc

SEQ ID NO: 98902 - DNA, 351 bp, Glycine max
gctaaacaaagtcctacagccacagacatggccaggtgcatggatccatcagctagtgaaccagaaacgcctaactcctcaaatgcacctactccatggctttgagtctcaacctaagttggaagctgataatgtaccatctacctccgggacagctaaaaattgtgtgtttaaactaggtgacagggtaaaatatagttcatcttctgggggcttgtatcagcttcagactatttcttcaagcaatcgcatattcaggggtccagctaatggaagtcgggggaaggttgtcttactttttgatgataatcccttgtcaaaaattggcgtaagatttgataaacccatacc

SEQ ID NO: 98903 - DNA, 451 bp, Glycine max
  unsure (1)..(451): unsure at all n locations
cgagcggccgccctttttttttttttttgacttttttcgtctgnggttgattgagggggtagggtagtagttttttttctttagtatgatttagttaaacatggttaaatgaaagagatgttgttatcacccacatcttttgtatgtaaattattaaactatgtagaaactgtatgatgagtgatacaattcctctcattaagccgaagcattgaataatcgtggatctattgaaaatattgagcttctgggtaccgaagctgcgaggttatacactcagacctgggatcgttgaatgagtctgtttcctcattacttccttattcgagttcgcgtcccttgaacttggaaattattaactatttttttggttccttgtgacaaaaatatggctgtggagaggaagagaagtcagaagagaattcaagcatccaggctaaaaaaatccatg

SEQ ID NO: 98904 - DNA, 480 bp, Glycine max
  unsure (1)..(480): unsure at all n locations
tgatcattaaggattgcctgaacatttactcaattgtatacatacattatatacggaaatatattcaaattatacaagagaaagaaaacatcaaaagccaaaatatatggcaaagtaatataatctatacacaaattaacaatgagtgtccactccaaactcgtttcactctcatttgaaggccaaagtaattgaagtatcttgtctacttgttgcctcctttattaagaattttttgcaggattcaagaatggaacggccaagaatttcagccaagcaaggcaaggctcaatttgtggcagaagatggcaactctccaaactactgttttcctctttcttttttcctcatttatcgtaattaatctcatttttaaccttaaaagagacatatgaccggtgttgtggtatgtgtgtgtgtnngtgtttcacttttgcagactgacacagcttctgtcttgttagaagccattggatacat

SEQ ID NO: 98905 - DNA, 319 bp, Glycine max
gctaaaaagtgccaaatcgcatgttgctagcatttctaaaaaatacaatgccacaccatttctacagttttcgtgtgaaataacaccacttgaaaaaaaaaaaaaaggagtattacaatttcagcatatagcttatctatttaaaattacaactaccatcccacaaggggatatcactcccagtaaactttacataaattgaagcttggttagctccatacaaaaatccaatttggctgaaactcaggatatgaatggttgtgccattaaaatgtaggttaaggattcctcaatgtgagaatcgtttacctaccccgca

SEQ ID NO: 98906 - DNA, 436 bp, Glycine max
ctagttctgtccgagtatcagatcagagtattgtacaatgaggagattttatggtactaaacaaggtacactacttttgtaccttgtttcaaatgggtgagtggtgtagtgaacaaattaaatgaattgaaagcaaaaatcgaggtgggaaagagatgatgttggagacaaatatagaacacgcccttaccctatcccttctaagctttaagacaatgatcatcattctagcaaaagacgctgtggttgaaataaccaaaagccagaaaggtgatagaaaatatcagagaattcttctctgtacttgggaccaaattatcggtactattcatttagcttacagttttgaagatagggatgattgtacttgacatacttggtccagtaagaccgatactttgtcatggcaatttctaaccatggcttcatattacca

SEQ ID NO: 98907 - DNA, 275 bp, Glycine max
gggagcaaacccccctttaagcatttatgagtagaaaatattggcccccatatgttttgaaacattggggggagtacatttcacaactgggttaacaaattaaaccatactggatccctaaacaactggggggggggaacaaattcccataacaaaaaaaaaaggggaattcttcaacatgtaaggggaaaaaattaatggagaaataaacttttaattgacttgacaaaactttgggggtagctagcttctttcatctggtttttggggaatgg

SEQ ID NO: 98908 - DNA, 59 bp, Glycine max
taaaaataaaattgttgcattgtctttttttcgtatgattaaatggcaatttagcgact

SEQ ID NO: 98909 - DNA, 59 bp, Glycine max
agtcgctaaattgccatttaatcatacgaaaaaaagacaatgcaacaattttattttta

SEQ ID NO: 98910 - DNA, 290 bp, Glycine max
aaaacaaaacgggcgggctttattttttcttcattcaaggagaaaggattcattgtccctttaaggatcttgctgggcttccgtacttgctaatttggcttaacaaaaaaacgtggggaaaaaaagggaaaaaaatgcccaattcctaaaatgaaaaaaaaaagcccataaaaagggactaaattaaaaaaaaaaactgaaacaaatgcttgaagcattcaattgaaaaaggagcctttttcataagtaaaaggggaaattatacccattaaggaaagagggaaaaggga

SEQ ID NO: 98911 - DNA, 346 bp, Glycine max
ttttttttttttttttttttttttttttaatgaataaatagaaggaactaaactgaagctaattaggcgagtggcacgaggaacaaacagtgcagccactgcattgattgaatcacagcttcttctcgccgcatcagacacttcacacataaataaaaccactttcccacactcgcttgtacacgttaccttctccttaacacgacaccacaacatctaccacctctccacgtcttaaaatcaatcagaaaaactactctgagtgttaaattctctctgtcccccatttttttctttctgttttctcccctcggtttttgttccaggttttcaaatctcatctagt

SEQ ID NO: 98912 - DNA, 74 bp, Glycine max
aaaaaaaaaaaaaaaaaaaaaaaattttaaaaaatttaaaaaaaaaaaaaaaaaaggggataatagggaaataa

SEQ ID NO: 98913 - DNA, 298 bp, Glycine max
aaagccaaacaaaacgttcgggctttattttttcttcattcaaggggaaagggttcattggccatttaagggtcttgctgggcttcccgacttgctaatttggcttaacaaaaaaacgtgaggaaaaaaagggaaaaaaatgccccattcctaaaatgaaaaaaaaaagcccataaaaagtggcttaattaaaaaaaaaaaaactgaaacaaatgcttgaagccttcaattgaaaaaggggcttttttctttagtaaaaggggaaattataccctttaaggaaagagggaaaagggaa

SEQ ID NO: 98914 - DNA, 459 bp, Glycine max
ctcggtttgaagaggccacaattaaccaagttaggacctgagagctctaagattgagtttgggaatgggcttgttgcataggcaaacttttgtttcaggtctgggaaaccacataggaagctttctgattccatttccccaagggttgatacagaaatgacaaaggctgataacatgactaaggatctaaagaggattcttagtgagaatttccatggtgatgatgatgaaggagcagagcctcagactgtattatataagaacctgtggcttgaggccgaagctacactttgttctgtatattacagggctcgctataatcaaatgaagattgaaatggataaacattcttacaaggaaaaagtgatggagaagcaatctaaatctgaggtcattccgactctgagccagagtcagagttctgcaactaaagtgcattatccaaaccctgattcttct

SEQ ID NO: 98915 - DNA, 189 bp, Glycine max
gaaaagaaaaacaaatcaccgttactaggaaatcagatattctttacaattgttttcacttctatttctatgtactgaagcattacaatgaccaaccaattggcaattttcgtattctataatataactattattggaacccgaagataaacaacaaataaggaaaaagaaaaaaaaaatcaacgaata

SEQ ID NO: 98916 - DNA, 420 bp, Glycine max
gctcggaattggtcggtatatatatataaaatgtgtaacttttatatatattgataaaaaaggagtgggtttatatacacactttgatcctataaaaacatcttgacacaagcattcaatagaatttcaccactttatcatgacattttactataatgatgtggtaataaagtaaattcttgttgaatattttgtataaagatgctttatactcatggtttctgtgtataaattaagcttatatatatttacactatatattgccactttacgtttgtgtgatattaattatacagtcaagtatttattagctatctttgaatatggtgtatacactagtatacatgttgtatccagggaattatggttaaagagctatataaattgagaaaaaaaaaaaaaaaagggcggccgccgact

SEQ ID NO: 98917 - DNA, 183 bp, Glycine max
cccccccaaagcccaaagggtttgggccccggggtttaaaaaaatgaaaggcccgttgccttgcaaaaaaaagttgcccccattccgagactccccgtgcctgggggttaactttggggcaagggtttttgggaaacctaagaagggggggtaattcacatttaagggggattccgggttaaa

SEQ ID NO: 98918 - DNA, 416 bp, Glycine max
agacacggattctaagaggtccttcaatctaattaaaactgtgtacaataatacgcttagttcttttcatccaccgatgacttcatgaataaaacccaactatacgatctaaaattcaaaccttttgccacctgtctgtaattaaaaactataaccttcttacatgtatcattaaacttctgttaatgccaccaatcccaattgttaagaggaaattcttcccatgtctcttcttcagcgtgtatgtacttgctggaattttgactaaatggctgtcctaattgagaaatagttcaatagaagaactgtattatgtatcaaaagaaagctgctaccattggcctggatctgtttgaactctatatttcttgtatgtgtctgaaactatgaatgtttacatcccactatctatctag

SEQ ID NO: 98919 - DNA, 476 bp, Glycine max
gagctacatggatccatgttattgttggcagccctattcacaagattggggaagagatccactcactccactcagaccaaccttgggagtgcatggatggcaacactgatgaggccatcaccattgctgaaggtggctttcacctccacccttccattgttgaccccatcacgaagctcttcaacaccctcatggaatattctcaaggtaagaagaacctcactgaggccacttcaaagggtgctgaacttgaaagctatcacaagctggctgctttggctgctaagcttgcttctgcttctgcttctgcttacaacaacaacaaccttagtgttggttctttcctcagacaaggccttgaggcataccaggtttcaaaggagcaagaggaggtgaaaggggtgtgggaactggagcaggaagctgcttgaagaagcaatctttgcaatgcatgagaacaaccagaggacatatac

SEQ ID NO: 98920 - DNA, 421 bp, Glycine max
gaagagaaagaaatatattggggaaaaattacttcaagtagtacatctaaatgtccccatctcactattcatcttgcccccttctaatattgatttttccaacactcactactttccttaaagagaaacgaagacgtttaaaatggaaatgggaataatatcatagagattaatgttcaaaaattttaaaagagaggggaaaaaaagggaaggaaaaaataaaaataaaaataaaaatactagttgttataaatcccaacacaatggtaatgttgaagaagcctattggcttccctaagaccactgaagtaagctccatgagttgtggaataatgagttctgtgagttgcttcccctgcaaacaaaatttgaagtggagatgaagctgcaggaggttgacaactgttatcttttggcaatg

SEQ ID NO: 98921 - DNA, 392 bp, Glycine max
gcttccatgggcactggacattctttaatatttcacaattccaaaatcatttacaaaattaaccgatgtatgtatgtatgtatgatatatatagatattatgatacagattgcttagccaaagaagcagcaactccagaaaacttttctagttcaaatcgccaataacatctatttggtaaatgaaagtaatcacaactacttaagcaggcaccaaagcccaaccttcacccattatgtgcaggcacaacgagagacatattgtgacaacaacagaggatttggctgcaacatatctcacaatctcaagtactgcctcatgaacaatatgagcacattttttcacagaagcacaaaatgtctgcaaaacaaactccatgaaagacctaacag

SEQ ID NO: 98922 - DNA, 311 bp, Glycine max
gggaaaagtaaaaaaaaaaagatttggtccggaaaagacaaattcctttgatcccccccaaacatttttggtccctcggggggttttttttttttttttttaaaggctaaaaaggccagagtttaaaacatttcacacttcgggcattctgtttaagcaattttaaacctttttggaacttaggggagttttttgcgacttattattatccttataaactcatttaagtttttaaagcccttcccattttttttcccccccattaccatttttttacaagcccttagggtggaactttccccttgggtttt

SEQ ID NO: 98923 - DNA, 476 bp, Glycine max
ttctacattggagaacaaggtctgtttgatgcaggagattgcatcagagttttcaggaaactgggactccaaggatttcaaactgaggatgtcgagatcctctgcaaatgtacagggccacaatgcttgtatgtctaaccatgataaaccatcacatggcaaggattttacccaaaaagaagtaaggaatgatgttttgttagagaaaaattgtgatcttgccaataatgggtgcagatttcggaatggcaaggaagctgttgtgttaaacagacttgatcacgatcttcattctagatccgtactccctggaaatggattcaagcctctaaatggtcatgaagttcttcggaaaagggatggccatgataatccaggaatgcaagagattactgttgagaagagtgatagaggctattggaaggagggcagtatgctaaaaccaattggacatccatctcagcagaaaacagtgg

SEQ ID NO: 98924 - DNA, 257 bp, Glycine max
ccaggcacaaggacggatggctttttgctataatggatcagcaatttatctattaccctttcctcttcagcattttggtaccgttcatcatcaagcatagctttcagaccacgtgttgattcatctcgtctcctgcttctgctccttgattttttctcaagttcagagtcttcattagaggcatcatagtcaccagggggtcgtgatcttgagtgccttcgccgcataaatcttggttttaccacagggacttcttc

SEQ ID NO: 98925 - DNA, 345 bp, Glycine max
aatatccacttttttttttctttctttcaatggcggaacgatacagcaatttacacaacaaaactatggtgtcttttgctttccacgagaatttgatatcaaatactatattttaatgaacgtcgtgtaaccaaaacagagaaaacagagcactctttttaataaacaaaacacagcttgttttttagagtgaacaacaaatacagctttagttctcaattaattaataacttttccagactcttcatgatggaaggatggatgttgcgtgtgtcgtgctagtagaatactttctttcttttactgatcgacaagtatgctgcctttgacatccacaacaaacct

SEQ ID NO: 98926 - DNA, 300 bp, Glycine max
ccaaccctcaaaggaaattaaaattctttccccccaaagttgaaagggaaagggcaaatcaaccaccttaagaaaaaagttgacaaaaatttccgggcccctggaatttgtctccgggcttttaaaaaaaaagggatccaaaaaacggaccccaaagcaccttgtttaaatctttaaaaaaaaaaaggattttgttaaaaaaaccttcaaaccctgcaattgtttattcccaaactggggggaacttttaccccaaaataaaaaagcagggcctgacaatgttttaaagcgggcttgccg

SEQ ID NO: 98927 - DNA, 150 bp, Glycine max
tgctgctgaataaatcaagttttgtaatgtactcgaagttgtgcttgtaggtatgttgaatttgttagaaaacaaatttatcgttgatatggatatatgtattttcttgaatatgagctagtttcagaagaataatgacttgaggaatac

SEQ ID NO: 98928 - DNA, 418 bp, Glycine max
gaaaattcatttgcaaaaattttatcttggttcaaccaaggtggctatgaatgtttacagagagagaacttagatgaagttgcatacccttacaattctcccaatcctcatacgtgaatacaagagcaacgcattcctttccttcccagaagattaagttgggaaggcaaggacattgccaaaatagatatctttatacatatcacaccaccatttgcttcaacttttaatagtgagtggggaaaggaaggcctagcttatagtgaaccaccataaatattccaagcatgttcttgatttatccactctttaggctaggctgcgcaaaaatgactccttgagctgattaatatgaaggtaaagccctatgtgtttcatcacaatgcaagggtaaaaatacacaaggttttatctcctc

SEQ ID NO: 98929 - DNA, 293 bp, Glycine max
ggggaaggtcccgaatctttaagggaaacaggtatcaagcgttacaggtttgctcgtctatgaataactctgccagggggaaactggtaaacctttcctggccaattttggaaaccagctttgatttctaacataaactctccctttggagcccaaaaaattctacccgcaaaacatgtttggatgtggtaagttatgctcctcccactgtatccatatgttgaaccccgtcacctcccttggaaaccacacgcaattttctcaaacaggaaaacttttggccgtttttggtt

SEQ ID NO: 98930 - DNA, 470 bp, Glycine max
aaagaattgtatgacatgttttaattgtatcatctccatgaatggttaacttgagtgggatcaattaataggagcatgcagttcgaaaattcaaagagagtagccataggcattgaatattctattaaaataagaaagaaagtagttcattttgagagatgtttccctcgtaccagtggggaccaatacaataaacgataataatgaataaaagtggtcctagcgagcgagaagataatggaagcaataaggacggtaacccaggtgacagtatagagctagctggccaattgtagttggctctgcaccaaaaaatgcaaagtgggaacaaactatgcaagagggccaaaaaccaaaagatcccacacacaccatgcaatggttgctattcgtacgtagccatataggccaaaacttgttaaatcacttcgccctatcttctccctttcctttcaataatacagatgcac

SEQ ID NO: 98931 - DNA, 380 bp, Glycine max
aggccaattaaaaagaaagatactttgaatataacacttgcaagtgtaaaatgaacccgtccaatataatatataataagactatcaccatagttgtatagtgcataaatcatgttttgaataaagacaactggtcctaaatggtgaaaagtgatacaaaacattttctgctcaacaatgaaatttcttttgttagatgtcatctcatcatcaagacattgagcggcctctgagaaaacgccatggtcccgtacctgttcccatcctccacacaccggcaaacatgcgaagactcatgtagatggttagtgcaatccatatcccaacgaaacctttgctcttagagagaagaaacaatgaagcaacacttgccaatgaca

SEQ ID NO: 98932 - DNA, 210 bp, Glycine max
atagggaaatatactgtagaagaaacactcaagtaatcattgatgtcaaaactcatgtctcaaatttctgagttctaggaggcttcaagctcttcgttatctgctcaaacaagaatcagttaaagtcttcagctaactgccccctctcttagccgcagcctttttcgctggagacattacactctttggtttcacactcttcactggcgc

SEQ ID NO: 98933 - DNA, 241 bp, Glycine max
ctaacccaatccaaaatttttttcccttttcattatatgggggggaaccaaaattggaaggaaatttttccagaaaaatgggtccaggaaacaactttattaccctcctatagaccctattttaaccaacccttgagttaatttgtttttaaaaaaaaaaaaaaaaagttttttgaaaattcccttttttgaaattcaaaaaaatttttcccaatgatttttatgatcatcccccaggggc

SEQ ID NO: 98934 - DNA, 358 bp, Glycine max
ggccggggaaaaaaaacataatttataggagcctgctgggaggggccctcaaagggaccttgaaccttcttaggaattcccgccccctcaaatttcaatgctaaaagggggaataaataattgaataaaccgcccaataattttatttgtaatggcaaactttggccgaaacacccctgaacggggaaccgtttcttttccttgacctacaggggctacacaaactggaacaatttaacaacccgtttttttttttttgggacaattaaccccatgcgggtattttcctgccccaattttggatttctaccccctggaagccctaaaaggcttcgggggggaaaccccccaaaaaggg

SEQ ID NO: 98935 - DNA, 534 bp, Glycine max
gatgaagcatctactgatgtttaagattttgattctgatgaagaagcatcagacagtttccaagatcctgatgatcttagtgaacctgagatggaaatgaataataagcatgttgaacttaaaattccccttttagaaaagtttgcaactgtgtccaagcctcctgcattctgtgagtcccaggcaaatgttgaaactagaccgagactggttgttaagttttcacttcgtgattctaagaagaatgtgcccacagaggacacaagactagcttgtgagactcaggataatatggtatgccagtcttttagacctcaacctgaagaaagtgatcaaaaaacttttccagacacaaaatcgttggaccctgcattatcttctatggctgcacctaatgctaaacttccccaaagcctcgacagaaatgaaaatgatgataaagaacaaactgaaaatattacaaataatctggatgcatccagatatgttgaggcaaacacagatcagtgcagaaaaatgaagacacatacacac

SEQ ID NO: 98936 - DNA, 468 bp, Glycine max
caataatccagtatcttcatacaacaaccttgaatcacaagacccctttgacatttatacttcatacacacaaatattatccgagaatgattccttttttcatggccaacaaaccttctttgacaaacaaaaccatccttcatccccctttacgccaccttcacagctaccacaaatgcaaacatcaaatcgagatgaacatcccattgctaatgaagatcttattataagatttcatcatgaaaacatggatgattttactgaggatgaggatcaacagttctttgatcacatcaatcagcaaagcgatgaccaaagtgatgaccaaaccgatgacgagggtgttggcagaccaacgacacctccgtcacctccgttgcaatatcagcaacctaggtgtccagtagacttgaactttgaccacctaccacactatattgatcgacaccattttgttcatcagcaaca

SEQ ID NO: 98937 - DNA, 287 bp, Glycine max
aaaagggcaaaaaaattgggtgacccctctaataatgaaaataccccgaataacataatggttaaagcaacgttcttttcaaaagggaaaaaaagtttgaatcccctcccacaaaaattatgccttaaaaatcccattgaaaaagcctaaaggaaaataagtttttaaaaccgggttttgggggaaagcaaccccttttgggccccttcctcaatttgggggcccgccccccttccccccagggggggggcaggtatttttttctttgttggccccccccccccccc

SEQ ID NO: 98938 - DNA, 352 bp, Glycine max
aaccttaaatatattttaaaatgtagaaacattacagttttccaattatgaacaattgaaactagtagcaacattttttaaagagtaagtttagccatatctagactaaattaactactgtggtttattggtcttaaaactaataccaaaagggaaggaaaaaaacaaatattagggaatcattcttagatattgaaaggattctactaaagttcagcacaagaaatcacaaatatagtaacggcaggaacctgcaacaacatgcctccctttaggctactacaaacgcaggggatgaacctgtaaagtgatgaattgatccaaataagccctttgcagcaccaaagtgact

SEQ ID NO: 98939 - DNA, 240 bp, Glycine max
atctctaattaacataagtttattaatcctagacccataatcagaacctatgttcaaaggaaacaccagccttgggggcaagatcagatagtatatgtaacttctgttgaatcgtcttacaattttattgctttggcataatcatgtttatctgtttaaacaatatgggctgaataccatccccaaagggcaacaagcatcagccctaattttaagaaacatctgactattacaattaag

SEQ ID NO: 98940 - DNA, 168 bp, Glycine max
attttgtgctggtgtaaaatcataattttataatgatccaagggaaagaaatcaaaccagaagcagaaacataagctacatgtttgatttctttcacttggatcattattagattatgattttgtgctggtgtaaaatgggtgtgaatgttgtttttcttgcttttct

SEQ ID NO: 98941 - DNA, 168 bp, Glycine max
agaaaagcaagaaaaacaacattcacacccattttacaccagcacaaaatcataatctaataatgatccaagtgaaagaaatcaaacatgtagcttatgtttttgcttctggtttgatttctttcacttggatcattattagattatgattttacaccagcacaaaat

SEQ ID NO: 98942 - DNA, 520 bp, Glycine max
  unsure (1)..(520): unsure at all n locations
gttcaatttctagttgctgctattggatttttaatttgggacactttcctttggacctcactttatggccatctcccacctccacaaggtaaggaggagtatcttgaactctcaagttcagtttatccaccaattctgtagctataaaattgtgggaagccccacaatccaacaatatcacaatagaatggccctgtaataaaccctccactttccaggattttgaagtggtaaatccagacatagagcataatgataattgcaaggatttaaaagtctgcaaactgtcttcttgtcctcttcctctacctcttcttctgcttctagaattatcattctgaattgtctatttttgcatctgtgttctctagtaaatggctcaacacatctaaaacgtagtcccttttctcttttctccctcatttctgcccctgttaaatgcttaaattccccacttctatttctcccactttctacaatttggctntgccttgtaccactcctgtactactcacagtag

SEQ ID NO: 98943 - DNA, 355 bp, Glycine max
atccgggatttgccagtgttatcactggtatcagagcaccgatctggtgccctgagatctgcgattccagatgctgcgtatgaagaccaggattatggcgcgaaactctaaagattgggagcaagagcgtgaggagatgaggattcgattggagctggctgaagctctggcgaagaaacacgaggaacaaatcgcagagattgtcgcgcaatttggccaaaatcgagatcgtgatcgcgagggaggtccaattcttgaaggaatcagcaacagtggtggtcatcttgaggatatgaatcgaagggagaagtagcgcaagctggagattcgatttttgctggagaagatgcgtttg

SEQ ID NO: 98944 - DNA, 126 bp, Glycine max
tgagttttttcaagatcttttttgtatttcagattccatgttaaactggaaggtgaggctgtcaaattttctaaatttttcttgtcacgttgtttcccaagtatttattcttattgattttatggc

SEQ ID NO: 98945 - DNA, 127 bp, Glycine max
ggccataaaatcaataagaataaatacttgggaaacaacgtgacaagaaaaatttagaaaatttgacagcctcaacttccagtttaacatggaatctgaaatacaaaaaagatcttgaaaaaactca

SEQ ID NO: 98946 - DNA, 421 bp, Glycine max
agtctaaaaactcacttttgattcttgtttctaattattgtttctcttttctgcctgggttgataactgtgtataacaactaagtagaagtacaaacttaactaatgaaacataaaatccaagctaaatatcttcactttcgaactttaatccagctaagattaacaattataccctgccctcctcacttatggcctttaaactcaagttatccatcacggaggatttgaatcagccttgtagttatacaactctgcaactacggttataccatttcatctgtgcatgctttctctgggtaatcctccagctgtacaaagacttgaaattatacctgtaacccacttcctttacacaactgctttttccgtatgcattttgtatggtcgtaaatagtatagtattggtgattgatggtgat

SEQ ID NO: 98947 - DNA, 394 bp, Glycine max
gcatctcaaaatacaccaataacatatcaccaaaaaaaataattcaagcacaatgctaaacaacaacattgaaacaatgacaccaataagttgctttgtaaaaccagacatgctggtgtagtttactaccacaaggccaaaattcattgacaatttcgtttccacgataaagaaatgagggtatcaatagcctggttgtgcaggttatttcttatgctgcgttacctctttaataacaccatcagcaagtgagtcaacatcattgttcttgccaaaaaactttacgaattccatctcaggactcatcaagtatctccactatttctactctcatccttgccattgaaatatttcaaagattagatcatataacaatggagtgatcaacaagata

SEQ ID NO: 98948 - DNA, 219 bp, Glycine max
accagcaacgacatgatagcttctttattgaaaagaacaaccaacgtcttaacaaaatatgcctaaagttaacatcatattttaaaaagataaagcttagaaaaagaacaatttttttaaaaataagctagaaagaatatctttggacaaaattctaaaaagaatgtgacatatcattgtgtaattttgtccaaaaataagctagaaagaatatctttg

SEQ ID NO: 98949 - DNA, 398 bp, Glycine max
aacaaattacatccgtttcttccaagatttttataataattaattaattacttcaaagccatgcttaagatatttataattaactgataggatatttataaaaaaaaattgatcgtacaattttttacactattttgattattatgaatattaaattgaataaatattcattttcgttttcaaatttattagacgtcgtctccggagaaaaaataaaaaatttatatctaaatttgtaaaaaatatgacaaatgagttgaacgagatcgctagaaacgttgccgccagacgctaagagagattaagcgtggtgtcaagagcgaggaagttgcgggtggccctaaccaacgacggtggctctggtttcgatggttttgcggcgatacaacaatgagaaa

SEQ ID NO: 98950 - DNA, 155 bp, Glycine max
gagcccaaaaaaaatcctgggggaaagttttttttaaaatagctaaaaacgggtttctttttaataaaaaaagggcattaattcttgccccccacttaacccttccattcttttcccaaataaacttttatttccagctaatgctttttttttga

SEQ ID NO: 98951 - DNA, 278 bp, Glycine max
acaaactggtaaaacaagaatattgaaatgaaccatgaaaaatcaataaaacaaaaaaacattaatttaaaaatgcaacatctaactcaactacaaaatattgaaagatttttcaaatcttaattgtaaaatataacaaatacagtacataattattttttagtatgtgtgggtacagggtgggttgcctacaataatatcataacccagaccctaaaatcttttaggagtaattaccttggcctttgttcattggaggtaatttttatgagtatcaa

SEQ ID NO: 98952 - DNA, 234 bp, Glycine max
gtgggcccatagggaaaaaaaagcttaaaaagcttttttaagcaaagaaagacttctttttccaacccaaaaatggctggtgccgcaactggtttcacatttgttaaaccttggagggggggtcccaacatgtttaacctcacaactaacaatttaccccccttgccttcccaataagaagaagggtaaaacagatgggggatcaaaaaatattttgcagccccatttttttta

SEQ ID NO: 98953 - DNA, 399 bp, Glycine max
acggtagtataaaaattgtttatttaatatcttcaatgtagagagagatgctattctgcttacaatttcaatgacattttcacccgtatctgtacgactttaataaaggaagatgttaggcgtgagatccttttggttcaagattttttgtattcccattctgtaattctcaataaccaaaagaatcctacacattaaaaaatgaatatttgtcatcatcatgtagagctcaaattagagtcgaagatattagaaacctcgtggactttaaacaaaatggacatgctgtatccaattgattacacactggacacacttccctttgaagtttggatacacattgcgactctcctcgtcagagctcttttgacaactatgaattggagggagaaagcttca

SEQ ID NO: 98954 - DNA, 332 bp, Glycine max
aaccccgctaagagggcaaagaaataaaaatttgtcattaatcagaagttgacagacaatggggcaatgggtttactggttacattttcctttctaagtgtgatctacccccaccccacaataaaacccttttgttcataaacaggggggattataaaccccatttcttatttgcatcgggtgagaatcttccagctacaggatgcaaaatactcagggttcctcaagcaacaggtttgcacctcaaaatcatgttcccttattcgcaaggcttgccccccacccccaaataacggggtccataatcaagtgccctctttcctgggacctgg

SEQ ID NO: 98955 - DNA, 228 bp, Glycine max
ggaacactaaatgatttcaaagcatctttaataccggatatatatactcatgggctagtttttttttaataaaaaattgaaagggaaaaaatattttgcttgtatttccttaggaactgacctcctaatcaatcattgccaaagaaaaaaaaaaaagaaaaattgccccctggaaaaaagaaaatatatccccaggccttttttccacctattgactcaacatgcaaa

SEQ ID NO: 98956 - DNA, 251 bp, Glycine max
cgaatcgaatgtcgctttttattattttatagtttgatcaaatgttaaatacacctttaagccacccaagaatatttagctaaattacttctagttttgtgtatgtttactggattttgggtattgttttagcaaacagacatatcttaatgcttgtccatgtctggtaaaacagaattgcctgagtgatactcacatgtttataggaatacaaaaaatataaaattctggatatggtgaacaatcaaatt

SEQ ID NO: 98957 - DNA, 305 bp, Glycine max
aaaaaaaaaacacccggggaatttgggacaaacccaaattttgggggggcgttggcccataaactacagaaccctggaaaccaaccgcaatcaaatttggtccccctttggaatttgaatcccaatcccgggcctgggttatttaaccctttgtcccgggcccatggctggctgaaatttgtacccaaacatttttttttttggttcaaaaaaaaaggggaaaaatctttttgttcccggcccccttatgggaaaaaggggggagggccccccccgggggctttaagccctcggcttccctttta

SEQ ID NO: 98958 - DNA, 289 bp, Glycine max
gcaggataaagggggaaatacaaatttatgaggtgggagttaagtataatttgtatgctcggtggatctgatatcgagcacgatccctttcagaattactaagactgccataaaatatgtacacatcaactttacagaaaaacaggtgattccccgatcttcccttgtatgattacaaggaatgcttccgtttagtccttcccacaaatgtgtcaataaaacggaatgcatacccttctaatacaagtaaatgcaagaaatgctcatccactgtacagtttactctcat

SEQ ID NO: 98959 - DNA, 329 bp, Glycine max
ggaaacaaattcaccatctttgggggataagcttgatccaattacattggtttaaatcaaaaatgcctaacagggtttacatttaaccaaaaatacccgtgctggttccaaatttcatcaactcccatgacctgaaaacagaatgtgtgaaacggacaagttgagatcccaactgcggatttttggataaccaaaaaataacaaaatgcctgaattcattttagggatatgtagagcccatatgatatgaggactgcaacctctgctaactaataacatttattaatccaacaaaacaaggggaaaaagaaaaaaaaagtaagccactt

SEQ ID NO: 98960 - DNA, 407 bp, Glycine max
accatgagttcatgggattcttaggcttctgttccagtcagtgatatattttattctagagtgcactgcattgggcatagtaaacaaaaagaaaaatccaaagttggtgtgaaaaaaagcttgtaaaattaaagtgtgtaggacaatgacactaacaaatgttggtcaatgcctagttgaccagcagggaagatcagtgtcaaattataaggctatcttcttgccttactatcagtgagaataaatttgtaaatgagtgttgctgtgttagctcctcgctaacacaacatatcttatagtggtttaataaaattgtggatgaagtgttagctcctcgctaacacatcttagagtggtttcagatgtattgaatttgtgtcagagaaaaagaataatggaaatgatat

SEQ ID NO: 98961 - DNA, 296 bp, Glycine max
aaaaaaagaaagccctgcaaaagtaatacaaattttgggcttagttctccaacaaatctttttgtttaacaggggaaacttgggcctttttccaccaaacaaaatattcttgattaagggtccccaaaactgaaggcaacttttagattaactaaaaggtcccctttgaaaaaaaatagaaaacaaatttttaataatttttcaggggtttgcccaataggatcacaaggtacagccccgggcaatttttactcccccctgtccataaaatagcaatcccgggattcaaaaacatt

SEQ ID NO: 98962 - DNA, 235 bp, Glycine max
gaaacacccacaagtgtatagtagcgtttctccattttccatgtgggtgtttcatagagccaaaaatgccataattaaactgaagaagaccatgaagaatctcacgtggattatggagtgtcgctactcatcagcttgtctcaattaagattctgttctgtcttgaatacatggcaaggaaataaaacgctgccaccgacatgtaggaggccatgtgtactttgttttattatag

SEQ ID NO: 98963 - DNA, 409 bp, Glycine max
catctaccagattcccattaccacggttcggctcgaggttcagttctttgtgaaggcgaccgcgtttgatgcgaattatccactagggagtgatgcccgtgaggcgattgaggagagtgttataaaggattataggagtatgctgaggagatactgtcaggtggagatgcagagacggagctggaataggaatctgcctgctcctcactgtgataagctgcataactttgcagtcgtggcatgaagcaaaagtgcctacatggaatttttttctccttggcttacggaagtcttgtatcaggtgctgagttttgttgcacattttagtcttcaggatatctaatatatccatgggagtggctcttattacaggctgtatgcttactgagtagctggcagtctaatgctg

SEQ ID NO: 98964 - DNA, 315 bp, Glycine max
atacaaggaataggaatttatagttctcttttgtgcaatcttcctgaatataccagaattgttgagttgattactactcaccaatttctttctttctttctttcttttggatttgcagcaacaaaatcaacgcccaagcaggtggaagtaacaggcctcatgagctgcttccggcggtggctcagccgtcacaggcccctcacgtgggggttgaatccgagcaaagccggtccggtctgatggcggatcgggccaagattccggcaccggaaggagttctgaagtgtcctcggtgtgaatccaccaacacaaagt

SEQ ID NO: 98965 - DNA, 352 bp, Glycine max
aattccagattttttataaaagaaattaatctagatatagaaatacaaaagccgataaaactggtgagagctagaaagaaaggtggaagcagaggtgaattgtggattttttacagcattactcactagatagatttcacttcattacgacctaatcattattattattcataaattactcccctttgcccgcacggatgttgatgattattattacccccctttttttttatcgtcatcaacctctcatctccgacccattactatacaccctgcaaaatgccttattctttctattccctccctcgctctcaattaattaagcttcttcttcttccctcttaactccatt

SEQ ID NO: 98966 - DNA, 282 bp, Glycine max
gggaaaaaaaaaagggccccctttgggcctttaaaaaccaaaagcttttaaaaaaccaggggtttttgaattatatgaaccccgtttccaaacctttaagccttgggtccccctttccctccttttggggcccttttaagggggtaacccccccccggggggggtttttgtcctttaaaaggcccccggaaaccaaatccttcccctaattgttccttaaatttcccaaaaaaaaaaaaaaaaacttttcccccctcccgggggcccatggggcggggaaaa

SEQ ID NO: 98967 - DNA, 268 bp, Glycine max
agagagagaactcttttagatacaaatcaacttttttcaaacaataaagggaaggggaaaattgagagatttatttgtccaaaatttttccattgggggaaaataaagaaaaagaaaatgtttcttcaccaaagggtaaacagggtaacattttactcacacaacattccaccacgacctaggctaacagacaattgatcatagaaattgaagtcgaaacatcttacactttattttaggccacttcttccttgattctcttcattta

SEQ ID NO: 98968 - DNA, 368 bp, Glycine max
agaccttaataaaaaaaaaagagagtatattttaaatattcgagacctacaacaataaaaaaaaattgttatgttaaatctataatataagttacattccttcccatgcttaacatttaatttaacaatatataaatgtttttgccttggcctatccactttccaaactaattgtagactatggttgctgaaactcaattgtgagtagaacttaaaactccaaagaaaggatttgtcattgcagaatttaggaccaaaccagctgaatttaacagtgccatgtcaaccttttcatcaggaagatacaagaagtcacccgttctctcaaaaccacacagctcaagaaactgtacacctccatttaaact

SEQ ID NO: 98969 - DNA, 200 bp, Glycine max
accaaaaaaccctttttagaaggccccaaccctgggtgttaaaaactttgacaggaaccgggcatgattcaaactgggtgactccccaaaccctgggggggggaaaccgcccccatttttttttaccaaaatttctttttttggggattttttttgccaaacacatgggaaataccttttcatacatattccttaagggc

SEQ ID NO: 98970 - DNA, 62 bp, Glycine max
aaaaaaaaaaaaaaaaattaaaaaaatttaaaaaaaaaaaaaaaaaaaaaaaaaaaaaaaag

SEQ ID NO: 98971 - DNA, 196 bp, Glycine max
aaaaaatggccactttcaatttgggtgtataacacgggaaaaaccctggaagtcggagtggtgagctcattcatttcagcaggggattccttcacctgggggacaaatacagaatcactattcctatggaaaatctgagaaaatccgcatgtttattgtccaactggattgggggcagtcttctattgcttgccct

SEQ ID NO: 98972 - DNA, 106 bp, Glycine max
gaatccaaaacaatttgatatttattactataagacagggggtggattacctccgccgaattccccttaaagcatatatattacagaactgcaagcttattttgac

SEQ ID NO: 98973 - DNA, 105 bp, Glycine max
gagagagatagaaaaaggggctgcttctttggagggagttaaagcaaaactgtggcaggtacctgaaacattgcctgaagaagaccttgcttagttgggagcacc

SEQ ID NO: 98974 - DNA, 431 bp, Glycine max
atcaaacatccaatattacaacattgctagtcaaaatcaactcatgaatcatattctcaacaggtcttatacacaagcacactgttaccagcactgcacaaaaatacatataaattttttaatacattagctatgctcctaggttttaaattgccgggacaatgcatttctataataaagtgagaccttcagacttataaaactcagaagcctgaagtttattaaaatttggaagtataaagtaaacaagagggtaagtactaacagtcataaatccttctctattcacagaaacacctctaaagctagaggaccaaagccacccccagaaactatagaacacaacccaattgattttggtcagaaacacaaagttgaatctgcccctaaaatttcccataccagattcagagcaatcctaaacacaattg

SEQ ID NO: 98975 - DNA, 146 bp, Glycine max
agtatatatacaagactatatttgaatgaatctgccagaccataaaaaaataattggcagtaagtttgaaaaagcaatttaaaagaatgatgataagaaacacaatgccacaaagaatatcacatctgttatctttaagggtctct

SEQ ID NO: 98976 - DNA, 361 bp, Glycine max
gcaaagtgaaaaggtatcctaaatatattgggccaatagaggctacaactcaattaaaaaataaaaagattttttttttggtacaaattaaaccttttaaataaggaatataactaaaaaaataaagggaagagatagagagacagggtttgcttttgaatgtaacattgtacaagataactaagttagaccaaaaaatgccaagaggcataaaccttaagcataatagctttgtagctttcttcatcaataaattaacataggaaaccttaggtaagtgacaattgtgcaaaactcctttaaccaaacccctttgtgccacggttgcaaattgcaatgactaattgagccaaaataccat

SEQ ID NO: 98977 - DNA, 117 bp, Glycine max
gatttgtgttggctgctctgctcctgttttactgctggtttggtggcaactggaactagcactatgaaggttgccctgagtggctctatatcggttgggactttccatggggccaat

SEQ ID NO: 98978 - DNA, 343 bp, Glycine max
gacataaaaaactaatgagttgaaaagtgtttatatgcacacatcccatagctggcaggtagcacaaaccggatctacccacactgaaaaaaagaggccaataaaataattcggaaaacagacaaacaacaaatacaaaacctataataaaaaaaagtacacatggccttctaccaactggattcggggcagtctcctattccttgccctcacacagttagggcatttgtaaccattgaataaagatcggacaggtcggatctcaaatacgggttttatgtctaatttactgagatagatgtccgatctttatgtaatggttccaagttagtaattgagtgaa

SEQ ID NO: 98979 - DNA, 106 bp, Glycine max
gaaacccaaaaataacttgatcttgcttacatgatctaacatcaggtccagttttactataacgcacataataaccagtttgcattgttttggggcaggggagggg

SEQ ID NO: 98980 - DNA, 111 bp, Glycine max
ggaaaatgtgaagctgtgccagacactttaatacgtttttttaatgggaacattgttggggcacaacagtttgctcatgctgcaataactgatgggtcatttaacccttca

SEQ ID NO: 98981 - DNA, 110 bp, Glycine max
gaattaaactagcccatagctttggtaggatttacgctgggccattgatgccttatgttatagaaactattacatgtattgcacatgctggaagcaaggaactttttggg

SEQ ID NO: 98982 - DNA, 326 bp, Glycine max
atcccaaagataacttgttcttgctttcataatttaacatcaaattcagttttactataaagcacataataaccagcatgcatttttttggggcaggggaggggttgagaggggaataaaagaaagtgagaagttttaatttacctttgcaccagggttttcagaccactatgacttccttttatggaatccatatgcaatatacagggtaccttaagtgaattgtccaggtccttatctggaatacatatcataacataaatctctgaaaattctttcacaagaacgatcataagctgagacctcaccattaaaattaaccaatt

SEQ ID NO: 98983 - DNA, 362 bp, Glycine max
aaaaaatccaacgggaccggcttcatttcaaattaaagatcaggggatattttcaaaaaactaggctgcctcaaccaactgtcacagaaatactcctttggggaaagaagattacacttcccagttaatgggttccaacttacaagaaccttggaccgcaggacatatttcccttgcacagaaattatggacttctcacctaaaatgaatttaatgcaataatatcttactataggatcctcaggttctgccatctacatcgatgccagccccagtcccatctggagttgaagaaccacccttggccccagcgccaattccctttccttttggttggaagttgactttctttttacttctgc

SEQ ID NO: 98984 - DNA, 175 bp, Glycine max
aaaataatgagtttatgttcacttttattcacaaaattcaggatccatatgagacatttaacatatgtttttgttttcctctcttttgggagggagagatgatattgaccaaataaggggatgctaatatccccgggaggaaggggtccagggtgtcatgtccatagggtaactc

SEQ ID NO: 98985 - DNA, 290 bp, Glycine max
acgataaaagttcttgagactttttattattattattaacaatgtaatacttggttcttacgactttggaacatgcgattgaagcacgtgagaaaactacctagcttaattaaagaggaaaaatgatatgtatacagttaagctccagtctcgaagacaaagatcattgcaccaatatccttctcattcatcccacaaagcaaccctttattctaacattgggtggagaagactgagaaagaaccggcaggtgtcgtcaatgaatgaccttgtgcactgggattatgact

SEQ ID NO: 98986 - DNA, 451 bp, Glycine max
gaagctaaaatgtggttttattgtcgattgatatatatatatatatatatatatatatatatatatatgctcatgtctgtcttatatggcaaaaattttgtgggtccaatcacaccattaatcctaaacttgagagaagaatggacataatttgtcagtgacgcccacattccttctagacaaattagatttagtggacagtctatcatagattaatctccaagcaaaaaacgcagctttacttggtatttttagtttccatacgtcttgaaatacctcatctatattctcatctcttgattccctgtcaagcagttgatatgcactgcttatagtatataccccagttgagtcgcttagccacacccacctatcttgttgctgctcatttgtgttgagatgttaaatttcctccaaagagcagtcccccataggtatctcaacctcaaaa

SEQ ID NO: 98987 - DNA, 234 bp, Glycine max
gctccacaattgcatcagccttgtcaacccgccttgggagtcctgctaaagctgaaagcatattctgaaccggctctttggacaagtcctgctttactcttggtattatcttcattaaggactttcgactaggtttagcattctcaggatatctcttagacctatttacatgacttgcatgccttattaccagcctaccttgaattacagattggattaacatgattgcatgga

SEQ ID NO: 98988 - DNA, 499 bp, Glycine max
ggcaatctcaagttgactgactagtttggtgtggtgtctgttgattaacattacattgcctgccgactagtttacggtatcagcaatagcaagtggctcacacacgcacagatctgatctatctgaagctgaaaacgccgacgcccgacggtgatgatgaagatggggtcctcaccttcacgttgctccttcttcctattccttctccatcgttcccttcgatcagtttggattcacccacaagggtcgccttgagctcagcgtttccaaaatatcactctccaattccaatttggacctctccaaggtgggattcttcctctgcaccctggattcctggcttcatgtcttccagcaactggaggatggcgagattcggtgcgcccttcaatccgatctggtcaagtccgtctacaccttcaattctctcaacggcaaggactctttcagcacgctctacaaagaagaaaccgacgccgatcagtacaacctcgtcttt

SEQ ID NO: 98989 - DNA, 351 bp, Glycine max
aaaaactagcgtggaacttgcgctgttattaataagtccccctgggcgggtggaaaacaacattggggggggcttcccccattgactatgaattaaaaggcggttttattttcaccccccagaacccacaatggtgggtaggttttccttcccccgctaatgttatttttatccccttcttacagttttttagttagtccttccaatagatatgctttatttgccttggtgggtatgtaaatatcattttagcggactgaataatcctttgctggttggaaaaggcaagtccaaaaaaccaataacttcgttccatttaatttttaaaaaccaaaatgccttttgtttccc

SEQ ID NO: 98990 - DNA, 165 bp, Glycine max
aaggatgggatttcctgagtcctatacaacgttactaatggagccaacgagctaaaagagctaaccaactatgcgtagaacattagatgctcaacgtcctgtaaaatcacatacggatgtttgaacagacctctctagacactacacttggatacgggagtcact

SEQ ID NO: 98991 - DNA, 457 bp, Glycine max
gaatgaatgtaatcttgtcactcaacaaagagaaaagggtgatgcttaaattccaatacatacatctccagaaaaaagaaaaaagagctacgaatcacaaaaaatgtagcggtaaatggaagctcatatgaatagtaatttacattcttgaccaagcaacagaaatccgatgaagaaaaagcaagccaaaagaattcaatctcgtgaagttgagtgagaaggccaagcatggattgtccaacttggcaaacttctagctggctatatacgcattttgcacctatatgtacaccaggaaagcacacccagaaatgtcatcaaggaacaattccaaaaagaattcaaatgatatgcccacacacagacttgagccagtgtgtgatttaacatgggcaggtttaatggaacaaatgacaacgcttgtggaagtgcaaaactagcagcaatcacattcccc

SEQ ID NO: 98992 - DNA, 204 bp, Glycine max
gccaaaaccgcaagtccagaacaatggaacaacattaatctccaaaaaggactagatgaaaatttcccagggccactgaaatacgaccagaatcatcaccattgtcaccagagcctaaagcccactgtttatttggcatcatcatatgaacatgaaatccaaattcctgtattgatgtcaaggagcagggttcttttaccggat

SEQ ID NO: 98993 - DNA, 302 bp, Glycine max
cataaaaacagttgttataaattttataattgaatcagacttatacaaccaagcagccatgcatatactgaaccaaagttggatgagtttggttctagccaatcggtaaatgataaagactatactaaactccactagcattaaccttgataataaactaactgtaacaaattttgagataccatagaaacactggtcttaatagagtacttagaggcacaatatgaaagtcgatgcttatttatcatgctgggaaagaaaatatgaaaggggtgtgagcatgcaagagctactcatgggga

SEQ ID NO: 98994 - DNA, 307 bp, Glycine max
acttcacctttcaaattgggaggatgaggatgatacatatttttcctggtcaaatgaaccaaccataaaaaactagtactaaaaactttttataaacatttacattaactattacccctaatccatttttttgcttctcttttttgggttttaaataatatacatgattcttgaaattggttttcatttcaaaatcctctcactcactcactggtttgagagattacttcttcaaacttgaggaagagttgagcatctgaagtgctcattggggggcagtttactaagtggggggttttgagggttg

SEQ ID NO: 98995 - DNA, 237 bp, Glycine max
gtccacttgtgtccgtaaaagtttcttcataaaattacacactccaatggctagcaaacacagaaaactcttccctgatgaaacaacaacaaccacaaaccaaacccaagattgctatggcttttgtgaccctgcatgcccttacaattgttacaataaccctgattacttcttctctccaccaccaccttctatttcacattcaagccaagttaatcacatatcctcctacttgat

SEQ ID NO: 98996 - DNA, 470 bp, Glycine max
catccacttcagttacagattgagctggttgtgttgtagcatatccagtttgttatggaggagcatgatagtttatcagaacacaatatcattgtgagggaggaattgaaacttgaaagtaaagaatcgaaaatctcgtattcaagttatgagccccccaataaaggaaaactaaacttacaccaatacacaatgtagaagcaaaaaatagtgcacttaatgtacctcattcccttttgtgggagcaaacctgttctgcagtgccactggacattgtgattttgtgatacaaaaatacaacagagttattttcacatgccccagcacttgataaaacttcaattacaatttacattttattcttcaataaaattgatctcttttctctttcacaattttctgtttaaaccattgccaaatgttcaaactccaacctaagggtgccctcaaaatctgagagttaaatggac

SEQ ID NO: 98997 - DNA, 333 bp, Glycine max
aagattgattgaaggatttgttattttttactagtttttctctccagatatggggttgctgagacagaacagttgaactatttttagttgtttatctatatgaatagctttttatttgtaaggattattatgctacttggtaattgttctgtctagggtttcgctggagggagagagtggtgctaagaccatgtgctgatgtgcttacttgtgaagttgttgttgttaaatgtattgttttctaaaaatctgtgtctttgtgtatgtgcttgacattatcttgtgttttgaattataattgtggcttgctcttgctttgactagctgaatttt

SEQ ID NO: 98998 - DNA, 202 bp, Glycine max
ggaatcatggctccagcaagaagcgaagaagaaccaccattctccattattctcatcttcttcatatctgggaagtcaatccaattggatggaatgggaccaacattagcttagaaataaaaaccttaggataatgtaaaataaaaaagtgccatctatgtatgttcctttcctaacttaccattctgaatttgttttgttt

SEQ ID NO: 98999 - DNA, 269 bp, Glycine max
aaggggaaaacaaccaaaaaactcaccccactgggggctctacataaaaaattttttaaaaacccccgggtccataattcaaaaactttaacaagagctttggcccaacagaatcaatttacatatttcaacgagacatacaaggattttcgtaatttgctgggactggggtgttcaacaaattgcacaacaaccgaaacaagttgaagttggctgcaatttgaaaatgcatgacagtaaacaaacttgtttttggatttttttggact

SEQ ID NO: 99000 - DNA, 455 bp, Glycine max
gaaaaaaagatgttgatctacaatacaacgaacaagctacaagcttttccaatgtaatgtggggtctgatcaataaagttttaatttctaaccctggttggaaaccaaaaaccttggcaacgatgacgaaaaaatgacaatgccatgtgtaaggtaaggaagacatggagaacaagaataatagtaacagtctgatcaacaatgtttaaacttctaaccttgacttggaaaccatgaacccaagcaaggatgatgaaagagtaacaaagccatgcttaaaagataaggagaccacagactagcctaactgtaacagtatcatttgcagaggacgagattaaagaaagaagccaaacagaagtactgaaagaaaaagcagagatgtcatcagtacaggagcgtgaatggaaggcctgagtcaatcaggtgaggtccagcaactagtatatacatgt

SEQ ID NO: 99001 - DNA, 323 bp, Glycine max
ctagggtcaatatttatttgactaaggtaacaaaatgttggtaaattttgaacacatactgtctgtcgccgtttttaataactgcatttcggttgcttcttctgtctcttttgctttcttttgtttgtatttcccatcatcctcattctctatctctactcgagtgtgtcacactggaaccttttcttgttctttggtgtcattagtaggatgtatatctgtactccgtccttccaaattaggatgctttatattcgcgttctcctggttcttcacttcaatcagggtttcagctggctgcgcattttctacacttgtttggt

SEQ ID NO: 99002 - DNA, 465 bp, Glycine max
acataacattcatgcataacacggaagagaggattagtcattcatcagatctggttagaacaatttaaaaacaaagtctttgagcaaatttatacggatttacaaagagaaaaaaggtttgtcattaatcacaaaatgcccgaacttaattcttgccttatttggcccatctagcacgttcaagatggcatttaccatacagctttgtcacccccgtaatttttattgacccatgaacctgatgcaccatctgctgcttatttccaactagatgcttgacccttgactgcatcacttgattgaccccagtccttacaagtagtgtttgaactagattccttggtccacccaccaccctggatattggtcccttcagttgtagattttttccagctagcctttgcagtttgcgatgacccattgctgttccaattattgatacctccaccacttgctgaactccag

SEQ ID NO: 99003 - DNA, 108 bp, Glycine max
gtaaaaagcaagtaacattaagttggattcggatacacaagataattggacattatgtgaagtacttcaccaaacacaaatctaaaaactctcaaaagtcatttcgtt

SEQ ID NO: 99004 - DNA, 262 bp, Glycine max
agcattgatcttttttagctttaaaaatgctcgtgggagaaaaacaccaattaattaatactaatagtactaaagttgcacttttagtcaatgtttccaatgcttactaggcggtgaaaccacaacatcagagcaagatattgcagaactaagcattgtcaatgaatgctaatcggatttcccaaaggaaactaaaatcagttttgttgttgtcagacttcattctctctaaaacaaattgaaaaactccatcaccatttaa

SEQ ID NO: 99005 - DNA, 398 bp, Glycine max
tcctttttttgagttttttgtacaagtaccgtatgtacattaattgctcccacaaatgttgccacatatgcggcaaacataccttgctccaaaattacatgatttacactcaaatgtaattagatatgagctataagttgtgctacagcacgtaactatatggcttcagaagaaaagccactgttttgtgtaaacatcagacttaatacacatcacactataatctggcttatttatctaaacatctatctattcagatatgaaacaaaggatagggattgaaacctacttatgaaggatcctagaacaagggttcataccagccatcagaagctcgggtcattgcaaaacacggacatgtagcttagggattggacacaagtttccatttgtgatca

SEQ ID NO: 99006 - DNA, 341 bp, Glycine max
ttttttttttttttttttttttttttttttttttttttttttttttttttttttttttttttgttttttttttttttttttaaaaggggaaatcaaaaaccccttttataatgggggggcataatttaaaagggggagggtttttataaacccgggttcaaatggaaaacaaaagacccctagaaaatttaaaattccaaattcctttttttaatgggggaaaaaaatttaaaagggggaggattttcctaaaaataaaaaggtttgccttggggggaaaatcccccccccacaaaaggggttttccaagaaaaaaaaagggtaaaacccccccccccaag

SEQ ID NO: 99007 - DNA, 507 bp, Glycine max
cacccatcccaagtacatgagtatgcattatgcaatcccctcctgctcttccattgcctgtataatttagctagggtggggctgtggtgctaggaagcactgatgtaacagaaaggctgccatacggttgtcagatatgtcactgtggatcaggatcctctcttgcctctgcagcaggatgttctgtgcagccaaaatctggaccatttatcaatattttctctctgcatgaattaatgtgcaataaccaatcaacggttatgatttggctgcagacaagattggctggagaggatgtgatttgacccacagtttcgagatttggatttgatgggtcttcaccgtttggagttgcattcaatttgttagtgaagtttaccatctgagttttttattcattgctaacaatgtctgcatcaacttatttgaagagttttgttggatgtattctctctccttagtctttctgtctgtctgatatgacaagtgttttagatttgattttgc

SEQ ID NO: 99008 - DNA, 229 bp, Glycine max
atcaaggaaaagaaatggtgtccctggaacctgtttctggtcattaaaagaatccttttccattttttttacataagtggaccgggtgaaacattcacaaatttccacatattagcggttcagcacaagggtccaactttagccacaatgaattggaggggtattccccctttttcaattaactgggggtctttatgaaaagggccctcttaccaaaacttgggggggg

SEQ ID NO: 99009 - DNA, 122 bp, Glycine max
tatcaataataatataatgaataaaagagaagctaaaagccttcactgttgggactcaactaatcaatcttgttataattttgttacttatatatatatatataaaatctatgttaatgttt

SEQ ID NO: 99010 - DNA, 398 bp, Glycine max
gaagaaaagatcgataaataaataatgatgatagtaataatattaataatggtagtctgagtctgagagagtgaagctatcgaaatgaaaccctaaaggacatgatctccgagaaggcactatgaacatgatttcccaccactcactaatgagaataataaataataaaaacaaaatgttcagtgtctctaaagaaagtctcgtgctcaatatttatactactaaataacaataatcataaaataaaaccctaacccatacacaactaccggatctacatcatcaaggcgaccgcagcggccaaggcgacggcggtgacagattcggaggcggagactctgcagaggtgggcgtggctgctggggctgacggcgggggagtcggcgggtccgtcgctg

SEQ ID NO: 99011 - DNA, 361 bp, Glycine max
agctgtttcagtgttaccatggagtcaaactttccaggtgcttatcacctgtttggtgaagaccagggcataccgtatctctcagactcgcttggttttccaaccatggatccttcttcaccggaagacaacgatttctcagaaactgtcaagttcataagccaaatcctcatggaagaaaacgttgaccagaggccattctatgactcactcaccttgcgagttacggagaaatccttctacgatgctctcactggcaaccaacccccttttgttctttgctccgaagctgaaaccaacaccataaccagcaacaacagtggcagcaattttttaaatgaaaattctcgtgagttaaaca

SEQ ID NO: 99012 - DNA, 408 bp, Glycine max
cacataagttgctatatatagaaatacaaaactgcaagcaagaatatcaccggaaaaaacaaacggaacatagtcatcatctgtttcaaattaatcacatcttctcaactaatttgtctcaaaagacaagtatcctgtaaaagaaattaacaaacttaaatagaaggacgtgaaatgcctgatacatgttggttaaagagaaaataactcaataataggattgcaagtacttgggcaaacatgctataatggccctcctactctgatgactaatatgcccttcttatcaatatcactaacgaaattgtattaccttcacaagtcttaatctaccagaaaagtgatgctataattttaccaaggaacttggtgcaaagcttggtacaatcttcatcacaaaagctgaag

SEQ ID NO: 99013 - DNA, 205 bp, Glycine max
atcgtccaattcttgtactatataccattctttaaataattcattcttttcactcaatacaataaatacatacaaatgccaacaaaggtttctattattacatttgaggaagaaaaaatcagggaaagagagtactatttaacaaaaactttaactataacagcagaatggcaaaaaattacaaaggaggctgaatgcatgttgc

SEQ ID NO: 99014 - DNA, 437 bp, Glycine max
ggcggccgccctttttttttttttttcttttgttcacttctttttttcccaattatttttccttctttttctgtccccgcaaatacttgattggaatggcaacatatctcatcagataagcaaaagaacaagaaacaaatggaactccctttatactatatttcccccaacacctctgtacaagtcctcaccaactaatggagaatgtggaagtcgacaacacaacacaacagcctgacccctttactttttcttttgagttcatgtttaactcattctcccatgctcataggcacaattattctatcacctcttatataccaagtggcaatccaaaattttggaaaatcttaatttccccttgaaggctggcagtgacaatcaccataccccaggctgacatgtttagattcaccccattagataaatccacactt

SEQ ID NO: 99015 - DNA, 245 bp, Glycine max
aaggcatatttaaaccccttttttgctaaacaaaaaaaaaccccaaagggaagttctttataaccctttttcactacacaaccagaagggtttaggacttaataggcgtactacctttggcactggacatatgccccctcacaaaataaaaaattctcccaccaaaagggatttaaggggcttaagggggaaccccccggatttttggggggggggggggaaaattccaaaaaattttttttttt

SEQ ID NO: 99016 - DNA, 446 bp, Glycine max
  unsure (1)..(446): unsure at all n locations
gctctggcattcttcattgattctttccttcatcattcctcttttttctttttatttttctttcataatttgctttgggacctcaaggacttacgcacaaacttattatcttttgccagttgaccaagccacttgaggatagctntgcatacttttggtgtttgaagagctcttccatctgccaaaatgaagggacgtgtaagatggaatgaagataatattggagaaattgaagcaaacaagcccatgaggcaaaaaatcactgaacctaagactccatatcatcctatgcttgatgatgacagttctccatcccccgtgctaggagattttgacggatataatggtgataaaaatctctcaccaaatgctgaacaaactggttataataatggggcatattgtagcagaaaaggaactagacaatctgacggctggacatcatc

SEQ ID NO: 99017 - DNA, 349 bp, Glycine max
aaaaaggatcttgggattcgaaattagagtccgctgtaaaaacagcttcagtacaataaaaatttcataagacatatagtaactactatatcttggattgctccaggttacatacggaagtggtccataattacattataaatgcgttatgcataagtccgtgaacttggatcatctattgaatataggtatttacattattatgtatgattatgattatcattattattatgcttggattctccatggaattacacaatacaacatcttaccaccaggcccttttgatcaaccctggcttcttcattgccttcaggaggctgagttagcttcctattttgaggagaca

SEQ ID NO: 99018 - DNA, 231 bp, Glycine max
ccccaagggaaaaaaaaaccctccccttttttattacaaaaattttcccgtatccaaagggcaatccatcaaacgggtttggacccctttataaaccttttaaatgtttaaaaaaccctttttttgccagggggataaaggcccaaaattgggaccaaaaaacaaaagtccagttttggtataacagggggggccgggaccttccaaggaaagtttaaaaggcaaggaccg

SEQ ID NO: 99019 - DNA, 292 bp, Glycine max
ggggtcacaaataccataaattcaaaataaaaacctttatcagcctatttaaaccggttcaagattaaaattgtcacatttgcctaaaacattttacaaggacaaaattttgcaaaaaacagtaacctgggttttaggagagaattcattttcaatttttgaataccatgaaaaccaaggggaacaatttgcctgttaaaaaaattgatgctgctggggcttgggctgataaaaatccctaaaaagggccccctttatttgcccttggcacctcacatttttttatttttga

SEQ ID NO: 99020 - DNA, 268 bp, Glycine max
aaacaacttatcggggctggtttaatgaaatatttagtaataaaaccaataagaatcccgagtcaaatttctaacgtatgaatggcctgtcaaaaatttctactttcaaacaatcccaaattagaaaagaaatttgagctggggccatattcgtggaaataatggggagggagctttgcttggctcccaaggcataaatgaattatgtcccaaatgggtggatccaaaagaaggggtttgataaaacataacccccaaattttgtttc

SEQ ID NO: 99021 - DNA, 383 bp, Glycine max
gcacaacaaaattaccccatacgggtaatcacagggatctcaaaaatgggacgtctcatgaaaattctatagtagagatttctgatatttttaggccacaacagaccatactccatttagaggtaactctagttcactggctttaattcatcctcttgccgctgatgcacgtatagagaacctctttgtataatgcataaatagaagggaaagcactctccagcaccagactcaattattgtgtgaagcatccaattatgatgctcctacaaacttgttcaaggctgatgtgtctaaacctgcaaagtccttcacagctgcaagcacagcaagtccaagcttcacagcatcatcattactaggtgcctcaatgttaaggggaa

SEQ ID NO: 99022 - DNA, 210 bp, Glycine max
caatccaaatgaacaagttaaattttaaacttataacacgttttacaggggtacaatgaacataattcaatctttggttgggcagctttactactttagtacacagtatcacgggcaaaaccaactaacaacagaaattttctagacacaacttgtatcaacccctaccccgatcgcttatatattctttcatcttttcatataatgatg

SEQ ID NO: 99023 - DNA, 433 bp, Glycine max
gaacatactctgattcaatttcctatttctgtcaattaaaggaaaagagagagaaaatacggacaccatatattacagaccaatatctccaatagacgagcattttaacccgaacttgtttttcaaaaaaggatacttgaaccctacaagggacaaggggtgttatattcgtaaacattctcagatctgtgctttaccatcatccaaattgtaaaaaataaaattaaatgtaaagactggtgttccaataatgtcagtttcagcatcatgcaggatagacatcgatcattgttgacgcttggtacggtgcaagagagcgagaagaatttttttccttggacccataggaatcccaagctctttgaggtcattttctcccatctgcttcaatgcagtcatatgcacttgctcagccttaaagagaatggcatat

SEQ ID NO: 99024 - DNA, 213 bp, Glycine max
aaaggaccattgatggatatattaattaacttaagaaagccaaaccatgtaattactgagagcacatgcacctgagagcttacttaactagggtccatgatgctaattcttcatacatggatagctctggcaggtatcttattggatggacatgcatgccattaaacggattctcatgagcccgcttaagtatgatccggggtgaccccatta

SEQ ID NO: 99025 - DNA, 363 bp, Glycine max
aatcaagtaatttcaaaccatttgagtatatattattttatgggcttggcacttaacacagtacacatgcatatatagagcaacacatttcaaggaaacattcttcaaaccatactgatcttccaaaataaactggaagatgattaacttaaagacacacatatatatataagccaaaagcatatatatatataagacaagtagaaggaatatgctcataattggttgcttatgcttcagccaaagagatgcttgtggtgcttctcttccttcttatagtcaacctcatcatcatacccaccaccacttgttttgctgtacccaccatcagtggtagtgtcagggtacacaccaccaccacca

SEQ ID NO: 99026 - DNA, 413 bp, Glycine max
ccaatgacaagttaatttattgatttagaagtacagagagaggggagttactattcaatggtaggacgcgacaatatagtagtatgtgtagagaaagaagggaaggacggtccacttgataagaaaggaacacaattccccaaagaacgtgagttctgatttctgctgtgacatttgttggtaggtaatatgtaaataatgttgtaagtgttctttgagcttgaggtctgaacctttgtgagcttcgaactcgactcacctaaacttttttttttatataaaaagaaaagaaaagaaaaagaagtaaagaggacgatacaatgcttcgccttttcaccgtccttatcgacaattgatgacaaaacaaagcccaaaattaccatcacaaattcttcaacttcaacaacagacac

SEQ ID NO: 99027 - DNA, 417 bp, Glycine max
agaagcaacaactatactctcattgaaagactgagagagtaaagaaaaccctaaaaccctagaaattcagaattcagctgaagaagaaggaggaaccaatggacttcgacgagtacgaatacctggagaagacagtggaggaagacatagattcctccaagaagaagaaggacgtcacctcctccggctcagtctccaccaccagcttccactcccccaccagccccactcagctctcctcccactgcctcccctcctccttcatctccaccacccgcatctcctccccctgcctctcctcctgcggcatcttcaccacccgcatctcctccccctgcctcccctccttcggcatctcctgccccagccactgctcctgctgcttctactactcccttttcaccaccaccaggcaac

SEQ ID NO: 99028 - DNA, 299 bp, Glycine max
ttttttttttttttttagagaaaatttccattgtattcagtttccgttttttgaaaaactgaaggtgttagcacaaccactataactcaacgaggtagggtgaaatacaaaaggaaacaaaaccaaatttgatccccataataattaaaagaaaaagaataaaataaaagcaaacccgaaaattttgagtcattaggcagagagaatttcccacatgggtaagcacacacactttgccacacgtattccattcacagctgacaaaattaccctttctttttgagaccctttgttcgggg

SEQ ID NO: 99029 - DNA, 253 bp, Glycine max
aaactcaaataaaccatataaagttatttggccaccctcgtagggaagaatagagagaatacccaggggcaatctagcagctggcagaggatgctgccagtaggattgttttaacgatgtaggccaattaaatctatacatttttaaatcaagaatatactcctaccagctacctcttactaatgattcatagcaaaagtaaggagggaaaaaaaaaaaaaagggcggccgctcgcgatctaaaactagtctg

SEQ ID NO: 99030 - DNA, 236 bp, Glycine max
atgggactcaactgcagtcaattaagactgggaaacaatcaaaatgcatacagagacatatccgtctatcaaaaccaaaagtaaagcacagaaccaacaaaagtattgtaatgaattaaagtttcctaaaacattcataaagcaaaactagcaaatcaagcattcaccctttcctcctccaagattagagtctttcctgttggttttgccaataaatctgtgtactcttggaatgg

SEQ ID NO: 99031 - DNA, 419 bp, Glycine max
aatacacaagatgggtcaggttatgaatacaaataaagatggggaaaatattcaatcttagtaatacaaaagctaataattctcttacaaataaatcaaattgaagacaatggcaaagattgacagatcgtaaataaaagaaaagaaaacaagaggaaaaaaaaatcagacattttcccaacaaacagatttgaacaaaaaggacttacacagaagatacagccttacacttgccaattcctgacttgaagttatgaactttacggacaatgagcaatttacgatctgttgccaaaactatcatgacgcaagaggagatatgatcaggccaaataaactctaattttactcaagagtccctctcccatccaccagtttaaaaccattgatcatggaagttggcacgattatttggtgga

SEQ ID NO: 99032 - DNA, 288 bp, Glycine max
gtaccaagtgacccttatatgaatatgaatacatgactctacgtaaactataaacaaagatcgcattatcaatccaagcgaaagaccacaataacacagcacattagtgacaagtatttctgtaagcaatacataatcggctaatagctgtacaatactgtcactgtttttaccccctttatgaagtaaattggtcgcttccctataagcacaagacatccaaaatcagatagggattatcactaaaactggaccaataatatccaacatctttctgcagcgtgatga

SEQ ID NO: 99033 - DNA, 307 bp, Glycine max
ctgaaataaatgaaatgtcaactttaattttgaagatttaattactcacttggtttttatacttatgtaatctttatcttttagtatacacctagaaaccactcattttagttctctgagagcaaaaactcaagtttatggcaatgacacaacattgaccatgtctgtgctttatgttttatagccgttaatatttgtgctatttttacttgttggtctttatatctaaacaatgtacattttggtctttacgcctaaaaatatacatctgttccctacacttaaaaataatgtacgttttagtact

SEQ ID NO: 99034 - DNA, 294 bp, Glycine max
agtactagagaacggacattatttttaagtggagggaacaaatgtatatttttaggggtaaagaccaaaagggacattggttaaatataaagacccacaagttaaaatagcacaaattttaacgggtataaaacataaagcacagacatgggcaaaggtggggcattggcataaacttgagtttttgctcttaaagaactaaaatgagggggttctaggggtatactaaaagataaagatttcctaaggattaaaacccagggagtaattaaatcttcaaaattaaaggggaca

SEQ ID NO: 99035 - DNA, 202 bp, Glycine max
ttttttttttttttttttgttcaattcaattctatttatcaatcttttgactgtctgtacagttattatcccctctcctgagtcaatttgaatctctctccacaccccacaatgtctacatccataacacaagcaataaaataaaaaaagaactctaatcacataccctgtacaagctagtgtgacaatccctctccctccc

SEQ ID NO: 99036 - DNA, 516 bp, Glycine max
cgtactttgagggcagtcgcagctctgcctctcccaactctgcctttaatcagatacgcaagagctctgaaaatgggagttcaaaccattcggtgggtgatcacaatgcggaatccggcacatcaaatggcaaactagaggcattcaaagatctcactatctgacaaagttgaacaggggctaaaaaaatggtttgcaagtaatacctagtttggactttggatgcctggtaatccaagctgcatttgaatccccacctaaactaggctgcagttcccgacaaggttcatactaagttttggtgccggtgttatcaaattctgaacacaagtcacggatgtattttcttttcacgagttctccctctccaaacttacatgtgttcgttccatttgcaaatgtgtataattttaccgcaattatgttttagggttgaattttttattctcacccttttttttcccgagatgtttagagagaaggctccaaggatttgcaatttagtccaagttttac

SEQ ID NO: 99037 - DNA, 381 bp, Glycine max
aatccaacttcaaaaggctttgaaattagactaatatctgaaccaagtacaaatccacttgtctgtaaattccatttttaatcataactcttacaagttttcttaaccatcgggagatatttcacatggattttaaggcaaaattctcacattaaaaaattattacatgataaaaagcccaccaattaggaaaagtcctacatgctctcggggtgtatatgtgctggccgaatgcaggaccagaaacttaaaatttctttagctctccctgctacctaaatagtaaaacttggactaaattgcaaatccttggagccttctctctaaacatcttgggaaaaaaaagggtgagaataaaaaattcaaccctaaaacataatt

SEQ ID NO: 99038 - DNA, 91 bp, Glycine max
gtgagacgtgtgctactgctacatcataattcccatcaaatttaattatcgatgggttagaatttcattaatttatgattttggtcgtgct

SEQ ID NO: 99039 - DNA, 150 bp, Glycine max
tggtcggcgtttgttctttttttttttttttttttattttttttttttttttttttagcacgaccaaaaggataaattaatgaaattctaacccatgggtaattaaatttgatgggaattatgatgtaacagaagcacacgtctaacctt

SEQ ID NO: 99040 - DNA, 343 bp, Glycine max
ctatcagtctcctcctcctccatctccagtttacatatacaagtcaccacctcccccatcacctacttatgtttacaagtcaccacctccacctgtgaagtcacctccatattattatcaatctccacctccaccatcaccaaaacctaagccaccattatgatgatgaaccaacacctggaaagaagcttcgaatatgagttctagtcaccacattgtaatgtttatagaatgagatgagaattccatttatatctgaagataatgtattagcatgatctatttttcccccttaaatagaaacttattcatgttttttatgaaaataaatagcattaaggtc

SEQ ID NO: 99041 - DNA, 203 bp, Glycine max
gcccaaaaccgggaatatttcatatcaataaggattgggggaaaaccccaaaaatcccacattcttttgggaaaacaggggttgggaaaaataaggggaaaggggtttaggaaaaaacaattgcccaccaagcatgctaaaacatctaaaaattccccacccggtttttgaaacacccccattttaaaaatttttctttgggg

SEQ ID NO: 99042 - DNA, 388 bp, Glycine max
gcacgcaattctccttaagtataatattaacaaagcatgagtttattacagttatgcaacaaaacgtgtataagtagacaattcaattttacatcaaattcaagagcaggaagtttgtcccatgctcatgttaacagcttattcttaaacaatatagaaaatgcaaagaccaaatggcagtaaaagaattatcatcctatccagacaatgcaaagctctcctgagtccagtgtggtggatccatcacagcacagggatctgatttctcaaagtcagcaaccttttcttgacatttaggacagtagtgatatttatgccaaaggcaatccattgaagggcaaagaaagcaaactccaagcatcatcggcacaaagcatccaacaaatgc

SEQ ID NO: 99043 - DNA, 320 bp, Glycine max
tttgtttttttttttcattctttttttttttaatatcatctttgattatgggaaaagcggattattttttcattgagttttgatttagttcttagcttctgcttcgatgccttcaacatgtcaccctagtggcaagacaaggctgctggtttcttttcttgctctggggtcaagcttaaagaagcgaaggagtcagcaggaacattcgttggtgaggtcacaaaggatacaaagagtaatgtggctgaagtggcacgacgagttggatcgatggtgaagagtcggtgggcacttcctcaacagccatccacaagacatgc

SEQ ID NO: 99044 - DNA, 372 bp, Glycine max
gaaaactcatgaataatatatgtattttaaaattttaatgttaaatattcatgacatgatttaataatcaatctttgattataggtccatgtatgtttaaagttggcattaaattttgagataaacctctaataatgaccggaaaacaacactaaaaacggtgaaatttgttgcatattgtctttaatccataccctttgtgagataaaaggctagtgcagcggggctccaagttggatggatagtctttataagtgcaacaataccagttatgtgggggcatggcatatggaagttcctgactcaatgttgaagttaaggggatgtaaatctgactcatcttcatttgcagcatcagataccaaacgggca

SEQ ID NO: 99045 - DNA, 363 bp, Glycine max
aaggagttcaaaattttagtgcttcattggatgataaatgcccttcacctatgttattacatttttaaatgtaacaaaacatgtcacaaaattatgtttacctactaaactgagtttgaatcacccaaacagaaaattatgtataaacgttgaatttccttgaacgacaagcgagaaagtctgcatgcagagtgcaacaacatcactactaattaatcaaattttatagcactaaaaataataataattatagtgatagtgcaacttaacctgagtaagtttctccaataatatgtggaaattgttgctttccttctctagcaattgtaggattttaagaccacttgttcgagtgccactttt

SEQ ID NO: 99046 - DNA, 479 bp, Glycine max
aaccattaacgtaaaaaactattaaaaaattgtaattactacacagtacacacctaactaacttgaatagctgcaatggacaagtcagagtacttattcttacatgcattgcagctacctttagcaatgaaaatatacaaaattgtgcaatttcctaataaatacaaatttccaacaaaaaacagagggtcaaaaagactaccctctaagctgtaggctggtcattcaataattttctccctccctgttctattggccattcaatcaatacttgaatcagcaagattttggcaatcggttagcagtaattggctgctacatttcaataatttactatagtcctgcagtgatactggattctctttgcaggaatttagtgccctcatataagagagctcttgagagaatcattttctgatcattctgaaaatggttttttaacctgaggagtgaatggtggaacttctgagtactgaatg

SEQ ID NO: 99047 - DNA, 389 bp, Glycine max
gaactaactaataaagttaactaactcaaccgattaccattgggtgtttttcttaagtgcaaaaagatgaactttcaacacttcaagattagagcaaatgccacagagctcgagaagatttacaatgctaaatacatataacctaccaaagaaaacctcgagtgagtaacaacgtttttcccacctacaattactcgtaaaaatgaaaaccctctcattattttacattttgtcacacaacttttaacctaggggagggctgcgtgtttcaaacaatctattgaatgagtaaaattattcagtttttttcggagttctcataccagacatttcaatctgtactgcttaatctgagctttggaaagcaaaagctatcactagcagtatta

SEQ ID NO: 99048 - DNA, 442 bp, Glycine max
aacggttgaacctacaactgcacaacctgcagtttcttagcggaacgtatggcgttgtatccgaggcctccaacgacaggggaagagcatgttttgctaacattctctcccttttcagtttcataacaaaatatgatgagtagtatacattgcatttccgtacacaaaataaataattacaagagtaatacaagatggcatttcatgactaaatgagtcctaaagtaagcttctagcactaacaacgaggaggatttgcacgcagtgcttcaaaccaccaccaccaccaaagttgtaatcaagcacggagggccgcaatctcacctgtcactccatccactgcctcatcatttgcctccgtaattggctcttgctctggatcttttttttgtttcacaactacacacttggaagcactaatactggcactcttcaacaagct

SEQ ID NO: 99049 - DNA, 491 bp, Glycine max
ctgttttctagcttccaactatgtatatgtatgggccaaatgatgtgactttccttccacttattgatttaaagattacaagatttaattcttgttccccttaatgtgttggtttttcaattttggaagtctcctttgtatctattgtgtaatgtgtcgttttgcccaaaaagactgttcagggtggtgtatatctcccttggtatattatacccaaaaaaaatctcccttagtatttctttttcctctgtgcatatgtttttaatggaaatcaatcactctattgatgttaattgtagtctaaatttttctaccacatattgacaatacattatctattaaataaataacgatcatgagagttttggaagcctttgattatgtgtgaggtataagctattcttattatttttttaaagttaggtataagctattcttaggtctcttttcttcgttacaatttttggcttcccttggttttaatttctgca

SEQ ID NO: 99050 - DNA, 445 bp, Glycine max
aaaaatacgacttgtaaggttctccgtgcaatagataattaagctaattcctgtgcagtattaattctagctatttcctgagggagaagtgttggtaaatatttgtgttttaatttaaaatttataaatatatattaattctatcttataaaataaaatatttattttagattttcttaagattttgttttaatgagtcaaactagtttgttagatttgttttgacaactataggttagtttccaacggtcatattttgtttgttgcttaaggtgatttgtgactatatattatctttccttatttctaaaaagatgacagaacaacagtctcatctttttctcccaaaattttttatttcttctcttataaaataatttatttcttgagagtaagagcattggtgttcataaggttcggggatcctttcgctgcacacgatcgg

SEQ ID NO: 99051 - DNA, 431 bp, Glycine max
ataaggtactctattaggaatagaacaaacaaaatataaagcttcaccaaagtgtttattttattgtttttatgttttatcaatgagttataaataaagagacaatcagtcaatatgtaacaacaaaatacttgcagcagtaataataacgttaaacaataaaaattaaaaaccaaacaacaaatgtcctgattttaaagacttgtgttcacaggatcatttgaccaagtaaaggatagttttctaatcatatatgaatgaaattagaagtatgcttttagtttttcacataaactaattctaaaagcattttctcttcaaaaccatcattaatgaagaaaatatattttaaattttaaattataagaaaatatttttcaacaatctctcacttatgtaaaatttaaggaaatgaaatactatagtaaaac

SEQ ID NO: 99052 - DNA, 221 bp, Glycine max
tttcttttttttttttttggaataaaccccatttccatctccggtggatatggtggaaaacattctgaattccagagtaaaaatcatggaatagacaaagcacataaacacactaccaaaactgagtattcactcacacacacacacacatgcctctaaataaaactcaactggtacgaggaccgactctgagaagagagtactggggcattcactctggc

SEQ ID NO: 99053 - DNA, 429 bp, Glycine max
gattcattagggaaaagagatcccaactagttcgaaatttgactagaaagtaaaaattaagaattgtttccgccaaagatgaaagtacttcaactatttaaccttaacttcaacacattaatcactcgtgttcaattacttgattttcaatcaatttaaataaaagcttgtagatccatcgagtttacatggatatcagctttttaaactgatgagtgatgaggattcggccggacaacatccttttcttttccttctaattcaagaccctagaatatcgctccccgtccccccctaaaaagaagaaaaatagttctcaaattcagacacaataacatggtgtcatgtgatgtgggtctaacaaccacaatcgaggaataaaaaacgcctttaaaaatcaatttatttacgcaaacaatagttcatatc

SEQ ID NO: 99054 - DNA, 469 bp, Glycine max
gtgagatcaatcctgttttaaatcccagagctgccggccctgaaggatcattgatagcaatgcctggttcgaatcaaggtagcaacaatttgactctgaaaggatggccactcacaggcttggagcaactacgttctggtctactccagcaacagaaacctcctttcatacagtctcctcagcaatttcatcaacttccaatgttgacaccacaacatcagcaacagttaatgctagcacaacaaaatttggcatctccatctgccagtgatgatagtagaagaatcagaatgctgctgaataataggaatatgggtgtaactaaggatggtctttcaaaccctgttggtgatatagtatcaaatgttggatcacctcttccagcaggtggccccgcttttcacgcagtgatacagatatgctaatgaagttgaaactggcgcaattacaacatcagcaacagcagaat

SEQ ID NO: 99055 - DNA, 389 bp, Glycine max
gatgaaataatatacaactcatttatgcattatgtagtactaatataccagcagcatttacggacttgatacaactcacgtaaaacacattttcatctacactaagggctttattatattaaaatactggacatcaaagtttccactaaaaaggaaacattctatacccaaatacacaaaggatctggaaaactcttacaagggaccattcatgatcagtaaaacacaggagcactttacgtagactttggagcttcactcgtatatatcaagcatttattctagagattgactattgaaactgcaatgacttcagcactggacttcatgttaccacctgaagggagcataacgataggaatgtttttttcacgagcaaaccggaaaac

SEQ ID NO: 99056 - DNA, 348 bp, Glycine max
gaaatcgaaagacaagtatgaagttgtgcttaaggctaagccatttgcttatgcttcaaagaagcattttgaagactgctacaagcccaagccttcaccaactccttactactacaagtcgcctcctcctccatctccagtttacatatacaagtcgccacctcccccagcccctgccgcagatgactatgaagccatatagacacttctgtttgtaagtttgtctcatttttactttatggaataatctcatgtctgctataagtttatattgggagtcggaagaaggaaataatttattgtttgtattcttggacataaagctcgtaattaatcatcaatttcaat

SEQ ID NO: 99057 - DNA, 394 bp, Glycine max
ctttttcttatttttgctggacatccattttttcattaatataactgctagatgttgcagtttttttgaatatcttcccagtctagaaggtatgttgtcttagcttccttttaagagttatgtgagttcaaatatcttccttgtgagatatggcttcagctctgtgcatcattataaaatttcactgacataatcactttgtgtatattaggactgtaagactacttaataagtatgagctacttttttatttcctatctaccacttaataagtatctggagctattacaacaaatgcaaaatcttcctcctccattagttgagttacttttttatttcctatctgtatatacaaagattttatatatattcataagatatatgatcctatgca

SEQ ID NO: 99058 - DNA, 247 bp, Glycine max
aaacaaaaaataacctttagtgctttttattaatttttgaatcatcagaaatatgaaataatcatgtttattaagtaccaccatttgacaccaaagatatatatagacacggtggtgaattacatgatgtctaataccaccgtttgaccctataggtgtggagtaaaagaaatacattattggacctctcaataaagacattactaggtgggcgacgagcccgtatgtgatctgaagttctgaacta

SEQ ID NO: 99059 - DNA, 483 bp, Glycine max
cttgtataaacttttcatttttttttctcaatcaatcattaggtgtaatcgttgaaggttcgactcatactaaaaataggattaagatcacgtcactgctgctactgctctattatttttgtccgatacattgcaacattaacccaacaggcaccccgtttatatagtctctctgaagaggacgtggaataccagattctcaaatatatgcttcacgaacttcctcactcaaaacaaaaggcaccccagattctcacttgaacgtgacaccacgtaaaacacacagttttataggaacttgactcctgcaaaaaatacagaaaaacttattgctatgttcctttctgagtgacgaaaaaaaaacttcaaacttatttatttatccctccatttttcattgtttaagacaaatttttaacaaatttcgtgaatatgacgtaaatgtaaacttatccgaaaacaaaatgcattgaattacaaatc

SEQ ID NO: 99060 - DNA, 288 bp, Glycine max
aataattaagaaccgaagtgtatatcatccaattttctcaaagatggataatgtcttttatattattttctcccttgtcaacagccaggtgggataattatgaatattcgttcataatcactatgaatgatgaacaggttgagtagtgcgtcgtccatgttgcgttccttgctcacgtacctttacgcgaagaccgccgctaaaagttgcagtgaggcctggcgagaaacgtggggtaactgcgatgatgatgatgcggtggtggagccgccaattcgatgtggaacc

SEQ ID NO: 99061 - DNA, 127 bp, Glycine max
agaagaaaaatatttactaataatattattgacaaattaatgaatagctttgcttcaatcacttttatttacacaataaattgaagcaaagctattcattaattgactaataatattattgacaaat

SEQ ID NO: 99062 - DNA, 332 bp, Glycine max
ccaaaaccctaatccttcgtcttccaaggagatggctgattctcccctcgcaaggaactcaaggtcaccttccccatggaaagctcagtcgagatcgagatctaggtcaaggtcgagatctaggtcgaggtctaggcctagacaaaggccaagatcgcgttctagaagtcgtggcaggttagtgacaattgttgtttagtttgagagtattgaggcaggtgactatgccactcaaggttttaaattgtgcactatgattactgaaattatgaaaaaaattacggccaaatgtagatagtagataacattttttttattatatatatatattt

SEQ ID NO: 99063 - DNA, 447 bp, Glycine max
caagacgctcaatcttgttcattcatcaaaacagcaattatgctatctaacaaagtaatgaacccggtttatgatgtacgactaaatgattactcaggcatcccaactctgagaaatataaacaaagcataaaactgaaataaattgactcaagatcaaggaaaaactctcgtagtagtagcccgcaatgtaacaaaaacaatcaccaatgataaagcatataggttgattcttttaatgatattttgttggtggctatgtaggatttactttctccaatctggaaggacataattgattctccaaactgaatcagaagtctttggtatataccagatgttcaaggagtcacaattttgtatgttttctaaccatcacaaattcaaaacacacgacgatggatagcttaacctgctgcttggaaatcaccaaaatcatcatctggta

SEQ ID NO: 99064 - DNA, 287 bp, Glycine max
ctcgagccgctcgagccgattcggctcgagattccaaacatagaagatgttaagctgcaacccatgtgtgagacaaattgtttgcaaggatagctacactatcaacaactcagtataaattggaatatttatttgggagattttgttctactcctattcacaaaatagaggtgggtgagaattacacttgtagttctgagcatccattggcaggttagaatgtgattcttgaactcagaaaattatattttgttcaaacttattaagtattaagcttattttccatc

SEQ ID NO: 99065 - DNA, 466 bp, Glycine max
tggagtggggggttgttttgatttgtttattttttatacggtgtctttggttgtgatcgttgactgccacgactttgttataattttgcagttttttttttgtaagaatttttattctgttaaattctatcatcaggagctgcgctgttcccggggaaaagcatgtacagtatgaacactaaatgcagtgctggggattgccaattgatgtcatggtcttcaccattgccaccacagtttctttgaaactgctcaaggtctagggttctatttaacttctgcacctgagcttttatatttaagagtgtttatagatattgggctagttgatagaaatggaagcaaaaatcgcaaaggcattggatagggttgcactcaatctgaagcgcaagcgagcgacccgatatgctgcacatttaagtggagcttcacaaccaatgttagggcattggtcatcttttacgtc

SEQ ID NO: 99066 - DNA, 550 bp, Glycine max
  unsure (1)..(550): unsure at all n locations
gttgataagagacagattgctgacaagtcaaaatttgcggaggagacaagtacaaatcacaaatatgctatgtcctttctgtagaattgaagaggagggcgcatcccatttattcttccactgcagtaaaatacaacccatctggtgggacactatgtcatggctgcacattaaaggtgctttcccattaagcccaaagcagcattttcttcaacatttgggtgttcaagttgatggagtaaggattaacagatggcaatactggtggttagcctaaacttggtccatttggaagcttagaaacagtatagtgttctctaatgcaacttttaatgctaattcattgtttgaagatgcaacattcctactttggtcttggcttaggagtttcgagaaagatttcacagtccattttaatcaatgggcaagcagctttacacaaagttttatgtatcagcagaggattacatagttatgagcctaattcatgtaaatttcatatganatctatatccatagattggttccctttaaaatatgaatgtctgat

SEQ ID NO: 99067 - DNA, 268 bp, Glycine max
aacaacaaataaatgctaaattttctattgcaaatatatcttgcatgctaaatataaagcagacactaagatgtaaacattgaacagaacaaattttcaaatactacactataataacttatttttatatacaaaaaataaaactgcaggcttaagctctgatattggtgaagattcttacagtatctaaaatctttctattccatttctttttaattttctcaattcacaattctttgaagccaaatctctaacgtatccatttttc

SEQ ID NO: 99068 - DNA, 280 bp, Glycine max
ggattgggagaaactttacatgggaaacatttttttcacttggggcaaaagttttgaagccaaccatataaatcccaacttatagggaatttttaaaaaacacatgggccccctttttgattacaaaggagagatgccttattccgaaaaagttataaataacatttcacctgggatttcaaactaatttaaataaggcacatgtttaaaaaaaaataaggaaacctctcaaaacatatgggggttctacaaacaccacccacaaataacattttttttt

SEQ ID NO: 99069 - DNA, 137 bp, Glycine max
acagggcaacataaattgtaggattcaaataaaatggagtatcactagtgttatctgtgacaagaaaaagtacagctcaaacttgagaaaactccctaaaagttttgactaacaatgtatgaccaccatacaaaaca

SEQ ID NO: 99070 - DNA, 347 bp, Glycine max
aagcaaaaggtcttttgccctgatattattacatgaacaaatcaccttaaagttgttgtgatttatagtgataaattttagttgaaacaacttattacatttacaagacaaaaagggcaactgtgatttacacttttgagtagtatactgtctcatgtatatatataaaaaagcaaaagggggaccaagctgtagaatgagaatcctaagaacaaataattgcactaagaaaacgtggcacatttcaccaagcaaatcatataaccaatggcctgatatctacggaaaattcatgcttctggaatgggtgggagtagtttctgagcaaactgaagatgcccatgatt

SEQ ID NO: 99071 - DNA, 263 bp, Glycine max
ggaaaaaaatatttgcatccttcgtcagtgccaaaccaatacagttcacaatgcaataattaattttttccccgtcatacctcatgctctagaggacaatacagtggcaacagtcgtctaacctcgcaaaaacgtcaagccaatcaaatacagtgaaacttcagacatacataattattctaaagtagattacaatgtacaaggaaaaagagaaaagagcaaacacatgctgccagaagagaagagctgaggcttcactaact

SEQ ID NO: 99072 - DNA, 128 bp, Glycine max
cttaaatttattatcttattaatacttattaagtcttctatttgattggggaacatgccaaaacaaaatttgattgaatggattgcatatggtaatcgaagtttcaattagacgagtacattcgacct

SEQ ID NO: 99073 - DNA, 328 bp, Glycine max
ctctggagatcttgaactgatgctaactctcaaatgtatctcatagttggaatgatgggatttcttgcatgtaaagtttctgtggtgttagctgcatttaagcctattacactaggtccaaagttaccaagtgatatgtaacattgtacttttttgtcgtttgtgaagtggtttaatttttaaaccaggtgtaacttacaattatcaataccgcgaccattatagttgtatagtgctcattttaagtgtttcttacgtactctttggctggaaaggaatggaaaaggggaatgagattttgataaaaaaaaaacctgctacttaaaag

SEQ ID NO: 99074 - DNA, 280 bp, Glycine max
cagtaaggtagatagtaatgtaacatctattgctcaaggttacaacaaggtctatggcaattccgtgttaactaaccccttattcaagcagggaaatgatgtgccatttgtttcacattcctataataatggaggagagcactatcatatcctttggtggctgtgacgatgatacaactccctctgacttattcatttctgactatgatctgttgatgtgtgaagcactttcacataagtcagaagctgtgaatgtgaaagagttggctagatctagttc

SEQ ID NO: 99075 - DNA, 269 bp, Glycine max
aaaaaagccaagtacattcatgttttaaccattgacattcatatgtatgcatgatcccaatttactggtttcatttctcactatttgttccctatatgcgagtgcacgtgccccctgattatgcggttacaccttgctaagcataaagaattcaaaagaattagcttatcaactaaaattacatggcacaggagggaaacttaaacctggtagtgaactaatgccaacatacaaattcagtatttgttttcctttgaaaaatttgcaaa

SEQ ID NO: 99076 - DNA, 391 bp, Glycine max
aagtcccccagcaccacttgctgacgattttgcttctaccgattcagaagagacaccatgaccagcaccaagtcccaatgcgaatggtgcacactcatactataggcaagggaatatgtggccaagtattaatattggactcgctattgccattttgttatctgtcatcgcttgacacttgcaacagctgctatagaagtctcatatgaagaacatggattcactctaattaagcggtggtttggtttgcaaaacatataaaatcagttaaatgtataaaactgaataacgaaaagttatatttatccatatttttttatttattttatttcgttctttcttaatttgtattgtgatctttgctcaaaaatattaatgatacgagtttttg

SEQ ID NO: 99077 - DNA, 257 bp, Glycine max
tttttttttttttttttttttttttttttttttttttttttttttttttttaacgggaacaccctctttttgattttgattttaaaaaacacattgggggggcttacttacaaacagagagtacctgtttttagtggatcccggtaaaaatttcaaaagaacattctattaacaaatttggggggagaggggagaaacccccagagttagagacgtggaaagttttggtttttagacatattttaagggcgacggtc

SEQ ID NO: 99078 - DNA, 244 bp, Glycine max
gctgcgatgacttagctcggttggtgttttctcactaattaaggaagaggcctgcaatgcaagagacgacttgataataaccaacgtggctgttggtatgcgtcctgcatttggtcaaataagttgtagaaattctaagtagtttactgagccagcctttcttcttctgctttgttctttacatgtttgtcgctatacattttaatgatataatatagatgctctctgttttcaaaaaaaacaa

SEQ ID NO: 99079 - DNA, 386 bp, Glycine max
ggcaacaactttcaaacattacattacatctttgaaattggaaaagggaggacatattatgaagaatgcaaatgatagcaactaaccttataattctcttttgcatttctccttgattttgcaagaaaggcaatttgtgtacaaaagggaaaatgaaaaagtatacactatgtagaaaactgcactgattatgcagaggggagtgattaaaacacgttattgactctttcactagtaagtgtcagtacattaaaaaaacttgactgtacaacaaaatctcacaaaatacaaaatgccctgaagaacaaaaaactcaaaatttggtttttcagtacctcttgttaaatgtcacctggaaattgagaactaacagcaacacatggggc

SEQ ID NO: 99080 - DNA, 208 bp, Glycine max
ctagttctagatcgcgagcggccgccttttttttttttttttgataaagcaattaaccaagagaaacaaatgcatgaacaaatatcaagaaacagggaagctccctcccaaattcaaccctatacaagatatcctatgttacagaatgtgcattcaatattaaggcaaagttcatctattaaaaaaaaaaaagacgcacaaaaagata

SEQ ID NO: 99081 - DNA, 441 bp, Glycine max
  unsure (1)..(441): unsure at all n locations
attattggataatcgtggttttcattatatgatgtcacatatgctatttaacgaatctcatttattgttcagtgagattcacccaataatagaaaacatattaaacaatatactatcagttgtgttgttagcattcctcaaaaaataagaaatgttaataccacactctaacacttgcagcagaaacagataacataacacatcaaattcttgacatcagcacaaacaagacccatggttgcatgtggaattggatgtttcaataaagcatagtcttctcctcttgcttgcatgtgatgttcttggtgagaaanncanngaggcagaagccttttccatcacagaacatagtgcctggtgaacagtacttgcaagagcttggcatttttcaaaatcaatattattaatgttttctttgcaacaagtgaagacaaacacatt

SEQ ID NO: 99082 - DNA, 215 bp, Glycine max
gggtttacatgttttgcctaaaactaagggcacgagatagattaacatatgcaactttacctaagcggagagaacatttttgcaattaaaattgctgcctaccaaatcacaaggcaacatcggtggaccaagacctctcaatatatatatgaatctcgacacaaaggatgaagggacaggcttttgatgtacaagatttaatcaaactggtccca

SEQ ID NO: 99083 - DNA, 370 bp, Glycine max
tttcttttttttttttttatttatgttctattgttttttttaccgcccacagctcggggaaaaaaaagcaagactttgttaaccgatcaccccgtaaaagaaagaaataaaaagccaacccctgaaagaattgaaaaggaattacatttcccatgaattctttatgaagtagagacttccaatgtttccctcactggtttataattatcaacctatttctctataataatattatgaaatatggggggatgactgggtgaggcttcaccgaaggaactcacatgggggacaacctacaaattaaacacaaaatttttgaagcaaaagggagacttgtttgaatcaaatctcctacaagcccaacagaaaa

SEQ ID NO: 99084 - DNA, 255 bp, Glycine max
aaattcttgaataaaatagcgatactccgtggttccccaagggaacgtcttatttaaaagcccatatatcaactaatagccatttggtcaacgggggagaggatgcacaatggccttgcccatagccaaatcaactcattaagatctcaagcgagctgcttctaccacttgtttattgcctagatctttattccaagcacaggatgaaccacatttttcactgttttagccaattgaacagctgctccaacataa

SEQ ID NO: 99085 - DNA, 329 bp, Glycine max
cggacaagaaaccaaagggtaacggttatttttacaaatttcaacaagacttcatattgggataagaattacccagctaaagagaacatgttttctatacaagctccttgtttaaagaatcaaagaatgatcttttggtggggtattattttgaatctattatttgactgaggatgcaaatgtacactggcccatagaaaacgtttttaaggaatcatgatacacctgcaaggggaggggggcttgaaatcatatgtagtaaaaatttgggctcagaactggtatgggtaccctgaaaggcacctgaaatggttccaaagggatcaaaa

SEQ ID NO: 99086 - DNA, 359 bp, Glycine max
tttttttttttttttttttttttattgtattattctatttgcccccaccccaaaactggggcatgctaaaggggaacaactttttttgtaaatttgccaatcatggttgaatataaaaaacaccgggggctaaacaaaccactgggtcacgagcttttgggactgttaaaagcttaattacaaattctcagggtgttaacaaatttaacagaaactttaaagggtcgggggggcccttaaatttccccatttttaaaaacgaaacctctgataaactgggctttaaaagaaaaaaaccccccccatttaatttatttatatttgcccccttatccaatattgggggaaacacaacttcc

SEQ ID NO: 99087 - DNA, 257 bp, Glycine max
cagaaggattttttttgggttttggtttttttttttttttttttaaacaaaaacaaaagggggcccccttgggccttttgcaaaggccctgaaacccgcttaaaggggggctggtgttgccccccccaaccccaaaccaattaaaacaaccgggaccattttccgccccctttttaccaaaacaaggggcaagcccctggaaaccggttcccgaaaatggccccctttaattccccccccaacttcttttttttttt

SEQ ID NO: 99088 - DNA, 150 bp, Glycine max
ccacaaatcagctcctgtaattaaggatggtgattctatacaaaagggtagtactgaataaaacctaaagatccctaaccccaatgaaagacttctaaggattgaagacaataatacactggccaaatgatacacggattaagacacaat

SEQ ID NO: 99089 - DNA, 91 bp, Glycine max
gtgtgctgttaggatgcagtgtgcttttatgatgctttgatgaatatgcagtgtgcttttttaagtctattattttcttttattctctttt

SEQ ID NO: 99090 - DNA, 91 bp, Glycine max
aaaagagaatatatgaattttttagacttaaaaaagcacactggatattcatcaaagcatcatcaaagcacactgcatcctaacagcacac

SEQ ID NO: 99091 - DNA, 398 bp, Glycine max
aaattgcataaaatgtttttcttcagggtatgtattctaaagtagtttttctttcgttttttggttcattctaaagcattccatttattaacttttatttcgaaattgtgaaaaattaaataaattaatataagatttaaaataactaacataaatcatctgcatcagttgttctggagtcttggtttacatcaatgttttcatgtagatataaaatgcattacattcctgcatttcatgtagaagtactaatagttttagatctttttgagatatgttagccgtacattttatgacattctctctcattggcttacatttacttgaaaacattattttagattcacttcttatgagtctgtttcctaattgtatagttatcaataaattttaattga

SEQ ID NO: 99092 - DNA, 272 bp, Glycine max
ggtaataatattttatgattatgtcaacaacttgatcacatatgggaaatgttctattacaacagagaaggaaaaaaatagatatattgttctatctacaatctctcttgaatttgaatatacaagattgaaaaagataataaacagaagcaatcaacaaatcgcacccacaagcaggtctgttaacacattctctgcaggggtttgaatttcagtcacgctcatatgcacaaattggaagcaatcaataaataaataagttggctttttat

SEQ ID NO: 99093 - DNA, 359 bp, Glycine max
gaccaaaaataggcatttctaaagccttgtttacacccataggtggcagttaggagcactgaaatacataaaagacaaggccagtatcaaattatggacaaaacaagaaaaactaagggatgataaaggtcattataaagaattctatgaagagtatgccaatgcaatcacataggctatttccttgttgaagtgttagcaaaaaactcccagatagcaagtaaatagacaaactctgaaaattgcaaatcctttttaagtctcctttctccggcgtaagatgaaactaccctggcaggcaaattctgctcccaggctgaatattcgtcaagagattgggcaacaatcttacattttat

SEQ ID NO: 99094 - DNA, 415 bp, Glycine max
gaaatcatattttattttttttgacaagatagagtaaggatgagacacacgattgatactaccaaaatccacaagatagagtacattgtttttaacacaacagaattctatggactaccattaagcagcaataatttctagatgaaagcaacccaggtagatgttgcagcaacaaccttggcaaaactagatgacaaagttgaggggagatattattaaagattgaaccaatttgtgcgggcttctactcccttgtctacctgttactataagccgcatactaatgtctaagagctcaactttgactattattattaactgggtcgctttgtttctccatattattttgagcatgaaatgaaaatgacagtatgttcctgtcagatttggagactggcagatatggagcttgcaa

SEQ ID NO: 99095 - DNA, 442 bp, Glycine max
  unsure (1)..(442): unsure at all n locations
attttggtttgaggtttattttctatgtttttgataatttaatgcatttgaatttgaatatgggtacttgcagagtatcatctaagttcaaggaaaaaatagcaaaactgaggacacaattattggagcctccaaaagtatgttgctatttatactatttatatcatattgttattctcaatttgttgatgattgatgcaagcttttgttatatgtctgtattctctaacttgcttattgaatgacacttatccttttgcaaagaatgagaaaccagattgcatatgcaaacaaaggttttaaattgtagttgcagttaaggcttggttttggttcataatcacagcctaatgatgcaacggctgtattccatctnanaatatggaaccttaccaaacaagccccacaaaaacatcttgaggatgctcaagggcaaaccctt

SEQ ID NO: 99096 - DNA, 230 bp, Glycine max
tgtacattaaaaaaatgttctattcattgttattgtgctttttccacgccccttccattttcgatatagggaaaaaatggctcaagggctgagaactaatgctttgtactaaatgttaatgttaattaacgggtcaagatgagttcctcagtgccatatagttggaatttccttttcttctcatgttttgggggttttatggtgggtcatccccaatataatccaccctc

SEQ ID NO: 99097 - DNA, 433 bp, Glycine max
ctcattttcctcttctttttcacttgctttttcaacaatctcctttcatgtttgtttcaagcttcaacaatcaagcgcgcccacaagaaaatgatgaaacttttccgttgggttttgaaattaagtagtgactttgatagttttgtgtagactgtactaaagggagagagaaacataagtttaagatggcttttgtttgagggtgaaaaggggggaatttgtgaccaaaaattataaaaagaagagggctttttcagctagtgaaggttggttttcttctacattgattgaaaggggttctgtaatggaagaagggttagggcataactcaggttctcctcatggtcccattgataagtccaagattctggatattaaacctctgaggagtttgattcctatttactcaatgtcttctcaagctccacctgct

SEQ ID NO: 99098 - DNA, 68 bp, Glycine max
ctcgagccgctcgagccggtatttcttattcagtgtttcgcattgaatcatatttaactagttggaat

SEQ ID NO: 99099 - DNA, 59 bp, Glycine max
aggtaaatatgattcaatgcggaacactgggtaagaaataccggctcgagcggctcgag

SEQ ID NO: 99100 - DNA, 237 bp, Glycine max
ggaaacgtgcacttgttagccgcatgcttcagtatgttcttgaccatgttgtgttgcaaatcccatttcctgacattgtcataaaacgaactttggaaggcaaaccctatttggattattatgataaatttgatcttagattcccaaattttaatttcaatgtatctcatcatggtgactatgtggccatagcatctgaacctgtatgtcttgtgggggtagacattgtctcctatg

SEQ ID NO: 99101 - DNA, 240 bp, Glycine max
  unsure (1)..(240): unsure at all n locations
ctaaaatacgtaaccaggcgtctcacagtcgccgtcctgtcaagagcgctaatgaacgttctcattaccacgcangagtaccgggagccctgaaccgcccgctgctcggcggatcccagctgcggtggcgacggcgggaaggcgctttccgctgttcctcagcgggccgggcccttgaccagcgcggcccgcaggtcttccttctcgccgtcttgcagttgaagagctacatacgtagtc

SEQ ID NO: 99102 - DNA, 230 bp, Glycine max
caacctaggaatggaaattcttgcttcctatgtttcagtagacggtcggtcatctgtgatgtgtatacacatctaaactaggaatgtaggtcatccatatgccatgcatagtagtgttaatctccaagagagtttctacctagaagtgggtacaccagcttacaatgtaacactatacggtcggtcatatatgattggagtatttatttaaatttgaatgtgattcgatc

SEQ ID NO: 99103 - DNA, 236 bp, Glycine max
tcttcttggaaatgaagctgatattgtttcaaatgggataacacgaattgaccacagcagtcttagtggtgttgggaactctactagaaatctgcctgctactgagatgccagaacaaggtaaacaggctcaggttattcatggtttgccagattttgctgatgtttacagcttcattggaagtgtttatgatccagacacagtaggagtcttccagaagctgaaggatattgatc

SEQ ID NO: 99104 - DNA, 209 bp, Glycine max
tgtagctcctgagctttgaatttggttgtttagttagcaattgctacatgggtaataaatgccagaatatgcatggaccatataattaacttgcatactggggttgtgtttatccatttcatttgctgaatgtataatgatcaattgagtgtgaaactgaacgcccgttgattatacttatgatattctatttgattcacaattaagaa

SEQ ID NO: 99105 - DNA, 123 bp, Glycine max
atagaatctccttatggttggtagctatggtgtcagtggtcatttgggaacaatgtcaaagacatgggacccattgccattgtcactataatgatatagtgattttggtgtccacacaacata

SEQ ID NO: 99106 - DNA, 174 bp, Glycine max
cagagaaaagagcctggtatgtgctttcgtctcgcttccttctcctctatctaccgatgtcctcctcctaggcctggggtactgctctctctctctcttcaccccaatgaatgatcgcgtctctatctcttgctcttgtgcctgcttacttggcataattcgagcaccaacata

SEQ ID NO: 99107 - DNA, 275 bp, Glycine max
ctctatactcgtattgcattgggaaaggctaagaggatggatgttgtgtggggggaaacagctggtgtggatggccaactgtggttattgtgtcccatacttttcacgttgcagggatttgaggcatatgttggactgttgttgctcaggactgcagttgttggggttgtttctgagtggcaggtaatattttgcggtgtcctgttggtcttaatggctgttgggaactttgcaaatacagtacagactctgatggcaaaatcaagatttaaggc

SEQ ID NO: 99108 - DNA, 136 bp, Glycine max
caacacactatgaagtttgtgttgatctctttcatttgataaggctgtttcaatattgtgtagctccatgttcaattcagagatcaacacactatgaagtttgtgacatacaaaaaacaaaaagaaaaaaaaaaga

SEQ ID NO: 99109 - DNA, 260 bp, Glycine max
gtacttttaaaattataagtaaatgtatcacaggtaaaggtttttcagggacaaaacggtactttggtgatttagggaaaactttgagatcagctggctccaatatagcttttgcagttgtagctgaaatatcggattctgttctgaaaggtgcagaggcgaatggtttcaatggattggtgagtggctttcaccaaggaattctaaaattggctatggagccatcagttctgggaactgcattgatggaaggtggtcca

SEQ ID NO: 99110 - DNA, 256 bp, Glycine max
aaaagtactgccactgacttgggatcccattgttgtgacaaagactcatcaatggtagcacagatgctggtttcctctaattcatgctcgaaattagaaggtggaatgtttgacaactctatggtatcagaatttgtgctgtatgatcttacacactcaagcaaaagtgtttctcctgaaaaaaagcgttacagcgaccaacactgttctaaaactctaaaagcttctcgtgtaggaatgaagggcgaaactttca

SEQ ID NO: 99111 - DNA, 187 bp, Glycine max
ctgagctaggagctcagcctataaatttcagaactctccagaactcaatgttctttgcacagtgcaatccaagaacagatagatttgaaccatttcataatctgaagccttgtatttttttgacgagtggagttcaaattagaaggcgtaggggggcgcgggaaaggaccgaaggggcccaccagat

SEQ ID NO: 99112 - DNA, 264 bp, Glycine max
atttgcaaattgcaatctttgcttggcccttgagaacgcgctaactgctaagttacgcgagggatgcgcagtgcgcaccctctatcgtctcttcttttttcttcttcttcttcttcttcagagtttagccagttgaattgaactagtaactttcttttaaaattaaaattagaatcattatcgtttatcacactccaacaacgcctttcgctcttaccaccctcgcgggtcattttcttgggaaaactcgtttccaccaagaaa

SEQ ID NO: 99113 - DNA, 258 bp, Glycine max
gctataaggaaatggaaagtgcatattcctagtgacactaaagaactttatgagcttgatttggaagagtatgccaagagagggagagtcagaattgattccactccaaccttgaggatcctcaacaaggcatgtgtcaacaccgattcaagtactagtggatggaagctaagccctgttacccatgtggaggagaccaaacaaatgctaagaatgatcccaatcttggctgctacattgatccctagtgcaatggtt

SEQ ID NO: 99114 - DNA, 261 bp, Glycine max
cagcaagtattctaaatgtcttagtcttaagaggggggagaaactggaattcgaatgattctgaatttagtacaagccaatctgcaaagtgagcatgatatataacttgttgtggatttctgcctcatcattgtgcatcatgtgagattaaaatggaagggttgtgtggagattgcttcaatatgattttgcacatgttgtgctgcaggaacttggagcatagcgtgtgctcaaagtgcatagggatggatttggatagca

SEQ ID NO: 99115 - DNA, 193 bp, Glycine max
cattcccatgcttttatgttgtagcaatgcttctaaagattatattaattcacgagtaaatctacatcttagtccttgatattaaagtgtcatttattttagaagctaagattttagaaatcgtgtattagttcctgaatttttaaaacaccaagtgaatgttaaacattgtatgagtgactttcgttctttt

SEQ ID NO: 99116 - DNA, 257 bp, Glycine max
cagttggatgcttcagtccttgaggagtgaagacagcgtgatgccatggctgaggctcgttttaagcgtcatgtggctatgctgaagagagatagggctaaaagattgctatataaagtagatgtagccattcacaaggccatggctgctctaatgactgcagaagcaatgaaagcttctgaggactcccttgttgaaatgaaagcttatgaggactaatctggctattcaaatgacttggcttacttggtcaagag

SEQ ID NO: 99117 - DNA, 254 bp, Glycine max
aggattctatggtgccgatgcgctaatgcaatttctgtggtagatgcagactggttaatcagcaaagatcaccagtgttttatttgttaataaatgtgatgctaggagactaacattgaggatttgatggttaaatttcacatatattcaataaccagtagatgttttcattttacaatcaaaatcattgtaacgagtttcactgaattttccactttgcccggaatttttctagtcaattatcattgatgcat

SEQ ID NO: 99118 - DNA, 246 bp, Glycine max
gttatttttagagctagtataagcttgtaacctattatgactttgatgaagagcaacgcataaccaatggccactgaatttttttccttatcttccagtgctgcctttactcttaggccttggccaaaagaatgagagagatcatcatcaattgacatggaatcatgtgtgcctccaggatttagatttcatcccacagaagatgcgattatcgggtattacctcaagaggaagataaactcgcta

SEQ ID NO: 99119 - DNA, 139 bp, Glycine max
  unsure (1)..(139): unsure at all n locations
ctgaatttctgaattctctgctgctgaaaaatgaaactgtatccaagggagatcgtgaaactagacctgcataatgcaggctaccttccacacaacatacgagtttacgagatngggatcaactaggacgaaactgagg

SEQ ID NO: 99120 - DNA, 186 bp, Glycine max
ctctccttctagaaacttcgcttctttcactccctgcacttcttccttcttcgccacagctcgttccctcctctgctccgttccgcggtggagccaccgcctccattccgcctctccgctcactccccgtcctcggatcagcgccgtcgccaccatggccaattagagaacacacacaaaactcag

SEQ ID NO: 99121 - DNA, 184 bp, Glycine max
tcccaccctattattccatgccttcttctcacgcaaaaaaggccttataaatcccacactacaccctgtctaaagccctcctctacactgttccctttcaccattccattttctaacttttctgactctgctcatggcttttcttttcttagcatcacctattctcttggtatcatagttattt

SEQ ID NO: 99122 - DNA, 196 bp, Glycine max
gtgatgcttaatcttctgtgatcactttcaagtttgagttagcatgcacagactaactacccgacaaaactgcgtcaactgcctgggatgtgttgaatgtaagattcctttgccaaactaaacataaaattccaactcatggttacaatgaccaagaagaagctaattggattttttttagggtacaatgctaatt

SEQ ID NO: 99123 - DNA, 259 bp, Glycine max
tcccacttggtgttgttcagcttggctctctaaataaagtgattgaagatatggagtttgtaactcatatcagaaatctttttttgtctactcaaaattactcaatcctacgtcctagtcaaatacagggtagtttgaagagctcatctgagctggatacattgaaggaaaatttgtcttcagatattatgcctacttgcttttacgatacacagaaatctatgaaaagtgaaacagcagatgttttaatgccccttca

SEQ ID NO: 99124 - DNA, 261 bp, Glycine max
attgaatcgtaagcagcggctaccctaatcctctcctcttcctctctactaatttcagctatggccgacgaagctgtggttgttccagatcccacccagatcgatctcaagctctttaaccgctggagcttcgacgatattgaggtaccaatttccatgtttttagggttcagctgcttattaaattatatcctaaaaatctgtgatgtgtattctgttctgatgttttttcgatgtgttcttatgtgaaatgtgtaatta

SEQ ID NO: 99125 - DNA, 255 bp, Glycine max
caagactcatactctcaaagcgccgcgccgcgccgcgccgtcgaactcaaatcaccctctgtcaaccggcggcgcgtcgcaggaatcgatgaagttgcctgaagaagcagcgtcgcaatcagttcctcgctcgctagagttttggattcgtgtgtttgaggaggttatttatggccacttgtatggcagcgattcaacgaattattcttgactcgtgaacttggcagaggtagtgtgaatttacgttcgaaaaat

SEQ ID NO: 99126 - DNA, 255 bp, Glycine max
tgagagttgaaaaacaatggatggcttgttttgtttttatgatgatgagtagtattatataataatttatgggagcagaaagacaagacaaaacaagagagaatgagtggcggatgaggaggagaagaggaagcaactctggagttcactccgacgtgggttgtggccgccgtttgcacagtcatcgtcgccatatctctcgctgctgagcgcctccttcattatggcggaaagtttctcaaagccaaggaccag

SEQ ID NO: 99127 - DNA, 249 bp, Glycine max
ggcgcgtgcttcggtgtcctcgaggcgatgttcacctttcgtgttctcgatttccaaggtttgatttgaggtaaaataagaaccgagaattggagttttcgaccttacctgctggtgaatgtggagttttgtaatgcagtttatcaaatcaatatccggttttttttagctctccagtggtgaatgtacttgctgataattattttttatgatattctattgtgatgaagttgatgttgatgttgagtt

SEQ ID NO: 99128 - DNA, 259 bp, Glycine max
gcgcgtgatcattatctatctttcaagtcatgcttaatttgtattctgtgaagtttgcaacaaggagcaaaatatatatgaagaaaagctagtcaaagggtggtatatatagtttgccttttttttgttctcaaatctattaggctgatgtattttccttctcttttttacttgtgtgtagttttccctgcctaaagtacgtacttagtctttttccagtgaaagaaataagcaaaaaaaaaaaggaattaccaaaatt

SEQ ID NO: 99129 - DNA, 145 bp, Glycine max
ggcgtgcagagaatctcacaggtgcggaatatgaagccatagacaagatactactgaacaaacacgaaatggtcttcaattttgtctctgcactaataacaacagtattgctctccggagccatagttgaagttaaggtcttcca

SEQ ID NO: 99130 - DNA, 257 bp, Glycine max
agcgaattaagacagtctctgaggttttgcaggtaagttttattaaattcagcatgataatatattttgagaattagaattttgtatttaggtttgtagctgtgtagagtatctcctcaaaagttatggaagcctggataatcggcctctctctataagattaaagggactggaatgcatgaaaggttctttggcaaaagcccgggttctgtatgctcctgtggaagagattgccagtgagggtcgtcttttacgtg

SEQ ID NO: 99131 - DNA, 247 bp, Glycine max
gatattagcaacaattccctcagtggtaaaatccctcctagtttagcaagatcttctaggatattcaggatcaatttgagcttcaactcactttccggatccattcctagtagtctcactatgtcccttctctaaccattcttgcacttcaacacaacaatctctctggttttatcccagattcttggggtggaactggaaagaagaaagcttcccagcttcaagttttgacgcttgatcacaatct

SEQ ID NO: 99132 - DNA, 214 bp, Glycine max
ctctgttcctcttctgggtctcgttactctttcagattgttgctaaatttggcagaaaaaagccacgtgtatttctgagagattgtgttgtgtataatgaggactttcgttgaggattggaacctggagtgttgggggttaaggaaaactagaaccgaatgatgcgtaaaccagtgtcacaagaaaagacaattgctttacgcatcattcggtt

SEQ ID NO: 99133 - DNA, 219 bp, Glycine max
ccaacatcagatcaagatataacaaaggcgaatgaacaatcaataaactcatcaatcaaaaaagttaaagttaagtgggagaaagctggttctgatgctgaactcaaactacaagcagttaattttatccatcacccaaaattcttgatgcaaattattactttctgttcctcatttcaatgggtcaatgttctctttttttggttacacttcttctgc

SEQ ID NO: 99134 - DNA, 111 bp, Glycine max
gtcttaactcaacaaccgaacttgatagatactgtgagtgtttttgttcctcaatcaatctaattgtcccatttctcttccaatggcgtcttctctttccacacaacatac

SEQ ID NO: 99135 - DNA, 237 bp, Glycine max
catttgcataacttcgctgatcacgcggatgcaccatctgggtctccccaatttgcgcctcgattcttggcgttggtgctactcgcggcgagtgtggcggtggatgctcaggagaactcggacgtgaagacgctggtgaagtacaagcacgggaagaagtactgcgacaaaggatgggaatgtaagggctggtcaatttactgttgtaacctcaccattaccgattatttccagacc

SEQ ID NO: 99136 - DNA, 104 bp, Glycine max
ggaataagcaagacagtgacaggtgaaccgatttcgttatcagaacaagaattcgtggattgtgacacacgatatagcgaaggatgcaatggagggacttatgg

SEQ ID NO: 99137 - DNA, 247 bp, Glycine max
ctaacgaccatgtgaccatcctcgtcaacatcgaattcagttggttcattatcggtgtgaccgtttttttggtttctttgtacttggttttggtaaaagtttatggggagaagaaggtggagtatttttcgttggggaatgaggatgaagagtcaaacgacgacgttgagtcacaaaagagcggtgcctttgatcacagcagcaaaagcttcattcaggtgggcaaaatcttttctcaaaatgacat

SEQ ID NO: 99138 - DNA, 244 bp, Glycine max
gcagaaggtgaattaactgaagaatcaaatctcaagccagattttaatcctgcaacaagcacttcttgttccgagacaacgatgatggacacggagtctgataacgataactcttcacctagggttactgatcacgtttctagtgggagctcggaacagctaaagcagagcaacgtttccattcttcatttcttcaaagttaaggataccggacaggccggtgtgtcttcttccgaagaggcaa

SEQ ID NO: 99139 - DNA, 241 bp, Glycine max
ataaaacataagagggtatgtttagtgtggctgtttagtgggtaccttgttgccctcataggaagtgataaacaattgcatggagtcccattggaatttttttttttgtggctgaagaaggtgaaaagggggcaagtttcactcttgaagggttttgaggggtgtcaacttctgtttggagactccgaggttgagtttgaaggctcagtgcttcaaggcagaagcttgaggttactaagca

SEQ ID NO: 99140 - DNA, 238 bp, Glycine max
tgggaatcgaatacggtttagatcgttccccacttatgaacacatcgggaatcgttgatgttagctagtttttcgtgacttcattcattccgtagtgaattattgttttgatattttttttctcgagaaaacttcactttccctgaaaatcattccgctctcctctcgctccgaaatccgaaaaggttaaaatcgcggattgaaaaagcgaaattctttttgaaacaacctgcacgat

SEQ ID NO: 99141 - DNA, 277 bp, Glycine max
catgtccttactccttacgatccgttctgcagtcactcactgtagttaatgcctcattgtgtttctcattattatttcctaactaacactcttgaccctgacttcttcacttgtgctttttagatcaacaaattaaagtattaaactttgagcttcagttttttgttcttgactacttgtaatttattatggagttgatggggggtggaaaatttagtaggtgttttgttgttgttgttgttggtgtgttgttcttagtggggtcagtggtgggatt

SEQ ID NO: 99142 - DNA, 258 bp, Glycine max
cacagatacttgattctaccgaaaaggctattgagcatagcttggcaagcaccggtcgtgccaatgtgcgagcaacggcaatatactcggagagttcaaagacttcttgcttaacatggcttgtgatgtttgtgatgacatgtgtgtttgtcatggttattcttctaatccgtgtcacatagtgtagttcacgtttcaccgggtaaaataaataacttccaatataactttttttctcaatctttaacagttttcctt

SEQ ID NO: 99143 - DNA, 245 bp, Glycine max
ctgttaggtgtttcccttttaattaatattacggaactgtgtatgagtgaataagtggatctgggatcttgtattccattgggttgtgattagtctgtgttatatttgggtattgtgctagattactgtgtcttgtgagcatggtgattgagattctccttacagtttttttgtacttgctagataacgtttattgacatggatcactgtttttgtatacatatgtatctggattttgttataaa

SEQ ID NO: 99144 - DNA, 253 bp, Glycine max
gtgccgcaaccgcgcctccgttgtgttactgttaccactccacgaacgtagcttttgataagtgggaatagtaatactccctttttgtttgtttcgccttcaattgtgaatcacaaacatagggatattgtatttgtggcaaaatgcgttaatttcgtcttcaattaaactaaacgcgagggtggattttttctgtgctcttggaactttttatttattttgtgcctctagacttaatattgtatatttattt

SEQ ID NO: 99145 - DNA, 251 bp, Glycine max
tgattagttaacataggaaacatttacttcacaaacacgagcccatccgaagtgtaccaagcataccttgaccagtttagtccatatttcaatctgtttctaaaatcacgcgcggaggaattattgcgtggtggtggcatggttctaagtttcatctctaccaacaaatcttagaaccatgccaccaccacgcaataattctaagatttgttggtagagatgaaacttttgacataataactcctgggggt

SEQ ID NO: 99146 - DNA, 262 bp, Glycine max
cacaattcaggcttcattaaatatttatgtgacaaagatgccgctgttcagttatgggagtcgtagtatggcacctcaggtaaaaaatgaggtattgatacctgttgagcaaaatagaagcattgatatcctggatattgccggtgatagaactttggtttctgatgtttcacggtcagctgttagatttaataaccaggtgtcttctctaccattagccgtgcatagtggtagaggcagctttactgcggctaattaacta

SEQ ID NO: 99147 - DNA, 124 bp, Glycine max
aacctccaatggtacagcagattcaagttgttctgccagaaatattaaatcacctggcctcattccattattatgactaaatttacacgggattcaaataagaaatgatgagtaaattttctga

SEQ ID NO: 99148 - DNA, 250 bp, Glycine max
ggcatcttgtgttgtgtccctgtgttaagctatttccttttcttaacacaattggttgtgccaattgccatagtcaccaaccaattaacaaaggtatatatatcatcatatcatcaccaaatgaaaaatattgggttgttttttcttgtggtggtggctacttttgtggtggcagccacagctggtagcttttaccaagactttgaaataacgtggggtggtgagcgtgccaaaatctatgagaatgaaa

SEQ ID NO: 99149 - DNA, 243 bp, Glycine max
taggtttcctttccgcgcctcctcctccacctgctcatgctcctgtccccaaaaagagtgatgttgctgaaagcgaaagggaaagcgataccgatggcgaaagtgagagcggaagcgtcgcaatatctagaaagggaatccgcagatcgtcgttggataaaagtcaacatgattattgtgatagcagccatcttccaccagtggtttcctcccaagctagccgcaaaagcagcaccagatcag

SEQ ID NO: 99150 - DNA, 243 bp, Glycine max
aacaaaattgcaacaacaattgagcttccgttgaagaaataattgttattttttttttcttcttcctggattttgatttttttttattatctaattgtacgttcagatgagtttgagtatgagcttgtgcggtaattacagtcttcagcttcaaaatcgcagaatcgtaagctgcaatcttcaccaggatggcaggcatattgttcccatcaatacgcaccaaaaaccttccaaacctgaaaa

SEQ ID NO: 99151 - DNA, 222 bp, Glycine max
gaaacaaagaagtgaaaataacagcaaaaagtaggagctgcagcagctcccccgaagcttatctcagcggcagactctgaaagctgtttgagtagcctcaacccggagaatagcaccaatgggagaggaggaaaacaaaccagaggaacccatggcaaaggagaaaaacccagaggaagaagcaacccaagagaaaaaaccggagcaagagttcaaagagga

SEQ ID NO: 99152 - DNA, 244 bp, Glycine max
agaggaggcaatgacggtaacaacaacaacagtggaagtggtgctattccaggttcaccgcagcttcctcaatcatgcactactttctccaccaactagctgaattttgagaaactatatacttaatttctctatgtatatacacaaattaaaagagaagattaggcatgctcgcgcttaatttactgtgtttttattttcttatatgtaaaacagattaagagtcacctctgattctgaatgc

SEQ ID NO: 99153 - DNA, 219 bp, Glycine max
gtgaagttggaaacaatgctagcttcttcgctctccttcctccattcttgcacatccccctcttccccttccttattgtcaatttcacctccaaaccccaaaccctctcacttcctacctttcgtggtcgaagccaaagacaggacccgcaggatagacaggaccggctgccacactcgcagcagaaagaaggacgaagggacgcccgagaggccgagg

SEQ ID NO: 99154 - DNA, 211 bp, Glycine max
gagtctgcatctagacgaaaacacaaggatgcatctagagatgggtctggcagttctcgtgaacttgaatacgaagctaaaaggatagagaaggagaagggtccatcctcgtctgatcagaggaaacaggatatgtcatacgcggaagatgctcctgcaagggaagaaggccttgcatctatggcagcagcaaactccatcaccaacaata

SEQ ID NO: 99155 - DNA, 226 bp, Glycine max
gatgtcagagagcctgaaagtatagtacattctggaagacattcaagtaaaaggtcttctttcttacgatctataagccaagagtcactgggagtaggaaacagtggccgccattcattctcagcatcatttggtgtgcccacatctgttggcttcatagaacctgcaggtgaagggcctcaagatcctccttcaacagctccttcaccaccagaagtgcctcttt

SEQ ID NO: 99156 - DNA, 234 bp, Glycine max
ctcgtattcaacttttggattggcaatagagttgtctgagacccgagaagacagcgggaatggattcctcatttaatttggcttttcttatcaatggaagcccatgcatgcacatagatagatgaaaagtgaaaactagtctcctctatatatccttgtcgttggttacacgtttggcctatagagaaaactaattttcaaaaaatgaatggtaaacataaaactggatcacgg

SEQ ID NO: 99157 - DNA, 239 bp, Glycine max
gtgatgcctcactattgtctctctcttgttctgtcttttctctccttctgatttggctatcacacacttctctaagggatagaggtttatgaataattttctagtcatggtgctggaaagaaatcttgttggtgaagccatcatgcactgctttggtgtcctcttcaatgttggccctcactagtgtcatctccatctccttgtcctcaatagtgaaacttccttgggataacctctgg

SEQ ID NO: 99158 - DNA, 246 bp, Glycine max
ataagttcaaaaaacaaggcaaataaggcaaaacaccggatacatcatactactgggtcaaaatcctttctagcagtcagctatgatgcacgtgacccagtgactggaaaggagcccgatttgcagactttttggcagttgacacacaaaagggacaacggggaatggattgacgaagcatctaaggaaatcaatgacaaagttgctgaacaaattaatgagaagagatgtcaaatagaagattct

SEQ ID NO: 99159 - DNA, 253 bp, Glycine max
gcacattcagggaatgagctcaactgggaacctagcagagtttaatgcagcaggaaatcgacaccgcccccatcatggactttatcatatgtggaatgggtccaacttgcatcagcaacctccttcaaattccatgctttggcagaaaataccatcctttgttaatggtgcttgttctccaggtcttccacagatacccagcttttctagaacaccgcctcatgtgcttagagcatctcatatagaccatcaa

SEQ ID NO: 99160 - DNA, 249 bp, Glycine max
aattaattcgcttgaacagaaaacagagatggggcttaccccagaaacctcggactaaagtttttaaggaacttaagctgagtggtcttaaaactgcagttcatgatgttgagttggacatggagaaacatgtcaacagattgggagaatgtagttctgatatcagttcatgcccaatgaatgaagatagttctcctcctgataccaagaagtacagtcggggtagatacatattgcagtttgataaat

SEQ ID NO: 99161 - DNA, 248 bp, Glycine max
gtcgcgcttttcagagctgagactgactcagaacaacttgcaatattgggaatagcatttacgatattggatgaactgttaccaaatgctgtgttatcaaggtggatgctgcaaagtgaaagcaaggccaaggaaccaaatagtggagcaacagagaatgtaaccttcaatacaaatgctagtgtagaattgaaggagtggaggaaacatcttcagcattcttttgacaaacttcgggatcacttctg

SEQ ID NO: 99162 - DNA, 254 bp, Glycine max
tgcataatgggcaccaccaagagataaaaaaaaaatgattaaaagctaaggcagggagcaaagcacactgcaagattctacttcttcttcgtgtttcgaaagcgaaggggaaaaaaatacatagcatcaatcatataattagaagtcgaagaagtagcaagatcaattaggtatttagggtcaccaaagcacgatcagcgaaattttcaaggtcaactctcttttccttcttcccattttgcccttaatttttc

SEQ ID NO: 99163 - DNA, 236 bp, Glycine max
  unsure (1)..(236): unsure at all n locations
ctttctcctaaaacatctccagtgggttcttctgcttccataagacatacgacacgcangancatnancatggacatggccatgatcctgctcctcttcacggtcttcgccgtgtcatcggccctagacacgtagatcatcccgtacgacaacgcccacgtcgtcacgtcgctcagagacggcagcttaactccatgtactatcagtggctagggtagcacagcaacgaggacaac

SEQ ID NO: 99164 - DNA, 248 bp, Glycine max
gtttcccaaggaaagaaagaattagaataggaccgacgatggttagtgttgtacgtgttcccccgaaacaaaaacacatttgttgtcacatcaaaatacttaaacaagggggtcctcgaccaagagaccccgccaacccggaaattatttccggacgggtacttgggggcataacagcttcccccaaattgagtcgaattaccccttgggctactcatggccatggcggtttccggggtcaagttttc

SEQ ID NO: 99165 - DNA, 203 bp, Glycine max
gcaagtgcaaggcatagatgcactagttgtcccagacaaaaataagtgtcccatgatatcagatacgccaagatcagtgtcactcacttatactgagcgagccctcatataatcagtggccgcggccatctcaaatatatgggcagaaaatcagatcctgggatccaggaccattgtctgcacgtcattcacagacactgagg

SEQ ID NO: 99166 - DNA, 251 bp, Glycine max
tacagtttgtattattgtagcagagagatggagagtgatggcgttgaggatgtgcaggtacgtgatggttgcttcgttgcttttcctattggagttcactgcgacagttatagatgcgcgcttacgagtcaagttcattgatccctcatttacgccccaattctgacgccaccgagtacgatgttaattcgacatcaatagcgtgctgtcatagctgtccttgctcgtgatcaatctcttcagggtggcgt

SEQ ID NO: 99167 - DNA, 162 bp, Glycine max
tatcaggcgagaaaaggtcaccatcgacaggccgtcggcgggggctgcgcagctgacgacggtggtgacttcgaccactctccaaacctggatctatgcgaacttggaaagcgctaattagaaagccgcttcgtctatgagcatgagaagggtcgacccagt

SEQ ID NO: 99168 - DNA, 251 bp, Glycine max
cactaagacctgaataggggatcgagaagcaaggaatctattctttaaacaggcatgccttcttttaatcatctccttctgcaccatctatcacctcctccttctctttcaaaaccatggaagatttgaacacgattggcgctgattgtgtggtcatatcatgctgctgccagtgcttgatgcttcaaattcttgtatttgtgttgctgaagcttcccgggaagttgataaggaaaacaagagaatatgct

SEQ ID NO: 99169 - DNA, 248 bp, Glycine max
caaacttgcaacttctccccacctaatctatcattcatccacctccttctcctcttccattcccatgtagctttgattctttctctctaacatgggtctgaactacagaaatttgttcccaggaacaccatcaaactgtctacaagactgttcttatgatgataaatcatcatgttgtgatccttctaatttgctccctccaactcctcctatctactcagataatgatttgagccaaagtcccagca

SEQ ID NO: 99170 - DNA, 249 bp, Glycine max
attcgaggcgaatcggctcgtggattataattcatatcaaatccttaactattgtgtcaagtgtcaaaccatattctcatacactatttttgtcatgcttaaatatatccctaagttaataattgtgtcaagagtgacccaatagcatatgctcccagttccttgttgattccttgaacgcccgccaatgtaaaagagaatatccagtgctggagtccccttgcatgtgtcttagattcctctctttgc

SEQ ID NO: 99171 - DNA, 244 bp, Glycine max
ggttcctctcaggagtctgtttctaaatcaggtagtgaaaatgaaacatcaacaaccatgcaatgtaacaaatccaacaaaaagctctaagtagtcaatggtcccagctctcacttcggacattcttccagatcagtgcaaatcttgacaatggtaggtctgtagaagtagtcgatgactcatgtactgagtactcagataatcaggcagaaccctctcaaccaagccctcgtttacagggaac

SEQ ID NO: 99172 - DNA, 247 bp, Glycine max
tttcggattataccataattttctgcagactctgatggaagctgttaattttacaggcaatggatgcgatatagaagttgtattcaagtctccccatagatgacatacaaagattggagctagaagtatctaacacatgctaattgcagctgataagataactgtgatccatagcttagggtgtctgatttctgatatgaccttcttacaggatgatgatttgacaaatgtatgtatccagagtgcg

SEQ ID NO: 99173 - DNA, 159 bp, Glycine max
ggaatattcctagcaaactgccaagcccacccatattgtctcattactctcaagcatgcaatggccaacgccacagcagctgccacctcgtactgcatggggacgtgtctcctgggggcccactccggggcggggcggctgcatgcccggttcgggtct

SEQ ID NO: 99174 - DNA, 247 bp, Glycine max
tgtgccttcattctcgtcgatctctaataatgttgccttatgtttcgcttccttttgtaatggttctgtctgatggatttcgttccctttgttatctgcccttgctttacaattcaaagtaatcaaaggagaaaaatgtttggttgttttatgaagcaactgaacagtatcaaagatgatatattgcgcaataaaacaaccaaacatttttgatactgttcagttgcttcatgtgatcattgcttgt

SEQ ID NO: 99175 - DNA, 237 bp, Glycine max
gtttattatggtgtatggtatttgacatactattgtgtcattgtcagtagactagctaaaagtttataccattcaacaaagggtgtattacatgagaatcgtcaggatcaaatatgcatttggcctgagcggaagcacaagtatcagaaaaatcctttgttgaatggtatacacttttagcgagtgtattatggtgtatggtattaacatgctattgtttcactgtagtaatgggtt

SEQ ID NO: 99176 - DNA, 142 bp, Glycine max
tatcaaacagggcaagggttttgttgtcaaagtggagcaaactatttgcaaggaaccatgtaataaagaagcccaatggtgttaagacttctagtgatggtcataaagagatgatgctttctcggagtattggtcaacttat

SEQ ID NO: 99177 - DNA, 219 bp, Glycine max
cgtacgtgaactctgagttctgctctcgttgcaacctgtcataaggtaccgactataaccgtgactagtcggatctatctgagctcagaagacaatcccatctctacaagctctactacgactagaatgcttctgccaggaatcaatagagaacagaacctacacccgtcgagttatcggaggtccttgacattagatcaactctagaatgctatgacc

SEQ ID NO: 99178 - DNA, 251 bp, Glycine max
ctgatatgttgcaaacagatgatgaaggaatatcagcatgatattactaagttatgagcagctttagctgtggacacaatacccatttgtatttgttccctcacattttggatctgtacattgctattgactactatatttcccttcatgctccatctccttggtctcactggggtctttggattattcgttatctggtgcatcattccatggatagttgtctacttgctagttcctgaaatacagggcat

SEQ ID NO: 99179 - DNA, 247 bp, Glycine max
gagaagtgagtctgggaatctcattcagtgtttgagctgtcagagggagttcttctgcatggattgcgtaaaagagcggtattttgacactcaaaatgaaattaagaaggcatgtccagtttcttgtggaacttgcacttgtaaggattgctcagcaagtcaatgtaaagacagtgaaagtaaggaatatttgactggtaagagcaaagttgatagaatattgcattttcattatttgatctgcatg

SEQ ID NO: 99180 - DNA, 257 bp, Glycine max
tcgagaacgaggcttccaaaatgttttggtatgcaagatgcattgacaaggttgtttccttttctgctgtgaagtttatatgaatatatgtctccgttatgaatgaaatggtagccgtggaacaataaatataggaagatgttcctgtgtcattattgagcaattatactgtcaggactgtagcacagcctcagcttaagctcttgacatataaacttgattagcatgtgatttgtttgtgtatcagtatcagtttt

SEQ ID NO: 99181 - DNA, 228 bp, Glycine max
tgctagttcagcatgagatgcagcaacaattccgaagccttagctccagggaacttggctccaactctgccactgttgctgctgccgctgccgccgctggttcccctgccaattcttggtcaaatatgggagtctccaactgcacgcgtgacttggcctacaagtcatattaactatggaagcatcgatgatcaacgtcaatttagcacgggtactacaggtagcagc

SEQ ID NO: 99182 - DNA, 242 bp, Glycine max
atgaattccatagatgtagaggggtcatttagaaatgtctctggcgctgtggagtctcaatgtacagacaaatcccccaagtcttttccattgccaaatcatatgcctcaagagacaaatggtgctggtggagcatctcttgttcagggtataaaccagaaatgtgagggaaaggacatacctactcctgtgtcttaccagcaaggactgcctgttgatgttcctcagatttctgtgaatga

SEQ ID NO: 99183 - DNA, 248 bp, Glycine max
tattgatgtaataatatccccaagtaataccatgaatttttgttaatgtaataactctttgtccttgccctctctacacagaagatttatggataaaatttgcaaatttggtatcactgcagcactgttccgtcgcggatttcttccaccgacaagtgtttgacttcgtggttccgtcgctttttcaacccttcgatagattcattccttggttacgctttctggctctcaaataacattcaagctac

SEQ ID NO: 99184 - DNA, 121 bp, Glycine max
ataaacgataatattccatcctcgtttgtttgcgattccctctgacttttctcattggagggcgaacatccaatcagagatttcggtcatagaagaatatggcttcgtcttccaccagtga

SEQ ID NO: 99185 - DNA, 192 bp, Glycine max
ttctcgtgaacggtacctcactgggatcgccgtcgctgctgatagcggtggtgacggatcctccgacgtgtagttcgcggaatatgcacttctctgtgcgtccctcgcattttggatctgcacattgatagtcacttcggtatttcccttctcgctccatctcggtggtcttaccggggtctttggattatt

SEQ ID NO: 99186 - DNA, 195 bp, Glycine max
gtggagatggctctctagacttatctccttttacttgctatctctcaatctcgctactgcagcctctgattacccagctccctctacttatccctgtgaggacattagccattacccttcttctgtgaagcattttagattcagaggtgaagcactcaaaagacgattgaatagcatcgttgccccagatcattc

SEQ ID NO: 99187 - DNA, 143 bp, Glycine max
tatctctttgtctcttcggctggtcttggcatctccgcagcacgaccacgtaacatacagatgataccaggtactatctctctcgacagagagcctggagcggagaaaaaaaaccagcgactaacaaggcggttttagcagcg

SEQ ID NO: 99188 - DNA, 146 bp, Glycine max
ggtaggcgtagctgctcacagattcgatgcgcatgcaccttgttttcgacatgcaggtctccggccaggtcccctgtggggatcacgtcagtctccacgtcgctgagtcagttgtgagtgacgctctatctggaggggcacgagcc

SEQ ID NO: 99189 - DNA, 249 bp, Glycine max
accccatctagtaacatggggtgtgttgccagcagtgtcatgtcgacgcagattggattccacaggactaatcatttctcactgggcctatcttcacaacaaacaccatataggtctctctctggggagattcatgctatttctccggcgagccgtggcggtggcggcgatgtatatgaggggcttgcacaacggggatttctagtatgcatagttgttctttgggtttccaattagtttgaaagcaac

SEQ ID NO: 99190 - DNA, 247 bp, Glycine max
tctggtgtttgatcttgaaaagggttccattctttatattgatctggcaaaatcaaactctagatctaaacgcacaaggatagatgacgagaaggctggcgcggataagaaagctagaggccttacaccatcatgggccactcctgattctggtaagatgatgttgttggcttggttttagtgcgttgaggttgtccgtgtatatggcttgcgtgaagtttctttcagtttactattgttgtgctac

SEQ ID NO: 99191 - DNA, 248 bp, Glycine max
ggtattcgggtcgagcaatatcatcctgatgcgttaaaatggcagtggctactcgattgctctcccttgtcgatcgttggtccggcagcgagtgaagctgggcgcatcattccggggagttcggagggtccgcatgttgcacattgtcactacgcaggcctcttgcggaagccgatcttgccgttgattcctcgtgaagtgcttaggcctattgttttgccgtgtctcgtactacctcactggtgcat

SEQ ID NO: 99192 - DNA, 238 bp, Glycine max
attgtgagggcattgggaatgcgatcgtgcatctcggctgttggagctggtggacaatgccctcctatacgtcctatttcgcctgaatcggacatggatggtggggagaagacaaggttaaggggttcctcttccgttgatttcagagtgcctgggagggtgttgttgaatgggtcaagcgatgatgcgtccatgcattgcaagcaatgaagaaaagtgatcaaccgagctgctatgc

SEQ ID NO: 99193 - DNA, 242 bp, Glycine max
atcttcttcttctttcatggatgctttgaacttcctcaagttctggagaaacgccagcacgaccacaacctccgaaacccacctcgtggtagaatccgacatcgaatccgacgaagaagactcattcttcgactaggagcttacgccacacgagtttcacaacatagaaaacacgaccacaaccaaaactgacgacgaaccaaaacacacggcaacaacaacatcaacgatctcaaaagcat

SEQ ID NO: 99194 - DNA, 252 bp, Glycine max
  unsure (1)..(252): unsure at all n locations
tttttgttcccatttcacccctcgtctttccttgtttccggtgagggccaaccacaacatatgttaaacaaggaacaacctccaggacataacatcctacgccaaacaaaactttgacctccttcagagttagacccgtcgtgcgtgtgcgcgtcgaatttcgaantcttcantatgggcacggagggtcgacggccacaagagtggtttacccaacgcagtgggggttcaccgccntgcgttttccggcga

SEQ ID NO: 99195 - DNA, 242 bp, Glycine max
tagcatgttgtatggtatttatcttattattgtcgcattgtactaaactagctaaaaattgataccactcaacaaaggatgtattagatgtgaatcgccagcatcaaatatgcatttagcctgacggaagcacaagtatcagagaaatcctttgttgaatggtataagcttttagctagtttattatggtgtatggtatttaacatactagtgtctcactgtagtaatgtgttttggacgtg

SEQ ID NO: 99196 - DNA, 245 bp, Glycine max
ctgaagtgagggaaaggagaataaaccctgtcaaataaattttgaagaaccagtctatcagttgtagataccaagtggctaagaatataaatcatactggtaaagggggatacatgtatattgttttgtcactctctctctaacataactattttgttccacaagaaactgaatccagggtaaattgaagataaattgttgaagctcaatgtgttctaattctcaacttttccccttagcagcag

SEQ ID NO: 99197 - DNA, 196 bp, Glycine max
tatgcggtcagcggatcgtgatgtctatccctcgtgtgaacaaatgcttcttcagcgttattatgacgagctctctgaggtatactgcctagcttacgtctcacagtacaggaatcgtaatgtaactattcattcattacctatataatatatatttgtgaggaatgcacaatattgctagctgttatgcttattc

SEQ ID NO: 99198 - DNA, 139 bp, Glycine max
tgaccgttgtagaatgcataatattataagacggtcacatgtccgcaatcgtctttgaatgtatggcattctacgactgtcacgtgcaaatgaccgtgttagaatactcaatagtctacgatagtcgcgtgcgaagacc

SEQ ID NO: 99199 - DNA, 138 bp, Glycine max
ctttctcctattcgtacttcttctttctcttcatcagctattgttgcattagactgagttactgctacttacagggacctcttcaactaacctctacaagaacttctgttccaagacatagtcccaacgtattcaaca

SEQ ID NO: 99200 - DNA, 271 bp, Glycine max
gtaattataattataatatactacccagcaaaacaccaacgttgttttgagttattgaattaatattaaacctagctatcatccatgggaagctgcatatcaacgcaaggcgtgagaacacgcaagaggtcgaggagcaagaattacaagccctccacgccaagagggcacgagccggcgcgaaggtcgagcgtgacggcgcgtccgctgaacgtggtgtcggggccgagtcctgggaacatattcgacaagtaccagttcgggaaggagc

SEQ ID NO: 99201 - DNA, 268 bp, Glycine max
ggaacataaacgaattgaaacatcaaatggctaaagatatggaggcaaacagtaagcagacttctgttgacaatcaacaagcaatacaggaacagccagttgagctgattgatagtggtggagcacatcaagctgaaccaggaaattccattaattggaattatcctaaagaagcttcggttgactatcaacaaacaatgcaggagcaatcagttgagctgtttgatggtggtggagctgttcaaagtgaaccacaaaactccataaa

SEQ ID NO: 99202 - DNA, 217 bp, Glycine max
gtgccctgcacgtgctcgactacgccaccactacatccgacgacgacacggaaaaggaggaggaggagctggtacacgagcaaaacgaatcctccggcggagggcggtggtagtggcggcgtgcggtggcggcacgcggcggacgggggagcgcgttaggcgatcttgaccaaggcgaatgggtcagaatgaacagtgtctctatgtcgcgcgggtg

SEQ ID NO: 99203 - DNA, 259 bp, Glycine max
aaaaagaaagaaaaagcaataccattaccaatagcatccccaggttttctggaccactttgctgctgaatatagatgtcggctactatactgtgaatcaaacttcagtgtgatcgataatggctttccaaagggaaactacaaccatgattggagtttggcttgtggtgttgatggttctctccaaagggttatcttcaacaggggttgtaccagataatttcactataccttcttttgtaaatattggggttctctat

SEQ ID NO: 99204 - DNA, 264 bp, Glycine max
tacagaagctgggattatctgaacattcttctactattcttgttggatgcattttttcagaaggacgagaccttgacagaaaaagggtgaaggaagttatcttgaatgctaagcagtatgatgtccagtttatatttatggggaccagtgaaagattgatcatgaatcaggcgcctgaatcacttcagacggaattcaaggatgataatcttaaatttgtgcctacttatgatgaagctctgttgcatttagtctttgctggat

SEQ ID NO: 99205 - DNA, 261 bp, Glycine max
ctcatctttcaatttcaatcaacggttatacccttttctatttgagcatcatcatgtccaccgcagcgcacccaaggccaagaaaacggcgtcgtccaagaagcccctctcccatcctaccttcgccgcggtacttcctaattactctctttcgattcaatttcgaaatcaattgtgtttaattagtttcattgttttgtagatgatagcggaggcgatagccagtctgaaggagagaaccggttcgagccaatacgcgat

SEQ ID NO: 99206 - DNA, 202 bp, Glycine max
aacgctgactctcgggtttgtactactctttacccaacgctctttcctctgtatcgaacacttatcctttaacactttctctctcttgttggattcgctgttctttcgcggagatctgtgtgcttttcgactctgttcctcttctgggtctcgttactctttcagattggtgctaaatttggcagagataagccacgtgtat

SEQ ID NO: 99207 - DNA, 250 bp, Glycine max
tttttcctgaactttctttttgctgcaatgcttacatggtcattgcctcttcgtataccagcatactcaatgctgggattgtctttactctattacattttagcgttaattgttgcaatgtctggatatagtgttgcatggggtggttcagctaaaatgtcaggcctattgtttgtgtttggagaggccacaagcttaatgctacttcttagcatcataatcatagttgtgctctatgctgcatggtgct

SEQ ID NO: 99208 - DNA, 257 bp, Glycine max
ggtgatttgttcactttgtgggactgaacaagaggtgagtttataatttcttcaatgtctttctgtgtggtttgtatagtggtatacgaattataaaggaggatcttgatctttaagcttttgaaggaaaatctttaatattgtcaaataaaaaagagaatcacactgcatgtgaatgcatgtgtgcattcacaggcataaaggagaaaaattggtgcatttgataagggaaatataaagtttattacttctgaagg

SEQ ID NO: 99209 - DNA, 274 bp, Glycine max
ggtgcacgttggaatttctcaccttgcatctaccttcttctggctcatggtattcaagctcctatcagatatgcagaagaggtatatcctctgatttttcttcaattttggctctgtcgaatggacgcttgtgatgcttgaaattcaatagatatggacctggtgatgcaggattttgttagtgactgcatggtgattctgcattttatactctacgcttgctgatttgtttggtcacatgagttgttcactcagattgctgcatctgtgtaaa

SEQ ID NO: 99210 - DNA, 257 bp, Glycine max
cttcaacacctgaaatggcatgaaattaaatacattcatgccatatcaggtgttgaagttgaagtggggattttgaatggtggcaatcgcagcacagcttcctctgtctcaattgagtcggatctcagtataggatcttgagtcatttgctccagcaactggtagagtctttgcagccacagcggcaaagggtgctggtggaagcaaagaagagaagggtcttcttgattggatccttggagggttgcagaaggaag

SEQ ID NO: 99211 - DNA, 257 bp, Glycine max
cataaacatctataagttaataattcgggtgtgtaataaattaaaaaatacatatgcttgtgacaaaaaggagatgtcacaagaattatgtgaattcggatttctagtatgaaaatatttgtgtaaaattgaaataaagcgaattatactttgatttgttttataaattctttctgcatttgcttcattatcgtaaatgcagttagaatttataaaacaaataaagcgaattatactttgatttgttttataaattc

SEQ ID NO: 99212 - DNA, 249 bp, Glycine max
ctcgagccgctcgagccgccaaaataagttgagtctgagatgactagcccaatttttcaagcgttcttttatttaaagtccatattatctataagtgttttaaattgaaactttcacggtctaatacataaaatttggtacataatcatctcagtttgatatggttgtagctataacagataaaaatgacataaatgcttaactgtttgaactgaactgagcgcccaaaattgaagtcttgattagtgt

SEQ ID NO: 99213 - DNA, 165 bp, Glycine max
gccaaggttgtatgtgaaagactctgatgtgaggcatgagaatgagatcattagcatttgttgtgattctgctccttctttcacccaccattgtcaattctctctccctccctcatactccatctccatctccatctccatctccatctcctccttccacatcat

SEQ ID NO: 99214 - DNA, 244 bp, Glycine max
tgagcttttacacggttattcaatcacacattgtttaaaatgatttttaattgattaatagtaccaaattttactgcaacaatgcataaaaattaaactctttagcataattagttcatgacatggttgtttaagcttcatatagttttcaagtaacagcttaagcttttatcatgattggttcatgacaatcattacttccatttaactacaaattcttaacaaggatgatgacaatagaatg

SEQ ID NO: 99215 - DNA, 250 bp, Glycine max
gattaggtgaagatggatgatgattagctcgcatggtctctgacgcgcttcctttattttttcaagaggatagccgcagggtgcgggcacgtgaagaagaaacggagaaagcaatgcttgaaggtttttagggagtggagatttggtgttcggtttctgaaagggggtgttagtttgttagatagtgatgccgttagtttttaaacgctgttaaaagacggaagggtggggttaagaaatagaaatgttg

SEQ ID NO: 99216 - DNA, 239 bp, Glycine max
accaaaactaaaaaagaacatttgcaggaggtataagatggcattagaaaattgaatgttattaatttcttcatccacttccactatttcaaaatcaaaatgattcttatgttcttccttggatgatggcgcttcaactttgctatatgtgaagggagttctgaaaaaaacttgaggaagaagaaaagatttcaataagctatgttgataaagggagatggagaatgatatagagggtg

SEQ ID NO: 99217 - DNA, 255 bp, Glycine max
ctttctttcttttcgaaaatgctgatttttcattttttttgccttttttcttcttcttccgtctgtatttgatttgttcccattaattctgaaatgattcaccttatttatttggaattgcgtggttttgatgtccaaatcttttctcacaactgatgtttcggccttctgtcaaattgaagcagtaaagttaattgatcaataatctaattggagccgatcggacttgttgactttgagcaatggtttattgtt

SEQ ID NO: 99218 - DNA, 260 bp, Glycine max
atattttacaaattatttaattatcatggatgtcttgtgatgattttgtggttgaactttgtttattgttttcagtcaggaaaagtctatctccaaaagtgcaacaccacaataggctttccaccaatctctgaacacaacaagctgaatgcaaagccagcagggccaaaactccaagacctaaacttcccatcatcatccccctccaatgtgctattgaacctctttgatgaaacaagtttggaccttaaattggtctc

SEQ ID NO: 99219 - DNA, 258 bp, Glycine max
agttggatgattgggttctttgccggatttacaagaagtccaaacatgctctaacttcaacagaggcatcaataggggtgggtgaggtagatcaagcagaggagcacttattccaagagacccttttgccaatctcaaaatctccagcacctccacctcaaaacacattgatatctcagaaatctgtgtccttctccaacttgttggatgccatggactactctatcctaagtagtttcttatctgagaatcatacca

SEQ ID NO: 99220 - DNA, 255 bp, Glycine max
ctggattcagcatatgtgttatcttcaaccacgttgcaggagatgggagaacccttcatcatttcatgaagttttgggcctcagtttgcaaggccaaaggggatttgaatttccctggctctgtgcctctacccttatatgatagggacatagtgaaagaccccaaagggctcatgcacgtttacgtgcaagagatgagaaattcagcgttgcaaaataagcatttcggagggtttttacgtggtgtttacgctg

SEQ ID NO: 99221 - DNA, 249 bp, Glycine max
ggaaaatgtccatggactcagatgggctatggcaatttggtttttaattggtgcattgattgttatttatttggaataccatgaaaggcagcgaatagggcggcagatatctggaagaggcaattgggtgcttggtaatcttgaggaagatgattcagttgatctcttgaggccaaccagaacaagtgcagataaagagttacagccctctgcgagaatggaagtccagttagaacctttgaacagatg

SEQ ID NO: 99222 - DNA, 259 bp, Glycine max
ggattttcaagtctggccggggcacttcttgagaataacagtatacgtcatatacatctcaatggcaattatggtggggctttgggggctaatgcattagctaaagcacttgagagcaacaagtcaataagggaacttcatttgcatgggaattctattggagatgaaggaatctgttctttgatgacagggttatcttcacataaagggaaacttacacttctagacataggcaacaactcattaacagctaaaggtt

SEQ ID NO: 99223 - DNA, 254 bp, Glycine max
gtagaacccttccactgtggtgactctgcgatgggtactgcctctaccttctttgctattctgcttatgtttttttgttcgtttgtaatttgtttttgttttcattagatctgatgcctgaattgaacgattatttggtttaattgttctgctggagctttcttaagagggtttggggttttaacgccaaagccaaaacaggagaaagaacatcatctcttcgctaacttgaactagcatggatgtttgctact

SEQ ID NO: 99224 - DNA, 250 bp, Glycine max
ggtttcagaagctaatcgcaggggaaaaagaaagaacaaacattaatatctcgagtattgagtttcggaagcgcttacgacgatcaacttcacgtttattcctaatgcagcattgtccttgaacttcaggtaaaaaatagcagaacattttcatggtacaaggatgtccaatccagcttcaaaagccacttggacacctgggttccatagagtatttgttgatttatgccttggagaaatgctgaagaat

SEQ ID NO: 99225 - DNA, 262 bp, Glycine max
catcatcttaagcagcagcaacaacaacctcggaagcaattccaatccctcacaacctccaacatcacccaaaacaccaaacaacaaaagcatgaaaattctaataatagcctccgctgtggccgcatcgttgtttctattattatcattcatcatcggatacttaatcttccgatacgtaagaagaggttccgctgcggaagatagcagcaaccctgaaccttcgagcacgcgctgccgcaacttttctttgacggagata

SEQ ID NO: 99226 - DNA, 263 bp, Glycine max
ggaagctgaataaattaagaattctcagcttttctggatctcgaattgagaatttgccagctgagttagagaacttggataaactacaattactagacatcagcaattgttcagtagtcaagaggattccgcctcagcttatgtcaaggttgacttcgttggaagagttgtatgtaagagattgcttcatggaagtgtcggaggtaggagagagataccagatgtgcaaatttcatctatttctgaactaaagcatttgcatc

SEQ ID NO: 99227 - DNA, 263 bp, Glycine max
cacgagacgaatctgctttacttacatcaacagatcttaatgattattcagatcatgattgtgattgacgaacttggaactagagtaccgttcagtaactctgatacctttgtcctctgtgtctttcgttcctatggcagttcctattttctcaggagtgcgaggtatgctcacgcgtgtgcgcgcgctctcacccagcaactgcctaactcatcacttcagcccactcaatcgcagatgcactcaaatcaaatcgtagtcct

SEQ ID NO: 99228 - DNA, 267 bp, Glycine max
tggatggctatggtacactctaggctaatctgacctgtaccgtccgtaagatctgccattaaaatgaatgaaaggataggattctcggatggaccataaattgaataatgataataaggagtaatgtctaaacagtagattttttttatacatagtatgatgatatgtgaataatagagaattgaagagagagaacaagaacgtggcggaacaatagccatgcccaagaatgtgctgggtaatgctctttcttgtacggacgtataa

SEQ ID NO: 99229 - DNA, 266 bp, Glycine max
gaacgaagcagaagaagcatctcagaacagaaccaccgaacccactcagaagcaaatccgaaaacccctcatataatagtactggtattcagctgttcatgacaaaagcctgaaccgatcatgtcagaaggtgcagaaattgatgagcgtgtggaccttgacgaggaaaattatatggaagagatggatgatgatgttgaagaacaaatagatgatgatggagtggatggaggtgaagatgaaaatgctgaaggtagtgttgaaga

SEQ ID NO: 99230 - DNA, 261 bp, Glycine max
cggagagagagagacgccggcgggtttggacagtgagtcacgagttaggaatcgtgacactcagacgttgagaaccgcggaatgcctctgaagccgtcgtattcgtcggagaatctgatgcttccggtatcggatcctcctaacgacgacgaccagaagtggcttttgaaagccgacaataacaagaccttccaaacacgaaggattctaactgccatctcttacatgtcatgtgcagtgctctttcgtcttttcacttcc

SEQ ID NO: 99231 - DNA, 110 bp, Glycine max
ggaaaactttggacaaaaaatggagtgctacacaaggccaaacatgagtgactcgaacctctcagcagaggtagaagccaccatagaagcaaagaccagagagtactttg

SEQ ID NO: 99232 - DNA, 255 bp, Glycine max
ttccattatgtataaattcataacatagtggttgagcaaacttctaaatcctttgtgtgatatatgataaaatatggaaatttcattatctgattctgttcatctctgttctattgattatgaattagcattttttatgaaaatgattatgcttgttgaggaattatcctttttagattatgcgatctcttatggataggggtgccaatcaaatccagcagcttggttggcccaaaaagagctcagaattgagcc

SEQ ID NO: 99233 - DNA, 252 bp, Glycine max
aagtaaactaaactgaagaaaatgttgttaggtcacttgcaaaattgaagagatttaagacctctgtcttttctgttgaattagattccataatcttccattagtttccattctgccactttgctacaaagttcttctcctctttggaacacgcaattttaggcctatgcatttcagcaagttctgcaaacaaaattgagagttgttggtttataactacgttatatgtttcattgtctcagttgaaatggt

SEQ ID NO: 99234 - DNA, 192 bp, Glycine max
cggctcgagcgtgaagtgaatgacaatgagaaaaatcccatagaaatggtggtaattagaggcaatagcttggtcactgttgaagtgcttcaaattcaagtatttaagtgtaaattaacaattgttaagtgacctgacaaatgtaaatatggagtaatttatattataattgacatgctgtcatatatttat

SEQ ID NO: 99235 - DNA, 261 bp, Glycine max
aaaagagattagtggagaaatacgacaacacgaatccgtcgtttgttcaaaccgaaacgacaaggcagttcgctttccctttctttctctgagaaggcgtcgtaacagaacacgacgattccccaaggaagtgggcaaaaattgaagatagggatcagtgacagagagagataacaaacgagttataattggttaagtagctcaaaggatacattttgatcttctgctgacatctgctgggtacaaaatgaaagcagacaa

SEQ ID NO: 99236 - DNA, 266 bp, Glycine max
ctggaacaaaatttaaatgagggaccaaaattatgttttagcctaaataatatctctaaatatttggtctttaactgatccgtttgatccatgtagccaacctcacctaatgggacaaggctttgttgttgtaaatattagttgtgttttcatcataagtgaattgtgtgtgtctgtcaattctggtggggtatatggtggctgatattcaggtgagatttttgcaggtttgtatttttactgggtcagttcctttgcagaggttt

SEQ ID NO: 99237 - DNA, 258 bp, Glycine max
cttggcttctctcaaagattattcttctttctttttgccctgctctgtggggttagtttctgctctcaaatgctcttggcccttccttacttcttggcctttgcttctgtgtttgctgttgcactttctgggtgtaaggattttcagctgctcccgttgttccttttgtcgagcctgtcatgcctacccttgtcaattatagtggtgatgatgagctctatcatgggggttccttctgtcaaaatccattgatttggg

SEQ ID NO: 99238 - DNA, 103 bp, Glycine max
cacagatgaaatagggatgtaagaacaagagtggcaaggttgtggaaaataaggaaactccaactgcctcctgtgcggattctaagctgattgggatttatga

SEQ ID NO: 99239 - DNA, 167 bp, Glycine max
tagcagagtctagcgatgagtgcgtttctaaaagccttcgtggccattctctggggtgttctgtgtctgggtcgccatgagggagcggtagaagataagagcagatagattggtagacgtggcgaaatcagagattccgtataggttcgagcagcatgcggtggggt

SEQ ID NO: 99240 - DNA, 162 bp, Glycine max
gtaaggagagcacagcaatgaccaatatatattgcagagtggttctagtaatgcagtgctgctagaagatgggaactagtgaatggcaggatcgatcgaagatctagcgtcggctctgaatgccccttagcaagagaggcaggagatgtgcctgaaactggg

SEQ ID NO: 99241 - DNA, 208 bp, Glycine max
atgaaggtgaagaagggttggctcgcggttcaagtggaagaagaaggtggcggtggagggtctcaaagatttgtgatcccaatttcgtactttataccctctcttcaagcacttttggataggctatgagttatggtacacaccgaggtctctaactgcagtcagtcgtgcttctcactcgtgagatcggagatcctccatacaccac

SEQ ID NO: 99242 - DNA, 223 bp, Glycine max
tagtaatctctgggacttctggtctgtttggtagagacgagaggcatagagtagatggaaataactaggatgagtgaaaataggtgtaaataaagttgatattaaatgtgttttgtggaagagaaataaagtagagacgaagaaagagatattgaataagtggaaattagtgtgaaatagtatactaggtcccgtcatgtttaaaattagttgcacctttgtc

SEQ ID NO: 99243 - DNA, 247 bp, Glycine max
cgcattcgctaatttcaccaatgtatgttgtatggtgacgatggtctctgcaggctcttcagctttttgctaatgatattgtgtgtttggagtgaaaggggacaaggctagttgagcttgattgtgttgttcaacagtgaggacaggccagagacagtgtggaaggaggaggagtagaagttgatgtctctggcttcagagaatgcttgtctcggtcctggtgggatcctgaggttcgtcgcttgct

SEQ ID NO: 99244 - DNA, 254 bp, Glycine max
  unsure (1)..(254): unsure at all n locations
catttttgctttaaggagttcagtcctattttgctcctcttccttgtcttccacacaacatacgaggcgacancngtcgnagntcgggtctgagagttcgcaggcatgttaccaagcctttaattaagccgccaattagaagaggcaattttctcaagacagagagagaagaacatcttggtatcagtgttgcatccactctctgatggggggaggtgagggcggtagattggatgaatcaggatcgtgggctg

SEQ ID NO: 99245 - DNA, 255 bp, Glycine max
aacccgacacgtgttccaccacactttcctcgtcagtcttgctatgtctctgcaccaaaactcagtgttctgatgctaccccagaacacaagcaccatggacatgattcctgggaagatccgaaaacgaggctgttcctcctccgcctcctcctcttcctccgtgctccacaactaccgcttcaagaggactattctcgtcggaaagcggggcggatctagtacgcccgtgcccacgtggaactcatgagctcga

SEQ ID NO: 99246 - DNA, 261 bp, Glycine max
tttcaagaccaattgcactcacatgccatacctgaccataaagcagcagctggtgctatcagaggctatattaagttgaatgattctaacccaaagtctacagcagaggaagatgataatatgtcaaagttgcttccttctcagagaagaaaatgagacaaaagcagagaaaggcagaagcaagagccaaaaaggaggcagaagagaagaatgaagagtcaagtgccagtggggtatcaaagtctgggaagcggcacataa

SEQ ID NO: 99247 - DNA, 260 bp, Glycine max
aactcatcatcaagggcttcttctgatcacatcaataataataagtcgacgaagcacaatgaaatggttcaacaccacaacatcaaaatgggattcatgggacaatcaaagccgccaacaactgaacacatagttgacaaaataatgaatcggaagcaagcagtgatgtcaacacaactcttggacattctaaatacaatgcttaccgtgctgccaccatggcgcttccagttgttccaatggatgaggtagccttgatg

SEQ ID NO: 99248 - DNA, 123 bp, Glycine max
attacgttatctcacgattctttgactgttctcccacaccacacagatgtttctcatcctgctccttattctcctatttcacgcggcggaagccaagggacagtggcagctactccacacaaa

SEQ ID NO: 99249 - DNA, 252 bp, Glycine max
attcgctgccactgcaacagggtaacctaaagttctctctttatcattcttattccaataccacaataaactcctccacttttcactaacctacgcaactcctatcactatccgtgcacataaatgcaatcaataccctttttctctctcttgaaattaccttcttcctctgtaagagctgattagccaggatcactaatttaacagcaacaaatggccaccttcattttcaaatgcttctgagacattatt

SEQ ID NO: 99250 - DNA, 138 bp, Glycine max
cacacatatattgctttgtttgctagcttgtagtagtacgaattgcaggaggccaaatacaactctagagtaatatacttgtaggtagatgtagtgccccgtaaccggtcgtaaggccgagaatagtcaacgtttcca

SEQ ID NO: 99251 - DNA, 247 bp, Glycine max
atcaggagagtatggagctttacaacaccaacaaacaagcacatttgcatccttagaatttcatgttaaactgagtaaaaagaaatttgaaataaaatgcaaaacataaggttgaaatgtgcttgtttgtttggcattcaggagagtatggagctttagtgctttacccttttttccagcagatattctcgcttaaccttccagtcttcttcagctaatgaccgatagaaaagcctaaataagaact

SEQ ID NO: 99252 - DNA, 246 bp, Glycine max
ccacttgctagattggttgtactgacactactagccaccacgtttgtgctctgctccacttcgcactctccgccatcatcgtcatcatcatgcaagcgcttcattcccccaccctccgcacttctcccttggacctcttcggggccccaacaatgccgccgccaagcgacgcgcctcctctgccaagcgcgtgttcttcgtgtccgccacggtggcgccgaagctgtccgctccgcagcggcacaa

SEQ ID NO: 99253 - DNA, 136 bp, Glycine max
tttaacgttaactagtaactagtaacctcttagcattgaatttccgttattaatttaatcgatttgaacgtaattagtagctttgaagttttcttttattatatgagtagcttttattaaaacttgagattcactt

SEQ ID NO: 99254 - DNA, 168 bp, Glycine max
ctgagatgatgccccctgagcaagaaacaactattgcaacaaacattccagccatcacaacccgacaagcgaccagctcggtccaccatgaatcagagggttcaaacactaacaaaatcaaaccaagtttagaattggatgataatggacttcctccacacaacatac

SEQ ID NO: 99255 - DNA, 272 bp, Glycine max
gtagctaaattaattggctgtagcattgaagatctcaagttgacactatcaactcgcaaaatgaaagttggtaatgataatattgtccaaaagttgatgctatcacaggtaaaatgaccactctgttactagaaatgttggcctgaaattatggatggaaaaaatgcaactttctagttacttgaaatattgggaaaatgaaggtgtactgcattcctcagtgcatatggcaatttgtttagtttgttatttgaagaaaaaggaaatgaaaa

SEQ ID NO: 99256 - DNA, 167 bp, Glycine max
ataaaataaacactttggtgaaactttatattttgcatgttgtattcttaaaagaataccttataaacaaaaaaaaaaatctttatgaattatggagaaaaagagaaccaaatctgaaatatcttaaagtgtgggggtgtgtagtaaatgttaatatccctattaat

SEQ ID NO: 99257 - DNA, 265 bp, Glycine max
tttctcacatctctcctctcctcttctcttctcagcacagctaaagcttttaactttcaacctcttctgaatccaaataacctttttctgtttccaaaacacatactatatatctctctctctctctctgtttttcggtttcctctgatcatgggtcgtccacccagtaatgggggcccagcctttcgcttcacccagctgggggtatcagaaatggaagctattcttcaagaacataacaatgctatgccgtcacgtgatgttc

SEQ ID NO: 99258 - DNA, 263 bp, Glycine max
actccttccattccatcatcttctacccacaccaaaaatcctaaatgaaccccaagacaactcctcctcctcctcctcttcttcttcttttctctcttagagcccacaatcactttctccttagacgaaagattcgaagcctgcgtgcccaagacatgtgggaatgggcagaacataagctacccgttttacatccaaggcaagcaaaaacccttttgcgggcagccaggcttcgagctaacgtgcggtcacaacggcttccc

SEQ ID NO: 99259 - DNA, 261 bp, Glycine max
cttgcagtgagttgcaatctggtacaagacagtatgtaagtaggtacttccgtactgctgttgaggttttgtctggtgatcaagtatcttgttcctaccttggaggctgcaccatcccagcggactgcatcaagttaagccattataggggttggaacagggattcttgatcaaccaacctgagtacagaattcttctggtgaatctgcagaaaataattactctgataaaaaggttaggcactttgaattcttttagctg

SEQ ID NO: 99260 - DNA, 256 bp, Glycine max
gcacaatcatattggtacatacatgtcatgtatttataaaatccatgttacattaatttgttgatacatattgaattttacattttattatatcttcaactgcaaacattgcctcgccagggaataacaagacgattgaagaaagcaagtaaggaaattgaccaattcttggagcaaattatccaagaccacgaacataatcaatatgataattataaagtgcaaaaagctccacacaataacaaggactttgtgg

SEQ ID NO: 99261 - DNA, 258 bp, Glycine max
cctccctggccgaaacggagccggatcaggccgcggaatccctaagccgtttgcgaaaatccgtttcccagcacggaaaccccactcagcgagtgggcttttacttctggcaggccctctcccgcagagaagaaaagggccataatagcacttgggatgaggagttaacactctcttacaaagccctgaacgacgcctgcccttactccaagttcgctcacttaaccgccaaccaagccatccttgaagccacccaaa

SEQ ID NO: 99262 - DNA, 258 bp, Glycine max
acacgctgccacaatatagttccgtgtatgttagtgcaaagtctggtccggtgacgcctcaatcttctgttcgttgggataatccaagcaaagagaaggttaatagtcatatcagaaaccggtccagccccttgcggaggttgttagaccctttattgaagcacaaggcatcagataaacacaattcagctcaaagcagtcaggcactagagggtggaagtgcaaattcaagcttcaggactattggtgtcaatgaat

SEQ ID NO: 99263 - DNA, 256 bp, Glycine max
ctcaatataagaccttctaacttattcttctcccatctattttataagcaaccttggggctttccaaggtagtagcattctcacacaatggcctcgtgttgctctcttctattgctctccttaatattccttctttcatcatctgtctctcatgcactttccaatgccgaagtctctttcattgctcgtcgccaattgttgcacttacacgagaatgatgaattatctgacaactacgtagataattatgaaacaa

SEQ ID NO: 99264 - DNA, 252 bp, Glycine max
gatttgttggccgaccttcaaaatgcgctgttggagcaacgtcctaactacgcctctgcttccaaattgaacacaacaagggaaagccgttatcacactcagattcgacaccgcttaacccaactccaaggattgccttcaagcagaggagaggacctacagactatgtgcttgcttgagctttatggactaaagctagctgagttgcagaggaaggtgcagactgacgtgaattctgaatactggctcaat

SEQ ID NO: 99265 - DNA, 250 bp, Glycine max
gattccagtatgaaagttgcagttcgtatttgatgaagatagtggagcctatcatgaaaagctatatgaacgaaatccatgtggatagttatgaactctctgtaactgaatccaaacttgcttggttcacacacatagttgctccaattctcagaacaaaacagatttctggttctagtggagaatcgcatgagatacttgatgcggagatttcagcatgtgttctgcagttgattaatatttgtgacag

SEQ ID NO: 99266 - DNA, 254 bp, Glycine max
ctccatactatatgtcttcccagctccagtttggaggtggaaaattatcatattaaaagtaatcaaaaatgatcttgtaaaacttagaatacagcaatataaataactacttctccgaagcagggacctggaatacttgaatgtgaagaacagaacaaggggcttcttccaagagttgtagaaggactttttgattccataaattctttggatgaagagaagacatattcaattaaattgtcaatggtacacag

SEQ ID NO: 99267 - DNA, 250 bp, Glycine max
ctcttacgttatattaaaagctatttaaagtgttcccctcactcaatattatttatgtgttaggagaggtcaattgcctttgcatattctatctcatatcgatcaatttgtaataatggccagtgagagaattctcaagccatctaaatggttctcaaacaaatcactaaagcttagtcttcatcgtggaagatcaagatcctcctccaataactcattatcgagtaactctcccagtccaagatcaccc

SEQ ID NO: 99268 - DNA, 248 bp, Glycine max
caaatgtttgcagaatgctggtctgagggatattgcacacatagcggataccttttcaacaaaagggctagatccacaacaaattgaatcaatatcaaggataagatatattgcgcatgaatgtctgagagaccaatttggtggtttggtcatggcgtcagggagcccccaagttgaactaggaaaaagggtcagaggaaaggagagggttagaagaaaaggaggagcgggtaaacgactgcgaaagg

SEQ ID NO: 99269 - DNA, 253 bp, Glycine max
caaagccttctccttaaccactgagagccttggttgtgttcaaagctctatatttaggagcatccatggaaatatgatttgttttccacgtgggattttggacccacgagttcatgttcatgaagaacatctatctttcagtgaatgacaacttcagatgccattgctccatgatcatatggtatggagcatggcagaggcggtcgagtaaggaaaaagaggagctgacctcaacccttgtaagttggacaat

SEQ ID NO: 99270 - DNA, 127 bp, Glycine max
gataaaccctaatagtcacaccgtctcttcaaatatgtgtataaagaaagtctctcaatctcacgaccccgaagaatgtcaagacgtaaagcatctcttgccagtggctactccaaccgatggctcc

SEQ ID NO: 99271 - DNA, 110 bp, Glycine max
cttgaatcagcatctctgtaggatgcattgcaaactgctatcctcctcattcatctgatggatcgttgctgatggctgacatacgctgtcttcctggtgtgagccatttc

SEQ ID NO: 99272 - DNA, 154 bp, Glycine max
gcttcgcttccccttaattcccaaccttacattattaacttcaccaactcatctccctctaccaaacaaaacgacgcagcaaaaccctgtctctaaaaccctctctctgtctcccttccttctcatcttcaccaccaccaatggcgtcgcgccg

SEQ ID NO: 99273 - DNA, 207 bp, Glycine max
gcaccataatgataatgggtttagctttttctttcttttttgtatgttttggggggaccaagttaggctgagagtatagctatagggtgaaaggaataaccaattgttcagcaattctgtaaatgactaaatgcttgcttgtcattgtggagggttttcgtttttttaacctgtgtcatatatgcctcataacaaatatgcggttcg

SEQ ID NO: 99274 - DNA, 254 bp, Glycine max
gcttggccaagatcatctgtggggcatccatttgcatcgatggaaagagccatgccttcccatattcaactcagaatagttcttttgttggttcatcacagcatcttcaccaccatcatgtcggctccgccccatcaggtttgccttttgagaggcactttggtttccatcccgagtcatctgaaacttcattcatgaataatgttggctatggaggcattggtccagggcataatgatggaaatcacatggtt

SEQ ID NO: 99275 - DNA, 252 bp, Glycine max
cggaaaaaacacttccctcggcaccgtttccgcggaaccggtccaagtttcagtcctaaagccgcatttggacacacgaaccccaacacgaatttttcccatcgcaattctccccctttcagaagcttccaaacacgccgttagctttaaaaaggaaaaaaaggaatatagcacgttggagcatcatgtcttgttcgttacagtccctcgcttcacgtattaagaagagcccaaagcgaattcgaacttaga

SEQ ID NO: 99276 - DNA, 206 bp, Glycine max
ctacaagagaatttgttaaaattggatactctaaatggaagaaccggtgcttgttctcagccgatgtctcgagccaaagagacactttcaagagtagctgtgacaagaacttcgtcagagaaatattcggatttttgcatgccaacctccgatttgtctaaggagcattgtaaatcatgcgatatttgcagacgatcagagtttat

SEQ ID NO: 99277 - DNA, 113 bp, Glycine max
ctctacttttctagaacctcaagcaccttatactcagtgaaatatcacttttgactaccttgacggacagtgtttgacattttgatattaatattactggtgtctctaatttt

SEQ ID NO: 99278 - DNA, 160 bp, Glycine max
ccgccatgacggttgcaagcgccgcctcttcacgcaccaagaggctcgtcaagctaacgctctcgctcctccgcctcggcttcaactcctccaaatggtacttcactgcaccttgaactctctctctttcgcactaaacgacgcacgaataaacaaaacg

SEQ ID NO: 99279 - DNA, 271 bp, Glycine max
ccaccttcttctcatcacatgagtttaaaccttgagctaaatttgatgtgtgaatcaccgaggaaaaaagaagaaggttatggttatgaaatgaatgagaaaaagagttctggttcttcccctgggggtttgagtgaacgtgaggatctgtgtaaaaaaagattcagatggtaaaattctttctccctcgtggttgtcatcatctgaagatgattacaaagagatggttgcaacagtttgcatgcgctgccacatgttggtcatgctatgc

SEQ ID NO: 99280 - DNA, 269 bp, Glycine max
gaaaactcttgagactactcctgtcatgtcgggtctcaaagaaggaatggacagattgaaagctagattatcaaaatactctcctggattttctctgtcaaatataaaagatcgtgaatacaagcaagatgaaagtcgccaaacacctttagaggaaaaactgtttagtttaactccagatagtaacgtgcataaaggcttggttgatagcaatgatcatggaattcagtcatttaaaaatatttgcaaatcaagtcaaaatgaagaga

SEQ ID NO: 99281 - DNA, 272 bp, Glycine max
ctggttcagaacatgaaattgaagatcatccttctgaatcagcagctgccacaggcacaagtcagagacaggacaatcttggcaatcttgctttggtgactagcaatccaagtgaaaagatggataataagcttgtttatgtgacacaccgtggtatacggagacgctgtctagattttgaaatggccagtgtgcaaaggaggaacccagctgataattcaaacaccaactcaagtacagcaaaatctgaggagaggaatgttagtaatgaa

SEQ ID NO: 99282 - DNA, 261 bp, Glycine max
gtttttactggattttgttaaataatatgtatggtttttattgacaatcccgtgcagggctctccagtttcaattcagtgtttttgaaattagataaatcctactgattatttattttgtatttatgttgttatttcacatgctgcagtcatggatgaattttgtctcatacataagttgtagctttgaagtggtgtagcttgattgttttgaattaactttgcattttgttactgaattactcagatgctcttttttatc

SEQ ID NO: 99283 - DNA, 265 bp, Glycine max
gcttccacaacccttctccgactagaagaagttcagagacaatgggtttcaacaaaagttaccttcttttcaccgtgtccctctcatttctcctcctatccacccatgccatcagcagcattattgctccttctccctccccattcccaacccacaccaacaccaaaaccaaaaccatagactccatcttcaagaaagccctctcaaaaacccaaaacatgttaaaatcacccaaccccaaggtcctagacttctgcaaatccac

SEQ ID NO: 99284 - DNA, 262 bp, Glycine max
tctttctctttctaagctctgaccccaatttctgtggcggctctctctctacttattttctcttctgagattgagatttggatccaccctcttccccttctttcggtctttgatttgatcttttccttacctttctttgggtttgggtctgggtcttcagcttcaacttcaacaacaacaccaaatcgctatggttacccaacaacagccacagccacagcttcaggttcagcctcagcagtcgacaccaccctcttcacaa

SEQ ID NO: 99285 - DNA, 262 bp, Glycine max
gtggaattttttttcgttcctgtgaagttccattccatattctgggtatgggtctataaaacaagcttccaaattggagagaaagtcccaaacttttcggttcaattttgagttttcgcaattgggtctgtgatcttcatgtgtgggtgagcaaggtttgaaaaaactttctgtgatcgtgattttggccccaacttcaattgtggctgcatccgctgtaatttgttcacaattttccgcaatatcaaaggatcgtgacgac

SEQ ID NO: 99286 - DNA, 259 bp, Glycine max
cagaaatagaatcatctctctgtctagggtttcattctttttcagctttatttgttctgtagatccatctagcttcggtgctgcaaatggacgtcgcagtcactgccgttcggtcaccgctgatcgtcctgggaagtccggtcaacgggtccgcctcagctcggttgggttccacttttgggttttccagaaagtatttatcccgaagcaagttcgtagaagagggtttgttgttagagctgcatcctcatctccggag

SEQ ID NO: 99287 - DNA, 259 bp, Glycine max
cctcgatccaccatctccaatcctcctccctaatccctattcacatttcacaatctcacactacccaatttctcacattccaaaacgcaactgcgacaccgccgacgaggttgtcgtttccacgttttcccgccacccacattcccgatcaagttgccgttttgatgcctcccacgcgcccctaccaaaaaacgaatcgtgggtttgggttcccagcgattagcatcaaatgcagctatcgaaacgaatcgtgggccct

SEQ ID NO: 99288 - DNA, 213 bp, Glycine max
aaacttcgaggtttggggaacactgctgccagtagtgatggaagtagtagtggtactttcttcagggctgttctattggttcgtagaggaaagtatgatgaagcacgcgagtatgtagaaagagctagaaaatgtctggcaacagagcttgctgctctggttttggagagttatgaacgtgcttacagtaatatggttcgtgttcagcaacta

SEQ ID NO: 99289 - DNA, 254 bp, Glycine max
gcaagtgttgaagataatactttagttagcaaggaagagccactagcatttgattctgatgaacgagatgccaagaggccaaagcttatgaatgcaggtggtccaagtcgcagattcactagaagcatgataaaaagaacgtgtaatgtcgtgtaaatactgttataaccaccctgctgctactaacactatttacacgacattacacgttctttttatcatgtaaatagtgttagtacagcagggtggttata

SEQ ID NO: 99290 - DNA, 251 bp, Glycine max
tataaattcaattaagcagttgatgccctgatcccgggaataagataactttctcttccaggtattcactcatcccctctcagtggcaagagtgagtagatagcagaagttatttcattcctcattcctgggatattcgttaagtttgcccattaggggtctttctcaccggtgctatcaataagaaggagccttttccctgggtaggctaagccagaaaagagagaaagagaaaaagagttaaaaggcta

SEQ ID NO: 99291 - DNA, 253 bp, Glycine max
tgcatccctcttgatttgtagtttgttttgtgctttagataaaagttctgccaaatcaagaggggttttaagatcatagtgtgtgttttgcaacaatggctaagttctttgctgctatgatcttggcactctttgccatttccatacttcaaacagtggtaatggctgctaatgaacaaggaggccacttgtatgacaacaaggtatatatatccttacctattcttcactctcttgtctctctttctttgtg

SEQ ID NO: 99292 - DNA, 230 bp, Glycine max
gttcttgtgatgttgatatcattgacacctcaaaaacatcacaaggaaattatgtacaacttagacctgcattgagcataatttccttgtgatgttcttgtgatgttgaaatcattgacacctcaaaaaaaaaaaaaaaaaaaaaaaaaaaaaaaaggggggcccccagattagggactctgcggcccgagaattttattggggccgggcccttgagggggatccatttt

SEQ ID NO: 99293 - DNA, 130 bp, Glycine max
gtgatgatggaattggaagttgacgagaacgaattgaaagctgcaggtgctgagatattcgtagacggtggtgggagcggcatacgaatcaatggttgggtgatcgagattaggaggaactccatactca

SEQ ID NO: 99294 - DNA, 253 bp, Glycine max
agcgaaagagccattttctgattctaccaaatctagggttagggattcaatttaccaacttcctctctctctctctctctcttcatattcttttccttgctacgagaaatataattactctctatatctctctcttgctcattacgaatatcagtttacctcgagctaatcatattcggaagaaacatggttttattatccggagaaaatcatcgtcacaattttctcggctaacctttgaattatatataat

SEQ ID NO: 99295 - DNA, 252 bp, Glycine max
ctgttgccaacttctataagacttcggcttcgatggctggaacacctgagcatcttgggatattgattagtgagaaactgaggcacccaagtacatggctcttgttgctgtcattatggctgctgtccacatggtttggcacattcatactgtgtggcatgttgagcctctcaacaaagtttcccttcttccatagctaccctgagttgtctcttcttaaacagcaaaaagtgatgagtcttggtctctcag

SEQ ID NO: 99296 - DNA, 221 bp, Glycine max
atataatccgtgacaacagtggaaagaccagaaaagtgtgggaccatccctaacatcaccttcacagcttctaccgattgctgaaacaaaagactctaccagcaatagcctctgatttcttctttcagtttctttaggttatggttttctcagaagattgaacttaaacacgcacaccaagaacgacagacagatcgaagatgggcattgcagtgggacgt

SEQ ID NO: 99297 - DNA, 245 bp, Glycine max
ataaaattggttctttatatacgtctctagctacataatcttctttcttcaacacacaagaatatatatatcagtgtggaggttaattaaaaaatgagcgataaagaagcgaatcttcaggcgaagttggaggcaacttcaacatgggctgttgcagttgtgtgctttgtcatgcttgctatttcaatcctcattgaacatattcttgaagaacttggaaagtggttacaaaagaaacaccaaaa

SEQ ID NO: 99298 - DNA, 272 bp, Glycine max
gttgtaactcaagggttgctgtttttttcctcgtgacatgatttgatttccaccttcactcaagttctcttttttctttcccttcctttcatttatttattgtgcctatgtttctttaaattttaatttatagttttataccatgttatgttaatgtcatatgtgcgctctttcttatattttgtacaagatttgttgattcaattatctgagaattccaagtactttgttgattgtgatttgtgaagcaggtttcaattgggaatctgatg

SEQ ID NO: 99299 - DNA, 272 bp, Glycine max
acaacacatcacaaagactttctcaaacaaaaccagacggttgtctagtcttccaaccttccccatattcctattcctattcctattatatcaaaaacaatgaatagataacacttcttcttctttatatatatatatatatatgggtgtgttttttggtcgcttgcccgctttttgcacccttcagcactaagttagagacggccccctttccttgcagatctttttccagggaaaggtttggattttttgagcgttttgtgataagagtg

SEQ ID NO: 99300 - DNA, 249 bp, Glycine max
gacacttttcttcttgggttgcaaagacacacaaagaaacattgatctcagtcctcactagtaacgcaattcatgctcttcgtctccgattcatgcgttaagccccttccgctgaagaagaaaaaccctttctctttatgtgttcaacatcaatggcttcctcgttctgcggctattccaaggcccaaatgtgcttcttcaagattctccgcataatttcatccatcccaccctccacacaacatacga

SEQ ID NO: 99301 - DNA, 278 bp, Glycine max
aaagaatacaaaccttgtctttgaaccagctcatggatcttccaccccagttcatccgtctagccaatgatatgcctgagagcaccatagccatagacggtgtcactgtgcctctcatctcactgtctcatacatatcatctcacggtgacggcaatagctgaagctgctccatagtggggatcttccgtcatattcgcttatggtatgtctacaaacatcgatccaacgttcgcaagtggtaggtacggtagtctgtgccctccctcaagaagagaa

SEQ ID NO: 99302 - DNA, 239 bp, Glycine max
taagatagaacgagaataatcaagacgacaacgttgcacttttgggaggtagaccgaggtaggtcgatggccatggagatttgtggtgaagtggaagagaccgtgaaggagtggaggcaatacttcagcactggaaaaatcaggagtgtgacatggaggaaaaaccagctcacagctctcttagagcgtgttcatgataatgaggatctatatgtaaggcgctcgatcaagatcttggg

SEQ ID NO: 99303 - DNA, 212 bp, Glycine max
ggaaaaggttcttcctgatcttccaatgagaatgtttcacaaggtttaaaagaagaggtacgagatgcaagattagaagttctagcaagcctaagacaagaaacagatgaagagcgcttgtcgtggaaagagctatctgcgttgcttagattagaatgtcgagagtacactccgttacttgcaatgattatggaatgtttagttcctaagag

SEQ ID NO: 99304 - DNA, 243 bp, Glycine max
ccgtcatgggactcagtctcatatcattgtcatggactccattggtgcccgctgacttctcatctgcggtcactgctgcactctgctttaatcgctggagatctagttgttgttgattgtgtttcatccgtatgtgtcctacctgattctgcttcgaagacaagaccttgggtgttagggttcaggcttgttcttactgtcaataagctggacatgtgcttccttgaactcgaagtcgatgga

SEQ ID NO: 99305 - DNA, 256 bp, Glycine max
gataagatcgcgcggttgatcacagtggtgtggtgctcggtggcggtgctactgtgcgccgctgcgggcgcgtcgtgggtggaggagacgacgaatccggtacgaatggtgtcgggtgtgcaggcggaggtagatcgggttctagggcagtgccggcgcgcgctggggtttgctaggttcatgagcaggttcagggaagagttagcgaagcgacatcgagatgagggataggtactcgatattctcgcgaaacctc

SEQ ID NO: 99306 - DNA, 275 bp, Glycine max
aatttggtttaggagaaaagatggaggaaataggatagggggtgggaaaattgatgaatagaggtatttctgcagtttggatggataggtgaaaacaaagggtcaatgtacagaatatgaaactgttctgtttccaaaatcactctctcttctggcatgtttcacacgctatgtagctatgcttctgtgaacttcccttcctattgaactgattgttctttcaaactttctattatgaaattttctttgttgggttttctttcaaggatttttta

SEQ ID NO: 99307 - DNA, 237 bp, Glycine max
cacccatccgcaaatgggaagcgatcatccgaagaattctaaacaaatcttctgatcctgaaagcaagcacaaaagctacagtgcccctcattctcctgttcaaaaaacttcttcttctgcttctgttaatgctctagcagacagtgtagatgttaatccactagacatgatgaacgaggagtatttaggaacttttgacaatgatgatctagaacaagaggaacagaaaagcagca

SEQ ID NO: 99308 - DNA, 238 bp, Glycine max
aataattgagacttgagagagaaaaaactaaactatagggcaaaatgagaaatatttgagctctcaacttcattgcccattcttgcccagaaccccataaaacacccaaggaaattgatgctgcttataagcaaggcggtggtttggcttttctagtaactttgactcactgacttcaaacacagtaaccaagcctcttccttcatgggaatatgagaatgaaactaaattcaccgtg

SEQ ID NO: 99309 - DNA, 232 bp, Glycine max
aaaaaaaacccacacctttttcactctctttccctaacagtcgcagattcaaatggagcccgagcccgaacccaagcttgagcctgagccagagcccgggcctgagtttagttcgaaagaggaagcattctcatactaccaaacctacgccaaatccgtgggcttttccgccataatcaaagcctgccgtcgatctcgaatctccggcaacttcattgacgccaaattcgcc

SEQ ID NO: 99310 - DNA, 235 bp, Glycine max
tcacaaaacaaaactcagtttgtaactctcacaccattttcactgatatcccataataaccaccatggctcgacctaaagaaattgctaccatcatttaccacaatggtcacattgtagacgatctagttcaaggatcgatgtacatgtgtacgaccctaatatttttttacgccagtcgttctattacgtttacacaattcattcggagtattaacaatcgtctccttactcaa

SEQ ID NO: 99311 - DNA, 231 bp, Glycine max
cttttgtggattcaagaaaactaaatgaatcactgtttttgtatcatttgtatgtatgtagttcctttcttcatcatgattattatgatccgttcacacttttgtactctggtaaattggtttgttttcggcatctttgaggaatttgcttgtggcttttataaggaattaaggttggatgcttaaagggaggaaatatcccaaactgaaactatattcagttcgtaaaaa

SEQ ID NO: 99312 - DNA, 227 bp, Glycine max
cggagaaggaaaatgaagatgtttggaatgtgtggtggtagcgacgatgataatcacagagatgatgaagacaaaagcccgattggggcaagagaagatggcagccaatacagcctcacaggagttcttcttccgtctctcggggccacagctattcgcaatggcagcggtagaccaaagtttcgccaatacattgtctcaccatataatcgtcattacaaactatg

SEQ ID NO: 99313 - DNA, 259 bp, Glycine max
agacaagagtacaaggatttgctgtatggcttagagaaggcgtcgcagagggttgtgatggctaagagcgaacttggtctgatccggaaacaagaatttgctgtcaagcagttgaaggattacgtcagccagcttgaaagcaaagttttcgagattggagaatgtcaaagagacatatcagaggcaaaagccttggtggacgaagcagaacgctctctgttggtaaatgttggaggtcctgaaaatggcagtacatcca

SEQ ID NO: 99314 - DNA, 261 bp, Glycine max
catggatcgtgattacagaactgcaaccaataaccaacaagcctttacgtacaagttcacaacacatgtttcacaaatgtagcaagaccaacactcaaacgcgagttcagaatagggaagagaacaaatatcagctcaccagctcattgaagggaagagaagtggataacagtgatcaaagtttgaaatggaagagatgaggtcaagaaagggaatagctacctttggagtgtttcgagtttaaaggagagggaatacagc

SEQ ID NO: 99315 - DNA, 141 bp, Glycine max
ggctcgagccgaatcggctcgagctcacccttctttgactgttctagcacaccacacccatgagactcctcctgctccttagtctcctctttcacgcggcggaagccaagggacagtggcagctcctccacaaaaacatcg

SEQ ID NO: 99316 - DNA, 262 bp, Glycine max
taaaatatattatgaacaattcaggtcaaagcatatattttgattacatccatacccttgggaggaacctgattgctgatagcatcaagaagcaaaggataaggcagtcaagtggtatggatgtaatcaaaatatattatgaacaattcaggtcaaagcatatatcgcgggatgattttgtgaagatgctgaggttaatagttggagatggtctgttgagaactacaatagaagatcttcagttcaagataccttccggtgg

SEQ ID NO: 99317 - DNA, 257 bp, Glycine max
gtgactgtgacaactttcatcggcacttgtcaactttttactgatgatgatgatgataaatacatgtttgtaattgagaggagagaaaaaaaaatcctatagatactgggttgttgtttttgttatgttagagatgctagaaaggggcatattgatgtctgtgcagacaatgaatcaccctccatttcttactggtgatgcctttagaaagaggactcagactcggtgcagatggagagcaaattcaagcacagctt

SEQ ID NO: 99318 - DNA, 252 bp, Glycine max
cccatttctcatgaacgcagctctgttctctcatctcaaacccacacaacaccgtgacaccgtcgctcctgcaaggttgccgcgccgcaccgtcatctgacggtggaacctgtctcaatctggcatccttaccgtcgccgtcacggaggctgctggaacagcgaccaacggcctccctttctgaacggcgaggtaatctactgtctgtttgaggtgttaaatagcatgtgggtgtctattgatcattttcct

SEQ ID NO: 99319 - DNA, 254 bp, Glycine max
agcgtattaacccttgtgatattagtggggtgccaaagaagagcagctgggacatgattgtggatactacttctcttgtaaacaaggaatcaaggaaagctatgcagcttttacaaggtctcaaagggactcggttaatcattccaagattggtcataggggaacttgaacgtatgaagaagcagttcacaattttcagaagaatttcagaggtttctttggcattggaatggattgaagaatgtatggtgaag

SEQ ID NO: 99320 - DNA, 253 bp, Glycine max
ctctttgccattcttgtaggttctgcttcccttccgagggggtccttcaacgtcatttgagggaccctcgtcctttaatttagctattcttattcttattaattaatttagccaaagagattatatatatatttatgtataaaaccgagagggattttgccattgtttctgggtgaaaatgttgtttagaacaaagaattcataaatatcatttccaaatttcttccgccacaagttcttggaggttgtttat

SEQ ID NO: 99321 - DNA, 252 bp, Glycine max
gcgaggcttttgttctccctcctttccttgttcctcttccgtcctccttcgtttctggtggacgtggaccccacaccggcggcggcactcccacgttaacatacattaatcatgtctgttcaacagccgccatgtgccgccccgctgcaaaacaccacaatggtggctgttgacaaagacaaaaacagtgttcatgctttccgttgggccgttaatcacctcgacaaccccatcatcattgccgtccatgtc

SEQ ID NO: 99322 - DNA, 247 bp, Glycine max
tgacacaagtcatcattaactctatgcctattcactctttcctcagtttctctatccatccatctctttcatcactttcctctatctatctatatatatatatatctccctctctctattctcttttactactgttctgcaaaaaagctattttggccctgtgccaccaaagccatctcccccatttttgctcctctatctcttttttctaatcatcacaattgggtgagaaaaaaacacacacaca

SEQ ID NO: 99323 - DNA, 245 bp, Glycine max
ctccagcactttcttctacttcttcatcatcattgtcaccacaactcacaatggagatcaagagtagagagaggatacaagtgtcaattgaaaaggtgaggagagacagcacagttgaagttgaagatgaagaagaggaggatgaaagtgtggttggtggtgagggtggtcttgcagaagatgagaagaagaaaggtggtggagggagtgggagaagagggtcaagtggagtttctccaccttct

SEQ ID NO: 99324 - DNA, 245 bp, Glycine max
taagaaggcagctgcagctgctgttgctgctaagcttgctgcctctacatcctctgcccttatgcttacatctgttctttcttcccttgttgcagaagaagctgcctccatgaatggtagcttaaactctactgggtttacttcagggttacctgttttccgtccagagaaaagacaaaaacttgaaaaacaaatgcatgcttctgagtttaacagtactgatatggggagctcttcttttctgg

SEQ ID NO: 99325 - DNA, 265 bp, Glycine max
ccacaaccactcttaatttctctgtgcattgctcatttacacacgtgtccaacctttcactttcagctttatttgaatccctctctctcctttccaaatggccagcgttgagctttcttaagcttggcacgagactttgttaaatgcaattagcaatctcccaggttgcacatcaaacaccaacaacagttccagaaaatgaaacaaccgcggtaatcaagacccaggaaacaaccccggaaccagtaccagccactgaggctcc

SEQ ID NO: 99326 - DNA, 265 bp, Glycine max
cgatctctatccaagggatttggcttgtattatttagcttcgttttgaagagttcatttaattttcacaaaattttgaagcagcaccaccactttttgttctactacccatttcatggaagagaagtagaaaggggaatgctttttgtccaagttggaaaacaaaattatatttttgaatatttctttgctcaatttcattctctacatgcaatgggatataaactacgtgtgataccctgttctgccccaccaccatcatttta

SEQ ID NO: 99327 - DNA, 251 bp, Glycine max
gcacaacacaggaaaccaactaaattctgagaagaagaaaaacattcattcttttccattacaaaaaaatggaacgctctacaaaactcttctcggcggcgttggttctcttcgcggaactggtggcacaccaggcagcagcctcacaggatctaaaaggacagaagctaatcaacaaggtatgcacaatcgccccaagcagagacctctgcgttcaaatcctctcatcggacccaataagaagccctaac

SEQ ID NO: 99328 - DNA, 249 bp, Glycine max
tccgtggttcgattcaatagtttagtacaaatgttgtgttctctgctgaacccttcgttcaccaccacccctctccctcgcttcaattccaatccgtaataaccgccgcgcgtgcaccgtagtatcatgcacgtcctcacacctcaccacctccaaccactacgatgtttgttcgccgccgaacatcaaggacgtggcccgctgccgccccgcggcggagaacgacttcacggcgaagtacgtcccttc

SEQ ID NO: 99329 - DNA, 249 bp, Glycine max
cggcgatcatatttctctgcaatccgaacagacccacccttctctgcaattagttgctgagttttaggtgagagaaaagtgttcggaatttcccaaggtttctgtgaatatggcgaataacttagcggtgcaacaactggttggttcagagatacatggattccacacaccgcacgcctctaacgccgggagcattatggaggaagcaagaaccagatggctccgtcccaatgagattcatgccatgct

SEQ ID NO: 99330 - DNA, 259 bp, Glycine max
atttgaactactttagtattatgttagcattttcatatgttaacacatcatttttaatcttgtatagttatacctattatttgccagttatatggataggtaagtaaggtgctgctaacataggggatttgtagtacaaaaatttacggatgtttcgaggtggaagagtgatgttggtgatggaaatggtaatttgtatactaagtggaccaccaaattgcaaacaccacaaggatactttttattataaagcacatct

SEQ ID NO: 99331 - DNA, 258 bp, Glycine max
  unsure (1)..(258): unsure at all n locations
gcttccaaccctctacatttatctttgtcaatataacatttctgatgctggactttttttgtattttccatccacacatcttatttttgtggcnacaccttncacattggnggagacattgnnagttagtgtagaaactcatagacttgagactaaacaatgagtctcattcactggtctttaatcttatggatcaccatgatgatgcttattatccataatttggataacgtggaaggaagataccactatcacagg

SEQ ID NO: 99332 - DNA, 256 bp, Glycine max
gccacttagaggttgaagcagcgcgcggcttcttagtgagattcaatggcgttcattggtgcagtcaaattcttgctgcagcacttacttctattatgcctcttcaactatctacctttttctcaaggtaagagaactggaatgaagggtacccgtttataagaagagcaagttcattgggttataatgggaaaagtggtgggtatgattatataatagtggggggtggaacagcagggtgtccattggctgcaac

SEQ ID NO: 99333 - DNA, 258 bp, Glycine max
atctacatcaagcatcatgttcgttgctcttagataatgttgtatgattatagacgactgcatcgtgtctgcctgctcagatgcgtacttgaccgattcctgtctcttgtaacaccaggtcccacggacagagacgatggataaaacgttgttggcctgtctcggttgtatgtattagctggtgcaccgttcgagagcacgaccttacccatagctgctgagagtacacgatgacaagacgctctagatggcttcaat

SEQ ID NO: 99334 - DNA, 259 bp, Glycine max
acgccgcactctcttttcttccacacaacatacgagttttcgaaaagtgcagatgcggcgatcgtggcggcgaccgtggacgttttcggaagtggattcggcgggtgacgaagcggaggttaaaggcggcgaagccggcgccgaggcccccgccgcgaggaatcaggataagtgggtcccgttgaccaaactgggccgcctggtgaaggagggaagaatccgaagccttgaacagatctacctccactcgctcccgatc

SEQ ID NO: 99335 - DNA, 250 bp, Glycine max
tggaagagaaaaatgggagacacaaaggagagagctacgaagaaacccgcggcaaaatggcctctcatcaaacccaaaaagaatcttcagattagccgcctccgagatttcgatctcttcacggggagctaggtccaacttatggcgaacattcagagataatgatcgaatgttggtggatgatcctgtccttgcagatactatttgggagtctggacttagcaaactattttctgatattaaaattcga

SEQ ID NO: 99336 - DNA, 257 bp, Glycine max
caaacctgcagcttcttcagatggggatgaggatttcatgtccctaacagtaccaaatgatcaaaataagaattttttacccaatcagagaggaactccaaatgcatctatagataatgatatgggctacacttccagcaatctatgggttaattcttcttccagtagaggagcacggattcaagctaattctcgagatttggatgagcttagtccacaagaaatcctatcatctcagcatactgggaaactttctg

SEQ ID NO: 99337 - DNA, 257 bp, Glycine max
gtttgttacctcactttgttttttttctctgcagtagtagacaaaaaagaaagacagaagaagaagaagaagaagaagaagaagatgttgagggttgcagctagaaggctctcttctctctcctcctccctccgtggcggcccaaccacgccgcttccgcttatgtctctcgaaacgcagtcgttgatgaccgcagatccgatccttcctcccatcccctttttcccttcagaggttttgctactgaatccctgatc

SEQ ID NO: 99338 - DNA, 254 bp, Glycine max
ctcgagccgagaaaatgaaaagagtgcgtaaagtaaagtgggagcaagaggttaataaaactggagacggcgtggtaccaaaggagcctctctctcctgcctgcgctcgagggagcaattgaagagagaagaagtaataagctacgatgatgtctattacttctataattggtacgccaaggaacagggttttggggttagggtcactaatacctggtaccgcaagaccaaggaacgttacagagccaaactta

SEQ ID NO: 99339 - DNA, 275 bp, Glycine max
cgcgtattcggctcgagactcaacaaccgaggcagaacttggcaaatcaaactatccctcagggtcaagttcagtcccaactcttgcatccccagaacatggtccaaaccaacaatattcttcagcagcagcaaccatccattcaaaaccatcaactacatagaagcctctctcagaacccatcacagcagcagacaactattggtcagaatcaaccgcaaaatttgatccagtcccctatgcctgatcatgttcaacaattacagatgtctgac

SEQ ID NO: 99340 - DNA, 251 bp, Glycine max
gctaattactagtcgttgaatccatggctcccccagcagcaaagctaagagagattggtttggaaggctttgctctatggtgcagaggcagaagggccagtagcaataatggggtatttcctgcatcacaaggacgttgggtggttcaagtgcccaatgatgagatggaagagcttgccttgaatagcaaccaggtagctgctcgctttggtgggataatgcttctcaattgcttcaaaggacacaacata

SEQ ID NO: 99341 - DNA, 260 bp, Glycine max
atcttgtcaatgaagggatattttagtgtcaagcctcaagtagcacaagtcaaggattctctcatgtgctttctggctgcttgagagaaatcccaaatttccagctgagaaaacgaagtcaacatcgtggcatgcatgagactcggtttgctgtaatctttatcactttgagtttgagggtttatcaaatgacacaatacacatctgaaacgaataggagttaaagattccagcctcgacaaatctttataggaaagtaa

SEQ ID NO: 99342 - DNA, 251 bp, Glycine max
tgctcgtgtcctttaaattttctgtaagatatacatcgcttttattaaacatttcatttttgttgtttatccaaagttttcttcaagatgccttttcgattttcgtttttccatttcccccctttataaaaccatatagtcattgtagttcaaatactctgcttttttagttaatacactgtatttacataaattatttgtgtttagttggtcttgtcttgactactgatacttattagaaggaaatatag

SEQ ID NO: 99343 - DNA, 208 bp, Glycine max
ctcggctctggttttcttatttagacacttactcctcacactttcttcacacgctttcatctctgattcagatatgagctctcgtatattccccagccatggccgaaaaggtcaccataatgaggctcaacgtttatcctcaagtccatacatgctaccgtctagtctctaaatttctatgtacacaagctccaatcagagacaacgt

SEQ ID NO: 99344 - DNA, 251 bp, Glycine max
  unsure (1)..(251): unsure at all n locations
cgcgtctcttcactcttcaattcaatggcttccacgcacttctccattgaatgccacttccacacaacatacgatataaaaatntccgtcgtctccgncttctggaaagattttgagttggacaaggagaaatctatactggatgagcaagggcttcgaattgcagataaccaggaaagcagtcagaaaaatcgccgcaagcttgccgagaacactagagacttcaagaaggcttcgcctgaggataagtt

SEQ ID NO: 99345 - DNA, 226 bp, Glycine max
cttcaattagacggataatattgcacggaaacaagcatgtttgtgtgagtttttagtagctccttcccctggtctcggggattttatgttagtggctttttcgtagtgcacaacctaccaaataaaagtgctaatttgaaattgaaattttcaattaaaaattgtatgccaatgtgaagaagctaaaaggaaatacgatttgctgagatgaccataattttgaatt

SEQ ID NO: 99346 - DNA, 244 bp, Glycine max
gatagatttgtattgttccttcctccttcatgagtcgtctcctaaacattttacttccttcttccaccgtatcgtaggataagaccactcctaacacgttattattaccttttaattcctattttctttctattcttccacattttcttcttttccgggtgttccaattcctattctgatcaagaccctgtgagaaatattaaagacgggccactttcaaaatccaccatggaatccatttcaa

SEQ ID NO: 99347 - DNA, 240 bp, Glycine max
cctaattttatgtcaatttctattgcccaaagctctcgtaccctcactctaaaactctcgctattgtgaactttgttgctgcgtttgccactctgtcgttcccctctccgtgatggcaccttgtgtgacaaggtcttttgcttccttctcatgagaaatgcaaaatgggatctgagatttgaggggttttaatctgtttaaagatataagaagtgcaaaatgagatttgagactgagatc

SEQ ID NO: 99348 - DNA, 271 bp, Glycine max
cacttttaccctctccacgcataacaacactgacacatttttcacctcctcctcaaaaaaacgtttcactgacacaagcacacgggcaatgtctcactatatagagccactgatgaccacttcttcatagttcagagagcctttctccataattaagaaaaacgctgtccttttgtgtccttttttcttcctctgtcctcgcacacatgggtcgccattcctgttgtttaaagcaaaaattaaggaaaggtttatggtcccccgaagaaga

SEQ ID NO: 99349 - DNA, 271 bp, Glycine max
gttggtaaaaaatgtacaaacacattctagagtccgaataaaaagtatgtgtgggtgtgaactctagataactattcatttgcctagttaagaagggaggaaactgtcagatattttcttatcatttcaaattcatgtttttgttatcattggatgaaaggaattgagagcctttaggatgtatgacttaggtagtgggtacaaatagggtataatgaatacgccaataactaatcagatacatcggcaccgcactgatcacgaggatctt

SEQ ID NO: 99350 - DNA, 273 bp, Glycine max
tctcgagccgaatcggctcgagaccctcccccaaagccctcagcacttgtctcaacctctaccttgattcgaatcgcgtagatttagcgcgaaaattgcttctacacgccaaacgggatttaactcgtaagccaaatgtgtgtgtgtttaatatcttggttaagtaccattgcaaaaatggggatcttgattctgcttttgagattgtagaagaagcgagaaactctgagttttcttaccctaatttagttacttactcgacccttatggacg

SEQ ID NO: 99351 - DNA, 266 bp, Glycine max
atcactgtatgctcattgtataggttacatggttggtaccgcaactttatctcacagattaggtggcctttactgcttctactgtctttatgagactcaaccatttaatccttcttttaaggtctatctatcccttggagaattaaagaaacttagaatccttgttgctgatgcaaaagcaaatgatattaaagtagcacttgctttagtaaaaagaatgcttgaaagaaacacattcctttttggctctgttgacttgatggaag

SEQ ID NO: 99352 - DNA, 267 bp, Glycine max
gtaaaaccaatcacaaagtttccatgggaatcacgaaccactcccccagcactaacctttaaggagttgcaattcacagccccatcatagttcaacttaaacaaaccttcaggaggcggactccacctaattccatttggataagacgtgatctcttccatgagacgaagaataaccatcaaggctccatcgctctatccaaactattcattaagaaatgaacctgctatactacaccattggctgctaaccaatttttattaaaaa

SEQ ID NO: 99353 - DNA, 262 bp, Glycine max
aatttgcatgctcttcatctcatctgggaacccttcattttgaatctccattttatggatcgtcacagtcagatactctaaactcttgtatttccaagacgcagattgatttcacgacgtcgtaccggcggccacttcgctctctcttctttctcatcggaatttgcctaacgcaaggattcagaacactgatatgagacttgaatcgggaacttgcaatgtgtgctcagctccttgttcatcttgcatgcatcttaaccat

SEQ ID NO: 99354 - DNA, 257 bp, Glycine max
ggctggtggttatgctgctgggttcactggactcacagacatggctggtggttatgctgcatggacacaaaatggacttccaacagaactatgaagtgtttcttttggaactgcagctgtaaatagaataagttttgggaggagtcccatgcatgcaaatgcagaagcacttcaccaagacagtgacaatctgatactggaacatgtaaatgcagaaagagcggggggggcagtctcgcagatttcttatgcagact

SEQ ID NO: 99355 - DNA, 260 bp, Glycine max
gagctctagggttttcttcttgctcccgttcttcttgctctcccagggcggacaatggatttgtccaaggtcggcgaaaaaatcttgagctccgttaggtccgccagatctctcggattgctccctcccgtttctgatcgccccgaggttccagctcgagctgctgagacagctgctgtagctcgtgctcttgcagggttacctcctcatcagagatacagtctttcttcaagttcagaagaactaagttcaatatatgg

SEQ ID NO: 99356 - DNA, 264 bp, Glycine max
gttggattctttttggtttctttctttcccatgtatatctttgtttttttcatttgattttagtttttcccccagacaccagccatggctcttcctctgaaaccttcttgagccaaaggctgtatcaagctcagaacaatcatcagtcagggtgacatattctgaaggtagtttgatctttgaagaaagtaccttattcttgagaattcttaagattatggaagcttcttcaggtgttgattatgctgacacaaacatgagcat

SEQ ID NO: 99357 - DNA, 246 bp, Glycine max
gtgagataggaaagattctcagaatctagaatatcagcatggtttttttgcagggacaacaaggtttgaattaggaacaattaaacaagatattaaggcacttgtggggctgtgtgtaaggtttctagagcattggattacagggtaacatttgcatggtgacagaaggatttggaaagccaatgcacaaagttttgaaactttgtaaatgtgggggttgattagatcaaattgtgggaaagaaaa

SEQ ID NO: 99358 - DNA, 245 bp, Glycine max
ggaaaccctcttaggatatttgtgattgtgagagattttctggggatgttagataatgtgtgtaaagaacttagaaggtctaaagctccacgtagcccgaaccctcttgctatgctccctttagatagatcatagactagaattaaacactgccttgtgtgttcataggaattgaaattttttaaaccaaccgagtgtaactttattttgatttttgtggagttttggagcatttggattttgta

SEQ ID NO: 99359 - DNA, 243 bp, Glycine max
acagcgcaacaagcagtgtttcatcaccatagtcttatttaaaaaagactacaactttccccttccttaatccttacgcacaatgattggctatttgacttgttcacttcatggttttcgctaagtttgtcttctacttccgtgttagtgtcacaaaaatttgaaaaaataggttatgtatggaacgtgaaacaattttacaataaaatctcattataaactgccattatattagtttaacca

SEQ ID NO: 99360 - DNA, 209 bp, Glycine max
cacattttcactcctcacgcacaactcaccacgcacaatactccattccttatggtctctattgctccattctgattttttgtttgttggcactcaaagggccacaccctcatcttgtggttctccttcctccactcccttcagtctctatcactgtgatacatatatgattcaccttcactcactataattcttcgttcctgttcccc

SEQ ID NO: 99361 - DNA, 240 bp, Glycine max
ggctttgcgagctgcacatggaaaatggggaaagctgggagctgaagaggaagaagaagaagaagaagaagaaaaggaggagggtggtgagtttggtggtgttctgaggatgtgggagggtgaagttcttgattgtttcgatgatcatcgcatagctattgaatccacgtgttgtccttgctaccgatttgggaaaaacatgaagagagctggttttggttcttgctacattcaggcagc

SEQ ID NO: 99362 - DNA, 265 bp, Glycine max
agccttcagatgctattgtctctaatcagttcaatggcctcatgaagtggatgataattttccatattttattcctacgtctgtaatagaaggagaccttatcgccgtggtagaaatcactctccgcaaagaattgataccatggttgtacaacatatctgtgcccaattccaatgtgaaggaccacaacattccactgcaatggaagtccaaatcttctacgtgcatacacagggtcgtttccttagtcagttagcaagtgtga

SEQ ID NO: 99363 - DNA, 216 bp, Glycine max
aaagaaagctctctcagagtagagtttgagatcatgaatcagcaaatggatgagctaaaagaaaagttagagaaggtggaagctgataaagctgaactagagatagctttgatgaaaagtgaagggtgtatggaggagtcacagcttcagttgagggaggcacaagagaaattggaggagttgcaaagagaggtagaaaatgcctacaaatcaaag

SEQ ID NO: 99364 - DNA, 269 bp, Glycine max
cgatcttatgagaactagtataatatcatcatcaagatttgtgcttagaaaagaagaagaatgcaaagtaataaaacatgttaacagtataggccaactgcgggaggcaggtcttaaattcaaggaatatagtggcatttgaggaatgtcacctttcagatgatacaaacatcattactcaataccgtaagattctagatttgcttatcaacactgaaaaagatgtgaatgtactagttgataaggaaattattgtcaattggatgggt

SEQ ID NO: 99365 - DNA, 146 bp, Glycine max
ctgaggcactgaaagtgtgatatggcaagagtcatttcctcttactgcgcacgcctcgcaatgcgcctcttctccaccagcaccacagccaacgcgttcgccgtcactttacccaaaccctcatcactctccctctcatcgggtcg

SEQ ID NO: 99366 - DNA, 217 bp, Glycine max
gaagcatatgcctcaaatgatctatacaatacattgtatgataggacagtaaaagttcctgaagatgtcattctcccatccacatctaaatgcgccttcccatcaacaatgtattgtctgaagcatatgcctcaaatgatctatacaattactgcccttcatgggctctttcttggccatatcgcaggcaaaatttgttacgggaaattattggtta

SEQ ID NO: 99367 - DNA, 169 bp, Glycine max
ggtaaacaacccatatcataaccgtactcactttcctccggttcgggctttttcagcccgtaaccttgcactgaatatcagtgttggcttggcatcctgccatgggaacaaacacaacgctcctttcccttgctgccccaccctcattcctttctctttccacccttta

SEQ ID NO: 99368 - DNA, 147 bp, Glycine max
  unsure (1)..(147): unsure at all n locations
agacaacacatttctgcacaatataatagaaagatntctccatcacgtaaaaaatgggcactagtttcatgctaatttctccaccgtctctgctcaagcctcaccaagtacccctcacgactccattccctcttcctcaaacccatc

SEQ ID NO: 99369 - DNA, 258 bp, Glycine max
agggactacatgctttggtttatgatatgaattcagcaaatgaaacatgggagtgggttaatcttaaagaggtaaaattttacaatattaatattcttccgtctatcattcacatacaatctagttttagcttggttctttcttttcttttctttttaagcaatattttcctcctgacaagcatagccagaaccttttgttttcacatatcttacatttcccatggtgaccttgtgtctcttactttgaatcccatac

SEQ ID NO: 99370 - DNA, 255 bp, Glycine max
caaagtcaacgactgcatgaaatggtcttgaaacatcctatagagattgatgaccttttgcaccttattgcgcaatcaaagctatctcttgttgcaactgcgaaggcaactcctgttcttagtgcattggcatcgttggaaaaggaaactagtggcttaatcataattggaccagaaggagatttcactgagaaagaagtgagtatgatgatggaagcaggtgctacagctgttagtcttggacctcatcgtctt

SEQ ID NO: 99371 - DNA, 194 bp, Glycine max
tttgattgcagatgtagtgtagtcctaacgcaaccttattttctcattcgtcgtcgacaacgtaaatctccattatagtctgttcgtgcttcctctggtattcttctttttgtagtgctgttctgttctcgttctctctctactaagatcaccgccatgatcttcgaatcacgatccctcctcttcacgctcct

SEQ ID NO: 99372 - DNA, 265 bp, Glycine max
  unsure (1)..(265): unsure at all n locations
gttgtgtttcttgaaccacagtctaagaggctttttgtcttctattggtgngtaagcgattcagtctcgctaagccacccatcttctattggttgaataagcctgggataagcgagtcagtctcgcgaagcccaaagcatttttaatttctgagtttttgttcatgcgctaagcgcaatttcttctctgttttgttttattttggaattgagcttagtgatcctgctcgctaagccaattaagttccagtagttattttgggcta

SEQ ID NO: 99373 - DNA, 271 bp, Glycine max
gttaataatcgatgttgtattaatcaaataaccgatgtacaataacgtttatgcagtagtggttgtgtttgaagattgagggctatatatcttttgggtcgaattataattcgatcctcataacttagcattgatgcatgttgtgcttgaggttcaaggactatttatccttccgatcggatcacaatttgatctcacaatttagcctcaccttatgcttgagacttgaaggttatgtatccttcggattgaattatgcgaccatgcattt

SEQ ID NO: 99374 - DNA, 251 bp, Glycine max
ggggtacaagttttgtataaatgtagtcgtaatatatttgtgtggtccctacatgaaaaattgcttacaagttagaccttactgtataagtctaaatggtgttagtttatagtagtattcatataaaactaaaattgatctgtcgggtgtagggaagtgtataattttcgctttatatctaaaatgaaaaacgatgttattttgtaaaatagagaggggccgaatctaataccgttgtaatgtttccacac

SEQ ID NO: 99375 - DNA, 263 bp, Glycine max
attgaaagatagaaattgatatctgtgaaaaatgacactagaataacaaccttagtaattaaatatgtaaggctgttttatggagaggaagatttccttgtttttgtgtatagagattagagggagttcaagttgtggttaatattcttgtatatttgtagatgcatgatacttttaatttcgagatgtttaatttctatcagctaatctcatctctttatcatctgtaacatgttattattccttcctcctttaacttgtgg

SEQ ID NO: 99376 - DNA, 261 bp, Glycine max
tgtttttctacttgtttttggacttgatatatttaattttttagaatgccttcattttggcttatgttcttttggatatctttgatgaacttctcatacaaatgctgctccattaattaagtattgtttaactcccattggtttcaaacatctacttgatgaattaccctctcctcattgataagaactttgggagaagctcaccacaaaagctagacatagctatagaattgactgtggccttataaaccccttactaga

SEQ ID NO: 99377 - DNA, 259 bp, Glycine max
gtttgctgaagagcttgaacttgaaactcttccaccctcttaccctccccctcaccctgttcactcccccgcaccagcacctcttcacgcaccagcaaatgctcctgccccacaccaacagcagcaccagcaccaccctccagcaccagcaccagcacgagcacctgttccttcaccttctgaccacaattaccctcctacccctgctgctgctaagcctcctagtcaccaccatcagcatcaccctcctgctcctgtt

SEQ ID NO: 99378 - DNA, 263 bp, Glycine max
tagtctaagagaaaggctgttgccaagtcacctgtcaatgctagcggcaacgtatagcgattccctcatatatctaagttcacgtctacgatatatctctccctctaattaaacctctctatccatatctaaaatttcacaatgatctcaattaattagatttccctctctctttctctctctaactatattgcaaacctttctctctgctttcataatcagcaatttcatgggtcttagagacattggtgcttcactgcccc

SEQ ID NO: 99379 - DNA, 197 bp, Glycine max
  unsure (1)..(197): unsure at all n locations
ataaataatatgatcattgatcatcacatcgtaccacaagatattataatgtcttctcttccttantgtttcttttttttgnnttactancacaattacgatgacaattaggaaaccgtcgacgatgatgaggacgatgacgacgatgacaaggaagatgacgcccaaggtggtgctgagggtgggacgcagagcag

SEQ ID NO: 99380 - DNA, 214 bp, Glycine max
cagcaatcaaatctgtaacctttcagaactccggaccccctttgaaatttcaacatgaccggctatcccagccagcctccgagctacagctacagcgcgccatggctgaagcaagtctaaagtgtccctacggcatcgcaatcatatggggactatccgccatcgtaataatacgtggctcatccgacaccacgacgctacggagcggtgacta

SEQ ID NO: 99381 - DNA, 260 bp, Glycine max
cctctctctttctctgtgtctagggttttaggagttcgaagcatcatcatgtcttcggtggaccccgagatcgcgaagacgcaggaagagcggaagcggatggagcagcaactggcgtcgctcacctccgtcacgtttgataccgatctctacggcggaagcgacaagggctcctacctcacttccatccctgccaacgaagacgacgagaatctcgacgccatggacaacgaggtcgcgcgcaagctggcttcttacac

SEQ ID NO: 99382 - DNA, 173 bp, Glycine max
taaaaaaatagaagcagaaagaagtgcctctgtctctttctctctctacaagccttcttcttcttcttcactttgattttccgtcttcaatgcaaacccaaccatgatcctctacacgtaatcccaccttacctaagctaaaacccttttgatctcactgttccacacaacat

SEQ ID NO: 99383 - DNA, 276 bp, Glycine max
tcactcgagcgctagaagctagttaaactgagagtccaatactcaaatcatgccaaagtaattgatcttatttgtttccatttcccttgagattgatttgaatgtttgatgcataaagcaatgggactttcatatatcaaaatgttttgacttctatccattttaactcatgtgaattgaagtaacattttcctgttgtagcttaagatgaatatatctcatgcagatagtatctattacactacctggttctaacactcatctaataaaaatctg

SEQ ID NO: 99384 - DNA, 271 bp, Glycine max
acacattctcctaaatccatggcaacccttcttgtccagcaccagtttcaagccaccgaagaaggacaagatgagtgatcatggtcgtgcaaaggcagcatctggttcaaggaatcgtttggaatccaagaatattgtcaatagaacttcctcctttaattacagaagcagctctgctgttccccttcatgagttgccatgggcttcctttgatcaatatatagaggacaagggaagagtaatccgatctatatttccagaaaaatcaaca

SEQ ID NO: 99385 - DNA, 254 bp, Glycine max
cctcaatacccacgcaacacaaagttccctctactctctttcccataatttttcactatcattccttcccactcgctctttcttcgacgctcttcctcctcattgctcatgtcctccacgacgtcgttttctctctctcacgctgttgttcccttctcctgcaacacaaagcatggtcatttatctcacaaccgccactatctctccctcccaaaacccatttccctgaagcccctccgatcgccttccttcaa

SEQ ID NO: 99386 - DNA, 267 bp, Glycine max
cggcttggtccctctcgtgggtgagaactacgccctcaagctgaaaaattccatgcaagaccttttggccgagattcctaaagaatccccaaatttttctcctttcgtcgatgcgttttacgaattgatgcaagcgaaggttgattcatcctttgaggtgatatgggtctacgctgcaattaactttcgtggtcgtaactcggagaaaggtgatgccttggatcgaatattggccgcaaaagacttgtttaagttgctatctgcgtg

SEQ ID NO: 99387 - DNA, 266 bp, Glycine max
attatcatttgaaaatttacaaagcatgaataatttttagctttttccttttaacaatgtatatggtcgatcaactgatactttgttaaaaggactaagctcaaaattattcagaatcaagctagagcagagacatttttcaggatcagacaagggattaggcttttttcatattcaaactaagtagagcaggattcgatcatagtgtacatgatgtgggtattgcattagtcattagtgcatgctgtgaaatatattctttgagg

SEQ ID NO: 99388 - DNA, 267 bp, Glycine max
attttcctttgtttgacttgattccttttctgggttgttgtcaaaatttgagcttgttcgtggacgatctggttttcgatcgatatcctgttttgtttactttttccttgtggggttgcttcacaatgaaaaaaacttaatcatagtttagggttttcttttttagaaaaaaaaatattgttggctaggaattggagatttaatgttttactcctcattaaaagtgagtataagttacatataaaacttcaattctaattaaatggt

SEQ ID NO: 99389 - DNA, 265 bp, Glycine max
  unsure (1)..(265): unsure at all n locations
ctgtgaaacctcccataaacctaaaaccctaattctcaacaaccatgagctacgagaaccctagcttccacttcaagacacacagacaagagactcaatgcaatcctacgatctccttccaccaccttcccttctgtcaacgtgcctctccctccctcttccaccacgcgccgttctacaancaccaccctccgttccccccaacccaccaacgccctcatcgaccctaatccctctctccgcataacgacgccgacgacgacga

SEQ ID NO: 99390 - DNA, 259 bp, Glycine max
ccggagtttgattcaccggtcggagagtttctgcggcggtggagggttgcggagggatcagtttccgaaggggtttcggtcggagagggagcgatcgcggagggaggggagcgtgtcgtcgaccgcccgccgtttcgtccatgcagccgctgccttctcctaaccccgtcgacacctccgctgtttctcagagactccaaaaggaattaatgactctcatgatgagtggaggagatcttggggtatcggcttttcctga

SEQ ID NO: 99391 - DNA, 144 bp, Glycine max
gaccagtttcagattagggctggtattggccgagattgcaccctcgattacgaggttgaggaggatcaatatgacaagcaggctataggcaaagtgaattcgggtgatcgtgtgtatatgaaggatctaaacgacgatggagtt

SEQ ID NO: 99392 - DNA, 245 bp, Glycine max
cttttataattattttaaaagtttaatttcaatatattattggtgactcgtaatttgtgaagttgtttatacggtcaactaattaaaaatcacccttaattttgaattattatattttatatcaaactcattgttttaaaatattttcatattgcataatttcctttatttttataaatagcatggtattttgtaatatacaaaatcttaggtcataaaacaatatttattgtctaaattcgtga

SEQ ID NO: 99393 - DNA, 256 bp, Glycine max
attccacaatggattgggcatggtgaagacattggagatgtgctatctatcaatgtcttggctccaattctgctagttcttctgacttttattctctgtcggggtgttcaagaatcgtctgttgtgaattctcttatgacagtgaccaagataatcatagttatcattgtcatttttgctggagcatttgaggttgacgtttccaactggtctccctttgctccaaatggtttaaaagccatatttacgggagcta

SEQ ID NO: 99394 - DNA, 253 bp, Glycine max
gggattgtggcaaatttctatagcctacattcatggatgagtttggcttttgtatccctcttcggatcccaggtatttgcttcttcatgatccttgataatttcttagtaaaatattacctcttgtgtttttatagaaactaaagcatacaattcacaccaccaaagctcatatgaagttcctgcaaatgaaatttcatgaggagttctccaatctaggtaatattttgcttatgattaatttatttaagttc

SEQ ID NO: 99395 - DNA, 237 bp, Glycine max
tgacagtgttagtttgcgctttgtgttcaggttggttgtgctgtacattttgtttgtgggttgcgttgtggtgtcgacgtccgccctcccctccgtcatcgtcaaactaatgggtgtgattgtttcgtttttgggcgtcttgtgtttgattttgggagtcatagctgagaacaaaaagcgtggtggtggaatgcccgtgcccgtgaaggatggtgtgacatgcaagttgtcagccga

SEQ ID NO: 99396 - DNA, 239 bp, Glycine max
gtgccagctgaaggaaggtgatgttgtggccaagatgccaaaggaagcttgcatcaccacaaagaccagtggggcacgtaagatcattgaagaggctggtttggatggtcatttggggcttgcatttgctatcatgtatgagagaagcttggatggggactctccttttgctggctaccttcaactcttgcctcaccaagagtgtgtgccaattgtttggaccctcgatgaagtaaacg

SEQ ID NO: 99397 - DNA, 273 bp, Glycine max
gaggattggtcaagtatcccttcattgccgttgaaagtagtcaggagaagatttagtgtcaaatgtagaaataaaatacacagaagaaaaaaagaattgaaaaagataaactttgcagattggtctagtctccctcgaggtatacttgagatggttgctgaaagactgacctttatcgattgcttatcaatcagcaaagtttgtacaagttggaatagagttcttggtgaagaacttcctaggtggcaaaggcatggatttccttggctcttg

SEQ ID NO: 99398 - DNA, 270 bp, Glycine max
tcgggtataaagcagcaggtgatgccttggagttagttaagctttgtgaagagtacgggatggaagcttacataataaaatctgttatggacaagaatcgtttttctgctgatatgaattctgttaccaactccaaagagaggggacaggtctcatctacacgtgttcgtgaagcccttgccgtaggggacctgaagtatgtctcagagcttttggggaggcctcatcgtctcatattaatggccactgatcaagaaagattcagtactg

SEQ ID NO: 99399 - DNA, 106 bp, Glycine max
tttacattcggacacgataacaacagcgacatggattaaggtggcacagtggcagctattattgaattgttgaagagaaacctgaaactacaatttcacccaccct

SEQ ID NO: 99400 - DNA, 265 bp, Glycine max
ctgaatcatccttctcatgctgcaattggacttagactcagactcaaaccctacccaaccaatttcacctgcaaggcagttttctccgacgatgccccctttgccgccgcaatcggtgcttgcatgttcacttctttgcttttaccagtctctacttcctccgaagacgacgatgccgactccgccgtcaccacaaccgacgcaaggctcgccgtcatggggattctcagtttcatcccttatttcaattggctcacttgggttt

SEQ ID NO: 99401 - DNA, 135 bp, Glycine max
gcgttcttcaatttattttctttctgcatctcatggatgtctccacacactctacatagaggactgtcggagtaacaccttctgatcctcgaaaatcacttccacaatggggtcgtcagatccacaccacacaac

SEQ ID NO: 99402 - DNA, 262 bp, Glycine max
  unsure (1)..(262): unsure at all n locations
cagccttttgcttgcatgtatgagtggctgcaacttttatttgctctgcctgcttttccgtgaaattagaccgaaattatgttgtgtaaatagtcagaaactatatctcagttattgactatttacacaacataatttctgaanaaaaaaaaaaaaaaaaaaaaaaaaaaaagggggggccccccaaaataggcctgtcccccccgggattattttcggggggggttcctgggggggaaacgttttccccaaaaggggggtt

SEQ ID NO: 99403 - DNA, 264 bp, Glycine max
aaaacgactaaaattatagaagcacagcgaagccatagaaattatcttgtaaaacaagtcaacaaggcttctacagtgattgtggacaaaccacttctaacaatcatatagaagaatcaaaaaaacctgcaacatttcattggtggtgataactttgttaagaaagacatctatatcacaattaattaaagcaagaatcttagctttcaatattatttagcaagaggagaatgatttaagtgaacaagaagtgccactgacgaa

SEQ ID NO: 99404 - DNA, 150 bp, Glycine max
ttccttctcaaaattgagatggacctacttgattcttgaatttatcaatagacaggtatctcttctgaatgataagaaacagcagcctacaaatcggcactagatcaattcaagaatcaagtttttccttctcaaaattgagaggggctt

SEQ ID NO: 99405 - DNA, 262 bp, Glycine max
gaacagaacaaaggcaaaaccttcacttgatattattttcctctacttccaggtttcttcttccctccattcaatcatcaaaacattctcctttagcaacaatggcaggtgcaatccaaaaactaccccttgaacaatccaagaggacccaaataagttctattaccatttcctctacaaagccacactagtcctcatcttcttcgttatcatcccattgtttccctcacaggctcctgaattcatcaaccaatcgctcctc

SEQ ID NO: 99406 - DNA, 258 bp, Glycine max
cttattatactctagccttgcaccctgaaagaaaacaggaaagaggaaactagtgcaaagattaacatcattaacaccatatcaaagtgaaaaatataggctaagaaaacattatattgagacattcagaatttagattatttttcatatacattttctctcatgctttatattttgttgatgctcttgtgtccagtttcacacctaatctgactatttactttgtttattggtactgttatttcagatatattgtca

SEQ ID NO: 99407 - DNA, 124 bp, Glycine max
ttctcgatcctcatcggctcgagctaatggtctacgttctgcggagcaccgacgtcgagatactaggcacagcgtcatcggttttctacccccattactcttgtttgctcgttctctgccggtg

SEQ ID NO: 99408 - DNA, 252 bp, Glycine max
gaaatacatgccaaacctaaccagttgaaatgacactccctttatactatatacttatctcccttcaattaatctccatcttaggtttgtgtctatcttacaataatgatgttgatttgttgagacaacttcgtcggtatttccagtgatcagcaatattttccattggcactttaatttcctaccctagctagttgatgttgtgttttcataaatgacaatctggaccaagccacaaaaaaatattctgcc

SEQ ID NO: 99409 - DNA, 253 bp, Glycine max
gaaattagggttgaaggtgatctacccaggccttgaagatcacccacagcacaaattgctgaaatcaatagccaacagggaatatggctacggtgggcttctttgcattgacatgggaacggtggagagggaaacctgttaatggctcacttgcaaaatgatgctcaatttggattcatggctgttagcttggggtattatgagaccctcatgtcctgctctggtagcagcactagcagtgagatgactgagg

SEQ ID NO: 99410 - DNA, 253 bp, Glycine max
agcaacgtgaacctaacctaaccaccatgtctttcttctctttcttgaagtataaacaccttgtctttggtcatcttatatatgttaattttgttgcctaggttcaagaagacctcagcttcatccaacagtggagtccttcttcatagaccacctcaaccctttgctaccgaagcctgccttgtcggagcactcaacctcaaaccccgcctcctcctctgaacacatccccgccgtcatgtataccgtcgtg

SEQ ID NO: 99411 - DNA, 249 bp, Glycine max
gcttatgaagtttgaatatcagagaaaagttgcaattctacacaacaagaaaaataaaggtgccagtgctgaatccttagaaaagactaaagcagctgttagtcatttgcatacaagatatatccttgcatgcagtcaatggattcaacagtttcagaagtgaaccatattcgagacgtccagttgtatccgaaacttgttgctcttattattgagatggcaaatatgtgggaaaatatgtgcatacat

SEQ ID NO: 99412 - DNA, 246 bp, Glycine max
gtcagaacctccagtggcgtggctccgatctgatcgtgcgcgtcgggaagcccgagacgattctcatggagatcgcgatggctgtcggtcatggctgtaccagtgagtaacagatctcgtgagtgtacttttgagagggacggtgaaggtgattgttattgattttctggatctttcatttttgtgatttataaatttgatatgttgcactgccacaagtaacaggggagactatgtttttgaggt

SEQ ID NO: 99413 - DNA, 153 bp, Glycine max
ccccgtcaaggccatgaaccctggcttggtttatgatatctcctctaatgattatgtgaatttcttgtgtacttcaaattacaccaccaacactatccgcttcatcactagaaggacttatgattgcgtggggctaaaagggcaggacattct

SEQ ID NO: 99414 - DNA, 247 bp, Glycine max
gtttgttaaagaagaataggaatggggagtgaaaagggaacagacagagttgaaatgttaggacgtggtgggaaggcctatgtagcataatatataatacaagtaataaagtatgcaatatatagatgagtgagagtgtgatagtaaggagaaaaagaaagtggtatatattgatatatgtgtgtatttcctttgggcttgaaactcaaaactataataatgggttcttcttctcctccggacacta

SEQ ID NO: 99415 - DNA, 244 bp, Glycine max
aaaacggcctgctaatgctgccaatgggtccaacaatattgtctcaaagaaaggtcgaggtgctggtggtttgcaaaatcaacttgtcaatagagcgctggaaggattgtctggtggtgggaagggggtatgaggggcagaggccggggctggggtggtcgtggaagaggaagaggagggtatcatcggtaactttgttgcagatgtgatgtagaaaacgtcagacttcaccaggctgtactag

SEQ ID NO: 99416 - DNA, 243 bp, Glycine max
gtttatgctgcaaaatggccactctcagggcagaccaaaattacattgacccctggtagtggaatacctgttggacctgtgatcaatgccggggaaatttatcaagttctacctcttggtggtgaactcatactagagatgtaattgcaatggaagatttggcaagaagcattcagaatcctcctgctgattggcatggtgatccttgcctaccttcgggaaattcttggactggagttacat

SEQ ID NO: 99417 - DNA, 246 bp, Glycine max
tggagctaaattaattgagttgaatatgtacgaagtaactggcctgctactgaattgaacgacaaaggggaatgaatcaagcacagttgctgttatggaatccaattcaaaatcattaagccaaatgatttggtttcaaaatcctctcctgaaatttgattttgtactgtttatactcttttctttgtttagaaccaatatattggcatgagttatactatttatgtaatatttctttacaacaaa

SEQ ID NO: 99418 - DNA, 243 bp, Glycine max
gtagctccatcgatctatatcatgtgctctagtttaggaaaattgcatttgcatttgcattgcgtcaagttttaattagtttctgagtggtgtttaattctctcatcaacctagctagcatcaagtgatgaggacatggaatctatgcaatgaatagactctcaggtaccatatgtatgtatgtattaatagaattgcatagggtctttctatgctactttctctttcaccttacaaattctg

SEQ ID NO: 99419 - DNA, 265 bp, Glycine max
tgcgatcttcgaagaagcgtgagagctcaaacacacaacaacaccacatgcctctggctgagacaaccttaactccggtcgctctccggttctttccaagttccatccacgggttttgtgttttccgcacgagatgacggactacaaagagaaagctcaaattgcacgtgcctatctctcttctcaagtaaactttctccatttcttcttcgatcttgtgcaaattttggagttttgtttccccttgttggttctctggaaatta

SEQ ID NO: 99420 - DNA, 263 bp, Glycine max
cccaaaatgcatcatcatcccaaaacgacaacaacagcaacataactccgcctcttccgcgcccccaatgctctactccgacgcggtttcgttgttgtcgtttaagcgtctagcggaccaagacaacaagctcctctactccctcaacgagctgtacgactactgcgagtggcagggcgtgaagtgcgcgcagggcagagtggtcagcttcgtggcccagtccatgggcctgcgaggcccattcccgccgcacactctcacaa

SEQ ID NO: 99421 - DNA, 171 bp, Glycine max
  unsure (1)..(171): unsure at all n locations
tcgatgatccgcatccgaagtcgatcctgtctccggagagctttttaccctaagctacgacgtcacgagcaagatcctcaaatacttccatttctcgcccgaggacgagaggaagtcgccggacatagaaattgccccttcgaacgcgcacgacgatgnanncgcacgact

SEQ ID NO: 99422 - DNA, 121 bp, Glycine max
tacaacatcagaaatcattttgattgcagaacaatttactctgaccaaagaaggctacacttcgtatgcaagttacatgaaaatggttgtacatggagcttgggcgcatgcaattcaaaga

SEQ ID NO: 99423 - DNA, 187 bp, Glycine max
  unsure (1)..(187): unsure at all n locations
tttgctactgncttgtttttggtcatctgagcggcgagccctgctcgcagcggtagagttgtggccttgagtgactatgtagagacatgggttcggaatccggacaacaacctcttttacatatcgtagggtaacgctgcgtccaacatccctccttcataccttcgctagcacaagctccgggcaa

SEQ ID NO: 99424 - DNA, 266 bp, Glycine max
cttaagagtaccctttacaaattaacattaagaacatgatgtcaaagcattatcatataatatctgattggaacttttttttcttgatttatctgttctgaacttctagatgctaaaaagcgtaagaaatgttcacgacctctggtattacataagaaaaagaggagattgttaccatttgttcctacaaaagacttaaccggagattgaaacagatgggttctcttgcttctgctttaacagccttaaatatggaattcagtgat

SEQ ID NO: 99425 - DNA, 233 bp, Glycine max
cgcttgataactccaactctgtttgctatgtgcatcaagattcagtttagttaaatgatgtgttggttatcttagttgtagaaaaccctgaatagtattattgagatattacgaattcagtttgatcctggaagggacatctcgcctaagcctacatgatgatgccgccgcagccgcagcccccccagatgtgggccccatcggcccagcctctgtcccaatcggtagctcct

SEQ ID NO: 99426 - DNA, 263 bp, Glycine max
  unsure (1)..(263): unsure at all n locations
cttttctctgtctctctttctctttctcttttctctctcaaaacaaaacaaaacttgaattcatacatacatacatctcccttactttgcttcttcatctctctctctctctttctcaatattcaccagcacagcgcatctcanacatcaatcaatcaatgaaatcgtgtttaatgcctttgcttctcctctttctgtgtgtatgtaaaatctttgtttttatcagaggtggtgcagaatgttgtgtctcagatccctatata

SEQ ID NO: 99427 - DNA, 240 bp, Glycine max
ggcttgacaatttcaattttgtttgttatttgcatcaagattcagtttagttaaatgatgtgttggttttcttagttgtagagaaccctgaatagtattattgaaatattacgaattcagtttgatcctggaagggaaatctcgcctaaaaaaaaaaaaaaaaaaaaaaaaaaagggggggcccccaaatgtgaccctttaccccggggtatatattccggaggggtactttggggggaa

SEQ ID NO: 99428 - DNA, 260 bp, Glycine max
gcatgatatcccgtagtatgttgtctcagcaaggaagctttggaactctgactggtggtggtcttaaggatcctattgtcactctctttggaagtttgcacgagaatactctccctgagagtggaggttcacgcagtatgctacttcataatgccaacagtatctttagccttggagagacgtcgagccctttggtaccagtgacaacctgcatgcgccactaatgtcatttcaagggggtgctggggagaaggataggg

SEQ ID NO: 99429 - DNA, 262 bp, Glycine max
tgcctttcctggacattcaactcccattgcacagctttattgttgcggagactccacctttcctggcattggagtcccagcagttgctgccagtggtgctcgttgtagcaaattcattagtctcggtatctcaacattccaagctgctcgatgcaattggcatataaaaccaaggtttcatcttcatgtcccacgttttcacactggaaaagattgaatcttttctacttctcgtgcaaaaactacatcttggtcaataact

SEQ ID NO: 99430 - DNA, 249 bp, Glycine max
aaaaaaatatctgggtttttttgggaatttctcattagaaatgaagatggagaaaagttcgttcctttccatgaacaaaaggcggtccaagagaggtgaaagagaagtgggtgagggacgatgtccaagtcttgcaaagggttggccatggagctagtaaagtgtctcagtgaactgattgtgtaaaggttgagaagagatcatataaggaatgcgttggagagaagagtccatgcataccaagtgagt

SEQ ID NO: 99431 - DNA, 214 bp, Glycine max
aactcgcatacccactggccgtttctctacatggcctcaatattcctgattttatcagtcaagaacttgggtcagagtccacgttgccatagatacactcctgagctcaacggggaaagattgctcgtgggtgccaacttagtctctgctggcttggaatcctcatgacatggagtccatttgaaacacatagaatccaagacaactggatatt

SEQ ID NO: 99432 - DNA, 249 bp, Glycine max
tggaaagttggagaaagcaaggtccgggttaaccaagggtccagagtaaatatatctgtaacagatagaagccaattggaagtgtacaaaattcgagtcattagcttattaagtgtgatgatgttgggttctatgtatcgtgactgtaagaatggttccatatttggctttgctacccacctggaagaggatttaccgaaacatcatacatgacctgtaacggagtagttgtagtttttttttttagtg

SEQ ID NO: 99433 - DNA, 248 bp, Glycine max
gtatattattaaactgtgcaagatcatatagtcgctttgaatgtggtccacatagcttattttgcattaacttttctactctagcaaagttcattgtgcaggctagctaccataaaaccctggtaaaatgctcaaagaaaatattgttagtaattgaatgacttgatgaaaaggactataaatctgtaaggcatagaatgtgtcctgccattgcagaatgtgagagatttggcactgtaatggtcaag

SEQ ID NO: 99434 - DNA, 241 bp, Glycine max
tgggattagcagaagttgtagcagggaaagtgttagcataatcccactagaccatttccttttcttatgaatatcattccaaccagtgccaacaattcggttcaagaccaccctcaagcaccatccaaacctgttatttgtgatctaccattggctaggaaagcttcacttcatcggttcttggagaaaagaaaggatagaattgctgccagagcaccatatcaaacaagcaatcacatgg

SEQ ID NO: 99435 - DNA, 245 bp, Glycine max
aatagccccattttctgaaatgctggaaggagcactgaaaacacatcaccagcttgtgatgctaatagaaaatgttgactttgctgatgcccagttcaagaaattcctctgtgatggattcgaaacaggaaactttggaaatttcactgaagagaactcaagccaagtaatattcatattgacaaatggtggaagtggatccactaacattgagcagcagaatgaggactcggttatgaggttgt

SEQ ID NO: 99436 - DNA, 260 bp, Glycine max
ataaaaatagataatatcctctaatatatttgatttgatttagggttaccgaaatttaaatttgaaatgaaaaaaatcatttgatttggtaacaaataaaactaaaagtataaaacaaatatttctattattttgaattttatttcttatgattaggtaaaagaaatgcttaaaaaattatattttaagcatatctctgacctaatcataaggattacaattcgtaataatggttatattttcaatgatctgtcttatga

SEQ ID NO: 99437 - DNA, 254 bp, Glycine max
attttgtgaatgtgtttttttccttcctttatattgcatcaaggtcccatttacgccttactgcttatatgtttcagttcttctgttattcatgatactgaactctcaccagatgtccccaaactttctgctctggctggtgcttggtgttttcttgatggcaacaatgttgaggatgtatgcaacatgtcaacagcttcaagcacaggcccaagctcatgcagctgcagccagtggcattcttggccacacag

SEQ ID NO: 99438 - DNA, 254 bp, Glycine max
  unsure (1)..(254): unsure at all n locations
tttcttattccttctggaatccttccctttagtttcatgcgcaaggggaagaagcaattcatttgactcttactttattatttgatttgccggcaccctcttcttcacgggttttcttctcactctacttcatgttcatgcctttctgttccatcaccatgtgcatgccctntgtttatccaagattgagtctttaccctatttgcttattttccaggagctgaaaaaaaatgggagaaagtgctttgttctct

SEQ ID NO: 99439 - DNA, 109 bp, Glycine max
agatgatccttgctctcttaaagattcaatactgggtgtgcgtgaagataatccacttagaacacaatccatattcccaagtcaaacatcagctgcaccctgtaagggc

SEQ ID NO: 99440 - DNA, 107 bp, Glycine max
acttctccttggttgcaccatgtcttgctatgtgtaggatcttgtgtaccttcttaagctttgagcaattcccttgtacttttatttcactccatgatcatcagcca

SEQ ID NO: 99441 - DNA, 231 bp, Glycine max
tagacattcaattttatggatgaataattaatatagaacaattaatgtaaaaataattacatctaagcacagagagagagtaagagatgagtaattggaattgcgagggcagatgattgaatgaatatttttggccattcctaaaactgtccgagcttaataccttggaatcttggattttgcattgcgcagatgtgaaactattccaaagtcagttttcagagaattgtt

SEQ ID NO: 99442 - DNA, 108 bp, Glycine max
gcagtaacccacgttgtggctgagatgatgtcgaattgagacaagcattaatttcagcgctgaattgaatattgagctgagcagagtatcggcatagcgtagccatgg

SEQ ID NO: 99443 - DNA, 268 bp, Glycine max
tctgtgacgttgccctattcaattactctatctctctctctatctctgtcgcgatcggctttgccctagaaaatactatactagagagacatcgattgcgtgaaacaagatccgtgaagattgcatcaaagagagagcatggagcgtgattgcagaggaatcgcgtcccatgcacactgacgtccggacgtcaaaggcctgtgagtatcgggattacctaccagcttatcatcctcgtaatgttgctgaagcagattcccccttggat

SEQ ID NO: 99444 - DNA, 273 bp, Glycine max
tgttttatgagtttgctcttgatcaatctgaaaggttcccaactctgaacagatcgatacagatgcaaactaacctccatcgagtgtcagaatttgctgtaactgctaatcaaacagtcgatgacggcaatgttgaagcaagaacttctgttaagagagttcgtgaacatgacactgagacagagtcagacgctgatgacattgttagtagcagtacaatccctgtagctctgacagacctaaatagccatgggattgataccacagatttct

SEQ ID NO: 99445 - DNA, 271 bp, Glycine max
agaacacaaaatgtgacttacaaggtcatgtttacgcttcacatcgacaagggtcttcttctatgtgcaattccaaggtcatgaatagtggctaacagatcatatatctctagtgtttcagtttcactttgctatatagatttctaatttgcaatatatgactctgccatgttgctaggtgaagaagacattattttcaagtgtgtttatgaatgtatatatttccaaaagccctttttttttgttaatgtttatggaatttcagactttt

SEQ ID NO: 99446 - DNA, 243 bp, Glycine max
gtcccttgctctgtgtcgtcgtaacacaaaaagcggaacagagagatagaagcacactacgcaatgacagcttttgatcttcacaagacatagcttcgtgtgtgcgtagattttcttccttccagcttggaaagactgaagtctctgtctcttccaggtcatagtggcttcctcgaagatgatggtagccaatagctttgatatatatcgcaaggacagattgtcctctgcggcggaagaggt

SEQ ID NO: 99447 - DNA, 269 bp, Glycine max
  unsure (1)..(269): unsure at all n locations
agaacatgtgtacttaaattacttacaaaaattaatttcgacagctgtgtgtnatctatgtgaataatgtgatgttttcctcatatgtggttagaagttgctacttaatttctctgctaaatatagtaaaccttttttcagccttattcttgtgaaaatcacaggttaccagagttttgtgtgtgttgagttgataatgatgacattggtacataaaatcattcttgtgctactattatcttctctgtatgtcactgatagttcttgag

SEQ ID NO: 99448 - DNA, 264 bp, Glycine max
gaagcttatgtggttggttaacgtggttctaaattgtagttggatggggtaatttgttgttaagtttttaatctgtttgttcccgttagcaacatacgacaatatatatatataacattgttggttctgtttttagctttattaaaatatcaatgaagattcaggaaatttgtattctcgggtcttcatactaatggtttagtgtgttctggggaatgtctgtaaattttattttgaatcataagtcatttatatttagacaaa

SEQ ID NO: 99449 - DNA, 267 bp, Glycine max
tgatgatcagtttttggatttaagagcttctgagggatccaataaagatggtatgcaccgcattgaccctgttgctgggtttgatcatgatctttcatcgcattttgttagtggctcaccatgtcctccatctgcatttcctccaatgggagaggttcagcctaatgaaatcaaccataaatcaactaatccatttgattatccttttgattcagatgtagaacataataatacgtgtcaattgcaattccttgacgtcagctctct

SEQ ID NO: 99450 - DNA, 266 bp, Glycine max
aatatttttgttacaaatactgaaatactttgatattttgttcaagataaaatattttattattttttagattttcatatgctgtacctttttttatggatcataatatggtaatgtttactttaggtaaaataatggttggatcatctttattctgcattgttatgttgttttctatccatttgaccctattgattcattgcttactttaggaagatctgcccgtcctgctcctcgtgcagcacctcgtcctgctccaggtatgc

SEQ ID NO: 99451 - DNA, 264 bp, Glycine max
cacagattaatgaaaaatcagagaacgattttattgggaatattcctggttcagaagcacaggctgctgcaacttcaacaaattcagagccgaataaaaggccaaccccaagtcccttggataattgtcaacgtgaaacacattcacatgagttggtggatgggcaatcaacgagtcaatcatattttacagaccaacaaaggccacttggaaaaactgaaagtgccattggaattcctcagcatgagcagaatcccgcgccag

SEQ ID NO: 99452 - DNA, 257 bp, Glycine max
atcagaaacaaagaaccctagtaatgccgccgatggggaggaagcgaaaggtagcacccaaatcttctctatcgaccgagccacctctcaagcagcaacaaccaaaacccgaaaatccccctcaagaatacgaagaagaagacgaaaacgacgtcgtcaaacaacagcagcagcaacaggaagacgaagacgacatcccgatatcgaaacttctggaaccgttgggcaaggaccagcttctgaaccttctttgcgac

SEQ ID NO: 99453 - DNA, 252 bp, Glycine max
ttcttattcatttctcttataagtgcttctaaaaaatttacccaaacaagcccctagtatagttgagttctgtgcaaataattgagtgaatttgaatattaaacacaacaaagagagagaaataagataaattaatatattttagagtctgaattgagatatgcttattaagggttgcatcaaaattttctcttgtctaccatttctgtgtctttctagacgataacagacagcaaatctatttcactattt

SEQ ID NO: 99454 - DNA, 261 bp, Glycine max
agaagctgcccacacaaaagaggcatcgatgatgtttctctgagtcccaggattcacgcattaaccaactgttgctcttcctcaaaactcaatacgctacacactcttcaactcttattcccttcctcgattccacttctccggattagggttttctttctttcagtagaaaaagaaaagggtggtttgggagaaatggttgagcaatcggtgctggcactggaaaagcagcaagggtcaaatccagtgttatcagaagga

SEQ ID NO: 99455 - DNA, 164 bp, Glycine max
agtggtcatctggacggtgcaccgacacatgctgcaggagctgtacatggtgcatgctgcgtacaatgctagaacgcacgttcgctgacgcacatctccttgaaggttcagattcctacacgtctgcgtaatagcatctcctatcgcatctagagtatgcccat

SEQ ID NO: 99456 - DNA, 260 bp, Glycine max
gtcaaatgcttagattcttctttatctccaccagagaaagttcaacttgctctagattgcttgcctaaatcttcagaaaaaacactatctggaacaaattcttcattctgtcgctggacaataatggattatgccaaagcttaccgctctggggacataacaccaagcttggttgcagaacgatttattgctgctattgatgaatccacaaaacccccactccaaatggggttctttattcactatagtgctgatgatat

SEQ ID NO: 99457 - DNA, 112 bp, Glycine max
tgtgtcgcggcgctatctctacatgattagtctatttagattatgggtgaaggttgcggagtagacagaggctgcaattcgcgattatggtatgagtggcagacatgcagaa

SEQ ID NO: 99458 - DNA, 261 bp, Glycine max
gaagaaagttgcttgaggtcactatcggcctacttcgacaagaggtttctagtgtagcagccgggccattgtttcctaggttgagagatgattgtgacaactttcagaaagatttggtgctcttgaaggaaagaagagcaatcttttgtgaaatgaacaaccttggtagtggtcagattgacaatgaggaagtttctcaaggggcagttggtccaatgcaattagagctggatgacataagatagagttgttactggtgga

SEQ ID NO: 99459 - DNA, 117 bp, Glycine max
  unsure (1)..(117): unsure at all n locations
atcatcatagacacaatgggggatctggggacacaaaatggaaatgttgcaaaactccttagatatcatatcattctcacctacgggttttagctaaccctncagccatcccagcgt

SEQ ID NO: 99460 - DNA, 249 bp, Glycine max
cttctggtcacattcttcctcgccaccacggcttttgtaacatcgtgagtggtgcctcatttggcttctcctgctagagctaatttatcaaatagcatttttttttttctggagtgaggatacaatttttttagaaatatatcagtttattgttttcttctgcaattttagggttatttaaacccctaaaatcactatgctaaattcccgagtagtagctagagtcggagcttcgatcgttaaacacct

SEQ ID NO: 99461 - DNA, 253 bp, Glycine max
aagaaactgggatttgcatcttgtaagcggatctcaggtgccacagaaggagttaatgtgctgatggagaagaaaagtcttgatgggaactgggaatatggtgtgtcttgtattgaatacacagagtttgacaagtttggaattactaccggacctcttgctccaaaaggtttgcaggcagagttccctgccaatacgaacatcttatacattgatttgccttctgcggagtagttgggtcaagtaagagtga

SEQ ID NO: 99462 - DNA, 261 bp, Glycine max
gaagaactaaaatcaaaagatataaagaagctcccgagcgtcgaattcttgagagaagtccttaactccgtcatgtttcttcttcaaaaatctatcctgaaactactcattatacactggccgttcccgataccaaaaataccaaaaaacttctggaaaccaaagtcccagaaaccaaagcaccctcccccaccgccagactaccgtgtacaactaaagtccgatcccccagcgccaaacgcaccaccgaagcaaatcaat

SEQ ID NO: 99463 - DNA, 242 bp, Glycine max
cgacttgactcctcttcctcggttagctccctcggtccttctctctcgcgaggctatgccaggaatgcccgcggaacagtggcagtgcacgacacgactggcggagctgtcatatcgctggtacaagccactgcatgtagcggtgctccacaagctccctcgagacccctatgatcttcgcgaggactccctcgtcgtatcctcagtgtgccgcgcttgcgtactgcagagtcctctcgctc

SEQ ID NO: 99464 - DNA, 254 bp, Glycine max
gttgctttcatgggaaagcttcacctgacggaatctcctcctaaaaatatctcattggaagtggttgttgagcctcagcaacaaaatcctaagcggaaaaacgattctgaaaagctaaaccataaaacagaatgttcagctgagaatgcagttgcaaaaagaacatctttttcgtccccgaaaaatggtagccaccttgcaaatcacacccccttttcaggaactccacaccaagcaaatgtagcttctgataa

SEQ ID NO: 99465 - DNA, 154 bp, Glycine max
ttgtgttattgggtggagtgtgagaatccaaatatctgtatctatcgatctccctctgcagttatccatattgtggggcgcatttgagcaacaatggtgcacacaacagcagagcctaaggagggagagtcgatcgggaaactaacggcggaag

SEQ ID NO: 99466 - DNA, 163 bp, Glycine max
gtacgcacgcacttcagttcgagcgaagatccatagaaggttgaatataatagtcagacatcatgttacacagtataatcttgtgagatatcatttcggggattaagtttgtgaaggagaaaaagctgataacagatgttctattcttgttctgatttgcttg

SEQ ID NO: 99467 - DNA, 124 bp, Glycine max
tgcatcagctgagggtaccaagtgatatgctgccagacgttaacccagggcctgctgaggaccagacgcaatcgacgtccgctgacactgttcacgcagacggtgctaataccgatccgtttgc

SEQ ID NO: 99468 - DNA, 257 bp, Glycine max
aagcgaggtgtgggggcaacacgtccccgtgaataactccattgaggcattgacagcaacacgtcatcgtttcgtgtgctgctaccgtctgggcgcacgttagactacacctgtcctatgtcatttgctccatcctcgtgcccccctctcgtcgtttttaaaccaaatactattagttatttaatatcattaagatattagtatatctatttctctttctctgtcatacataaccttttacaagagttattaaaata

SEQ ID NO: 99469 - DNA, 255 bp, Glycine max
ggaaaatatctggctagtggtggtgaggatggtatggtacgtgtgtggaaagtggttgaggatgagagatcaagtgaattggacattctggacgatgatgcgtcaattatatatttcaaaataaataatttttcatgcgttgctccccttgatgtagataaagagaagttagttaaaacagagaagttgaggagatcctctgaagcaacctgtgtgattgtcccaccaaagaccttccgcatatcatcaaaacct

SEQ ID NO: 99470 - DNA, 255 bp, Glycine max
ctggattcgagctaacctttgccttttcctttgggcccaatttaggagatctttttttcgggtattgaaaagtttattcatcatttagattcagactcaggttcaataaatatttgtaaattatttatgaataagatttacatattagtagtgaaaatcaaacaatgtttacgtggaatatgaattcattccttattggaccgacattttttttacacccaatttagagaataatatcctagcaaaatgggggat

SEQ ID NO: 99471 - DNA, 251 bp, Glycine max
gaaatttgattcattaataagttcattcactcatttggatgaagagttctctcatatgattcagataaccaaaactcacaagtctcttgaaaatgtggaacttattgctctaagaaatgacattgatctgcaggcaaagcactcgtgggccactttacattcccttcttcattctgaaagaattgcttaccgtcagaatgggtatatctggttaggtgatctgcttatttctgaaatcagtggggaaagca

SEQ ID NO: 99472 - DNA, 254 bp, Glycine max
cacagtacaatgagcggaacacattctatggattcagggaaaccaaggcaggaatcttatcaaagtcatgcaataccatgagatcctctgaatccacagtacaatgagcggaacacattctatggaccctttgaagaggattttttagaagattttgtaagacaaaacctgattcctttggctgtgcctgtatcctatgaaacactcaagttgatgaaagcagatggaaggaaaatagttttgacaattgttga

SEQ ID NO: 99473 - DNA, 253 bp, Glycine max
ctcgagccgctttcctttcttctgctagtgtttcaaacgggaaaaatgagggtttggattctcggaatctcacatgaggatgagatggaggaagaagctcctgagacaagtaacaacacaactgaacttagtttgggaagctttggcgggtttgggattagctcaagccccaacccatcaatgcctaagacaaatccttttgggggttcatttaataatgtaggaacaagtttatcaagctctacagttacat

SEQ ID NO: 99474 - DNA, 246 bp, Glycine max
actcatcgtgcgcttgctcaaataacaattgaagtgtttattgtgtcaagttcagtttcaattttgagtccttagggtgggtttcgtaagatattatttaggtatatccaatgttttattggaggaagtgagctattttgatgaaagataacggatccttcttggatggattgttaatatgaccgtctaagcaaaacatgcctgaacctggcaatttcacgcattaagctgctgcaaaacaagaga

SEQ ID NO: 99475 - DNA, 268 bp, Glycine max
gttgggcatcatggtgatactcaacacttctaatggcatggtgaccaacaacaatcctccattttgctgttgatcccctcagtgccaattctaggtccttgagtaagttagaaatgttgggcatcatggtgatactcaagaactcataaatcggcttctccctatccttcaggtaactaaaggttgaggatgaagaacgggagatgatcatggcctctctttcctagttcctctacctaactcttctgattttattttactttcaaat

SEQ ID NO: 99476 - DNA, 109 bp, Glycine max
gcacatgttggtctcaaaatgagcatccggaaggtatatcgtttgtttatgtttcccggtagagtagttattagtttgcattagatgtcatcgttccacacaacatacg

SEQ ID NO: 99477 - DNA, 243 bp, Glycine max
ggcgtcttcagctcaagtgcctaacctcttcggcggcgccacctcagctccgccgccaactccggcggcgcaccatgacaacatcatgtcctcatccgacgccgccgatgcgctctcgcgcctcctccagcgcctctcgcccacgctctccctccccacgcgcctccctttgacttcctactcatatgttatgtctcatgcctgtgtctaggcttaacgacgtatctcctgcgattccaaact

SEQ ID NO: 99478 - DNA, 251 bp, Glycine max
ctctcatcggagggaaacaatcaataaaagataaataaaaacccataaaaagattataacaaaaaaagtatgaaaggaaaagtactaggttccgcagtttctctcatcgagatggtgggcgtggtaattggcgtagatgctgaagttcaaagccaatggggggtgaaaagcatcatgaatggaggagaattgaaaacctgcaaaagggccgtgcacacgttgtgccaaggctcagacgaccagaaactgtg

SEQ ID NO: 99479 - DNA, 253 bp, Glycine max
gaccgacacgcttttattattaattgcgtccctttcttctctaataccctcctccgatggaaggaatgttacgcgactctctcttgtcgcttattatgaattactacaagtactcacaagagaacgtacgacaaggttttgttctttattttatcgtcaagagaaacagaggaggttgaagcaaagccagggtaagaggagaaagatagtctccctccatattgatttcaattgttatgaataaataaaaagg

SEQ ID NO: 99480 - DNA, 209 bp, Glycine max
gctcggtggcactgctacttcaactcactcccaagtttcctcctttctcacatataaacaattccaacgtctgcggatattcgcaccaaggctttcaatactgcttgtaggattgtgatccctgcttgccttacatgcttttccatgtcagtgttcgcataccatatattgcagactgtcttattgatacagtggactgactactgaga

SEQ ID NO: 99481 - DNA, 254 bp, Glycine max
ggtaaaaataatgcacatcaatcatggagtgaacccactgccagaagaatgccaatgccccatgacggtccagctaaatggaattcatcttgcctatcatcaaggaccctagaggatgatgcatcttcttttgccttaaaacacaaaactcaaacacaagaacagatgttaagcagtgaaagaacgtcatctggatctacaacaagcgatatgcaagtaaaaagggtattgtcatctatgagtgctgtgaatgg

SEQ ID NO: 99482 - DNA, 253 bp, Glycine max
gaacgaaaatcgagagtaaaaggcgaaggagcggtgggagcgatgcgcatggttgttaacgacgcattcctcccattaactaaattgctatgtctttacctcttcgttttcattcctcatctttctctctctcttctcttggggttgtgagaaaagtgctagggagtcttataacagcattgatgaactgcaatttattccatcttcatagatattgttcaaccaaggagtggacattcgcacttagcaaaaa

SEQ ID NO: 99483 - DNA, 281 bp, Glycine max
ctcggaattcggctcgagtttttcttccgattaaaaaaaaatcagtcaaataaagtgttgttcgcattttaatgcatgatcaaatgatcaaattttcatacacacttttatcgccccttgctcttgagacccaaaacacgtgacataaacgtgaatataaatacgaactcagtttctcaacactctacaatggtgacgacgcttctaaaattctaaaaccctaaccctaaccctaaggaaaaaaaatcccaatcttcgcaagactcgatgaacgtggatca

SEQ ID NO: 99484 - DNA, 254 bp, Glycine max
gttgagattaaattacaagttgtgaacgtgtttattgaattcttgattctcttaggaagcaataaggacatggcaaagatatcattagctttggtatttgcattggtggtgactgtaccatttcattcagttatgggtcaggatgatgcatggaaaagtataatagaccaagcaaaagatgaagcaagcaaagcaggtctctctgaagatacaatattcggggctgagaaggctataacagatggttctgccga

SEQ ID NO: 99485 - DNA, 231 bp, Glycine max
  unsure (1)..(231): unsure at all n locations
aaaggcaccagccgcagacgctgcaatcttacaagcacttccctcattctcgcgcattcataaatcataacacaaaccctatttttttctccacaatggatctaatatancaatactcagacggtgacgatctcgactctccctctgaaaatcctagctcccctccgcgcctcctcccgggacgttccgccgcgtctaacgtacgacgacaccatggtggctctcattgtt

SEQ ID NO: 99486 - DNA, 247 bp, Glycine max
gcataagaaagtggtaatagccatcgtcgtagccaccactgcacttgctgcactcattttcactttcttatgcttctggatgtatcatcataccaagtatccaacaaaatccaaatccaaaaatgttcaaagtccagatgcagagaaggggatcaccttagcaccgtttttgaataaattcagttccatcaagattgttggcatgaacgggtctgttccaataattgactataagcaaatagaaaaa

SEQ ID NO: 99487 - DNA, 261 bp, Glycine max
caagtccaattttccaaagaaccaaaaatgcacccatctcgtgccgaagcagcagcatcacaaccctgctttaatggctgtttcccatctccacttcttgcctctgagaagtcccatagaactacttcttccaagcccaaagtcgtcaataataataatgtaacttcatcacacgatgacttcgtcgcagccacatcttccacccttcacccacacccaaatttcaccaaccacgagtccctcccatctttgcaagactca

SEQ ID NO: 99488 - DNA, 255 bp, Glycine max
tagaaatggatggtgggacaaatggagatcatgtgaaggtgaaagaacaaatctcaaatggtgtggcagataagaagtctactaatcatcttatgatgcctgatgatgcagaattggctatcgatgaacaaaagaaaatagaaggcagcgtagatgggtaccaatctggatgatgttactagtgaagttgacaattacatggatgctttaactaccatggaatcagaactggaaactgacaatgagtgtaaacct

SEQ ID NO: 99489 - DNA, 251 bp, Glycine max
caccgctgaatcctagctttatcttcccttcccttcaaaataatatctctgttccaaacaagtccaacaacacactgctacaatctcaaacgtaatcggttacccttctctttttctctccaccttttcatgtttttctttcggattcttttacattgcattacatcaattgggtgatcttgggcacatcgagaaatgagtttgagtaatgggaaaaccgaggcaccattgccaattagtaatggggatga

SEQ ID NO: 99490 - DNA, 245 bp, Glycine max
tttaagcgtttctttactaatggcattcggcaactacaaacaaaagcaacaacaagaagaagaagaacaagaacacagaatggaagaagacgaggacgaaagcgaagaagaagaggaacaattttgggacgattgggaaggagaagacgaagaaggagagcagcgagactctgaattcgtgtgtctcttctgtgaatcccggtacagctcgtgcggttccttgttcgaccactgcgcctcccttc

SEQ ID NO: 99491 - DNA, 245 bp, Glycine max
ccataccctaaactaaaccctcctttgatatttcattttattctattctatgcctttatgcctagaacgtttacttgaagctgcatcaattgaggagggattcttcatctttggattcgcttttggtgcctcggagtcagagctgcaaggaaagtggagatgctgggatgaaagctgaattttgtgggaaatggctactttagttgaaccccccaacagaattaagcctaaggggaagcattatt

SEQ ID NO: 99492 - DNA, 251 bp, Glycine max
acgaaacaaccctaaacccctccttctagaactttcatgtccatcttgccctcacaaacccaagcgccatcttcgtcttcttcctctgcgccatctcccaaccctaatccccaacatggaaccggaaaccctattcctcaacccttctcttctctttccccctcaccaatcaacctcgctttcggatctctccagatctccgataccccaggttcgtcgtcttcagccgctcaagattctggtggatcttc

SEQ ID NO: 99493 - DNA, 117 bp, Glycine max
ctttcattggtgtggcctagctgttatctcaatgagaaagccgtcatctcggcaattgcggactttgcgcattggggttcccttgtagcttgtaataaccttctgttatgctacttc

SEQ ID NO: 99494 - DNA, 114 bp, Glycine max
ccctggcttttctgagctgacaagcacttccctaaaagagagatggtcatttgacagtgagtcgtttggttttaattgtgaaaggccggttagatccagtagtcggttttcaaa

SEQ ID NO: 99495 - DNA, 232 bp, Glycine max
ctcgagccggatttttgtttctctgtattccccgtttgatccctgctcaggttctggattctcagtgtttgcgaacgctgcatcatcctttggggaagaatggatcatcaagggcatagccagaacccatctatgggggtggttcgtagtggagctcaattagcatatggttctaacccatatctgccaggccaaataactgggccaccggggtctgttgtgacatcagttg

SEQ ID NO: 99496 - DNA, 122 bp, Glycine max
actgaggttcattgaacctggacgtgtttttgggcgtggactggatgatggtaacgaacctttggcctcatcgcttccgtcagatctcattcttcatccattcacagccacatcccacacaa

SEQ ID NO: 99497 - DNA, 235 bp, Glycine max
ctgactctcacgcgcatcttcttcgtagcatttccccacactttaccctccacggagaggctcgccggacggcgctcggcgctcgtcgccgccgatcgattcggcaacgtagcattttcatggtaacgtcggaaactgaaaacagcgcgttttgagatttggctttttgcgtgcgtcgacgaaagagagagagagacacaaaaatgactaggattgggaacggaggaggaggagg

SEQ ID NO: 99498 - DNA, 246 bp, Glycine max
gaaaaaaggaagaggcacagagagcagtgaaagagagaaaggaagaaaagagggagggagagaggttcgggggccatgtaattggaaaaatggaagcaacattgaagttggagtcccttgcgtgcatagactccaccactctctctcactcagagctcctcgctctttctctctcctctctatgctccacccatgatcgcctcactcccaatatcgaacccgctctctacaaccagagcaccggct

SEQ ID NO: 99499 - DNA, 265 bp, Glycine max
tgcttagaagtttctttttcttttttgggaaagtggtcaccctgaagctgtttacccttgcaccctaaggtcacaataacgagctcccaattgttgacacaaatagtggtgctacaacagcgagacatatatctgtcacatactaatctcactttataaatgtgtcactgtgctttccatgtatgccaactacggagggacaatacaataagtttgtactgcagtcattaactagcttgctgcttcaatttgttatattgtgtag

SEQ ID NO: 99500 - DNA, 211 bp, Glycine max
gagaaaaattacaacaacattattatttattgtaactaattagctaattaattggttattaaaaattataaggccatgtttggcgaaaccgttccgcgaccacagttcattcaatctgagcctataatgtcgacgacggatgcgctcaccgacgacgagttcacgatgcaaagcagtagcacggcgtcaccgatgatcccacacaacatac

SEQ ID NO: 99501 - DNA, 262 bp, Glycine max
ggttgacttagttaatagtagtttagatgatttatatttgatatcttgcacttgttgcataccgttgtgccaaaataggaaaggaaagctatcaagtaactcccagttttgctccccagtgttttctaatagttgtgaaggaggttgtgaaattcgtcatccgggtcaggtgcaaatttaccatgctagctagatagtgagagagagagagataaaatgtttgatgtcattttgtgtacaaagtccataagctgttagagac

SEQ ID NO: 99502 - DNA, 122 bp, Glycine max
caccagcgaagtacacgacttggccgttctagttcagttgttaacactcatatcctgttacaaatcacttctgctcttatcgttgtttgttcctcacttgttgctttcattcagtttcagtg

SEQ ID NO: 99503 - DNA, 233 bp, Glycine max
gtgttttttcctggtgtgaaatatatttgtaaaacaagtgtattggattgtatatgtgatgttggtgctggatcatccaattttatgcatataaaaaattggactttgtattggagtttggtgctgattgacagcgttgttttcatgcactataatgtgcgtttgccctgttcttttgttcctctgcactccaagttgaatactttttgtaagtgtttatttttattataatc

SEQ ID NO: 99504 - DNA, 199 bp, Glycine max
tttgtggttaagtacaaaacaatctcaggaatcttctccgtggaacgcatgtgtgaattattcaattgcaactactgctatgtgtattttctttttgcctaatcatataccataaacatgaagttgtgcttccttttattgagaatgctttagcatgcatgattatttatagagcgtttcatatataagtatattttaa

SEQ ID NO: 99505 - DNA, 261 bp, Glycine max
aaaatcttcaggaaatgatttatatagtttctgcttgtaagcaaagaacgatggcagaaaaatttcaatattcttgtttcctctaaatctgtttccctgggcctgcaagaaatagatattggtcaccgaggacatgaatagaaagattgcataatttgcacaagatattgattttttgggtgccacttattccctacatccaccgagaagggtcagagcggattacaattttctgccattgctgagttgaatgcacacaaa

SEQ ID NO: 99506 - DNA, 250 bp, Glycine max
ctggcggaaacagagaaaggcacaaaaccaagtccctcttcttacctacaaactcacaaccttttccttccgccatataaaatctactattatttctcattttcatttcaacgtaacgttgatgggtcttcgcttttcgtcttccgaggcggcggcgtcggaatcggcatcgccatcgtccagtttgggcgaattgcccgagagctgcgtcgcccagatcatgacctacatggatccgccccagatttgc

SEQ ID NO: 99507 - DNA, 110 bp, Glycine max
actttgcgcagattgttgcctcgcgttgtggtggtatgtgatctggaacttcctctcactatggcgatgttcttgtcaattcttgttctgtagatctgatgattgttgtt

SEQ ID NO: 99508 - DNA, 272 bp, Glycine max
gtgatagcaatggcggtggcggtgacgacagcagcaaggccatagttggagcagtgcttggcataggaagcgtgcttcttattttggtcattgtttgcgttgtttgctccaggaagaagaagaagaatagaatgtactattatgcaggagagcaatccatgggaaaagggaataataataactattacaatagcgggcaacacccaaattattacggaggtccacatggggaccatgttgtgaggatgcaacaaaatggaatgggtcctggt

SEQ ID NO: 99509 - DNA, 143 bp, Glycine max
gagcgtctaacggagattcggtacggtagtctttctccccagttccctgtctgtaggtggggagttcctttctctcaaacattcggtgcggtatactgcttttgatttacaagtcaccttcgctttgagtttcttttagccat

SEQ ID NO: 99510 - DNA, 269 bp, Glycine max
ggaaaggtctgacagaattcatgttatcgatttcgatattgggtttggagtgcagtggtcatctttagtgcaagagattgccttgagaagtagtggagcaagttcatgctgctctgatccagctaagcctgaacttctggcggtacctctctctctctctctctcacccacacacacacacacatttcaatcaacagcatttgattttttcaataaccctttcaaatttctggccctgttcgatttcccatttcttaatcgcgtcagaa

SEQ ID NO: 99511 - DNA, 272 bp, Glycine max
gtccaaattaactgttctgatggagatggattaactgaacttgagaagctgattaaagcagaagactttcaccagatcagagatagagcatttgacagaacttatgcgttcaagaactgtgggttcatgctgttgggtatcaagtgacgagcccatgtttgggtccatcagatccaatgttgcctcgtgaacaaaagggagaatatcccaaaactccagatccagaaaatgcgattgaaaaccagcttgtttcaaccccatacgttactaag

SEQ ID NO: 99512 - DNA, 178 bp, Glycine max
caggattttatgcctcagaacaagcagtgttatcactctatgctgtgggacgtatctcaggctgcactgttgatattggacatggaaaaataggtatccacacctgaatgcacttgtccatttcttgccattgtatataccttgtgccttgtgtattctagataacatttttttttac

SEQ ID NO: 99513 - DNA, 263 bp, Glycine max
ttcagagttggaaataccccagaagaaggagcataattcatcacttgtaaattaggttcttatgatgacaccaaccggcggagaaggagctgagaagatggatgcagaagatggtgtaaactgcagtgattatgagcatgacatagaaaatgaagaaagtggagggtactggtcagggatatatgacagacacatggctcatacaatgccacttcttatgaagagggctaacaccacctacccagattgctattgttggtgcc

SEQ ID NO: 99514 - DNA, 261 bp, Glycine max
ggcagtcaaggcttgaaagggtccataagtgatcagattagtcttttgtcagatttggaatttgagttctaatttgttcgtgggtgaaataccttctggacttggtcagaaatccctgatacacctggacttgtccaacaatcagttaacaggccccataccagatagtattgcctcttcaagtttgcagctcgtgctactgaatggtaacttattggaaggacgagtaccagagcaactttattcgattggtgtgcatgg

SEQ ID NO: 99515 - DNA, 262 bp, Glycine max
gtggtggcaatgggtagcgaagaagagagggttcttgagaatcaactggaacttcaattgcaagagcaaagggattctctctctgctatcggtcaagctcttctctctgatccaactaaccctgaacttctggcggtacctctctctctctctctctcacccacacacacacacacatttcaatcaacaacatttgattttttcaataaccctttcaaatttctggccctgttcgatttcccatttcttaatcgcgtcagaa

SEQ ID NO: 99516 - DNA, 240 bp, Glycine max
cgagtgtctaatgtaaatgatcgagttatgttgggtgacaacacattcaggagtggacaaactgaaatgtcaatggagatgactcagggtcctcggggtcattacgacaattttcttctacaaccatcacttgttgaggatgcacttgcaatcagaatatgttgagacgaatatcacctgtcagatttccatactgactacgaaattgctaaatgttaagtgattagaatcttgcaatga

SEQ ID NO: 99517 - DNA, 255 bp, Glycine max
gttttcttgcaaaaaaaaaaaactcttaattggatagaatcagcccccaaagtgctcctaccacagttacaaggcctcattttctatgagaagctgagacttatgtgaagccacatcttgtaaggaacaaaatgtcttccaagggagacaggccaagaattgcttgccaaaagggtttaggcataactcagctccaggcggattcgtgaactatgacacgctaggctctagtgggtgttccggaatgcgttcgga

SEQ ID NO: 99518 - DNA, 262 bp, Glycine max
ggaactgagcaagcattggttgctgaattgagtgccttggatgaacatctcaagacccatggtccatacattgctggggagaaagtcactgctgttgatctgagtttggcaccgaaacgtaccatcttgtggtagcgctgggctcacttcaagaattgccgtattccaggaactttggtacatttggcatggcactgtaagctcctggtctttgggtcatttctcggagcagattccatcatacctgaccggagaattccct

SEQ ID NO: 99519 - DNA, 260 bp, Glycine max
caattacagaggctaagacctcaactacaaatagtgctaggcttcatgtcagttctcactcgtgaagttaaggaagttggccatggtgggaaagaggtgactagggcggtgccagcgtatcagaaaaagtgaaggattctcttgtgaagaacattagaagatgaatgaccccccaacccttgaaaattagggcagatattgaaatgaaatgaaatgtttccaggttccaagaaaacttgcacagtggatgcatctctaca

SEQ ID NO: 99520 - DNA, 261 bp, Glycine max
cacgtttcccttttctttctgttgagaacccctgctattcttccactcaggggtcccactcgttggtaggagaataggtggtgtttccggcaacgtgcttttttggacacaaaccttcgccggaaccctgaattaagcacttaatgtgaattctgagatacaataacaataacaatgtcttctcctcataactcttctcctgatgactctagccctgataatgcaacacctgataactccacccctgatgactctgacaac

SEQ ID NO: 99521 - DNA, 149 bp, Glycine max
catgttttggtgccgaatcatggctcatttcatgtcgggtgcttcattgttgtaaatgattgatgattcatgataacaacaaatggccgactccagatactaaattgttcatgttgttggaatgtaatcttttgcacagacttttggac

SEQ ID NO: 99522 - DNA, 250 bp, Glycine max
gagtgagtaggttactggaaagaggaatggagaaggaagccgaattgggtgaaaaggagtttgaacaaatggtgcgggctttgccttccgatgctgtcaaggagttattgtgcacggggtgggttcgcttcattgcttgcaattcttcttcttcttctgctaaccttctgctatttcacagctcctatatgaaaaccaaatatggatcccaacctttgttccatgaaaacttgcacagtggatgcatctc

SEQ ID NO: 99523 - DNA, 267 bp, Glycine max
cacgtttcccttttcttttgctcggaaagccccagtcacgtcgaactacatcaggttgcacgtaaataccgtggacaaccctagacgatccaacgggcgagatgtactccgcgattttaacaaagacgtcaatgctggtgagtactctccgtactatcttcaaggagcaattacggctctgcagcgttttctgccgtctaacgaaacggacgctgactcggacacggaggctcaacccgacgcggcggtggacgcgtactcgtgcga

SEQ ID NO: 99524 - DNA, 111 bp, Glycine max
aaatgatcacaatcaggtgacatgcggataagtgagtgatcaatgagtggctctgcctgcccacttcggcgctctattctatatatagcgatggcatccaccacacctgca

SEQ ID NO: 99525 - DNA, 259 bp, Glycine max
ctaaaatccttaaaagcaatggtgctatcaccaacccccctatgtttgctcgatattcttcttcttcttcttcaccctcagtgccttatgtttctaactaccagaaacaaacagctccatccccaacttcttcatctgggaatagaataagccctgcaattcttgtcatcatagtaattttagcagtggtgtttttcatcttgggtttccttcacttgcttgttagatttctcataaagcaaaggtcttcctccaattc

SEQ ID NO: 99526 - DNA, 237 bp, Glycine max
gtcaggtgacatgcggggaaccttatggtcccgcaccttttgccgacgaggggtaaacgagcccgttgacgtgcagagactaacatcgtttcctgcaccttttgtcatcctgacccgtgaagtcaggtgacatgcgtggcaaccttatggtcccgcagcttttgtcaaccagagtcaatcgagcacattgacatgcggggaaccatttggtctcatacttttttcacattttgtcat

SEQ ID NO: 99527 - DNA, 263 bp, Glycine max
  unsure (1)..(263): unsure at all n locations
actcaacctcactcactcgctcattcgctctcttcacagtttccagtcgagggttcccggtcnnaatcnaaaccgaananananaaaacgtcaatcctacacacacacacacacatatcacctaaccatcgtcggtgggattcgaaggcaacggcgtcgtttcttcgccgccgcaagctctcatcgagagactgaaagactacggccaagaagacgttttcgccctctggttacgagctctaccccgaggaacgcgagtttct

SEQ ID NO: 99528 - DNA, 259 bp, Glycine max
cgcgttccttccgttccgaaccaacgccaaacagggttcataacacctccatttcattcccttcttcgaatcgctcacaactaagaagttttgcagttaaaaatactgcaaagtacggttattccaatattcttctccgaaggcgtaatctagcgcacgagtaagatgaaacggagaaagcgcaccacagcgagagcagaaacgaagaagacagactgagcgacttacccgaatgcgttctcctgcacatactaacatt

SEQ ID NO: 99529 - DNA, 254 bp, Glycine max
aatgcgttgttgttgttgttgttgtatactattttgccaagagtcgcacagatcgaattgtttttaaactctttggcaaggatccatctgattttccccttcttatccgatcacagattctcaactggttatcccacagtcccacggagatcggagagctatataaggccaggttgtataatattgacgatatacctccgtcttgaaaaatctgcatgggaggagctctactgtaatctaggatcaagcttgag

SEQ ID NO: 99530 - DNA, 256 bp, Glycine max
ggctcgagccgattcggctcgagctgctttgccaccacctttgaaaagcaaccacccttttgctgctaactgcaatcgtcaacggcaaacagcacctacaaatttctagacacaaacttttttcgcggtcgcatgatttttcagaaaagaaaagctttaaagcccctcactcatgcaattaacgtggaaatatactgcaagtttacatttcagtttcctatcactgagatgtggagatatagtatgatgcaaagtc

SEQ ID NO: 99531 - DNA, 252 bp, Glycine max
gtcgtcgcttccatgactttcctcagacaggtttggcttcacggaaaccagttcagtgggacaattccacagaacattcgaaacaaaacttccttgcaggagctcaacctcaatagcaatcaacttgttggtttgattccagattccttggcaaatatggaccttcagatactggtgtttaaataataacgggttcatgggtccaataccaaagtttaaggctgacaaagtatcttatgattctaatttatt

SEQ ID NO: 99532 - DNA, 252 bp, Glycine max
tatgtatgatattgtttagaatacttggtgtaaagattctttacaaatgtctttcaaacggaaagattatgtcaataagtttaatgtaacaactattacatgaaaactgggaccctaaataaaatattctacccattgaatttgtttaagtgttatgtatgtgatgcatttttttttacacatgtagatttttgatactggatcgcttgagggcttacatgcgtcatttcaagtgcgtaatgttcaagttta

SEQ ID NO: 99533 - DNA, 191 bp, Glycine max
ttcttcttcttcttcttcttcactctctttctctatctctgcgtggcagcatatatcaaatatcagttgcagtattaaagaggcttatccgtcagaatggtttccgcggagaaagattccaatgaaactcatcgaaccatcatcgggaagtccatgcgaacggtgcgctccaaaatattccacacaacata

SEQ ID NO: 99534 - DNA, 264 bp, Glycine max
atgaattgcaatccaaattaccaatacctttaccaattaacattccaatatcaatccacttttcaaatcattttacggttgtgtttttggatgaatcaattatcataaataactcaataaattgcaagcataaaatgggaggacatgaattaatgttgcgtttttaagttctgaggaagaggaattggtgattgaagaaatggcagatgcagcgaagggtacctacagagcctcaagatggtcccttaacggaatgactgctct

SEQ ID NO: 99535 - DNA, 253 bp, Glycine max
tgcatttgcagcacttgacgaagtggagagacaaatgaaatagttcaaattttagctttgagaattttcctagaatattaagcaggagagtttggtccaatttttattttggtttgcatttcctctcgtgaagttgttgtttattttttcttacaaattttagtgagaccaatgcagtaacaatagtctctgttaagttctaactggtaagggtcttgaagttgattttctaatttatttggtaaggtgatgt

SEQ ID NO: 99536 - DNA, 262 bp, Glycine max
agagtttgtgtcttatttttatcaatttcatccgaattactagaattgcacccccattcttttgagtccaaattccatcaacttttgctggctaggttcgctcgaaattcttgaggccttcttaaacacgggattagttttatatatagcaatactatttatttataacgtctatttactcattgttttgaaagagatttttattcttccactatgtttttgggtgccccagaaaaaaattctgggtgctcctagtaacacc

SEQ ID NO: 99537 - DNA, 256 bp, Glycine max
gtaagcaactgcttaatttattgatcaaacgtacagctcctaattttcaagtatttttctttctcttcttgaagaattaagaagaaagtttttgtagttaatttttctccaaaggaaggaaaaggaagcaattatcaaggaggggactacggaaatagaaatggaaggaactcgtgcaaaagagggaaccctaccaccgggatttcgatttcaccctactgatgaagaacttgtcacttgctatctcgtaaataag

SEQ ID NO: 99538 - DNA, 251 bp, Glycine max
gtttggaaaaaagggtttgttcggttggttcttgtagcagggatcttgtggatgttattaattcttcttgcattattgttccatatatggtcttgtcaaacttccgtctcctttttatcagctatgtgtaacaaagatagcaaggttttcaacatgttagacaatatgggacttgtatcaaaacctcacagatgtccaattcctctttccaatgaccctgataaaatagttatcccaactggaagaactcc

SEQ ID NO: 99539 - DNA, 249 bp, Glycine max
gaaagatctaaaatcagacacagttcttattctccgttcgaacatattaccatcatttctccaaaaactggaaaaggatctggcagaaattcacaaaatagcttatgttgttgatgcatatgtctcttatgggagatccgatgatttgaatgaaaaagtcactattgcatcatcaggaagactagatgccattgcaagagcacggcctattctttccgcaatgtgtgaaaatctcttcacttttgaggg

SEQ ID NO: 99540 - DNA, 230 bp, Glycine max
atctccagttaatttttttatgtaatactcatcaaccttgacttttggatgatagtaaataatcatgtattgatattcgtttcttttgtcatatgattgttttaagatgcccggtggacctgtgtttgttctgtcctatcagatgccgtgctaatacggatattacatgtgttgtgtgttggcatgtttctagcatgccatttaaggaaatatgactcattgagtaacac

SEQ ID NO: 99541 - DNA, 253 bp, Glycine max
agagcacagaatgggatgtaaaattattgaatcaatctgtttatgaccagacttctacaatagatatggctgaacattctggagaaaaagaagccgtcaacagcaatgaatcctgtggaactcccagcagtgtaattagcttaacagatgaatcaaactccagattgtcagaattacctcaaaagaatattaaggaacactgtagtcctacgaggagtggaatacttagtgctacaattgaggaaggagaaga

SEQ ID NO: 99542 - DNA, 247 bp, Glycine max
ctcaaagcttaaaagacacactgacagaagcaacctgtgctcccgtgtccttcaatcattgcatttgaacgatgatggtgagctgaagtggaacaacagggttgcaggacatggacactggtatggttgccgcagctcgttggattaagaagcactgcaccactatactacttgaagatctttgtcgacaccccgatttccacgtcaagctgcctccgtatcattggagttagcagaattcgggaag

SEQ ID NO: 99543 - DNA, 251 bp, Glycine max
gctttggttataaactgtcacatgatgcttcattacatccccgatgaaaccctatctgatacaacaggcttgacctcttttctctacgattcttcttctcttgctgcttcttctgctgttagcgttactcccacttcctcactgcgatcattgttccttaagtccctgcgaggtttagacccaacggtcgtaatcttggtcgacgaagatgcggatttgacttcgaacaacttggtatgcagactaagatc

SEQ ID NO: 99544 - DNA, 263 bp, Glycine max
gagcttttctgtcatggctcatgcaatcaaagtgaagaatactttgatattcaatgcatttgttctctgtcaaatctttaatgaatttaatgctcgaaagccagatgaattcaacatattcaaaggcgtcatctactagtaatcacgtgttcctgcaatagaagctgcagagccaggggattgattgaaacagaagacaaattcgtcaaagcaacctcaaatgatcatcatgaaacagaacatgcacatgctcactctcacgt

SEQ ID NO: 99545 - DNA, 249 bp, Glycine max
gaagatgaagatgttcgatggaaacaagcatgagttaacctgcattacatttggttttgatatagggtttggttcctctgtggctgatagctaattgaaattggtcatcgaaatctatgatcagaaacagatctatataaattacttgtacaaactgcaaagtacccttatgttaccagatcctgaattaagaatcagaaagatgtggggtattttctgggatttaaaacacaaactatgtgtttcttt

SEQ ID NO: 99546 - DNA, 237 bp, Glycine max
atccctcctcagtcattcgtgtctgcagcgtataatgttccttccaagtctaccattctcccttctgccctgcatccattttcacaatcccaatccactaaatatattaaatctaaacaccatcacactcctagagtacacatgtaatagtggaaaccaaaacaaaggagaaaaaccagatattcatatagaacaaaggaggaacattctacttggcctaggagaggtttgtggtgc

SEQ ID NO: 99547 - DNA, 233 bp, Glycine max
ttgtgaatcagcaccacattcacctgagctttttgtacaggattccgaagcattgcttcccttgcagcatcctcggctgctgcttcccttggcatgtcagttatgctttgtaaccccatcaacctcagtggtgccacatggccagctccatctgcctctagccctgcctccttcaatactgttgctcttttctccaaaaagaatgctgcacctccaataaaagcttcactgct

SEQ ID NO: 99548 - DNA, 230 bp, Glycine max
ggaaaggcagccttagacggctgaggaaaaagtaccagtcagtagagtctgatgatgatggccgtcacgaagaaaagataattgctgatgacagtatggatgaccaaacccaggaaatcaaagatgatgaagatatcctacctatttcatctctttacaagaataaagcctctcaaagggtcttggacgaggaaatggatgctagtgttgacagacaggcaggtgatgcc

SEQ ID NO: 99549 - DNA, 257 bp, Glycine max
gaaaccaaaggtatctgtttgaacagtggtgaatgcttttaatgatgtgaatatacagaagcccctcaacatatcattgaactctccttccagtatactcatgattggaagtaactctgttaccgcagaccttcactaccctctgctgctaatagttcaacgccaaaatggtccagaccatcgctagagttcatcaaatgtaatctggatgcctcactctttcgcaattatcttcttcatggacttggggcatgcaa

SEQ ID NO: 99550 - DNA, 252 bp, Glycine max
  unsure (1)..(252): unsure at all n locations
attttgtccggatgggaccgaacaagggacgatgaaatcagtgtggtggaaagaagttgtgtttgtgtttgtgtttggtgttgggacaattgatatcggtggctctcaaattgtgaaccgcacatatacccaccctgcctcccacgccacatcgtacccgctctngctccctctctctctctctccgctnctctctctctctctaagctctttcaagtagagactgtgtgtctatgtgctttgtcgcggagc

SEQ ID NO: 99551 - DNA, 193 bp, Glycine max
cattacaactcccagaaacttatatgggtcacataataacgatttgagtgcttatgatcaataatgtctatgtaaaagttattctagatgtagtggaattggtaagatttccctgtaacttcgttgctttgcaaatggtgagaaacccatggatgtcaccccagggcttagcatgcatagggacttgtatctt

SEQ ID NO: 99552 - DNA, 254 bp, Glycine max
tttcagtctaacccggatttacttagttagttgggacttgcttcttagcgtgtagtggatcatccaggctagctttcctgtagtagaacgcggggagcttgaccatcagggtcttgaatagggtgtgccttttagatcttttagtaggagtactcttgaatgtactatgcagtaggttctctgtgcccttagatcccaatcccagatcgggttccaatcgcagaagtgttttcatgcgaatggctaatactcat

SEQ ID NO: 99553 - DNA, 250 bp, Glycine max
ctcagaggaatggacagaagaaccataagaaaccacgaaacgcatgacatcggctagtaactggagttgcaaatgatccataaggcataaaccaagcatgtgactgatgatgctgtggagaaagttttgacttttgagttgtttcggagacatcacatattgtagtgacaaggtgataattttggcaagatgaaaaattcaagaggacgcagcatgaaacatgcacatttatttcattgtgaagatcaaa

SEQ ID NO: 99554 - DNA, 237 bp, Glycine max
caaggggcaggagcaaaagcttctggatgaaattgatcggctttcagcagaactccacgactgtgatgcgaacatacacagacgtaacatcagacattactacattggaatctctcatctctcagtcacgtgaacgcactaatcgttacacagacgagacagactagttacatggggagagacagtccctatggggcaaagagattgaacttactgctgacattgataagctgagag

SEQ ID NO: 99555 - DNA, 217 bp, Glycine max
acaatatcagcaatggccatgatcaacgccaaatgcgtcaacccaaagttccccaatcccaccaagctcgcaccatcaaaaccctcccttcagatcaaccttccaagggcctcatagcctcaccgaaagcatatactttccccgcgaagccatgcagagcatatcacaacctcgacctcgagcgatcgtgtcaacaatgcgactagcaaaggcacgc

SEQ ID NO: 99556 - DNA, 254 bp, Glycine max
ctccttcgttctgaaaatcgtagatttttgttttagggtttctcttatataatcttttcgtaacacaaaaaaaaatcacataaatcttcctttatatttattactatttcgttttttctttggattaattaactaggcttgagctatccgaataataataataatagtttcggagaatggaaaagaaaaaggtagcagttcccctcgtgtgccacggacactctcgccccgtggttgatctcttctacagtccc

SEQ ID NO: 99557 - DNA, 257 bp, Glycine max
ctccgctggatttagagattggtcttccttgatgatgagtttttgcagtgaagaagatgaagaatctaccaaagggaatgagtatttttctaggcaaaggaatgtgatacagacgaagggcttccgcataaaaagtatcatgagcagtcaaatggatgctttggctgttgcagatagaggaataagatttgttttgcttccggaccctatatttgacaagtttgagcagcaaaagagagcatagatgctggatatat

SEQ ID NO: 99558 - DNA, 254 bp, Glycine max
aaagaattgaagaagtggttttaatattttaccaccatgaagctctaattatacttgccaacatttgtaatggcaagtccaataattagacatggtggattatttgtttgttgtttagtgtgtaacaatatgtagtacttttccctcccaataatagaatgtcaagtcttgcatatatttttcatctctctagttcattattaatttgactcagatcaagaacttttacttttgtgttattatgcaaaaacttg

SEQ ID NO: 99559 - DNA, 243 bp, Glycine max
tcttccatgccttcataacatgcataatcttcgccttctccggtgctaccaatgcatgttatgaaggcatggaaggttcttgggcgacccttgaaccttccatgccttcataacatgcataatcttcgcgctctccggtgctaccaatgcacttgtggcattcaataagtcaagattttctaggctttgtgggtattatgcaatggcttctaacgcttctgctttggcaattctcttgtgggc

SEQ ID NO: 99560 - DNA, 242 bp, Glycine max
tttcaatttctctctcttctgctctcactctctcacttgggcaatcatcagcagctacaccaccatgtccatttcgcttttagtgtttgcttcctcttccctctccagtcctgccaaaaccaagttcctgccctcactttctagattttctgtcaagcgtctctgcttcctttcccatactcgtccgcacatttccgtgttttagcgctccgtgaacctgttgaatagactcgggtgtagca

SEQ ID NO: 99561 - DNA, 251 bp, Glycine max
atttgtttgagattattttaacttatttggtagtgttgaatttgagattttttaagttattttttttggaggcaattttttttagtcgattaaaattattataattgataaagtttttcgtccaaataattaatactatctatgtaagccaaaggtgcggaaaatgagtagtaaagcatagaaaacagtaggagtaaagagaaaaaggatgaggtagagagaaggtgggagtggcagagagaagattacaa

SEQ ID NO: 99562 - DNA, 244 bp, Glycine max
tgctgataaggccattacacaaaattaaagtgagattccaaatctagatcaagaaaggacaaaatataacaacagaagattatatttcgcctaataattatactaattaaaagcacactttgtagaagcaattttgttttatttcttttcatgagatttacaaatatggggtcgtcctccacttttagaccttgaccatgagaagatttggcaatttatgcagggattaaaccttgttctgagg

SEQ ID NO: 99563 - DNA, 251 bp, Glycine max
ccctttcattcttttatgattcttcactcaatttcattagaagctgcttctgagataaaaatatcagcttttgtagttcacactctagttgcttctgcaaaatggtaggaagtgttgatgttctagctcatgattccagcattaatggaacaatgaaacagtggcctgaagatttcagttccatgacgattatgagagatcatgtgacactcacaattggagagaatggcattggcaatggggttgttcag

SEQ ID NO: 99564 - DNA, 241 bp, Glycine max
tcgtatttcacttcctcacacaatccacaccaataacaaaaccctccccaaaactaaaaacgtcgaaatcaaaattcacattactacaaaatttgtctgttattctttctctccaccaccatggctactaccatagcagagcaagaagcctcatcacgtgccccgcactgctcgactacgccaccactacatccgacgacgacacggaataggaggaggaggagctggtacacgagcaaaa

SEQ ID NO: 99565 - DNA, 241 bp, Glycine max
aaaccctgaagaaagacacagccattgtttgtttactttccattgattgagcgaaagctttgttttttctgcgatcattttccattgggtggaagaaagtctcaacctttagtcgaaagagcaaggatctgagtgagtgagcgatcatgtgtggtggtgcgattatctccgacttcattccagcgggtcccgccggcggggcgcacgcgtgaccgccgacatcctgtggccgaatttgagg

SEQ ID NO: 99566 - DNA, 251 bp, Glycine max
gccacctgaatgctttgtaaaggatgtgacaaaatgtgccaaagcctccacacaacatacgacatagtgctatggtgcactttacactctagcagtgggaactggaggaagcaagcccaacatctccaccaattgaagaaggttagcttgtgtaacttctctttagggtgaaaatcatcaaattgatcagctcctatggtggcgttcctatcatcacttctcaaatctcgaaccctctcgttcgtgccgat

SEQ ID NO: 99567 - DNA, 246 bp, Glycine max
ctgatattttctcttccctataggcatagctggctgtgagcaattgtggtttcacagaacgtgctcttttcaactatggcggagaaacacaacatcaagaacccagccgtgaagcggattctccaggaggtcaaggagatgcaatcaaacccttccgatgactacatgagcttccctcttgaggttcttttctttggtttcgctttctctactattattcattcttcaatttcactaattgtgtag

SEQ ID NO: 99568 - DNA, 257 bp, Glycine max
gacacatcccatttcttctgcctgcgccatattacacaaaattttcttcgcggtaactcaaaagacaaacatttaaagaaaccactcttgctggctggtttcgcataaacggagaagatgcacttgtgacatcttggggtatccgtgccaataagccaagtgcagctaaatggcttgatcaactacccaaacaaaattgggtacaatgcttcgataagggaaaatgttaaggacatatgactacaaatttgtctgag

SEQ ID NO: 99569 - DNA, 259 bp, Glycine max
cactctctctgatgaacttcacattcacgcgccctcctcatgctgcacccttccctaacactcctcctcctcctcctcctctttcaccccaacgccggggaccctaacgacgccaaaatcctccggcaactccgcaacgggctggacaacccagaacaactgccatggccggacgagggcgacgacccatgtggttggaaatacattttctgcgacacaacaaacgcgtgaaccagattcaacccaagggcttaaacct

SEQ ID NO: 99570 - DNA, 260 bp, Glycine max
cttcattcatttcctgtggctcaatgaggcaccagttggggagctacagtaaggcaaataaaatggtggcgtgccttcagaacccaatgggtattgcaaaaaaaaatgttcagttcaggggaaatttctccatacagtatttttttttatcagcatttctccaattttgtgagttaagcagcctaacttgatgcagcatataaactctcattggttacttttgtgcttgcttgctagcagttttatatttagttttgtta

SEQ ID NO: 99571 - DNA, 256 bp, Glycine max
gacttacgattggctgatgctcttttctgtaattacccttgggtatgttggctggatgatctatcttggtcttcatgttctgcagtcttatacctcactgtcaggagatgcttttggaatggagcaagcagttcagaaaaataaccgtggacaaatatatctatatggatctatggtgacgggaatgctttgtttgcttatgctgctggagcagtctcctcctctttaccatgcatacatcatcgtgacttcattt

SEQ ID NO: 99572 - DNA, 258 bp, Glycine max
gccttattgtcatgtgtaaaggattctgatttcaagacaacaatctatcctttgaggttaagttcaatgactttgaatacaagctctatgtctatggcggaggagaatccaacatccaaagaaccaccatctgctcaaggtcatggtgcagaactgcagcttagtgatggcagtagcatatatgcaaagttggtggttggcgctgatggaggaaaatcacatgttagggagttagcaggaatcaaaacaactggatgg

SEQ ID NO: 99573 - DNA, 212 bp, Glycine max
agttcattcgcaagacacagtattttgagtagctttattactttatggttgggatattatgtactggcgaattttaatgagccaccggtttccaaaatgtactgcgaaatttttttatggttggtacatttcttaaataatgtgccgaactactgatacaaacaaacttttgaactcttaccaaaatgaattgatgtttcacgatattgatt

SEQ ID NO: 99574 - DNA, 257 bp, Glycine max
ctttctctaaggcaatttgtatgatcatccacatcctctttcaaagattgcgtacaacactgaaatatagcagagatcaaccaaagactaaagaaaagctatgctgatcaattcagtcagttggttttacctcccctctcattttcatgtctgtttacaatttgaattgcaagtattttcctattaatttatgtgttaattaaggagacaaagcttggattgctaaacaagcgaaagagtagctagttattcaatca

SEQ ID NO: 99575 - DNA, 213 bp, Glycine max
gattgggggctgctgctgcgagagaaaaaaagaaaagaagaaacagtttgaagtcagatgctagatatgggaagtggagtttcaaccctctgttggtgctctcggatcaacgaacccgacgttattttcaccgccaccgacccattggacgaaaccctaggccactccttctgctacgtcagatcctccgcgcgcttcctttctcccactcgc

SEQ ID NO: 99576 - DNA, 243 bp, Glycine max
tcgaggtgcctgttctctgtaactgtgtttggagtgttaaaacgttcagcctagtcaaagattcttgtttctgctgtagctttagttagtagctaagcacctcagaaaccagatctctgtagaaagtgaagttttttttttggttcgaattctattctttgttgtaccaacatgctctccacggattcccttttggaaaatttccctggttctgtaaacggattcatatttgaaaacggtccg

SEQ ID NO: 99577 - DNA, 131 bp, Glycine max
aaatagactgtgaggttcttgggaaccagaccggagaaacttaatattttgcaaacaatgtggtcaacggttggcagggtgaacagagaccaaggatctaacttctggtttgacctaacaggagattttca

SEQ ID NO: 99578 - DNA, 256 bp, Glycine max
attgagcgaatattatcgcgatgttgaattcggaggatctggaactgcgtgttgttgcgttggggtgcgcgctggagatagggtacttcgggcggaaggaagcggtggaggcgatgatgaaggaggggttggtggagaagctggtggagttgcagaggtcggagaaaggtggggatttgattgagattggaagggaaaaggttagtggggttttggagagaaaaccttttgcgagctgcgtggcgaggtttgcggt

SEQ ID NO: 99579 - DNA, 254 bp, Glycine max
ctggaagagaagtggaagtggaagtgggagcagaagtggaagtggaagtgggagcagatgcagcttccacttccacttctgatgccctggaagagaaggcctggtttcgccccaccagtctcgaggatttcgagaagcctcacacccttccttaacaacccctttctttctttcaattaggacatcatatatattatacaaaattaaataaataaacactagtcagtagtagtgactagtgaccaagtggaagt

SEQ ID NO: 99580 - DNA, 252 bp, Glycine max
aaaaaagtctcctttatatctatttaaattgcatggattccattttttttatttataagaattaattcgattgtaaaaaaatcaagaattcttaagtaaattaagtaaattcagatttatataaaaaattcaaaattagtgtcattactattactgatcaatcaaaatatctatcaaaagtaaaaagcgaagagaagggaaaaactttaatttttttatggtaaaaaattcaattatacctgttatttcaca

SEQ ID NO: 99581 - DNA, 248 bp, Glycine max
tgatgatgcaacctctcaatgctacagcacacgcatttattgcacacttcatcagcttgaaactcgctgatcatacttgcaagcaagcccccatccaatagcaatgccacctcaaatcaactttttagcatctccaagtccttcactatttatttatgctctcattgcattgagtgcctcaagtgtgcctttggggtgattctgtagtgttggaaatataaaagaggagtgtggactttaaaagggta

SEQ ID NO: 99582 - DNA, 247 bp, Glycine max
caatgatgttgacttggagtttccaaaatttggatttcttcatgcggatgcctcagtggacaggaaagatgatcaacaatcaaaggactcgtgtcatagtgctgaaccgatgaaaggggattttgtagaagatcatttctggaaagatcatcctttcatgttggccaacttttatcctcttgatcagcaagactgggaagataaaatcctttggggcaattctcctgttccaagttataataatgtt

SEQ ID NO: 99583 - DNA, 251 bp, Glycine max
aagaaagcaagataaatgggatcattgaaagtaagccatttgcagcttcttcaatcaagactcccactgccactgtgccagctactttggtaactgaagcatctgcaaagccaccccatccagataccaagtacttaggccaggtatattcagtacctaaggtggagcagtggtctgattttgatgatcaagagtggctatttgacaccaatgtttcacaagaaagaaaatctgtggtgaaatcttcaata

SEQ ID NO: 99584 - DNA, 249 bp, Glycine max
aaaaggccacctataagagggccgtatgaccaacgaggaagcaatgaacatttttgaggagatgccagactatcaatcatcaacgcaagcccaattgtgctatttataatatttttatcaatggatttgggaaagcaggcaacgttgatattgcttgtgatttgttcaaaaggatggttaaggaagggataaggcctgacttgaagtcttataccattcttgtagaatgtctgttcatgactggtagag

SEQ ID NO: 99585 - DNA, 245 bp, Glycine max
caattggatgttatttagatctggattttttaaagatatgcaccagtgagttctccatggacgctgtcgtatcgtaattcgccaccacactgaccacctcccgtcctccgccgtgaagttcagcggtggcttttattttccgtttgcactgtgtcgcagcactgccgccactatcccctgtttcctcttccttcgccaacaacacaaacaccaacatcaaacagcggtggcttttttagttactt

SEQ ID NO: 99586 - DNA, 254 bp, Glycine max
ttaaacccttcaaattttccaccgcaaaactgtttcatagcatgccaccaccgtttccacacacctatctatacagcttctaaatttctctcctttccttgggggaactgctcggttactgaaaccatcatctgggtcgcgaagattttttggaaaaaaaaagaaagtttaataatctccgatggcttcggctgctatcttctcgtcgctacggcggcgccggtcgccgtcgctggaggcgtttctggcgccgg

SEQ ID NO: 99587 - DNA, 201 bp, Glycine max
tacaaccaccacaatcgctcctctactcttctgtacctgtgcttgtctcatcttcttctccgcttcattgtcagaagcaacagtagttggttatggctacaccatctcaactgtcaacaattatcccataaagaattctttgactgcaaaccttaacctcatcaaatcctcctctgtttccggacccgacattccacacct

SEQ ID NO: 99588 - DNA, 269 bp, Glycine max
caccctctttccctcattgtgatttgtgagtaattaagatatgtatatgtctccaggccaagacatgtcatccatgtctaatgacagaaacaacatgtctatgatgatgcacaacagtttctactggggcaaagatgccatagtgcttttccctaggtggcctgagaacaatgttggcatgtacatcttagccctaatttttgtgttcttccttgccatggctgttgaagtgttatctaaccaaccactcctcaagccagggactagtc

SEQ ID NO: 99589 - DNA, 251 bp, Glycine max
gagagtagtagagtaacgcaacccattccatttccctctaaaatggcgtcaagtaaaatgagggtcgaggagctgcgaacggagctcctccaccgtggactctccaccaccggaaccaaacccactctggtccgtaggcttgaagccgctcttcgtaaacaaacgacgagtgacggtggtgcttgttctcctcgtaggactagaaagagaacaacggattcgaaccactccgaagaaatcgaggttgcaga

SEQ ID NO: 99590 - DNA, 246 bp, Glycine max
gttcatgaacattattcgaggcataatggaagaaattggaaggcctaatgttgcagacttgtttcccattcttcgtccacttgaccctcaacgtgtccttgctaggacgaccaattattttaagaggttgcttaagattatcgatgaaattattgaagaaagaatgccttcaagagtttcaaaatccgaccactccaaggtgtgcaaggatgtattggattcacttcttaacgatattgaagaaac

SEQ ID NO: 99591 - DNA, 244 bp, Glycine max
attcaatttcaccctcctttttcatttttcattaatttagaatacaatgatgaagtatggcttacgtgcgtcattacgtttttcaattaaagtaaatttgatctcccctgagttgcctttctattaatttaacattccattagggcgtatagcccccacaaagtggaattctggattagaaaccaggataatgagatttgatggcactactttgcaatttcaaccttcatctattgcagtagtc

SEQ ID NO: 99592 - DNA, 243 bp, Glycine max
ggtggggtgaggtaagcaaaacccacccctgacccgtcccgttgccatgcctactaagggtgcaaggtcgaggaaagactattgaaattgaaaggaaaacaatagtattattaatttatttatcagtcattcactttgttattacaaaggttatattgtgtatatttatacacataactctaatggtcataaacataattatgaaagcagaattatgtacttaatggtggtatatttggtttg

SEQ ID NO: 99593 - DNA, 242 bp, Glycine max
tcatgaacctttttttccttccttttttttattcaataattaacggtgtgagctacacagtatatgaataggcaatttctttctttctgtaaatctcctacccagttttctcctaatgaaaattaatcttgacttagaaattgaagtatatttagtattcaatcatttaacttctcttaatctttgaccttcttctttggaaggagctagtaccatgcatggttgtctactttgtcttctat

SEQ ID NO: 99594 - DNA, 252 bp, Glycine max
caaatccattctcacgtcacggcacggcacagcagcattcaaccttgtactcaaatccaagtaacgatcattacagacagttaccaccttaacatgcaatatcatctctgtctaaagcaaaagctgccatttctcactctctcagtccatcatattcgcccattcgggtgtaacagatagataaaaaaaggtattttggtaaaagggaggaggaggaggagaaaaaattattcgtccaagtttcaagtaatc

SEQ ID NO: 99595 - DNA, 215 bp, Glycine max
gaagatgctcttgctgtatgcgtcacctttatgatgataacaaggatcctagtctttggttagtatgcacatctgaatttgctcaagggggggactcctgtgggttgtcttgccatattgaatgtgcccttcagcatgcaaaggtgggagtccttgatcatgggcaactgatgcggctagctcgtggctctggatgtgcatcatgcggtaaagtt

SEQ ID NO: 99596 - DNA, 249 bp, Glycine max
gtggagtaaaagagaacatctttccaggtgttggaaaacctggtggaaaattcattgccttatctcaagtatagctataaaaagtacagggttcgacacaagaagaatgataaaggagaagcaagagaaaagttccagtttagttctagagtagagacagaatacctgaagccctcttactctgctagcattggtgaggagcttgaagatgggctatttgatgatttcttagaattggccttgcagttt

SEQ ID NO: 99597 - DNA, 244 bp, Glycine max
tgagtcagcacaaggatcatcagatagcctttgtaccattgaaattaaggatgcgcttcttccaccttggagtatttgtggtatatgtgcattgatggcctctgaaggaagaagctttgtggcaagttttgtgacggaacctaactcaattggcttgaatgttgccttaaaatcaacttgtgagaagtcggaatctaaagctgccggcagtgaaagcttacaagaccaaggaagtacgtttggc

SEQ ID NO: 99598 - DNA, 242 bp, Glycine max
aggaaagtttggctattctttattacacctgatttttctcactcaaacaaatgatattagaaatccacattatgaaagtatgtatgtggatttctaatatcatttgtttggctgagaaaaataaggtgtaataaaggaggaaagtttggctattctttcaaccatgtgacttgatggccaattgtactctatcaaataacatatgttaatctgtcattcattatatgtttttattggctcgt

SEQ ID NO: 99599 - DNA, 291 bp, Glycine max
caattcttgtcatcaaattgtgatgctgtattttcccattttaggcccagattgatcaccttcaaattttgctatatgcaggctggtggttgaatttgacggatgcccttttgagattttggcctttctttcccttgtacacgttcaaacttggatttttatgtggaagggaaagagggcataattccaagccttaaacttttgtaatgcccttcatttatttggttgttttttgttagtattggaattataaaaaatgagtaaggtttctggtgttatatcccgccaagt

SEQ ID NO: 99600 - DNA, 226 bp, Glycine max
ggtggaacaagtggatcggtcaaccactcaacctgacaaatctctagtatatccaatacaattttattaataaaattaattattttttttagctttattttacttttggtaccaagagatccagacatttaaattaaagataacccttctgcaaaattaaatgtctggatctcttggtaccaaaagatccagacatttaattttgcagaagggttttctttaattt

SEQ ID NO: 99601 - DNA, 136 bp, Glycine max
aaatggtattaaaatcacacaatagtttgatttccggtttttggactgaatgagtcaataagacatgtattttatttgcttatgtaatttttcagctataaatggactcctgtattaataattcttgcacagctct

SEQ ID NO: 99602 - DNA, 254 bp, Glycine max
gcgaaatatacctcattatgtgattatcttgtaatttcacagttttattgttatatatttccagggtctttctgaaggaacattttcttgattttcaatgggaggaacaactttgattttttttcccgctgaaggaaattgtaaaccaatatctatggcaagaaacaaggagagtgaattatgcttatgacttaccaataaaaaaacctagtattcttttcatatcaaaaaaaaaaaaaaagggcgtccgccga

SEQ ID NO: 99603 - DNA, 280 bp, Glycine max
atcccatttaatttaaagagagagaaaaatacaaacacaaagaaagagcattagaaaaagaggattaaggaagaagaaggagacgccggaccaagcgtccgtgtttcatctttggtctcctctccttcctcttccccgtaatcctcccttaaatcatcatcccatattcacaaatcacaatcattaattcttagattaattgcattcgaggtattttctgctttcatgtgtcgtaattgttcatgattttgtccttaaaataatcctcattctggtttca

SEQ ID NO: 99604 - DNA, 268 bp, Glycine max
catggttcacgtcgttttcgccttggccaacaagaatgtctcctaggccatgcacaaggatgtctcggatttgcagtggttcggtacccttctctcggctccctctgccactgccactgccactgccactgcccgtaatgggtcgctgatgccctcgctgtcatctctgagtccaaggaggtccctcatgattggatcaccgatgccgtcattgatcaggttcttggtgatatagcttttcagaaatttggaaaaggtttaatttcat

SEQ ID NO: 99605 - DNA, 178 bp, Glycine max
ctccatatctagaaatgttacttcttccatggcacatgaaggctggctccatgtgtgaatttgccacgaaggagtgaactgcaggcctacgatcttccgggattgattctacggtatagtcccgagctcaggtaccgaatatcgctctgagctgactcatgatcaggaattccgtgag

SEQ ID NO: 99606 - DNA, 266 bp, Glycine max
ctctctctctctcacctttgttatacgtcttctccttttcagttctcagaggtcacgaccaccactacacaccgcaccataatcttggaaattagcgtctgaaagagttcaaaggacttccgtagatttaaattaaatatgaatatttatttcttctccttgtcactttcaagattatgaagaggaagttcacacagctacgggagtctatggggtttcaaacatcgcatagcactaaacggataccacagccaattttcagagca

SEQ ID NO: 99607 - DNA, 178 bp, Glycine max
catcgcaccaacgatcccatgtcccaagacttctctacgagaagatcacagtgtcacatagggctaggcaaaatgtccgagggtaatgccaagaggggacactgcatcgccagcattggcgtctcaaccttattgtaggtgctatggtcgtggcgatcacaattaggtcggtccgcat

SEQ ID NO: 99608 - DNA, 265 bp, Glycine max
ctcgagcgaatcggctcagaaccgaacaacattctctgagtttatggtttagcaatatcttattcagaatttgctttctttatcagtttgagatcaacattagattcttatggcttcagagtctggaaaggacgggccggcgtcccaaggaagcttaaatttaaaccaagagctccacctcgtcgagtgataaagcaagaagttaaagctgaagtggctgatgatgttgatgtcgatgctgatgcagaacatgctgctaaggaga

SEQ ID NO: 99609 - DNA, 112 bp, Glycine max
aatgagctgagtgtaacacttgattaccataagctaagtgttgttcatgtgctacactcagctcatgaacaacacttagcttatggtaatcaagttctacaattcggagaac

SEQ ID NO: 99610 - DNA, 264 bp, Glycine max
ctccaacagaatgttggctatcttctgctttgtgttgtttgacatgcagtgattaagcatgcttggtttctccttatagcaattttaatgtgtatattgttcttcaacagtctatcctctacaacaaccatagaaagagaatgtttaaatggagatggctttggaacttggggatagtaaaattaagtggaatttcccccttttcttacatatgaggttcaaagcaatactttgtttagaagagagatttctgcaccacttaca

SEQ ID NO: 99611 - DNA, 252 bp, Glycine max
aaaagggttcgtgcgttcttcctccaaagcctttcatggagttcacggcactctctaacgcttcccaacttgggagcatcaaccctcgcagaaccaaccttcaaagtttaacacaaaccctcttgctttttcttagtttctttcccttcttcctctcgcagaggttgctcttgcatagccattctcaacacccacacgcccacctctagcctgtggacctccttccgctgattttgaactctctgttttgac

SEQ ID NO: 99612 - DNA, 246 bp, Glycine max
ggagattattccaacttccatatccactctcatctactacatatatgccacacactctcatagtactcgtttatctaatatctctctcatattatccattctgcggatattcagctaagtacaatacgtactaagatgactgagggaaagctagttgaagctgcagaagctcataagacacttcaggatttcgatcctccaaagaagcgcgagaggaacaagtatgcttatgcttgtgctatgctg

SEQ ID NO: 99613 - DNA, 262 bp, Glycine max
tgcaggtaagctaagaagggtagaagactatctctttctttcgctctatttaaggaacacaaattttacaggtgtagtaacctgtttcacaacccaatacatgtcatgcacatgttcaaccaaaatccggaaagaccaaactgcatttacattttgctgctgctaattaattcaattactggctatgggacttcattcgccgactcctcctaattaactcatcgcacttctttcatcaactcatatttcacttacaaaacac

SEQ ID NO: 99614 - DNA, 273 bp, Glycine max
tgtgattccatttttggaacactagaatttataatccttcagcctctaatatttgatggtcgaaagtgggtttttgatctgtatttgtgaatcaattcaaagtttaacaacaaacaaaaatcaaagtactgcgtaatcccccccaccctccaaaagaaaaaaaaggtttcagactttcaggggtcattatctaatttgttttgttttccgctctctatcagagggaattcgaacaaaagctctgtgctgtgagggccgatacagtggctacag

SEQ ID NO: 99615 - DNA, 276 bp, Glycine max
taaatctcttgttgccttctttcttacagattgttctctttcatgctagcatatcatccataaatgcatgcatgctttgcaatttgcaaaacagttttatgccaaattcaactaactttagtttttggttggtgatggggttttaggggactacagaacttctatggccaaaacgtagttacatgtgaaactattaggtgaaacattgatgtattaggaaaacaccataactaactgcgatattgacgattatgtccttgttggaaatgagttgca

SEQ ID NO: 99616 - DNA, 272 bp, Glycine max
gtggagtcagtagaagtttagaatatatcaactgcaagttaattagtcaatattacctatttattttggaatgtatatgcagtgaattagtaattaataacgtttttattatattaactcaattaactagacatgttttcatgcacatatatgttttttcctatcaagttcagtctagctggaacttgttgtcaaccctttacccctgtcccttgaagatgtttcactctttcaatgaatgttcaagaagtaaaattcatcagcagattcaa

SEQ ID NO: 99617 - DNA, 269 bp, Glycine max
gtgaactagttttagattcttacctggtggtaattaatgggaaagactttctaattttgttataacttataaatcataaactgcatccttgtactcatttgagatcaatgttttaaatcccgaattaggctatatatgaatattttgaaatttattatatagtctattaaatataatttctcaaaaatgataaaaaaaaaaaactcatagttgatgatgttcataattaacaataaaaagttgtaggtgtcatgaacaaaacatacaag

SEQ ID NO: 99618 - DNA, 272 bp, Glycine max
aatagaatagaattcagcacacacaacacattctctttctttgtagatcccactcaactcactcaggacccatccctcagcatctgagagagagccccacaaacacaaagggaatctgtctcaactcaactcagctcagtgcagaatgcgaaagagcaatgaggaatttccgaatctgagtctaaggaagccacccttaaagaggagcaagacaattccaaatccaaaacacacccatttctctgtctctgtctctgactccgacgagcaat

SEQ ID NO: 99619 - DNA, 268 bp, Glycine max
  unsure (1)..(268): unsure at all n locations
caaagtttcatcaaatgtactctcaattaagagaaatttgatcaaatttgagctcagttacgtaataaactacttgacatttgatcaaatgtcaagtagtttattacgtaaacagaggtcaaatttgctggctgctcttgaacgctatgataattttgggcgggaagcccgaatgcaaccatattgtacaaaagaggacattgaggatgatgattgattgcataatcgtccanagatcgcaantaatgcacagaagaccacggacgag

SEQ ID NO: 99620 - DNA, 183 bp, Glycine max
tccatatacatgtactttttaattacccattcaatcccatatgatttatggctccttggagctgattttgtaattgtaacaattcacttttgtaatttatgtacaacaaccaagaattgctaaacgcatatacagtttggcgattcacattcaattttttaattccatttctccatcacacac

SEQ ID NO: 99621 - DNA, 201 bp, Glycine max
ctttcgcatggtcgattgctttttattttatgattcacgttgcaggtgatgctgcccaatctaatctcttcgataagtatgttaggagaacaaacattatagggtgaggcaacccaattcaccctctgccggttaccatctcgttctgggcctgctgcattacttggagtgcatattagagcaggagaaggagatgaagat

SEQ ID NO: 99622 - DNA, 221 bp, Glycine max
gttctagatcgcgagctgccgcccttttcgccttttttttttttttttttcccgccggcaccgggttctttccttttccacctggtgtgcaatcccgggtctttttcaagttttttgggttcacaaaacaaaaaaaatgacctcaggaggggcccccccccgtctagtagtcttccccccggttgatcatgcccgcacgttcccccaagtggagcccgttt

SEQ ID NO: 99623 - DNA, 247 bp, Glycine max
gagtcagcggttttacttgcatcattttggaggacatctcttaatgaatcagagagtcagcggttttactttgatcattttgaaatccatccaataaagatcattgcaaactttatccctggggaatcacgttcaagttacagctcaacgcaggaggctctgaggtccttaattcatagtgtgattaaggtgcctcccataaaaaatatggtagtagaattgaacggggtcctgattacccatgctt

SEQ ID NO: 99624 - DNA, 207 bp, Glycine max
ccgtgatcagggtgagcacctccatcaagatgtcacgtcctatgacgtgccagatcctgatgccattccccagcgctcttcatggactggtaggtggtcgaggtgggcgaagctccttgcaggccctcgtacacggtcgacagtcacaacgctagacacagacgtggactatgcgtgcccagacacgaccgtcaccttggacatggc

SEQ ID NO: 99625 - DNA, 255 bp, Glycine max
catgagggtgtgtgttagagatatgatataaaaccatttatctatgttcacctaataacttaagcttttgagatagttagttcattacattattaaatattttggagtttcaacataattgctatgtaggaaattcataagaggaaaccttaggggatgcatgtgtagttactcttataaatttgagtcctgtatacattcggtttcacatacttatcatgtaagattgaatggatataaaatagttcctctctc

SEQ ID NO: 99626 - DNA, 262 bp, Glycine max
ctctgttctctgcgctcggcgtggtgttcttgtgcccattttcaggagaccgagataggcagtgcgattcgatactgttcttcttcctgatgcttcattaggcgtcgcaatctgggtagtgacaactccatgttccaaccatgtaatggggtctaccttcagtgtgtcagtcttcggatctggtacttcacacgatttgtacaacatgttctgcgccatcgtgtggctgcactcgtcagtcgcggatttgttcggagcgttc

SEQ ID NO: 99627 - DNA, 243 bp, Glycine max
gtccgctcgagctgaggccgtctctctgtggctccatgatcatcaatctagccgttgagagaattgcagactctagtgccctctaaagtagagattgagtatgtgcgagtcgatgacctcattaccgtgacgagatagccgatgatccacttggcgctattcactaggataggctcaggggtattctgaatctggtaaaaggtgctagtctcactatcgtcaactgtgggacggctcttgaac

SEQ ID NO: 99628 - DNA, 250 bp, Glycine max
ggaggaagtgctgaataatgctctaggcagagtcaccactatcgaacaagacttggttgcaagaaagaaggcacttgatgatgcccttgctcgacaagtagaactccaagctcaaattgacaagaagaagaaaaagaagaacaagttgttccgcttccgctgttttgctgcgtgatctcaaatgcatcaggaagagttgtaaaattggaggctttctatttcgactgcctgtttgattaaaaacctctgt

SEQ ID NO: 99629 - DNA, 226 bp, Glycine max
caaaatcatcatgatttggtcagttaagataattctgggttttgtgacaattgatttcaatacgacggtttcctttttccagattttatggtagctgtaagatgatgtataaactgcagtcttgtaatattgaattggagacaagcatgtttcagtgataatgcgggaatagataatataatttctttcttttttaaaaaagaaattaaaaagaaagatgagtagg

SEQ ID NO: 99630 - DNA, 245 bp, Glycine max
tcttacttcactgcacgtcttgctttactctttctctctcttacatgccggaatttcctctctctttctctctccggagaatagaatacataccctaaatcttcgctttgctgacacacacattagatcctgactacaactgctaacgttaggaattatgcgtcactagcgatgtccgattttgattccacaacgcgaaaccgtccggggtcgtggtcgccgtcgccgggcgccaagggaattcc

SEQ ID NO: 99631 - DNA, 143 bp, Glycine max
agaaaattctctttctctggtgcggtgtccaagaacggccccgcccaagggagggagctcgtggagcttgttgaagggagaggacgggaagaatagttaaatcgtaagaaaaatagatagactaaactaggaagggacacgtt

SEQ ID NO: 99632 - DNA, 253 bp, Glycine max
attcagaggtccgaaataggctacgtctctacgaaagccttgttccttcttctcccattctatccgtttctatccaaatatcccaccccgccatggtggtggcaacaaccaaacaccacttccgtttcctctgcacattcatcacgctgcaaccacattagcgtactatgctgttcttcttcttgttgttccctcctcagctatggaattcgccaggaccatgttctgttcttctccaccgttccctccaaga

SEQ ID NO: 99633 - DNA, 247 bp, Glycine max
tggaaccccaattgcagaagagcattccctgcttctgtttgctgaggttgctgaaaggtacaaaattggcctagctttaatttaagtaacattcagcaccctccttacgtatgctgttaaattgttttagtattgcattttaaaagctatgattttagtcttcatttctttacagtttctgagtttgttcctcactcttaaaatatcaaagacttaaaagtcagatatcatccaaacactcctttgg

SEQ ID NO: 99634 - DNA, 121 bp, Glycine max
caacaagtttatatgagtatcgaggatggaactcaaaagctgccaatcctacacaccgtcggcttacttggggccttagactgctggaaagacgcgtcggttgacttctacatgctcggat

SEQ ID NO: 99635 - DNA, 245 bp, Glycine max
ggtggacacatgaacagtgtaaatgtggttcaatcagcaactactgataaccaagcagggtggcatgatattacaccagtgaatgaactgaaagtcacatcaaatgttcttgaaacccaaccaggaaaggcaccatcattggaaagtgtgtcctcatatatttggtctggatcaatctcaatcaatctccacattgatgctatgtcctctgcagaaattcctcttcagatctgtgtgttctctcc

SEQ ID NO: 99636 - DNA, 252 bp, Glycine max
attgggttctcttgcaagctttacagctacagtaatggtttcataggtcaaatatcgatgctgttacatgtactgggatggcagttgtaatgtgtggaaattttattcttacggagattttgaagtggaggggaagatcactggctcagtcgaatcaacaacaaggttcccaagtagcagtaccgccacctgatcaatcatctactatccctcatcaagctcagattggttctgaacatactgaaagtaatt

SEQ ID NO: 99637 - DNA, 248 bp, Glycine max
ctcttcactttcaatctctttcccttcctttccttgtctttctattcctctagatcaaaattgttatattatcacccatcaaacattccacacttctccccctccctttgaaaacacctcaatcaatctcgatgatcatggcagcactcaattcaagcacttgtgccatacctcaattccctcacgctctctcctccactatctctgctgcttcatcattagcaagagatttgggcttccccacaagg

SEQ ID NO: 99638 - DNA, 244 bp, Glycine max
tggaaaccatatccaagcggtttgaagaacttaatgtttgtggcaaagttactctaaagagcaaacttcgggaaattgcctaccctactctaaactctatgtgtcatcctccaaaaaaggtcaaaacaaaaggtgttcaaaagaaaccgatgaccaaacatcaaagatcaacaaagggtgattcgtcttaatggaagtatgttgatgtattacattctatgcaaaatagtaattcttcagtcaa

SEQ ID NO: 99639 - DNA, 149 bp, Glycine max
tacatttttacataccattcttagccgccacttttctatattcatctgtaggaataacttttcatctgtatcaattttccccgtctaataaaaagggtttgactttttcttataatagagtttttttgtttcggctttaggtatttgta

SEQ ID NO: 99640 - DNA, 132 bp, Glycine max
gagacgttatgagttccctccctttcactctttaatccccatcagcaaaacagtttccaaatggtaatagtagcattatcctcctcccttcccgccggaagaaacctcttctcctccattgcacacaacata

SEQ ID NO: 99641 - DNA, 249 bp, Glycine max
tcctgatgcatataaagctgcttggggtcttttgaaggtttttagtcattctactatttggactgttttagactaaatgcatttcctttattttgtgtcaatactgcattaatttaattttaaatgtattgaattgtagatgtagattatcttaagatgttccctaaatgaacttatgttacagggtgctaatgggattctagttccaggaggttttggtgacagaggagtggaaggaaaaattcttgc

SEQ ID NO: 99642 - DNA, 257 bp, Glycine max
actaactccagagtgtccacagaaccatacgagtgtttctcggattcagaaaaagagctatgttggtgatggttaattaatgaatgaagaatggcaaaaaaagctgtgttttttcttcttccccacagagctttttcttcctcaaccacagaaacccccaccctttactccttccttcagccctcagtctttgctctcaccaaaaaacaacaccaacccaattcagagccttctccaaagtccccaactttactctc

SEQ ID NO: 99643 - DNA, 174 bp, Glycine max
atctaatggttactatgacagggcaatagttttaaatgtgtataaagcctcatcgttgcaagcttatcttgcgatggatgcaggcctacactgccgattcgagaaaggaggttggaatgttacatggctgagccaatgaatttacgtatgtgggaaccgccactaacttagttt

SEQ ID NO: 99644 - DNA, 215 bp, Glycine max
ttagtaggaggcattcattgtcttagagaccatgttctgcagaccctagtccttagagctccattcagtttattgtataatcatctcattcaagtagcatcaggagttagaggacactgacatcatattccatctgataattcaatcagaaatctatgtaactgtgaactaatgtgagcatgtggctaaaatatgaagcgccaaaagtatatgtt

SEQ ID NO: 99645 - DNA, 238 bp, Glycine max
gtctctgtctcaatcctctttcgatcaaaaacccttagctcttctctctctcatacttacacacactctcaattcttgcacatcttccatcggcgttggcgtcttcattgaattggttaaaattgacatgaacggtggaaaaattggtgaattaatctcgcagagttttgaaaaatgccgggattagcgcaaaggaatgaacaccaacttactaatcgctcatccacgccgacgtgtt

SEQ ID NO: 99646 - DNA, 252 bp, Glycine max
ttcaatatgataattataaagtgcaaaaagctccacacaataacaaggactttgtggacatattgctatcacttatgaatcaacccatcgatcttcagggccatcaaaatgtcattgatagaactaacatcaaggctattatattagatatgattatggcggcatttgacacgtcatccacaacggttgagtgggccatgtcagatactcttgaggcatcaaagtgtgatgaagagacttcaagatgagcta

SEQ ID NO: 99647 - DNA, 253 bp, Glycine max
gaataaatctttcctctgctttctttttcttgtgtctccctacacagttggaagtagaaggcagtgatctgacatggatgcggagaatggcgaagagagaaaacatcatgaggcaagcacgtcagagaatagtgcagaaacaagcacgaatggggagaagagagaaaagggcaaacaaaaggaaaagccagagacagttccatttcacaagctgtcagcttttgcagactccactgacattcttttgatggct

SEQ ID NO: 99648 - DNA, 249 bp, Glycine max
aaaagctatagctttgcaaaatattgggcaaataaccagagaaaatgatggaagctacatacccatggtaggggaaataaggggtaatttgggaaaggactataagaaataaaaggaataaaataaatctaagcctttaatttagaagtaaaataaaatctggcagtccaaatacactttcccattatgggatatatacctttcccatgctagccgtcgctatgttcccattgttctattccacacaac

SEQ ID NO: 99649 - DNA, 248 bp, Glycine max
ctgcaaatagctctgatgcgtgctccaatggtgccttcgtaccttcagagacgaacaaccataatagtggtggaaattctaaaacatcttttatggacaatgatcaagatactgtagcaccttctgtgagcacaggcttcctggagctctccaggcaacatgatttttgtattgatactgcagttggcattaattcaaatggggatgttcatggcttatgttcagggttatcatctattagcattaat

SEQ ID NO: 99650 - DNA, 247 bp, Glycine max
caagatctggtcttcttatgatgcgtgcgtgtttgtttctactttaaatgtttgaaattcatgtaagcctagatagacgcatctctgtaatcgatatatttttttttccctttcattttactgtgtggtgtaaattggttgttaattctgttaagggatgagagcttttgttttttttctggtaaaattgacgaatccggtgtatttctctgacttttatttgatagcttgagacttaaagtactcg

SEQ ID NO: 99651 - DNA, 246 bp, Glycine max
aggccatagtgaagtcggagaaattagcataagattttcacaagaaatagactcatcaaatgtgcaggaaagctcatctatgagctctgcactggacgaagcctcacttgaagcaactagctttcgccaactgcaacaggtcatggatcagttggatattagaactaaactatgcataagggacagtctataccgcttggctaaaagtgctgagcaaagacataatgataccaatgcaagtggtca

SEQ ID NO: 99652 - DNA, 244 bp, Glycine max
cacagacaatcatttatatactatacaatatttcgccgttcgcaccattgcaacacgcaagtgttgttgctgattcatttcgctccagtcttgtctctttctctctgcagaaccaaaccaaaaggttgttttttccgggcacaattttttgtggggttcatcaaagttcgctccttttctgcaaaagaaatttcgcccaaaactgtaatcaatacagtactttgtattccattttggataatga

SEQ ID NO: 99653 - DNA, 242 bp, Glycine max
agggtcttggcttgtgttctgatgatagcaatggtggaacacattctggtgatgctctttctccgtttcttatctcttgcaatccacatcaacctaaattttcacaaccagttcaagttgcatgtggggctgctcatactgtcattattgcgcatgagggttgcaagctatggtcttgggggagaggaaggagtggagttcttggaaatggtaagactatggatagttacactcccaccata

SEQ ID NO: 99654 - DNA, 239 bp, Glycine max
acccaccctactacctcatcatcttccgatccctatacttttattgtgtgtgtttgagcaagagagagcgcaatggaaggtatctcaatgggtttgaagaagtactggagaagaagcattaggggataccaaagattacacgtgtcggatcggcgaaagaaggaaacggttcaacttggagggtgccaaagaaggtggagatggcgcataaagatggctcctaagatgagaattcacaa

SEQ ID NO: 99655 - DNA, 239 bp, Glycine max
cgcttggttacaagaagagcggggcacgcctagaggaggagtctggcatacctttgcattcgtccgtagtgaatcagtttatgcagcatatacttgatgggcattgggacgagagtgtagccacattgaataaaattggtctagcagatgaaaatgttgtccgggcagcttcgtttttgatattggagccgaagttttttgagcttctggatggggaaaaggtcatggatgctttgaag

SEQ ID NO: 99656 - DNA, 236 bp, Glycine max
caattgcatataatttcttttaaaactaaagaagtgcaaattatgggacttgaattctggaactaatatacttaacagtggaagttagtgccacaagaccaataagtatctcattcaatttgaaataacaagtaaatgccatatcaaatgaagaatccaacctttatatttttgttcatcattttcagataacgtccagtgccagtaacggtgccaccagttccaatcccagctac

SEQ ID NO: 99657 - DNA, 232 bp, Glycine max
cagggtcttaaattgtagtggcattgcttttctgatcaaagtgacacactagtgtaagggattgtgatcacaatcccttacactatcgtttcactttgatcagaaacaaaacaaaaacactaagtgacacgagcagtcatattcatcactgtgccacgttttactgattgcattggtagtaggtatctactaatggtcatgccaaatgtccaattcctatcaataattgaag

SEQ ID NO: 99658 - DNA, 242 bp, Glycine max
ggagacaataaaaaaattgaaagaagaaaatgaagtgcacattcaggaagaggccatatcaaaggagacaattaaaaatctcaaagaagaaaatgataaactacttcagaaagtggtttccttggaagaggtcatcaataatttacaaactgataatgaattgcagatacaaaaacatactagtctggaaatgagaattgcacaattgcaaagtgagaataattccttacttcaaaaagagg

SEQ ID NO: 99659 - DNA, 229 bp, Glycine max
caacttgaagctagaagagaaatttgattgctggaagttacctacttcctagattattctttatacaacatgtactgtaaacgcctgagaaattgtggttttgtaagttgttttatctgtgaaattaataggctaaatgtagatctgtataaagagttttgtgatcttgtacagtagaggtatatatgatgtaaaagtggaatgaaatgaatgtatctttcccacgcct

SEQ ID NO: 99660 - DNA, 155 bp, Glycine max
gtttttgtcgatagaagccatcagtcatggataggcttctatcatcgtcttcacccccttcttttacatttctcactcgattcgaatctgcaactgcaagattcaatttctctccgtcaacacgttctcactctcacttgaagcggctctcctca

SEQ ID NO: 99661 - DNA, 138 bp, Glycine max
cacaggctgcgcagtgtatgaacgttgaaggagagcgtagaggcagtggctggcaattgatgattgctctttggagaatcgaatcgagttaatttcggatcgtgtgagtgtccgatctagaaatccacaagatcaatg

SEQ ID NO: 99662 - DNA, 242 bp, Glycine max
atcgcgagccgccgtccttttttttttttttttttttttttggggcgtgtttaaaagtttaccccattttttccatgtgacttctttggggttttttgtaaattttgttgttttggaaattaagccccccctggggttaccgtttggggattgtttccactgtccaatggggggggatttttggcaaatgtccaatttagggggggacctttaatgtcctatgccccgtaattttgggactt

SEQ ID NO: 99663 - DNA, 250 bp, Glycine max
atcatttcctatgcacttgctcctccaaaacccacccactcctgctaagcccctgtgttccagcagcttgaatgactcgtacctcattctgggttcctgcaatggcttactgtgtctgtatcatattcctcggtgttacgtagcgttgtggaacccttcaatcagattcacatcaaaaagattgcccaccggcttatcacctggcgagggttttagtactttccatggttttggctatgatgcagtaaat

SEQ ID NO: 99664 - DNA, 146 bp, Glycine max
ggctatataatcggtctctgttgttgatactggatccgtaaacctccacttgaagctacgtggttatatattctggggatacatgcatatctaagccaggatatatatcagggatgagtcacctaccatcaaacttgttggtcgtg

SEQ ID NO: 99665 - DNA, 258 bp, Glycine max
cacgcacacgcttgtataattatgtgtgaatcatcttgtttttttggctggtaattgatttttgaaaaaaggtagaggcaatggaatgatacccgtattttgtaacaacatccggcatgaattaatttgctaaatgcggtgtcagtgggagcggtggggcgtggcagaccaaaatgattataatgattcggtggtggaggaatcactgactgtgatgggccaactccattttctaccaaaagtgccgttcccagaccc

SEQ ID NO: 99666 - DNA, 263 bp, Glycine max
catttgtgttgtgtgtgcatatggaaagttactactattctggctggcctctggctcaattcaactctgcaccaattagtgatcaattatctcctttttcagtcccaacaacaacacaacaaacactccctcttgttgctacttcaacttctgaccctgcagctgcagcctctcttcaatttggtgagttcccttcgtggcctgcccccattgcagcagaagatagagctgcaagtgcttccaagagccacagccaagcagag

SEQ ID NO: 99667 - DNA, 152 bp, Glycine max
catgctcctatcaccacccaggtcctacggcacgcaccggataacttcacggagcaagatcatcttcggcagggcgaagtgtggcagttgcaaattttcgggctttgcttgacggtacactgattgctgtcaagagtctggaatctggctca

SEQ ID NO: 99668 - DNA, 261 bp, Glycine max
aattactagagtattcttttaaattttgtctgtgaaaaaaggtcttttttttttatgtatttctaacaaaaattgtctctcttttttaataatctttgaactggccttattgtttcagtatatcaaatgtctgaattgcttgattagctcctggccgccatggttcataaacaaattttgagctttctgtctccctgattacattttggttattccggccagccttatgtcaaatgtaaaggatgccttagtgactagttg

SEQ ID NO: 99669 - DNA, 221 bp, Glycine max
gaggcatgccaagtgggtcgaattgcttgagcaattcccctatgtgatcaggcacaaaaaaggtttgcctcggcctaagggaggaaaggactcgatttttgtggtggttgagaggttatctaagatggcttactcatagcctataagaagataagtttgggcaggttaaagcagaatatgtcaagaagttgcatgagaaaaccaaggcccaaattgagaag

SEQ ID NO: 99670 - DNA, 261 bp, Glycine max
ggatttactgggtaaaatatttactgacccaaaaatacttgagcagttgattaatgaacatggaactgcagctaccacagcaagtgcttcctcaaatactgtggatatacccacttctgggttgaagcctgctatccatcagttctggtgtctacacctacacctgatgtgacagcttcatggactacacccacaagtgcagtgggttcattaccttctgggtttgggttgaagccttcaaatccatcagtttctttattg

SEQ ID NO: 99671 - DNA, 260 bp, Glycine max
gaggtttctggaataaaaaatactatggagacaagaaaaggtgaatttattactgaagaaattaaacatgcaagtgtgcagatcatgtgtgctggtgttgtaattggactggtaactttggttggtttaaagttttacctactaggaatggctcacccattcttcgtaaaatgactggttccgcaatggtgtcagatactatcaacttaggttccttgggagatgaagaaaaagtagagcagctaccaaaaatggatgca

SEQ ID NO: 99672 - DNA, 258 bp, Glycine max
ttcgcattgccttcgcttctcttacatacgtggcggtgggatcacagtccacatggcctgccatatatgctacagtgatgggaagcttgatactgctctctgcgattggctcgatgtgccattgtgtcattttcacacgctcgtggagactacactgagacccgagagtctatcgttcgccatgtctcatgcatcagtccatgcgattttgaagagtgcatacaacagagtgtgcgcgctgcagtctgtagtgtagtt

SEQ ID NO: 99673 - DNA, 258 bp, Glycine max
ccaatttatccctttatttcccatctagtgtagttttccgggtatgtgggtggaaatgctagtgactagtggttatcttggtgggtgtgctctagaatgtacattggcattggttttttagtacctaatactatggatcacaaatttgaatttgggatgtactctgttctccacccatttctggtccgtcttatgtctctcacgtgccatttcaggtcctttcaaggttaatggagttcctttgagacgtgtgaatca

SEQ ID NO: 99674 - DNA, 253 bp, Glycine max
tggaatatgcttagaaaactgccaagcccacccatattctctcataacttgcaatcatgaactggataacaataacaacaacaacacggccacccgtatagatccacctctaaagagatcatcattattaccaatttccgatttcacagcgactattctttgtgggcatctcttctcaaatgccaatcttccccatcacggtggctgcatgtcgcaggaccggcaatgcaccggaaacctccatcttttctca

SEQ ID NO: 99675 - DNA, 163 bp, Glycine max
ggtttttctcaagtaaatgagactcacctttgcgttttggggggtctattattaggtttgtatgtgggttttctcatgtgaatgagagttacccacatctcatggtgaagttctcatgatttgtggaccttatctttttgtagtgaatatataatattttttc

SEQ ID NO: 99676 - DNA, 279 bp, Glycine max
catcgaatattctggtcagagagaagccactgatgatgcattgtataataaggagccaactgaagtaattagagtgactcaatctgatcctagttgtgaggaagtaaaagccgaggaggctggcaagtccacagaaaccagctcaagctatgatccagatgaaactgagaagttgaacaaaactcaggtagctgatacaactattgaaaatgaggaaactctgaacgtaaatccagaggttcattcatgtgatgtgcaggatgatacaatggtagcgag

SEQ ID NO: 99677 - DNA, 284 bp, Glycine max
tgttttcttggactcaataagttatttaaatgaagttagttttagcatttattttttattcatttcgtttggggatgagagcaagtggctactctttcagtttctttatgtgttcagattaatttcacattaagttgtcaaagagcatttggtccccatattgcgggattatgacatgaggcagcagaggtggaatataggagtttagctactactatggcagaaatgatctgggctcaatatcttcttacggaactttacatcataattcctactcctattgt

SEQ ID NO: 99678 - DNA, 269 bp, Glycine max
caaaataagtagaacctaacatcggttgcatattgagagtagaattactggctagaagatacaaagtatatgtattcactcttgcattttaatccttttaacctatgttgtgaatctcaaatcagggaggcaatggggaaattcttgctcgtgggcacagccgagttcccgtctattctggaaatccaaaaaacattattgggcttctactggtggggtttaaatcctcctcattttgactttaatttagtctatcccttttaattact

SEQ ID NO: 99679 - DNA, 269 bp, Glycine max
ctgccgttcaaagttgatatgtaagctgactggagacaatgtcactaagtcagaggaacatatctggaagcatatgagtgggaaaaggtttctcaataaattagagcaagaggaagaagaaaagttgttgtgtcatggatggaaggtggagagagcttacatgagtcaaaaagtgcagatggtggaaaaaaggatagaatgaagaagaagaaaaagaataaaaagaataaggtcaaggaaattgatgaggagaaattgcaggtgtcaaa

SEQ ID NO: 99680 - DNA, 291 bp, Glycine max
acttttccaaatatttcccctttcgattttctcccctttccgggattgcgaaaaacgacgctaattcgtgtagctgcatttagaatcgccaactcagaagcagtcctaattcctcaatggagagttctgaagaggaaactgatggagtctctggtaatcatgctcctaaggaactgattcgtttggcatcacatggtgcaaaatttatagatgaagtaatcaatggtcaaaatgaatgctgtctggataattttcgcatggataaacatgtattctataagttgtgtgaat

SEQ ID NO: 99681 - DNA, 274 bp, Glycine max
taacaaactcatagtcttgcactttgcgagcgccaagactcgagtttcagccacacccgctgcgggagactcagattaggtgtttcctaagaagaatagtttccatcgagtctcaattgtgggtggaacttcaaagatttgtacacatcatggtgcggcatcagagaagaaggtgccaccaattggagatggagtatcgaacaatccttaagtttcatgaacaaggaagaaactactgttcagttttctcatccttggcccaaatgggccaact

SEQ ID NO: 99682 - DNA, 239 bp, Glycine max
tgcacgaagccacgcatgataataacaatacccttcttcgtttcttccctctccactcggcactcacaattctcaacccaaccaccccctattaaccctcaccgcaatctctgattcgatcttcttcaatttcggggtttcccatataccacaaggcataggcctgtgtgaatttgcgatatgctgggtaattgtcgccaagacccaatctcttgggtactcctttaccaacccccacc

SEQ ID NO: 99683 - DNA, 123 bp, Glycine max
ctgaaacttgggtgcgattccttcactcacaaaacaacacatcactatggctcttctgagtcgagcctcttcacgcttccctcagctggtttcccctcaaagggtagtttcactccacacaac

SEQ ID NO: 99684 - DNA, 271 bp, Glycine max
gtctttgccaggaggactaagcctatgataatgcctcagactggattgaatcttgatgggagtaatggatttcagaattctacctgtgcaattgcctcatcttcaaatgatgaaagcttggtgcggcatgcctttagttttccaaagcaatgcagcatctcaaataagtctattggtgtaccctccgtgaaaaacatagcaacttcggatacctcatccacttttcatccctctattaaggatgcactctacggcaacatgcccaaccgtt

SEQ ID NO: 99685 - DNA, 274 bp, Glycine max
cctgcattcaaaagccgtaggacaccacgtcgtgcaccgccgcgtgccaccacccactaaaccaccaacctccacacccagcccaacacaagcatcgttgtcggttttgtttctcttcctccctctctggttttgggtcttggagtgtccttctagctcttccaacccaattcgcggagatgaagtaagaatcacagtataaccatctaattggtatcttcaagaaacaataatgtatattttatggttttcgaggtctttgcaacgtgagtgc

SEQ ID NO: 99686 - DNA, 220 bp, Glycine max
agcgaggtcaccagattttcctttgacactgaggtatgagttgttggtttgggtcgtgagcctgtttgggtttgtgcatttgtggactgtgaagcaagcgtttcacactttcctgtatatattactattattcccagagtttgtgtgtgaggcagcaacacacacagagaacaaaaggcaaagacagagagagaaccatgtcttcccaagcaaacgtcga

SEQ ID NO: 99687 - DNA, 158 bp, Glycine max
atcagtgcacaggtcacctaacacagtcacagtggatgactttgtgttctctggctttgtagactggacaatcaccacaacacacttgtcaactgctcgcatttaacctaccgcactttgttactgattttccaggtgtgaatggtcttgggtatctg

SEQ ID NO: 99688 - DNA, 264 bp, Glycine max
ctctggcattggcaagtttatgtaataagaaactattactttggaaatgcaaaatgagtaacatggttgccaattgcagtttggagaattgcaggttgaagtaaccccagataaggccaatattggggctgtaattgggtttctttttgggtaagttttccaagttaaacttgacttttataagaggatggagacaaggaaaactcaattcttgtttaaatttggaacataggattctttgttggcaaatagcgcgggggttca

SEQ ID NO: 99689 - DNA, 267 bp, Glycine max
tgcggctgctacttactgtacgagcttggttcttcaaatgagatccccttctgttggattcaccggaatacttgtgcttcttgttttcctctctgcttgctgttgcagttcttctacacatgggagtttggcaacggcgaaaacttttgccattataaaaccagacggcttgcttggtaactacacagatgatatcacgcgaacaattgtcgaatatggtttcagcattttcccggccaagattgttcaactcgatgcgggcactgt

SEQ ID NO: 99690 - DNA, 268 bp, Glycine max
tcaggagatgcagatgatatatatttggcatactcagatttcaatcaattcttgcttggagattcatcttgtctaaaagagctaaatcagtggtttgctaagcaactggacacaggtccatttcgacttgttgctgaggcggggaaatctaaatgctcttgggtgaatcttgatgacatctcaaatacctatgttcgagatttggaaaaatcacatcatcaacgtgtatctgagttgcgacggcttcgctcaatatttggcgtaagtg

SEQ ID NO: 99691 - DNA, 279 bp, Glycine max
cgcctgcttcttcaccaccgtctccttctgcttctgtcactgttccttttcatttcttttcttttcttttcttccaacttcatcaccaagacatgtccatgtccatgtccatgtccacacttccctcctcaaccttcgcaaactccaatctctccctctctacctccttatcctcacaaaagctcccactttttcacacccttcacgccaaatcccttcccctcccctttccttatctgcgcattcaaaccccaccaccataccttcccccacctctct

SEQ ID NO: 99692 - DNA, 272 bp, Glycine max
cagagggtggtgcattgatgggaagctcgatgaagctcaaaggctcgctggtgaaatgtatcgtggcggatttgaccttggtgtaggggcttacaatgccatgcttgattgcgtgtgcaagctttgtcgcgagacggatccgtttcagcttcattcggcggcggcgaaagtgctggtggcgatggagtaccgcggcgttccaaggaatacggagacattcaatgtgttgataacgaatttgtgtaaaattaggaagactgaggatgctttgg

SEQ ID NO: 99693 - DNA, 263 bp, Glycine max
tgggcatacaattccaaatctagagttcccctaatccctatagatgaatctccattatgaggatatgactcttgcacgtggaacaagctgctcaaattgtagcctaatatggcttggtgttaatggatcttcagcctgactccatgtaagtcctcatgggaaatgtgttggtcagggcaagacaaaagttcaagatttgtgctgtggaaatttgagttcttcatgcaaatttctttccttttaattccaagagttctggatgg

SEQ ID NO: 99694 - DNA, 262 bp, Glycine max
ctcgtactcatgcggtctgcaaccttaacctaagtgcactgtgcggtgagtttccttgggtacatgcgggaatggctaccgcgtctggcatgcctgagcaggagacacaggtgttttctggcaacaatgaccaatatcctaggttggatgtctacgtgtgggccatggatgagactcttgtattgctaaactccttgctgaaatcatcctatgctgaggcttttcacggtctgaaggatgtgcagacgggggtggcaatcgg

SEQ ID NO: 99695 - DNA, 219 bp, Glycine max
ctcgagccgctcagcaacttgttgcagaacagctcaaggctcagcttcctaccaagccactccctccctctcaggctggtctattctcttctcttcaatttgcattttttctttaaagattcttattattgttattcccagcaagcaaattgttgacttcttttgtgctagtgcgggaagcaagacatgtaaattcacgcggtggtcgaggaagtggcc

SEQ ID NO: 99696 - DNA, 172 bp, Glycine max
tcaaggatgatgagtgatttgtttttgtagtgatatatgctcgaggtttttattacttcatttctgcagaattagattatcatcttctgacttgtcctgtgactattttgataaagcactaaatacaacagaaaatctttagttaaatcattatcatattggctttgacgcg

SEQ ID NO: 99697 - DNA, 207 bp, Glycine max
cagaaatgttcatttcggtctcaatcttttgacagtctgtacctaattgactacattatgattttcctcttttgggggggggggggagatttcccaatttgtttgaggaaaactaagggttacactttgtggcagaaaatctgtgaacaaatgccgcttaatactgattttccaaatttgtttgaggaaaacccgaatttggaattt

SEQ ID NO: 99698 - DNA, 259 bp, Glycine max
gttgtacaagtacaacaaccaaaaaatgtataggttgctctgaagacttgtacaaagtctcacaaaattaaatatttggaacatcaaaagaactggaaatcgaaacattactcagatcatcaacaataggggagtctctaggaggaaggtgttgtgtgactacaacctcccatagtcccattgatgtatcttggcataaaataaaataaaaataatcagcatgcatgaatgaatattctttattgtcatgttgcattgt

SEQ ID NO: 99699 - DNA, 259 bp, Glycine max
cttaaatggacttgtcgatccaaggttgcagacaaattacaatcttcacgagatgatccgaatgactacttgtgctgcaacttgtgtgcgctattcagccaggctccggcctcgaatgagccaggtttgcttgagaattactgaatctgaagatttgtgtgagaataaaccttgtgtttcattttatatttgaattgctttggctgtttgtctctgacaagggtatgcagtaaaatgcctccctgaaagacatttgcct

SEQ ID NO: 99700 - DNA, 262 bp, Glycine max
caatttgtgtggcaaagaatttagatagtctagctctcaaatcctcttcttctcttccatccatcctctcagactgatcttagacgcaaacacatcctaatcacaaaagcggtgaccatggcaaacatgattatggcttccacaaaacctctggttccagtctgcaccagttcccgttcccccacaccaaaactccccattctccaaatttcaaagccccagatgctgtccctcctgggagggatagcaccactggtcttgg

SEQ ID NO: 99701 - DNA, 278 bp, Glycine max
  unsure (1)..(278): unsure at all n locations
catgacttgaaccaaatcatggcatgtgtaattcatgtttcttgatgataaaaggaggaaaaagcagttcttgtttttctttctttttctatctattcccttttttttcttcttcttttaatttatttgtaaagtgtgctactactgnttgtaatttggctgagaattccaagaggatgngctggtgggcaaaaacaaaaaactctaaactcaaaaaaaaaaaaaacgggggggccccaattttgggctttcttccccggggaattttttcggggggg

SEQ ID NO: 99702 - DNA, 226 bp, Glycine max
  unsure (1)..(226): unsure at all n locations
ctgctccagtgctacttcctcttccatcacataaaaccctagtaaatccaattggggattttttctttctagaagaggattgaaagggataaaaaggtcatatcagactgaagaatatccgagtgactgaaatgggctctggtggacttggccatctggacctacgagnacttgactcgagtcgatgtcttcactttacacaggggctgtgcttgagaggtgtagg

SEQ ID NO: 99703 - DNA, 212 bp, Glycine max
ctagcctccatgtattcctcaagcaggtttagacgctacagctaagcaagctgctgagaaggcaaagagtaacactggacaggatctggtggatgagaatagagctgcgtgtgtatactccgtgaattctggaggacttacatgatagtcgatgtcgaatggggatacgatgtactatccgatctcgtccatggacacaacgtatattggta

SEQ ID NO: 99704 - DNA, 257 bp, Glycine max
catatgactcgtggatgtgtcatctcctttattcaacgttgaatattggcattattctcggccggtattgataaaatactttttcgctgtagctctgaataacagtccatcatagacagatggggtctgaaggtcctccaccagatgtgccgacagtgcatgtcgcaggggtgcacgaaattccatggggtttctgagtctacagtggtcacaattgccgatgatgtcaatggatattagatccagaaggaaggttt

SEQ ID NO: 99705 - DNA, 194 bp, Glycine max
  unsure (1)..(194): unsure at all n locations
ctttttatctcctaaaactaatagcattctgtcagtgggacccggacccctcgactacatcagcacagggagcatcggttctctcgccggaccgncggctccggtttgcttctcatcgtcgccggctatctcagtctcaatgctttcggcaaacgaagaaactcttacctcgctctctttctcgagaccgtttg

SEQ ID NO: 99706 - DNA, 256 bp, Glycine max
ctttcttttagctctttgttaagtttctaatcctagagcttgttctggacatggtagaaccgccgaaaagttcacattgtaatgtatccttggggagccttcggacacttaatcccacagcttgagatggccaaactgcgttgcgcaacagggtcacaatctcgcgctcgtgtccatcccaagtcagctccagggtctccccgaactgtgcgcaaatctggtttcagtcgtccatttgtggaggtccatgaccaag

SEQ ID NO: 99707 - DNA, 185 bp, Glycine max
ctactccatccgcaatgggcatcgatttgaaggcaatacgtaagtcctcggagaccaatagctttggcaccagattcgatgatatctcactgattcatattgaaactccgcattgcagttgctgctctcttgcttaggagtcacttgcgtgctggcgtcttcacttgaccggccagggtacgcgt

SEQ ID NO: 99708 - DNA, 188 bp, Glycine max
actttctctctctttgtaacttgtaagcatggagtcctcaaagatctatgcttacctcttcctttgcatgcacttcctctcctccgcaactcccattctcggttgtcgctactgtggcaaaccccctaaaaagcacaaggaccgtagaacatcagagacaccctcagtacccgttcttaagccaccag

SEQ ID NO: 99709 - DNA, 270 bp, Glycine max
cgatatcactatcacatctcatcctcttattctaccatggccttcccacctcctcacggtttcacgtttaacactactcatgaagaagatcaccaccacctccctccaacctctctcaaccccttcccctctttgccaccccaacactttcaagggggtgcatctttcatgttgaagcggtccatgtcgttttccggcattgagaacaagtgcgatgaagtactacatggagacgatgagttatccgatgatgggatcttccagtgtggg

SEQ ID NO: 99710 - DNA, 171 bp, Glycine max
ttatgattagatgaatatatttatattctttcttgactaagaagtaagatgagggagacggcttatctcacaatgatgggttcgcactggccgacgatgactatgtgactatcgacatggggtaacgagatgagccaccagagccagagattgaggaaggtgaagagggaa

SEQ ID NO: 99711 - DNA, 259 bp, Glycine max
aacgcccaaagcgctgctgaatggccgccacattcccttcctccgacatccacgacctccgctcgccgatgctaccagcggcggcggtggcggcgaagaagccggcgatggagaagctctgcatcgacgacatgctgcagaaacactgcggcgagttcgggcggtggcagctcaagcacttcatcctcaccagcctcgacctggcgctcgaggcctttcacaccatggtcatgatcttcgccgaccgcgaaccggactg

SEQ ID NO: 99712 - DNA, 257 bp, Glycine max
atccagatcttccttcaaatcgacaccaaccaaacgccgccgcaacctcggagaagatgacaatgaccttgcatgcacctgaccaaacatcgttgcaacctcgaagaagacgatgacaccaccacaacttgaacgaatgggttcaaagacaagcatttccacatcttttttatttattattttttttcatttttaattgttgttgaattttgttcaatgctaggacgacatctatgttggtgttggtgttgttgtgt

SEQ ID NO: 99713 - DNA, 247 bp, Glycine max
ctgcacgagactccatctccaaaattcttctcatccattccaacaatggatttcagctccaccgtcgacacttctcgtcctttcacctccgtcaaagaagccgtcgccatatttggcgaacgccttctctcggagaaatctatctccataaagagagatcatctggaggctgtcatcacatcccatcaccttcataagaccatgaaaatgatgagagataacacaataaaatggcagttgctgtata

SEQ ID NO: 99714 - DNA, 227 bp, Glycine max
atcaagccagagcacaaagaggggttcctagacaaagttaaggacaagatccatggtgagggcggtgacgccgagggcgagcagaagaagaaggactaggacaatatgctacatggtcatgaaaattgctcatgcaagagtaccagcagttacagtgattgaacttctggatcatctatatcattaaacagtttatggggccatagtactcgtcggctgtggcttaa

SEQ ID NO: 99715 - DNA, 146 bp, Glycine max
tgacaaggtttccagtttcactcttcaacgactctctcgggtgtcaacttgtgttttgagactctgaggttgaagctgcatttactttaagggtgtggatgggttgtagttgtggatgtggtgccacacatgttctcgggttcggc

SEQ ID NO: 99716 - DNA, 128 bp, Glycine max
atgtaagcaaagatggctttcacggaatcgtctctcctggttccttcggtttcaggaaccaacaagggcaagaagacacggtccccgaagacaaatggtatttacgccacattctgtattttaccctg

SEQ ID NO: 99717 - DNA, 249 bp, Glycine max
cggtttttcagattcaaagcaacaaattgttttccttttctcttcaattcattttcctaagacaaaaaaacaaaccgaaatttcgagcaaaatgagagacattgtttctgtcatggaaaactagttttcctcttcttttggcacgttcattccggcttctccgaacactcgccggcctaacatcccccggaatttcgcttcgcctggtaaaaatcgcgacctctgaacagcaggtttccaaatcgggtg

SEQ ID NO: 99718 - DNA, 278 bp, Glycine max
aaagcaatgaaaaggagtctccgtaagtcaaccgaagccatggacgcaccagctggtataattgagcagccgtcaaagaagaaaagagatccgcgccatctttatcgcaatcgcgtttaagccaaaaataaaaatgaaaaggaattcctattcttattctcattctcggcgttaatattttccctccatccctggcgcgattcattttctctttggaataagagaacagaaccgaacctgcaaagggttggttccattccaacatgtagagcacgctc

SEQ ID NO: 99719 - DNA, 192 bp, Glycine max
ataaaagaataagtttgaaactttgattgaattgattgtctcaattcaggactaatttttgctcggagtaaacaagattatcagatgtgattacaaaaaaggaaacaaaacacacggaagacagaaaaccgtatttgttctcactttcaattgtatacgagcagaaaccgcaattcatattgttctctgtcc

SEQ ID NO: 99720 - DNA, 254 bp, Glycine max
atgcgttgcccccaataacaaaagtggaaaattgaagaaaggattccaacaattggacatttcgactcaaacataaacagaagataaaaactcgtctgttacctactctgcgatatcgcagctttcactcttcgccgtccccttgcaggtgcagagcttcaataacgtaactgccactcatatcgttaattgaatgagtattgttgcgttacgtgcaagcgtctcctatttctcccgtccatggacagaagaat

SEQ ID NO: 99721 - DNA, 256 bp, Glycine max
  unsure (1)..(256): unsure at all n locations
caaaattcggctccaggacaactctacagaggaatttagtcaccttcaaaaccaaaggatattggtttccaaattcatcttgagatggaaaatccatcgcaaagtgttttgcgattttgacgtctaggtaatgaagacaagagaggttgcagtgacaaatagcctctgtgaatggaattccttcggaggtgcagttgattctgaattttccatcagcatgtcttaccgnatgtcctgcaagaggataatagtaaaa

SEQ ID NO: 99722 - DNA, 249 bp, Glycine max
ttccaaaacactccctttccctttctattcacttcccctacccttccgtgatgatgtagatagagaataaaaagagaccagtgtgcagtgagaaagagattgctcacttcttgtgtgggtttgttttgttctttgtgttggaatttgttcatgggtgaagaaggagaagaggtgtcaagagagaaggaacaatacatgggagtttatggaaatgagtggttgtattgtggttgctctgcaaattggcgc

SEQ ID NO: 99723 - DNA, 245 bp, Glycine max
acataatagagaaagagggagagatgatggaggacaagaacaagaagaagaagaagaggagcaagttgtggttgaagaaggtgtcgtggccgtttcggtggaaacgactggatcttcaaacgaccatcatggacaccgtcgttttcaaggtactctacgcggctgaggctgtagttcttgtctccaccctctgcttcttctacctttgttgtggctgccacttctgaatcaccaccaccaccctt

SEQ ID NO: 99724 - DNA, 241 bp, Glycine max
catgaattctctatcactcttcagcttcgtatgagcaatttgaacgtaatccgtagtagtcacctgcgtggaatattattacatcgtcgggacggaaaccggagaatgctcactaccgaggcgtattcgtcggagcaggagttattcgtcacatcgaggagtctagtgtacgaagatgcttccaatctttaacataatcgagaagtatatcaccgagatgccggagtgggatactaattat

SEQ ID NO: 99725 - DNA, 149 bp, Glycine max
gaaaccgctactttctctattattatcatcaagtgtgagatgcatgctcctgacaaattcccagccccttttgtgcgagtgagaccatctaatcgattaattactctaacccgttcataacaactgggtatcgcacttcacagctcaac

SEQ ID NO: 99726 - DNA, 232 bp, Glycine max
gttcatggcctcaatggcatacaattgttcatcattggcctcggcttctcgacaaagcatgcatgtttcaaccatctcagcagcaccaacaacattgccaggtgcccctctatacttctctccaaccatttcaccagatattgagcctttgtttccaacccctggacgtgctgctttctctccatcagagtcttcaattcctactattccttcaagtcctagccctcccaac

SEQ ID NO: 99727 - DNA, 253 bp, Glycine max
  unsure (1)..(253): unsure at all n locations
gaaaccccaatcccaatacactcccaactcacaaagccatgtctccaggtcctgttgtcgacgcttcccctgaggttgaagcagagcaacaacttccctccgtcgatgacgcaacccagttgnaagaaattcctcaaccgcaggacggagtgatcgctacccggttgtncgnnaggacgtgcaggcgcatcgatcgacaagggacgannncgacgatcggaggannncgacgacgcacgcatgnnnatgaaga

SEQ ID NO: 99728 - DNA, 236 bp, Glycine max
  unsure (1)..(236): unsure at all n locations
atatctagggtttctctttctctttcgcattctctctgaattcgtaagccatggaatcacccggtaacgagcatgtcgtgggtggccccccccataccgccgtcgctanccccttcccccacagacctgatcccctcaatttccaacccctcatcggctcacgtgccagtcccggaaagatatttataggtggtttaccgcgagatacgaccattgcccaatttatcccgcacttt

SEQ ID NO: 99729 - DNA, 165 bp, Glycine max
acggaacgagcgtgctgccaagatggttctggtagagaagctctgggatgacgtagtcgcagcacctccacatgccacgaggcccacacatgcgatggaagagccaccgcgtcaattaagctactgacttctgagtaatgcatggacggcagagataggaattgt

SEQ ID NO: 99730 - DNA, 163 bp, Glycine max
ccatgggatgccattatgatttgctcactagctgtttgataaaatgctccagctgaatctttttgtataagatgtggttttcgtccgtttgatagtgtgcactgttagaattatcgtgtgcttaatgtaatcaacttaaggcatcagttccctgagctagtgg

SEQ ID NO: 99731 - DNA, 160 bp, Glycine max
cagattctcaggattcgtgtgtcgtgcgggtagtttgtcagagtatttgacaggactttgcattttgcgagttaaatttgtgtttttcttttttggtagctcttgagcagaatagtatctttgtctaggatgaagaatgaaccccgtgtttttctttatt

SEQ ID NO: 99732 - DNA, 148 bp, Glycine max
actcttatcacatttgcagcatcaaaatgagtggtagcaacgatggtagcggcagtcggagctctaggtttttgaaggtggctagtgcagctgccgctacagccgccgttgccggcggtttatatgccattctttcatcctcaacctc

SEQ ID NO: 99733 - DNA, 147 bp, Glycine max
ctagctctctgctatggctcggccacttgtaatgatccaccctctatcaaacaattattcacatattggcttcactcttgtgagccttatggtgtgtgccattgcattgctcacgtgtgcttctcattcgcaaaaatggcatcagtg

SEQ ID NO: 99734 - DNA, 160 bp, Glycine max
cgtatcacttcagtgcttgctgtcgttgcttcatgacacacaacggtgcgatttgttggactcgatcagatccagggctaggagcgtactcacgagataacggcgccatttttcagcgtaattcgtagaaattccaacttcgtctcttctctcctaaatc

SEQ ID NO: 99735 - DNA, 162 bp, Glycine max
acgtgcgctccgaatatcgggtctggcacttgcttcgtgagaaccagtcaaagacagtacgggagaaaagataccagctcataccttactagttcctactgctgctactacattaggtcagccagtttgcgagtgttggaaccgggtttcagcgtctccgtt

SEQ ID NO: 99736 - DNA, 157 bp, Glycine max
tctcgagccgctcgagccgctcgagccgttgttttttagtttttgactagctgttgaaggtatctttggaaccgagtgctatttggaatatgagttttgtgatatcagttgtggatggtatatatggtattggggctttgcgagtttcgtattacct

SEQ ID NO: 99737 - DNA, 169 bp, Glycine max
cggaacaggatcgaggctagctacatatcggataagacgttgaacttagacgtgttgtcgcagcacattgttgattgataaatttactagatggcatattgtcccaaaaaccgtttcaacatttcatcatgatggagattttacatttgagaatatgatttatttgagt

SEQ ID NO: 99738 - DNA, 156 bp, Glycine max
gtgcttttgccttgtggagttgtgggctaataaatttcaagtcaatcaacatcgttggctacaactgtactcagaacagaacagaaaccatctcttatcccagagttgttgtcttaatttttcttattacttgttattttttgttagcaggaagat

SEQ ID NO: 99739 - DNA, 143 bp, Glycine max
taaggttcgaattaggatcgagactagtgctagatcacgagcgcgagactagtcatgaccactgcaagaactgagatggaagtttcactcatgagatcgtcaaagcgtacgctactcaactgaagaggtctggcaagatggac

SEQ ID NO: 99740 - DNA, 149 bp, Glycine max
cgagtaggactcgacttgccgcagttgtctacaactccgcttgctcacattgaagaagtgcccattcttctttcggtttagctgtttgttatggaggacggggataacattctggatgccatatacgatgaggacaacttagatgatga

SEQ ID NO: 99741 - DNA, 119 bp, Glycine max
cggctcgagcctactgacctgcgatttacaactagtggtgtctgactcacaggtcagtagtgtcaagatttttagcacgatggccgcgacatgatgcgtggtgaatcatcaggtgctat

SEQ ID NO: 99742 - DNA, 166 bp, Glycine max
  unsure (1)..(166): unsure at all n locations
gtagtaagtaggaattgagtgagttgaggtgaaattgttttattgaggaagtttggaattccaccaatagtttcatcgtcatctaattatcaataactgcagagtatataatatatgaaatataaaaaagnagtcatgatgatgataagaattagtagatgttatg

SEQ ID NO: 99743 - DNA, 157 bp, Glycine max
ggagaggaatcttaattagtaatatatttactgctgaatacaaatgaccaaacaaaggtggttcctggcactgatggtaatggctctatcgccaaggccactctcacattcactaccaaagacgatgcaccactctcagatgcagtgcgtgatgaaa

SEQ ID NO: 99744 - DNA, 153 bp, Glycine max
ttcattgattcctgtgcagtatgtatgaatgatagcagcatacttcaaaatgtgtaacaagctgctgcttactgatattctttccgggatactgccttgtacaaaattttgttctctctagttttacactatagtatgataggcactttatgt

SEQ ID NO: 99745 - DNA, 99 bp, Glycine max
atttcaattgttccgagatcaaccttggatcaggtttagggaatggctgcgatcttagctcgaaaatcactccttgctcttcgtgcgcgccaattggct

SEQ ID NO: 99746 - DNA, 125 bp, Glycine max
ccgcgcgagttggttcggctatcgttaaacgtgcttgatcgtgcggttccgcgaagttctaagtcccgggtctgctgtatcaattcgaggctgcacatatataagtacagatcccaggtcaacag

SEQ ID NO: 99747 - DNA, 126 bp, Glycine max
atccctcttttttctctctcttgccatacctatttgtcaatacttccgtctcatttcagtatgcgtgagaggcttcacatccagggtggtcaatggggcgtccatatcggcgccatgttcccggag

SEQ ID NO: 99748 - DNA, 159 bp, Glycine max
cctcgagccgaatcggctcgagtgccccttagcgaaaccactggcttctcttaaagccaaatagctctatattatttgtccaatctctatacaattgtgaagtcatagactaaaaaaacgtggccttccaatcttctgcagccaataaattagctaatt

SEQ ID NO: 99749 - DNA, 159 bp, Glycine max
ttagcttgtaacttggtgcattgactcaccatctttgctttgaatcgccatggaagataaactagcaacaacaagtgaaggacaacccataagatgtaaaggtgtgccatgccatgattcatgaaaaacaacaaattttatatgctcttttttattatt

SEQ ID NO: 99750 - DNA, 176 bp, Glycine max
gtaggaattggggtcgaggttgggaatgcagatgaatcaggggtttgtgaatggtgtttgatggtgagagaaagagtggggaaatcgctgaagtgtaattgatgttgtagagtagggtgatagtaagtatctcataaggtgtaagttaaaggttagtagtcgtgaagttgtaaacg

SEQ ID NO: 99751 - DNA, 156 bp, Glycine max
ctcgagccggtagaaactcgaaaggaatcagtgtttgtgtgtttcgcatattcttctccgttttagatttgagagagaagaagaaagagaaaattggataagatagttttcgttttcggcgaagaattgaaatctgagtgaacgatgggagtccca

SEQ ID NO: 99752 - DNA, 163 bp, Glycine max
cgcatacacatctccccaggctttcacgctcgtctctcagttttattcgaatcccactctcaatcacctttccaaatggccagcgcagtggttgcacaggagaccccaacaacagttccagaagatgagacaactcaggcaatcaagacccaggaaacaaccc

SEQ ID NO: 99753 - DNA, 283 bp, Glycine max
tctctctctcctctctctctgattctagtcctttaattaatacggtctttctgtatcttgatatgtacatgcatgagataaattgaaaaacagaaaactcgtttaacctataattctttcacacataaattcctttcccaattctctgtaaccaataaaatttctgggtgtcttttattattttgattcataacttgatctatctgtaatctagtctttattgggcgaacgagtgaattttggttgataagctcttcaaactttggtttgaattcgttcagag

SEQ ID NO: 99754 - DNA, 255 bp, Glycine max
ctgaacctcaacttcctaattccccagttcttacaacttgtctatctatagagttctctcttgtttcccttgtactgtgacgttacatgccactggttatgtcctaactagtagataggactttaaacccagaaacgaaggctttaaaatagtgacaatactacattccagtttcccctattttatttctttggggattgtttacctgtttgctcattattaccggaaaaagaaacaaataaactttacatcatt

SEQ ID NO: 99755 - DNA, 287 bp, Glycine max
cgttttgcgacggaggagggtgtgggtttcaactttcaattcagaacgaacgattccttcatttcccgagtgattcaccgatctgataatcgattgaatttagggtttgggagatggcgtcgagtgtgttgaagagcctcctcctgagattttcctcatcgaggaacacgacgaccaccagaagtttcagcctcgttacccctcaaatcagcaaccacaccgccaagtggatgcagactaaatgaatgaacagggttgaatagtggggatcaatttcaacgatgtga

SEQ ID NO: 99756 - DNA, 114 bp, Glycine max
  unsure (1)..(114): unsure at all n locations
agatgaggcatgatggaatcgttgtttggatgaaaatgtangaattttacccacagagaaagtgatagattagaatgagttcgtccttcggttgatcaggataacagggtgtta

SEQ ID NO: 99757 - DNA, 275 bp, Glycine max
cgtgcccccttgattcctggcatggaggctgtcaagagggctgccattcaggccggtgcttttggctgtaccatcagccgcgccggccctaccgccgtcgccgtcattgacgacgagcaaactggacacctcatgccaaacacatgattgacgcttttctccatgttggcaatttgaaggcttctgcaaatgtcaagcagcttgatcgccttggtgctagacgcattccaaattgaaccttctcttctctatctctatgagaggcttgtagattt

SEQ ID NO: 99758 - DNA, 258 bp, Glycine max
gtcgcttcgcgatgcccatgcttgaggttatcatttttggggcttgggtatagatgactgctctgagattttaggttttgcccttaattgtattttggggatgggtagacctaagatcaaaccttttgtaattattcgaaccattttcattattattttgggttgtatttgttgctctctagtttgtttgagacgtatgtatttggttaactcttctggcatatgatacctacttattatatttgatgaccatggaga

SEQ ID NO: 99759 - DNA, 130 bp, Glycine max
gttctaaagcactcatccacacattctccgtcgccacgacaacaatggctccaaagaaaggtgcgaaaggtggagttgtagcagcaaagaagaaggttcaggagaaggtaacgaaccctttgttcgagaa

SEQ ID NO: 99760 - DNA, 278 bp, Glycine max
tcaacgcggtagagagaatctagggagaagatctcagcatgaaggcacacacataaataacactacatccatgccactgtgccaccacagttttttctctcatgcacctactaatagcaaaacaaaaagctaagagggataattacattccacctctccttcccattctcactctctctctctctttctatttctctctccgtgcgtgaccttgaattactgatattttatattttaaccagctatatatattacaagaacacatagatagtgtgtgt

SEQ ID NO: 99761 - DNA, 286 bp, Glycine max
aatacggctcgagcgagttctatatattattgaattgacaatgaggcctgctcttgctttgcttccacttctagttgccttctcgttagcttccactacggtatcaagaatagatcttagggaatattggaatatgatcatgaaagatcaggaaatgtcagacggatttcaaggtcttgtatcatttcaatctgataataaccctaagtctcaagagtagcttggtaaaggttctaaaaaccattgtgaagagtctctagttacaaatacacaagtcaacagtgac

SEQ ID NO: 99762 - DNA, 265 bp, Glycine max
ctaaatgttatgttttattgattatttggcccttatggccctatcagttgataaggttgaaattgagggtttattattgaatattgattgcctggccctatgtggtcgacatggaacggttattttgtccatgtcattgcattaaaagcattatgcatgagtttagattataaattattttttttgtaccaatagatgttaataatttgtgttgaaaccgtgtttttgaatttgtgttgcagagtatggtaactgcgaatttccc

SEQ ID NO: 99763 - DNA, 263 bp, Glycine max
cgaaaaacgaagaacatgggtttgggtagtgaggttgaagacgatcttcatcgccttcgttatctttcttctcttctccatcagattgacgagcttatcgtgcaagccattgaagtgaattacaacaacaacaaaaccataagcaaagagggcaaaacgcaaattgagtctttttctcgtgtcctttctgacatgctctcttctttggagccatgggttcccaaaattcaaaaagcccttaaccctcaaaacacagtttctga

SEQ ID NO: 99764 - DNA, 272 bp, Glycine max
cgctcgacgctcctctgtcggtcatggccagtcgcagcccatagtggggactctcttgacagccagtcggcacccgaacttcgtggattatcttcccgtcttgacggtgtctcatcgacaaggcattcggaggcagagcacgaagtagattgacaagttgttcgatgtgttggcccctatgactgctgaacgcatgacgcggagcgaagacacgggttatgtcactaggcatgacatgttagatatcttgctggatatttctgaccagagta

SEQ ID NO: 99765 - DNA, 278 bp, Glycine max
tgtcagttcccacgagcttcaaaccgttgtcatttgctgaggtgtaatacagattgcttggcatggagagtacctcgattccgttgatgaaagcgtaggagtttggttgtgacggagtgaaggtgaggttcaacctctcactgtcgccgtccacattgacgacatattctctgaagatggttttagtgttttccgcttttagagagggcttgaaaacgtggagaagggtgaattggttggattgatcggtgaaggatgcattggagctaggaaaggaa

SEQ ID NO: 99766 - DNA, 270 bp, Glycine max
gcaatccctcagtttcatctgttgatcctttagttggaggagaaacagtgttttatggtcaaagaaacaaaactgtggctgaggtggctcctactgaagggacagccctactgcaccttcatggcgataaatgtttgttgcatgaagccagaaatgttaccaagggtgtcaagtacgtgtttcgttcagatgtagtatttgcatgaagtctgaagaatggttaatcttataccaaatatcctggtatatacatctcctgagtcctgaagg

SEQ ID NO: 99767 - DNA, 142 bp, Glycine max
ctttcttctactatagctttttgtagtgaccaatatctcatctcacttctcatccttcacaccttcttcttcacatatccttcactaactaactctagtaaactgaaaacttctggtctctatttctattcccacacaacat

SEQ ID NO: 99768 - DNA, 256 bp, Glycine max
gtcctaactcttttgtttctcatttcgttgagtcgaaacagcagctcctccgccgttggtccatcgccgcctcctcctcgtgccaccgcccttgggtgacgacggaaaagacgcagaattggtcctccgtggaatagtctccgtttccccgttttggaataatttccatcacttctcgttgcttttgttttgttcgaggttgggaggagaaaaaagcaagttgtaggaatggtggtttccaataagatgcagaaat

SEQ ID NO: 99769 - DNA, 220 bp, Glycine max
gctgtgttaattttccataaaatttgtctgagtgaatgttgaaatgaacgtgcagtctccttgttttcactgccctccagactattcactcttttttcattttctgagcattcacattgaagcctgacagaaatcgagactgtggtcttttattatatccttataaatcttttcttatgtgtatgatttgtttagtaatttgtccaatctaatacacaga

SEQ ID NO: 99770 - DNA, 260 bp, Glycine max
tacaaattctctgtgttgtgttttgtacttgtgttcattgtgttgttgttgtaggacatttaagtgaagagagcatgatgatgaagtctgctatgtgtgcattggtgcttgtcgcgatggttgtggttgaagtggggcccattgctgaggctgcggtgacttgtaacccaacacagttgactccttgtcttccggcaattaattcaggttctgcacttcgagtgctcgttgccagaagctgaatgagcaaaagccatgct

SEQ ID NO: 99771 - DNA, 255 bp, Glycine max
ctgtgttgagttttccaaccttaaaaagactctctcttctctctcgctctttctctccctgaagcaaaacaacattagcatcaaaaccagagtggttctagtaatccggtgctgctagaggatgggaactagtgaatggcatatcgagcgaagatctagcttcggcactgaatcccccttagcaatataggcacgcaatgtgcctgaaactcgtcactctctattgtcgtgcttggcgcttctggggatcttgct

SEQ ID NO: 99772 - DNA, 255 bp, Glycine max
ggcgtttggtgatctccgacgggaatccattcctgtttaagcttcagaaagttggttcatcttcttctgcatgaagcacctccgtgtagtttctcctagtgagagacgtgtgcaagatgatgcttgataaataaatgatttggttgtaactaccgaaggattagataaaactaatcaaagcttatatatgctacgttttcggttgcttacaaaaaaaaaaaaaaaaaaaaaaagaaaaaaaaacaaaaagggggg

SEQ ID NO: 99773 - DNA, 262 bp, Glycine max
aggaaatggaagtgagtggaaggagctgtggcgttttgggcctcccttattgtgtacctgtgagaaaaaatggaaggaggtttgtgacaactttggctaaaaggaatgagtctcaagagaagagtaagggaccctctttcacactgagggtttccaagtcaactatcgctcgtggtgccattggactgtttggattggggttcgtcgatgccgggtacagcggagactggtcgaggatcggagtgataacaccgcagactga

SEQ ID NO: 99774 - DNA, 258 bp, Glycine max
caactatttacaaacactaactaattagtagtgtagttcttgatcaagtgatagctggtagaaaaatgatggagtgctgcaagattgctatagttctcaccatctacattatggctatgttggtttttgctcactgttgtgtggctgagaatgtagctgaagatgttgctgcaattccacccacaccaatggaaagtgcaggggtgcatctttgtgcctcagctgtttttgtagtcactgctttggtggttgcaatgt

SEQ ID NO: 99775 - DNA, 262 bp, Glycine max
ttcacaatcatattgcctttgtttcaaatatgtatttctattagtagtttagttaggctctacctcttgcacacaatccaagttattcaaagttggttatcaaataagtgttataattattgcgtgatgactattcgacacaaatggtggtgctccttcaaggcttctgaagtgtttgttgaataattttcattccaataagattcctttgtcaaaatctactgtggattataacttgaatgctttctcgtggatgagcatg

SEQ ID NO: 99776 - DNA, 277 bp, Glycine max
tctcgagccgaatcggctcgagcaggttcctggatctagaattacgcgctatcaatggcatcaccagacaatccttgccatactatctatatattgtatactttgtaaacatagtaatgaatatattatatgaaggcttcctaagctcagtagagccagcatttggctgatatggatgctctgcaaccttctctataatatctgcttcaatgcagcatatatacgttcagcaagagtggcacatttcgactcacttcaatcgtgacttgcgatacca

SEQ ID NO: 99777 - DNA, 228 bp, Glycine max
cattcttcagcgactgcgtttttggatcggaacctcttctgcggcgtacaatgggacactcaacgttggaactctcaccaaaaactcgggccggtctcgactgccggtggtgggaatcaatggatgtcaggagtatggctatgtgctgaggagtgctccgacaagccaggaattgctcacaagatcctaaagacagtgtcactaggacatattggtctgcactagtgt

SEQ ID NO: 99778 - DNA, 164 bp, Glycine max
  unsure (1)..(164): unsure at all n locations
gaaggagagagagagagacatttgtaacgacaagaagcagtacgtatagagggagtggtcanatcacggatcaggactcatgaatgtccattctgagacacacagtagcacagagagaaactccttgtagatgctcaatttgcaagtcaagatctgacatcata

SEQ ID NO: 99779 - DNA, 272 bp, Glycine max
gatttatgcttgattcaaaaggttgaaggctagataacactttcagctccagtgaaatgatttctactatctaggttctgagggatttattattgattgattcaacatgttcgtagaggaagtggccacaacgctgaggcaacgtttaaaatttttacctgctttttttgttcctttggtataaccaattgtgaggaaaaaattgaaaagaactaagtgaaggcttttttcttcttcttttgatttgcacagtcccatgagcttgaactctt

SEQ ID NO: 99780 - DNA, 272 bp, Glycine max
agcatcatcatcattatcatgaagtctctagtgaaagcagatctggtataattaaccacaaagggtagcaatttcttagaagcaagacatagtttgatttcattttccttaattacctttgcagaatccaaaatggtgctttagttagtttgcatcataaagctatgccaggccatttcctttgatatatatgtataatagaaaaagcatatgttttacaatttacatatatcacttaaaagttgcttgcacttaattatgaggatcatcgg

SEQ ID NO: 99781 - DNA, 131 bp, Glycine max
atatattggcagacatccattctgtcatgcactatagtggtttgtcctacaatctgttagcggaagagactggattcaccaacgtcgatgtggcgcagcttctcaggagacacgctcatcacaatccctaa

SEQ ID NO: 99782 - DNA, 215 bp, Glycine max
aatgtcaacaaatccactcgttatggagaagaagctaaagctggagaaaccgttcaggtacctattgaagaggaacaatccaatgctgctgatggagaactacctgcattaaaagataaagctgatgacaaagtaactgagggctctgaagttttcctgagaaaggatgaagaaaagtattgagccacccaggggacgacacaaaacaatggggt

SEQ ID NO: 99783 - DNA, 123 bp, Glycine max
cacaagctctacaataattagtaaaagtatgagagctgagaataaagaaaactttatatctattgtattgatgtcttgatcgatcagcccttttttactgagttaaaataaagaaaagtgtgt

SEQ ID NO: 99784 - DNA, 145 bp, Glycine max
cgagagtagtcactagtgtagagatgtattgggggaatgtctattgttcatgccattgcttgcattttctacaattctatttatgaagtagcaaatatttctattgagcttcccagttataactttgacatcaatgtccatttgg

SEQ ID NO: 99785 - DNA, 259 bp, Glycine max
cggcatagtcactcactcacatattgaaaccgaaaccaaaaacctcgccgtcgacgacaacacgatgccgagcttcaggatgagaaacttgttatccagtgttaaaaagaaaaccatcgaaaacagaaacaaaacttcacaaactgcatttccattacaaaagaattagcacgtttagtggaagaagaagaagaagaagaagaagttaacgaggaaggcttcaacatcaaaagctctgccccgtcacacactcacggtg

SEQ ID NO: 99786 - DNA, 265 bp, Glycine max
tgtaggttgtggaacagcttagtggcgaaacccctgtgttttccaaaggttagttctcatccagtttgtaaatgggtagttcagtaatggacatagatctcaaatctgtgttcattggaagtttatgttttaaaattaattgatcatttgtgtctcattctatcattttttttaagaggtatagattgctggtgaagtggttttgtagaattctccccccagatttagggtagtctattttagggttatgaattgaagcttcatt

SEQ ID NO: 99787 - DNA, 265 bp, Glycine max
ctggtattctctgtcggcattctcttagagttctttcaacaggcacttgctttcagattccagatagatatcttcctattcgatggcgtcggatcaacatgccgtcttctaagcttcttcaaagtgcaccaaatgacatgctgaaagagttaagttgttacaaaatatggtttcatctctgatgacagaatctgctaaatctaaggcacggttagatattgcaacagaacaagtaaccctccttctgtctcgcataagagaacaa

SEQ ID NO: 99788 - DNA, 110 bp, Glycine max
cgagaatttccaagttgcaaatgtagataattgacattttagattcttgtttccacaaactcactttcagatgtcattcatttttgttcaattaatttgaatctggcagc

SEQ ID NO: 99789 - DNA, 263 bp, Glycine max
ttttgcaagtcaatacttgctaccagagctggctggtatagcaaaaatgttctccagtgaaatgactttggcctctgcctggattcacctgttggttgttgatctttttgctgcaaggcatattttccaagatggctgaagaatcagattgaaactcggcattctgtttctttttgcttgtttttttgccccattgggattcttactcatgtcgtcaccaaatccatgaccaaacctgccagaaaggagggtcatggtttata

SEQ ID NO: 99790 - DNA, 257 bp, Glycine max
gattaaccaggtgttgccaattggagggcctgggaaggcattgactccattggaacaaggggagatgctgtttaggcttttggggaaggagcctaagttcttgaaagttccaatcgggatcatggatttcgccttggggttcttgactttttggttaaggtctttccttcactggaagatgctgctgagtttgggaagattggaaggtactatgcggcggacagtatgttgcttctggatcccgagaccggagaata

SEQ ID NO: 99791 - DNA, 258 bp, Glycine max
agaggttggtgtgaagtggaagaggaccttctgtgcatcataccaaagaaattgagtgacattatgcattgaaagtatcaagtaacaaagcaagcaggttgaggaggttaccagtatatcctaaagtatagacttcaattagttgttccttcagtctctctagagctgcgagatggggttgctaagagatgtaaagcatccacttctcattcagcatcaatttactggatgggcgataacgcattgcaaagttctcta

SEQ ID NO: 99792 - DNA, 262 bp, Glycine max
ctactcctcgcaacgtggaacagacctcttccacaacacacttgaaatgacgacatgggtctcttcctcgaagaggctgagaaggtgaaggctgccatggggtccctccgtgacatcctcggccgcctccagcagccaacgaggagagcaagtccttgcacaagcccgaggccctcaaggtgctccgggcacggatcaatgcggacattgtcgctgtgctcaagacggcccgggcgatccgggcccagctagaggagatgga

SEQ ID NO: 99793 - DNA, 273 bp, Glycine max
ccctttctctctctctttctccccattctagttttcaaattttcattcatggatgcccaactaataatccctcttctccaagaggctagaggcatctctctttcccttccttctcctccctccaatcaaaatctcaacttttttagacccatttgatctctttcttccatctatttgatctttgcatgtgtcagcactctccacacgagtttcagaacgatggtgaatggagcacagaaaacatagttggatttctttcagcatctccatcat

SEQ ID NO: 99794 - DNA, 270 bp, Glycine max
cagaatagtaagtgcacacactcaacaaacctcctgaactacacactcatgtgcaatccaaaagttagtataagtaaataaatactaataatataatacatcatattaatgtatatatttcccaatattaccatcccattaactgagcacgtattcctaacaataattttagagattccattgtatgaaagcatgataaaagatgtataattccattgtagggaatagcaaaacgattggtgagagctgcactagaagaggttgcaaaga

SEQ ID NO: 99795 - DNA, 196 bp, Glycine max
  unsure (1)..(196): unsure at all n locations
ctctcattgtgccattacaccattacttctactctttctttgttgttgacataccccttttgataatcaaacacatatcctanacaaggtatatatatataccaaaatgtgtagctctaagaccaaagtgactgttggtttagaagccgttcccgctgntgcgaaccctcagtggctagaatcaatggaaggccat

SEQ ID NO: 99796 - DNA, 269 bp, Glycine max
tctcatgccattcctttgaataaacaattgtacacgctgagctatgcttgtgtaacatctggagcagcagaattacttttttcagccttctatattatggttgatatttggggtttaacattcttgttcttgcctttgaaatggattggcatgaatgccatgcttgtttatgtcatggcagctgagggaatcttcgcaggattcattaatgaagacatgtctctggatccaatagattcacttgtgtgtcctgtcccttcaagtttcat

SEQ ID NO: 99797 - DNA, 273 bp, Glycine max
cgggtgaccatgtcaaattggtgacggctggaaagcatcacgtctgatcgcacacttttctcctcgtaaaaggttttcctttttccatgaatgcattgtttcattaaagtggtgctacaggtggttttccttgtaaagggtccaatttacttggtctgcatcagctgcacggaagagccttatgagtcactaagggggcagttggagcttattcatggtcagatgattgtgatactcaacaaagtcagtaaacagatgttttgagaagaatcc

SEQ ID NO: 99798 - DNA, 206 bp, Glycine max
ctcttacacatcgaagcactggtactactactactttctctctagatatggggtccccctgtgtagaagtggttttggaactaggggcacttggttagctcaggcttacctcaaataccaggtgttgcaccgtcagaaccacgaattatgagtccattactaccaccacccaggtcagcatctggaccagcacccaccacaccagg

SEQ ID NO: 99799 - DNA, 265 bp, Glycine max
aattcagcaattctcactagattgaagaattagcaaagatatacctagcagagaagctaaagggtacctaacttaagattctgttcactaggcttcagattctgttcagcaacaagctcattgcatcacacaacatcatggccagtggaccaaagatagtgcacatcgaaacacggtacgtggaaaccgacgctatacacttcagagatgtggttcagcacctcacagggaagaactcctcaacaacaaactgggtaggaaatgg

SEQ ID NO: 99800 - DNA, 278 bp, Glycine max
gcaatgcaaaggaagatcctcgcttctaccgctgctgctgaagcattagaggaggccaatgctactgaatgtattataagaaatttaagcatgttttcagacctctgctcagtttgccaggccaggaatcctttgccaaccatagacagattcttcactatctatgatgatgttctgaaatcaactgcaatggttgaatctgttgccagcagacataattctgagacacctgatgaaggcattccaacaaaacactcaaaatcactttctttttgggt

SEQ ID NO: 99801 - DNA, 99 bp, Glycine max
cttggcatcgcttctcctctctcccaagaaagaatcatcaatggacatgaacacgaagacgatctcaaagacggaaacctcgacttcgcgagagatcgc

SEQ ID NO: 99802 - DNA, 265 bp, Glycine max
gggaagggacggagggagtaatgttgagctggcgttttatgattgggtgttagttttgcagcgcatcgagttgcgtgcacaagcacaacgctgtatgggtatcctacccttgcaactagttctatccaccaatagaatttcgtctagaaaaatttacacaatattttaagacgcacataaacttcctctgtcactacccactcctctctctgtctccgcctttcgcattgcaagcggtctctttctttgcttttccttccccctt

SEQ ID NO: 99803 - DNA, 265 bp, Glycine max
caacaacattcatgagggtactcattaaaacattacaaatatagacatagagagagagatcgtgtgaaggggtggcgatggagaaggcattgtggaggtcgaagtacgtggtttccggaggggggttgaagtggatggtgtttgtggtggtgtgtgtggcgtgcgtggtgggaatatggccgtgttatccagagctgaagatcgagagaatggaagtgaagcgggtgaaggtgcggccggtgccgccggtgggggcggacgtgtc

SEQ ID NO: 99804 - DNA, 175 bp, Glycine max
cggctcgagggaaatctgaaatccctgactagtcttcaactcagtggcaatctgctcacagggactattccactgtccatatcaagattacagaacctttggtaccttaatgtatcaaggaattgtctttcagatcccttaccagtgatcccttccaagggtatccctgcccttt

SEQ ID NO: 99805 - DNA, 127 bp, Glycine max
gccatttaaagcagagacaataatatgtgtgtgggaatagagaatagagaagtttcttttaaggatgaattacactccatgtaacttctctggagttttaattcatcagttatttccacacaacata

SEQ ID NO: 99806 - DNA, 215 bp, Glycine max
agcgcctcttgatagggtctcccattttcaattgcttctcagtttccttttctctgaaaaaagatgttgagggttgcagctaggaggctctcttctcctcgtctctctccgtgcgccaatacgcgctccgtttctcctgaacgacgcgcgtcgatgacaagacgttctctccatccttctcttcgagttgtatgacctgacaccatgaaagatat

SEQ ID NO: 99807 - DNA, 221 bp, Glycine max
  unsure (1)..(221): unsure at all n locations
cgccgacttagacctgacctgggcttggagtaaacagagaagaaaatattccatacaacatgcgatattaagaagagaagagaagagagggggaatgaacngattcgagtccgatggcctctacagagggcctggtgcccataactagggcctttctggctgcttattacgactaacacccttttactcctctttctgctcatgtctccacacaatctact

SEQ ID NO: 99808 - DNA, 161 bp, Glycine max
ctcttcttcgtctcaaacctcttcgttccttcgattcattccatctcttccaaaatggccaaagatcatgtcgcggctcgtcactggagcgcaggcaaattggatatgctcgtgcctatgatgcaggggatgatgctggctgacagccggacctcaatgct

SEQ ID NO: 99809 - DNA, 264 bp, Glycine max
tcgcaataattctgagtcagggcttcaagcaccgtgtggcttcgtcttcccggcatcgcggtgttcttcgcagtgctgtcaaatcgcgtttttcacaatgttgtagctccaatcgtgtttaccacacttcgcaattgcaggttgttaattacagaagataggaattgtgcattcttttttgctgaattttgggccaaggttgctagtcttagcaggactatctaaagcttaagcttttgaccaaagccttttcctggttaactg

SEQ ID NO: 99810 - DNA, 276 bp, Glycine max
cgaaataacaggaagactaaaagagttctagacttctgtttagtggaagtcatctagctcatgaatgccaaggtgaaaaaagagaagattagggtactcattctctattctctaatttgaacttgccatgaagggtattgctctctgtctttaggaattctttagatgcaagacagatattcaaggtggaaggtcacatttcttcaagcatctatggaattctttattcctcttccttcttaatccttgtctttagtttttctatctctagctaaa

SEQ ID NO: 99811 - DNA, 271 bp, Glycine max
cctggatggggcaagcatagcaaagtagtcggcaatggcactttaagaaaggctgtcgaggcactcctaaatggcattggtgcaccctttcagatttctgagtgtaatttggggaggcttatatcagaaggacctgaagtagctgcttggttgagacaacctagcacattgaatgtgctgcttctccatgattgcattgtttattctcaaccagttgagagacaccaaacattcaatataccatctcttggtgcattgtagagaaattgag

SEQ ID NO: 99812 - DNA, 273 bp, Glycine max
ctattttctcctttcctttcacattatcccttcccttttttaaataagccatcttgcttttgtttcttctcttctcatcaccaacacggtgtgtgtccttcatcctggattagagccacaataataacacattccgctttgactttggaggctaagggcctaaggcaggtttttttgctttgtcaggttcccaatcactgtgatatcatggaatccccacaatccgttgtgtcaccattcaagagctctgtcttgggtgaagctgagaagtat

SEQ ID NO: 99813 - DNA, 263 bp, Glycine max
tctagatgagtgtctctctatgtctgcaatctccctcacatacattttgttttatagctcatacttcagataagtgtgcgtgtgtgtttattatctgtttcttgaaattacgttgcataattgtttgcacatgcttgttcagacacccccacattttttttcaatatcttatatttatacagttttaaaagcagtgttatcattgatggatggtgacgtatggcagaggataacatttgggcacataaacacaccattggggc

SEQ ID NO: 99814 - DNA, 159 bp, Glycine max
  unsure (1)..(159): unsure at all n locations
tcgagaagccaggagagaanatagaaagttttatggtataaatctatagaatacaatcaaaccaaattgaaagaagatcgatcgatcgatcgatggctcttgtcggagtttaagtgaagcatgcggcggatggcgcaccggagtagaattgctccgcca

SEQ ID NO: 99815 - DNA, 187 bp, Glycine max
cctcgaaccgtatcggctcgagggtggagataacggcacctgcaattactgaggatctcgaaaactttatgccaaatcagactatttaggcagctgaaggggaagcagctaaatcacagtatcaacagggcccttctggccactgggtcgatgtgatatgaagctcaagcgccagtcatgcgaatat

SEQ ID NO: 99816 - DNA, 124 bp, Glycine max
ccagagcggcggagctaaagaagagagtgggcatagtagacgagaaaggagaagaagagaatcataagacagcaagacagacaatgggagtggagaagcagttgttgaggcctgacaggggtcc

SEQ ID NO: 99817 - DNA, 123 bp, Glycine max
  unsure (1)..(123): unsure at all n locations
cgctcgagncgattcggctgagcaaaccctaactattctactatgcaagntaactattgcacctcagatctctcacttgaaccacagtggtgccttatcgctgtggttttcatcgtcttcctt

SEQ ID NO: 99818 - DNA, 124 bp, Glycine max
tgccgagaaaaccctaattcgctcgtaatcacccaagaggcgaatccttaccattgctcgagatgggtgaagaagtgaaggccgtggttccagattctgttttgaagaagcagaagatagagga

SEQ ID NO: 99819 - DNA, 148 bp, Glycine max
tgggattggaactcacgtctcctttgtagagcttttaggtttagtggagagcttgaaaggcataacctcagactatgtggcttctccatgtgtgttgaaactgtatcaaggaggacagctagaaatgttcaataatagtgattaccaa

SEQ ID NO: 99820 - DNA, 180 bp, Glycine max
ctttcttgttgtatcaaaaaaaaagaatattataagacaacaatgcgctcatgatgaaactcaatacaaagcaccattcacactacactgactttcccttgctcaccaaacatacacctacaagcacagaattcaaccagtattaatattactttggaatatgaaacatatatgaactgg

SEQ ID NO: 99821 - DNA, 256 bp, Glycine max
cattgatttttcagtgtgctaatttctaactttgattggtcacttgtaattatagcttgtaaataccaaatcgtgtctttgtcatatgctgactctgatctttcctctgttcttttaggtgggcgattgtatatctggcacaaatgaaaccactcattgtacctatactgaacgagggcgaataattctttaaacagatgtagctccttgtaagttagagaatatggttcgcagattggctgctggattgaatttg

SEQ ID NO: 99822 - DNA, 233 bp, Glycine max
gattaatcaatggcagattaaagggttggtcccccgtagacgtcgtcttgtattgtatcatagaatcccgatgttttggtgcatagatgaatatcatagcactgaaaactcctcttttcaatacgttgtgtctttatttgcttgttgaatgttgagaaaccaagctatgcatccaaaacaacacaatatgttgagtagtaatcagcatcgagaaacaaagcttgaatattgaa

SEQ ID NO: 99823 - DNA, 112 bp, Glycine max
gtttcgtctggatacttacaacgtaacaacataatgttgcgaattgcctgcaattgctcttatggttgcgtccgttgcatctcattagctgtttggggtctagtcttagttc

SEQ ID NO: 99824 - DNA, 278 bp, Glycine max
  unsure (1)..(278): unsure at all n locations
cggctcgatgtttctctcaactcagaaatcgtgtcttcactcttcacttagctacgaaccccntgaatgnctgnaagcaaatccggttcaagaaagcgagcatccgaatccgaacgcgcaaaatctgacaagaacaagcgatcagccacggataacttcgatctcgatttggatttcgatctctcagatgacatcaaaggaatcgtctcggcgctgcaccttatcagagacaaggctcagaaggacggtcagaagaagaacgaagagactatttccag

SEQ ID NO: 99825 - DNA, 215 bp, Glycine max
gcaaactgataataaagaccttcatctgagctcgaaatacttttatcttaaaattctaagctatgtgtaaaattccatcactcacagacatgtcctctagctctatatctatctcagaggacatagatctgtgctcggtaccaaccgcagcttgaggcctttcacgctagttacgttggcggaagagtcttgcagcgcttagcattgacaccggt

SEQ ID NO: 99826 - DNA, 119 bp, Glycine max
cttctcgcagagtgagcgagtaagcgaatatcgcaatcgcacaccgctggtatgcccaggcagcgctgattgcctattctgcgcacatccaagaaacatgttctgtcactaaccctgtc

SEQ ID NO: 99827 - DNA, 114 bp, Glycine max
cggcgctgtaccatagcactcatggacacattctccgtcgtcacgttgacaatggcgctcaagaaacgtgagacacgtggagttgtatcagcgtagaggacggctcaggagatg

SEQ ID NO: 99828 - DNA, 267 bp, Glycine max
gcataagcatcttctcagagcttcttagttctcacccttcattcttttcttcagcaaatcagagacaaacacagaaatttaaggaatggcaggtgcaagagccagtggcatgatgaatggtggaagaagcttcccaaggaggttctctgggcgtccaattccaaagcgtggacaagtcaaagttggaatagttgtcgggcttgcaaactctgttgtttccattttctctcgcagcagagccacccgaggatgtgctacacctactca

SEQ ID NO: 99829 - DNA, 220 bp, Glycine max
ctacttctaaatgggaatgcagcaatgacagttaaataagaaaggggaaatgattttcacttgcaatatcttttcttgtgcatagccatagagctcttatctactggattgccttgtctcttgcagtggtctttgaaccggaaatagttgggctgccatcatgcatcaacgcgaggtagaagaccttggttacgccggatgatgtgggttatatgaagcg

SEQ ID NO: 99830 - DNA, 125 bp, Glycine max
attccttagaacatttgcaccagctcatgttgagaatggacgatggactcaaggtgggcagtgagtcagaagtcagccgatgaagggacatgagacaagattagcgggcactaatttggagctat

SEQ ID NO: 99831 - DNA, 267 bp, Glycine max
  unsure (1)..(267): unsure at all n locations
cagggatgaatattgtttttcatgtttcctctcaaacttttgggaaagatacaaagacaaatatctatgtaaggtttactatatttgtttttttacaatgtgtttctctcccaaatgcaaaagggaaacgagaggatcgattcttaactccctctgcgggaacgactcttgtgtgatgaatccctggtgtcgctaggtccattcaacatagatatcaagnntccctatagaaaaaaattgtatatcattgattaatgcaactatttt

SEQ ID NO: 99832 - DNA, 175 bp, Glycine max
caccaattcatatctgggcttatacatttgtattggtgattgctcacactaggaaatctgtagtctcttcttgcagcgattctctcgaggaatggttgcatctggctttggatacgatggatatggtggttgtcaaagtcgatttatcatggatgctctaaaatgctagtttatg

SEQ ID NO: 99833 - DNA, 129 bp, Glycine max
tctgatcgagcgattattcatgtgattaagacctatctaggcatcatgcttttataggtattcaaatcatgctgcaatggggatgatgtaagctaccacataatcaagatatagaaatcacttatataa

SEQ ID NO: 99834 - DNA, 245 bp, Glycine max
cggctcgagagagtggtttgatgaagccgttaataaaaccgcgggcggggaaaacaaacgttaacgagaggcgtgttgtaatttgagggaaggtggaagggcaaatgaggaaacaagaaaagtggtgcataagacaaatcaaagaagtagtagtagtagtagaagaagaaaaaaaaaaaaaccgcctcaaagaagggaaagtttaaagaattgcggaatacccgatgttttttttgaaaaaataa

SEQ ID NO: 99835 - DNA, 195 bp, Glycine max
cagaggcattggatttcattttgcttaagtttaccaagttatgtaccgaatcatatgattctttctttgagtttgtccttgtctgtgtcttcggacggcacactacatttatagagtatttttaaaagatttatattcaagaccaactagaatgattcttcgctcgacttggaggacacccattggcaggccggc

SEQ ID NO: 99836 - DNA, 260 bp, Glycine max
agaagtttgagttttaaagagcacagaaaggcccactatgatgaattcctgaaagtcaaagagctgcaacaaaaggcttctctggaggatggaagtgacgaggatgataatgctgagcttaccatcgaggagaagaaaaatgactcatcttctccaataagtgctacgtgaaggagaaaaagtgtcttccaatcaatgcctacaaccagatgcttcctacatgatcaaataacacccactctagtttcatcagcctttgt

SEQ ID NO: 99837 - DNA, 267 bp, Glycine max
cctcgagccgaatcggctcgagtgaaaatgttgcatatcctttgatttctagccatttcaaattctttggcaaaacatatctgacgttttgttttttccattattattgtgttgtaggaaattgtagtatactgctctctacaaaggttatccattgatgcaaggactattgtgctgccgcaaactatacacttctaataatttgatgttttacttttttgccaaatattgtgctgcagcaaactatacacatactatgttgttgcc

SEQ ID NO: 99838 - DNA, 233 bp, Glycine max
cggggtgaagcatggcctcgtggccacccaaacctgcagagatattttgttcgtttgagtgtgagagagcaatcgatggcctcatcaccatgtgattgctggccccattcttctacttgcttctacttcttccattgaagatgtctggaacggcatcaaactagcctctctctccaattcctccgttggcttagagttgaacaacaacaaccatctgtctccgtttgtggtgt

SEQ ID NO: 99839 - DNA, 250 bp, Glycine max
caaaaactcagaaaacacagggaaagaaagagttgagtgatggacggttgtctggaactgatggaatgcaaaatagcgagaccctttgactcattaccggtgagaaggtcaattcctttgagtctgatgtgttcggccgagacctattcttcaaagccgacgcgcttctaaagcatcactctcatccccggctacggaatcgcggccgagatcattcaggtagacaaagacgttcttgatcatcgacggt

SEQ ID NO: 99840 - DNA, 259 bp, Glycine max
ttcaaaacaaaatgctaaagagaaagaggtaaatctggtaaagcgtgatagatcatacaaaagaacaagaaacaaatggagcaatcctggttgcaagaactttaagatattcacttttctatatagaaaagacattccaaaagctttcttttacagcaccctcaacttgaagagattagggagctttaatagaaaacaatttttgcacttcatgaagatgaagatagaagaaccatcatctcgagatgtaggaagtgtt

SEQ ID NO: 99841 - DNA, 178 bp, Glycine max
agccttcgaagcatgtagtcaattactgttgtatacctagcttactgccattcattatattctcaacaaggtatgagggtgtagtttggtttctttctgattgtttaatcagtagaaagataaagaataagaaattgtagactttactgggtagttatgtggatgaagaaagttcagt

SEQ ID NO: 99842 - DNA, 180 bp, Glycine max
tgttgtaacaaagaagtgtagtagcggcgccaagaggagcggtctcacgaaagcaccagcgtcaagtgacagcatcggatacccaactgcatggtagcaagatcagacgaaactgaagttggaggaagattcaaggccctctctgagatcactgaggtgtgatctcgttgcaaggatcag

SEQ ID NO: 99843 - DNA, 253 bp, Glycine max
aaaacatcaagatcttgatggtgatgatgatgaggaggaggagaaggattcctacttaattgagcttcatcttctagctaaacatgtttaaagttataatgttttggttactaatcactagttaattgtggattttcttggcactctatttcaggcaatacgcatgctatcttggcgattgttttgggttgatttatgtcaaatagagcaaaatgggccaaacgaatggtttgtactttgtacttcttaggtt

SEQ ID NO: 99844 - DNA, 250 bp, Glycine max
ttcatcattcaatactatattggactataagctttgattcttctaaattcatacgctactcacgctcattcatagcagagagtatggattgctgcatggaatggagtacatgctgaggtgaccaagatatgggtgcctaccccaggatatacatgatactttgtaaccgctcaagactggtcttgcgagagcatgtggccgaaacattagagggtatatggccggcaaccttggtcatgggggaagggaa

SEQ ID NO: 99845 - DNA, 212 bp, Glycine max
actcgagccgctcgagccgctcgagcggctcgaggtcacccaccaaacacgtcgagccacagcaacagaaccatcagactgttgaactcgaccaacaccaacccatccccgaaccaaccctagaagactccaacaccatggccatcgacgaaccaaaacatgaacaagaagaagaaccgcaaaaccccgcgagcgaacaagaggtagagtaa

SEQ ID NO: 99846 - DNA, 227 bp, Glycine max
caaagcagtattattaaagaagtgtagacagaaggtgagcaatggaggttcatgtagtttaatcttctgccaaaacgttgaatgtcttgttcctgttcaaatcatccttttgaaattttgaatccacataattgaaatgcttaattcatttttattttgttgcaactagatgtagtacgacatcaattaatgagtttgatatagtcttgaaacttgcatccggtttt

SEQ ID NO: 99847 - DNA, 277 bp, Glycine max
catatattcacaacttcttccatggaggactgggcgggcctctcatgagtagaatatgatgcatagaagcatcttatagcagctgaagtctcgagtatattacagagtagcttgtttcctggtcttagatcatccattgattttatggtggagggatacctaagatacatcggcgatagctggctcgtgatgagggaccttatggtcccatgggacgcagaatccccgaggggttattgggaatggcattctgtaacacaggcttagatggtcgtta

SEQ ID NO: 99848 - DNA, 265 bp, Glycine max
ccgtctctccaacctttcactttcgtttctcagttttattcgaatccctctctcaatctcctttccaaatggccagcgttgaggttgcacagcaaacaccaacaacagttccagaaaatgagacaaccgaggtaagcaagacccaggaacaaccccagtcactgaggctcctgcaacagaacaaccagcagctgacgttgctgcaacagaagaaccagccgctgaggctcctgccccataatcaacaccgcagcaccaaaggcag

SEQ ID NO: 99849 - DNA, 244 bp, Glycine max
acccgttacgttgaatgtaaagctttggacagccgtaaaagcaatcatgcgaactctttctccgattcagtattttaattttcccttttgagtcgaaggagaccagaaatgaagtgaatggggacatgagaaaaggagggaaggaagtggggcttgtgatgatgaaaaggaagaaaagatgtgaggtagtgatgggatgtgagagctagaaaacagggtgttaaatgtgcttcttgtttgtttg

SEQ ID NO: 99850 - DNA, 268 bp, Glycine max
gtacgatgaaatgaaatggagttcccagacacgcgtttgtctctgagatcgagcttgacgttcggagagacgctgtgctcggtgttcattccgctcataggaatagtcgaagctttggttttcacattcgccagttgcttcgattccaatctcccaagaagaataagatacattcttctaccttcgatgacattctcaccctcgccgaggattctccatgttcgttttgctttttctttttctctttcatttcatttttcgctgtttt

SEQ ID NO: 99851 - DNA, 164 bp, Glycine max
ctcgagccgggaagaggaagagggatacatggatagggagattggacgttagtagtagtgggtcttgtttcctcatgttaatatgtgcctcatttacaatgttgcacaatgctcagcagttcctttccttgtgaaatgtaatggctatctatctgtttttcttc

SEQ ID NO: 99852 - DNA, 264 bp, Glycine max
gtatgaatagacaggcaaatgatttagaccttctaaagtaatgtgacaaagcacaatactagtggaatttagagtctctttttgggagggggtggggaggcaagagagaattgggaattttccctcaatatctcaatgaagttaaaaaatttgtcctatcttcagctttccttttcatgttgatatatttggtcaataatgtcgatgccagtccagtgtgtgtgtgtgtgtgttttttttttttttgggaaaaaaaacaaaagg

SEQ ID NO: 99853 - DNA, 268 bp, Glycine max
caggcagatacttgttacatagttaaagttcaaattcaagacatcttaagacgatacaacaccagagccatgggcgtttgtatcaacgaaggataaagaacgcattcgacaagaaggtacgcccgtgcaagttcaacgacgggacctcgtgctgaagaaaatgtcccatgttgttaaagataatcgaggcaagtgggccccgaattatgaaggacctttcgtggtgaaaagagctttttctgggggtgctctgatactcacccacatg

SEQ ID NO: 99854 - DNA, 257 bp, Glycine max
ctgatttcttctgtagaaggccagtatagtgggtttttactccggttttgtcttccaataaattgattttaagatttttaactgcagttttgcttggttatttgttgggaagttcacggatctgagtttatcttttgatgttctcggtttatactggagatctcagatctctgattatgatgtatttgttgccccgatttagtatctctgttatttcaaaattgtgagaatacattaaattcaagtaaactagagaa

SEQ ID NO: 99855 - DNA, 255 bp, Glycine max
gtggctttgaaaatactatagtattaactgtttgaaaaatcatcaatctgatggcaacacggaagtatatcagtcctttaacagcgagttgatgattatgcatcatcagtaaaaaaaaaaaaaaaaaaaaaaaaaaaaaaaaaaaaaaaaaaaaaaaaaaaaaaaaaaaaaaaaaaaaaaaaagagaaaaaaagaaaaacggaaaaaaaaagaaaaggaaaggagaagaagagagggacagaacgaaaggggaaa

SEQ ID NO: 99856 - DNA, 160 bp, Glycine max
cgtatcttcattttctctcttcctctcaccgagtcaccgactcgcctcccgtcgtacagactcagatcccccccgagtcacagtcagacagcatcatcgcccgatctgacgatgtctcgcgcctctatcgccgaatccggcggatcatgctgatcggggt

SEQ ID NO: 99857 - DNA, 271 bp, Glycine max
cggttcctttagcaaattccaattcccaatccaaaaccctaatttaggtcaaagaaccaattgtgatgggaccaaaggcagagaagaagccagcggagaagaagcccgcggaggagaagaagtcgacggtgggagacaaggtccggcggagaagaagccgacagcggcaaagaagcttcctaaggagggaggagccggcggagaaggggggaagaagaagaagaggaacacgaagagcgtggagacataccagatatacatattccaggtg

SEQ ID NO: 99858 - DNA, 269 bp, Glycine max
cagttgtgttgtgtccctcttttaagctatttccttctcttaacacacattggttgtgccacttgccatagtcaccaaccaattaacaaaggtatcatatatcatcatatcatcaccaaatgaaaaatattgggttgttcttcttgtggtggtggctacttttgtggtggcagccacagctggtagcttttaccaacactttgcactaacgtggggtggtgagcgtgccacaatctatgacaatggcaaccttctcacactatccttga

SEQ ID NO: 99859 - DNA, 267 bp, Glycine max
ccggcgagcaacaaaagggttggtgagtggggggatatgttggattgttaccaagtgcatggatacactcaagaaggttcagcagctatggtgcttgtttgtgctatcggtcatgtagaataagctttgctagatgcagggttgtgtttttgtatctttgcattatcatgttgtcctggagatacttgcacattcggtttactctttcaacacttaactttgtggacatgctctgagtgcttttgtgcatctatattcattcatttg

SEQ ID NO: 99860 - DNA, 146 bp, Glycine max
gatgacactgttttccccccctcaaccccatgcgtagaataaatagatgtctccaatttccttcttcttgatcaaaagtcgtagaactagacggttacgttgaaggcgatatgaaggtaaccacaggccaggaactcaaattgttc

SEQ ID NO: 99861 - DNA, 222 bp, Glycine max
ataggagaggagagcttcaacaacaccatcaacacaggaatctgagtccgaaacaagcatttttgcgtgttcctcccccattcgtcaggtactagacttctaggaaaatcagatgtatcacggtaaattttccctacacccaagaatgaagttccaggacttgacaggttcaagttttcccagttacaaacatagcagtcagctggctcccatagatgtttc

SEQ ID NO: 99862 - DNA, 191 bp, Glycine max
gtaatcatcagcatgctcagtttgctgataaaaaaaaaaaaaatcagcatgctcagtttatattatcatcctcttcctctcgtagggggtttttattcggttttttcctttgttagtattatttaggtttacaattttaacccaaagtggtcgtgacattatcttctacatatatttatgatccttttctc

SEQ ID NO: 99863 - DNA, 285 bp, Glycine max
attgcatgttcccgtacagttcactgttatacgttgtgatacctgtggggctgcagggtccacacagagatctctttgtcacaagtgccatgaaggcgcagagcacacttactgtatgcatcctgatgagcagtcagaactagaagcaaactggaagttcgtgaagattggacatgtcaagagtgcatgccgagggaaggaaagatctaatggtgaaacttcatttcctggacatagattactggtaagcaatgacaacactcacaaagacccaaactttccaaa

SEQ ID NO: 99864 - DNA, 281 bp, Glycine max
aagacttattagaaaaggtggtaaagccaaaatgtttataagaaaaaaacttaactggaaataaaggtaaacttacatttgctgtgtgtttcgctgtttctggttcttccatcttaataaagtttccattaaagaaaaaagacagaattgaagaagaaaaagaagaaaagttgcagtgatggtatcgagaaacgtgtccttgaggcaaatattcgcggagaggagcaaggaaagactcctctcgcgccatgagttgccgctgaatggcagcaacaacagag

SEQ ID NO: 99865 - DNA, 202 bp, Glycine max
  unsure (1)..(202): unsure at all n locations
caacttcataggaaaaaaaagatctcactatcaccgcatttcattttcatttttcttctttactcatgcctaagataagccaagaaaaagatggatctgaaaccgaaaccctaaaaccaatcatggatccatttccctttccacatttagctaccaacaaanntaatttcaatttctctgtgaagagtcattttccgatgaa

SEQ ID NO: 99866 - DNA, 202 bp, Glycine max
ataagtcattacatattggctcaaatggggatagcagaagcatgctccagattccttggtgactttttacaagcattgaaatgctcctcaaaaagctcagtgtctcaccttgatcataattatcatgacccttcttcatgcaagccccagaatgtgctcaaacttgatgacaagatggttggtgcccttgtcagtgttttgg

SEQ ID NO: 99867 - DNA, 279 bp, Glycine max
aaagtctgttgtataatacaatgtaattttcaatattctttaagcatataattcaagattcgtaaagcaaaagcaagggaagattttgatatgcttgagaatatgaagtttgcttggtagtgaattgacctctttcatatggactgagtgagaaagatgttaagactatattcttattttggagaaaatatatccttttgctggaagagtattttctcaatgggctatagtactctgacttctatagtcatgataagctttagattaaaatcactaaac

SEQ ID NO: 99868 - DNA, 275 bp, Glycine max
ggtttctgttcttctcaatttgtttgaatttgtataaacttagcaattttctctgctcaccaagccgttggtttctcagtgctcacgccaaagatcattctttcttcttctgaattgaagaatggcacaagatattgctactccaccagttccttttgattttgaactcttggttggtgatcaccttagaactgtcacagcctcatccaacagcagcaggacagacccatggattgaacctgaaaggttgaaactcagacacaggattggtcggg

SEQ ID NO: 99869 - DNA, 181 bp, Glycine max
aaagaatatgattgattattgatcatttccggcataatattattcccaggatagaagaaggcatgaatcgatgaagtagcccgctctcataacaaaccaccaacgaccaacattgggaaaggcaaagaaaaaattggtggaagaaagaagctaaggtagaaaaaagcagagcttaagattg

SEQ ID NO: 99870 - DNA, 274 bp, Glycine max
  unsure (1)..(274): unsure at all n locations
caaaaccattgttcgcaatcaaaaagtgacagttaatattctctaaccaaccgaaattaatttccatacactaaacaatatccaaantgattaacggagaaaagaaaatggagaaagaaggtgttgggcttgaaatcactactgagcttcggttgggccttcccggtggggattaaccctgacaagaacgagaagatgaagaagagggtgttctcggagattaatcaaggtgatgaaaacagctcctccgaagaagatcgcaaaatccaaacca

SEQ ID NO: 99871 - DNA, 259 bp, Glycine max
gtgctggccagactagggttagggattctgatcgatgtgagatgttccctgcattgatgataccgctcgcgcgctgctggaagccgttcgggcaaggtgacgatgccgctaatgccgccgcagtcgccggaagtcattgcaaggacggcctcctccagttccgcgatatcggaaacttcgccgccggcgaatttctccatggccgtcgtccaggccaatcatgtcctcgagcgacagagccagatcgagtccgtcgcct

SEQ ID NO: 99872 - DNA, 221 bp, Glycine max
gctgtggctaatcatccaattaaagggttttacttcatggtagctggttcacctgagagtctcaccatgacgatcatgagctacatgggaaagataagaattgcatttggagtagagaagaacttcatcgacaagcaattattcaagtcgtgtttggagaattctcttgagatgataaaggaagcagcaaaaaagattcccgcataaaatcaaatagggaa

SEQ ID NO: 99873 - DNA, 241 bp, Glycine max
taaaaatcatatactctttctttaataaagtgctagtccaatgagaaaaaaaggaaatggaaagtgaaattctcctaagcttgcccgagtaaatatgaaagcatataggtcttttttttatcaatcgtatatggataggtctagttcaaattgtgtaaataataataagggttaaataggtttttattcctttaaaattgagtattttttttaatcctcaaaaaaactagtgtgaatgtac

SEQ ID NO: 99874 - DNA, 99 bp, Glycine max
gattgcatcagtattgtgatggaaggaacatgaacagaaacacgatcgattgatagtctcattcggggttagaaatgtgacatttccatggatgataac

SEQ ID NO: 99875 - DNA, 152 bp, Glycine max
tgtaatgatttcacctttctcaatatcaccaacatttaccagatacaatttaaagtgtaattttaaaacaggcacacgatgcaacaccagtccgctgataggtgaaaaaacaccaaatgcccccccagtccattctaagtccattacccgtt

SEQ ID NO: 99876 - DNA, 218 bp, Glycine max
ctcgcctctctctccaattcctccgttgacttagacttgaacaacaacaaccactctgtctccgtttcttctttccttaaccaacctctttccacttttctcactctcacttctacttcctcttcctcctctgtctttcacaaacatgaccactctcttctctctggtctccgaccccaacaccctgcaagatccacggcatacgcgtgtgattcaga

SEQ ID NO: 99877 - DNA, 180 bp, Glycine max
gtaagtcggattatctccgaaaactttttgagaatagagatagagagagagagatgaaatgggtaaggggggaatgtcaattgatgaacatggagcaggcaaagaagagaatatggctgcatggcttgttggaataaactctctcaagattgcagcctttcaagcgtactactttgggac

SEQ ID NO: 99878 - DNA, 215 bp, Glycine max
gtggtttaatgatgtgcattcaactgaaatctctgataaatgtgatgaagcacttaatctgctgtctaaggcgcatggttgtgaaatgatagaaattgttataccagagcttcttgagatgcgaactgcccatgttgtttccattggctctgaatgcttatgttcactgaatcctgattgtgcagacgggaaaggtgtaaattcgacatatgata

SEQ ID NO: 99879 - DNA, 212 bp, Glycine max
catttttctcctttctgtgttttcaagcaatctgttttttaacctctatttatggggttgtttttcttcctagtctagtctccctttgtgttttgtaatttaatgtagtttgtagttcattagatgctgtgcaacagaacatgcacaatatggtgtatcaagtatcaagatgccatagaaacacctggtttgggggtaaaaaaacacccccc

SEQ ID NO: 99880 - DNA, 179 bp, Glycine max
ctttatagaaatgatgagttttgtcagtgggttacaagactggaacatcagctaactgcattgtcgtggtttacaattggtggcaagacatttgattattctgcatggaaaaaattggactgcataccaaaaaaaggatccggagtaggatttggtagttttcgctttgctgcacaaaa

SEQ ID NO: 99881 - DNA, 256 bp, Glycine max
ggtctgtgaactggacttaatattcaactttcacaaggtttgtatgtggccatggcctatgtttgttagtcgaaaaagtggctacttgtttttctttcgtctattaccattatagatgattcttcccatataggtccacccagaattagcttcaataattgattgtataaagtgcaagttcgtttttggcgagtaaaggtccttctgattctgagtttgttttcgttgtaattgtaatgtcgaaagcccactatat

SEQ ID NO: 99882 - DNA, 252 bp, Glycine max
ctgcgacccaaacaaaactacttttgatgttgtcttggtttggttcttaaaaaattccgaaagttgaaaaggttgtcaacaagggaagacaccgagttgaacctcgaacacacacatacacatatactgccaccatccctcaaaaatagaccagacaaaactttgttatcttctgcaaacagaaacttgcttgctattactacaaggattggatcctggcaaggatatctctatgggagaagcacctacatt

SEQ ID NO: 99883 - DNA, 245 bp, Glycine max
acaatatatgcttcaaggtttgcagctaatgcacttagacttttacgtagaaatggcacaagaaagacgagggtgcctgagagaatatcacccatgttgctgcagaagcctgctgagcctgattttacttctgaagaacaatagtcatggaaaacattggtggttatggatgcctggttccgtaagacaagaaaggatgggagtgaagtaaaaattaacatgaaatgaactttttgatagagggc

SEQ ID NO: 99884 - DNA, 227 bp, Glycine max
gaccttaattaaattgtgacttatgtatttatcctttatcctccgcggcttcgtcctccccatcagaagagaaaaagaaaaagaaacttgtttacgatggtcattcaagaaaatccaccagaaagtgggtgtatgtgcactagttggaagcttttcagcatttttctcctctctgtatataaagatgattggattctaaccagttttctgggacatcccttttactg

SEQ ID NO: 99885 - DNA, 258 bp, Glycine max
  unsure (1)..(258): unsure at all n locations
ggttactatctcacatatccacatgcaaatgcaacccgtggttcnctaatgatncattgcttctgttgaagaatcctatgggttctcactgtctctctctctctcccgacattatctctctttatatgagctgctcaangntgagtttctaaagngacagaaaaagagagcaaagggttggcattgatccctttgcacaaaggaaaagagggttgtgctgtgttaaaaaacatattgaacttggtcggttcagagttg

SEQ ID NO: 99886 - DNA, 249 bp, Glycine max
gtcttaatgactcaggcttcaccaaatcaagataaaaaatttgtgttcaattcaagctccctcattatagtccaaaatccttaaattatatcgagcatggtcaggttagccttgtctgttgaattggttttgccatgacctttgtatgcaaaccagcacatgatggtaggaaaaatgaaagtgactattacatcggagtagaggaagaagataggtttgtgagtaaagagtaagagtgacatgtgacaa

SEQ ID NO: 99887 - DNA, 254 bp, Glycine max
gtttgttgcttccttgaaagccattgatggccatggagaagcaatggatctatcagtggcaaagaggcatttgtaatgcagagacaaagtggggatgacgaaggtgcagtggtacgccatgtacttaatatctctgatgtggttccgcacgtatatcgctgacatgttcaacaaacagacacatcatcacaggagactaatggcaaggatctcccacaaaactattgaattttcaaggatcagttgcaaaattt

SEQ ID NO: 99888 - DNA, 246 bp, Glycine max
caataatataattagtaatgttgttaattattctttgttgatgaagggtggttgccaaccttgtcaagtgttcggttccacttctaaacaattgctcagctaattatagttgagaggggaagttttgtgagacggaatttgcttgtctttatgatgagaagcagtgggttgggttctgtagtgttaattaattggtgtatgcatgggttcggtgggtcgtgatgaagaacatgttttctccatgtt

SEQ ID NO: 99889 - DNA, 254 bp, Glycine max
ggctcatccgaagctggaagtaaagacaagacaagaacttgggaagttggttggtatcataccatgggacaagtctttgacaagttagagggtaaggagtggaggcaaaggcaaataaggaagataacagatcgagtttttgacaaagtaaagaatcaaatagagactgataacttgagttttgaagatctgtatattgctgttttgcttgtgtacaatgatatcaacaagtatatacctggtccccattttga

SEQ ID NO: 99890 - DNA, 247 bp, Glycine max
ctcgagtgctcgagccgaatcggctcgagtgatgtcacaccatttttggatgagcatgcagactgtgatgcagttttgctgacgtcaacaggtagtcaatttctgtttgttggctggttcatattgtccgtctgtaggtcggtcaagcagaagtagtaagtggaaaggagtggagtaagaaactcagccatgtatttttatagggaaggatgccaccattgattttgaagatgtgggccacagtgat

SEQ ID NO: 99891 - DNA, 263 bp, Glycine max
ctgatattgacagttactgaagacaccacccttgtgaaataagccaatacaatggttctttcttataccaattccccagttagctcgatatcacctgcgaatcatatggtagctttactgctaccacattatggaatgagttatgagtacgtgttgcctatggaatgaatgaatacctgtaactaactatggaatgaatacatgttgcctatggcatggactctaggataccagaaactcactgatcatccgtcaaatcttat

SEQ ID NO: 99892 - DNA, 255 bp, Glycine max
cggactagttgtggctgtggaagcagtgagtgatgcattggaaactctgaaggatggagcagtgagtggagcagaatattggtcatcgtggttgctttatggtgtgggagctgaagctgatgtgaagacaattggtgttgctgggtcaccgaggtttgaggtttatggtagtgactttggttggggaagaccaaagaaggtggagatggtgtctattgaaaaaactgcagtctttggtctttcagatagcagaaa

SEQ ID NO: 99893 - DNA, 133 bp, Glycine max
  unsure (1)..(133): unsure at all n locations
gtacgtacgtctgtattcgtttcgagcgtatattgcgattcagacatagagaatgtttatngntcgaagattcgnttcgttatgtnttaggatcgtgtccaacaggaacatgtgccttcaacatctgttggat

SEQ ID NO: 99894 - DNA, 275 bp, Glycine max
tgcttttgttcttactctgggatgttctcgcatacgatgcaagcatctttttttactacactgagtggactaatcatattggttaccatatattttgcgttggggaccattgtatctgctcatggatgttggcggtgctttaataaacccctcattcacaatggagcaaaggctgagtttctgagaagggatgtagaagagacaatgtctacaaacttaatcgcttccaacaagttggaaagccatatgttgaagaggactttcaacaaagagca

SEQ ID NO: 99895 - DNA, 100 bp, Glycine max
gctctctctgcatgatcatgtacaactacaagcatgctctctgtagttttcaacctggtgcgcttgcaggggttgtaaaactaatccataatatttaatt

SEQ ID NO: 99896 - DNA, 268 bp, Glycine max
cgtggtggtggtgaccgtggttactctcgtggtggtgacggtggtgatggaggctggagaaactaagggttgatgtcggtgaataagggttaaggataagccccgtaaatttaggtggggtttgagtttgataaacttaatggttttgtgtcaccgtggtcctggtttttgacaataaaacctggttgttaatagtcgatttaatgaaatgataatcggaatttggagtaaaaaaaaaaaaacagccaggactgacgacgtcgcgaag

SEQ ID NO: 99897 - DNA, 277 bp, Glycine max
tttaatttacttttgttctgaatgtcactcaatctatggttaggaatttacgagagatgttgatatagaaaggtaaggttaacccattggccaaggaatatatggcgttttctatggttttcattgttagcaacattatgctgcttttcagttcagcatttgccaaaactgctagtcctccctctctgagcccaactccagcaccagccccggcacccgactacgtgaacctcaccgagttgctcagtgttgctggtccatttcacaccttccttgg

SEQ ID NO: 99898 - DNA, 139 bp, Glycine max
ccctaacaacacacgcgcagacgcaaacgcaaacgcaaacgcaaacgcaaacgcagagcgtgatccattgacgaagatggtgcaacgtctcaactaacggaaaccggaaaggtaatgcaacaagttcaaccaacacagg

SEQ ID NO: 99899 - DNA, 284 bp, Glycine max
catagagccgcttaaggagtaactggctaggaacagataggcggagggtgacagtaaaggatctggtagtagtggttgaggaccatgtaaaacaggaccaggtgggcttggccggccaaaatcctcagctgctccatcagggtccgctgaactatatgggttggcaggtgaaaccacaacatctggttatgcctgcaatgcagagccatgaatggttaggatgcttctaggcatctaattaatttcccttaaatgcttgtacgcatggcatgggtggaacaatt

SEQ ID NO: 99900 - DNA, 263 bp, Glycine max
aaacacagagagagagagtgaacaaatccagcattgttcttttctctgcaacattttccactctcaaccatggcttcaaagcttttactcatcactgtcttcggttttgatttgattgcttctcgactggctgtgggtagttgacaggagaggaggaattgtaagaatgtggcggaccatggaaaggattataattaatggggctaaaactccggtattgcaactggctaaggtggtggagcatttttggtcctcctgggtaa

SEQ ID NO: 99901 - DNA, 154 bp, Glycine max
caataggagacaggagaagagagttgatgttggtaggaaagaggagaggagagtggtggatcataggaaggtttcctggcttacaagtcacattcgtgttagggtgataacccgggattgaaaggggggccggtgtaattggaaaaaggggaag

SEQ ID NO: 99902 - DNA, 227 bp, Glycine max
tgcaataatcagcagaagcaagatttgaaaagagaaacggagaatttggtagtggcttctgaagtcatcaatcaagttccctattggtcttcatcagagttttcttctgtgcctatgccagtggtcaatgcttccttccaacactatggctagaaaaatcaaacatctcttgggagcatgattggtaacaaactagagggaattacattttccaacggtcatcatca

SEQ ID NO: 99903 - DNA, 274 bp, Glycine max
cgattgagctgtcaacacttgggcatggatctcagtcaatgtcaatgggctgattaaattgtcttcctaaatatagaaaaataataaatgggctgatttacttcatggcccactgccggttgaataaagaaaaaggaaagaataaaggaaggaataaagaaggtggaattgttgatagtgatgattattggtagggtttaaataggaaatagagtattggtgttcatactcaagcccaagcaaatgtaataatttcatacttagcagatagtgt

SEQ ID NO: 99904 - DNA, 278 bp, Glycine max
ccgtggtggtggtggatatggtggtcgtagtggcggtggcggtggcggtggtggatatcgtagccgtgacggtggttatggcggtggctatggtggtggtggtggtggtggttatggcggtggcagagaccgtggttactctcgtggtggtgatggtggtgatcgaagctggagaaactaaaggttgatgtcgtcaattaaggcgttagattatgccccggttttttaggtcgtgttggttcaaatccgagtttcttaatggtttcgggtaaccgcgg

SEQ ID NO: 99905 - DNA, 263 bp, Glycine max
gctagtgggtacctcccaacaaccccaagtggcaccccaccaaccaccccatcaaacccttctccttctactccctctgagtcaggatccaccaacaaccattcatcagcaaagcctagtggagctgtaaatggtttcaatggcaatgggcttttggtgggggctttccttgtgttagcaattaaggttgggttcaaggggtaaggaagaagcaatgctggtttttttttattccccttttaataatatggtaatggtttgcc

SEQ ID NO: 99906 - DNA, 201 bp, Glycine max
  unsure (1)..(201): unsure at all n locations
cgggagcttccatcaatctttctctttgttacatgccattcattcacaatttcaggatggctgatcacggcatagtttcataaactttggtcttatatcttattatcaatgcaatcatcatgtctatggcaacatcacagccanacttcataaaacattactgttttgaccaaaatggtaactacactgctaatagtacgt

SEQ ID NO: 99907 - DNA, 269 bp, Glycine max
  unsure (1)..(269): unsure at all n locations
aacaaaacaaccccacttctatcttgtatttttcactacctagaaaccgatccaactgcggccaaactctcttcaggatggagcaacagaatttggncggaggtggatcggtttctaggtagtgtgatacgaggcagagatgttttgctgccattgtaatttggaaacaacactcagaacaaatcatgtccaatctgcaaacaaaacaaccccactttgacctcgtatttttcatgttgtgtatgattttgtccagtggatcaggtcgt

SEQ ID NO: 99908 - DNA, 260 bp, Glycine max
agagggatgggagaaaaggagggttgctaggctgtgctttattttctctagagtggggctaaagttgtacaattcagtggaggagggatattatgctatctggtgttgttgcttttacgttcaagatgttatacaagggaattgctattctcccctccgttagaaaattgatgttcattgtgtgagttttttttttgctataaatttaaacgtcagtataaatatttattataaaatcagtatgaatgttttttctcccc

SEQ ID NO: 99909 - DNA, 301 bp, Glycine max
atcactgcttgctttagcttacgttctgtatccattttcctctctctctctctctcaaactcgggtttgtgctgagagaaccaagggtttcttcccttgcagagaagaaaatttggttcagatcgaaagttatacatgcatggttttatatattgttctttcatctttctcagatatggttcgaaatgagagattggggttgatgggaatgttgtttggctcgaggtaactatgcatggtactaattttgttcatctttgaagctttaatttatgggtttcgactctttgatcccttgaaa

SEQ ID NO: 99910 - DNA, 253 bp, Glycine max
tgattccatggtgtcaaaaccataatttttcttcccctcggctcagaaatttccctattagagatttatttgttagaaaagaaacaccatttacttgatattgaatctcggtaaaattttgtttgttgacatatattaaatcactgcaattaaacgattaagtttgcttcaatatatgtcaacaaacaaaatcgtttaattgcagtgatttaattgtttcaaaaaaaaaaaaaaaaaaaaaaggggggccccc

SEQ ID NO: 99911 - DNA, 298 bp, Glycine max
gagctctagcgtagttcatcaaagccggtgccgaggagagagagtccatggcgagtcaacggagagactcatcctgaatccaaagctgaccgctgcaatgaatgtgtctccaaacgactccgcgaatatgggctccgatacgcagatttgtacgatccttactacgatcaggatgtgtaggaggcgatgtgtccgataccggtgaggtagtagcagctccatatacgtatctggatttcgagactctaaagagagtgacggaacctgtgaaacctgagtagtgttgtcttacttacaa

SEQ ID NO: 99912 - DNA, 290 bp, Glycine max
gcagtgactcccacaaggagactcaacattgagtacaatggcagtgacctatacgactcgttcgagttcaaacagatgactttacaactcaacgaggccattcaaacctcaaaagaatcttcaccagcttacagagagatgacgcacaggcacaagcttaaaaaggccattcagggctctaatggctcatcgccatcattagtcttccacctaaattcacccttttatcgtcgccacctgaagcgtctctacaaagaaagcacaaaggcaccaagagaatctctagtcct

SEQ ID NO: 99913 - DNA, 189 bp, Glycine max
cagctaacgccatcgtttgagtggaatttcttgttatgtttaagcttgtaggatttaagtgtgtctcagattttgtttaagcttgaaattggaatacaagtgatacagatttttaatcattcgtaacttataatcagcttgctttttgaagagacgatattaattattaattaagaattttgttttttg

SEQ ID NO: 99914 - DNA, 282 bp, Glycine max
gccttcttctttttgttccccgtgcgtgtgcgtacgttgttcgtgaacaatatataacgacaaatgagcagtggcggaagggctgggaaacccaaagaggaggagcaagatggcatgtccgtccactctccttgcaaacctcctcattcctctgcttcctctctccccaagtcacaggttgtcttggagctgagattgttggaagctcttgagatttaccctccaatgaaactacaaggagtacatcgtcactttgtcctttatggtctgctgaatttctaa

SEQ ID NO: 99915 - DNA, 285 bp, Glycine max
gtatcctccatggcaaggctttggaggtctggcccaaacagcggggataattacaagataatctctgtggaggggatgaatggtaggctttcaaatggaagggtatctagtgggggcataatgtctcctgattgggaacttggtaacggtggactaagcccccaagaccatctgtaccagttgagttcgcctgagtcagcaaatctgcataatcgcggcatgaaagggtgcattcctcgcaccgtgcagaagagtagtctgaaagccagacttttggaggctagg

SEQ ID NO: 99916 - DNA, 207 bp, Glycine max
gctaaaccttaaaccctacttttgcaatcagtgagtgtagcgatgagtagtcgttgatgggtcggcgaacgactaacagctcgattcctctatggtcatccggtcatgtttgctctgattttccattttacccgtggcggtatcaggaaggcttcttgtgggatcaatctgagtgaggctatgatttgctggattcaactcatcact

SEQ ID NO: 99917 - DNA, 112 bp, Glycine max
atgtgatagtaatgatggatatggtgactgttggaagagtcactcaaaggaatttgattccaattccgggttggttgaattcaatggtgtccattactataagtttacaact

SEQ ID NO: 99918 - DNA, 252 bp, Glycine max
ctagactctagttatatcgattagctattaagttggatatatataggatgttctcaaatgcattagcagtaactgtgatctcctcagttgcttggattggatatgaggtatattacaggctacagatctttcaatgagcgctggcaaagtgcttagatcatcaatgcattctgggaattctagcattgcattactctgtgtatatgctatcctgggcccatccaagctctcaaagtagcaattcgagcatgg

SEQ ID NO: 99919 - DNA, 282 bp, Glycine max
gcaaaattgattgggaagggaaggaagttggaagattgagaggttcaatctcaatggccacgcttagctttggactagccacgacaagtctgagtgctgccgctggttatcgtagaagaagacccacaattgtgtgtattggatggtctcgtgatgttcccgatactccgcaatacctcatcgaatacttcctcgacactgaagctcaggagattgagtttgagattgcaagaatgagaccgcgattgaatgaggaattctttgcacaactcaaattcgagt

SEQ ID NO: 99920 - DNA, 277 bp, Glycine max
cgtagaacacagaaaaagaaaagaaaagaacaaacaaacgatggggtggccattcagcagaataggagcttctgggttttcatcatattctactgccaaggaagttactcatggaatcgatggaagtggtctcactgctattgttacaggaatttgtgctgccccttttgcactatccaaggataacattgaacttcaatttgccataaattacatagttacaacaattggtgtgcatatggacaatcaaagcttgctaatattttgcatgccaatg

SEQ ID NO: 99921 - DNA, 270 bp, Glycine max
  unsure (1)..(270): unsure at all n locations
acttatgtcantaattcttattctcttcatctctctctactctacgacacggaggttgattataagacctgattgctggaaattacatggcgtcagctattaagatcctataacttctctttggcttctctggtagctaaggaaattttggttggaggtacgactgatgcatggacggtttcagcctctgaatcagattcactccaccaatgggcagagaagtctcgtttccaagttggagactatcttgtttggccatatgatagtgga

SEQ ID NO: 99922 - DNA, 283 bp, Glycine max
aaaacaatgaagtgagattgcaacttgttgtttcatttactagataaccatctgattaatcggatctcattaggtggtatgatgacaacatatataaaattttcttggacaacttagctgtatatctttcttgtaatttgctaatcgcagttatgctgactttttagtttaacttcaacactgtctatttacacattgcttgaacatcctttgatgcagatccaatggatatctcttcgatgtaaaaagtcaaaagaaaaggccatcttgcttgaatgggatg

SEQ ID NO: 99923 - DNA, 270 bp, Glycine max
gtcgttggctagtagacgcaaagaacggagtgctgtggtgcaaaataagaagcattggttcctctttctcagcgattgagcgagaaagcaaagacagtcatggcgtcgtttcttcaatggtttctggatccgaagaagaactggttcgccgctcagcacatgaaatccctctccagacggcttcgcaaatacgggctccgatatgacgatttgtacgatccttactacgatctagatgtgaaggaggcgctgaatcggcttccgaaagag

SEQ ID NO: 99924 - DNA, 176 bp, Glycine max
  unsure (1)..(176): unsure at all n locations
aaagcggggaaagaggctagagatctttgaaattcaagaatatcattatcgacagattcncancgaaaaacatctcacagcatggtttatcgccatttggattattagctcttcctctgtttcctctgtttagagatctctgtatcgtcccttcgattgcacggtttggaccaaga

SEQ ID NO: 99925 - DNA, 162 bp, Glycine max
ggccggaagactgtgcacaatcacaaaccacgtgagaaacgggtgagttttagcccaatggaaaatgaagaaattcatgtagtaggagcttctcaataaggttactttcttccttgtaattagtatttaagtagaagcaaagtcgtgaccaaggcaaaaatg

SEQ ID NO: 99926 - DNA, 105 bp, Glycine max
  unsure (1)..(105): unsure at all n locations
ctcatatatgatggctacgtcaatggtgaagcttatgattttgtatggggtcataggagtgaagttggangcaggtgtgtgtgtaaaagtagtgcatttgcaaga

SEQ ID NO: 99927 - DNA, 148 bp, Glycine max
ggttctatcaaaaaagaaactgtagattaagctgagagatgaattagtccaaagcaaattcaacgccgccgctgaacacccttcattttctattaataataataagtctctcaaaaatcttctggactctgccacgcccacagccaga

SEQ ID NO: 99928 - DNA, 148 bp, Glycine max
acaacaatgaagctagtctgcaactcgtagtatcacgtacgagataaccatctgaagaatcggatctcattaggcggcatgatgacaacatatataaaactctcctggacaacttagctgtatatctgtctcgtaatgggcgaatcgc

SEQ ID NO: 99929 - DNA, 142 bp, Glycine max
ggccacatagtttcgctgcaactgcagcagcggctcgcagccagcgctctccagtgtggcagacgaaaggtttggcttgaccccaatgaagtcagcgaaatctccatggcaaattctcgccaaaacataaggaacctggcta

SEQ ID NO: 99930 - DNA, 153 bp, Glycine max
gaaagatgagtagttcatcaaggccggtgccgaggagagagagtccatggggagttactcgagagcatcattctgaaaccaaaggtgactgtcgcaatgctcgtgcataggaagccataccggaagccattgccgtgcacccaaatttccagt

SEQ ID NO: 99931 - DNA, 152 bp, Glycine max
cagcagcatactattctatacataaataaccttcacatttacaatttgtcatacctaaggaactgttgggtcattacacctctaactgcatttatgtatattctgcactatacatggcacaagagagagggacaaaaattcctacaacagtg

SEQ ID NO: 99932 - DNA, 149 bp, Glycine max
accgtctgtttgcaattccacgcttttcatttcctccaaattccgttccctcaggtttagccactccaaacagacgagaaatgggtcgtggggtcagtgctggtggtggtcagagttccttaggttatctctttgcagtggggtgcctg

SEQ ID NO: 99933 - DNA, 287 bp, Glycine max
  unsure (1)..(287): unsure at all n locations
tgttcgtgcgattcttcgtccctgctcgaatgcgtctgctactgcatcaagtctcaagacaacacggcttatcgttactntaatttatcatttaatcgtacaaaaacgacttaacgtgcggggggagtacaaaaatatagtggaagataatcatcgatcacgtacagaaaattatagcgatgcagcgtgtattggatgtacgatcttcacttcagtttttacttaaatttaagcaaaactctttaaaattggtttccttaatccaggtaatgtacctttcacagaaa

SEQ ID NO: 99934 - DNA, 128 bp, Glycine max
cttcatttacggctatgagcaacttctgtctaggactaagctctttctggtaaaataaagagttccctgaacaaaaggagttctgtgtgaccttataaatacggtgtatcttattcatatgtaatctg

SEQ ID NO: 99935 - DNA, 253 bp, Glycine max
acaggtcgagctcgagccgtttgcaggtatttgtgagtgtgtgagacatagagcgagcagtatcagacacaccgagatgggtttgggattggagggattgacgctgcgtctcttcctcttctctttcgatccatccctcattcctaatcctccaattcaaccatctcagcctcacactcacatatacacatatctgaacgcgtatcgtccctcctattgcttcaatgcgcatcctcaaggagctcaatgactt

SEQ ID NO: 99936 - DNA, 248 bp, Glycine max
ggacgccaagttcggaagcctcttcgaaaccatcggaaacttcttcaccggcggtgagcagatcccgtggtgcgaccgtgacgtcatcgctggctgtgagagagacagctgcagaggctgctaatcgtgactctgaggagcggaagaatgagagtataatgaggttgtcatgggctcttgttcattcaaggcaaaaggaagatattcagcgtgggatagccatgcttgaaacttccttgggcaatgat

SEQ ID NO: 99937 - DNA, 146 bp, Glycine max
ggcgagtagctgtgtgtcttctacgcctcactttctttcaattccaactcgtgtaagagcgaacagaagaatatccactttggtggcaatggcattcccttcttcttcttcttcatttccatttctgcttcttccgccagcactcc

SEQ ID NO: 99938 - DNA, 285 bp, Glycine max
caaaattcaactcaaacatccctaacacatacataacagaatcagaaacagagacacaccataaaacaaaaacctacaaaatattataaagcaattaagaacaaaccataccccaaatcacatttctaccataatattcctaatcccaaaatcaaaatttataatattaatataaagcagacgaatattaataaatttcctttctatatccatctaattaattaaaagacggcaaatatttcaaataaaaccctaaaaactactcgcattacttacaacaaatac

SEQ ID NO: 99939 - DNA, 253 bp, Glycine max
ctttgtttcgcagacctcaccaaccccttttagctcaccctctcactctcagccaccgcacgccgccgtctccggcagccactcataaaaggggtgggttaggctttgcaaccattggaagttccaacaatggcaggcatagctatacttttagatctatggaggaaaaatcaaaacttgagctctggattgcactcctctcatgcttttcagtcttccagtgacttttcttctgcctctgctgcaactgctg

SEQ ID NO: 99940 - DNA, 275 bp, Glycine max
attcaactcaagtacccctctctctatttcccttctctttatcttcctattaacaccattactcttaactcaatctccaccttctccttcttacttcttcttcttcttcttctattacctacaaaaacacactatatccaaaactctaccgttccattctctcaaccattcgttcatccccttacaacccttataactataacaagttctccataaaacaaacctcaaacaaacaagaccactagaccaaatctttaagaactttctccaacacc

SEQ ID NO: 99941 - DNA, 241 bp, Glycine max
cttcctccatttacttttattctatctcactttcatactcacccacattgcaggttaacttcagccttattttgacctcaatggcaccaagttcggcagtgccagatgaacaggttgttgttggagaggagatagagcatgtaagagcgatcactttgaacaggccaaggcaattgaatgccatctcaccagaattggtttctctgctagcaacatatttggacaagtgggagacggatga

SEQ ID NO: 99942 - DNA, 274 bp, Glycine max
acacatacataagctcaaaattcaactcaaggggtctcttccattcacaaccttaaacctttctttcttataaactttattaattaattctaagaatagaactaagagggtatagacatagctaacacaattacaacttcttttttaattctacttctaactttccccactatatttggaactgaccatgaagttggtgacactagtagataaaccctcgaaattaattacaacacctaaacctctaggaaaactttcacaattggtgacactt

SEQ ID NO: 99943 - DNA, 211 bp, Glycine max
cttgaaataaaataaattattgtccaaatcccgtctacacatagacccaacataactcatgttgctagagtagttttctcacaaccatcgtgcacacaggccaaaacatctctagcaacatgagtcatgttgtgtctatgtgtagacccgatatggacttgaaataaaataaattattgtccaaataaaacacaaaaaaaaagggggggcc

SEQ ID NO: 99944 - DNA, 248 bp, Glycine max
cttattctttgatagtgcaaccaacaactatcatgtggctgtcatcattattctttgatagtgctaatctccatttaaattcaataaaaaagtcatcttcaacttctgggaattcattcttgaggagctatagaaaacttaatcacatagttattgtctagtacatataaatcctagagccctgctttactgaatgaagctacaaatttcatacaagacataactcattagagagtagaatcagcaat

SEQ ID NO: 99945 - DNA, 172 bp, Glycine max
gtgatcactcaatttcatgggcagtggaatatcattactctctactacaactacaagcacttctcaactacccatgtactataattcctcttgctatcttattcatcaaggttccctcctttcaccacgtttatatataaatcacatttcccaattcccacgcacacaaacc

SEQ ID NO: 99946 - DNA, 268 bp, Glycine max
ttcaactcatacggagtcctcagctcaaaacatagtgggacagaactgaatagttgagtattcacattaggggtcgaactctgtgaagattcgagcagttgagtgcggtgcagcttgtacgtcatccgctggtagctttatccaagctaccaccactatcacccttttcccaaacctattattgttcatacacacccacacggataggttgctcggtgtataagattagggaccctcctcgcacgactcctgcatttcgcactaccaa

SEQ ID NO: 99947 - DNA, 257 bp, Glycine max
ctcgagccggcattgcatccctcttgatttgtagtttgttttgtgctttagataaaagttctcccaaatcaagaggggttttaagatcatagtgtgtgttttgcaacaatggctaagttctttgctgctatgatcttggcactctttgccatttccatacttcaaacagtggtaatggctgctaatgaacaaggaggccacttgtatgacaacaagagcaaatatggaagtggaagtgtcaagagttaccaatgccc

SEQ ID NO: 99948 - DNA, 264 bp, Glycine max
ggtgtcatctcttcctgtttggattgtttcctttatggtggtaatctatacatctttgaatatggggtttcacctgcattttttctagccaaagctcgaggaggcacctgcactcttgctccttctgatccaactgaagatgtccttcatcgttcttcatttcttcttgaaaatgggtttggtgtctacaacattttcaagaataactgtgaagactttgctcatttactgcaaaacaggtcttcttgtatccacaagtgtcag

SEQ ID NO: 99949 - DNA, 101 bp, Glycine max
  unsure (1)..(101): unsure at all n locations
ctnataatttgttgtttgtattcttggatctaaagcttgtatttaatcatcaatttcaatatattaaccctaaaatgtgaaattagtcattgggttatatc

SEQ ID NO: 99950 - DNA, 277 bp, Glycine max
ctcatcctcacagacattcaaacatgaaatttttttggtttcttcaagtcctgttcttcctggctatgcttctcatcaatccctctgttgctcccaatgcaccagctcctccttcaagtggtgacccgcatacagaaacactccggccaccgccacgcaaggtctctggttcatggccatgaagaatttattgataagcttatatatatataaagtttggttcttcaatatatatgtagtatctcttttcttctaaactttttctgcttgtgatcac

SEQ ID NO: 99951 - DNA, 280 bp, Glycine max
cccaaacacatcctttctctctctaactttcccactctctttatccagcaaccaagctcgttgaagacaagcgcgtcaaaacgctcattattcacagcagaagaagaagaagaagaagaaccaaacaaacaaggaacatagaaacccaacctccttcttctcttctctcgtgattcgcgtcctcccaaccaatatcttcaccgaatctccttcatttataccaaaggcggcgaccatttatttcctatttctgacgccatttttctctgtgcaccactct

SEQ ID NO: 99952 - DNA, 274 bp, Glycine max
gttgtacactgtgggacctttcttctgcacctcccaacctgctaaaccactccctaacggttattaattaatgaagccaccttctatatgacgtccgttgaaatggctgcaaagtggaaatcatcatttttttttatattcaatttctatttttgtgttttttttttttgcctgatgttttgttaagtgttggtttcatatgtaattcattggtagggggaattgattaagcctccttgccctttaagagatttatgttaagttttaatatgtc

SEQ ID NO: 99953 - DNA, 275 bp, Glycine max
agctgctccaaggagacatcgtgttgacgatgaactaagctcacaggctaaagctggtttgagaatgttgtttgcactcgatgaacaaagagtagctcaagcttttacttccccttttcctagttttgtgaaaataatgaaaaagttcaatgtcagtggatcatacactttgaaaatcccataccagttctcagctgcacatctcccaacttacaaaactgaagttacacttcgtaattcaagaggtgaatgctggactgtgaactcggttccag

SEQ ID NO: 99954 - DNA, 255 bp, Glycine max
ctagaaacgttaatttctgtactgagaagaatggaaagcaaatagccagcactgagtgagtggatgtaattagatgaggagtcaacttggaaagaggcaagatcgttgtgcactctttcatatgattacagttactgggaggtaagaaatttcgaatgatgtggttgttgtaacaaatttctgttatctgaactcatttaggacttgttcggtggctaagatataattaggatagaatataaggagacacttgct

SEQ ID NO: 99955 - DNA, 273 bp, Glycine max
gttattttccatgaatgttggttgttgaattccttgtggcaaaaaaaatgttatgctgctatataggtttagtgacaccaaacagacgggaaatgggtcgtggggtcagtgctggtggtggacagagttccttggattatctctttggcagtggggtacctgccagcagtgcaaatggtgctcgcactcaaaatgcaagtgctccttcaccaccggttgataagcaaagtccagcaccagcaccagcaccagcacctgcacctgcagcagcag

SEQ ID NO: 99956 - DNA, 267 bp, Glycine max
ggcattggtgattgaagaaatggcgcatgcagcgaagggtacctacagagcctcaagatggtcccttaacggaatgactgctcttgtgaccggtggaactcgtggaattgggtcagtccctttatttattattagaaagggaatattttggttgtaaaaaagtgtgatgctttttggtctctagctatgaaaaactgtgtttgatttcaggcatgccatagtggaggacttatgtgggtttggtgccactgtccacacttgttccag

SEQ ID NO: 99957 - DNA, 273 bp, Glycine max
atggatttcatttatcattttcatctcaagcacaaatatcttggcagattggttttggaatgtgatgatgagtggaaagagtcatatgcggaggtgaagaaatacggatatcgctggctatatgaagaggatatagaagggccatcaaatccgttggctaggaagagcaaatttgggggaaatgaagaaaaagtgagcagaagggagaaaagatgatgcaagctgctcccaggaaaagccaataaagttgaatgttagggtgtagaatcatca

SEQ ID NO: 99958 - DNA, 229 bp, Glycine max
gttctgtgctattcgccctgaagggttgagggttttatactaggatttcctctcctccagggacacacattctcttagttaacaaaactgcatgcgtagtgccaacattttatacttcaaaattataccgaggaagatatgaaaaacataataaaattagcaacatgcaagcccctaaaaaaaaaaaaacacaaaaacaaaaaaaaacaacaaaaaacttacaaatgcc

SEQ ID NO: 99959 - DNA, 289 bp, Glycine max
tcacggttctagcgcttttcctacggaatatttctcacggaattaattccgtcagaaatatttgaattttgaacataattttttccacggaattcattccgtcgaaagtataacttacccacagatggttacccacggagatctattcgtcgaaaatttgatacctttctggcagattatttgaatggaatatgcatccgtcggaatttaaaaattttcccaaacataaagaccccaaccctaattgcctctcactcacttacccacaaatcatttcttcctcccacgg

SEQ ID NO: 99960 - DNA, 277 bp, Glycine max
gaacaaaagagctggcttgggcttggcgtggttccatccatggcagactacgaaaccagcaccagccacaaccaccactcgaaagaaacagccttccaggccctgaacaccataatccagctccacttcgagaaaaccctggagaagaagcgcgccatcgacctccagaagaaggagcttcacaagctcatccagatattcttcatcttcttgggcctcgtcttcctggcccaggcccagtcccctcgcctccaatgccgccactgctggatcccca

SEQ ID NO: 99961 - DNA, 123 bp, Glycine max
gaaataatttgtagtttgtattcttggatctaaagcttgtatttaatcatcaatttcaatatattaaccctaaaatgtgaaattagtcattgggttatatcagaaaagaaccaacacagaaaa

SEQ ID NO: 99962 - DNA, 277 bp, Glycine max
gggcacgccctaaccccaaaccttcgtggagtcaccgaaaccaccacaagagcgacgcgaagatggagacaatcacgtgcgttagagggtgagtatcacttccattactatgtgcgacgtcgcatgcgaagatcagttacagctctatgaacgaaaaccatgggtgtcggcgagaagagcaacgcgaacggaaatcatgggtggtgatcccttcgacttcgaccctagcaacacaaatctggagtttctttcactttgttttttcggtttttgattc

SEQ ID NO: 99963 - DNA, 271 bp, Glycine max
cgcagccataactgctttcatggaaataaaagagcataaaaaaaataaaatttaaatttcaggggttgcgcggttgtctattttcttagaattttgttggtaaataatgttatatttaaatgaacaagataaaaccattttgtcttggtatcaatgtggttgatgccaatgtgttatccactatttgttctgttcactgtgtaggcaggggtgataagatgataactgctcagtctttttttttgtagtcaataggaggcttgatgagtgg

SEQ ID NO: 99964 - DNA, 210 bp, Glycine max
cgactgacgaccttgcaacaccggcgtctccctccttcctctcctctctctgcctttacctttgattgtaggtttttcattattttgcggcgaaacagggttgaatacttctgccttagcgcctccgctctcatctcccagcctagtccagcgcgaacatggtgatgcatctaaacgggacaccgtgcgctctcggattccacatgcctg

SEQ ID NO: 99965 - DNA, 272 bp, Glycine max
cagactcggaacagcaacgttgtagagggagacttttgggggagagtgagtgagagtaaaaagatgtttctgcgtgcggtggcgcggccgttgatggcgaaggtgcaggcttccccggcgcgccgcgccgcggtgcgccgccccccaccccgacggaggtgctgattgggctgtacagcaagacgctgaaagagatccagaaggttcccgaagatgaagggtaccgcaaggccgtggagagcttcaccaagcacaggctcggcgtgtgcaag

SEQ ID NO: 99966 - DNA, 283 bp, Glycine max
  unsure (1)..(283): unsure at all n locations
gttgagtgacaggctgatcgcgaattgagtcacgagttcagccatggtatctgtgtctctgcgcgtagtcctagggtggcgaagggagcagcccgagagactggggagtactcacnggcagagtgctcggacaggaatgatactgacgaaagcttatgccccgacagcgagaacctcatcgggggtcacctcgcaaaaatcttcagcccaggtctgtagcgcaatcgttcacctcgaactcggtggcttggggagagggcgaactccgtggcaacgccaccgt

SEQ ID NO: 99967 - DNA, 241 bp, Glycine max
cgcagagatggcagttccccgagctgcacactggtcagaaaaatacaacaatgtggtaaagggaacgagtgaaaagggttctgccgtgtatggcgatttccctctgactcccaccgacgcgggagcgagagcgtggcaacagggctcagcgacgccaccgcagcacgcagcagggtccgcggcagagagttcttagagcactactaatagggtagctattgtcttcataaaatctgcttct

SEQ ID NO: 99968 - DNA, 267 bp, Glycine max
catacctcctccaccgaaaaatgatgacggtggtgacacgggtatgcatacagggaaggacaaaactgagggcatgaagttttcacatcatagcaccactgagacttgtgacgggttcaagaagtgcatcgacgatgatgggggcatggttgcttgcatttcgaaaattgatcataaatacctagttgttcttcttcacaatggaggagacggcatcatcaaagtgaagcttcgtactgattttgataataaccttggagttgtaga

SEQ ID NO: 99969 - DNA, 281 bp, Glycine max
ggaactaatgtacttgcccttggtactgatgtttcttttgacaccaaaattggggagttaactaaattcaattgttggactgaacttcaccaaagacgatttggttgcctcattgactgtgtgagtaattattgtcctcttttgagaggatgcttctaattggagtttcagcatttatttcatttgcctcatttagatttagtcttttacatgtgggaactatggaatttttaaattaatcttgagcttgtttgttcttttcttctgctagtgaagtactt

SEQ ID NO: 99970 - DNA, 279 bp, Glycine max
tggtgcggcgcaagcgtggtgaggcctccaccggaaaattctccgtccaaacggagaagaagaccttcttcggttggaatgttgtaagagataggttttctcttccaaagactcttccaattgcacgatctgtattctaacattccacatagttacttggagtgggaaaggtggaaaagaactctacttgaagagattaataactataatgccagcatactgtgtttccaggaggttgttcactttaatgatctagatgatcttttccagaacagtggc

SEQ ID NO: 99971 - DNA, 281 bp, Glycine max
ctggaacagattctggcatcactgcacaacatttggagtgggttcatcggaagacacttcaaatggtttcaggagatagcatatggctagttctctctccttttttcttatgtgaattatatatataagatcaagagtggcagacatcagaattcctggactatgctttgggctgtttggtttctgccagcacttaaccatcatttgaggtatttgtcatggttctgctgattttcaaagttaatttgcatattaggtgttctctcccctttgaaagggtt

SEQ ID NO: 99972 - DNA, 271 bp, Glycine max
gagaaagctaggaagagaaaggaggaaaatattaaagctcttgcaattctcatgaactgtggaatcctggtggggttcctattgttggggttgggagttcttaactgcccttcttctcttctctcatcaaccttattgatcattctcttcttcctcttcttcttcaaaaaccaatttctttttatacaaataaagaagataccaaagaaaaacatagcaaaaaaataaaaataaaaaaatggaaggaacaagcaataaggggttgttggaa

SEQ ID NO: 99973 - DNA, 133 bp, Glycine max
  unsure (1)..(133): unsure at all n locations
tgatggtagaagtgaagattcaattgtggattattgtggatcgtcgttaatttgaattgtgtgagtgagggaacaaggaaggtgaggaatatntaataaaangaaatggattatgatgtatgtgttaacataa

SEQ ID NO: 99974 - DNA, 164 bp, Glycine max
ctacagtcagataggactcagttatcaatctccataccaatatcttcctcagacttcatgtcattcactacttcctcaccctccaacgagaaactcacgttgtcgccacttaggctttcgagggcgttaaaccccattcaaatggggttggagtgggaagcggt

SEQ ID NO: 99975 - DNA, 162 bp, Glycine max
acgggatgctgctccaagatttgttaccatcctgcaatagatttctctttttaattcaagaagattttagctctttctaacggtggctggtcgatgaaacaggatggaacaggggattttaaatataaacctgctagaagatttctctgtatccatggcaaa

SEQ ID NO: 99976 - DNA, 159 bp, Glycine max
actcgagcgaatcgtgtcgagggctcgagaccaaaaccagaagacgctatcgcaatcgtactccagcgaatatgaaggacgtcgctgcacacttgctcgcagtgttgggagggaatccttccccttctgccgatgacatcaaacactcctcggcgcagt

SEQ ID NO: 99977 - DNA, 160 bp, Glycine max
cggctcgagtcgaaatccaagtcgcagttgctaaaccgtaacacaaactgcgatagcgtcgtcccgcaccggggcgttaaccgacgcgtctgtcgttcattcaatcctccccgcagcagaggaatttttggccatggttggtagtcctgcaggactgtct

SEQ ID NO: 99978 - DNA, 157 bp, Glycine max
caaaaggaaaggatgaagcaatcaaaggatccgttcgaagcagcgttcgaggaatcgccgccagaatccccaacggctacggagacagagacagaggaggaggaggacaacatggacgtggagctcgccaagctcccttccacggcgaccctcacaa

SEQ ID NO: 99979 - DNA, 134 bp, Glycine max
gtgatgagatcgaggaggcattgagagcgcagatgggagtgcaaagggaatgacatttgcgagtggaggcgtaagagcacttgcagattcgccagggtgcagagagtagatacatgtcgatgctcgagagagct

SEQ ID NO: 99980 - DNA, 145 bp, Glycine max
  unsure (1)..(145): unsure at all n locations
tcacaatcagntccagtaagcacttaatgtggattttcaaaagctttcttccctctctacattggaagtcttgatcaattctttgacaggtgacctgcctcagactatgagctcattttctagcataagaacctgtatctgcaaa

SEQ ID NO: 99981 - DNA, 146 bp, Glycine max
cataacccgatagaaagacagaaactttaggggtgtgtgtgacattataagtctccattgttccctcttgtaacgttcttggcgtaattaattagtactagtcgttacccttattaatagagtacgtactacctgctagctctgtt

SEQ ID NO: 99982 - DNA, 131 bp, Glycine max
ccggtggcgcagttgcgtaatcgggggatggagttggagacttttcaccccgaagtggagacttgtacatagtgaggtcctggagttcaatgcgatggtcatcgcgggtattcataataataagcaggtga

SEQ ID NO: 99983 - DNA, 150 bp, Glycine max
tactattatttcatcgagaagacaccttcctccgaattgactgcgacacaagtgtcttgagacgacggtgcatcttcacgctgtcgatgcgccaatcgcggcgttgttgttggtggtgcaacactcggcgagtgtggtgctggaggccag

SEQ ID NO: 99984 - DNA, 138 bp, Glycine max
agaggtcgagtttcacagcagcaatggtgtacgtcaagggctcagaaatcgaaaggctacttcaagagctatcaagtcaaagttcaagagctgaagagagggaagagaccggttagcgtgagcggacgtcggttgatt

SEQ ID NO: 99985 - DNA, 174 bp, Glycine max
ctgaactcttccaagtcccttagtatacccctcaaggaaaaatggacggtatgcacttcagtatcctttctctactgctacttctggtggccttctcttacacagaagccagtgcagatgttccaaaaacaacagacaacaaaatagaggtggtggtgaagccacggtctactg

SEQ ID NO: 99986 - DNA, 158 bp, Glycine max
cgcgtgtcttctccccggtcatgagctcatctgttccgagcgcgaagttaagacgcttcgttgatctcactgctgatgagacttctgatttatggctcactgcacaaaaagttggtaagcagcttgagagctaccataaggcttatcacttactcttg

SEQ ID NO: 99987 - DNA, 158 bp, Glycine max
cgctagagaggctttctagaattatatggaacttgagttggggagtgacacaatggtagaaacagctacgctgaagggagagtttatggagtggagtatttcaaggataacttcgacaggttggttcacataaagaccaaggtgatccccataatttc

SEQ ID NO: 99988 - DNA, 99 bp, Glycine max
cttctctctatcgtcttcttcctctgttccattagggtttcctttactccctcggagcttccaattgaaatccaattgctcaatacctccacacaacat

SEQ ID NO: 99989 - DNA, 284 bp, Glycine max
tcgaaacgacaaagaatcccctctagcaatatggctggtgaagtttactaggttctactcatcttgtgctattcattctttgtttgtttcccatatttggttttgctctgcacatagctcaaagaggataagcaaaaggggtgtagaggattgatggtgggattgatggaagagttatcccgaaatgaagagaaaggcaaaaagggtgttaagctgtggggtaatatacatgtggtctgttctttctcaagggtgacacttgacactagctttgcagacagttt

SEQ ID NO: 99990 - DNA, 180 bp, Glycine max
  unsure (1)..(180): unsure at all n locations
gaaagaaaaccctagcttaccttttcaactttcaagatgcaaatctttgttaagacactcactggtaagacaataancttgtggtggagagttagatacatagataatgtaagtcaagatcatgcaggagggatcacagacagacgtctatttgtggagcactgagatgagtaatgtgat

SEQ ID NO: 99991 - DNA, 308 bp, Glycine max
ccaacttgtaagaatagttattattatctgaagttgtgatttcaatttctgatactgtgaagagtgaaaaaatgccgcaagacttggcattggatttggaggagcttcgccacctccacagcatcgtcaaaagacctcgacctctctctctactctcctccgaaattcgcatcctcgaaaagttatcgtcatcagaggagccttctgcgcaggcttcgccgattccggcgccgattaagcacggaactaaggtggcgccttcagttgcactgaattatgtcgcactcgcttcgttcagttgggatcag

SEQ ID NO: 99992 - DNA, 116 bp, Glycine max
gtttgatgatgtttggagacggaggggaagatgcaaacgcgtcgttgtgaaaactgacaagcccgggggcgaaaaagtacgcgacgaatgtgaaacagcaccccaaaattgttgtg

SEQ ID NO: 99993 - DNA, 174 bp, Glycine max
tctcgcgcttcgcggattacccaagaagaacaaacaaccaaccaaacacagcaccctcaacggggcgtgagagagagagagacattgctaaaagacaaaaaatactcgaaagaacaccatgaaagttctgattaacaatccgaaaccatttctctcatcaccaaactccatttt

SEQ ID NO: 99994 - DNA, 269 bp, Glycine max
tcttaaaccaagccacaaatcaaccttgcaatccaaataattgaaaattccataccagacagtgtttcaggtaatcccaattgtcccaattttggattctgaatttgaagcaggccatgatgctgatccaccagtatgtattattgatgctgatccaccaaaatccaaaggtgatctggaatcagtcttgaaggcttgagaaagaggagttggagtcatcactgagcaaggagaaccagcaggttcttcaattaaagcaggatctggtg

SEQ ID NO: 99995 - DNA, 286 bp, Glycine max
gtctccaaagtcagacacagaaactaaaattgtataagaaccaaaccccaaacacttcatttttccaaattttcaatatcttcccttagtttcctccttcctctcaagcatgtctattgcttcatcatcatcatcttcttcttctatttgggtgttgtctaacataaaacttcagttctttggccgcatcagaaggtttctccaatccaaagcaaccaaaaagcgttatgacccctctgatcggtttgacacagctaagagcacagttgaacacaaaacaaggttg

SEQ ID NO: 99996 - DNA, 291 bp, Glycine max
tggaagatgaacttgaacagagtactgaagttcaaataatatatccagctgagccaaagccggtcctccggggaattggattgggaattagatgaccttgaggagttaactgataagctcatagaggaggaggagttatcagaagatcaaaaggatgcatttaaggaatttgtcaaggaaaaggttcgtgaagcaaagaaagctaatagagaggcaagggaagctcgaaaaaaagccattgaagaaatgagtgaggaaactaaagctgcgtttgagcgatgagattttata

SEQ ID NO: 99997 - DNA, 277 bp, Glycine max
cagcgtagtatcagcactcagcagttcaagtaatactaaactaaaactcaacagaaaagtgtttcatttgtttctcccaagtcagaacacaacacaacctaactaaacaattctgtcgatcgctttttccttcttcactccactctcttccaaatccgttccatcgtctccctctatacaccttctctctgatttcgcctcactcccctccgccgccccaccgttcgctatttacctctctgctcctccgccggaggacctggcggcgatccttcgg

SEQ ID NO: 99998 - DNA, 275 bp, Glycine max
aaatgagtctctctttttgttccttctaaggctaagccttcctagatagtagatccctttacactttacggattccaatattgtcaaactcactgtggatgaggctgcagccatgcattctaaaccctcatctatcacttccaattaccctctcatttctgccattgttgcttttgctctagctcaatccatcaagttcttcaccacttgatatgcaggtttaaggatagaagatgggatctgaagcaattagttgggtctggtgaatgccatca

SEQ ID NO: 99999 - DNA, 180 bp, Glycine max
attcattcgttcatcatggttcggttcagcaacaacgtgatcggactcctgaacttcctgaccttcctcctctccatcccgatcctggtggccggagtgtcgctgagcaagcaggcgccaccgagtgcgaggtggctgagagcgtgatcgatcgcgctctcatgtcgctatgcggctgcg

SEQ ID NO: 100000 - DNA, 282 bp, Glycine max
atttttgaaacagagaaacaaaaaaaaaaaaaaaacctcttccaaagtagaggcagagaatctgaaagctagggtttgggatcccgaagaacaagggaaagggaggaaagacccggaagcccggtaaaaacggggcggacgccgaaaaccggaaccgggtatccagggaggccggacaggattacccgaaggtcccccgaatccccgaaaacggtcgctgcaaacgatgtgcatcgagggcacaaagcgccttggcaatacccggggaaagttccacaaaaa

SEQ ID NO: 100001 - DNA, 153 bp, Glycine max
cggatcggtcgagctgtatctgtttgcagtaaacagaaagcttattgtactatttggaacttatattgacagatatcaacagtgattcacgggaagagtgtgcttcagcaacaagcacatctgagacaagtcagtacgtgagcatcaggtgtc

SEQ ID NO: 100002 - DNA, 114 bp, Glycine max
cgacgaagcagcttccgcagatcgccattctgggagctggtatctttgtgaaactcagtacttcggcatctcggtcttcactttcattgaatccttgagcgatcagatcagtaa

SEQ ID NO: 100003 - DNA, 193 bp, Glycine max
cggcagagcaagaacacaacacaagacatcgaagcagaagaagacatggggttgcagtggctgattctccctacgtggtcgagcgaagctgcggtggcattctgctacccttccagccaactcctgagaccgtttgcttctcgttccccatctcacccggtttcatgtacctgcaggtcactctaattatatg

SEQ ID NO: 100004 - DNA, 132 bp, Glycine max
  unsure (1)..(132): unsure at all n locations
ggatcgagagtaacgtacaaaccagtttttctgtctgcactcttactacattancttacattacatacacacacaaacttcacttctgtcagaagagctaagacaatgtgtgagtttaaggcacacacattg

SEQ ID NO: 100005 - DNA, 180 bp, Glycine max
cgcgagtgtcgcccttttttttttttttttggggaaaaaccataggcgaggcaagccgagatatgttacttgaaatgttaaatgaggttcagtaaaatacctagaaagagatggaatttggttaaaaaacccggttcccctaaaaacaaatttcaaaatccttgagggaaccttttgaaa

SEQ ID NO: 100006 - DNA, 228 bp, Glycine max
  unsure (1)..(228): unsure at all n locations
cgtccgacgtaccangcagctccccancatctagcttagcttttcaactttcaaggtaccttatcctcctcttctgttttcgattaagatttcggttgttagggttttctgctatttttttgttatcgatcatcggatctgtcgagctatttgaattttgatcgggattttttttccgggtctttgatttacccgttcatatatttaggcaacttgggacccgttttg

SEQ ID NO: 100007 - DNA, 280 bp, Glycine max
  unsure (1)..(280): unsure at all n locations
ctggggttctgtttgttttattcaattttatctttttcgttcatagttcaaaaagtttaaacggtcttagatttaggagtattcttctaggaaaatactaaatcccaattcccatttccaacaacaatatgtatcgaactctctcacttttcggngcaggtccccttgttgtgtgtgacgctctcgcttgcatcagaacctactatataaacacagcgcgcgctcgaaaacttcttcaagtcaaaaaaaaaaaaaaccaaaatcactcaataggaagagg

SEQ ID NO: 100008 - DNA, 264 bp, Glycine max
cctatctggggtttgcttccttttgtgtatgtgtgtgtcggtgattactccttcttcttcttagatctgaatagtttcagggtctaaaaaaaaaaactacatcctttgcagtttgcccataagctgagggattatgaattttccttgcgttttggaaacaaagcttctttttgttataattattattatttttttccagattccgtaggttgcggctgtgtgaaaagggtaccagattccttgcaaatgcttcttgattaaatg

SEQ ID NO: 100009 - DNA, 280 bp, Glycine max
tttgattctgggcattgcaactgtgacatcaaaattgatggatcgctatccaaaattggttactacagaaaacgaagagggattgacacctttgcaaatgctgcttgctcgatgttcacttgtacgtcgagatattgtaagttcgttgtttaagggtatggaagaagagaaagagcctctcaactctgaacaattgtcaaaagtagtgttcgatgcagcaaaatcaggaaacattatgattttagaatgtcttttgaaatatcatccagatttgctattt

SEQ ID NO: 100010 - DNA, 193 bp, Glycine max
cttctgatacctatactaaccactaattcattcgttctttcttctcttcaccgaacgacattagttagacagtagaacctgtacatttcatatattttcatcatcgcaacaaaggcatcaatcaatcaagaaccatggcaggctacagtggcgacgagaccgcacctttgatcggcttactcggtgcagatgc

SEQ ID NO: 100011 - DNA, 110 bp, Glycine max
atctgacgctttttcagcggaggcaacataactgcgcacgtctgggaaccctattttggtgcacatctcaagaatcagagttttctttaccactatcaggtttcggatta

SEQ ID NO: 100012 - DNA, 109 bp, Glycine max
caaaaagaagtctgatcctgtccagtcattatgagaagcttcagcagtctacgcagaggagaacatagacaagtaccagctcaaaatctctcagggagatcactagatg

SEQ ID NO: 100013 - DNA, 242 bp, Glycine max
tctttaccaagcaactattaagcaaggggacttcctattgaatcggatccagaaattgtcacgtgtgatagatctttaggtcattttttgcattttagactaaaagtttattggaaaggcagagataacgacaatttcacggtattttactacgagggtgaggcacggcatttctgtagtccatttgatgtgcaaatatgattaattaaatttgccaaatccacatatatcaatcagttttc

SEQ ID NO: 100014 - DNA, 259 bp, Glycine max
actaaatgctactgctaagcttgtaatcttcaaagacaagagtatgcttacttactgcttagtatacagttaagctagtcataagtggtgattcattcttgtctatacttcatagggatgctcattttgttgttgttttggttcattcactttattggcatgcaaaaatcatgtaaccttcctatgtcttgtttagtgacggacgataatactcattccttggttggttgcgagaatgattattccttgtaaatggaat

SEQ ID NO: 100015 - DNA, 257 bp, Glycine max
agaggccccaaaagctgcacacattgcccttcctgtccaggaatttgagatctagcaactaacaaggcaataatgaagttcttggttcagtgcccttgctgctcttgctttgcttcatgaagcaaagcaaggaaggcaaagtcaagaagtccaagaaccaaggtggagaaaaacaggttaggaaaggaaggattgaccttgtaactccatttcaagcttcctttggtaatcattagtattatataggcatgcacaac

SEQ ID NO: 100016 - DNA, 208 bp, Glycine max
ctcctttgtgcaatttggacagttggtcacctgtaaaacttccacctgtacctagagactcctcatctcctgctgtcatagataaagaagagcatattcaggaagcaatggatgctgatgtaattgaacgatctggtgccacaaaagcagaaccagagagtataacagaagatggggagcttcccaacggttgtttccaaaagtgtct

SEQ ID NO: 100017 - DNA, 260 bp, Glycine max
ctcacctcacactctccaaaccctagcggcactacacacgttatctctctctctctctctctctctccctctctccttccccaagatgtcgagcggcgatcccgaagaccgagaagtagcagaaggcaccggccgtcgcgaggaggaggacacgggagaacaggtggcccccatggtcaagttcaagaaggttcctgtcaccacgggcaaggaggaggaacatgcaatcctagatctcaaatcgaagttttacgggttcg

SEQ ID NO: 100018 - DNA, 273 bp, Glycine max
  unsure (1)..(273): unsure at all n locations
attctggttttcaacaaagtcttgttgaaaatgctttgcttggtctgcaatctagacanaaagaatgacagttacgattagcaaaatgtgtacattgaaatacatgcagccatgacgtcaggatctggatatccatagccaatgcgcaaattattanccttgaggattttatcttactttatgtttcacggattggatgtaagcacgccacaatcaatcttcaaatacttacctattctttcattcacagagagttatatttatcagctagat

SEQ ID NO: 100019 - DNA, 254 bp, Glycine max
gtgcaacaagtggaggcttgaatcaacaaagaactggagtaaatctctggactcttgagattattttagtcaaacaaggaattgttcatctcgaggtgcctgttcaaaagtagaataattcattttcaacttactttcatgtaccaaatattaacgcgcatgcatctcactataagttgatcgacatttgggataaatacttattatcatgagttgtttaaattgccttgtaaatgcacacaacatgcgagtgg

SEQ ID NO: 100020 - DNA, 264 bp, Glycine max
attgcaagaggaaaagaagaagaaaaaaggctccaccgaaatcaatttcccacagaatcaaacaaatcgttggagttggaaaacaaaacaagagaaaatgggtggacgcaagtgtttgttaacgttggtgttgagtttggtgttgatgatgagtatggcagaggcgcaatctggtactagcgcagactgcgcccaggagctaattccatgcctggactaccttaatggcacgatcaacccaccaagctcctgctgcgaccctct

SEQ ID NO: 100021 - DNA, 209 bp, Glycine max
cactagtgctcaaggacttggcaattgacttatcattttcaagctgcttctatggccacaacttatacaagcacaggagttaccgaattacatggcacagggacccatacatgctctgaaagtgatagtcagtaaatgaaataacccataagataagtagaggggtgtggaaaatgtcagctaacttagcatgggatggggacatagta

SEQ ID NO: 100022 - DNA, 232 bp, Glycine max
gaacaagcttgcatctttgtcttcacattaatgaagtaacaataatatcatgatgacccgccgttgactgtaggagtagttacatgatgctattgacggtagtttattctcggggtggcaacggttgatcctcctgatttggaagcaaggatgcatccttggtgtccacatcattgaggtaggcatatatcatgatgttgctggtcgttcaaaaaaaaaaaaatgcaaaaag

SEQ ID NO: 100023 - DNA, 231 bp, Glycine max
tcagatcttaacccctaagaaaagtatcgaaaaaagactcatagtccatcacccagcaagaaaaaagaaaatcgaagaggaagagcaaggacacaacacaaagaaaccaaaggaggacttggggtgcagtgggtgaatctaacttaagtggtcgaagttgaggttgcggtggcaatcctgtaaaccttccaaggccaaaattcttaagggacggtttggcttctctggttt

SEQ ID NO: 100024 - DNA, 256 bp, Glycine max
  unsure (1)..(256): unsure at all n locations
cacttgccatggcagcagcagcgtcaatgtgtatgagcttcaacatggcaacagcattcaagggtctctcttnttcttcttcttcctcatcgttctacgctggacgtagtagttatgctctccgagttggtaccacatcggtggtgtcattgaaccgacgctgcacgctgtccatagagaacgcctatactaagggggtgggtagcaccatgaacggctgcgactcgcatggcaagcgtctcgtagtcaagatata

SEQ ID NO: 100025 - DNA, 271 bp, Glycine max
gagcttggttacactatgccatgccttcccttcccttgcaagactaggcgcttcattactcaatactcactcatcctcctaaatctcactacggttctgtgctagctaacgtgattaggatggcggtgcaaggagagctagacaggttcaagaagcagcaagagaagtgccaaacgacactttcgagcattgcagctagtaaggccgcggcaacccaaaaatccgccgctcatggctcggccaatggaagaaacgcggcccctgcggttaa

SEQ ID NO: 100026 - DNA, 105 bp, Glycine max
caaaagccattcgtcatgttcttggcggtggataaccggctgatgtttttctatggagcgtacaaggagatatccgcatcgacactcggatttgcgaccgctata

SEQ ID NO: 100027 - DNA, 258 bp, Glycine max
cttcacttacctccatattgatttcaattattcttcatcacaattgctttgttacttttttgtttactcactcctttggttttgattgttgataagttaattaatctttgagaaatttgatgtttaaattgctagtttggtttagagagttcaattatagctgcggtttgtttgatcgttaatggttctgggaaacatgttatccaatctttcatgctagaaattggtgagttcggagtctgttgctatcattgtaac

SEQ ID NO: 100028 - DNA, 281 bp, Glycine max
cattcattcaatttctttcttcgcttcacgcattacatcatatcatataaccctttttcgatccttcttcttcttcttcttcttttctctacaatgccacaaccactcaccttttccttctctccttgaatgctgttttcccttttctgcgccatgcccttcctcttcctcttccttctgcttctctgtacacttgaatcccatagcagtaatcatcttcaaggtcctgtaagactggatagccatgtgggtactatgttccccaaaccctcacctcttgg

SEQ ID NO: 100029 - DNA, 104 bp, Glycine max
gtaaaacagattgatttgagatatagatggcaattttcccttgtgattatcttgtagaatttataaatcatttttctgttatccattttcattttattgcactc

SEQ ID NO: 100030 - DNA, 268 bp, Glycine max
caagtttgacagcatctgatacaatcacggacatttgtagtggatctggttcaatcacagttgatcagttggttggtaccttctcatctgatcctagtttgattgcttttgcacaactctgctgtgacccctcttggtataatagatctgatgttgatttcaaggaattctgcttgcaagtattatttgagcgtgtgaccaaggatagaccagctctgttacaggtaatgtgcttagaaggttaatttgtatttcctaaattcaataa

SEQ ID NO: 100031 - DNA, 273 bp, Glycine max
acttaatatcaccatgtctttcgactcctcaaaccacccaattagtcctgacttgtattgcactgaagtaactagcgaagtgattcacttggattccgatgatgaggctctgaagttcaatgttctatggggagactctgatcatgatgatagtgatgatgaaagcattctattgaacttgttagaatccgaacacaaccaagtgcaagcacaaacaaagttcctaggacaacaacttcgcaaaacaacatggctgattaatgctcgagaaga

SEQ ID NO: 100032 - DNA, 253 bp, Glycine max
ctaattttactgtgtctaacttcttggatggagatagttggctgcctcaaactggagttccatacgtgactggattgatatagtcaaaagttacaagctagctggttacgtataataagagcaaagttgcttaacaattcttttaatgctgctgcatgtgtttctctattgtatttataaatgattaaatgcaccgctactctattgtaagattgtgattcactcattaataatatttacaccacttatattc

SEQ ID NO: 100033 - DNA, 203 bp, Glycine max
caaatcaacactcactgacatttgcaaggaagagggggagagaaagtgagggggggaaaggttatgctggtggtggtggtggcggtggcggcatgttttgtggattctaaaatctccaacactcactccctcttgctctctctatacaaatccaaacgtcgtgatcatgaattcgatccgcaaatttggctaatcaagtgcct

SEQ ID NO: 100034 - DNA, 264 bp, Glycine max
caggcacttacaatgcttccaaagctgctcttcatgctttcactgatacattaaggtattaaaagtaattagcaacataacccatcttgttctaatgttcttaacttcttatacaagttgctttgttatgttatgtacaagctcagagatataaggttggcccactagcagagaaagggtgaatccttccaatcccgattaacatttcaaacaaaactaacaaattaacatttgtcatgtcatgtacaagctttttaggcttca

SEQ ID NO: 100035 - DNA, 257 bp, Glycine max
tacagttatgtcggtggattcaaataaacccgctactagattatcgaggggtggaaaacccgatgccgagcattacaaagattctaagtctgctgccgaagcagcagctgaggcagctaagcaagcaattgctgctgctgaagttgctgcttatatggctatgaaggactataataatgaagctcctcaaccatatgcttacaatgataagttgtataactcaggagtcaactctgggaccttccaatcaaacaatc

SEQ ID NO: 100036 - DNA, 261 bp, Glycine max
tgagtttatgtctttgtttatatcaccaatttgctatttgtaattttaatttatttctgctagttgctggttttaattttagtttatctttttccctaactggccttgaaatctttaattgtaaattgctatttgcttgtttggttttctctgatgacttattttaaagaatctattagtatcaaataagagcatggcatctagtctcacaagaataagcacaaaagacgccgaacagaatttgagatttttgcttccagt

SEQ ID NO: 100037 - DNA, 231 bp, Glycine max
  unsure (1)..(231): unsure at all n locations
ttaggctgggaactgnatatccgcaattctctctctcccgataacgccacagtacagtttctctgtatttcacagtacaatcaaatgtcttgtcgatctaacatgggagataatgttggagaatcaagttagctaatgtcgagattatggcattgggaggactcatagatgaatggtcttaaagtgatccgaagctatgcgatgaggcatcttaaagaacaggacatttgg

SEQ ID NO: 100038 - DNA, 162 bp, Glycine max
cttttgtgttagtcgagaaaagttctctctgcttctctttcttagactctaaaccctattgcctgctttgcaatcgatcccgagtatggtcaacagtaatctcccttgatgattcttcgagggattgacaggcagggaatattggattggctcatcttgagt

SEQ ID NO: 100039 - DNA, 145 bp, Glycine max
ctcgcttgtgctgccttcgtttgcctttttatcacgacaggaattaacatatgatatagctaagcactggcagtacacacttctaacgagccttaagctgctttcctgctgggggttggagcaaaagtttggatgaagtaacctt

SEQ ID NO: 100040 - DNA, 291 bp, Glycine max
cctatttttcctaatcccatttctctctttctcgttctcttgaatttctagggttaccgttggaaccactcgccagtcacgtacgtacggaggctctctcttcctccgccatgaactcacggcaatcctctctgtcgccctgtgacatctgcggcgccaccaaaccctatctctgaccatccacaacatccgccaccgcgcccacacctgccgccactgcaccaactgcgtcctcaagcagcatcctggcctcttctgccctctctgcttcgaactctacgacgactcgcc

SEQ ID NO: 100041 - DNA, 237 bp, Glycine max
ccacaccttaaaaggagttgggaggatgaagtatctccgtccactttatactgctcttgtgagaggcagtcggaaggacaatggtaaagtatttgccacaagactattttcagaggctcgtgaatgtcaccatccaattgctcacgggttgttaaggcgatatttgccaagcatctcgagatggtataattctcagaatgtgttatgtatttgaagatctgcaagttctctgagtgt

SEQ ID NO: 100042 - DNA, 127 bp, Glycine max
gtgtgaaatcgtgacacctatgcactgaagaacaagtaccgaaaccttctctataagacgacttcatcagcaaacatgaagtacatcagaagctcctgcatcgacatggggtggtaatggtaaggaa

SEQ ID NO: 100043 - DNA, 251 bp, Glycine max
gtctttagctcgcgagcatggaccaaggccattactaacggacctgcaatctgaccggaaaaatgtgaaatggaaaaagccggaggaatcaaagatttaaactcgccatccatcaaaggtgcggaatggtttcgagagcgagtggtatcattgggaacgggggtgtgcatgtgccagtggtcaaaggttgtgcaagtctgggagtgaacctcccgtgtacgagtcgagaggaccacgaagcgccgtgctcg

SEQ ID NO: 100044 - DNA, 254 bp, Glycine max
atcggctcgaggccgaggcgagttgtgaatgtgagtgtgttttctcttcaaaacgctctcgcggcaacacacagtttatatgttcttattctgtattgtgttttgttaatagtgagatgagtcgtgtgaacatcgacaacgtcacgtcctgtttaacaatggttcctttgtgactctctttaagttcgagatttcgtacgagtgtatcaccgctctcaaagatgatttggaatggaatctcatttatgttggat

SEQ ID NO: 100045 - DNA, 150 bp, Glycine max
ctcttttctcttctctgtctaaggggtgcctgagatcacattgaacaatggtgaaggtgtggccgtctggcagatgagggtcatggatatcattcgttcagaggatggcaacacgaactggtcctcgtggctacctgctcaggttcatgt

SEQ ID NO: 100046 - DNA, 276 bp, Glycine max
gtgacgtacgtagctgcaattgtgacactgccacagattctgaacacatgcaatcaagtttggagtcacttctttctacctagttttttctacttcttttaagtaaaatgacatgcagctaaattatttggaacatatataatttacccttaatatttctttttcatgtttacatataatgactagatataattactattagagcgtgtttagatctaccttgtatttaaaaattgtgccatttccacattaattaacaagccactttctatggtt

SEQ ID NO: 100047 - DNA, 269 bp, Glycine max
ataatgtttacctcttcttcattggcttgctgacttttggaatagttgattctcttgcctcatcctcaggtgctgattggaaaaaagttgcagttcttggaggtattcttgtggtcttgttttctctgttcatcaatgaacaaaacaaggacaacaagaaagactaacaatgaaaaaaaaaaactcaagttcatttcttatgttgatcaaataataagaagtttcttgggggaagacattgtgaataggtattgcatgattgaatatat

SEQ ID NO: 100048 - DNA, 261 bp, Glycine max
cctaaagaccctcatggctaatagacgttatccactttcaaacatagccagccaatccagaccagccgaaatctagaccaaatcagagaacaaaggatgatgtggaagataagacgaagccttcagcacttgaagttgcaaccttgctcgatcctcatcatgggccacatttttactcatcactctccctctccactcatcaacatgcgaccttcaccctcaagaattctcatggctcgctatccccaaaccaagtcacat

SEQ ID NO: 100049 - DNA, 204 bp, Glycine max
ctcgctgcagagctgcgcgttgatctatcgcagtggcgaggataaatgcgtacgagttactgtctaagacgatggcggagctactgatgcagatctaggatctcaaggcggctctagccctgcttcgcgtccgcaaggttacaggcggcgccgcgatcgagctctccacaattaaggtggtgatgctatccatagcgcaggttt

SEQ ID NO: 100050 - DNA, 210 bp, Glycine max
caaaataatggcacctgcaacacatagtctctatctgctcctcctgttctcactctgcatcgtcgctaccgcgagatcgagcgacatatgtaccgactgtgtgtacacggcgtcacgttagaaacggttcggtgttcgaacggggccacgagatcggagatctggattagtcggaacgaatagttgggttactccatctgcactggaaac

SEQ ID NO: 100051 - DNA, 274 bp, Glycine max
cgcatttcatccaagcctaaacctaagaagaagaagaatgaaatcactaagaggaccaagctgactaatgcccatcttccggagctttttcagaacttaaagtaaacaattcctgactcaaggaactcgtggcaattggtgaatgaattcacatagctcatttgttgacatacagcatgtggatagaaagtcttcatcgttcagatggatatgcgctttttattgtattagcatactgcttctggttttggatgggtacccaattggatggtaa

SEQ ID NO: 100052 - DNA, 221 bp, Glycine max
atcgatacgttgaagagcaggggctatgtctaatttctctgatactgtagaggaagtgagtagaatgttacaagtggtggtggcgttaatattattgttctgccattgctttgagtattgttatgcatttatgttttactaggtttgtgtgtgatttggtgaatgatctagataggtattggtagggtgtagtatatgttggaagttattattgatatatg

SEQ ID NO: 100053 - DNA, 182 bp, Glycine max
actctcttttccattccatgtgcttattttccaattgaaaatctagcatttctcgagtatcgacacttgatgcttaatcaaattgttacattgcttgaagtatgtgttggtggttatccttatgtcttgtatcaatttgtgcttgaagtatgatgatactcgagaaatgtgagattttcaat

SEQ ID NO: 100054 - DNA, 205 bp, Glycine max
cgccaacagcaagccccacgctccctcctccgacccacgctgggccgccatccaccggatccgatcggagtcccccagccgccgcatcctcccctccgacctccgcttctcacgccgtctcggctccggcgacatcagctccgtctacctcgccgaactcaacgacgggtccctctccgtgatgttcgccgccaggtgatggaca

SEQ ID NO: 100055 - DNA, 298 bp, Glycine max
ctcatttttaaaaagttgcagttccacctggagaattgcatacgtggatataggaaggatacaagattactgcttccgtaacactattagatatcctaaacttaaagatgtggtagagctgttggatattctgattattccaggttctgacaatggcacttcgatacccaaaatatttgaaggcggcgtcctaattaaaaatggtattgaagtgttcaagcagacatatgtgatgctgttcttttcgagccttgacaacattggagatgagatatctcttttgaattccatcaacaac

SEQ ID NO: 100056 - DNA, 147 bp, Glycine max
ctcttggaagaattgtctttcccttgcggacattcactctcattcttcttgaaaatttaagatgagtatggatagcttagtattaatgtaatatgaaaggttcggtgtgaaacatcttatttttgaatgtgttaacttttctagcta

SEQ ID NO: 100057 - DNA, 261 bp, Glycine max
ccaaaaacaactttgccgctgcgtgctgctaatagcgcgttgcatctgctacctatcatacatattttctccaaaccgccgattccgttgagcgtttctaccgtagcgctcagccgtgacaatctgtgcaagaactgcaagacacctggtcattatgcaagacaatgccctaatgtcgcaattcgccacaactgtggcctccctgggcatattgcttctgaatgtacgacaaagtcactgtgctggaactgtaacgaacct

SEQ ID NO: 100058 - DNA, 273 bp, Glycine max
ggacactgcggaggctgaacttgcaaggaatgcgttggaggagcaggcgtgggatctcgacaccactctctcacacaaaatcaaagacctcgaggctctcggcatggagtgcaaccaagcccttaagaggttgaagattggtaatggaattcaatatctgctgaatgccaagggtactactcctgctgagataatgggaatcgatcacaaacttgtgctgaagcctgcacttagatccttttctgatgaaatcaagaaaagttctatggaaaa

SEQ ID NO: 100059 - DNA, 233 bp, Glycine max
gttttacacatgatctaaatttgccgaacattgtaaaactattgagaagtgaaacagatgattttcatatatttttctttattttggcatgttatgtatgaatagaatcgatattttgcaatgttacttcctacatgttcttttcttttttgttgtttatgatgatttacgaaatagttgcaattgtttgagaacggtatgtgataatatctaagatttttgcactcagcaaa

SEQ ID NO: 100060 - DNA, 203 bp, Glycine max
agctatcttcatctgcttctgtcacatcaagcattctcataccgcttctcagtttctcattttcccaatcgcagctaaaaaatcctttgagcctttaacctattctcaataagcagaattaggagcaacatgctcagggtgagatgtatagaatgctgtcataggtcttaccacgtgttgcacacaggatgcctgaatattct

SEQ ID NO: 100061 - DNA, 222 bp, Glycine max
tgcaaagtgagtgtgcgattcagtactgagtagaggtacatatttccaatcggagtcggagcatctgcgctgcatcggttgcgatcaaggttactggcaccgatactgctatttgatcttcaaggtcttctgtatgagacttgtcgcgtactgtcgtccatagcagtagatgcgcgacaacgccattgtcatggtccgcgacgttctcatctgaatgctgat

SEQ ID NO: 100062 - DNA, 110 bp, Glycine max
gttgaaggcgacctcaagcgcccgagacaccatcgattggcagccaccgcgctgtcacgcaaaggggaagtgtccatacgcgtgagtgcggggcttcccgctataggtcc

SEQ ID NO: 100063 - DNA, 267 bp, Glycine max
cggctcgagaacttttgtttatttaatagtaaatggtgagtgtaaatagcaaaagctgataaacgtggcccaagaaacccaaataatgttcaataaatcagtggccatgcgaggtgatcaaattcaaatgaaaccaaattgctaagaagcttcagatcactaatacgacgacgcattacagaactaagggttgtgttgtgtcgtttcgttttcactctcacgttctcaaattttgtttgtgtatcgcaggaattaggatccgttatg

SEQ ID NO: 100064 - DNA, 265 bp, Glycine max
ctcgagccgtctgagcagaggaagccacggcgcggctgttccctttccgatcctttcactcgcagccgggacggtgacggcggacctcctttaatggcggctctgcccccagagtccccgcgactgaaagatggaattcgccgttggaaccctgcaatgaagactgcccgcggtcagagcccctttctctgttccacattgcttgagggcagtgatggccacgcgggctctccaaatttatcattctctattttttttaatttct

SEQ ID NO: 100065 - DNA, 234 bp, Glycine max
cccgagcccgactagttctagatcgcgagcggccccctttttttttttttctattactattacttttttttgtttttttttccaccccttagagaactttcccatcttctcctggacctcttttcttcctcaaccgaatccctgagaattgaaatccaatccgggcaaaacaaatggatcttcgaggatatcaagagcccttccatgaacgttggcaagtacaaatcgttaacc

SEQ ID NO: 100066 - DNA, 254 bp, Glycine max
gcaacattgaatagaaaatgcacctcagccttcctccatttgtcatatagaagtgtctcaaaatcttgcttagccgactactcaaaccttttaggacgtgtgcaaatttttttatggtcatccactaatcaagtgttgatcaaaatggcttctatttgtgagatggtattgtagtcctgacataaagaagggttcctgagtgataaaaaaaatgatttacgacacggtactagccaaaagctttagtcgttatg

SEQ ID NO: 100067 - DNA, 254 bp, Glycine max
aaagatgaagaagatcaagatggagatcatccagaggatagtgaagacaaagatcaagatcttgattagtcacagtgttttcacgtggtggtgtagtattcaagttgtgtagtagatccataacactgcagaactgataggtgccactggaaaattttcttatcaagcattccagtgttgtggtacaattcatttgcttttgttaaaatacagatctagagcaatcaaacgttgttcattttgattaccaattt

SEQ ID NO: 100068 - DNA, 253 bp, Glycine max
atccggcagaggaggtggtagacaaggtagtgaaggaagcaatgagccagccatggctaccattgcccttaggactcaaacctccttccatggatagtgtgttggctgaactctccaaacaaggcatacccagcatccctcttggcaacaagggttcttctactcctaaaccccgtcgagatgtacgaccgaccccgccaccgggtcccacatagtagtggttttgatgatggggccagccagttacatatca

SEQ ID NO: 100069 - DNA, 121 bp, Glycine max
ccgagattttaatcgttgaattttgactcttgcactatacaactttattgtggctgtcatattcatgaagtaatctttctattccttacctagtatttgactgggtttttggttttcgtac

SEQ ID NO: 100070 - DNA, 247 bp, Glycine max
gatcattgtagatggatgatgacagcgatagtgatgaggagagtgatgaagagacccctgctaagaaggtaatgatattgctgttgtattgtgtattgttttgtttggtcacatatgttaatgtcttctatatgattggtgagtagtgagcaaacttcaccagctcttatatgtgactttattttgtgaaggtggatcagggcaagaagagaccaaatgagtctgcagcaaaaactcctgtttctgc

SEQ ID NO: 100071 - DNA, 274 bp, Glycine max
tttaaaattaataatcttccatcaacgttgaatcatatgaaccgtcaacgactattataaaattcaaattttaattataaaattaaaattttaacctaatgactcttaaaagttgaagtgaagtttacttttatatatacaatgaatattctttggttacgggatagaattcatcaaatatccccaaaatcaaagtgtaatgtcacaacccactagtattcaccattatggtaaagtcataagctaacactgctggaaaatacagttaaaaact

SEQ ID NO: 100072 - DNA, 273 bp, Glycine max
ccaaaatagatcagttggcagtatgaagaatttgcctcacttatccctatgaagtggcctatacgtaaatcactaattgatttgatcatgtctcaatggaccttattgcttctctatgtacatgatggagttcacatttgtcacttaatgaggcacatcctaagcattcaacctttcagatcggctgcatgctactaagcagcacttgtgtattcctgaatattgttattacgtactattttcctaacaaaagaactgtatgagtatgacctt

SEQ ID NO: 100073 - DNA, 269 bp, Glycine max
cattgggggtggtatgcacaagtttctcatgtcacttgaatccggccatagtagctgtccacaatgttttctcgcagatcaagtggaagagtggctagtggtagagttgcattagaaaatggagtcccattaccacgttgcctgatcctaaagcaaatttacaatgggatgaggttaaaccactttcaggaaaaccatactggcatagtgttctttcgcctacaaatcttcaaccccgttataacttgatgccggggatgaacttgcgg

SEQ ID NO: 100074 - DNA, 268 bp, Glycine max
gacatcgagcgaatcggctcgagggctcgaggcaatctgtgctctaagtaattttactgtaaagaccatgcgctgctaaacatgttgagagactttatatcatacctagggcagcctttttctggggttttaaggaaccctcggttccatggcttggtggccttcccaggccagctgtaagttgaatcatccaatcatccggtttgaccttaagccatgtgtcctaaattatggtcattaatttattttatgaatatttttttttgtt

SEQ ID NO: 100075 - DNA, 273 bp, Glycine max
acacaacacaacacaacacagagagtagtgagtttgtgacaaatcctctgtcgttatctcaacctctctcaaaactttggtctggttctgtaactcattccatttttgtgtgttttgcattggattattatctgtccacttcccaggttcaactaacaaaaactcttcctttgaatttggatcggcttaatcctgcttacaatccggtcctttggtcaatccggtcctccggactgaagtgttggttgaactggatcctttcttcatccattt

SEQ ID NO: 100076 - DNA, 233 bp, Glycine max
gctgataaaaaatttgaagtgtgaattggaatgtatggtgtagatctggagaggtcgataaaccccaatttgtttgcttagtcggcaatgaggattctgcaacttgatcccagttatacctcacggatgaagacaaccaagcattgctttccctgcacgacactttccagaagtgtgtgagtgccaatgggccttggcttaaaggcaaccaggggcccagattatggccaaac

SEQ ID NO: 100077 - DNA, 99 bp, Glycine max
ctaaaacttgtggatatgatgattgacaggttaaaatgtttgccagacgatgaactctcttctcttgccactatagttgccacttatggtttgaacgct

SEQ ID NO: 100078 - DNA, 255 bp, Glycine max
ctagatttcccgcgtcatcttctctctctttttttctgtgtgtagtgtgcgaaaactttgatgagttggtcgacatgcagagagagaaagatggtgagaaaatggagacgaagggaagggttggtggcaaagattgaagggaacatatgggacacgttagtgcatgaaactgttgtggttatggattgttggggaaatgctaaaaaacaaaaattattactatatgatgaggatcccaaataacatcacctggtt

SEQ ID NO: 100079 - DNA, 123 bp, Glycine max
gtcatcaatgacaacaatgaagtgcttgtagtacaagagaggcattgttctccaacaactcttggtctttggaagataccaactggattcattcttgaggctgaggagatatatcaggagctg

SEQ ID NO: 100080 - DNA, 181 bp, Glycine max
gttttgtcgtttgcttctttctttgattaatgatgactagctttaaggttgcatgtgtggttgcgatgatgtgcatggttgtcgccatgagtgttaaacccatgggcacaggcgcaatcacgtgcggggaagtcgccggcgaagtttcttcgtggcttcagtaacttcggaagcggcggaa

SEQ ID NO: 100081 - DNA, 262 bp, Glycine max
ctttgttttaaaccgtaggaatcaaagacagataacagtgttttgttttttgggaccgcaattttggatgcagcgactatgtggccaaagttgtcacgaatttaaccccaaaacttcaaggttgcaacggaaccgcgaccatatagccacttaaaaccctgggttggtccttaatcgggttcccggtttggtggggtagggtagaaacttagaatctactgtgtttatgacttcaggaccaaaattgcgtcttgaggttgtt

SEQ ID NO: 100082 - DNA, 141 bp, Glycine max
ctcagtcaaccaattgggttaggtgttcaattttgagagacagactacgatacccggtgctttgcagtctatacagctcatacccaccttgcttactgatattggaatgtgtgtatggatggggtgttgcatccccaattt

SEQ ID NO: 100083 - DNA, 243 bp, Glycine max
ctttcttccaattctagggtttctctctccactagggttcccaaatcctctccaccccagccccaagaaaaaaaaacatggcctccgaagccctagaagatacaaagcctcccctgaaggttgacaatcacgccaaatcggagattcccgggaaagacgcttcctgggacgccgtagcggcgaaatccgagaacgcgaatcccggcgataaacacggaggagctcctggaaatcaggaagtag

SEQ ID NO: 100084 - DNA, 237 bp, Glycine max
aaggaatcaaaacaaagagggagacagtgagaaggtgagagaggatcctcatcggaaatatgccggaaaaaggtgcgggcaaggacaaagctacaatagagttaattggaggaatcggaaaaacataacatcgttttacttcacttgattccctgatgacgcgtcggagaaagacccatggcatcatttcaaattgttcggtgttgtaagggagatcttcatttctaagaataggaa

SEQ ID NO: 100085 - DNA, 240 bp, Glycine max
aagttatataaagacattcacatacttagatgacagacctcgaacgatgtcttactctcgtaaataattaataagactatttcatcatcacactccattccaataaactaccttggattgtatcttcagccttccttgtcagagtattgcattatgccacggatctatgtacctacccttcaacttaagtattccgtctagttaattagcatagctacccttcaacttatgtgttccgac

SEQ ID NO: 100086 - DNA, 240 bp, Glycine max
ctagttcaagatcgcttagaggctgatgaaagatgttctcgtcttgaaaaaattgatcgcttggaaatattccaagactatttacatgatttagaaaaggaagaggaagagcagaagaagatacaaaaggaagaattgagaaagacagaacgtaaaaaccgtgaggaattccgcaaattgatggaagaacatatcgcttcaggcattcttacagcaaaaactcactggcgtgattattat

SEQ ID NO: 100087 - DNA, 235 bp, Glycine max
ctacattctatggctcttccttcttccttatccccctggagatcctgtatgggccatcagttctgacacattgaactctcttgtgggtctttctctcaatttctttttaatattgcctttcatgaactttgttggaattcgtctgattgatgcgccagttcttcatcctgtaagtgtcattgctcaattttggcaccaaatacactcatttgatggaacaatctccctgatttcg

SEQ ID NO: 100088 - DNA, 231 bp, Glycine max
ctcgagccgattttcttctctttactctcattgtccgctgaacctttaggcttgcaggcatactgagcaattggcggtgatttggaggccaaattttcaccgtgtgacaaagcctctgattgcttatgtgaattcgatattggcatttctgcaataggttgttcttgtgtgggtgttaggattctgttaatgtcttcgcaaatagtttctagtggagggaaattcttcact

SEQ ID NO: 100089 - DNA, 226 bp, Glycine max
cacacatttggaaaaatatcagccaactctgttgcggctaataattcaaagttggccatctcctggttagaagcagcttttccggagttacagaaccaagaaactaaaggagacagcttgtctttgctaaaagctattcttatgctttatttgatgcatctcttgtcttgcagggacctctgcgaagagtaggtcaggatgggaatgaagattcagttggtcgtag

SEQ ID NO: 100090 - DNA, 221 bp, Glycine max
gccgtgataacacttcattcactctctactaatcgccaccattctctctctgtctctgttaacctctgcatttcaaacgccattccagattcttcatctcagaacaaaaagtagtgtgtgctgtgtggaaagttctcgctggcgaactttggagaagttttctatcgttttgccatgcggggacggcagcgagtgtcatcaagggaacacatacttggcca

SEQ ID NO: 100091 - DNA, 222 bp, Glycine max
ctccttttctttccttctaacgaaaaagagaacaaaaaccagaaaccctttccccgtgaaaacatctacctcaaacctcaaaccctcatcactctcattcattcatcatactaatcctcgttcctttcactttctatataccccaaagcaaaaaaagagaaaaaagtcacataaacctcacttcctcaacctcaatccaacacaacaacaaaacaaatcaaa

SEQ ID NO: 100092 - DNA, 218 bp, Glycine max
ctcaacagtagttcgcggaaagactctaaagatgggaaatggtgagccagaagatgtagccatacaaattagtcgtagtaatgacaccatgtacaaggctggtatggatgaattggtcatattgaaggaattatacgtacaaatccagatgcataagcgtcattgtgttcgtttcctttcaagttttagatacagggatcatctttgtccagtttttg

SEQ ID NO: 100093 - DNA, 225 bp, Glycine max
cagagttgttcccaacttcacaccgctccgcgatctctcacaatccctctctccttggattccgcgcactccatttcagatcgataatcgcgatagcaccagcagaaatcagtctcgcgtttcctcaaaagcgcgacaggatctgaatgcggtgaagttgttgtttaagaacgcgattcatggagtggacgacgctgcagcaccttgatctgcgccacgtggggc

SEQ ID NO: 100094 - DNA, 225 bp, Glycine max
catcacatgaaattacatgtcaaactgggggtgcctcatcctctgcaacaaaacttgaacaaggataaaattaagtctgtgtttccatacggacaaatcatgaactttgaagtagtggatggtggacttgtgtgtcaactgaagaaatggccgaaaagaacgatgactgctacattgttaatgcatcagaatatgttggctactaggcttttggtatcttagatc

SEQ ID NO: 100095 - DNA, 221 bp, Glycine max
ggcctgaagattcaaagctttataaatcagctaaaattcatgaagtggtaagtctttttttttccctgatcagtttaactttaatctgaacaaatgctactgtgctatatatctactgtttctcttgtattgctcattttaagagtatgtgctttcttctctatcttatgcttaggaacatgcctaggaaaatataaaatgttgactgactctttctgtat

SEQ ID NO: 100096 - DNA, 222 bp, Glycine max
cctcgagccgattcggctcgagggggagcgaagatgggcctcttcacccagaagaggtggtacgactgttttagggaaagtaccagttccaaaacctatcaacttacccagtcagaggttagaaaatcatggttgaacccaaatgtggagattgttcccaagggtacactcagctggggtagtagatcttcatcttctacatctaatgcatgggggtcttct

SEQ ID NO: 100097 - DNA, 223 bp, Glycine max
gcagaggggaaagcaaatcggattgacttcaatcctcccatcaatatatctggcacactcgacttttattgagttgaattccttttgctactcatctttctaaaataaaaccaactgaaattaaggtggtcattgcttttatttgttcaacaaaatcataccctttgctggcatacaagttggatccgatatttagtgaagatagatgatggagaaaaatttt

SEQ ID NO: 100098 - DNA, 219 bp, Glycine max
gaataatgaaagaacacaaagtaatggagccttaagtgaacttagtcctgatgatactacttcatcacaagccactgctgctactggggaaggatcttttccaattttctccagaaaaactcgcccttagaagctcaagttcctccttttgatatcttttccaaaaaagagatgtccaaatttttgggaagtagacagattccaaagccctcacatttc

SEQ ID NO: 100099 - DNA, 259 bp, Glycine max
agagcttctatggttgccaataacccatctgattcttctttcatgtctacaaggcatcatgatgcttaccagtcaatctctaggtcagatttgatggagaacggaagcctggattcacgcgacgatgaaggcctaatgagattaagactaaaagcactggagagggcattgcttgatgatactgatgctggggaggatgaagaggaggaggaggaggaagaggaagacatatttgaggctgcacaaagcatggaaattg

SEQ ID NO: 100100 - DNA, 242 bp, Glycine max
agtgtaccttgcagtgttgcgaatctggtttggagagtgatttttggatcaacccatcaaacaattctcgataattgaaactaattttctagtcttcttcacacaaagatcctgagaaagtgaaggaggaaagaaacaatgaattatggaagaaaaaagctaaacacacttgatattttaaggtatgttaatttattcgttccaaattaactaaggtatagatgaaattggtttcggctatg

SEQ ID NO: 100101 - DNA, 252 bp, Glycine max
ctcgagccgctgaggttttggggaacaatgatagcatgcattctcgcagcaattcaagcagcaataataggtgccttcttagattccagtaaagcttcgtggagattagagtgggatctacaactaatcactatagtatattcgggagcactcgctacggctgcttcattttgctttttatcttgggcaattaaaatcaaaggacctagttatcctccaatgttcaatcccttggctcttatttttgtggcc

SEQ ID NO: 100102 - DNA, 160 bp, Glycine max
cctcgagccgaatcggctcgagctcagcaagaaaaccagagttcttcaccacatcacatcccatacatgaagtggtcacaggcgacacgccttctgcgtccatgcttcaaagctcaaactggtggtttgtactcagggggaagtgcacaaatggttgaaa

SEQ ID NO: 100103 - DNA, 227 bp, Glycine max
aaaaaatggaacaaacagaatgaaccacattccaaataactacctgtgcttactgaacttcactcgcaaactagccatttcatcaatcacaaactcatcaattaaatccttaaatatcagtctctcaacatccaacacaaccccaggtaattcaccagggaaacctgtccagttttctgagtgacacatcacatcttcccttagcatacttttcagtccatcccctt

SEQ ID NO: 100104 - DNA, 222 bp, Glycine max
caatttctagtcttcactcttcagtagttcagttgcagtctctcttcatttaagaaatccaatgagaatggaggcgttggtgtttgcgcttgtggccattctgttgtgtggttgtgatgctgctaaagaatgcacaagcattcctacacaatctcataccttcaggtatgagctattgatgtccactaatgcaacgtggcaagcagaggtgatggatcacta

SEQ ID NO: 100105 - DNA, 221 bp, Glycine max
gagattcattctcaacatgccaatgcttcgttgcttcttcaacaaagcctttaaagcctccaaatgtgcaaccttgttgcaactcacaattccacgcatcaagttatagtgaaacagaagagaggttcatctgaagcagatgcgaagagacgttgctaagctacttgaggctggtcaagaagccaaggctagccttaaggtggagcatgttatgagagagg

SEQ ID NO: 100106 - DNA, 227 bp, Glycine max
caaacacggaaaatgcatgtatgcattgaaacaacaccaagagtcagagaaagaagcatagaagcaatttcctcaattggtgctactactactactactaccttcatatccaagaacaagaaatttgagaagataatcaacagtgaaccaagctcttaaaaggggtttctcactttctcttcattatggttttggcttttctcagagaagaaatgaacctcttagat

SEQ ID NO: 100107 - DNA, 224 bp, Glycine max
cgaaaatctcacaacacatgtccgaaggaaaaccagcgatgctcgtgaaatgcaaactttttatgggcagtactatgaaaagtatattcaagcgttagataaggctgctgataagtgcccagctcacaaaagcatatcaaactgctgttgttttatttgagggattgaaggaagttaatcgaacagaatatattccagtatctgatgagattatggaagctcat

SEQ ID NO: 100108 - DNA, 225 bp, Glycine max
cagaaattatggaaattcagaaaaatcaagtaagttgggcctttgttttgtttctttcttatacagcattccttttgctcctttttatttttcatcagtcattgctaagtatttgcgttgatcttaattacatacaagtgcctacttttcctaggatcaagaactgtaaccttatgcacaatatcatgacaaaattggttaatatatcatgaatcaaggtttagt

SEQ ID NO: 100109 - DNA, 222 bp, Glycine max
catcaatcctctcccggaaaccacctattcccattctgggttttgatctctccgagtttaaggttgtgggattttcatgcctttgtgatatcctgatgtgggttgggtaatttggaaggtgattaatggttaatggttgttcctctccaatcgttatttgaaaggaattgttggaagttggtgtttgtcaggttcacagtatccgcttggcaaattgacata

SEQ ID NO: 100110 - DNA, 219 bp, Glycine max
gggatctggcactcaagaaacagagtgagtattcgaagcagagtcgattaaaaaataaatataatttatgtatttagtttcaaaatttcaggttttgctcctccttcccttgtttaggaggggaagtgaagtgtttttacttgcaattttctatttttaagtttcagttgattttttttttcattttagtattgattaaaccatatactgaagaatttc

SEQ ID NO: 100111 - DNA, 221 bp, Glycine max
cggagggatgcaccttccgttggttgggtatactccgggtctcataattttagtgctgctgcctgggggcgacaaatttcaaatccatttaggacaaaggctgatagacctaaaaaagaggatccttctgtgaattatgggcttcatatttgcaattatgagcttgggattatatttacttttcctcctacagaaaataatggttgtcttgaagtaaagag

SEQ ID NO: 100112 - DNA, 268 bp, Glycine max
aaatcttggtaaagtttttatttatgctgggtgtaattattccagtgtctgtctacagagtcctttgttgttttgagaagtaaaaggtaaacttggaaaatgcaaccccacctatctgtggcctgggtctattttgtgtgctggtgctagttttgatggtgtgggtgcataaaattaaaatcactactatattctctctctctctctctctctttctggttaggaccagtaagagttgttgatgtatataatttgaaaacgtcaaggc

SEQ ID NO: 100113 - DNA, 271 bp, Glycine max
aatttgaactcttctctatatctttcccctacctatttccccctttttcttttcaacacaagcctactgtataacaagaagctaggttccatcttggtgctgcaaacttgagattctttttagccttctggcatctccatgatgacacaagattcatcagaggtgttggaaaaacatgcaagctcaggctctgttgtgagggggagtagtgaatatattagactggtcatatccgatgaaccaagggcggttgaagctgaaaccttgctgc

SEQ ID NO: 100114 - DNA, 263 bp, Glycine max
cacaattttctttttcctttcttctccaccgctagccataagttatcgtcagattccatatttcaagtgtctttgtttttcattgaagatctccttaatcctctgtctcgccactcacaaatactcataagccatttgatgctttgttgaaggaaccattaagaacaaatggataatagcaagtcagctgcaatgaaaggcgtctggaggaacgagcttctgtcaactgatattttaataacaatattcatgagcctcaacat

SEQ ID NO: 100115 - DNA, 260 bp, Glycine max
ctcgttattaaataaattcaaacacgtgcttcactgaagttaccaactattttattgacaaaagtattcagtgtagccgtgtaggaacaatatctaattaattggtgaataaagaaattcgaagagtggttaatgagtaatctctcatttagttagttggcagcagattgctaatttattaatattaaaatgatcatgaagatatatagttttgctagaattttttattttattttatcgatgtccttaaagttcctaaa

SEQ ID NO: 100116 - DNA, 276 bp, Glycine max
ggagcagatcatggttatgccacacagtgtgcgccgaggtgctgacgtctctggcgacgatggctttgccagactctacgcctccgtcgacgccgacatcgaggccctacttcagaaagcagaaagtgcttccaaggagaaaggtaaggcatcagctgtagcgatcaatgcagagattcgtcgtactaaggctctgttgctggaggaggttcccaagttgcagagattagctgtgaaaaaggtaaaggggctttcatcacaagaatttgctgcccg

SEQ ID NO: 100117 - DNA, 170 bp, Glycine max
cggctcgagcggctcgagcggctcgagcggctcgagggccatgcaagccgcactcaaccaccacacttctcatcgtttaagctaccccattctgctcttcttctacctgtcaagttttaaaagtataaagatggcagagacattctatttacctcagagtcggtgaacga

SEQ ID NO: 100118 - DNA, 151 bp, Glycine max
gtgacctcgcaaatgtggagaaactgttggaggagatggagagggaaccccatattggcatagattggattacatactctatggtgaccaatttctacataaaagcagacatgagggagaaggctctggtgtgcctaatgagtgtgagaaa

SEQ ID NO: 100119 - DNA, 257 bp, Glycine max
ctttgagagatcaatatatatactacattaatttattttgatgtaaatcttaaggactatttttcgttctttgcaacactccactcattactcagaaaaaaggaagacacaacacacaggatccaaagtgtcgtacacagaatgtctcattctcttgtttcagtgattttggtgaaagttattcttgcagccatgattattgttctattttcacatgctgtgagaagccaacaaatttgtcttgcatcttgcaaaga

SEQ ID NO: 100120 - DNA, 260 bp, Glycine max
  unsure (1)..(260): unsure at all n locations
ctcgagccgaacactcataaccctctctctctttctcctctcactcactagtgccactaatgcgaactctgcacaactagactcctagnctcacttgaccacagtgcacaaccctcgttcaatccaccaaacccctacaaagatggagaaaatgatgaacatgccccagttgcgatcatcgtcgttgccgccattgtccaagaaagttgggaagagatggaaggagtaccaaggaatgaacaattgggaccgtttattgg

SEQ ID NO: 100121 - DNA, 260 bp, Glycine max
cgatttcttccaaatcctgaaagacactggggtccaaaactaagggctggacgtcaaattactagcaaacatgtctctcttttgggtcctgacgctattaatggagctctcaatcaggaagacgatgaagaacctaaagtaagaagtcaaggactgaagatagtgtcacatcttagctcacaaatgagatttcaaaattaattttattcatcaatctagaggtcatggaattctatgcttatggttactaaagaaatccg

SEQ ID NO: 100122 - DNA, 151 bp, Glycine max
ttatcttcatatcaaggacaagcttaatagcttatagtttaatgaccatttgttttccaaagcttcttctttggttctcctaattaatttcatgcatcccccttaatgaagtgacactccaaaaataccatctttgggttttacttctttt

SEQ ID NO: 100123 - DNA, 211 bp, Glycine max
  unsure (1)..(211): unsure at all n locations
tcattttgattctacaggaaaggctggactaatgcaattcattcttcaacacactaatcgatcattgcactcgttatgatgactcaatgtatggaacatcatgattaaatcactgtgacgctatatctcacgggtaagatgactgcaacganatggcatctttatggattgaatttgctttgaaggtcactcacaataccaatcctcccta

SEQ ID NO: 100124 - DNA, 127 bp, Glycine max
agaacccagtggatgacttgacacataggccgaatgacttgctctcatttgtcgtggtggagaaaaggggggtgcagacttctattagaacacccacctattgagtatttgctcctaactgacactg

SEQ ID NO: 100125 - DNA, 246 bp, Glycine max
ctcgagccgcaaaattctgagataagttgtaaagactcagagaaaagttatggcaaagaaggcgatgaaatctaccggagtgacaattatgatcatgattatgatgggctatgcacaagctaattataattctccattgtgaaattgagcctacacacaacgataactacatgtctgcacatgtgtatagatgctcatgctacatgcatatcatatgttgcattgcgtcactgtctaaagcaccta

SEQ ID NO: 100126 - DNA, 177 bp, Glycine max
ctgctcgaggaaagttgacaaaaagaaatctcaatttgatgtatgacacactggtgtaagtagcacttgaggtgatgctaccccaggatgaagaacatgtcactaactgcttgatcgagctgagaactaatccggaaaggctcatcgataaagtttacattgcgtttcggaaatggg

SEQ ID NO: 100127 - DNA, 281 bp, Glycine max
agcgtttcatcaattacagccttctctcgcttcgttccacccttcacctgaaaagcaaaaaggagtgcaaaccatgggcgatgcacttgatttgactggtgacggaggagtcattgtaaccattgtaagaaaaagcaaagctgatgctgtcggtccaacagaaaatttccctcttgttgatgttcattatgaaggcacacttgctgatactggtgaagtttttgacactacacatgaagataacaccatcttctctttcgagattggaaagggcagtgtta

SEQ ID NO: 100128 - DNA, 171 bp, Glycine max
  unsure (1)..(171): unsure at all n locations
cggctcgagtgaggatgaggtcaaagagagggaaaacaagcaagaatacaacctactctgtgattggataaacaacaacttggtgacaacgtggcantagtcacatctcagatcgcttgagatcatctcctngtgtgcatgtatcacggtagttaggtagtctgcaacatg

SEQ ID NO: 100129 - DNA, 273 bp, Glycine max
cttattgtttgctctcatggtgtgtcatgttggatgcttcgttcaatttgtacagaaaaatctactgcaattagtatgagatttcccacagagagaagttccagtgaattacagacagtggcttttgagatgcttggtgaagcaatctcaagagctgggccatccttccctgttgatatttggagatcgattcttgaggtattcagaaaaacaatggatgtcttggcattaaaaacccctgttgtggaagatagtgtcatgtccacgtagcct

SEQ ID NO: 100130 - DNA, 276 bp, Glycine max
  unsure (1)..(276): unsure at all n locations
gaatttcaagttttctacattggagaacaagttcancttgatgcaggagattgcatcagatgtttcaataaactgggactcaaaggctttcaaactgaggatgtcgagatcctctggtaatgcacaggggcacaatgcatgtgatacnaaccatgataaaccatcacatgggaaggactttatccagaatgaagtaaggaatgatgtcttgttagagaaaaactgtgatcttgccaataatgagtgcagatttcagaattgaatggaagctgttgt

SEQ ID NO: 100131 - DNA, 207 bp, Glycine max
atattacactctttgcctcgcagcttcaacttaaccttttctactcatgatcttaatgcttgctagagaagataagatagagaaagtggttgtgtagagagacatggtggctcgtggagcgtctctgtttctgtacatcctcgatgtattgaattcatgtaggagagcaaaatgggcggctcggttgcttgacgactatcaggtgtg

SEQ ID NO: 100132 - DNA, 100 bp, Glycine max
ctgaagttgttgtacgacttctggtcaagttactgtgagcctagaccaaactactactgttctgtggtgcatatagtgatggagcttacaaaattgatta

SEQ ID NO: 100133 - DNA, 100 bp, Glycine max
ggacgcttgtcagcaagaaggccaaatctgcagaatcaacctgctctggaaaaggagcgatacataatccgtcaagcattcattgctgcacctgggaatt

SEQ ID NO: 100134 - DNA, 116 bp, Glycine max
ctcgagctcgagccgttgttttagaaagtagacggcacgctctggcacggtagaagagagaccatagacgtcgtgctcagttccacagttgcaagagaaaccgttgatccgattcc

SEQ ID NO: 100135 - DNA, 108 bp, Glycine max
gacgtgtgggaattctgtccttctgattttactacccctgatggaagatacgtccacttcaaggaagaagatttcatgctaagtttctgtggccagagtgctatcttt

SEQ ID NO: 100136 - DNA, 127 bp, Glycine max
ctttaacctaaagtattaaaatgttggtttattattattactcatagctcaaagcccaattttaccctaccaattaaggtctctcatacagtagtattttaattgcactacgtactggctactttat

SEQ ID NO: 100137 - DNA, 113 bp, Glycine max
gtgaaggacgagtcaagaagcaagaacgaagtgttgtgcgacgatataggcagatgtgcaatcaccacagtggaagcgccagacggtcctccccggctttccatttgttctct

SEQ ID NO: 100138 - DNA, 116 bp, Glycine max
atcatgacacattttccttctcagtgcaaatctgggattcttgtaaattgatagacaccagcacactcgttgcctcccttcccagagcataacatggaaaaagtttgtcattgtcc

SEQ ID NO: 100139 - DNA, 118 bp, Glycine max
taaatgtagacatcatcatcattgaaacttccggtagtttaatggcaacacgcgtgatccctccaagaatcctcaaggagctccgttacaacacatcaaccaggccactcaacgctgc

SEQ ID NO: 100140 - DNA, 117 bp, Glycine max
tctcgagccgcatcggctcgagacgaacaaggaggtcagcaagtaagctgtatcattttatgtacagtagtggggagttctgggccaagacatgagtccgcttggtttccggcttgg

SEQ ID NO: 100141 - DNA, 116 bp, Glycine max
ctcgagccgctgtgcttatcctctgcgctgagagcagatcagagcgagagcagagcaagcatatatctctacttgcaacgacgccgttctgcacttcgaactttacagttgatgtt

SEQ ID NO: 100142 - DNA, 287 bp, Glycine max
tgtccttttaagaaggagaacattaacatcacactggttttgcgatcaaagagatcgaagccagtgaagagcgagcgagagagctaggaacgtaacataacataccacaatgaatcatcgaccacctttccaagaccacatgatgctcatgtctcagttattccctgctgatgcatacactcaaattatttctcaacaaggagagactaataagaagccaagacgccgtcgtaacaagaagaacaaaggaggagaaaacggtgcctcggaagccaacaagaagagga

SEQ ID NO: 100143 - DNA, 280 bp, Glycine max
gcagattgctttgtgttttcagcacttttttgtttttatcacagaatcacttgcatatggttagtatgtttatattttaaattaaatgtgaaattatctttatagtatccacaagctttcagctcaattataaggagattcccccaaaaaaagaaagacaaaatcacttgcgtgtttggttttgccttaccttacgtgcataaaaagcataaaaaaatggggcacggatcctctttctgcataaacgtgagaatctgacgtgtgtaacctttgaagtgac

SEQ ID NO: 100144 - DNA, 124 bp, Glycine max
gtactttcttgcgaaaccgaaacagcgaacgggcaaacacaattggctagggaggtgcagaagcatttgagaaggcacagtgcgcgagagcatgggagggatgaccaacagggcagtggagtcg

SEQ ID NO: 100145 - DNA, 281 bp, Glycine max
ttcccccattcatattccaactattattattattcttttcttcaattccagattgaagcttttcacatcaacaataccttcttagagccccaaacccattttcccactcttcattttcgcctccttcaacaggcaatgtaaacatgagtatttgcttttctactagtcagtcctcaataaatgctgttgtcctgaaaggtcgtactccgctgctgatgagcagtaacattcatggcctttggtcccaaggaatatcgacttcagattcttccagtttgtct

SEQ ID NO: 100146 - DNA, 197 bp, Glycine max
  unsure (1)..(197): unsure at all n locations
gagcaaccctcgtaaatggactgggagttggagggagctaaagggcatgagtgctgtgaaaaaaatgctgtaaaagcaatggggggacaatggcgacaaacatggaaccacaggcgtacatnaggtcgtcaatcggatcacaggggatgcgatgcactggaattgaactgagcactgcaaaatctggaattcaaaca

SEQ ID NO: 100147 - DNA, 272 bp, Glycine max
ggaagagggacagaacctcgtgcggtcaaatttgaccaagaaagagagagtggcaagggggagtggcctgcgttgaatttgcagcagcagatggtctcaaatatgtttgaaaagtctgcctcgattgagcctgcagatgctaaggcaaaaagagtagcagcagaaggtaacccgttccttgctgcacctttgaaaattgaggacaaggaagttgcttctgttccccctccggctaagctttttaatgatgaagctcttgataatcctgttgt

SEQ ID NO: 100148 - DNA, 271 bp, Glycine max
cgaatctttagtattattagatagatagcagagatctagcgtattctctcgctctttctttttctctctttcactgtcacagtcagagagagacatcatggacttcccagccaacggcgcctccgcggcccattccctcaacttcctcatctacggccgcgcgggctggattggcggcctcctcggcaccctctgccgtgcccagggcatccccttccaatacggctccggccgcctccagaaccgcgcctccctccaagccgacatagcc

SEQ ID NO: 100149 - DNA, 119 bp, Glycine max
tccatggattcaagtgctcctccttcttctgcatcaggatctggatctgcatatgaatggcaaagtccaactctcatgtccacctgatttgcaatttgcgcctctccgaggaggcagtc

SEQ ID NO: 100150 - DNA, 254 bp, Glycine max
cctcgagccaattcggctcgagagagaatttggaaagggatagaatctcgattgacgacacacacctccggtggtaatcgcaattcggaacacagcctaaacacaaattcactgttcacagtgttcatctctctcctgcgcccttcctttgacttaacgagggaaccggacaaacacaacttttagttatggctgtggccgaatttccttcctttcccaatcgaaattcaaaccccaatgaaacccctgggggg

SEQ ID NO: 100151 - DNA, 236 bp, Glycine max
tctttgtagagataaaatagttagattgcattgagaatatgaatgtataacagactaaacaaaatcaatctatccctagtgatgactttatttagatactatttcctagttctattagaaaataacgtttcccaatgctacccctaaaacttaccatgcaaatggatgatgaagccgtaaacgacaacattaagcaccaggaagggtaacgaaggtaataatattgaatagttagg

SEQ ID NO: 100152 - DNA, 230 bp, Glycine max
attaattattctggatctttatctttgtacaatattggttttttcaaaaacattagttcgtgttttgaactaatttagtattttttattacaataaacaatatctatgtttggaaaattttagaaaaagtattataatattcaatgttttacttgaaatagtaaaaaatgggaattaggatagataaaatatgtggctaattaaagatatgtattttcataaaaatggct

SEQ ID NO: 100153 - DNA, 141 bp, Glycine max
gaatcaatattagcaatcttttaaagaaaatgataacagtgtgatgagtattgttgtgcagtgtacgtgaaggtacatgtttagcttaattcattgaacaagatacttgaattatggtaaacccttttgtacttgtaaaaa

SEQ ID NO: 100154 - DNA, 230 bp, Glycine max
gcgaagaagagagtgaaagagaatatctgagactctgattctgagagtcgagacgagtgattgagtgctgcttcttcttctgaatcaaatcattcatcactctctggttctgatttttctgacaccaaaatggtgaatcctcgaattccacgttcaaggatccctactttcacacttttcacttcttctatctccatcgctgtgcattttcttcgttctctcttttctct

SEQ ID NO: 100155 - DNA, 241 bp, Glycine max
gtggatttcaacctacccctttgttcaaagatctactttccactgagtccagaatggaaaagattttgagggcaatacttcataaaaagatatatccccaaggttcatgttcaacaacaccgtttgtaaagaagtatcttgaagccacaccaatttctgatgatggggaggatgatgatgatgaagaggagcttgctggctgcagcataaaatggatgtaaatgggtcaagactgattctg

SEQ ID NO: 100156 - DNA, 244 bp, Glycine max
gaggaattgacttatctgggcagttgtaagtttggtgtagctaaggcaaatgcttgtctgtgcagcgagctccactcttactttctggccattcaacaccaaatcccaccaccgatttttctcaaattcgctcagcctccctctcacactcacacacaccccttcatgcttcctccaaaccatcaaccccaactacctcccattccgatgacgccctccgcctcaccgtgccttccgccgccgc

SEQ ID NO: 100157 - DNA, 247 bp, Glycine max
taaagatggaaggaatcacttcttcaaatccttcatctggctcatctttgaacactcctggcaaaagtgcaccaaatggatctcaggcaccatcatcaaatccagtaagtgcacagcatagcgtggatggacttaagggtattgataaattgattatggactacctggagcagcattcagatatgtcagatgcgtggaatacatgttgatgaactatcacgggagctcaagcttccaatggaaaaga

SEQ ID NO: 100158 - DNA, 105 bp, Glycine max
cggctcgagcgcttcttggcttttgataccccaaaaccattgttttcttccttgtactgtctgatagctttgaaacttcgctgttttcttctgctcacactgctt

SEQ ID NO: 100159 - DNA, 143 bp, Glycine max
attatgcaccacgagggggatccatctggaaagactggaagggctttcaaggatgagattcacaaaaaaattgagaagtggcaggagccccctcctgctaagcaaccaaaaccgcttccagttccagattctgagcctaaaaa

SEQ ID NO: 100160 - DNA, 163 bp, Glycine max
cttttgtgttagtgagagaaagttctctctgcttctctctcttagactcgaaaccctattgcgtgctttgcaatcgaccccgattatggccaacagtaacctccctcgaagaatcatcaaggaaacgcagcgtttgctcagtgaggcagcacctggaattagt

SEQ ID NO: 100161 - DNA, 172 bp, Glycine max
agaaatatcactatgtaagtactgattgggtaacgaaagtaagagaaaaagggagttcacagtggacaccattgctcactcagggttaggatttttcttcattgctgttgagaaaagtttcttcctttcttgctcttctgatcattacgttcattcatcctttgggctagtt

SEQ ID NO: 100162 - DNA, 266 bp, Glycine max
attctgagcaacattcggctgggaatggatcgaatcacttgaacagcaccacaataattgagaattctcaattctcctgagggatattaacgaaataaagagaaagaactgaagttggcagaagttcatggaagggtttgcaagtgttcatcttatcagtagcatcaggtgatggtgatcgaggagggggagtacgcaatggaagtatgcggatgagcacagagaataaattccaacataaagttgtatttaacgtgagtggaatg

SEQ ID NO: 100163 - DNA, 248 bp, Glycine max
  unsure (1)..(248): unsure at all n locations
caagaagccaattcaaaagggcgatcaggaaatgctgctaaccgcaagtttggacacagaaagcgacctcacctatcaaagctcagtgttaatggttctaataattaaatttacagggaaggcagttctaggaatgagattacttcgccaccacaaagaggagttccanaagtcatgttagacatgtcatcttcatctagacaatcaaaatctcgaaacttaactttgaatgaggattctgttaatca

SEQ ID NO: 100164 - DNA, 162 bp, Glycine max
cacgcagtcacttcaaaagggcgatcaggaaatgctgctcaccgtcagtatcgacacacacagcgaccgcaccgatcacagctcagtgataatggtatctgatcattacatttacagggatcgcagttctaggtcatgacgattacttcgcgaccacagtga

SEQ ID NO: 100165 - DNA, 104 bp, Glycine max
ctttttgggctaaaaccggtttctcttgtcacaccaaatggaccgatccgccgccatattttccgacaacgtcaacctcgacggcacggtggcgcagctgtctc

SEQ ID NO: 100166 - DNA, 266 bp, Glycine max
  unsure (1)..(266): unsure at all n locations
ctctctctcctttgcaaatgggcagcggtgaggttgcacatcaagcaccaacacagagtccagacaatggcacaactgaccngtaatcaagacccaggggacaattccggaaccagtaccagccactgaggctcctgcaacagaacaagcagcagctgaggttcctgttcaagaagaacaacaagcaactgaggtgcctgccccagaatcaaccaccgaagcaccaaaggaagataccaccgaagcaccaacaacagaagcagtag

SEQ ID NO: 100167 - DNA, 272 bp, Glycine max
gaagcagacttcacccccttcaaccacacattcatcaatacgaaaccaaccccaccaacaaaacaacaacaaccccagaaaatcctactatttcacaagagacctcaaaatctcaccctcaaacaccccaaaaactatttcccctcctagaaaatcaaccaaacaaagaaccaaaaattgaacaccaacaagaacaccaaaacttgtctcctcctcaggttgtagctgccgcaccacccttgaatccatgtggaccaaatcagattcaccac

SEQ ID NO: 100168 - DNA, 280 bp, Glycine max
gggttctcttctggattgtggttgtggttgttgttgttgctgaactcactgtaactgctcgttcagggagcctcggtgagtgctctgatcatcacagaaatcaggagttgttcaatggcaaaagattctgccgatgctgattcccatcacaggcgtcttggtcttttgaaagatccaagttcacttggttaaaaggaaaggctctgatcgctatgagattgctccaatccaagaccaactaatcatttgagaaggggtttttcatagtgatccgtgcatg

SEQ ID NO: 100169 - DNA, 169 bp, Glycine max
cttctttctgcttcgtcgttcactttagaatccataaacagtctaaaaaagaataataataaacagtgaagttaccaagattctgttgagaagaagagcaatgccgtccatcgattccgattcgccgatgatgatcttacattgcgacgctggttacatactcgaagac

SEQ ID NO: 100170 - DNA, 319 bp, Glycine max
cacgcgtagtcactcggaatccccctcgatctcgagccgctcgagccgttcgattccatcacttatagttctctcatctctttcttttccttactttctccgccgaagatggcgccgcccacgccagcagttgaaggcgcccaggcgccgcaagggcggcagcaacagccgcaaggagggtttggcctcaccggaatcatacgcatggtcgttttctggtacttcgcttccaaattcttttcccccaaaaaacctaccgaaccttccgctctcatctccaatctccttcagaaagcacagcctctggatatgtggcttt

SEQ ID NO: 100171 - DNA, 281 bp, Glycine max
  unsure (1)..(281): unsure at all n locations
ttcgtttttagcataggataaagtaaattactctcatttctanaccacatacagattcgtataaattactctctgcttgttgatggctgttctagtgtcactgttagctgtgatnttgctcccaaaattttgattttttctatttcggaagaaattttagatgcatgagacttgagtgatcctttgccttcagcttctgaacagttgtaaagcttgagtttgtggaaatcggtctcctggcttccagatgtgctgtgttccgatctgtttatccatccaac

SEQ ID NO: 100172 - DNA, 279 bp, Glycine max
ggcgatggagggtttctggagaagatttgatgacagatcttgaagatgcactgtccaagcagcgcccgaattgtgtgcctggtttcaaattggagcaatcaagggataatcggtatcggagtctgattcagcatcggttaaatgagcttcaagaattgccttcaagcaggggagaggacctgcagacaaagtgcttgcttgaactttatggactaaagctggcagagttgcagatgaaggttcggtctgatgtgagttctgaatactggctcaatgcta

SEQ ID NO: 100173 - DNA, 274 bp, Glycine max
tagacaccaaacgggtccatcattccaccacacaccgtttatccaactttctttcttttattgcttcaaaaattcaaaatcaaaatcatctcttttatttatttttatatttttgtcttggtgactctcattttctgatctcacaccactttctctctcttctactctctagcaaccattccaaataaccccttctctctccttccacctctaaaaatcagcaacatggccttgtttgctcttgcagtgcttcttttagccttcactggctctt

SEQ ID NO: 100174 - DNA, 260 bp, Glycine max
gctgcaagcgtcaaatatgtctctgaattctatttttgaggacaggagatagcagttctagtcaatctcataataacagtgtctcatgttctagtgaacatgttacagctattggatcttgcagggcagatgcgacgagctccactgcaatgtcaacgagtgtgggcaaaattcctggtggtgtgtctcgaactcgcacatcaagcaatggtctacatggggactggtgttgaagtaagtccgacggcgcacagctctgc

SEQ ID NO: 100175 - DNA, 269 bp, Glycine max
gacgaaacagctcagcagagagccacacagatgagaatgagttaggaagagaagaaccccatcaaggatccatgttttttcatttttctttttggacccactgttatcccatcactgtctctggaaccaacttccactctccccaccttctctttcaattcactccacaattcatttttcccaaacacacattctcacatcccaaagttccctcctttttcactccaaccaccccccacgaaacgaatccatgaggagttcggagtgac

SEQ ID NO: 100176 - DNA, 270 bp, Glycine max
aacgctcatcaccgctcttcctctcccactctcgcaaagtggggatggtgaaaagggcaggatgcaagcatagttgccaatagaacccgaggtcaaacatttcatgtcttggtagcttcttcaggttaggtaggttcaaaagatgatgtggtcatggttgatcctgtggaagccaagcgattggctgccatacaaatggaaagaattaaagcaaaagagaaattcaaggtgaaagcagtcttatgtttgaatttgaatcacatatttggg

SEQ ID NO: 100177 - DNA, 251 bp, Glycine max
atagaggcttgtatgtaggtttcagagtttgagagaagagggtggagggcaggaattgtgttcattcttctcttttgaccttacagtggatatcatattcatatggtagcttaaagccctaggtatagctagtttgattttgactctgacgctgggtttcatcaacaatttagaattaatgcgaacatcctataatcttgttctcattcgatctcgcctaccgccgctactcaccatttccaagcttatcg

SEQ ID NO: 100178 - DNA, 103 bp, Glycine max
cgttagacggctctcaaatgtgtgtgcctcaactccaaccatgaaatgaatgatcaacttcgtctttttcgagcatgcagttctccatgtagcacgttttcgg

SEQ ID NO: 100179 - DNA, 263 bp, Glycine max
cattatcaaacattgatttgaaattcactttgttttgtttagttctgaaaaatgttttctaaggaaaccatactcatcctaggtctcttgaccatggttgctcttatatcctctaacgtgacagctagaaaccttgctgagacctccccaatgtctacaacgggtgaagttgctaaagagaaaaaagtgactgatgtgaaatatgaacaaaatccaagtcatggggtttgttcaacgtcaaattgctttggttggggcatcca

SEQ ID NO: 100180 - DNA, 256 bp, Glycine max
ctacaatcgcgtcggcaatggagccttgtccaagtcaagtggacatggcttctcaacacagtcgactaccacagaatacaaatggtggtaccgatatcatgcctttcagcatagcgaatcaagcccttggaatcgttgcggatctcggtcttcagccggctctgacactgtatccgatgcggagttggatgaggcatttatggatagcaactcaagtgtttctgttatcctctgcagcaagcaatctgcacgccac

SEQ ID NO: 100181 - DNA, 229 bp, Glycine max
gcaatattggataacatgcatggtctttccttatatatcgatggtggcatttctgattattacagtgaccatgtggatattggatgtttttcagagattcagaaatggatttagtttcatgctcccattcatctcgagtaccggtcacttgagtctcttccatgtggctccatggatcactaccgtagtcgctggtacacatgatcgtgactacctcgcattcgtggcg

SEQ ID NO: 100182 - DNA, 274 bp, Glycine max
tgtttcagcgagcgacgatgaccatccaagccttggatgtgctccgctccaatctctctaaggttcaggtccacgaagccatcaatcgcatctacaagcacgactgctgcagtttcgttcgactctccgaggtcggaaggtggtttgttcgtcgacatgtgtacttttcttgctttcgggaaggattttgttggttggaattatgagaagactggaaatcctgtctatttgcatatagagcagacagataaattggttccagaagaccggcctt

SEQ ID NO: 100183 - DNA, 291 bp, Glycine max
gtaaaattagaaaagaccaaatgtttggatgctctgtggatgatgaagctgctttacctccatctaaacgcatccatcgtgctttagaagcagatgtctgccaatgctgccgaagaaggtcaagcttgcatggaatcctcctcctctataatgacatttagtggtagatgctgtatatctgccattaagagatgtccttgtatgactgttaataatcaaggagttaatgagttagaactgcaaaggttggtttcttgtggcattgattcttctcatgttagtgtgtgtagt

SEQ ID NO: 100184 - DNA, 272 bp, Glycine max
atcttcttcgtttacgagtatccacatcaccgcgttagacgcgatagtgaacgtgaattccctttttcaccctcgccgtcttcatcggactaacctggaaccctaacgacccttccaacaggctcaacaccgatccggcgtcgtcaaccgcaccgccctccgcgccggcatgctcgtatccgtcgccggttgtggcttcctcatgctcgccctcgtcaacgtcgcgcagatcaagctcgaaaccctcgtctgcggaagctcacacacttacg

SEQ ID NO: 100185 - DNA, 275 bp, Glycine max
gttctggtgagtttacctcattctaaagtttttccgagaaaaaaaaaacccgaaaaaagggattgaatattgggtcagtttgtatctgcggtagaatccaggtagtgacacaagatcgacataggttaggtaaatttcgtttttccgtttagggaatggatacgggggattttcgatccattctggaaaatgccgaaaacaacatttgggcattgatggacgacgacatgggggtggcctcagtcgacaacacagacgagttaaagcgccggaga

SEQ ID NO: 100186 - DNA, 285 bp, Glycine max
gttttagtggttgtgtctatttgttatatcccggattcatgacgtgttctgcatatgtatatgtatatgttatgcaatttgtgatttatttttactaggtgttgtactatatgtttcctttagttgttttttgcctcagtgtgtgcccatctactgctgtctgcgtgattaattctcacaactaatctaaaaccattgaaaggggacacgtcaattgacctcagcaatgtgtatgcattaaatatcttctgctagatctgctaggacttctatttacattggtat

SEQ ID NO: 100187 - DNA, 278 bp, Glycine max
gttgaagcgagaaggaagggtcagcgcgccatggctggcatcaccacctcccccttcaaactctctcaatttccgactctcttctcttcttctgattccaaactcttcggcatgcccctctccaatccctattccctcaaattcgacccttcttctctctcaactacctctctatcctacgtcaaagcccgctactacggcggcggcggcggcactccccgctcccccaacgactcacgattccgcaagtcatccgattccgacgacgacgataaagc

SEQ ID NO: 100188 - DNA, 202 bp, Glycine max
cagacatagaagttttcagtttcacttatcacgatccagcaatagcactgggctgggtccgtgagactgtcgattccatcaaatatcttcagatcagacatgtactcagccatgctgttatcctacgcatgattgttacgtctgcactgataatatggaaagcattcatgtccgtaactggtcagtgaatctcccgttgttg

SEQ ID NO: 100189 - DNA, 290 bp, Glycine max
ctcgctcccacacccaaactcaataacagtaaccgtttttcgttcttcacttcctcactctctctctcttccaccacaatcatggcaagtgctcacaaggtcctcgttcccatcgccgatgtcaccgtcgcttcctcctccgccaacctcgccgtccaagctctccacggcgtcaagatcatcgccgacgcctccgtctccgacgtcgccgccaccgcctttgacctcgtcgctctccccggaggtttacagggtgatgagaatctgagagactgtcaagttcttgaagg

SEQ ID NO: 100190 - DNA, 282 bp, Glycine max
tatctctcttcgcctggtcttggcatctccgcagcaccaccacccaccacactgcttagaccaggtcctctatctctctagagagaaagagaaaaaaagaaaagaaaaaaaacaactaacattaagctttaaatagtaagacatggctaaacccagttcaaagggggatctaaataataaccagcagaagggtcaggttcagcaacaacagcagcagggtcaatgggcggcggcggcgcaccgatccggtatgagcagcaatggatggatatgcagtacccg

SEQ ID NO: 100191 - DNA, 161 bp, Glycine max
ctggcggcgaccctgaatacaggagatcttcagatccggctactgctagtgttgattacatttaatttagtgtcgtcctgaggtttctgatgtctgcagcatcaatggtacctgttgtagtagatcgtcactcctaatcgagcaactgttattcgtgttcc

SEQ ID NO: 100192 - DNA, 247 bp, Glycine max
cttgatatttactattagttttgcacaaggattatggttgttttcaacttgctgattgtagctaaatggattttctgaatcaccacgtgatatttgtctgattgtaactaaattaatgcatgtgggagtcctgaaatagtacatgttttgttgagtaatcgcctgagactgctgaaattaaacattacaaagcttgttgtgccatttaatgtgcctaaaaactgcaggttgcatttaggactaaggt

SEQ ID NO: 100193 - DNA, 244 bp, Glycine max
cttttctctttctctctactttatactcgagtgcttgatctcgctcctttaaataaaaagctatggaccacaacatctaatctaatctagtcagacaaacaatcactcctcttcaatattcttttgattctaaaattcttactcggatttaatcccttacttttaggaatcattgagtataagatcggaggactgttaaccttatcgtacggacgatgctaccgtggaatcattggcttcgctg

SEQ ID NO: 100194 - DNA, 239 bp, Glycine max
gctatgcaatgtgaagatgtgattgttgcatatataatatatcttaagcagagatatataggaatagagtgcagtcatgcattaggatttctgttgacatttttgcgttttttctcctctccttttgtttgttgtttgagtgtgcacacatgggctttggataggttcattgatccataagctgtactaaaatctaaaccaaaagggggaaaactataaagtataaaaacttaaatttt

SEQ ID NO: 100195 - DNA, 193 bp, Glycine max
ggaaattgttgatgaatgggtgaagttgaatcctcagggactaagcaacactctgatggctgctggagactcgccgcctgtgcagaaaaccacccaaaatgggcatcatcatcagcaggttgaggtcaaagcaataatcttttttggcttagaggtgcttttatattattccttggaaaatttgaccaaatta

SEQ ID NO: 100196 - DNA, 122 bp, Glycine max
aaaagaagcatcaagggctacagatgtgggtgattgggaggatagtgaaagaatggttgacgggatattgacttcagcatcttctgattcatcaagtgtgaatagggtcttggagatgggct

SEQ ID NO: 100197 - DNA, 230 bp, Glycine max
taacgctctaactacttcaaaaaaaactgtttggtcccatcatatatgaactattaatagtgacacctaatatactctcttgtgttcggtcgcatatttcaggtatattataaaccttcaattcggccaaagcggtgaagggctcaaaaatttatccactatcttaatgtccaagctcatctaataaacaccatacacaccactatatatatatatatatatgccaattt

SEQ ID NO: 100198 - DNA, 252 bp, Glycine max
ctcgagccgtaatctattcattgtttcataaaactgaccaaatataatatagttggagtgagttctgttgttatcaatattataaataatttataatgaaatattaaaaggcattatatataaaaactgagtggccacaggttggtttgggtttaggagatattttggtccaaaccgatcaatgttaatcaacttggattggtttggtttttttgaaaaaaattggcaacttgaaccgaaccaacctgatca

SEQ ID NO: 100199 - DNA, 256 bp, Glycine max
ctttcctttgcttataattattatccttgttttataaaaataattgttatcctaaaataagaatatgagttcataaaggtatatgttactattgaaacagccttttttgtgtgttgatacttttcaaaacttctcaaacaatgtgtgttaatttgtgtgtgcgcccgggaggtacgtaataggatatcatgaatactatagtactcatattctcattcattcttattaaatgttacaagtagatcttcagcctcaa

SEQ ID NO: 100200 - DNA, 217 bp, Glycine max
  unsure (1)..(217): unsure at all n locations
ttctcgagccaattcagagtgcacataatgaacaatttgccancaatctcattagcatgtatatctcttactacctttttcttctcaaatattccattgttgtatccaatgtataattgagtgtgaaagctatatgcagtatctataatagctaaaatgatgatatctatcaggtgtggtgttattctacttgaagttatgatgggaatttatattt

SEQ ID NO: 100201 - DNA, 120 bp, Glycine max
tatctaatcttcgtctgatgggatggtctagtcggttcataacttccgtggctgacttatacatcggagtgatattcgcatcggtgacactctaggtcaaaatcaaccacactttccacc

SEQ ID NO: 100202 - DNA, 258 bp, Glycine max
  unsure (1)..(258): unsure at all n locations
ttcggaagctcttactccgttctcgttccttatcattcacttctcccactccgattcaccctcctcctctgtttccccaccaaccttgattccanntccattcccgaaccctcctcactccntcttcgctctgcataatcagacatttgctctcggaaacccaaacggatcagattgcgcactccctctcctcagagcttctcaaagagccagactcggacgctctctccgtctcgcagcgccttcacctgagcttct

SEQ ID NO: 100203 - DNA, 110 bp, Glycine max
gttggcaagtgtgttcattatttgaccatactcactctcactccccagattatactagctgcagcagcgacaagcgctgtctcagcagtccttctctttattttgggttc

SEQ ID NO: 100204 - DNA, 248 bp, Glycine max
gtgaagaagagcattagcatttagctgcacgacgtcgttctgcggtggtggccgagtatcaaagaaagcgtttcgcatggtcccaataggttcgcatttctttttcacttcaaagcccaattgatgttgttgtactcgatcaggcagaatgtatttgcgaaaactgaggaaataaatcctcaaaatctattctgctggtgaaatcgtctttgaagcagttgcgaacttagctgaggggatcaatggtg

SEQ ID NO: 100205 - DNA, 252 bp, Glycine max
atcgagcgaatcggctcgaggcgaactttttgtaccgatgaactatagctatgtgtatgaataattgagtgtatctagaaccttgagttgtaaagatcacgaagataagtggttgccaataactttgatatctcattggtagttgctttccatatgccgtggaatctaaattacttaaatgaaaggagggtgctatggttataatgctgtgtaagataagatggtgttggtgtttttattttttatttttat

SEQ ID NO: 100206 - DNA, 256 bp, Glycine max
ccgagcttctcgatcttgacatattctggaaacctccgaacgcagaggcgaagtttggtggtacctccttcagtccgccgtgagcttggaattgtgccagccgcaagcttgttattgtgtgtctaagtgttaacagccagccgcaatcttggccgtacctccttcactccgaccgttgtgcggagtgaggacagcaaccaaatacgttgaaatctgttgcagctgggcaggaaaggttcaggactctacacagttc

SEQ ID NO: 100207 - DNA, 250 bp, Glycine max
gatgaccatgatcggtactacggaagaggacttgctcgtggatcccgtggagtcccctgagatcctcgatgatttggagcttcccaaggacgaagctgttgacatcaaagatatggaagtcaacaagctgaagttgaatagacgcattcatcacttcaagattgagcttcaaaattcctgtcgccaagggaagaaactgcttgttctggatattgattacactctctttgatcaccgctccactgctgag

SEQ ID NO: 100208 - DNA, 246 bp, Glycine max
ttggcgctgctcattggtttcggtgacgcacatcacagcagcagcggcaccccgtaccgtagactttgaatatggaaaatctttgccacttcggcaactaacacaaaaagtctgcatttttatctttattttcttcctcgcagactgaggccctcataacaacaacaatcttccatcctttttacccttcatggaatcgcgtccataacgccacctatttcatttccgtttcccttcttttcattg

SEQ ID NO: 100209 - DNA, 248 bp, Glycine max
  unsure (1)..(248): unsure at all n locations
gctctatgatcaacccttaataagtgcatccaaaccattgatgccatgggacaatctctcataatatgaagaattttctcatccacaacttgacagtctttgcangntagcatgctaacccccatgaagcaatacaagtattggtcaaaagtctagtatgctaaagctggcacataaagattctaattncttgaagagatttaggattccatatgagtcttcactgatccgactgctccagttgatga

SEQ ID NO: 100210 - DNA, 151 bp, Glycine max
ttttgtttctataaaagaatagttggacacgagaaaggtgtcagataactacatcattattctaccagaaaataatttttatttttctattgaaatgtttatgtaagaacaaattgaaagtaatagatagttgatttcaagtggcatttgg

SEQ ID NO: 100211 - DNA, 241 bp, Glycine max
aactattgaagcaacaccttgatacaagttgaggatcaggtgcacgttggaaaatgagaacaccttttacactctcccattttctgctactgcttattttctctgccggattagcctctgattttgtagtgcaagggcgtgctcacggggtgaagatcccagaacattggtgccacaagatgatccatttaagcaattgtgagttgcagaaatgctttcaagagtgctctaaacagccata

SEQ ID NO: 100212 - DNA, 244 bp, Glycine max
caaaccctatcctcttaccagacaaacctccttttcacgcttttctgttactttgcagcataccacttcactcatcacaaaccaacctttatcattctttattctccctcaccaaacaaacccaatagagaaaggaaaagtttttttcatttgggtcaccctacacaacacaacacaaccttgctgaatggaaaactgtgtcttccaccaccaccttaggattatgatcactcttccacaacca

SEQ ID NO: 100213 - DNA, 256 bp, Glycine max
gctgatttgacgagtggaagttgatgctcagaattatactctctttcgttttctatgtgaatttgtcttcgtgccaaaccatgtttgccatttttggcgtctttgcgatcttccagacttccgcacacactctccgttaaaactgcactttaatccgtttctgcttttgagctaggatgtaataggaggagtgctggaaacaaatgtctgggttaagacagggttgggaacggtttgggcctaaactgaggtggaa

SEQ ID NO: 100214 - DNA, 165 bp, Glycine max
cgaatccagagcagctaagataataaaatatagttgcttgcgggccggtcgtcagttcagactagctggtcagtgggggtaagagagtgttccgttagtgttctcacagtctcagtgcgaccttgcttggtcaacaatttggagagtttgcttccacacaacata

SEQ ID NO: 100215 - DNA, 258 bp, Glycine max
actcttacagtcatacgaagctgcccaacactctgtttttttttaccggaaaaccgaaacttcgccggaatgtggaagccacgcgctgtcccccgcgcgttctctctgcttcatcttctttttcattcagtgctggttctggtctctgcacaaggatctaacagaaccacttggaacactcttaccggaagtccaccattggtcatagcacgtggtgggttttcagggatatttcctgattccagtgaatttgcctat

SEQ ID NO: 100216 - DNA, 238 bp, Glycine max
aaaggtgattttgttaccgttgaatgctttttcattcacgtttaatatacttctatattgcagattagtgttactaaaacaacgtttttgtgatatcgagaaaaaagaaaaataaaaagtgatgtcgatgagaccggggaatccttatagaaggttcggtgacagtggcggtggactgttctcgaaatctaggtcgccaccggttttgactaatgcgctcgtagttgtgggaggtttg

SEQ ID NO: 100217 - DNA, 255 bp, Glycine max
atataattttgatttttcatacacaattaagatgcaatcctttattgttctcattcttattggctttcttcatcattgcatcagatatgtgtatggaatcagaagcaaggggacccattgtgcatgttcattgttctagggacgatgactgcaaatatcgtccttgtagagctaaatgtggttgcgtatgtagtaatagctactgtacatgtgtattttcttttatggataatgttcttactcatgcacccacaa

SEQ ID NO: 100218 - DNA, 257 bp, Glycine max
aaaagaagtaaaagaaataacaagaagaaaaggatagagacactatagacacttagagggcttgcttcctcactgcccaaaaggccaaaactacactcaaccttttttagccccctttatctcccctccttctctcttatactcaacctatccgaatttcactctccaaaattcagacttacccttttcgtccatctgatatctcattccccgcatgatcaagcataggaaggttcctagcatggtctttgttatat

SEQ ID NO: 100219 - DNA, 249 bp, Glycine max
tcaaaacccatgtgtggaattcttcatattagacttttcctttctaaaaatgcatataggaatttcatcaagttgaagtatgaatgttatttctaagtaaccatatgcatctctgtgtttgtgaatgtgtcttatcactgtgtttctgtgatgacagtgggggtgggaatgattccaaaggaccaagtgagtcctgagcaggtagagagctatatggctcaagaaagaggcaacaggagagagcttcta

SEQ ID NO: 100220 - DNA, 260 bp, Glycine max
gtcaagctgagcatgctttagctgatgcaaaggcttgtagagctttaagaccagattacgccaaaagcttgttatagggaaggggcagctctgcgtttgttgcagaaatttgatgaagctgcaaatgctttttatgagggagtaaagcttgatcctgaaaataaggagcttgtaaatgcgttcagggaagctgtcgaggctgggaggaaatttcatggaactactgaaaataaatcatagttttgcctttgctattaata

SEQ ID NO: 100221 - DNA, 257 bp, Glycine max
caagaactaatgggccaaaccctttgtatccgtactaataaacttggctcctcctcctttacccacatcttcatcatctttaaaatctgagatcaactaatgtttgcaggggaggtttttcttgtggtccattgtatcatcagtaaccccagcatcagtgaaaggtggtttttgatagcaacattagcttcttgtccttgatctatcggatcaaagttcagtgtccctcaagaaccaaatagcagttgctttcagga

SEQ ID NO: 100222 - DNA, 250 bp, Glycine max
gtcggaagagggaatcgaactcacaacctttcttccctcccttctctttatactaccaaactaactttataacttccttttcttttttccgtcccctgttgtttcttgtagagtctagcttgaacagaagtacacatgacacaactagaataggaacaaatgttccaactcataagaagcactttgttttactaatcacaacctttaaaaaagtagagcagaacaagtagattttaccataattggatat

SEQ ID NO: 100223 - DNA, 250 bp, Glycine max
aatctctctctctctctctctaaaaacactcttcttcgcatttcccttctcgcaagatcgtaaggtcggtaagaaatttagcgtttcaatcgcggtgtttcgattcgtgttcgattcttgtcctgatagagttccgaatcttaattattactgttttggcgaaggatgttttcgcgttagggttttcgggtgcggatctagggtttcgcggaggtcgaaacggtgcgttttgaggttcgtggttggggaa

SEQ ID NO: 100224 - DNA, 255 bp, Glycine max
aataatttcacaattcttctcaaaaaaccaattataacttacaatatggttactctatagttggttttatctaataatttcacaattcttctcaaacttatttggattttcttttttcttaggccctgatcccaaggacaaaaattttggttcggttatttacttgcaattttagatttgttcagccatttgggctaattataacttacaatatggttactctatagttggttttatctaataatttcacaattc

SEQ ID NO: 100225 - DNA, 134 bp, Glycine max
ctcgagcgaatcggctcgaggtcctgcccggatctgatctcatcggcctctctctttactttaccactccctgtctcgcatttcttcaatttccacgttttaactctcaaatcaaatgcttccacacaacatgg

SEQ ID NO: 100226 - DNA, 251 bp, Glycine max
cgaagagaacatcgttagcatcccctgccccgtgccgggatgcaggggactactggaggctgatgattgccgtgaaattctcgcgcctcgcgtcttcgatcggtggggaaaagccttatgcgaggctgtgattctgctgaagaaaaattctattgtccctttgcggattgttctgttatgttgattagagggatcgaggaaaacaatatcagagaagctgagtgtcctaactgtaggaggcttttctgtgc

SEQ ID NO: 100227 - DNA, 248 bp, Glycine max
ccctctccttcttcctagtgttacaacattccacaaacgactctatatcgtaaattttataatattcttctgagtctgttttttttttttctctcaagaccattataccagatccagtttgaagagatcggtagtatgagcagccagacgtcgaagccgaacgtggatggagtgcacatcgatgtgaaggttgtggagaggccaatgagagaaaggccctacgatctgttgctgcggtttcttggcct

SEQ ID NO: 100228 - DNA, 243 bp, Glycine max
caccaatgagcaagccaaggaaatgttccctaaaggcttcgagactgtggatcttccatcaaagaaggagtatttgcgtttaactaaagtttgatgatgttctttttcaagtagtagaaccttcttcagcatgccaaatctcagttcaatcaaccttaatcaaactatatatatgtcttgttaaagtacactattttgtagcactgcttgttatgttatatataagaatatacagtttaatgt

SEQ ID NO: 100229 - DNA, 248 bp, Glycine max
gcaggttccccctgttagggcgccatatgcagcaaatcctgatcggtatccccatgctggcgcaatcccatacaattatcaagttcctggccaatctgtatacactgcaccatctaatgctcctccttctactatggtcgttatatgggtactagtactagtttgcaatcctcacaccagccatacatgtgagttttttttacatcaaatcatcagttgtaagacttgagaactatcattagtagtat

SEQ ID NO: 100230 - DNA, 152 bp, Glycine max
tccacattgtatcataattcaccattaccgataaactcaatatgatccatatggatttatctggtggggtagcctcatttccttatacgtgttatcaaggttgtgtcgtcgattaaaatgaccctccatatatatgcaacttgtgtagtccc

SEQ ID NO: 100231 - DNA, 252 bp, Glycine max
gttcctgtaccaaaaaggaaactcaggcaggctacactggctttcaacaaagcaattgctgatgattctcgtgttgaaatttctgttgtttcaataggtgatggcttcactatctgcaggcgtgctcattgaacatcatctgccaatgttgtattaagattcaagttaatttcatgtactatgttttcgtgttttatttttctctcttttgggagtggggggtttactaaatttacgtgataacttgtggta

SEQ ID NO: 100232 - DNA, 251 bp, Glycine max
attcttcttcttcttcaccctttcttttctctctgggtctttttcatcactagcaaaacttggacttggaattggagttggttcaaaaagggaaacctggatctcagtcatatgaggataccttcaactctcgtggaagtgcttcttgtatttgcattgttctgttctagcccatggacagtgtggagcagcaacactctttgccaacagacgatcgaggaagttcgacctcacagtgtcagcatcactga

SEQ ID NO: 100233 - DNA, 243 bp, Glycine max
tctcgaacgaatcggctcgagcgagttcgagctcgaccgattcgatcagactgtcctgaatgatgacagcaaagtggactcacattatctgtgttgtagcgatctacggccgttgatctgggttcatcatcacaccatgcccgtgccccagcaccagcaccgtcagtggagtgttcaaacctggtattgaccttatcggattgcctcaccttcgttagcaacggcagcaccgtcaccaagcca

SEQ ID NO: 100234 - DNA, 247 bp, Glycine max
aaaaaactttacggtaatagtatcttaaaattaaagttttttttcttctttttgatcgttcttcaggcattcccaatgcacttaacgtgatatcaaatttcctattcatggttattggtctcattggccttgtgctttgccaccgtatgaactattttaacatcagtttgcaaggtgaactatggggttggacatgcttctatgttgctgtgacttcagttgcttttgggtcttcatactatcattt

SEQ ID NO: 100235 - DNA, 246 bp, Glycine max
caaagccacagcacttttcacggttcctgttagttgaggtggcagcgccatacagtactgattaacattctttcaattatatggataaaaactatagaaacagtgaagataaaatggatacataaagtcttcctgagatttggatagatgagtactggtgcccagagataccctgatttcttcaaagtcttcctcccagagaggcactctgagagaatgcttataccaaatgcttttgtgaggttg

SEQ ID NO: 100236 - DNA, 277 bp, Glycine max
tggacaatcaccaacctttggtttttgcaaaaaaattgtttttgacctaggaatagttacccttacagggttctttgaatgtgctcatatgtggttctccattaatcaaggagaaattctgacatatacttgactgttcacctgttacatcatggtttttataaaagattgtatctcatcggatttgacatcatttgtgacctcctctggagatgttgctgctggtttcacaggatctttagcaaataacagattggtgcagaaaaggatagtatgg

SEQ ID NO: 100237 - DNA, 289 bp, Glycine max
cggaatcggctcgattcgagcgattcggctcgagcgcagacgcagcagatcagatactctgtcttcaattcatgttcaagcaggtatggcacaacaacagggggacgaaatggagtatgctgctgatgataatgaaatggcggaagtagaagatgacatgtatttcagtggtagagtgtttggtgattcagagtccgaatcagacgacgatgatgaatatgactccatggaaaatcggatgacagatacctctgctgcagaagctaggaaaggaaaggatatccaaggt

SEQ ID NO: 100238 - DNA, 269 bp, Glycine max
ttcaaaggcagaggagtgaaattaagagagaattaatattatgggtgccggtctcattgcgttcctcttaatggttcttgtacaattggtctatgcagtgatgaacattacttcaaagcttgcaatagaatctggcatgagcccacttgtaccttgttgcttatcgacaactctttgcaactgtgtccattgctccctttgcttattggcttgaatggacgcgttatgagtctgtgggcatgttacgtgccagcaactttctattctta

SEQ ID NO: 100239 - DNA, 112 bp, Glycine max
acaggataatgccgaaccgatggcgcaagtatcaaagtttgggacacttcttcttcatacatctctccccagaccctccaactctaacatacaattccgtactcttctaaca

SEQ ID NO: 100240 - DNA, 263 bp, Glycine max
ctcaatcggggtgttcatgacttgcccaatgcacagttacatccaagaagagctcgcaaaacgcttcaacctcttcaaactctggcactatccctcgttctccgccttcgcccaagcccacgcccattccattcgcgccctcgtcgcaagcgccaaagtcggagtcgacgccgccaccatcgattcccttcccaacctcgagattgtctccacctacagcgtcggatacgacaacatcgacctccacaaatgcagacacagag

SEQ ID NO: 100241 - DNA, 232 bp, Glycine max
actccatcttgactctccatcgtgcattgtacatgatcaaggcaaaagcaaaactagtttttaattatagttttagtcaacaggtaaggttcaacctattagggtcacttgtatctcaaagcgtgattggacttgctttcctctgtggttcgttacctttgtctgtataaatggaaatttgtatattgtaactatattctgcatgaatgaaaatgactacacatatacgagc

SEQ ID NO: 100242 - DNA, 186 bp, Glycine max
cagctcgagcggctcgagcggctcgagcagagattacgtagttccatttcttggttccggtttcatatatcataacttgtagtgagtgaaagaaggaaggattgttggtgatcgatcatcgatcatcgatcatcgatggccgtctgcctaggctttttaagtgcgtggggtcgggcagttgccagg

SEQ ID NO: 100243 - DNA, 119 bp, Glycine max
ggctatgttggactcatgggctctgatcacaaaatcatggacttgtgctaatggctgttcgatttaaaacgatcagtaagaagtataaatcataataggtacatgcaggctcacacaat

SEQ ID NO: 100244 - DNA, 240 bp, Glycine max
atcaagtatcattcagtgctaaagagtgaggaaaatgggttgtcaactgaaaactcaattgtttcttcttttccttgtctggggatcatggacatttctatgttatggtctcccaagtgagtactccatactagcccttgaaattgacaagtttccttcggaggaaggggtgattgagctgttccaacgatggaaggataaaaataagaagatttacaggagcccagatcaagaaaagtt

SEQ ID NO: 100245 - DNA, 122 bp, Glycine max
  unsure (1)..(122): unsure at all n locations
gtggagctccacgtccaccttcaccaccccttcgtgcatcaagtggagctccagctcgttcatcttagccaatgtatggagtaacacgtgcacaancatcacctcctagtgggagaggatca

SEQ ID NO: 100246 - DNA, 244 bp, Glycine max
ctctcttcatctcctatatctctcttctctgcttcaaaaaaattttcaagaaaaaaatttccctttattagtttctcttctctacttctctgttaggttcaagagaatccaaattcccttgcctttgagttttgagattggggataagaattgagaaggactcaaactgcacgtgggtttttcagaattctgatttaggtgtaaggtttcaaatacaagaaggaaaagaaacactttgagaaga

SEQ ID NO: 100247 - DNA, 233 bp, Glycine max
gtctgtgtctctttctctctactattactactagctatatccatcttctcttgcacaaccaagttcatcactctctggtattcatagacatcactgtttcattgtctttgtttaaggattctctaatgttgtcacaaatggacatggaggagcttgtctcatgtaacaacaacgatgccaccaacatagccaaaggcaagcgcacaaagcggcgcttgaggcctttgtctcct

SEQ ID NO: 100248 - DNA, 230 bp, Glycine max
ttcttctctgattaattttcaacttctcttagctcattcacccaccctctagctatccaaaatcaatagatacaattgttcagttttattattaatttatggaaattgaacagcaagccatgaaaatgatgaagtcgtctaggttcagacgaatctgtgtgttctgtgacaccagccatggcaagaaccccagctaccaacacgctgcaatccaactcgccaaacaactt

SEQ ID NO: 100249 - DNA, 227 bp, Glycine max
ttcatgatcaagctaatctttctcatgtgtctaggtacttcactggtctgttatcaccatggaagggtatcctcctttttggcccaccggggacaggaaaggtttgtattggtattccatcagaaatatttacaacattgcctccttagtgtcattctgaaattgtaagagaatgttattgtgtgggtgcacacaaataaaattccaaaatcaaaaataaattctgt

SEQ ID NO: 100250 - DNA, 240 bp, Glycine max
gcgtatgtttggactcatgtgcttgatcacaaaatcaaggacttctgctaatgccagtttcattgtaaaactatcaataataaatataaattataataattacatgcaatgctcacacaatatacttaaaaattataaaatggtttttcaaacggacacagcttcattgttacacagcttcaacttttgatttgataagaaactgtgaaccaatgctttcattggatcaattactggttc

SEQ ID NO: 100251 - DNA, 225 bp, Glycine max
gtgctcaatggtgtggtgtcctagcttgtagagttatttcatatatagcaccgttgcacttgcttagtggcctggtagtaatggcgctctttgttttgtctctattattcttctcattcttaatggggatgagttccgagggtcagcttgaagtaggtttctactccaacacatgtcctcaagtagactcaattgtcggtgccgttgttagagacgctgttctct

SEQ ID NO: 100252 - DNA, 227 bp, Glycine max
tatcgagccgattcggctcgagggaagacagcgcaatggcgacgccgagaacaaacttgttaggcccatgatgatgctctgctccaaatgttgtcgttaattagatttagaggaaatttttggtttcggggatttacagatttttagattaggaatattcataaattcagttgagtgcagcttgtttgatatatttatttatcattattaattaattatactaaaaa

SEQ ID NO: 100253 - DNA, 225 bp, Glycine max
ttcccctctctctcttcctttgccttgtctccgtgtgaaagatcacaactccaccgtcaccgatttccaaggtttcttggtgctgctggtgtattatacatgcttacatctgcatgtgctggttgagttatttgctggtctaacttaaccatactgtctattttgactcctgagattgctagtgagtcatggggcatagacatttatatagctcatctccaatgt

SEQ ID NO: 100254 - DNA, 230 bp, Glycine max
gcattgataaagtcaactagcagtcttcgtgatgcattacttccacaagatgtaccatctctggcgatccccctgttactgcttattgctcaacatcgttctttggttgttatcatttcagatgcaccctacattaagatggttagtgagcagtttgatagatgtcacggaactctccttcattatgtggaatttctttgcagtgcattcactccagcatcaaattatgg

SEQ ID NO: 100255 - DNA, 147 bp, Glycine max
ctcgagccgggaacatagcaagcgtactgcagaacatgctactagatggtgcactcgtccagatcactgcaaggaggaatcctagatctattagcgctgtaccgttgctcttcaagaaccgcatcggatagtgtactctcccatgga

SEQ ID NO: 100256 - DNA, 272 bp, Glycine max
accacttcaatggatttcttggctaaataccagtttgattttactgcttgcatacatgaaggaatatcttatttatccagagaacaagaaagggaagcattaaggagtttgaattctacatatgatagtagtgagtggtcagacattggtaaattaaaaaatgttagggacataccactgctcagcacggcggacattttgttcactgcaagaatgaaaaataaattcggtgaatggcgtgatgggttatttcaggagcaaaatcaagaaga

SEQ ID NO: 100257 - DNA, 154 bp, Glycine max
ctttgatctgattctcttctctctctaattcattacgggaatatataaggatcaagtgaaaactgattattttccattgagtttgatttagttcttagcttctgcttcgatgccttcaatcatgtcacctcagtggcaagacaaggctgctggt

SEQ ID NO: 100258 - DNA, 154 bp, Glycine max
agtaaaaaaaactgcagtggaacgaatttctggccacaatgccattgtgttactgttgcagcctcttttttttttttttttttggggataatgcagttattataaaaactccaagctataaataaccccgttaaatttaagcttgcattggcat

SEQ ID NO: 100259 - DNA, 152 bp, Glycine max
tttgttcgctctctccctccaaattcgcgtggatctctacagagtttatttcccaaacgcattcatatttctatgatacagatcgccgcacgattaccataggctcaatcagagtcggtgattgatcctaatctcccaacaggtgaagaaag

SEQ ID NO: 100260 - DNA, 212 bp, Glycine max
ctctctttcgatctaggtactaaccctaacgcgcttcgaatcgtggcttcctcaggctcgcagaacctctctcgaagataatcttcatcttcttcgtcttcggcattgcaacaagtaaacgcgttgactcggatggtttagcggatatttcggcggacatcaaagtcgagattaaagctgtagccaaagctatgattactaaggtgcccata

SEQ ID NO: 100261 - DNA, 263 bp, Glycine max
atttggattgctgctgtgcttttcaagtccaatgatattctaaggaaacaaactgcgttgaagggggagaggaagatgctggttttggttgggatttctgttgggttcgcgcttcatgtggttggtgtctactggtggtatcagaatgatgatctaatgtatccattgatcatgcttcctcccaaggatataccgcctttctggcacgcgattttcatcatcatggtcaatgatactttggttcgccaggctgcaatggtatt

SEQ ID NO: 100262 - DNA, 259 bp, Glycine max
cgtaaatttatatattgtagaccgtgtccaaattttgtctttatgtattcatttatgcaataatttgctcaatttgttgggttgcttgaaatttaaaaataaacctgaatctcaacatcatcattcaatagagagaagagagaaaagagaaagagaagaagagatccgtgatctccatattcttccttagcacctaacaaagcaaccattctaaattgcaagaaaccctagccctctctctctatctctcttcaatccc

SEQ ID NO: 100263 - DNA, 309 bp, Glycine max
gcgagtatctcggaagtctactcgatatcgagccgattcggctcgagtacaccgctcgagaaggtgctgaccaagaactacttggacgttgagtctcatcatttcacttggtgcaattgggggattgttggaagaaacagatatgtccccggctgatgttgctgagaatctgatgccaaagtctgtggatgaagatgtggagatttgcctgcacaaattgattaaggccttgaagatgccaaggaggaaaaagcaaggaaaaaggcagaagaagaagaagaagcacggttgaaggaggagaaagtgaag

SEQ ID NO: 100264 - DNA, 285 bp, Glycine max
acacaccttgtaagaatttttctctcactccgattcaggttccaattccttgaattgacggagaagcaatctagaaaaatttaacatggaagtaaagacgaatgagtttgggcacttcgacgtcgtttcggatgactcagatcaccactttctgggttcaaataatggaaaatgcttctatgattcaaatagtaaagtctacagaaccattatgaaagagtggaaaatcctggagcaaagcttacccgaatcaatctacgtgcgtgtctacgagcgacgcattga

SEQ ID NO: 100265 - DNA, 286 bp, Glycine max
gtcgtccctctggaaatccgaaacgaagcaaacaacagaatagagttagaaggagagagagagagatggtggtcggtgttctttctgattctccttgatcttctttttctcttcgttattgttcccaacactttccagactctgtatttattgctcggctcttccatccccgatatcctatgtcaaacgcggagtggcagcagagatcagaaacatgtcgtcttggctgagatctgcggtcagcatgccgtcgtggtcggcatcaggggcacctcagtcgttccgt

SEQ ID NO: 100266 - DNA, 292 bp, Glycine max
tgcagcctgagtctgaggctgcacaagtgcaggttgcaccagtgtgttgtcttcctatcacgtatgatcgggtatgcggtccggctgatgtacacgcggttgatcaactattcgaagcgtctgtcgaatatagttcagatgataaagcattcactcatgttgggcaatatggctgtaagttcatgtttgtggaggaattgggtcgaatgagaaaagagttcactagatgttgcgatgaatgccggatcctgttgtcaaggtactctagatatagtggtacaatgactcatag

SEQ ID NO: 100267 - DNA, 161 bp, Glycine max
tcgaatcgagcgattcggctcgaggctcgaaaaacctatgtctacatgaatccatctttgttctatctctaacgatttcgccatacaacagcgataattccgtctccatcatcgtcatcaaatctcccattttctaaacctcagtggcttccacacaacat

SEQ ID NO: 100268 - DNA, 170 bp, Glycine max
ttctcgagtcgaatcggctcgagctgctcgagcaaggagagcgtgccaacaaggtgatcatcggcaccaatcatgagcaagttgagctgatcatcaatgacatgaaggcgtttaaggaggctgccactgtggcctaggtggttgtcctgaggactgctaccagagagagg

SEQ ID NO: 100269 - DNA, 283 bp, Glycine max
gtcgttatgacaggtactactgggttcttgcttcactgagtgctgttaatatactgtattatctagtatgcagttgggcttatggacccacggttgatcaactattcaaggtgtctgacgaaaatagttcaaatgagaaagaattcactcaattgggcaatatgggccaggttgatgttagtgaaggaattggctcaaatgagaaaagagttaactagatttggcaatgaatgggggatcctgttgagaaggtattcaagattagtgaaaacaatgactcaaa

SEQ ID NO: 100270 - DNA, 282 bp, Glycine max
aaacactgtgtgaatgcaaacattttgctagaagcactttagagtccaacaagttggttcttaatggttttgatgttgaagagaaaaatgatggttgccacagggcaaagcctactaagaaaaggaagtcatttaataaaagggaatgctctgatccagaaagaatcaatatcaagatgctggacgatttccaaaagagggaacagagaaatacaagagcacacaactttgataactgttacatttctcagcaggacattcaaactgtggacttggattcta

SEQ ID NO: 100271 - DNA, 288 bp, Glycine max
aaaatgcaactcgaactcgatccgattcggctcgagaattactcaaaattgatcctaacccattcttcggatccaagtgtttcaaatcaaatttcatcgctagaccagtcctctagttgcccccaacgattcatcaacgcgccgatttttctctgcagaacaatatataattcaatttttcacgtcaatctcatcgttctcgcgcttttagagaagctgtggcgttcttggaatctgggatcgaagaaaacttctgtaatgggctgtgggcattattgaagttgtagt

SEQ ID NO: 100272 - DNA, 138 bp, Glycine max
taaatttgttcatgtaagaccatattatgcgttatattatgacatgttactatatattaaaaatatgacatgataaatagacttggcgaggtgaaggtggattgtgcaaaggaatcaacacatttgctacgaaattgt

SEQ ID NO: 100273 - DNA, 283 bp, Glycine max
caaaattggaacctctggctctggatgatgaacgattcacaggccagagaccaataagacagacagagaaaagcgtagaagaaagatgggtacggattcggattcggatgcgaatggatggaaccgtgctcgagggttggcccttaagactctgctactctttggtggcgcacttctcgtcaagcgcctccgcaagtccaccacgcgctgggaccacgctcatttcgtctccaagtccctcgccggcgaaaagtattccaaggagcaagcttccagagaccct

SEQ ID NO: 100274 - DNA, 290 bp, Glycine max
atgaggttatcttctgtaacttcttcacctcttcagttcttttccatgatgtctctgtcattttcacctagtttaggatctccctaccatatgaaatgtgagcttaggggtttggtattaatccatttgttgctcgctggtgctaattttgtagccaccggtgatttacaatatgcatacctcacacttgagcagatttcccagcatgcctctcttgatggggatactatgcagcgaattgcttcttatgtttctgaagcactcgctgatcggatacttaaaacatggcc

SEQ ID NO: 100275 - DNA, 280 bp, Glycine max
aatatcatggatcaattctcacacaaactatgatccttcttaccttaagagttgttattttcccaaaattctcaatagtttttaggtattaattggagtgtctttctcgagaaacacttccttcactcattacatctctagaaagaagaaccaccaaatcaacatggaggattttcataaagaatttcaagagaagaattcagatgtaaagtcaaggtttgatattggcaatgcatctggaaagaagtggatatcaatgattaatgaggttatggaatat

SEQ ID NO: 100276 - DNA, 281 bp, Glycine max
ctaacgcgaacaacaacaacaacactgggcagactcacccgaagtcttttaaacgcagcaattcgaacacctattcaaatggagggtatcatccaccacatatgtctgggcctcaaggtccaattgctcctgctgggtcccacaactacaattcggctcttaaggagcatcaacccagagctggatttttgcctaatgatcacccaccgcatcgaaattcttttaggcaccggaatggtggtggtccacatcagcgtggagatggtcaccaccatcataat

SEQ ID NO: 100277 - DNA, 281 bp, Glycine max
gatttagttaatatcatatatatcctaacatacttactactttcttctggaaacataagagtgtatacataattatagataattatgtgtttcttacctgtctttggttaatgatacaagaaaaccatgcactctctactaccctagtctctataaatacaacaccattgttgattatttaattatatatatagtagcatagatagagttccttaagtgtgttataagtaactgctgagggagagacagctatagacagagaaatgaagagagattgtcat

SEQ ID NO: 100278 - DNA, 268 bp, Glycine max
cccatgtcaggtgtctctgctaagatttcaaatttttcaacaactatggttggtcaactgcttctgcaacgttgacattttctctcaggcatgtttccttaaatgctatattttttgcttatcattgcttgttttttccacaaaccacaatgtatgagttgggcttaatcccaaaacaagcaaagataataactttcttcaaaaccaccacatgggtagtgcctctctctctctctcattccaacctcaaaaaatctagacatactct

SEQ ID NO: 100279 - DNA, 267 bp, Glycine max
  unsure (1)..(267): unsure at all n locations
cggctcgagaccgctactaatagctaccactattactattaatgggtgttgagagaaaatggctcttcaccctcttcactgcagcattcctctccttcatcattctcatgttctcttccttctcttgcttcacatcccctatgccctttccctctattgtccactatggtccacaccacatacgagccctngnctacttcatatccggtggcaatagggacagcgaccggatcttccggttgctgctggcggtgtaccaccccagga

SEQ ID NO: 100280 - DNA, 287 bp, Glycine max
gaattctcataacttcaagttttagatttcatcgtcgtagattgcaacctaggagacatgtccatgaagtcattcaaattagcacttttctttgtgattcttgccatagaggcctgctatggtgattcattgtcaaatgaacaattaacaaaggatcaagtgataactatagttccgtgtcaaacaaagcaggattgcattcgcaacattcgttttatgaagtgtggcccatcagtcgtattctgctatgaaggatattgtgcttgtaaacatttaaacaaagaatc

SEQ ID NO: 100281 - DNA, 276 bp, Glycine max
ccaaaatattactaccactctccaccaccaccttctccttcaccaccaaagaagccatcttattatcactctcctcctccaccttctcccactccacctaagaagccaaggaggagggggcagtgcgggaggtggtggcggttatggcggtggtggaagccaaggaggagggggcagcgccggaggtggtggtagcgaaggaggaggaggtagtgctggaggtggtggtggcagccagggaggaggtagttgtggaagccatggcagacggggcag

SEQ ID NO: 100282 - DNA, 270 bp, Glycine max
agtgtctctgatggcagcgtcgttcaggtggatattacaactacacaaggatgttccaaaagccgcacgcttctactccgaaggcttggacttcagcatcaatgtctgcagccttcgttgggccgaactccaatccggttctctcaagcttgccctcatgcattctcccaatgagcaagccacacagaaagggtactcatcgcttctgtcatttactgttcctgatatgaacagtacagtaactacattaatggcgttaggagctgaact

SEQ ID NO: 100283 - DNA, 277 bp, Glycine max
cttcacaaaaatctgagatagatttatagatatagagcatagtcatgacaaagaaagagatgaaaacaactggagttataattatgatcatgattatgttgggtttctcacaagctagatataatcctttatttgtgcaaactaggccaacgcatgtgtctgataaacttaattgtcgtgacaaatgtacactagattgttcacctttactactacctccatttgccggtgcatttttaatatgttacttcccgtgtatgaaaaaatgtcacaacaa

SEQ ID NO: 100284 - DNA, 275 bp, Glycine max
ctttgtgcttactctttggtctggttcaaatgacgataaaatataatttgatttgctcaatcgctgaatgtgatgtcctctgcataaacaccaaggtctgcttcgccttctcctgttagaagccgtcgaagtcgatcaaagtcattatcaaggtccaggagaagtcgttccaggtgtagcttcccagaaacgcacttctaattggctctataacttaccctatattagacatgcacacacattcataaacgctaagttgtgatatgatagatatc

SEQ ID NO: 100285 - DNA, 270 bp, Glycine max
cttgattccaagatggttctgctagcgacgctctgagatgacgttcgttgctggccctcaacctgaacgtagccttggcaagctcagaaaactcaccatcctcaaaactattgatgaaggagacagtaggaagctggagcagacgttctcgatgccgtcgagaccgacaaccccgctgactcccacgactcgaacgacaccgggatccgagcgtaaagctgacaacgattggaggagcgtcttccatccttggagcaactccgccacaaa

SEQ ID NO: 100286 - DNA, 306 bp, Glycine max
aattcctacaaatattgcaaactcactcccaagaccacaaatgatgatgaatccaccaagaccactgatttctagacctgcaggcacggtagcaactattcaaaacccattaacaccttcaactgcagcaggaaattcagttcggccatctaatcaggaaaagctttcttctgttgggacaaaataaatgtcaatacatatagaaaaatgttcatgtcttcatacttactgatctctcgccatcattttgacaattaaattcttgcaaaggtcaagtgctggttaggactaactccaaattgagta

SEQ ID NO: 100287 - DNA, 294 bp, Glycine max
aagttaccgtcccatggtagaaatgcacgattacgaaatagtcctgtcttcttctgcacgttttcttccacctccattgattgaagttattactggctgttaacgggtcgggtcgcgcaccggggatgttagttagatttagatagaaagggttgacccgacaggagtggctttgtgaagtgcactgctgcgtttacttggaaaaaaaaaataatcagaaacgcaaatgtcaagaatcacccaattccgagctctactactccgcggcaccaccaaccagcgctcccctctccg

SEQ ID NO: 100288 - DNA, 101 bp, Glycine max
attattattctctcaatcatcatttacaaaccatttctgttttcctttcatggttttattgtattcctatttcgcttccgattagggttccacagaacata

SEQ ID NO: 100289 - DNA, 296 bp, Glycine max
accaacttgacttgaactcaggcatctctattcctcttaatattatatcattattattccaagagcagctgagcttaacatctttggcttcccctaatggcacaagatactgtttctggagttgactcgcctcggggacgtctattacgagatcaggttcaagtggttaaaaaaaaggattctgatcgctatgaaattgttcctatccaagattctttgtcatttgagaaaggattcttcatatttatccgtgcatgccagttgttggctcaaaagaatgatggaatcatattagt

SEQ ID NO: 100290 - DNA, 289 bp, Glycine max
cggctcgagcttatttccagagacgaggaaaacaaaaaccgatgactgaaccctaaggggaaaattgccgatgcggcaccgtaataccatttcccaattctagcactgttggctggggcaaattcctcacccaaaacgacacatgtttggggggccattttgatttgaggctcctttgatttgatcatcttctcttccgccatcatccattgaagagcagcaactaggagctgcaaaccacatacaagcctgattttcgcccctctctactataaggtttctgaacttt

SEQ ID NO: 100291 - DNA, 288 bp, Glycine max
tcttggtgtgtatggttgaagatgccttttaatgcacattacagtgttgtaggctatggtatagaataagtatggaactatcgactgtgcttcatataatactactttgggtcgattctaggagaggcaggaaacataatttgctttctctatctaataagtaataagaaattatgatcttctctcattttaatcttactcataagttcaagtgttttaagtcaggtaatactgaatgatttaatttttgcccatcttataaaaaccgagcaagggaactctcagatg

SEQ ID NO: 100292 - DNA, 226 bp, Glycine max
gtaaattttcggcaatgattagagaattagattatgattcttcttttttaaattttgaaattcatcaaatataaggttatgtatctaattatgattctaggggttgtgttgggccattcacttcctgtacacagttggagcccttcaaagtagccaaactatttactcacaatatatgcactatttattttaccacatattatgttagacacgcgttgcttgcagt

SEQ ID NO: 100293 - DNA, 288 bp, Glycine max
gccaatatctactacttctatgcccatggatagatatccccttgaagtttcttcaactttcaagatcagcggtggcaacaacaacaataacaacagcaacagcaccctagacaggtttgacagctccatcactagttctgatatgatgggaatgggatatttcccttttcagcacttgaactatggatcaaacatgggactcactactacacccaacaacactccactttgcttcatgccaagttccacttcttctcaaatgatgtcagagctgaattccaccatgct

SEQ ID NO: 100294 - DNA, 280 bp, Glycine max
gcttggcacaccctcacccttggccttggcaccaagaagtccaaggtgctcctctttgtgtttgaaactgaggccatgaaggcctcagtggacagaatttggccaccagagatagcacttggtgatgtcaacaagaggctcataaggggcctcaatggatgtgagatggcaaggttcaagttcagaaaagggtgcataacttcctacttgcctaacagcatagacatagaaagttatgcaagtaggaagctttggcttttcctgtgctgaggatctaaga

SEQ ID NO: 100295 - DNA, 248 bp, Glycine max
gtttgaaagtgtgactgcttgaaagggttcttctgtttcttcctccaaagcttttcatcgagttcgcggcactctctaacgctacccaacttgggggcttcaaccccctcagacccaaccttcaaagttctcttccttttcggcatgcttctataccttctacctctcgcagagattgctcatcgaaagcccttctcagcacccgcacacccacctctacccacaacatgtctggtacccattccacc

SEQ ID NO: 100296 - DNA, 274 bp, Glycine max
aatcataaatttcaaacaaaactgatcaaggcaatacaacaaagagatcgtgacaacaacggtgcacaggcaattattagaaacatactcttggacaaggagattaatgctagagttagttctcaaaccagcagcattctaaaccacacatatatgcatgcaggtttcttgtcagatcaaagttgatggtgaacacggttcttttgcttgtcgatgaaaatacgagctttcttgtcaatattgggcgaagtaccccccaagtcctttgtcgtaa

SEQ ID NO: 100297 - DNA, 110 bp, Glycine max
ctagcccttccttagcttaatactcatctatctacaatatcataatatcttctactagctagtttgattgttatgatcacaatagtatctatctgcaatatattgttata

SEQ ID NO: 100298 - DNA, 265 bp, Glycine max
gccattcggagaaattcaaatgccatgtcagttgtggtggcagatactgggagttgataatagatcctactcattttattgggtaggccctcgatagaaaagatttatattctttttgcatgatggctgataaagaatcttgaactgatgaagaaaaactattagattccacgaatctttcctttctatgtaacttggaaaaaaggatatggaaggaaaacccattattcttgccaggaaacttcattatgacagttataatgaa

SEQ ID NO: 100299 - DNA, 245 bp, Glycine max
gtttcccacttctctctcgctgtccatgcccttgtccctctctcttcttcttcttcttcttcttctgactttctctctgtaacaccttctcttcatgatatagcttcttcacctttctcttctttcttttctttgttaccatatataagtaaactagattccataactgtcccaagcgcttccctcaaaagggtcctctcttttcaacccaaaacagatctacatcttcatcttcgatagcgcgt

SEQ ID NO: 100300 - DNA, 191 bp, Glycine max
gttacattacttagtactctatataaactattatgaggatactgatacgtacaataatagttatgttcatgcatgaagagtggtgtaccagacaggctcccaggatgtcccccttgtgctggaatctccattctccagagctgcttgaactcttctcatcatctgtctctctgatctctgcctcgcactgg

SEQ ID NO: 100301 - DNA, 277 bp, Glycine max
aaatcactggagtctcggagcagtttgacaagctaccattaaccattttattttaatacgttgtttattttctaggcagcagaatgattaatgacttgctgtaaataagttactagccttcctcagtttgtttcaatttttatatttataaatcccatttgtttcaaaaaaaaaaaaaaaaaaaaaaatattaaagaaaaaaaaaaaaaaaaaaataaaaaaaaaaggggggccccccattttggacccttgcccccgggggattttttcggggggg

SEQ ID NO: 100302 - DNA, 244 bp, Glycine max
tgaaaactgagttacacattgctatttattcaatgttaaatgcatggctactttattttattgaagctctataacttgagacagctaatctcatttatctgtgtaattatttgttaaaaagggtatagtatagtaatctttttgttccccttttaattttttattttacattgtacaaggtttttttcccatcatcattctatgttctatagttatggctccaatctgaagtccaatcaaaact

SEQ ID NO: 100303 - DNA, 269 bp, Glycine max
gtgagttagaaaacacaacaaaatctgtggcatcaaatgaaactgagaaaaatagtaacactgaaatgagtgaaacaaacaagaatcagactatctcacatgtggagaacactgatgctactaagaatgagttcaagggtgacacacaaacagatgaaacatcagactcagttgaacaccaagacactgattcttctgattctcacatcctaaaaaatgtggcgagggccgaactgatctggatacgttgccagatattagaaatgaag

SEQ ID NO: 100304 - DNA, 268 bp, Glycine max
tcggcggaaacaaaggaggcggaaacttcttccttgacgaagttgctgcttgggactccctccatactccttcttgctgcatgtaaatctccatcagatgaaactatggagacagacagtatagcaataaagtcttatgtctccgtaataatgaataccttacatcatctgattatctccttccatcatatcctggacagtctttgaatatatacataaaaatgtatgtgtataagtatgtacaaaccatggggattgggggtgttaa

SEQ ID NO: 100305 - DNA, 266 bp, Glycine max
gggtggagtggtgtggggaagcgacatgaattgaatgtctctaacacatgacatgtgagtttctgatgaatgactttcagtaaaaacccgtaggtagaaaataaaaaattcctctggcttctggcttctggcttctcaaaatgaatgaattgaaatccagctctattatctatagtcaaatatgaattaattatagctgctacctaccttcccaatgaatggtattcgaggattagcggcgatgatgacagcagcagccggagatc

SEQ ID NO: 100306 - DNA, 264 bp, Glycine max
cactgtccatcccatcggcgatcgatttgatcggagactcaactggtgcggccaattcaatttcagaaagaagcaagatgataaaagcagtgctggtgttgaacacgcaggggaagcctcgtctcgccaaattctacgaatttcagtctgtggagaagcagcatgaagctattcgcaatgtgttttcagtcttatgcagtagacctgaacatgtcagcaatttgtggatgccgagtccttctttggcccggactcccgcctggt

SEQ ID NO: 100307 - DNA, 260 bp, Glycine max
attcttcacaatttagaaaaccaactactaaaaaaaaagcaaaccctcccaagagaagataaacaccagctagcacattctctctctcataattctcttctctctttagtttttgttgtcctaatgagttgttttactcctgaaaaacccaccatgtctactctccaaatggttcctcttggcaagcttcgttaccaaaggctaaggcatgaaaagggtgggatggtgaaagggaaaggaggccaaggagctggtttagg

SEQ ID NO: 100308 - DNA, 263 bp, Glycine max
cacatatccaactatgaagctgggtttataaattaaatgttcacaatctctgcctttattatcagaaactgaaggatatggtcgatggctgaatataaagaaatttcgagggcttctactgagattgaaagaataaaactaaactctgagggctgtaatctaaatctagtaagtatatcagttacacttttacttatgttgtatttttgctatgattcgtgttggactttccccctatcccatattatagataatagactgtc

SEQ ID NO: 100309 - DNA, 260 bp, Glycine max
tttctcttttgaacttctttccattttcctttggcttttcgtaaatcaagtttgcttttttacttcctgtttgaacccgaaatttgtctttttttcaaaacgaagtggtccttgtttacgagaggaactagcaggttctgaaatttttaagctttcatctcagacagggtgtaataagaaatgatagatataagtactctcaatgctgcacagatactgtgctgggatccgcgttttgtgttatgctttccatgcatttc

SEQ ID NO: 100310 - DNA, 268 bp, Glycine max
gctgtctagcactttagcatgcatggcaagtctctcctttaaattaaaatgtttaattgatttgtttgacagctagaatatttaattgatatagtcttattttaaatatatggtctttaataaatgccatttaaaaaccattttaatcttaacaaaaaaccaaaaagagaagaagcgaaaggagggaggattgaggaaggagagactttatatacggaggtaacagggcactgtagaattgcgcgtttgaggttgttgtgcaaaggtt

SEQ ID NO: 100311 - DNA, 160 bp, Glycine max
cattaaccataaccctaatgtcagagcgcggaggtggcgaccgtgtcagcgatcgtggcggtgtcggacgcggcttttgtgctcctgggctcggtggtgacagttgctcgaggccggctccgctgtccccgccgcgatgttgaggtgttttgggtcccag

SEQ ID NO: 100312 - DNA, 258 bp, Glycine max
gagaaagacgtgtgaagtgtgagtgaagaagctcttgatgttttctcttgcaacctctgaatctgatttaaaacattgcattgtgctatagcatgcagcctgcaactcatccacgaccatgaccatgagaactccccttgacggctgctttgtagagtccaactgctgctgtgctgctatagcatcctatcaataaccttgggtaggcttcagttgtgctatttaacagtgtagggcactgcgtgtttacgaaataat

SEQ ID NO: 100313 - DNA, 261 bp, Glycine max
gttgtattctcatacctttccgaggcatatatatataagccgccattttatattccaaaaccatcttaagcaaatttccccctataggatctagcacctagaccttctccttgattttttatatctatcctggtatgctcactcctttattcgtttaagcattcactagttaactctaggcctagcagataatcttagtttgtcatgaccagtgccctgtggatccaacatgtttaggtttttccatgggaaaaagaacag

SEQ ID NO: 100314 - DNA, 264 bp, Glycine max
gcacaagtccccgatgaacatgtaagccactaaatctgtctcttattcttggatcatctccctcttcccagcataggcaatttttaaaaataaattatttagttattttatgtaaatataatgctatgaataagaagggaagtgattaagcattaacacattcactgagatgggattggcttgtttgatttaattattttgtggtctaatcaaggattactaagctgaactgaagttaatgtgttgatctttgactggagatgt

SEQ ID NO: 100315 - DNA, 265 bp, Glycine max
gtttccctgatgaaatgagcaagaagatgagtgtgaaggaagctcacgagtacgtgcgaggagctgtttcaagattcataagagccagcaaggaggccatcaaactaggggctgatgagtctgctattgtggatatgagatcctctctcactactagatcttcagttcataattaatacaaaacaaaactcataaacagacaagagcaaagaaagttgtgtgcctatctctgtatctaactattatagtttttaggttatctgat

SEQ ID NO: 100316 - DNA, 260 bp, Glycine max
cttttcttaatttctctctattagtctgcatgctctgcaaactgagcatggctcctctcgcattttccttcttcttcatccttatcacattcttttcttcatcatctggtaatatcattctttcagtttctacatacacaaaacttatatctagtttcatatatattttttggtgtatttttctctaatcaaaattagaatttctccttcataatctatctttagacctttattaagtcagtttgtttaaattatttgtc

SEQ ID NO: 100317 - DNA, 225 bp, Glycine max
tgataaaaaacccaataccaaaccctaattctccgaaatttgatttctttcaggaaagttcttcctaaatccacgcctcctgcagacgcatatcgcttttcatcttctttctaattctccgcaactaaatttgcgatatatcagtatcacagtgttctgagcatgattccttaccacaagaacctaaccaggcttggctataaggcacttattgctcagtggcga

SEQ ID NO: 100318 - DNA, 250 bp, Glycine max
aaaacccttcactcattcgccgaaccctgaagaatactgctttctgaacccgtgatagtgaacgcgaagaacaccttcctcttcgcacttagcatagtcgcatagttctgaaattcgacgctcagaattgaccaaataaacagagtcaaaaatgaagatggtaactgctttcaccggcaacatgaagaaagctgctgctggacttagacgcattaatcttgatggtcttcgatggagggtttttgatgca

SEQ ID NO: 100319 - DNA, 252 bp, Glycine max
gcgtacataaattccatgtcaaccaactacccacactagagcgaacaaagcatggggaaagtgttcaatggagtagaagagttctctgaatcacgcaatgtgttcaagacggttcctgcattggtgttgtatcttggagcaattcatttcaaccttgcgttgatactctgggccacagtcttccttcctctctccaaaggactcttggtgttcggtttgctcttggtgttcgtgctcatccctgtggacgag

SEQ ID NO: 100320 - DNA, 255 bp, Glycine max
ctttctaactcccccaagaaaagttcctttttcccctttcccctactcttttctttttcttcggtcaactccgtttactataaataatgaccactcttcttcaacttcattaatactcacctttgaatggattcttcttcttcttctccaaacaacaacaacaatcaccacgcttccacaaccaaaaccaactctttcctaattcatcccaagctgggtttcgaacctgccaggtctcgatcacgtcttgccatg

SEQ ID NO: 100321 - DNA, 248 bp, Glycine max
caagattaaggagttgggtcttgaaggtacacaaagggatgaatattatgcttggggcctgcatcagatagcaaaagctgtgagcttcttaaataatgattgtaaacttgttcatggtaatgtttgcttggctagtgttgttgtcacacaaactttggactggaaactccatgcttttgatgttctatcagagtttgaagggagtaatgaagcttcctctgggcaaatgctgcaatatgcttggcttg

SEQ ID NO: 100322 - DNA, 246 bp, Glycine max
cagtttctgatttgttttatgttatatttgtatgcttgccaaggagttgtggctcagcaattttagcattttgcgatgaggcccaccaacttgggtaatggtttttctttttctttttttttcctacttgggcagatatgtaagccaaacaagtgaatctagtaacacattgcaatgattgaaaaaaagaaaacagcttgtaattctaatttatcttgtaaaaaaaaaaaaaaagggcggccgccg

SEQ ID NO: 100323 - DNA, 252 bp, Glycine max
tcggcgttcgccgggatctgaaccgaaccggatcgcgctcgttcccgccgatcgtgcctcacgaagaggaattcctctccgacgccgctccgcgcaagctcggaatccggccggaggatctacgattcggaggtggagacggcggcgataacggtggaacgagtctcaccggcggaaacggccgcgaatggatgaaaatcggcgcgtactacgaggaaatgttgaggtcaaatccgacggacgcgcttctgc

SEQ ID NO: 100324 - DNA, 130 bp, Glycine max
  unsure (1)..(130): unsure at all n locations
cggctcgaggtgtgtccctcggcctcgccacggtccccgcaagcagcatcactatggtancattcctaatccctgacaccccaagtagcctaggggagctgaaccaaataccccaagcgagagacgctct

SEQ ID NO: 100325 - DNA, 147 bp, Glycine max
tgctttggtgcgtggcactgcaaagagcaaacaaagtcttgtttttgtggctgtgaagaagagaagggatgctttgcttgatgcttggaaaaacaaaagtgatagttctacacctatcataatgccattcaggagcattgtgcgtga

SEQ ID NO: 100326 - DNA, 151 bp, Glycine max
cgaaaatccagtttcacctcggcaaggagaaagaaccccacaagtttccacttgccccaattcactttcatggcttcattatttgttggtaaccaacacacatcatttaataatgataataagaagaagaagtagaaggagaaaaagagaa

SEQ ID NO: 100327 - DNA, 154 bp, Glycine max
ctaaaacaataatagatactaccactcaaaaaacagttactttggttgtggtcgtgtttcggaggagaatcataaatttgcaatgaaaagaaagatagatagagaaccatgacaatgaggttgagaataagaaccataacagcgagacattcac

SEQ ID NO: 100328 - DNA, 143 bp, Glycine max
ctcagttcaacaactctcagcaacatgcacaatcctcccccgccaggcggtccaggccctcaccaccaccccggcccaccggctccgccaccacatgctcatccatctcctccgcctcctgggcctccacaccaccaccacgg

SEQ ID NO: 100329 - DNA, 150 bp, Glycine max
taggtgttatatgtgtgtatatgggttgagaagcctatgtaaacaaccaaatctagagaaacccagatctctgttcgcccatttgaaggaaaggaaatcttacacctctctctccaagtactgattcgcgccaagtccgacgcgcccaga

SEQ ID NO: 100330 - DNA, 148 bp, Glycine max
catcctcaccttaatcacctaccctccatttcactaatctgtctcttaatcacttactcagttaaactaatcactcaatcaccttggctaagctcaaggaaagaaggacatacagacacacacactatactcgttttcttctcgtata

SEQ ID NO: 100331 - DNA, 147 bp, Glycine max
gtgatgagatggagtgtgtttggtgaagaaatgaaaagagtgggttatctagcaggtcctatgatcaatgtgactttgtcacagtattttctacaaataatatcaatgatgatggttggtcacttgggtaaacttgttctctctagc

SEQ ID NO: 100332 - DNA, 147 bp, Glycine max
ctgcagcccgatcgtgctgtgatatacagtaccatcgatctttaggtgtccaagatgtgccatgctcatcgacgtcctgtacgcgaagaaccccgaagtcttcagcgtcatcgaccagggcggcgaaggtagtaccatcacctaggc

SEQ ID NO: 100333 - DNA, 142 bp, Glycine max
ctcgagccgctcgagccgattcggctcgagagagtgatagagaaagagcttagcttaggaatggaagcagacgaagcatgaagcagcattggcagtggcctcagtctccctctctctccccagagttttgcccttcttccaa

SEQ ID NO: 100334 - DNA, 143 bp, Glycine max
gtcagaaaacaaaaggcaaaggcgaatggaaggccatagcgagatgggtctaatgggagaaagttttgatactagtaatttgctagggaggatgagggatgacgaatatgaaagccggtccggaagtgataattctgatggcg

SEQ ID NO: 100335 - DNA, 142 bp, Glycine max
acggtgttgaccagagagtatctgtatgctcgccctggttgtttggtggattattctccacaaaggatagcgcagttgggggcaaataagtgcactaacaagacactttgtgaagagaacctcgatgtgttattacctgcaa

SEQ ID NO: 100336 - DNA, 141 bp, Glycine max
aatcttttcatgtgtatcacaaaagaaaaatggagatgtcgtcgatggaacaaaagaaagataccgaactggttgaaaggaaaaagggtggttacagaaccattccctttatcatagcaaacgagacctttgaaaaggttg

SEQ ID NO: 100337 - DNA, 283 bp, Glycine max
tgtggaaagcatcccggtaaaagcaggaaaaaggaggtgaagacggaaggatttgtctgataattttataaaaatgagggaaaaaagagatattatcagtaatgtaattctttttgaaatttacttcatttaaaaaaaaacgaaaaaaaaattactttggatacaatacacatcactccctctctctttggatctcatagccgccgctcgcggtggtgccaccgttgcactctccgctgctctctattcgatctccctctcaccgatactaagaaggtaaagt

SEQ ID NO: 100338 - DNA, 281 bp, Glycine max
cttcgtctcactcgtgactcgtctctgtcccctctctgacaatctccgagtccttctcttttccgatggcttctacaaaggtcaacaatcgaggttcccctggatcaaaaaggtttcgaaacgacgcttcgcgtaaagatggagattggcctgtcctaattgtgggaacttaaacttttcttttagaactgtttgcaaccagggacactgtggtgccccaagaccatccctaactataactccaccagcccccattataagcccatatagaaacagtcatc

SEQ ID NO: 100339 - DNA, 277 bp, Glycine max
aaattacccatcttcttactcatgacatcatcttccacttcacaaaactcagagccctctctgatcctttccacctcccccacgcctctctttcaaattcacctgcaattggactcgaaaccctacccaaccaatttcaaattcacctcaaggcagtgttctctgctacaatcggtgcttgatcttgcgggtggggttttcgtggcctgatcttgtggggaagagcccctctgacatcctcctctttaacagcatcaaccttggtgaggaaatcttc

SEQ ID NO: 100340 - DNA, 275 bp, Glycine max
  unsure (1)..(275): unsure at all n locations
cttgtaccgaaattcggataatggtgtctctaatttcaacatttccaccttcttcatctttccnantcatcccttcttctctccaaggtactactcactcactcattcattcattcttcatctctctctttattaattaacactgtcgctacgtataaaaggggcgtccaattcagacacaactgcgtaatttacaaacggaaaacggtacggtgcgccgtcaccagcgccgacgcatctcctccgccgtcaacgtcgttggccaaggaactcac

SEQ ID NO: 100341 - DNA, 275 bp, Glycine max
ttgggaagtgcaagatgatgataatgagcatgaaacgatgtattaaagaacaagtcggtggagtaggagaagctgctaactgtacgtgtgctttactgcatcgtttcatgctcattatcattatcttgggaagtgcaagatggaaacgggttatggtgcgcaacaccctataaatggactggaggaagccaaatgtaacgatgtgcgaatctcctccaaggccagtgaaggttacctttgctgagccggcgactcactggaccgatgccatgccc

SEQ ID NO: 100342 - DNA, 278 bp, Glycine max
gccactgccatcagcattctcaacacctcctccctcactcactcatcaatggcatcaacaatatcagcaatggccatgatcaacgccaaatgcgtcaacccaaagttccccaaccccaccaagctcgtaccatcaaaaccttccctcaggtcaaccttccaaagggcctaatagcctcacccgaaaacaccaaactttccactgcgacagcaatcgcaggagcaatattcacaaccctcggaacctgcgacgccgctttcgccgttcaacaaatagcg

SEQ ID NO: 100343 - DNA, 275 bp, Glycine max
cttctctctctttagacacactcttctcttttctcttctcttctctctttttcagttgcaacatgagaagatgatgacagatatcacaaacctaagcacagacctcatcgagctgatcctgtccctcctcccaatcccaaccttatgctagcctcaacagtttgcaagctatggcactccataatctcatcctcttccttctcaaccctctcctaccacctcaagcagccatggttcttcctccatggcatccacaacatctcctcaaagaacaa

SEQ ID NO: 100344 - DNA, 276 bp, Glycine max
agaaaaagctttctgtagcagggaatgccgccacagagaaatgatgttagatggaatagaaaatcttgagtttgaaagcaatggttattcttgactagatcatcacctgcgtgctttgcatgcaccgtggccgcaaagtcctgattttgagtagaggataataaccagaaaatgctcaaagtcaaatccaaattttccaattcataatgattttattatatgactaggtagcagtagtagtaacgagtttactagttagtatttcattgtaatcag

SEQ ID NO: 100345 - DNA, 271 bp, Glycine max
aaataatgataaaataaagtagcagcgtagacactcgatgggttgaaagaaaacggtcgtaaacgtaaacgcacatgcgaaggaaatgaaaaatgtttctatcctgactcttacactcccactactacccccactgtctttatttttgtctcaatgcaattattttttagaagcagacaaccacccaccgcttcgttactctatttcacaccctttgtataagctgacattaaaagcatcacttgttaaagccagcatcatataatttcat

SEQ ID NO: 100346 - DNA, 276 bp, Glycine max
cttcagcaccatgaccctcaacctggtcctcctaatggccatggacgccaccaacatcctctccctctaccacctctcctccaccctccaatcccccaaatcccccaaaccacacccaccagtccacgaccaactcctccacagctccacaccatacgcgccaccatcagtcacctcactcgcctccagaacacccacaacccagcacaaaaatccaccatcccctcagatctactcttatactcccacctctccccaatagcctcttcttgccac

SEQ ID NO: 100347 - DNA, 304 bp, Glycine max
tatgttttccctctttcgattcggtctcacttcataaaattccattcaatcaattcccttcactctgcatcgtgttattaattgacatcatgagttcgaatctccgactaacaaaaacccaacaaactaacaactaacatttagctattaaaaaaatgacatcatgcttttgattgagaaaactgttgatgataaaacagccatattctgttatgttttattttattttattgacaaatttgttgttcagggttcctgaataattaaagatgggactggctctgggttgtcttcaagtggagca

SEQ ID NO: 100348 - DNA, 323 bp, Glycine max
cgcatgctcggaatcaggctcgagctcgagccggtttcctcatttcaagataatagcattacatctaatgatagacacatgcagtatttgatcagtgttgatttagaatctggatggaaatatgaggttactgatctgcttcaatatatttgataatgttttatatgttcaatctgtggttaaacatattgtcacttgaaatagtatctcttctaactttatctggtttttggtaaaaaaaaaaaaactattgttttccttcataactaaggacaaatcatcttgaacaataaattctgattttttgttcattattagttgtg

SEQ ID NO: 100349 - DNA, 307 bp, Glycine max
acagaatcataggaaaggagacgtacgatacgatacgatacgatattgatagggtattctcagtggacgatatctccgatcatttcatggccgtgcatccgatccacgtttccggcgccaacacatcctctcagatgagccgcagcgcctccgagtggagctttcagcgcttcatccaggaagcttccgcatccgcacactctcctccgtcttcttcctcccccgccgacgtcgtattcgtggagatcgatgatcagcccaaacccacccctccgcatccgtcacacggcggcgttctgcccagtga

SEQ ID NO: 100350 - DNA, 170 bp, Glycine max
gtaccatcatgatgctaattaaagggaagaggaagtgacatgcagaggattcaatgcagatcaagtgcatgaagacaagacgtttctaacgtctagtgcattttgtaatcttgtgtcacatttgaaagcctagattgaaaattgctcctacacattttaatttattaccc

SEQ ID NO: 100351 - DNA, 302 bp, Glycine max
tgcttgtctactatttagattctgaagatgaatgatgtgcacaaacctttaaatacccactacttgtgcactatggtgtaaggaggtgcttctttttcattttctctttttttgttaattcttttttgagggtgtgattgagttttatagcataagatttagtacttaaaaatcacagctctaggaggaaacaaaaatctgtcactaatttgaatgagtatcgacaactcaggtataacattatttgactcctgttaagcatgttcccttgaaataacttgccaactagatttttatggtaa

SEQ ID NO: 100352 - DNA, 303 bp, Glycine max
  unsure (1)..(303): unsure at all n locations
taanaattccgatcacgcgccatggaacaacacgatctccgccgccgccgccgctctccgccgttaacctttgatcccaaaccattgccggagctcgctcgctccgcctccgcctcctccgccgtcaccgtcgacaacgcctccaaaggcttctcgcatccgcctctggaccagtcgacgagatggacggatcagcagcacagtctatatattctttctttagaggcctcatttgtgaatgaattgcatcgatctatgcgtttacatcatttgagcttaaaaaatagcacagatgaagcatat

SEQ ID NO: 100353 - DNA, 209 bp, Glycine max
  unsure (1)..(209): unsure at all n locations
tctaccctttcgtcaccatgccaccgatactctcactttcactctcactagtgttggtggtgctgtttttcgccgccgtggacgcgcattntccggcgaccggcgagctttcaacgttccgcgaggcttcggcattcagcaatcggagagaatgttgcaaccgcacgcgaaaggactccgtgatccacaacgcgatgacgcttgacgcg

SEQ ID NO: 100354 - DNA, 249 bp, Glycine max
  unsure (1)..(249): unsure at all n locations
cacacactctgatgttttggatttggcttaagtgactgtgttctgtttcttcaattgcacaaattggtggaccttaaattccatcacntgaagattagttgatagtataggaatagaagctgcatcatgacgagcataaatcgaacgctctttggtgactggtgatctcatctctttctactcggttgttcaggagagtgtgtctctctgagactacggaaccgttttcagtccaatttcatctattac

SEQ ID NO: 100355 - DNA, 272 bp, Glycine max
caccatgttgctcatgtctagtgtctctagcagttattccgtggatttgaagaaagaccttttcctccaattgcagagtctaagtttaaggcctaagttctctcaactctcattcaacccacttccaccatcaacttctactcaaacttcagcccgtacattcacaattctggcactcaaatttctaagatcaaagccgctcttgctaagactaaggttacaaagccaaagcaaaaggttgaagatggtatctttggcacttctggaggatt

SEQ ID NO: 100356 - DNA, 266 bp, Glycine max
ctcatctattctcgcctcagctttcactccaaacccttcccaaaccctaaccaaccacctcacccctctcgatctctttcgccgatccccgaaaccttccctatccgataattgacatttcgccgccgaattttttgggaggaacaaatccacgatggcggcctcctccaccagccaggtctacatccaggtaatcgacgatgtcatgatcaaggtccgcgacgagttcgtcaacaacggtggtcccggcgatgaagttctcaagg

SEQ ID NO: 100357 - DNA, 206 bp, Glycine max
  unsure (1)..(206): unsure at all n locations
ggccgtttcattgaggtaggcttatgcgttatgacaccttcctcaagcacgtgctaaggcactatgtaatggttcctactatccgtcttattaccatcaccaccttttcagttcggtgtgtacttcaattcacagttangacctatgcttaggaattctcgtcattacagtttgtatgacgccggacatacaacacaccgtcttca

SEQ ID NO: 100358 - DNA, 265 bp, Glycine max
cggctcgagagaaattaaaaacacccattttcttcttctttcgataataaaaaaatgctcttacgtggcgccatctccacccctctcccgccctccctccgcctccgcgcatcacccgccgcgcgcagaaccgtcgccgtcgcttcctcctcccccagcggcggcggcgattacccgctctcggtctccgacacggcgctggagtcgcgcggcttctcgctccggcgtggcgcggaggggctggacctggagttgctcaactccg

SEQ ID NO: 100359 - DNA, 260 bp, Glycine max
ataattttgaagtggttattatctaaggtgatactttgattctgctatgggataaatatactacagcacgtgttatctttgtatatagtttctgcaaaagatctcactagaattgctttagaaggttaaaggtagatgaagtttatacaggtttaatgatacgtgtagtatcaaaggtacctgcagaaatggtaagtgacagaggaaggagaagaaagggaaaggaaaatatctgcgaagctattgctcccccaagtgac

SEQ ID NO: 100360 - DNA, 258 bp, Glycine max
cataaatgtgggaacagctgcctgaaatcttcaggccccaccaaaagcaacccccaatcagctaccatatctacaccttttagattcagaagtgaagaaagagcagttaaacgacaaagagttcttgcagaggatggatgaaactaaatccaaggaagaagagaaagttaagttgcaacggactctcaagggtaaaacagagcatgatcacaagaagctgcggcagcgcagtggctctatatccaaactaaacgaaga

SEQ ID NO: 100361 - DNA, 261 bp, Glycine max
ataaacctctgtcttgtacaaaggagaagcaacgggtatcggataagtagcctggtttcctcgtcctgaaagaaacaccagcaaaccactctcaacctaagaggtaaactaaaaccccttctcaattctcatttagcgaattctatttttctaccatatctctcatatttctaccacaacgctttcagtgttgcaagtttactgaaagcaatggatttagtggcaccagccgaacaggtttgctcatttcaccacttccac

SEQ ID NO: 100362 - DNA, 262 bp, Glycine max
agggtcttgtgctggaattggtgtccaagtacattccatcagataacagtgaaatatttgatataatgaatctccttgaagataggctccagcatgcaaacggtgctgttgtcttggcaactattaaagtatttctacagttgactttgtctatggctgatgtgcatcagcaggtatatgagcgcatcaaagcccctctcttaactcaagtgagctcgggaagtccagaacaatcgtatgcagttttaagccacctgcatct

SEQ ID NO: 100363 - DNA, 272 bp, Glycine max
gaataattgcatcactttttgaaagcttatccagtttttatacttcactgtttcttttttacactacactgttcttagttgccatctccaggcttgtaattagttcttttctcctgaaggataaattattacttaaatgttccatgtgcacagtatcttctttttacaatctttctagggttgacattcgctccaacaacaggagtggtgatgcaattttgatccacaaaaaaggaaaagttgttggtatccattgcaatccaattcaacca

SEQ ID NO: 100364 - DNA, 261 bp, Glycine max
ctcgagccgccgatgaggatacttacagaaggtcatcacagtccaggcttttatgttttgttgtgacagccattgcaaagcttgctacgtatcatcgagagttactgccaagagcacgtgtgtccttgggcaaggtggctcggtctcgaatttcagatcctagagtatggagacgtgcatgtgatttcctgggtttgatgaaagaccctgctatatgtgcatccatattggggccttcacgtcctgcacaaggcaccacac

SEQ ID NO: 100365 - DNA, 260 bp, Glycine max
gagcccactgattggcgggtcttttgattttgattttcgacatttgaatcgagcaagaacatagccatagatttgaatttgagaacggaaactatggcgaaggcgagctcagagccgaagattgattacgcagaaatctacacagcatccgatacctttgacggctccgcgtctttcacactatctacgacgtcgtagggttcgtcctctacatgcaccagcaaatcccctccacggtgcaggatatgagcgtcgaattt

SEQ ID NO: 100366 - DNA, 265 bp, Glycine max
gcagtattggactctcttttttgagcatgaccttcatcctcgcaagataatgcacttgggcctccacaagcacaatgatacaaaaaattccacaataagctcatgggctagaacaacaagtcaaccttttggagcatggttacacgcaaaagtagaagagagatataatcttgacggtttgtgggaaagcagctgctaaaggagaagaaaagttttgtgcaacatccttgcaatcaatgatgggtttcgccatttcgaaacttgg

SEQ ID NO: 100367 - DNA, 259 bp, Glycine max
ctcccctgccccagaaaacaggaatcaaagcagatataagttgggaggtgaagacctcaacagcaatgaagattttattctggactttgataagagtgctgatgcagaagctgaaccggttgttgagaattggcacatttctggggatgttgtggcagaatttccaacacaagggaatgaaaatgtttccaagtccaatgggggtgaatcagttcaattaaggaccagacgccagtcttcagagttgttacaagtagaa

SEQ ID NO: 100368 - DNA, 261 bp, Glycine max
cttctattgcaaaatcaatactacttatttttcctttcccgtgtaatgtgattggtgtggttggtgttagtcagaattttacgttctggaggattctgtttatttgggtgccaaaaaggttggaacttggatgagattttcgactataagttttgtgggaattcaagatctttactttataactctcagcgtttgtcatttagatcaaagatgtttggaaacggtgaagccgtgactcacagtgcatgctccaatggttct

SEQ ID NO: 100369 - DNA, 250 bp, Glycine max
tctttcatggttttcttctcatccaggacgtcatccttgccggatttaacattggggatggagggcttagaaaatggtctccccacaaaggtcctaagtaccaggctcagaaaaaattcgccgcccaaaatggtgcatagaggaaagccttgcaacggaatggggacctttttagtaacaacgggtcccccccgtataaagtaggagggcggttctaatgactatcttcggagtcaaacgagcttggact

SEQ ID NO: 100370 - DNA, 263 bp, Glycine max
ggaagagcagaagaagcaaatagattagattagagaattagaaagaaagaaaaaagagaaaatagaaaaatagagaaattcaggaataagcgatgaaaaatttctctatataaagagatatccacatacaacacaatctctttcttcgtctgtgcttcggtaactgcagagagaaagaaagaacaaacgaagaaaagggaagaaggagaagaagcggtgaagcgtagaacgaagaaacacgcggcaggaggaatcggcggtgc

SEQ ID NO: 100371 - DNA, 253 bp, Glycine max
gtttctcttctcagcttttatgctttctttttcctttcgtttttcccccattttcccaaaattcatgaccgtctaattccctattgttacagcagcacgcgcatgtttagttctctgtttttgtacatttcggaataaaaacaaaatcatggtgtttggttcgtactatgaagaggactatgccatggagtgatgacgatgagtcatcgtcttcacattcagattctgaatgtgatagtgaaactggaggggg

SEQ ID NO: 100372 - DNA, 252 bp, Glycine max
agcctgccctatcggagcactcaacctccaaccctacctcctccgaccacatccccacagtcatgtacaccatggtggacccacctgccgccaagtgcaacctaaatgatgacatggatgaggatattgaagaggaagaggaggaggaagaagaggacgaggtggaatccggttccgaagatgaaactggagacggtattgcctgccaaactttgagaccatcaacggtggcagagcccagcgagctgatgc

SEQ ID NO: 100373 - DNA, 260 bp, Glycine max
ctttgggatttcactttcacggcaagaatgtcgagctcactggcggagaagtccaccttctctcggacttgtactcttctgaggcaatacctcaaggagaagggcagctttggagaccttaccctcgggattgcattgccatgcaccaacggttcccctgacacatcatgtcactctgcaacaaccatgcagtctgtttattctcgccacttggagattccaacttttattaacccaaggtctacggagaaggaggctaa

SEQ ID NO: 100374 - DNA, 253 bp, Glycine max
caggcacagagaagatagggacaagtatgcagatcatcataggtacagagaccgggaggcagagcatgatgatgagtgggagaggggacgatcatcaaggatgcacagcaagtcacgattatcacaagaggaagaacaccattctaggccaagagatgctgattatgggaagaggcggaggcttacctctgaataactatgtttgctggctgttatttctctgaacacttccactgaggaaggaaacaacagt

SEQ ID NO: 100375 - DNA, 252 bp, Glycine max
cggtatagtgaaagtggggtgaacatagtaatattgtttgtttttattacagcttaggatagcaatatgtaggacaagaaagggcatccaatggtaatagctagttgggacagtagagttcaattcccataacataaatgctcttcattctaaattctagcgaataatagtagctattcccctaccttccctaataataatagtggtgctatggggtattttacaattcagttttgcatcactaatgcacat

SEQ ID NO: 100376 - DNA, 277 bp, Glycine max
gaacagccctggtgaaactgaaagtttagggtctgcattgtctcattctgagaagcaaccggatgaacagttgattcttgtaacatgagtaaatttcctggaagactgaacgagttgtcttgaattaacgagttcatccaataaactcaggctccacagattgcatatttttctccgttgacttctggagagatagttactgtcttgatttgaagatgatacttacagttacagagcctgtctccagacttgaggcattgaatgaatctcctattgg

SEQ ID NO: 100377 - DNA, 279 bp, Glycine max
tcggaattcttatcgagctctgttgttgatgagatggctacttttaaagtagagtgggaagctgttctggatgaccttgaaactgaaagtgcccacttactggtttgagttcatttttgattgtcaatagatattgtggtttgtaatatgtgcatttctctgtgtgctgttatcaatgttaatcactatcaatacttagcaatttggtcttatttgtagtctgacttcttatgaaattgatttgggtctttctatttgtttcttgtgggccaggatact

SEQ ID NO: 100378 - DNA, 268 bp, Glycine max
tggagctgctcgggaagcgcgaggaaggaggagcgaaaaacgacgccctcgagggacaggagaggctggacaggtggatgagagagtcggtggtggagatcgtgaagaatttgaaggaggcgccgctgctggtgctggtttttcccaaatcggcgacgatggcgacggagaagagggtggtggtggaggactggccggcggtgaaggagcggtgggaatccggcgagacgccggttccggagggattgatattcgtggaggagttgga

SEQ ID NO: 100379 - DNA, 249 bp, Glycine max
caaaaataatattccttagcaactcattgacatttatgatggtaagtcacatttttatatatttgtatttttcactcctcgttaggtctaactcaacatcaaaagctagctcatgatgtgagaattgtcttccaattatatattctatcttgatcatatttctaaccgacgtgagacttgagtttttcctaatacacctcctcaagtacaacacttttggacttggtgtgtgaatgatatggtggatga

SEQ ID NO: 100380 - DNA, 249 bp, Glycine max
tttaaaccttacgaagccatatcttctttctcctttgtttctatttttggggataaaaacctcccttacatccccccatctcttgaactgcgcccagagatccgcttctgttatgtgttcctggaaccgcgtaaaataaaacgttgtgatagcatccttatccctccaattgtgatgatgatgcctgtggaactgcccaagattgttgttgccttagtgcgttttgggatcctctctcaatctctcccc

SEQ ID NO: 100381 - DNA, 252 bp, Glycine max
gtagccagagaggggaaggggcagcaggagaaaaccccatcaacgaacgagggcaacatcttagcctcatctgataagggacaagttccgtcaaagaaacaagaagactccaaaaagcagtaatctttcgaaaaaaaaattgcttgagatgcagggaatgcttcagcagatgcggcgtcttgagaaggagaagactgaagtgctcttgaaggccgaagacgatgttctcaagcaaaaggatgaagagctcaa

SEQ ID NO: 100382 - DNA, 250 bp, Glycine max
gttgacctccacgtgtcggttctggactcgtacacgaacaacacggggcggttgtcaacgaactcagcgaacatgaagcggaaatggcccgaaccggttgggtcggtgacgagcttcatcccggagcgtctccaggaagaggtgccacgtggacctaacggagagggagggatcttcttaacggtgacggagattaggttaacggcgacgacttcgcgaacggtgttggaggcgaagaggaagacgttgt

SEQ ID NO: 100383 - DNA, 261 bp, Glycine max
caataatcggaagaaacttccacaggaaagtcgggatggctaaaaatgagcgaagagctcaagaaagtgggtactatagcagctcaactggcggtttcacgtgtgtcacactaccttttgccagtggtgcaccttagtaatggttggccatcttaaccagctctctctttcaagtgttgctattgcaacctctctcaccaatgtttctgggtttagtgttttgtcagggatgactggtggcatggaaactttatgtggcca

SEQ ID NO: 100384 - DNA, 215 bp, Glycine max
tagttttctccatctatccgaatcgctttcactcactcgcttcattactcggcgcaacgatcatcatcatcttcttcttcctcgaccaagaaattctaagttttcgaattcaatgacgaagacgagaacgtcgagaagacctctcggaagattctccgcaagttcgcaaaccctagcactagtagttgcaggtctcgctcttccacacaacataa

SEQ ID NO: 100385 - DNA, 259 bp, Glycine max
cttctagatcgcgagctagaactagtcttcatttctctgcaatcccatgggcaagaaaatgaagctcccttccctactacacaacaactcctccccttcttcttggccctgccaccaaccgcgaaccctctctttccgaacccaaaacgacgccgcattcaaaaccatcaacgccgcttacttggacacgctggagagctccgaaacttccttcttcacagtctcccctgactccggaagcttctcaactgcctcagaa

SEQ ID NO: 100386 - DNA, 255 bp, Glycine max
ctgctcgaggttaacatcgcttctattctattcctctccaattttcacttttctttcatttctcttatttatttataaattccctcaaaattaagtgatcacaccaccacctatacccagattccggcaacaatcttcattctcctcctctttaatttcaacctcatacctccattatctccctttcttttttaatttttactttttgccctctcactctcaacaatttccccatacacccatttttctattata

SEQ ID NO: 100387 - DNA, 253 bp, Glycine max
cccccaccccataccactaagtcacaaacacaatcctcaaacaatttcccactactttgtctctgtctctgtttctctcttaataacccttccatttcgaactaggatcgatgctacaggtggaatcactggtttcagcgtgcgccggcggatccagcgatcggaaaatcgcctgcgagaccctggccgacgacgtccaccccacggatccgccggagtcccacccggattctccgccggagtccttctggct

SEQ ID NO: 100388 - DNA, 230 bp, Glycine max
gattgccgtaggttgcgagagtgagatagacttgaaatcgcacatggactcatgcctaatgctatggaggacgtgatcagtcacatcgctaggcgatgcaatctctgcatcactctctaccaccacacatcggttcggcactgatgctagcaccatcggtgcgcatgccttaggcgctgggaagccaccggcagcacacgcggatgcttcagcttcgctgttccctgcag

SEQ ID NO: 100389 - DNA, 248 bp, Glycine max
gttattaataaattcgatcattgggctttctagctagctaccaagataaatgaagtatccatctcttatttagtttgttgatgcatatatagtagaaatagtacttgcattcctttttctatggtacctagctagttaaagtgtggcttttattaattgttatgttggcattgggtgggtgttgttctttgatttctacgggttgcattaagctcaggtctgcagcttccttatcttgtttcttatct

SEQ ID NO: 100390 - DNA, 194 bp, Glycine max
ctttcaaacctgcagcagcaacagttaataaatcagcaaaagcacctatcaaatatgcatcaacagctgggtaataatgtccctgggttacagccacagcaggtccttggacctcaacctggcaactcaggcatgcaaacaagccagcactctgcacatgtgctacaacagtcgcaggttccaattcaacaaca

SEQ ID NO: 100391 - DNA, 294 bp, Glycine max
cccatcgacgtgtttctcagtaatttccgcacaccccgctaccatatctctctctctctcacactccaattcagacccctagttctgttggatcttgcatatagtatcactttatagattagcagacatgaaggtcacagtggtttctcggagtggaagagaagtggttaaatgtgtcattgagctcagtgattctgctactatagcagatctgcaggaggcaattcttaagcgagccaagaggtacccatcaaggcagcgcttgacacttccagtccaacctggatcaaagga

SEQ ID NO: 100392 - DNA, 203 bp, Glycine max
gtggttttaaatccatctgcaatttgaatggtgtctgaaacacaaaattttattatgccattcagattgcattagttaatgattcttttgttctgtttcattgtttgcttgttccttaaagatctcaaagggtccacaaccatatacaacttgtgcactacttatgaaatagaatagaatggaatgcccttcaagttggatat

SEQ ID NO: 100393 - DNA, 232 bp, Glycine max
gagagtcaggcatctcgctctgcgaccttccacttaaccgcaatccaagagctccaagcttcgaagacatgtcgtttaagcaaattctacgaccgtcctcgctacacgatcacgaaggcgagattttcaacggcttcagcagcagcagcagctccgacatgtactccgacgacgacatcatcatctgcggcaaactcgttcctttcaaggccgaactagccgctgaaaaacc

SEQ ID NO: 100394 - DNA, 295 bp, Glycine max
tgacaagaactctgatcattgctggtgagatccttcttctctgttcctccaattccttcccacaaaaccctacttttaattttccatcgcaattccctctccccttgttgttgaaaacccattattactcttttttcctctcaaaaacttagaaccaaaagcgcaatgctatctgggagattctcgtttttcggaggcggcggggattccggcgcggtggtggataacaccaattcgtcaccatcaaagtgtggcgaagaacaactcgctgttgttcaacccacactgaagctcg

SEQ ID NO: 100395 - DNA, 279 bp, Glycine max
ctgaattatatcctgttggcacccacttggattatcaagctttcataattcaagcactggaaggggtcacatggtatagtggactcaggagatagcgagtagtcccatgtccatggatccggccacgatgtttctttaaacatgtcaaagttcggtacctgctaaggttgccatgatttctgtgaagattctcgtatatacgtgtttaccctgcatattatattaacatgtggacagtgattccctgtggctactagttagagtgtgtctggttggtga

SEQ ID NO: 100396 - DNA, 278 bp, Glycine max
ctcgagacgcggtcaactgaaacacttggatagtaattcaccttgtgccatcgcccatgagcagtccattctacacccacttcatcgaataattctagaaaccttgtttccttacttgctcagtcatttcttattgaaattgaaagaattctattatccatattctcttcttctagtgggtgagtcaggcgcgctctagcatgcatactcagacatattcgagtactttcaatgtgtgtctatcatatcatagatttgggacaaactcgcagtcatct

SEQ ID NO: 100397 - DNA, 286 bp, Glycine max
acaacccccgctgttaactggtaagcaattatttccttctaacttgggaatttgatgattctgacctaaattttctcacataatcccatttggtcatttcattacaagtttgcatatcttggttttggatttttatatttgtatatgagtatgaatgaatcactattgggttgtagattttatgcacaaatgagagacatcgtttgcaaaaaatttctttttctgtaggtgcactctggaaaactggctggttaatgattcacagtgttctaaaagcaagtaggtt

SEQ ID NO: 100398 - DNA, 290 bp, Glycine max
gttttctaagctcttcttctaacacttcatattcatcatcctcacactttcttccacatttaataccgtaactcactctcccctccctcaaaaaactctctctttctcttccctctccctctgtcccctcacggtcacgcattctaccaaccaaataaacttcaaattccctctatttctcttcattctttcttcccataaacttttctctctttttatttcccacttccaacccttttcatcagtcaacactttcacccgattcctcatcacctaaagaaaaagaaaaa

SEQ ID NO: 100399 - DNA, 250 bp, Glycine max
ctggtaacgagtgggatgagtattcaagatatgtgaattcggaaggagttgagatgacttcagtaagtatttattttccttctcattttccaaaattattgtgcaggctttgtcattctgctgctatatattttaacatttgcagggagtttatggggataatgggtctctactttatcaccatggatatggatatgcgccttatggcccctattcgccagcagggtctccagttccaaccatggggaat

SEQ ID NO: 100400 - DNA, 265 bp, Glycine max
aaccgcacaatgcggatccacggctaaggtggaagaggtcactgccggaagaagggagcaacaccatctatcatttaccggcgatctcttgagtcgaccatcatacacggctatccggcgatccctaatcctcgcaaacagagatgacgacatcacagcgcctcacggacaggctggtggagaagtttgagcagaacatcacaaaaagaggatttgtgccagacactaccactaagaccggagacgactagcctaatgatcgcac

SEQ ID NO: 100401 - DNA, 248 bp, Glycine max
gggatatctatcttcattttcgtcgtcgttcatttttttattttttttttctgttttccattcgcttcttctctcagaaaagctcgccaatcgatcttgctctcttctacgcttttcgaattccttccattccattatggacgcagattagattcacgttcacattcacttctcttcgtttgcttcaaccactctgctctgctctgctctactctgagatccgatcgcattttcattcagaaaggaaa

SEQ ID NO: 100402 - DNA, 252 bp, Glycine max
atctcttctcttcattcctcttctccctctcccttcaattttttctctttttttcccctcaattttttctcttcttcaattttagccctacatacaacataaacaacaacaattttagccctcactcacaaacccatttctctcaagttttagcaacacttttgatgaagtcgtcacaaaaagcaactgttttggcttaattattagtattattgttgttaattttttacaaggatggagataataacacca

SEQ ID NO: 100403 - DNA, 242 bp, Glycine max
gagaacttgaaataaaaacggtaatattatttcagaccttgttgggtttttgaatccattttgtatttcttttctacgtggggactagttgggataatgcctcagtctactccttgcagaagttagaattaagatagtggagtagtaagttcaacacgggaattggcccccaaatttctgaattcagttgatgataatagttgagacaatttggtcgcagtccctcggaatatagaatggat

SEQ ID NO: 100404 - DNA, 272 bp, Glycine max
agaaaagtcaagaacaaaggatgggcctgcacttaatgcatcattttcaaatgattttgacctgactttcattcctgggctgtgtgctttgctcgtgtcagatcacatgcatagattggtccgccagattaatttgatggaggaggattgcacccttggttctaaacctggactaggtgcagttatgacttggactcttggattaggactttcatgcttacttggctagtaattggaattgtgacagaaaggcaccaacccttgccacttca

SEQ ID NO: 100405 - DNA, 166 bp, Glycine max
ggattcggctcagtcgagcgattcggctcgagaatttaaatgcaagaacaaggcacattgtcgacaattaatgtctggctatcatcttatccacgactatgggtgtcaataaacaaaccaggtgaatttccaaattgccaaattcattcagaacccaaaatccctt

SEQ ID NO: 100406 - DNA, 153 bp, Glycine max
gccttgcagaagcgtgcaagggttaagaaaatgaaagcagtgagaaagatgaaagcgagcaagtcctcatcgtcatcatcaacatataccagtctttatgccatggtcatcactgttttcttcttccttgtcataatacttcacggaatcaga

SEQ ID NO: 100407 - DNA, 207 bp, Glycine max
ggaaagtttcttggatgctaaaaaaaaaaaaaaaaaaaaaaaaaaaaaaaaaaaaaggggccccccccgaaaaggttcccctaccacccacaatttaattccacaacgtcccccttggggccaacaatttcccctaaaccgacacggttggaactcttggatagtacttgccaatactgaccactgggaaaatttttatccccccat

SEQ ID NO: 100408 - DNA, 262 bp, Glycine max
gtgatgatgagttcaaccgaatgagtgtagattcagaaaggaatattcttttatcaaaatcaaataatacttcatcgattagtggtgatcatgagttcaaccgaatgaatgtggattcagaaaagaatcttcttttatcaaaatcaaataatacttcattgaataaagatgagtattcaaggaatatgaacactcgggatgtttctattgatgaagaagcaccttcacttccagtggtgatgtctggcaaggagtggaaatg

SEQ ID NO: 100409 - DNA, 148 bp, Glycine max
ggacaggtttggcccaagttatcagtggctaagttatgatgtggaggcagtagctagcttcttttctggatttgtagataatgagttaaaaggctcaaactaaatttgatcgagaaagctgctgtggtaattttgacaaccagaagaa

SEQ ID NO: 100410 - DNA, 229 bp, Glycine max
cttgcctggcgtcgtgctgcgcagcctgctcatgcaacgcctgcaataccgtcgtatctggagacagccgccgttccgccaggatcgcctacatggtgctcttcgcatactctctcgttcgtcgctggatcatccgtgacgtcgccgctcgcctcatggaatcgcttcgctggatcaatcacttcatacacacacgtagccgagaatggtttgaaacggatgcagttct

SEQ ID NO: 100411 - DNA, 160 bp, Glycine max
gtgcgaacttacagctacaggtacagttataaacatcatgcaggatgcattcattactgtgggaagctatcatcacaaaaattgttgccaaaaggatgaaaagaagaaataaaaaaagaaacttgagaaagaagtactatgaggattggtcaagtatccc

SEQ ID NO: 100412 - DNA, 158 bp, Glycine max
aacaaaacaaccacccaactaaccctggttcagcttttccgatcagatcacttcgaggtgctttctttcgctctatgatcatctcgcattccccttttcctcaaccagagttttcgatctttcgtttgtataaatattctctgaaaatctgtcgggat

SEQ ID NO: 100413 - DNA, 103 bp, Glycine max
  unsure (1)..(103): unsure at all n locations
catgaatttcgtccctttgtgagagatgccacaagtggaccaacagttctcatgaaacttggtgagacgcatgacaantccactgagcgtactcctagtcctg

SEQ ID NO: 100414 - DNA, 240 bp, Glycine max
gatggatggggtcatagtttggataaaagcagagtgcatagtagacagccattttcaagtgatgagaaggaagctgacagttggatagcaggaaatgctgccaacatgcacggttcccagtcagtaggtacagacatttggttgggtgatgatgcaaaaatgtctcctgattgggattacagggtgagatcttccagctgtattgaagaacagcatgaacaaagtgagcctgtgataacg

SEQ ID NO: 100415 - DNA, 270 bp, Glycine max
atcaaactgagtcaattcggttttgaattccaaccgctccacccatcttgattcctcttcccttcaccaaatcccaaagtttccaaaatcctcttttttttttttaaaagccgtctctcttacaatacaataagcatccccatgtctagttttcccaaaatctcatcatttccgcttggcttaacctctgttctctgatcctatcacacacacccttccatctttcgtccccctttgatttaattccaatccttaaaccatagtcattca

SEQ ID NO: 100416 - DNA, 276 bp, Glycine max
cttttcttttctctttgcgttgttgatgctctcaccctcgtttacctcttgtttcggtgctctgttctccactcgatacaccttcttagaaaagagttcactctaccttccctgtcttgattcctaactgaaaattcttaaagtattcccatcatcgaaatgaaatgaagattgggaatgctttaagaatttcagttatgcatcaatcatggcagttattgggtctaactctaaccaagtagtaatatttaggttcttaatagatagctcaagaat

SEQ ID NO: 100417 - DNA, 253 bp, Glycine max
cttaagagaaaaattgaaggaatgatttgaaaattgggttgtgttgtgcttttgtacacccaagttatgttacgtgtcttttgatgttatattttttaccgtgtccgatgatatttactttctttctttttttcccttttattgtagctctatgctatggaaacgatggcaagcagcagggaaggtcaccatccgttattgtcattggcggtggcatggctgggattgctgctgctcgtgcactccataatgc

SEQ ID NO: 100418 - DNA, 268 bp, Glycine max
ctcacaagcgatgcttctgctacccctctaattcccaatcttcctctcctctccttacccttcttcttctaattctgatttattccacttccccgccaattttcctcaaactcttttcaaatttctcttccttctccttcaattcacaaaaacccttcgatccgctctgaaccctcgccccagtacccttacgagcattacccatctcccttttatgtttttccagatcctaaggccatggttttgcaccctttcgggaaaaggtgaa

SEQ ID NO: 100419 - DNA, 268 bp, Glycine max
aaaaaaaagacaaaaaaaaaaaggaagagagagaggcaaaggcgaagcttggaagatggaaacccagtgagtgaggttcgagatttgtgagcaattcgtgaactttgcgaaggtcagagttcaatcaatgtataactactttgttttcccccaaaacacttagtcttccttttccaccttcttcattgtgcttccttccattgcaatttgaatttttcgtttgttcggtttcggttccttccttttccctgtttgggggaattaagtt

SEQ ID NO: 100420 - DNA, 270 bp, Glycine max
cggctcgagcttctcttcattcacgtgcctctccttttccttttccttgttctcttctcttaacgttttttttctcttctctcctctgtttgtttcccgagaaaaacgtaaatttttctcatttggaggcctttttcaggcggtggttggtgtagtattgtgggttgtctctatttaaagaaccctcacacactcacttttgatccaaagtattgattttgatacaaaagtttttaagttttagagaagaatggaagggaataagcaaaa

SEQ ID NO: 100421 - DNA, 267 bp, Glycine max
ttcaaggaatctcacctggccattatggtgtgtttatcttgaaatagcagtaattagcaaacatggcgctggggaagaattcccaaggcaaggggaggaagttgtcaaactactgttcaaccgtctctgtggctgtgtttgttgcattttgtttagttggtgtatggattgtattgtcatccattgttccaattcagaattcagtcattcaggtatctgagactgagacaattaatgatgatgttaaaaatgtagcaagtgattcca

SEQ ID NO: 100422 - DNA, 265 bp, Glycine max
ctcacctagtgggataaccccataaggctattattgttgttgttttgtagtagtagcagtgtcttctagggtagcaaagggatatcggtttcactctgaagtttaatattacttgagataaagtattaaagtcacaaagttcataatctattggatgaatattgtcaaggaatattttcatgtctaaaaccttaagctgttaagtggagactaaggaatatttttatgtctaacaaatattatttgatccattaaaagtcagtgc

SEQ ID NO: 100423 - DNA, 262 bp, Glycine max
ctgagttatatccatgtgaatatgtgataattccaggaccagctcacgcggtacataactgttcaaaagggtaagccgatattagtgaaagtcagatctttaatattgagcaaaagttgctcgtttttttaaaaaaaaaatttcactagagatgcttaggaacatctatattggtgaaaataacctaagttgcataagtttttattttataattttttgaggcataccatggcacgtttatttattttatataatttaagca

SEQ ID NO: 100424 - DNA, 255 bp, Glycine max
gttctaaattatgacatcgggttttgttttgtgaaactcatggttgaattgttttgtcaattcctaaactttatttaaatatgttttgagctattttgaaacatgtctagaatgttgagcactatatgttatttaaatatgtttcaagcttttttcaaggcgtctttgaatttactattcaatatgatttgtaagtcatgattcaaaaaacagcttggaattcgtaatttgataacaccagctacaaagtttata

SEQ ID NO: 100425 - DNA, 263 bp, Glycine max
ctcgagccgctttcctgtggaaatggatgtgaagctgaagcattgagaccttttatataatcagaccaagtaacttcatttcttatacgaggaagaaaaatctttcctcaaaaaatgaataatctatttgtgcatttgattttgatatcagtgctggttgatgtatgagtttttgcagatttcttttgtagcttcataccttacatttctgtactgggcacctacccgtcttcttaattttgacggtatgttactgctagagc

SEQ ID NO: 100426 - DNA, 165 bp, Glycine max
acattctttcgcctcattcgttctctcactcaccctcttatttcttcccaaaactccatatacatccatatctctatagccattaattcttctaccatagcacacagttaccaaaccagaacatgtctactcaaattcaaaatggttcttcctcctcatcacaac

SEQ ID NO: 100427 - DNA, 211 bp, Glycine max
acctcctcctccaccagcctcctcgtcgccatcactggcttcctcacctccccctccttccatgacaccaccaacactgtcctcccctcctccatccctacctcctcagctggttctcctctcgtcgctagtccaagatcaagaagactaagccatatacacacatgcatacctgagctaggaccttgtcatcttcagcaacaattgcaca

SEQ ID NO: 100428 - DNA, 127 bp, Glycine max
tctcgagcgattcggatcgagtttatatcttcgttagttgaatcaggctgaccctatgtattgtgagatcacaaatccaggcgattgtttataaaaagttcctgaaaaaaaaatcataattcagagt

SEQ ID NO: 100429 - DNA, 110 bp, Glycine max
cagaaacatcaaaagttccttcactttcttgccttatccaaatgccacgaggagctgtgttctaagcagagacttgccttgcaaattattttggagcatggtgaaaagtt

SEQ ID NO: 100430 - DNA, 197 bp, Glycine max
gataggaaacagtttctttccatgctttcttgccatgtgcaagtttggttgccatagaaaagtaactggcccggtgaagtttgttgttaagcttttcccaccactttggtggagtcattatgtgctaatgggacaaaacatggcctcaacaatccagaagatgaaatgtttaaaaccagcccagtaaatggggtttt

SEQ ID NO: 100431 - DNA, 230 bp, Glycine max
attttgaacccgaaccaaatgtagacatcaacatactcttcatttcgattgttaggggccataccattgtaaaaggtaataaaccccatctttttggttgttctagaacaagttcacatttcgattgttaggttccataccattgtaaaatgttatgaagagtatgttgatgtctacattttcttttacaatggtatggcccctaacaatcgaaatgtgaactagtctac

SEQ ID NO: 100432 - DNA, 154 bp, Glycine max
cagaaacaaaaaaaaaacctcacttagatcacatagatcaaacaacaaaacacagagttacctaaattgaacctaccccagtaggttctacaagctcttgatcatggcctcagcatcaggggaggcaccacaacccaaacccatttcaacaaaa

SEQ ID NO: 100433 - DNA, 142 bp, Glycine max
acaagactacattgtaaggatagtgaaaccaatatacaaagcaaaggggattgtaaagattgaatcatacttttcctcggttaatccaacaatagcaggacataagaagaaccttgactcatttgcatgccaagcaatgttt

SEQ ID NO: 100434 - DNA, 123 bp, Glycine max
gaaaaatgggtaatcgttgtcatctgcatgccgaagaaggagtctaaagatgttggatcgagtagcaatagaatggggtagtcacagagggatctggtgagtgaggaagagctgcatcttcag

SEQ ID NO: 100435 - DNA, 129 bp, Glycine max
tattcactctcaagcagtaagatataatcccaggtgagtatgacgatggaggggtaagagcaaatgtgtcgttaggagctgacattttcccagagagacagccgattgggacggcagctgagaaccgag

SEQ ID NO: 100436 - DNA, 190 bp, Glycine max
gtatcgtgtacctccgttcaacaactataataagatctcactcgctccgatcacatctaactatggccacctcaagcgccaaatcaggccatgagttcaccggtaaagctgccaccggccacgctacaaatcgcggtgactagaagggaaaggcccttagcgtttacaatagtgtccgcactatggggtt

SEQ ID NO: 100437 - DNA, 177 bp, Glycine max
cactcgagccgattcggctcgagattcagggacaacaaagcattaacagaaacccctccagacactgaagatgtgagaaaacccaaccctgcagttcccaggtagcaacactgccatgtcaccacacttgacacaaccgtcaaccagtaaaaagtggatccctggtcaaaaaccctc

SEQ ID NO: 100438 - DNA, 186 bp, Glycine max
gtgagagctgagggtatagggagaaggaattttctgtgaggatgacagattttcagccgctagagcagaatcctgagcctgttgatgcccatgctgagttttgagttggactgaaggagtttatgcgtgtgcacttggatgagtgtatgtcgtttggttcgtgtagcgcgtctcgtggctccggat

SEQ ID NO: 100439 - DNA, 275 bp, Glycine max
gtttattcaccaaaagaaacataacaacaacacacgttgaagagaggaattaagacagagacagagtagtagtgaacgaaatgcaaggcgcagggataacctttgtaatggttgtggcacaggtcttgagtgtgggtttgaacactctcatcaaagcatcaatgtccaaagggatgagcatttttgtttatgatgcgtattcaaaccttctcggattctgtgtgctgctcctagccaccacaattcgtcacagaaacagagctctcacaccgatc

SEQ ID NO: 100440 - DNA, 240 bp, Glycine max
caactcagaattcatgagtgatgacaaattcgtgaagcacttccgtgagtcttaattaaagagattacagagacacaccattcattcgctcactcatttcatttcaaacaatgtcaatcgctgcttcagcttcttcacatgcttgtatttccgcaatccccacgtgcagcgcgttttcctgttcgaatttctgtgctgggggcacttttcttcgcccggggggggtggtattgtgggggg

SEQ ID NO: 100441 - DNA, 207 bp, Glycine max
cacaactcttgtccgtgatcatcaagattcacgagaaagagaaaacctagggtttgatcatgatataaaggccccctcattgtttcttcactcaaacatatattccactttcgctagtttagctacctacccatgggaaagattgccctagccaatgtcctcttggtccttctcttgaacttgagcaccttgctccaatgttctggc

SEQ ID NO: 100442 - DNA, 235 bp, Glycine max
tctcaccctcattatcaacacgatatcatagccaaaaccttttttcgaagtctctgattttcctaatggctccggcaaaggcagagaataagccggcggagaataatccagctgcggataaggcatctgcggagaataagccgaaggcggagaagaagatctcgaaggaaggatggatcgagaagaagtagaagctcactaagaagagtgtggagacctacaagatctacatctt

SEQ ID NO: 100443 - DNA, 256 bp, Glycine max
agatatcccaatctatgtgctgaaaccttgatggaattgggtttagggaatcaaaatgttgacaacaatattgaggctcttgttaacaaaaccatatttgaaaccagcttgccaagttcatattttgctgaattcaagactggggaagctcaaccagctcattcagttgttgcagactattgtgaagagctaatgagcatgtcactgaaaaggctagaccaatccctgagagcactgaaatcccctaaaaggtaca

SEQ ID NO: 100444 - DNA, 272 bp, Glycine max
ggttattctcggattctgagaaggacgaggttttgcttttagctactaccaaggatgttcctgcacctgttcctatctcagagaagcaatatcagccccatctccaaggctgcgaaggggaaggcaaccctcaaggtactaccaatgagaaacgggcaaacccaaatccagaaatgggttctacatctcaaggggaacggaagaggaagtggttagcaaccgatggagaggaggaaactttgcaaagccaattaattgatgtcttagaaaag

SEQ ID NO: 100445 - DNA, 284 bp, Glycine max
tactcgagccgaatcggctcgagcggctcgagcggctcgagctttactcaaaaatcaaacccgatactcctgggcttgcttccagtggaaaaagcttcaatcttttcgcttcaacaattcacttttgcaagctgtgttggtggcaattttgcttttgttctttcaattttgtggatgcactttgatttgtgttttttttatgaattttatttaaatgggtataaagggtttttatactgtcatcctatttatttacttttataataaggacgttgctagggtat

SEQ ID NO: 100446 - DNA, 264 bp, Glycine max
ggctcgagataacattgtgtctgctagacaaatggataaccgtatcataagtggcgacgtatgttcagtacacctctgcgttttggtggatgtagctatggtatagcgtggtttgatttccgtatgccgagtctagtatagtttatctgttgtattttgatctgcaccattagttacttgtctgaagcgtattttctgtgtttgcatgtgtaaaattatgcaaaatggttcagttttatgtaatgagatgaatgtatgtctgga

SEQ ID NO: 100447 - DNA, 190 bp, Glycine max
  unsure (1)..(190): unsure at all n locations
gcgccgcgggngcaccggagacgcgggtgcaccgtctccctcacgaaggaaacagcagatgtgcgagagtcagagtgagagcgaacgcgagtgttagaggaggaaaaggagatgggcgaaacggcggcggaaatgggacatgtggaagaaggcggaggagagagaggaggaagagcgcgacttcaacgca

SEQ ID NO: 100448 - DNA, 279 bp, Glycine max
atctggtcttatggtggacattaaaacacaactacagaaaaaggagagaaggctcaaggacatagtgagaaccgggaattgcatagtgaagaagttccaaaagcaccatgaggatgaacttgatcatgagcaattggttgctcgggtggggttgagattgatttcaagggtggtaaacatgtccaaattgagaaaagaacagctaatatggtgtaatgagaagttactccgaatcaagtttttgagcaggaagattgttcaggtggaaccttccttctt

SEQ ID NO: 100449 - DNA, 274 bp, Glycine max
ggctttggaaagatgaacttgcataattaccaatatgggtgcaatggatcctctgggtgctcaacagaaggtcttagaaatagctaacagcctgggtctcaatgtttctgttgctgtggctcacgaggtgtctgtcactaatataataggttcaggattttcaccagcaaaatcatatatcttggagggtgtaagaatctgttctcacgacccatgaggctgtctgtgttcacatataatggtatcagcacctacttgggagctgctcctattg

SEQ ID NO: 100450 - DNA, 272 bp, Glycine max
agcgttttgacttatggggttcatcttcatcttcatgttcaatcaggtgccgtatagttatataatctgagctgggccccattccatacgcaacttttcctccttcattctcctttttttttattgtcttaagaagtgatggacatggaagaaatttcagagttgaatttggatggtttttcttcttctcacgaggttttggaatcagaacagaagaacatgggtacccagagaatcttggtttcagatcacacaaacggatatcagtattc

SEQ ID NO: 100451 - DNA, 265 bp, Glycine max
atttccacatcaaacttgatttaacacgtacgatttggaactttctgaatacatgctgctgaaatatattttttggggttataatattgattactatttattttatcttctgatgttatatttccaatttgctgtcaaaacattattatcgatcaatttgaaattgatacagagctgagagcatcaaggaatagaatagaagattcatttttccattttgatatggaagcagatgtttctattatttttgccgcgttttcaaaac

SEQ ID NO: 100452 - DNA, 261 bp, Glycine max
tcgaaatacaacacaaacgcccagccgaataccaccaaaagctaggcaaattgaagaccaaaagtaggaatgaaagagattagggtttcaggagtgaaagaagatggggttttcgtccacaaagctgtccagcagggagtttcccaagatggacatgagggttctcgctggaaggtcccaaaactgctggtaaaaaaacctttcggtaaaagttcaaacttggcaaaatcgcaaggataaaccccaccatgggattaaatt

SEQ ID NO: 100453 - DNA, 235 bp, Glycine max
cggctcgagcggctcgagttactctgcatccctgttggcggagtctaagccatctctggtctctctcgagacgggaaagagagagagtgtgtgtttcggtgtcacaacgcaaagcagcgtaccccgcaacccagaaagtagcaaatgccaaatggtagttcagtattagcattgtagcgtagtgttggcgagagaatgcgatgaaaaaaaaaagggttaccgttaccaaagccaa

SEQ ID NO: 100454 - DNA, 274 bp, Glycine max
agttgatcccacactctagaagaaaaacaacatagcgagcgatcagagaaaatcgaatattcacaaatcccttcatagagatacgagaccgtcaccacaaagagtgtaagacgattcaacaaccaactttggacagaaaaaaaaaattccaaacaaacaatatttcttacactaactctctaaaattattatgccacagatggatgtggaaacgctggttaccgcctgcgccggcggttgctccgaccagaaaatcgcctacgagcctcgtcgg

SEQ ID NO: 100455 - DNA, 254 bp, Glycine max
tcagagacatcatttctcactctaagtttctctctcctctccgctccggcaagtaggaaaaactgtgcatatcgacgatttgcccgagaattcggcgttgggtgagtcgaattcatggactaccgagatagagcagtccggtgcggacacgaacaccactttggatagcgtcctctacaacgacctcgtcgagattgaccctcacggtcagtcactcattgatcgtaaagcaagccgtccattcacgaggcgtg

SEQ ID NO: 100456 - DNA, 263 bp, Glycine max
caagaattcatctcatctatctgtagatcggagaaaccaaaataaaaaaattggagtccgcggggaggaaagcattgttccgcaacgtggctttccaagtcgtttccatctcgctcccgattttcagcttcctctggttgcagggtatccctcaaaacctctatgccaagctcggccaccgtcccccgatcccaggggccgtgcaagccaagcgccatttgttcaaaggggggcattcttggcccagtccagaagatccaaac

SEQ ID NO: 100457 - DNA, 264 bp, Glycine max
cttggccaagccacagcatgtttccagggtggttttgctctgtgccgggttattaagaagaatgtgaaggcaagtgtatcacagggagaacacaagggcaaaagggctggaagcagttccatcaatgggagtgacacctcagtgaaattctactagtgagccattcagcaactctggtgatgcttcctctcaagcaagtcacctgaataaagagagccgttattcaagccctataacttctccgtacaatgtggctccaatggg

SEQ ID NO: 100458 - DNA, 261 bp, Glycine max
caaaaagtgtccatcctttctatgtattttctcttcccttaaagcccttctgtgttttgtcacagctattattgctgcattcagtggtaatttattacctaagtagaaaacttgcctatttttcttgtcattgccattctgtgattcgagtttgtcagagaaaaagtttgctttttttggccccccaaaggaatatacttgctctccaatctcatctttccctccaacttcactctcttgaactcttccttttcatgcttt

SEQ ID NO: 100459 - DNA, 252 bp, Glycine max
caaagacaaacatgattatgcctcgatcatcactgttttcaaacatgcatttcttgttcttttgtctactctcctccatacacctctctgtacaactcaagcacagcagcagcagcactaacaactcaagctcattattctcactctctttccctctcacatcactctccctctccaccaacaccgctctcaagatgatgctacgcaactcactcattgcaaacacaaagaacaacaacacacaacttaaat

SEQ ID NO: 100460 - DNA, 254 bp, Glycine max
atcaaggtctccctgtttcattcacaatatctacgaaattttgttttctggttctgcaccagttcctcttctgcttaggagattgttttagtatcagtctcatcgaagatgagcaaaaatttgatccatgttcttttcatcttcattattctttttagtagccgttgaacagggcaataaatcagatccagaaagctcgaaaagccatgaaatgcatgcacaagaaatgcccagatgattatgaaattgcaaag

SEQ ID NO: 100461 - DNA, 257 bp, Glycine max
gtgagagggaagattaattagttgacttgactatgccaaagtgaacgaaaatcaatgaagaagaaaaagggttaaaaacttgtcgagaaagctaaaaggatcagttgaagcaatatattgaagaggtggtttcagcagttgttgagcttctacggtaagtggagtcgaccccgagaatggaatggcatggcatcatgacttggtccaaagtctaacaaatattaaacaatttgtgtcatggggcacttggattcaag

SEQ ID NO: 100462 - DNA, 255 bp, Glycine max
gtagttatactttttttataaaaatgcatgtatattttcagattactatattgacagatttcatttaactcactttcatatagccataaataaatattctatgaaatggaggttcccaattatatatatatttataaggaaatactagattttgatatactattatttaataattttcctactcgactaaaatgaaaaaaaaacactaaaataatgatatcactaatattattagctggttttttttttttggtt

SEQ ID NO: 100463 - DNA, 254 bp, Glycine max
atgcaggcagccttgttgcgcctgatgttttctatggacaaccaaactgttgttctgctgagaatttagcgactgagaaagtgaagagatctaatattcttatcaatatttttgtctcaagtttcaattttgtgaagagatctcttggattggatcatatgggtggaatagtgggcaatgctgcattggttgcagttagcatgatagctttgcttcatttacatcaggtaactaatcatgagcagccatttgga

SEQ ID NO: 100464 - DNA, 263 bp, Glycine max
actgggatgaccacaattagtcttcatttattataatagtgttttactgtgtaatgtcgcgtcttggatgaccacactaagcctttatttataatgagcaaataggatcagtgttgattatgttataattatgtgtatctttagaatagattattgtatctgttttagcttatagtagaagacagcagtgtgtcctgtcttatcaaagctttcaagcttctctctcttctctttgtatatatatatctatgttatttgaatga

SEQ ID NO: 100465 - DNA, 256 bp, Glycine max
ttctctttttctctcttctctctcctcctttccgaggttctcagcggccaagaacaccttccggcgcggtggccgctggcggcgccaccgtgccggagtagctcaagtcccccccttttttttttacctctcgaaccctcttcactcactcgttatgaatctgaggttcgttaccaaaaaacgcgacacagcaagcctagatctaggcttaaagcgggtagaatcctacccttttctttcgtgtttggttgggttg

SEQ ID NO: 100466 - DNA, 261 bp, Glycine max
attttcaaagtaataccatgatgtatgaaatgacatatggagtctgaccattttctaacatattagcatacaatgtcaatggtccaatcctattgcttttgatataacaattagctgagaaatatgacttgttttggctctgcaaaagtttattggttgtgttctagttttactttggttcatttttgtatatagctcgaagctcttcttaatcagcatgggatattatgagagttctcatcccatcttgtgaattatttt

SEQ ID NO: 100467 - DNA, 139 bp, Glycine max
gagcgttgatatatgaaagtaaaagatgagaagagaggttggtcggagaacatcatcttcgtcgcctccagaaatgtgtagcactagcatcagcatagctctctcacaccacagctctctcaccaacgcccttattcca

SEQ ID NO: 100468 - DNA, 139 bp, Glycine max
tatcaactgtgacagataatgtagcaaccgtggtatccaagattgaggtaactaccccagaacaaccagctacccaggttactactcaccgaagaaccaaaggaagataccaccaaagaagcattagaggaagaagaag

SEQ ID NO: 100469 - DNA, 245 bp, Glycine max
caagacgccatattactaccactctccacccccaccttcacctcctccaccttataagaagccatattactaccactcgccaccaccacctccaccaaagaagaagccatactactatcactctccaccaccaccttcacctcctcctaagaagccatacaagtacccatctccgccacctcctgtccatcactaccctcaccctcaccctcccttcgtccattactctcctccaccatctccta

SEQ ID NO: 100470 - DNA, 233 bp, Glycine max
gaagaaaaatgcctaccagctaataatcacagattgctcactagaattgtaagttcttttacaaccagctaagccatccatctccatttcaggcttctggcagtcttgagtttaatgctggagggagtttctcattgggcactggtggggatgacaagtctggtcgaaaatatattaaagttaggcataatagatcgcggaagaagtaagcctattttgtttatgaaaatggt

SEQ ID NO: 100471 - DNA, 238 bp, Glycine max
ccccaactcaaatcatctcaaactccacccaacttcacatcctcaacctccattaaccccaccacccccaacttatatatacaccccacaatccccataccctcaaaatcataaaaagaaaaaggaaaaaaaaaaaacccacaacccattttctcattcatctccacctcaaaaactgccttgtatttctcgagaggtatttcactgtattatatattattattctttttgacatcat

SEQ ID NO: 100472 - DNA, 279 bp, Glycine max
gcttatttcgccacacttcttggtaaaacttatcaaaataagcactttttagtttatttcaatgagtttcttaattaaatttgtaacgaaagctcttacatgacaaaaacttattgaattagcacttcagtaagttgcttacctaacacacctatgtgaatcagttgaaagtagaagagttgggcaagctggagttgtggcccttgtccatggttagcatattgcatctcactaaagaagttctaaccaaaaacactgtcctcaaatgtttctgcagga

SEQ ID NO: 100473 - DNA, 189 bp, Glycine max
aacctcagttttcgtctacgcaccgctattatattgatatataatataacaatagtatttctttatatttcttcttttcgaggcaatttttctcggtgaaatagaaggatttgaaataatgcaaattgctgtatatcaacttggatgttgggtcataatcgttgccttagtgtagcgatccaaggaatt

SEQ ID NO: 100474 - DNA, 202 bp, Glycine max
ataatatgtttggtttgatttcttgttttctgtttttaggaaataaaaatactgaaaatttatgatatattgacttcttatattttttgtatttttaaatttgcttaaaattacattcattgccatttcattttcattttactcaaatgaggttcctgttttcaactgaaaacactgaaaacaaaattttattgttttcatt

SEQ ID NO: 100475 - DNA, 264 bp, Glycine max
aatgtctataccaagtccttacaagtatcttataggagcttttgcatggcacgtcagatgatctgatttctatgctttctagtctgtttacaggaagtaatgtttttctcttccatacatctctttttcaatacagaccgtgagttcattttctgaccatacacatgcttagcactagctgacttgtcttgtctgtttgtgcatgtataaatttaacatgttcattaatagtttgatatgtttacatcatttcaaattctcaaa

SEQ ID NO: 100476 - DNA, 168 bp, Glycine max
cgtttgctcgaagagctttggagggcaaagtttcgccatggatgcatctgggaccgacagccttgaactgtaccgaagatactgtgacataaaatcaggacatgtctatattggtcggggagaaggggacaagcaagacagtgacttcaaaaggcgaaggtttcaagg

SEQ ID NO: 100477 - DNA, 270 bp, Glycine max
  unsure (1)..(270): unsure at all n locations
gtcttcttcctttctccgtcggacatcctctttagggtttccactctgctttcagagtcggncatacatagcagctcccattcacttctttacaactttgctttgtccagagccgataccaagtatgcagatggctcaactgagccccttatgaacaaggttgattcatcagggagacaggtggaaatggggctcttgggtcctgtatccagtgatgttattgtgtcacagtcgcagggaacctcgaatgagcatgttggattgttgaga

SEQ ID NO: 100478 - DNA, 224 bp, Glycine max
tatcgagccgattcggctcgagccgtatttgggcaagaagaaacccgttagaatgctgctgatatattggagaaactcaggacgaggatgataaaagtgcgtgaactctttcgtgatactgattcaaccgaatttgtcattttacaatccccacggtgatggcagttagtgaatcatctagattgagtgcttccttgaagaaggaaaatgttcctgtgaagaga

SEQ ID NO: 100479 - DNA, 243 bp, Glycine max
catttctcttttctagactctgactttgggtttttctgggctttaacactaggtttcaccttctgggtcactctttacttttctgggatctccattttctgagctgaagtctgaatttttggaggattttgatcgtgggattctggttgcttattctggggtgtcaccaagttcccttaatcaactgaatatcgaaccttatctgggtatttggccattgattgctggtgggtatttcctttt

SEQ ID NO: 100480 - DNA, 268 bp, Glycine max
ttgaccttgaacaatgttcccatctatccccgttagagatgtaaacacaagacccaaagcttaagcttttggaatatagttaacattgatatacttttattaccctatagagctggaacaagatcaactaattgaaggtcagggacattgttacaaagcaaagaaaatgctggatttatgaatattcaccttgaatatacgtgagtcagaagaatttctttcaccagaatatgccattgcagttgaggtggtcgatcgtatgtgaaag

SEQ ID NO: 100481 - DNA, 263 bp, Glycine max
gggaagttcaatatggctttgctccctctcatcttgaaagcagctttgtcataaggttggtgtgaagagagaaagagaggaagagagtgaaaggaagaacaactatgagaaaagtgagtttaacaacaatagtaatagtaataagcatgtgaagaaagaagagtgccctttgactccatcatgttggaaaggcttttgggacactgatgttatgggaacaatctttagtgtgcctcctttgtcaccactatctccactaatgg

SEQ ID NO: 100482 - DNA, 248 bp, Glycine max
atcaaattggtctatataaagagattgctggtggcaatagaaaccacaacaagcaactcttctctcaatttttcctttctgggtcacaaccatgcgaccggggccaattgtaagattcgggtcctccattgatgctgcaaggagggcagcatccaggaaaaggaggatgggaattctgaagaggatggaggacttcaacttcctagggcaaaggttcgggaggcaccaggggaggttaaggaacttcc

SEQ ID NO: 100483 - DNA, 121 bp, Glycine max
ggcaaaattctcttccgtttcaggattagggtttcaccgttacagtgaaacatggcaaaacccaagcggatccccccgcggaaccttggggcggttcccctggattccaactcctcggttt

SEQ ID NO: 100484 - DNA, 260 bp, Glycine max
  unsure (1)..(260): unsure at all n locations
acaaattgaatattagtggttaaggttgttggaggagctctaacaagagatatggagacaccaaattgggttcaaaagattgaagcctttcgcagctgtggtatcaatacagtttggatatgcagctatggatgttctatccaaggttgcattgaccaaaggattaaccattaagaagtaacggaataacgacatgctgntgccatctttgttatggccccattggcatggttttgtgacaagaaagtaaggccaaagat

SEQ ID NO: 100485 - DNA, 264 bp, Glycine max
tgtatctttcttctctccagcatcgcagtgtaatgcgtatctctccgtatattgacttcgactgtgagaagacactggtcgccattaatatcttgaccaagaaacccacgggcatagaggcaggccgtcgtgaggcacgtgaagtgatgacagacactcgatcgcataagaattcgccatggttgctcgtccgtattgcaattggtatcgtcgtgctgggattcgtcggtttcttcgtgaggctcatttgcattccaattaaca

SEQ ID NO: 100486 - DNA, 266 bp, Glycine max
ctcaccttctctcatccctcactctctcgacgaaaccctaagcttcccctttcaatctcaataggttccttcctgggttgcgcgaaaccctaattttgaatctgcaaacatgtctgcagctatggatatgtcgctcgacgacataatcaagaacaacaaaaaatctggatccggaagttcccgtggccggatccgaccctccggttccggaccttctcgccggttccccaaccgtgccgccaaccgcgccgctccttatgccaccg

SEQ ID NO: 100487 - DNA, 185 bp, Glycine max
cagtgctgtctgccatggaggatgagaaagtttcgatttttcattgattggggataactggcccaaagagtttattaaggcaatgcatggagcgatcgtgtgtctcattcacccacgattcctcctcatcttccttgtcctctcaattttcctcattttcacattttctggttcgactattacaa

SEQ ID NO: 100488 - DNA, 255 bp, Glycine max
  unsure (1)..(255): unsure at all n locations
tgtggaagtagcgaaatgtatcgaacggcggcgaacggttgttgtgcggtgccagatactactattaaggccaccgttggattccgattccggcttcctcagatatttataccctcttctcgcttttccacatccgagactcaacctttacccattccacacgctacggatcagancattccagtcgtcgtcaccaccgaaaccgaaaaccctaactcttcaaattcggccggttcttcttcaacttcatcttcc

SEQ ID NO: 100489 - DNA, 236 bp, Glycine max
cgctctgtttctgtctctgtgtttgcggctgaggattccgaacgagcgaccttcttcgtttcccgcaaagtttaagtccaccaggggtaaggaaagactcccctccacaatggccgcaattgacatggccacccctgggagttcactaacaatgggcacttgaaccacaaacctggagggattgaccaacctgtgaattaaaagttccaaaaggaagctgctgagatgaacaagag

SEQ ID NO: 100490 - DNA, 113 bp, Glycine max
tccctacccatacaagtcaacactgcaaaagggatcaacaacaccatcacgaatgaatctggcaataatagaagaatcctgcaccagccattgttcccggcgagttccgctcc

SEQ ID NO: 100491 - DNA, 213 bp, Glycine max
cacgcatacggctcgacatgccggcaagtacaagaaaatattagctgcatgcatgcaatcccagttcacaaagccggcgggcacagttaatttggtgcatggtgactttgttccaagcttcaattatatgtatatataagtcataggcacaatacaattacaaatacaatggcatattattcttattacaggcaccaaagcaagatgttgata

SEQ ID NO: 100492 - DNA, 106 bp, Glycine max
aggaggtttgcacaagcagagtgacagagcccttctccatctgaagacctcggcaccaagatctcaacatcaacatcatgctcttatcaaattctgcagcaccatt

SEQ ID NO: 100493 - DNA, 105 bp, Glycine max
gatttttaagcaactcttggatttgggcattgttccagatgtttacttctgctgttgtcttctgaatgttatgactcaaacaccaaaagaagagttggtaagcta

SEQ ID NO: 100494 - DNA, 150 bp, Glycine max
cggcgatgatatgttctccgatgctgtgattcgaggtgaaagtcagaattgtcatcggacatgttggttatttggtagctcgtctgtgaatcaaggcgatacacaaggagttaaaaaagttgtggggattggctttcaaccaggaccaga

SEQ ID NO: 100495 - DNA, 146 bp, Glycine max
  unsure (1)..(146): unsure at all n locations
tccattttctcaccacaccatgttaaccgcagtcctcagaagatccagttccaccctctcaaagcgctgnttccccgccgccttaatctctgcctccaccgccaccgccaccgccaccgccggcaaccacttccggctactctccg

SEQ ID NO: 100496 - DNA, 160 bp, Glycine max
cttttcttaatttaagtggctgcaaagccccacgtgttgcctcctatcactcttttggctgcccccactttttcttgttcacctctttcgtcaaccaataattcctttggaggtttagggttttgatccttgcagctctctcttaattaaaggatatttc

SEQ ID NO: 100497 - DNA, 275 bp, Glycine max
tcttgctgcaattttgggagccccaaatgaatcagataaagcttattatgacacaggtagtaccacctccaggatgttgagacttaaggtttttcaggacatcacattatctctgagtccaagggcctgaagggaaccaccaatataatctaataaagggaattatcaataacatagtgtcttaggttggagatgaacttgctctccactcgtttaaactcattttatgcagagggaagaagtatgctacttactgatagggaatagctgcacga

SEQ ID NO: 100498 - DNA, 192 bp, Glycine max
cacacttttcctcagttaacccaacaatggcaggaaataagaagagccttgacacatttgcatgccaaacaatgtttggaactcttcagttgcaaccagagatgcatgaagttgtggactcaatggtccaaaagctacaaagttggagccagaactcaaatggccaattcattgcagtggacttgaggactg

SEQ ID NO: 100499 - DNA, 171 bp, Glycine max
gctagagcgatacaacagctacatcaggagactcaacagcaccaaactcctcaacgcctcctccaaactcctcttccgtgccactatcttagtcgcactcatcttcgtcttcctcttcaccttcaactaccctctcctcgccccagacttctactcccaccgccaccttca

SEQ ID NO: 100500 - DNA, 273 bp, Glycine max
cctagattcagccacagtttcggaggagaagaaaatagtcgttcgaggttagtttttcttctgagatttgggaatttagggtttatatctttgtctttttggtttctgttgatttccaaatcgcgtatcttagataagacagttgaatttttattcttctctagtcacaacgttctgattcttacgcctccgagtcaatattttcggttagtaatttctagggtttcagagttttgttttggagaattagtcgataatttcatccggccaacg

SEQ ID NO: 100501 - DNA, 271 bp, Glycine max
cggtctctcttcaccacgccaccgcgccgccgtgccacctcgccactgcgccgccacccttagtcggccattatgcgattttgtctgcttgagctatttccactctttattttttgaacttccgatctatcacaacgttgaaggttccatttccacgagatttgagatatgttagatggttgggtgtgtgctttccttttggtgctttcttggtctgtggaggtaatgacgcaagtgctggtgatgctgatccgcgctataggggttgtat

SEQ ID NO: 100502 - DNA, 255 bp, Glycine max
gggaaatcaatttcatagagagggagtgtgagcagctggtggagaggtttaaacgggagataaaaaacaaggacttcaaaagtttgcctactggctcagttaccaggctctcaaaatctgtcattcagaaagatttggacactgtgcatagataacaagcagcacacataattcgtcctagcattgtggaagttgaagatctttggccattctttcatgaagctctattaattctgcccagcgtctaacaagaag

SEQ ID NO: 100503 - DNA, 261 bp, Glycine max
ctcgagcgctcgagccgaatcggctcgagtgatgatgccgtacgtggaaaaagcaaacgaactggagtaggtcacggccaacgaagatagaaatgatttggattcctcaattttggatgggaaatcgaccagaccaagaacattgatgtgcctgaattgtgtttagttatttgtttgtaccctggtgtttataaatctgacaaggttgatcctgaagctgctcaaaattcgattggttttttcagaaggatgtggtgggga

SEQ ID NO: 100504 - DNA, 263 bp, Glycine max
  unsure (1)..(263): unsure at all n locations
gttctaacagttcccactcactttcgcaattacgcattgtgtttctctctttccgcggcgtagatctgaacagtttagaaaaccctaactgctctcatcactctctttgctttttttcctctccgatcaatgacctctttggtcgcgctaagtcatggcaggacttgcacacgagggatcacagtttgatgctcgtcaatatgatcagtagatgaatgantgcttacatctgatggacaggattttttcacatcttatgatga

SEQ ID NO: 100505 - DNA, 269 bp, Glycine max
gtgacaaaggaggctaaactgcatgaggcagagaggagacagtgcttccttttttggggggaaatctaggtttttgtctactggtagcacttgaaacgaaggcttgagtgctatcacctaagaattaaaatggtcctttgaccatgttcatgtttctaaggagtgagttatagtctagcttgcttcctttttctcaactctcttgtatttcttcaatgtatttcctattggttcttctcacaccaccctgtcttttttatttcttatta

SEQ ID NO: 100506 - DNA, 272 bp, Glycine max
tctcgagccgattcggctcgagtgaggagcaaggatattttaccttggtttgtatattatacatgttcattgttcataaaacttatttttggaattatttcaattttttaaatacaaactcacatagatattcaaagacacagatacaagtagatacttgaatttctttgatgtttagtgcacaaacatggagttttggtatctttcttacgccttccttatactgaatcacttacacattccaaaattttataggatgagtggaggagagg

SEQ ID NO: 100507 - DNA, 266 bp, Glycine max
aatgctggtacatgactgagtggccagtgcttgtatattaaatcagaatttccttttttttcatgttttttttttctttggatactaatcttgatgattggaaaggaattttctatttggttacagcttatacatttttaatgctgggtcctggatagttacaaaaaaaaaaaaaaaaaaaaaaaaaaaaaaaaaaaaaaaaaaaaaaaaaaaaaaaaaggggggcccccccaaattggccccccccccccggggatttttttccg

SEQ ID NO: 100508 - DNA, 262 bp, Glycine max
aaactggcatgtgctgcatgacttattttgtaggcactacttgcttatggtttatctagctcgaggcgtgcaccagatgctattcatccgtcagtgttaattatgtttctcacccctgcttccctatttttaatctcgaatgttgaatatgcatttccattcacatgctgtatgattcaggagctattgtacataattgttgctgaatcactcactgatttgcaaaatctaactggactcaatatatgataatagtttgtta

SEQ ID NO: 100509 - DNA, 262 bp, Glycine max
gtctctacaccctttggcatggaactgggaaaatttgaatggcaagcatcaagtctaagcagcaagtgttaagaggaaaaaagaccaagcaagaacaagataaaacagtgtctgagcctggatcctcatcagcaccagcaccacacaagaacaacaacaacaacaacaacggaagaacagcaacggaaacgggcttttgcgggtacggtggagcatgcgcaacgacgtcgtcgaggcaggggatggtgagagcaagtggtgg

SEQ ID NO: 100510 - DNA, 174 bp, Glycine max
attggtgtcccgtcaagaactggacagttcacattctcaataagctctacactcgttttggagacttcaaactgcaaaaccccgcaaatagaccctttgctcaaatcgtttcacatgcattatgcggggagtattttagagtgccattcaatctgttcaaatgtcatatcgtgt

SEQ ID NO: 100511 - DNA, 185 bp, Glycine max
  unsure (1)..(185): unsure at all n locations
tatgcgtttctctgtcctttattcttcaatccacagcaaagttagagacgagagagagagagagaaagggaaagaaacctaatacgataccgtttttctcaggaatcacactgctcncacccagttcacccagttcccattctctgtgaattacgagggttttcgaaatcgaagagtctctgatc

SEQ ID NO: 100512 - DNA, 271 bp, Glycine max
tgagcattcaccacgcaaatcaaaaaaccagatctcaaacccagatcagaccaaccctcaaaaccaataacaaaatctgggttctcgctgacaacgccactcctcatgactccggcagccaccgtgaacacaggatgttgtcgtgtgagatcgcagttgtcggtgtcatctagaaggaggcgcaggatggagtaccagtcatggggggtaatgtagtcgtcatcactttcatatctgagtggatgatggaatctctgaggatgacgtcgtt

SEQ ID NO: 100513 - DNA, 257 bp, Glycine max
gagtactgcaatgacagcatggcagagcttgacttaagtttgtgacgaaaatcaggcagatcgtgctcatatctaaacgcataggtgatccagtggtggcgttgacattgatggtccacactcacttcaatgatttccacatctctgacatgctgacgcgctatggtttgatagttccagcatcacacgatgcccgcaaatctcgagcatgtgactatgctcgtgttgtgattctgtgggattgatctcgcgctctc

SEQ ID NO: 100514 - DNA, 256 bp, Glycine max
tgaagatctgaaattctggattcttaactggaatcagggttttggttttttgtcattatcttcctcagtaagcagtgtactctcccgcggagttttgtcgctctcttccgccaataacgacggcatatggcaccgtttggctgttggctacagcagcttagcatcttgggttatgtcatccagcttagcattgcagtcattctgctgataaattgtcctacggtttttgggtttgtaggattttcacaaagttgtt

SEQ ID NO: 100515 - DNA, 114 bp, Glycine max
taaaaactcagtatcgagttctttgtcccacaaaagatggggttcactccgacaagtagtggaagatgcttgctcataatagcgcctctggttgtgccatggtgttggaggcta

SEQ ID NO: 100516 - DNA, 167 bp, Glycine max
cgcgaaattagggttcgctcacttgtcttcaatttcccagattcatctagctcgatgcataaatccgcttattagtttctcaatatgatcggtttttctacgtgacgcatcgcaattcttcagcggtttcgtttagggaacccgcgaaaccgaatcagatagtgcgg

SEQ ID NO: 100517 - DNA, 268 bp, Glycine max
tgcttattatgttggtgggtcaattggcgtgttgcgtagtgcaagaggatatgcttggagaaggagaagagcaaataaaacgattctgttgttttttttttttctttctttggctaatccactcattcacttggtcctcatctatacaactatagtctcatcccctgtttttccctttggcttaggaattgcaattcagcagtgagttgcgaacatggtcacccaatctcggcttcctccaaatcccaccgctactgaccaaaaccaa

SEQ ID NO: 100518 - DNA, 119 bp, Glycine max
ccagaagaatccttcacatttataggtcgtaacacatcatattcttaaaccacaatcattttttgcagtggcatttggtgatttttgcgcacacactttcgaaaacacatgaagatggt

SEQ ID NO: 100519 - DNA, 198 bp, Glycine max
aacgaggtatcgagaataacgagtcttgacgcggtgatggagatggctggaccggcgacggagctgccggagagcggcgtgaagcagggggacacggcggcgcttctgtactcctcgggaacgacggggttgagcaagggcgtggttctgacgcaccggaacttcatagcggcgtcggtgatgatcggaatggacgac

SEQ ID NO: 100520 - DNA, 222 bp, Glycine max
aaaggcttctaagcttggtgatgagagcgatctttgcgatttgagctattagtggagatctccatgcggcgcattggtggcgacgacgcatgaggatgtcgacgaaaaagagcggcgtgggcatgaggattgtcgatgggaaaggtgtgaacgacgaagaaaagatcaaaccatcgcgagctgacgaaagagatgacttagctgtagtagatcttctaaggg

SEQ ID NO: 100521 - DNA, 108 bp, Glycine max
cagcaaatgtcttctcatgtgcttatctggtcaatctggtcacgcccactcatcgaaagatagcttcaaaacatcagaaggcagttacggtatagtggacttcgagga

SEQ ID NO: 100522 - DNA, 167 bp, Glycine max
accctcgccctcgagccgaatcggctcgagctcgagccgctcactcacacacacacacactctctttccatacgtccgtttcgtaaaccctagcttgcatttctctcggttgttctatttctgggtctctatgaggcagcagcagaacagactcagactcacaagag

SEQ ID NO: 100523 - DNA, 108 bp, Glycine max
ctcgtaacaaccgtcgttgcttttctctcatggctgcatccgccgcattcgacgacgccaagcacggcttttctcggccggagatgtacaaggaaaacctcgccggca

SEQ ID NO: 100524 - DNA, 202 bp, Glycine max
tctgctcgagctcgagccgaagcatttaatgattaatgactatttccatttgttcttatccaaaaagaactgaggcagcattgcttgagcaaatggcagaggaggaaatagtacattaaaaaggagggatgcttgtacatagttttcgtgtaaaaaataaaagagtttgttgaatttatgtgcgacaagcatttaatgatta

SEQ ID NO: 100525 - DNA, 157 bp, Glycine max
ctcatggacaagagaggaggaacatcaatgtgcttcttggtttgcccgctcctgtcagggccagtgtcactgccagagaaggaagtgattctgttcctctctcatggacaagagaggaggaacatcaatgtgcttcttggtttgcctgctcctgtca

SEQ ID NO: 100526 - DNA, 264 bp, Glycine max
  unsure (1)..(264): unsure at all n locations
ttttaataggaaaataccagtctaactgataccttctcctcaataattaaattcatttagatacgaaaaatgtaagaagaatctgagaagcttgttgctcaaaaattcaaaggggaatgaatgctttttctcacaaccttgatcattccattactgtttccccttaaccccagatagatagatatanaacccaagaagaatttcgtttcggggatacaatgattgggcgcagagacagagagggaccttgatgaggacaacagt

SEQ ID NO: 100527 - DNA, 244 bp, Glycine max
tccaaatcagaggcttcagttcagactcgggaccctgcccttcttccaagataaagtgtttttgttttcattataaaaataaattaaaaatatcttttaaaaaaattgcagtggcagcacacacatctttgtgtttcaaaaatggaacctaatgacaaccaactcacctctttcttccaccaccaccaccacacagaccaacaccaccagccgccgccaccaccgcagaccacggcgtctccga

SEQ ID NO: 100528 - DNA, 261 bp, Glycine max
  unsure (1)..(261): unsure at all n locations
tacaagacaaaaagtggagtgtgaaattgggggagaaaagttaaacaagaagaaaatgggaaacatcccccacttgtttctattttctagtttttaaaacacgtacttgttttggaaataattttcgaaactgagtagattttgatgaaaaattgactgctgagtagtttggaatcgtgttggaaaacagtttttaaaaccanaaagttaaaagtgagaagggaatcaaacatactattattatattcttggaaagtgttt

SEQ ID NO: 100529 - DNA, 256 bp, Glycine max
ctctcttcttcatatacacattggtttgttagctgtattttccccaatttctaccatcctttatgtttttttctcttttctctctctaaaaattcaagctttgaaattttgagttgttttgttttactctctctatgtggcacagtgaaaggcaggtttgttatggaacgaggagggggtttgaagaaaccccaaattgaataaagtggttttgatttgagggaaaagcttgaatggaaggaaggggttccaaaag

SEQ ID NO: 100530 - DNA, 259 bp, Glycine max
cggctcgagggtatacagaaggtgcgtcatgcgcttgcgatgctaggttctcttccttgcgtgtctgtcagattgatggtactatgagagatatgcaccggaattctactggtagtactaataacaacactaataagataccatcggcactgaggctgtcctcacctcaacaatctctaagacgcttgggattgtgttcccagatagcaacgggggagcactctactcctattgtcttccctgacaaacgtggcaaggt

SEQ ID NO: 100531 - DNA, 262 bp, Glycine max
aatctattaacgtcaccctgtaggcattgagttgaagtagtaccgcacgcaaaccaccaacaattaacacccattgtattcaccaaaagaaaaaaaaaaacacaacaatcttcgaattgaagagagaaagacagacagagtagtagtgaacgaaatgcagggcgcaggggtaacctttgaaatggttgtggttcaggtcttgaatgtgggtttgaacactatgatcaaagcatcattgtccaaagggatgagcatttttgtt

SEQ ID NO: 100532 - DNA, 162 bp, Glycine max
ctcgagccgtttagaagccacaacacccttccctttcgccgcaaaccaaaccaccatcacacctgctgtgggactcagctttgttcaaatattatgttacattcatctgtcattgcaattcgttcgatccaaagcaaaacaaccgaaaaataaaggcaaaac

SEQ ID NO: 100533 - DNA, 141 bp, Glycine max
ccggtttttgctccttatcttatgcttgtgtaaaatttttatttattccaccttcccagaacattgctaaagaacaataactgtagttaatcgttttcaaatctaggggtggttgaacgttttaaacttttcttgattcga

SEQ ID NO: 100534 - DNA, 201 bp, Glycine max
gtttcacagttcacaccatatttttatacacaaacacagaatgaatacggtagattttacattttagctcagaagaacgttgaaatgaagatcgaaaacgccacatcgagatctatttctcttcattttcactcacccacttaactcccccaaccctattcagatcccaaacccaaaccccgccacgtgatgtgtttcaaa

SEQ ID NO: 100535 - DNA, 276 bp, Glycine max
ccctcgagccgaatcggctcgagcactcccacctgacttattcaaaacctgtttttcttctatctcttgaggcattattgttataaactctatattgtcatggtcactgtagtcaatcagcctatcactgttacaattccttaactaatcttgctttgcagttttgggctctaactgttgcacctgttctaaaagcaatagcaccattgtatttgaaaaacatgaatttcaaaaatggtacaaccagatcataataccatgcttgcttccgatgct

SEQ ID NO: 100536 - DNA, 269 bp, Glycine max
ggccaaggcacaatggtagggtgtcactagaactggagtcccttggggagttgatgttaggcatcagtgcgcctgctgcagcttgttttcttctgactttgtttcaaactgtattttattcttgttttatgtcttggattctgcttctttcacctctattctgcttatgggtgacatttctctatttctttctaactgttgtttcttgtttgtggttagatatgcctggttttcggtttctttcaaaaaaaaaaaaaaagggggggggg

SEQ ID NO: 100537 - DNA, 150 bp, Glycine max
catccttttcggaaaaagcgagacgtcttcatcattactacatcgtcttgtctttccatggcacgaaagaacggtagcggtcccttcatatatccttaaagaaccatttccatgtcgcaacccaggttccgagaatgttcaaatttgggg

SEQ ID NO: 100538 - DNA, 207 bp, Glycine max
cgctcgagccgctcgagccgtgccaactttgaggacttacttgtctgctcaagttgttctcaaggcgaggtaggcccatggggttctcattgacaaaatagtttctctcagctgcaatgggaacatgcatactaacgatgtgcttctcttctggtccaggcaaggcaagccgtgcactgtactaaaaggattttgggagttatgatt

SEQ ID NO: 100539 - DNA, 155 bp, Glycine max
ctcgagccgcgttctttcatcgttctcttccctaggagttgggaactttcttccaaatactactattaaacaatactatcacttttattaaccccacaaacatttgtcacacgtcttaggcttaattcactccaatggctgttttctctaccaaa

SEQ ID NO: 100540 - DNA, 152 bp, Glycine max
ggcaaagcaaacgtggtcgtgagcagaactgtcacaaacgttgccgaagaagatgaaacagtgtactctgccgttgtcgaagctcccaaaggagtatttgtcaaagtgactccaaataaacttcagtttacgaaaagtagtaaaaaattaag

SEQ ID NO: 100541 - DNA, 147 bp, Glycine max
cccaccgtcacttttccttaacggcgaagcatcgccgaaaagggcacaaccgtcattcccaccccccaaaccgtttcttcaattctcctctctcccatcccagtaaaaaggagaggaatcgaagctgttccgttctcatcggaaagg

SEQ ID NO: 100542 - DNA, 145 bp, Glycine max
atcgagccgaatcggctcgagtgcgttctccagcctagtcattttagcgttgtatggattggctaaccttgaagaagtgtttaatgacccctcttccagatgttctctcaaaagtttagaagagctaaccatagagaggtgtaga

SEQ ID NO: 100543 - DNA, 148 bp, Glycine max
caccgctccccattcactccattcacgtttcaatgagtttgtgttgctctctccgttctatactaaagaaatctcaaaaccccattttcagaaatcatgcagaagcatacacataagcacttcttctcatcatccttttcttatcaga

SEQ ID NO: 100544 - DNA, 265 bp, Glycine max
ctcgagccgaatcggctcgagctctaagtgtgtaatacaattagtcatctctgtccaatggtgttctgtttttagaacactaacactaattcttaagcagagaacatacaagatagagtaatcagtcatgccatttggtttggtctcactctcagcctggaacaagcgtcgtagaagcaaatcacaagatcatacagatccctgggtttacaaacctgcacagctttggcaacttgaagatcaaatgccacgacctacaaaaagg

SEQ ID NO: 100545 - DNA, 260 bp, Glycine max
atccaattgcgcattccttaattttcttcttcctcctgacctcagaaagaaagttgtttcaaatggcattgtggtgtggttaccttgcgcattgtgtctgccactagttcgctggtagtgggggaggtagcaaaagttaaggatgacaagactttcttcgggcatgatcttggtgggattggcttcccaggctggggtggtgatggaggtgatctaggaggaggtgcaggtggtggtggcggtggcgatttggaggtgga

SEQ ID NO: 100546 - DNA, 262 bp, Glycine max
gcgtgataaaccgatccatggaaaaattatgctaatatacctgaatctgttcaaaatggtttttgaaaaaggagggatcatgttcaattggttaatgactagccataggattatgggtttagttcatttctgaggaaaggaatatgagaagtgggtggtaatgacaggagagaatggatatagctaaaataattcctctccattgtttcttttactgcttgagatcaattggagagagaaaaaaacaagtttggggccctca

SEQ ID NO: 100547 - DNA, 264 bp, Glycine max
tccaaatcaagatggttactgttgaaccagctacactggttgcgacccctgatgtgaaaaatgctccactcagtactgattttcaacctagcaatgatctggctaattcggaaaatcagtctgaccataatgtggaaaattctgagtctcagcctaataaggatctctccagttccaaagcagaactacttcctgcatctgaaacccaggcttctagtgccgatgcaaatgaagggacattgcccaaccgtgaattatacaaca

SEQ ID NO: 100548 - DNA, 187 bp, Glycine max
tctctctctctcttagaacaaccagaacccttcgaagctaaccaatcctatggtgtctctcatcagatttattatccatatctctctctacacttagattttaaatgtaattcagattcataacacttcggatctcctctctcatcaaactttagagctatgctctatctcttccgcaaaacacact

SEQ ID NO: 100549 - DNA, 207 bp, Glycine max
ttcataataggatattgtattctaatatggaatgacatgacgatatctcaccccaaaaaaaaaactgagcaatttaattactcttagaactagaatcacagaatttgtttttacaaatgatatatgggttggtctttacgttgcttgacttctggattatctctagatcatactaaatgtttttttattttttgttctagcttcaag

SEQ ID NO: 100550 - DNA, 283 bp, Glycine max
gatcagtggtttatctttatcctgttcagattcgaacattttggaatacaaaacttgtttcttcttggcaacgccttttgttccccttaaaccattttctttcttcctttcattagttttcgagctgtactatcaataattccaaggatttgtaataaaatagggtgggaaagtttagcaagttgctattggttgtcaaatcacggaagatcaatgatccttgaagcaaattaaatgctaattggaaagatgatcaaggaatttcatatagtttagttgtttt

SEQ ID NO: 100551 - DNA, 276 bp, Glycine max
ctttgttgctcacttgcttgaagtcaaccctaagaagcggccctctgcatctgaggccctgaagcatccatggttgtcatacccatatgaaccaatatcatcttgaaatatttagagggttcttaatggtgataatgccacctaccctaagttgggtaaggttcatcgttgcagagtgaaggccccactgatacatcgctgcttttcatgatctattttaaagatgaaatggaaagagttgtgctgtgcccttccacatttatatgcatactgcat

SEQ ID NO: 100552 - DNA, 127 bp, Glycine max
ctagacgctgcatgtaggtatacgggtaatttaaggtttgcttgctatcaatggaaaacttaaatgtacgatgtttcagatccaaaaatcaagttgtagctggatattttatcctctcttatctatt

SEQ ID NO: 100553 - DNA, 176 bp, Glycine max
agcaagatcatagaatatatatcaagggttgggcaagcttttgtagaaggaataaaattgaaagaaatgatacatgcttctgtgaagttatatcaggggaagaccaagtagtaaaaacactacgggtgcatgttgctaggcggagatgaacactacgggtgcatgttgctaatttt

SEQ ID NO: 100554 - DNA, 226 bp, Glycine max
tgaaaaagtcgcatagtcgacgttttcgttttagagagagaaagaatcagagtttctgcttctgctttaggaggagagagagagagagagacagacagcgagcgaaccatgataacacgatcgaatctggttgaacagctgcgagagtatcagattcgatccaagcatgattgggcctctgtctcgttcttctcctccacttcttcaaacatcacaatttcaaggg

SEQ ID NO: 100555 - DNA, 149 bp, Glycine max
ggagctgaatctggggcaatttgcgttatcatccgctggaactctcacacataatgcatgagtacgtaaatcggataaggctgttacaatcagaacgcgcaagatcatgatcaacaggcatcattataagcagcaataagacgtggatg

SEQ ID NO: 100556 - DNA, 271 bp, Glycine max
gtggcacctttacttgttgtcttgggccgtttgagcccatctctctctttcctagtgtttggtgtctttgcaatttcaagtggtgttttgagcatttggctacctgagactagaaatgctcctctctatgagaccctgaagcagcaagaggaggaggagaaacacagttggatgtctcaaaatgattgtgccctagagatgggaaaataactcaaaatggtcttcattttaatttatatgcactactaatctaaaatgtttttgtgtagac

SEQ ID NO: 100557 - DNA, 251 bp, Glycine max
ctttatgattatttctaccatcaggagcatttattcattgtaactgaagttctgcaagcaaacttgtacgaatttcagaagttcaagcaagaatctggaggggaagaatattttacgttgaacagattgcagctcattactcgccaatgtttagaagcattgcaatacttgcatagcttgggaattgttcactgtgacctgaagcacaggagcattctaatcaaaagttacagaagatgtgagataaaggt

SEQ ID NO: 100558 - DNA, 122 bp, Glycine max
agcttttcttctttcagatggcacaccttgcgttttctttgtcatctctaaacttagaaaattgaattaagcccgacacgactagaacactgtgcctgactaacttggaaacctaacctagg

SEQ ID NO: 100559 - DNA, 263 bp, Glycine max
ctcaaatgcttgcagacctttgcccagatacatgtaaaggaaggcactgttagtaatcttaaatgtcctgaagcaaaatgtgcaattatgattcctctgggcttttaaaacaattgctggatgacacagattatgagcgctgggagtccatgatgttggaaaaaacacttgcatcaatgtctgatgttgtttattgtccaaggtgtgaagcaccctgcatagaggatgaagaccagcatgctcaatgcccagaatgttacttt

SEQ ID NO: 100560 - DNA, 283 bp, Glycine max
gagagtcggatcggtcgactgatccattagttgagtcagcatggatcgttctctgtctatcctatcttcctttgccttctttgcaccctctgaatctcacgacaaagtctcgttggaattgtactacgaaagcttatgcccctacagcgccaacttcatcgtgaatcacctcccaaaaatcttcaccccagatcttgccccaatcgttcacctcaaactcgttccttggggcaatgccaaactccgtgccaacgccacctttgactgcaagcatgggccatat

SEQ ID NO: 100561 - DNA, 245 bp, Glycine max
agaaaaactcagcacaacacccctcccaaccctctttttctcttaatttctcatcatatcatatctattaatcttacacatatattaagacatagatataattttttcgtttattttcctgcatgggctgttaaataagattctcgacgtgtcacagtgggaacaaggcacaatcgggacatgaccgacgtggtgcgcgcttctgcgcgggtctccagggaaaggcacatgctgtcgcgtagatt

SEQ ID NO: 100562 - DNA, 172 bp, Glycine max
gtttcttcttggatcttaccctcttgtttgctaatattctcattcttctgtctctgcttcttctccttctgaactaagagatgggggtgtcttcaccaagcttttaagcggtccttgctaagaagagatgcgattctcatggtaggcctgatgtgctggtagactaccatct

SEQ ID NO: 100563 - DNA, 188 bp, Glycine max
atagatatcgccaatgcttagtaaacgtccgacacatcctacgtttctatgttggagcagattcagatactgtacccattcgtcatcatgtccaaccccaaatctgagtgcattagatgctgaaccctctgcttcggagacgtcaatacccatttcatatccaataaaaactcttgaggacttggagt

SEQ ID NO: 100564 - DNA, 288 bp, Glycine max
taactcgaactcgagccgaatcggctcgagctcagccgttcgattgagtgcgtcctttttgtgtgtggaccatggatatacagagttcactttgagaaagaggattcgccatttcaattctctctctctctctttcaattcgcaggcattgccattttacttaatcactgaccacggccttcaaaaagggtttatctttcattccatgcagtgctgctttttcattcagaggttcagtttgtgtcatgtgcatacagcaatcggattgtttggatcagaagtcaattc

SEQ ID NO: 100565 - DNA, 283 bp, Glycine max
ctaaactgtcttctgccttttcaagaccaaaacaaggaaactaaaaatggatcaatcccagaatgcgagccatcaagctggccaagccatgggacaagctcgggagaaggcaagcaacatgatgaacagtgcaggcaatgctgctcaaaatgtcaaagaatcctgccaagagactggccagcaaatgcagcaaaaggcacaaggggctgctgatgctgccaagaatgcagttggggctaacaaatgaatctagttgactggatatccctcaaagtggctattt

SEQ ID NO: 100566 - DNA, 273 bp, Glycine max
gctttctattttttcgaatcaaacttcagtagtcgtttattcgtttctcggtgagtgtggtgttcggtgttgcagaggtagccaattaacatgggacctggtggaccagggggtcctgggcctggtggacctggtggacctggttggggtcctgggcctggtgggccaggctggggtccaggcccgggaggacctggtttctttggttctggtgggtttttcggtggatgtgcagatggcctatgcaacgttgtatcttcatgcttctactgc

SEQ ID NO: 100567 - DNA, 278 bp, Glycine max
actttggctaatctttggtcagatttggaggaaggtgaattctgggttattggtcaaagggatactgtgaatgtttggaggactaaatgggtggatagagatataaaattgatgagcatggctcataatgttcctgatcaattctgagttgaaagtcaattagctgcttaaagaggatggtaggtgggattctgattttattagaatgcttatgcctgaagttattgctcagagaatttttgctattatgcctccctcagctcaagctgattctgata

SEQ ID NO: 100568 - DNA, 218 bp, Glycine max
ctttagtgatatttttctttccaatcatatttttttcatctagaaaacttgaactcaataccttacttaaagagaccaagtccggttccacatcatgatctacttctgatgcaaccgaatacaccttcaaatttgttttctttgactatgactacctgcagattgcttgctatttccattccaagtatagatcgaagctatctaacacctatacgaaa

SEQ ID NO: 100569 - DNA, 240 bp, Glycine max
attctcaaaccctaaaataaattcagcaaatcacaaaagagaactatttattcctattccttgtatgcaatcttcctgaatataccagaattgttttcattattactactcaacaatttctttctttctttctttcttttggttttgcagcaacaaaatcaacaccaagcaaatggaagtaacagtcctcatgagctgtttccgcggtggcttcagcggccacaggcccctcacgtgggg

SEQ ID NO: 100570 - DNA, 261 bp, Glycine max
gaacggctcgagcaaaaacactgaaagtccagtggctaaacaaaggagtgattgctttttgagtgttcttgctgcaatgatatttggtactggatgtggagctttaacagcatttattgtgctttacttgtggaccatctttggcaccaataaacgtgcagtggtgccagaggagtctcttgtggaacctgtagatgttgattataggaaaaaagtcaaaattgttgtagataaaaccatcgaagatggtaagaagtagaa

SEQ ID NO: 100571 - DNA, 230 bp, Glycine max
tattctcaaaccactcaaaccgaatcggctcgagctcgaaactgacaaacataaccgataaaccataaaacagagtcattacacaattccttacaccgaaatcatattttgattttgataccccttattttatttatttccatactatattcacttctactacacattttctgaacctgacatcttctctccttaaagccacacttctgataccttttgatcatcaagtg

SEQ ID NO: 100572 - DNA, 229 bp, Glycine max
gctttctctgctacaaagaagaggtaaaagcagaggcaagaagaagaatagagcaagagaaattggaatggaaggcagaggtggaggagaagtgagaaggcttcacatcatttacttccttagtcagataggtggtcgtgcagatcatcctcatctgattcgtgttcttcatcttgctcgaaatggggtttatctaagagatgtaaagagatggcttggggaattgaga

SEQ ID NO: 100573 - DNA, 269 bp, Glycine max
ctgctcgccttatattctatcgttcacttgttcagaccaaggtacctatatcatcgttggaagcaccgcaccatcttcacatcttcatcttggtcctcgctgtcgtatacgactccttttccatactcaccgatgacttcggatccgctacaatacgtcagtggatacactagacaaattcaattgtctaaagcaggcgctacgatcactgtgccgatttctcaaaccaaaggtcactcagggacaccagaatggttttatcaggggtc

SEQ ID NO: 100574 - DNA, 129 bp, Glycine max
ggaataccaggagacaaaaagggccctcctctcgtcgccggcgcctttgtctctctgcttcactcgcacccgtagcgttttctgcaaatccagaaagaagccagcgccatgtggtggcagaggaaaccg

SEQ ID NO: 100575 - DNA, 143 bp, Glycine max
ttcggaatcggactcttcatacatcctctattatttctttccaacaataattccctgttcctcagtttacccaacatacacaacacctacgattcaagtctcccaaaacacacataactaggaacccgctccttccttaacct

SEQ ID NO: 100576 - DNA, 236 bp, Glycine max
gagtttccgatcctgcgatgtcctatatgatagatctgtgaggaaattgaactgaaaaaaaaaatggcgacgtcggaggtatcgatcaagggaaattcggtaaacggaaaaggagataacagttctggtgatgctagaaacagtggaggcgaggctcagaatgcttcttcatcatcatcatccgcgagagacgcggaagctgcgctttacagggagctgtggcacgcgtgtgcagg

SEQ ID NO: 100577 - DNA, 252 bp, Glycine max
gcagcatttccctgcttaaaccctccagcagcctccaaacaaaaaccctaattcactaaccccatttcaaatcccaatcacgtttccgatcaatcatcaccttctccataatctctccgttcgcgtcgcaaatcgagcgagatagtgtcgagtcgaaccaacgatcgagaaggtaaaagcgttccaaaaataccatcgaggataacgatatagaagatggagtcttgccccagttgtggtaacatgctacag

SEQ ID NO: 100578 - DNA, 197 bp, Glycine max
agcagattcatactctctccctctctctttagtctttaccaccacctggcctgcttttaaaacttgttcttcctctctcacatgaagacactagtcatggacacaacctcatcaacccctcaagactcatcatcctccaagaggcacttccactggacgaacaaggttggaaatgaagacccccaattcgcaactta

SEQ ID NO: 100579 - DNA, 201 bp, Glycine max
aaaataaaagaaaaccactttaattaatttttcgcaaatccccaagagagaaaaaaaaatcacacaattttagtgaagctaaagcttgtggtttctttctcgttctcaaccaaagttcctgaggtaaagatacaagcttttctcttctgttcactggatcgggttcaaggatttaaggggtaggtccattaggggtttttg

SEQ ID NO: 100580 - DNA, 159 bp, Glycine max
ccgccacattggataccaatttttctcatggttgcagcggggatgggtccaattctagccatcaagtacttccgatatacatatagaccgagcaaaatcaatacccttcagcaagctgaacgtcggggtgggcctatatggtctcttggcaccattgag

SEQ ID NO: 100581 - DNA, 206 bp, Glycine max
ctcaacaagttcaaatgcagaggcaaatgcatccgcagatgcagcagatgattcattcccaaaatatggctttacatcaacaacagccgcagcaacagcagttagagagaatgcgaaggcgtgcagcagcagcagcagctactcctcgccctgctatggatatagataaggaaagaccagtggttcaagtcaagattgaaaaccag

SEQ ID NO: 100582 - DNA, 161 bp, Glycine max
tcgggtcgaggtgatcttcagtttcgtgttcgtttcttggtttttctgttcagtcatttgtttgtttgcaccgaaaacccatttcgaaactggtcttacttatttttttgctgatctggtcgaagaatacatagcgacacacacaaacaaaccatggttgg

SEQ ID NO: 100583 - DNA, 226 bp, Glycine max
ttcattgatatttccttttttttcattcttgttattgacacggaaaggggtgaagaagattatagatccaattaagtattaaatatatgtaattaatatgtaattaatctcctcttctttatttcgtcttttataacttcttttttttacaattgtaatagaataagttaggaaagtgaaagattaagggttaatttggcctaattgaatttcggaataaactggg

SEQ ID NO: 100584 - DNA, 109 bp, Glycine max
  unsure (1)..(109): unsure at all n locations
ctctttcccaaactcataagccacccgcaagcaangaagcgccaccatcaccatggagtggaaccctcagaccctccaactcctctcgaatgnctctaccacacaacat

SEQ ID NO: 100585 - DNA, 259 bp, Glycine max
ctctagtttactacagaaaaaaaaaaaagatgggtagtgttttttcagaacacagattccaggttcagccctctcacaaagcttctctccctcaggaaatccctgagggacatagccatcccagtcccaccaaggaagctcctctaccgccgctccgccgccgtccacgacgtctccggggacatgttttgcgatgacaccctccggcacaagtaccttccccacaatggctccaaagactcctccgacgatgactccg

SEQ ID NO: 100586 - DNA, 248 bp, Glycine max
  unsure (1)..(248): unsure at all n locations
gtcaaaggctttgtataacttgtacctcacaaggccacaacacagattttgatggtgtaagaatcttaatctctgacaagatttcaccacaagctagtagataantccagtggtgacaataagaaaattctctttgacaggtttcagtgccattcaatagagaattccagaggagcagagcaatggtttcatatatgcaagagtttttggtgggtttgcaaagataagatcatcgatccccggtcttg

SEQ ID NO: 100587 - DNA, 261 bp, Glycine max
gaaacggcgtaattggaaacaaaggaacggttagtactcctagtcctagacttctggtgcagaagaaaacggcgttggattgtcctgtttcgtcgccacgtggagttctgaatagccgtgctcttcaaggttctccgatccgttccgcggtgcgtcctgcgtctccgagtaagctagcgacgccgtcactgtggtctccttcgagaggagtgagtccgtcacgagcgcaaaacggcgtcgtcagtggcttgagtagtaggt

SEQ ID NO: 100588 - DNA, 259 bp, Glycine max
gtgaggacattttatatatttgtattgaacatcaaaggaaaaggcattcatctgatcaagtagaaggcaagtccaaagatacccaatttgacaataggaaaacagggcatatggtcagaagcatgcaattgcagccaaatgtcaaggctttagagacaagagatgtagatgaaatggttctgtcaaactggaagtctcaaggaaccatgggtagcatgtcagtgcttaaagaccgtgagatgttattttcaatgattca

SEQ ID NO: 100589 - DNA, 131 bp, Glycine max
cttttgcttgttctcgctctccagcagtgccttgaattagagtcgctctcatgggctttctccggcgactcttcgtcggcaagaagcaccacaacaaggccccaccctcctcgtgcggcgcctccagaccc

SEQ ID NO: 100590 - DNA, 275 bp, Glycine max
cgaaacgtagggtccgtcttgtgaagaccaagtctctcaccacaaagacgatagagctcttgtattagccagagaaacagacgattttggctatctcgttggctttcgcttgcttcctaattctggtcttgaagagtttatgaatgtgtcacactctataactgaggaagattctagtagcgatgagattgaaaaacccaaggttgaggatacagaagaagaggaagctaagactagagtgtcacataacattgttgttgtgacttctgaagcgg

SEQ ID NO: 100591 - DNA, 247 bp, Glycine max
tttcctactcattaagcctaatattctcactaaccaaagaaacactactcactactctctctgtagtgttttcaatagccatgggtggcaacaggcaaaggaaatcttcctccttcaagtctgttttcaacattttcaaatctagcaataggcaaagaggagggcactacgatgctaattatgatgatgcaccaaagcaatggaccaaagtttggcccagtgatgaggacagaggtcgctggggggt

SEQ ID NO: 100592 - DNA, 274 bp, Glycine max
  unsure (1)..(274): unsure at all n locations
caaaaatggcggaaaaagaagccattgaagaagctcagagaaagctccgatcagagttccttcaagtcctgcgtagtaggcgaccctctcaagttccattaacagtcgaactcgcgaagcagtggcgacacctttgtttcaggacgctcctccatcgatcaaagagatcgagataatggagtcgtgtccaaagtctgatgtagagaacctcgaagacctgctcgaggaggagaacctctacttgaatgtagangaaggagagcaaggacggttg

SEQ ID NO: 100593 - DNA, 271 bp, Glycine max
actcgagccgaatcggctcgaggacctacaaagtaaatgatttgttcgatgagaaagtcgttgcagtttctgtagcagaactacgggtgtcttgtattgaacagagaataaaaacgtgccatgagtatatggatcatgagggacgtacccaacagtcattggtgatcagtactccaaaatatcataagcgttatatcttgccagttggggagaccatgcatggtgccaaccgcacaaagtcaaaacatgtggggtacaacctagatgacga

SEQ ID NO: 100594 - DNA, 269 bp, Glycine max
gtccatcctttggatgaagaaaacaatatttgtgatggaacattcatgggtgaaattgtgaatacaaatttattagcttctgatgctgctgatattgcaaactccggcttgccagttaaaactgatttacagaggcagtttcttttccaaagatgtttgataagcaacacagtttttcagaaaacatggtcacgccatttgcccaccaggccactaaactaactcgaatgcttagtgggtctgaaaggatgggtttgagctggccagag

SEQ ID NO: 100595 - DNA, 195 bp, Glycine max
ctgaaacgggcaaaaaatggaaactttgccttccaaagtgtgcggatcgtgatgtttgagtcatacatttgcttttatgctccggcaatgcatcatcatcatcagccataattgatcctcagtttctccgaataatgtctacagacacatgttgattctcccttttcgattgttccaaggatccgggtttttttt

SEQ ID NO: 100596 - DNA, 268 bp, Glycine max
aattgtcttctgccagaaagcctccaggttgctgcagttagacatctgcctgaacgtgttgcatttgatgatgatgatggatcaggatctgatggcctttctgcatccattgagagtgaagaagatgagcccaataccattttttaacttcaccaaatggtgatgttgcctttctaaaggaaaaaccagttaggctggcacgggagcacttatgattttatttggtttaccttctgttttgtattctttctttgttctcctggcttgt

SEQ ID NO: 100597 - DNA, 268 bp, Glycine max
  unsure (1)..(268): unsure at all n locations
gtcagtgagtgttgttgacttcacattgacgatcctttttggtgcctggcgggatgcgtccagtttnctcggagctctggntcttcagtgcttggcaaaggcaaaatgagttagcatttaggatgggaaaaacaattgactggtatggattccctacatctgttaatctgtctgatgtaaggacatttgtagagcagtatactggtgaaggaactgtgttcgccatgacattgatacatggaaaaggtcgggttccaagagcatttgc

SEQ ID NO: 100598 - DNA, 199 bp, Glycine max
ggtcgaatcgagcgaatcggctcgagatttccttcttcatgtggatctcttatattcttgttagttgaacattttttgtgaatcccagttcaagtgcttttatgatttacgataaaaaatcttttttactgctgaagaccttcctttttggaaatggagtaaaaacatctcttgtcctgttttctgtatttggtatcaa

SEQ ID NO: 100599 - DNA, 244 bp, Glycine max
cgagaaagagatttctctatgctctggtcatacataacatacacatatactattattgacatttgagataataataataataacacacaatctctattcaaaatcaaataaatccacgtgtttgagttgagtttcatcgaataataatttcagatctcgtcgatcttgagcttcaacaatggcgaaaccaaggtactctcgtcttccacctcgcaagtcatcgtcgtcttccacgctgattctg

SEQ ID NO: 100600 - DNA, 133 bp, Glycine max
atggcaatgtcacacttcatgatagggctactgccccaactacatgctcaccagaagctgctctagcagggtccttcacggctgaaaagtcagcggtggtgcagtagggtccacacatcattccacaaacaca

SEQ ID NO: 100601 - DNA, 162 bp, Glycine max
ctcgaatgccaaaactagtttttatgtaggtggacttgtagtgtttgtaatccactgatagcaccttgtggccaggggcaaacaattccacagggggattattgtcttacaccatagggtttaggtttatccccaccccaaaatgttaccaatatgagcata

SEQ ID NO: 100602 - DNA, 214 bp, Glycine max
caaaattgagaaaattttatattaaaagggaaaagcattgaacatatatgtcatcttcttcattcccattattgtccttatccatttcattttattttctggtataactttaaattcttttgcacccctcattttgttttctaatatataataactcctctgcttcaacacactacttctcagtcgtgctctctaatagtaatagtaatataca

SEQ ID NO: 100603 - DNA, 237 bp, Glycine max
atgagactggtgcagatatagcagggatcagtaaaactataagtgtagctttggcaaagaaagacaatgatgttccatctcatcgtaaaacaagtcaaagaagaggagcaagagcagacgttcttcgaaaggtaaatcacgtggtaagctgaaaccaactacagaaattaagaacactgatatagaggagcaggagccagaaattcctacaaccaataatacgtatggattgcttgt

SEQ ID NO: 100604 - DNA, 213 bp, Glycine max
  unsure (1)..(213): unsure at all n locations
tctcgatccggatcgacatcctcacatacctagattaggcaactgaactaatctacagctacaccattanctgctccaatggcagctttctatctcccaataagcatgttggcatcattgttgtcgtttctcttggtttgtggagtggtgttcaaggtgcaccacaagtgccatgctacttcatttttggtgattctttgggttgatatggga

SEQ ID NO: 100605 - DNA, 284 bp, Glycine max
cccgacgtctggaggccgcccagtccagacgatgccagaaggcccaccaggcccactgctcgcagcaaagatggggcttgggctgcccgaggttcaaccaggcccgcccctcgtgccgcaaagcccaacagcagggtcagcacaggaacaggaaagaaaggaaaggataataataagtatgaaagccctgatggtgagttggcggaaatgctagaaagggatgtgttggaaacgtcccctgctgtcagatgggatgatgttgcaggcctcactcaagccaaaag

SEQ ID NO: 100606 - DNA, 162 bp, Glycine max
ataacctcccctcactttttcttcctctttctcttctcaccacctacgtcgtttcgcgtgagtaccagcttttcctttgggcaattctcgtcttcggtgattcctatggtttcttcattgaattcgtttcatgattctgttcctcggaattggactgtattg

SEQ ID NO: 100607 - DNA, 278 bp, Glycine max
cgagtgacgtggatttcatttcgcaatgggattctgggggatcgaagtgaaacctggcaggccatgtccttatcacgctgacaatgtgcgagggatgcttcatgttactcaggttcttcattcatatactcaactcctcttccttttttttattcatagaacccgaggttcttggatttctgttgtgcaagaaacactttctttctggtcttgtaaatttctcagtgttggagttcccaacaattgttgctgcttttctttgataattggtatgaagg

SEQ ID NO: 100608 - DNA, 235 bp, Glycine max
gcgcattagttatcaggcgctaagcatgctttttccactgaacctgtgcttcgcgctaagcgcctgagacatgctaagagcacctcttcaaaatttcaatatgttcttttggactttactttactcattaagcatcataaatttatcaacttttaatattttttacacaaaaacttaaatgatgttaaaataataattatttgcacaaaaaaaaaaaaaaggggcgcccgcggct

SEQ ID NO: 100609 - DNA, 158 bp, Glycine max
ctcgagccgatttatttttgtgattaagattattgcgaatttatgtttctgtgtagaattagtagtaatgtaattgggctttgatctgtatattattgtacattctgtgattaaggatgattatcttatgggagtaatacttattttggtatgggaaa

SEQ ID NO: 100610 - DNA, 162 bp, Glycine max
  unsure (1)..(162): unsure at all n locations
ctcacagcatcataacctgcttgaggacacacacttctagtgcctatgtgatcaagagggttagacatgatcacataggcaaccgaagtgtgtntcctcttgatagagattcaaaagtgcttttgtcctttgctggagctttcagtagagtggtcattgatg

SEQ ID NO: 100611 - DNA, 103 bp, Glycine max
atatgttcacgtacatatgtatagctcaaataattggatttttagttcttgacaaaggaaatctactttctttggttgaatgtcaaaccattctagttaactc

SEQ ID NO: 100612 - DNA, 277 bp, Glycine max
acctaaatagctcacgaaactcaacctcacgcaccttacctaaattctggttgtttctaaactctatgctctgattttgcagaataccactgagggttttttttaaccctattttttgtttttgtttcattgtttggattctgaaatgtttttgagctggctttgtggcctacaacatgatttgaacctttgaaagacgtcgtacgtgacgaggatcgagtggatcgaagccgacgcgcgcaacaccgacgtgaagattgacgtccggtggtactac

SEQ ID NO: 100613 - DNA, 227 bp, Glycine max
cgccccggtccggttctctcatatagcgtcgtttttgggtgtgcgactattgtctcttctcttcccttcgtcggttaccataattctctctctctctttcttcttctccctcttcttcacactgagttgactgattcttcgtaactcgctctctactctctctgctactcatcgcattctctgcatttctcctccgatcacattttctctctcttcattggactata

SEQ ID NO: 100614 - DNA, 269 bp, Glycine max
ctctttctccgagaacaaaaaaaaaaaaaaaaaaaatccgggatccgccctcctctgggaaaagtgaaacccagaattacgaccgaaagaaaagagcgttttaaaagtgaaaaaagagggggttgccgtccacgaagctgtccaccaggttttttccgaaaagggaaatgaggttcctaagggaaggccccgatcctccgggaaaaccacccatcttgaaaaagcccaaccttggaaaattggccaccatttcccccacaacgggttta

SEQ ID NO: 100615 - DNA, 113 bp, Glycine max
gcattattcgatgtcgtattgcactctctcatctcatctcccattcgcattctagctaacatccgcttatcatgtgcgcactactcaccgagtgtgttctacacatttctctg

SEQ ID NO: 100616 - DNA, 163 bp, Glycine max
  unsure (1)..(163): unsure at all n locations
gcgatttgggagttaggttctgcacgctctgcttccgacgagtgtactaacgtcgtttcaacaccttaatttgcgcacgcagcttcatcggcttgagacatggaccnagaaacctttctattcacatctgaatctgtaaacgagggtcaccccgacaagctgt

SEQ ID NO: 100617 - DNA, 158 bp, Glycine max
ggcatcctcccatgtttctggcgagctcctatcgataatgataaaggaggaaattcagccagttatttgtccaggtggaaagctgctggaatggactgcctccacttcattactgagagctgttctgtacaaaatattacagagaactcagttacaat

SEQ ID NO: 100618 - DNA, 233 bp, Glycine max
ggttcacaaggctattctagagttatggagacctgaccccagtgaactaacccttttactcacaaaaggagttgattctactttactgaaggttcctccaaatgcaattactttgactggaagcagtgatccttgctatgttgaaggttatcatttggctgatgcaagtgatgggaggttcactctgcatttgaaggtcttaaacttaactgagcttgaataaaatcgggtgg

SEQ ID NO: 100619 - DNA, 210 bp, Glycine max
gaaaagctatcttctttgctgccatatgcttcacttttatcaccagaggatggacagaaaatccaggatcagcatctcttaaggagtatagtcacgcattctatgcatacattttaggtgataaaaggatatggctgttggcgtgggcacaaacttgccttcacttctctattggaatattttggatcctttgggcacctacagtggtgg

SEQ ID NO: 100620 - DNA, 130 bp, Glycine max
tatcgagccgattcggctcgagtgacacttgaagttggtggtgaacagatctacagctcaaagcagcaaggcactcaaaatgccgctcagtcaaggtagcatgattctagtcgttcttctgggtttcctg

SEQ ID NO: 100621 - DNA, 132 bp, Glycine max
gaaaatagtggtgacttcattcttgggttaagtttgtgactttgtcaaaatgcagaatatccctctcaatcacggaatcccaaacgacacctattaattttataaaatatgtatttaattcacatcatttcc

SEQ ID NO: 100622 - DNA, 131 bp, Glycine max
tatacttcgaatttcgaaattcgaagttcgaaggcatagaattcggcgaaacaatgagggtttaaattggtggcagtgatgtaatgttcgcttcgtgctgttcgacacgacaatggcgtatcggtcccggg

SEQ ID NO: 100623 - DNA, 117 bp, Glycine max
accaaatccatgatgtatctattaagaaagccaccaaaggtaaaattactacttctattctctggttttcctctattgtcactctgcaagtctgcattcagtgatgatatggaaaat

SEQ ID NO: 100624 - DNA, 170 bp, Glycine max
cgaagacgggttcttctgtttgaaagtgtgaatgcttgaaagggatcatctgtttcatcctccaaagcttttcatggagttcgcggcactctctaacgctacgacacttgggggattcaaccccctcagaaccggccttcaaagttctcttccttttcggcatgcatgct

SEQ ID NO: 100625 - DNA, 131 bp, Glycine max
gtatttctatcttgtgttccaactatggatgttagaatgaagggaataacagaattgcacacgcttttgcaatttcttcagttttctgaaattttcccactcgctttatcaggttaaccccgcaacgcaag

SEQ ID NO: 100626 - DNA, 165 bp, Glycine max
aattgatcaaccttgtaagaccctcggtttttgctgtccctctataccacagttttgtcagagatgatgttttcccattgtcatgtccctctgtctcatcatctcattgtaccactctgctctctcatactactatactcatggtcattgcagatatattgaatc

SEQ ID NO: 100627 - DNA, 265 bp, Glycine max
gggatatcgagatggagatggaaatgctcggtctagaaagcactgctcgacaacaacagcagcagcagcaacaattgatcgaagagattgacaggatctcttcaacatgtttccggagccaggaattcagtaggattgttgatttgaatcactactacccttgatgacatgttaggcatctgctgaaccatctgtatttactcaattacatggacttactgtgcaaccttaaacacccacaaaaagtgggcttaaggtgcgcaaa

SEQ ID NO: 100628 - DNA, 130 bp, Glycine max
ctgtggggaagtagacttgagtagagcttgttggaaggctctgtttggaacagtacagtttctttgaaagctatggaaactacttggaagttgcacgtgttgctgctgatgctgatgacttgcgcagttg

SEQ ID NO: 100629 - DNA, 123 bp, Glycine max
acagaccccttcttccttttcatcaggtttattccttttctgttggttcaattttgctgaatggagaggtgcagaatagacaaatggttaagtcttctagtgtgtgtactgctattgcttaag

SEQ ID NO: 100630 - DNA, 206 bp, Glycine max
cttctcactctctctattttattttcgctttcccgctttttcatagcaaaacgaaaaagggaaccctagatacgggagagatttcattccgcaaaaaatctcttccttctctctcctcatttctgagttccgagctttcctcccctgagatctggtgtgacgtggcttcaaaattgaatcggattgagatttgttgtcgtggttgc

SEQ ID NO: 100631 - DNA, 281 bp, Glycine max
tctctcttcatttaagaaatccaatgtaacttccctttttatttgttttttttaattcaatttgttcaactcattaattattaacttctggggtgtttatttcacccaaaaaaaaaaaacttctggggtgtttccaagtcctattggttttagactcatagcatgaattgaggagaatggaggcgttagtgtttgcgcttgtggccattctgttgtgtggttgtgatgctgctaaagaatgcacaaacattcctacacaatctcatacattcaggtatgag

SEQ ID NO: 100632 - DNA, 272 bp, Glycine max
ggggaggaaagcactctgcaacagaaatactctcagctcttttcgattagtaagcagcagaatgattttatctccaccatgggtagcttctcacagaatatttggagatgggatttgaaatggaggagacatctcttcgagcatgaggagggtgtagctgtggcttttatggaagacatcactgcttatactcttcagaatcacttgaaagataagttgctgtggaaagctgatcctagtgggctatactctactaggtctgcttataggct

SEQ ID NO: 100633 - DNA, 274 bp, Glycine max
catacaccacctcctctcctacaattttcaaaatcaaaacactcatacacacctctcaattcaaaccaatttctactacttccttcaacatctctccaccacaagcttacactactacttacttcaacctcaacaacctctctttcaaaattagaaacaaaaaccattcaccatggcatcatcagcagcagcaacaacaacaacaaacacttggatcaaaaccacactcccttctcctcctacaaccttaaagaaaaggtttccttgcaattcc

SEQ ID NO: 100634 - DNA, 278 bp, Glycine max
gaggctgttccaagctttcattttcttctactacttttcttttcaaattcttcctaacctgacaaaaatagctgaaagatcaaaatttacttatgtgtcttgtcaagatatactttctgtgtgtgtgtgtgtgattatatgagaataataaaatgatataatcttttacttgattcagcttgattagtctttgaggggtgaagagcttgcaaaaacatggcttttccaaaccaatccatgtcatcagagtctccccagagaaagatgggaagagggaa

SEQ ID NO: 100635 - DNA, 269 bp, Glycine max
gtcaccatcgttttgtgcgtgacgtttctccatttctttccccatcagcgaaaagacagaacaagctctgttgactttttccattttccaattttctcggtgattctatcagcctccgacacaatcgcgcgcttaacgttgaatcggtgccaccactcagtattcatttttgacttttagggagagtctctaacagaccaacatgagtgtggatccaaagagaagtgcctctaatggccaggagaaaatgttaccatcactagaacagc

SEQ ID NO: 100636 - DNA, 275 bp, Glycine max
aatccatccaaatccctctctataatgccttcatcaaaatccagtagtagaaacgaaacgattgagtaatcctaacttgatgatactagtccttagttgataacattgttatcacattaaacttgcaataacataaaaacttccttacagttcctctttctctcttgtctctctttcttccacccttccctctctttacgtctttacatcacaccctcttttcccccctttgccaaagctctgatcttgtccccctccaatccccgctactctgc

SEQ ID NO: 100637 - DNA, 268 bp, Glycine max
gttctgtcatatgcagcggaatgtaaaggcttttcgtgaaaattggaatgctttgagaagtggttcattacagttccgttgcaattcatctcaacctggaagcacagttagtcaaaaacaagattctagttccttatcacatcacaaattggatgatttgcattctatggcttccacaagccttcaacaatcgactgtccaaggtggtccttctaataaaatgttgaatgagagagtctttaaagatgctgacaaggcatggaaaatg

SEQ ID NO: 100638 - DNA, 265 bp, Glycine max
actatatgtaacaatcttgaaaagaatgaaaagtatatgaattccgaggatgtatttaaggatgttcaatacgtttgggacaactgttacaagtataacaataagggtgactatatcttggatcttatgaggcgagtaaagaagaactttatgaagtactggacagcagctgggctatacagtgaacaatcaaaagggaccaagggtgagacatctatgtgtgtgtgtgtataatatatatacacaatccttcccttttcctttg

SEQ ID NO: 100639 - DNA, 256 bp, Glycine max
ctctctctctctctctctctctctctctctctgtcttttcctttgcctgtgcgtgtgaaagatcgcagcaactccaccaccatcacaacaggaccgtaaccgatttccaaggtttcttggtgctgctggtgtattatacgcttacatctgcatgtgctggtgagatgtgcttgagttggaaattcaccttcgctctctctgttccccacttttctgtagtcatttacacttcacggatcttttcaagcattttggg

SEQ ID NO: 100640 - DNA, 260 bp, Glycine max
aaatgtactttcaggctttgtgcagcaacattacgatgccttgatcatggctgctaaccttagtgatagaaagctgcaatatttgccttagtcatcaaaacctcaaagcttatgttgtccgtagataattttgtaacgtcaattgtttaattagtgagataactgatttgtcggccaatacttactatcggaaatttatatggttgtagctattcttgttcggggtgttttgttgacattaaaagaaatgggtgatagac

SEQ ID NO: 100641 - DNA, 268 bp, Glycine max
  unsure (1)..(268): unsure at all n locations
actcgagccgaatcggatagaggaatggctcccaaatagagaaaagtgacggcngngncaagcctctaagtactctcacagtttgcgaagagtgtgtgangaaaatggagtatggtgctgctctgaaaaggaccatttttgagatgggcaatacataaacattggcacagttaaggaatccctgaaaccanaatcatatattggacaatggggtttagatgggcatgtgccaacgtgtacttatccaagaggattttgagttcagaag

SEQ ID NO: 100642 - DNA, 235 bp, Glycine max
gagactctttgtatctattctctgtttaagaaaataaggatctctctctgtttgatttttaattcatagaaatgacgtcctaggttggttatcatgggagagaccatacaacttgttacccttttgacacaatttcaagagtcaatgatgatggtcaaggatatagtggaaaaaagcagatcgagtaaaacgagcaaacgattactaaggaaaaccctcaagaatatggctcctc

SEQ ID NO: 100643 - DNA, 261 bp, Glycine max
aggtaatgcaataccccactttcacacaacatataaaaccaaaaaagaggcggagtctgagctgccaccggagacttaactctgctcatgagatgggtcagtgaaagttggcaactgtcggtgacgcaattcttattgcttcgtggctctatgttgcatcagctagttgctttgtggaactgagttggtgcccctgaatcagtcagtgtggtgagaaaattgtgggatatgtttacaacaacaacaacaacaacaacgcct

SEQ ID NO: 100644 - DNA, 236 bp, Glycine max
  unsure (1)..(236): unsure at all n locations
tgttttgcttttctttataatcaaaacacaacctcgtgtgattccattgagtagttnttcctatttctgcaagtagtggtggtgtcggcggcgacaccggttgtggcagcgaatagtgtggacaacaactggctgcattattcttgctgtatgtcagtgggatattagttcagtggganttactacgctgagctttctaacccgctccaatggccacagtgcaggaaaaaacgacg

SEQ ID NO: 100645 - DNA, 240 bp, Glycine max
cctcctcctcctctatctttcctctaggtctaaaaccatgaccaacccaaaactaggttatgcactaatctacgatatcggcaaccacattctctactccaagtagaaccacaagatgctcctactctctctattggccacccacctcgaggaggcctccgtggtggacaatgatgccgtagtaaaaaactaaaccaaaaactccgacaactccgacaccaccagaacattccactccct

SEQ ID NO: 100646 - DNA, 255 bp, Glycine max
ctcatttccatgacttcaaccctcctgtctcaaaaaattataaaatatacggctctaaatgaagcactgaagaacgaagttgataggctcaagattgcaactggagagatagtaatgcataccgatgcctatggtttgggactgcatccacttacatattctcaagctccattcttctcacatcagtcacaacatgggcagagagaacttcaggccatgaaaatgtggtagttgcattcactctcatctaatgtg

SEQ ID NO: 100647 - DNA, 249 bp, Glycine max
ggaaagaaaaatggttatggtttgatagcggtgtgcgggtgtgaatctcagactcaaattcagcagtagagcacatggtagctgcaaattccaaccatcaccatgccttccaattcctcctcacttcactgcaaattccagaccttagcgtgccaaacaaatcccaaccttgatcaaaaggatacccctaccacggtatgctactttccttgctttatttcgtaccttaacttcctttaacctcctctg

SEQ ID NO: 100648 - DNA, 245 bp, Glycine max
tgaaaatgtggagtttaactgtttgttttatgctttgatgggttttcttcaaattccttctttttttcttcttttccttgctatggggggagggagagagagagaatttggacgtgaattgaatattttttagtaggggtaaatagtttatgacttttcatgaattgagaaaaagctgatacaattttatggcttctgttagtattcatttatttacagggtggctttctgagactaatttagac

SEQ ID NO: 100649 - DNA, 239 bp, Glycine max
aatgttgcaatgtgtaataataataatattggatgctgttgttgttgtgaaagggtttaatctgtgaaagtagtagcacatgaagggaaagttgtagtagcagtagatgaagatccagcgaaactggtaaaaaaactaaagatcggaagaatgcatgctgaattatgccataaccagaaacgaggaataatgtgtaatcagattcagaactatcctatcaatccgcaattccagaacat

SEQ ID NO: 100650 - DNA, 231 bp, Glycine max
gtgctcgacaatggtggcgacgcttctaaaatcctaaaaccctaagcctaacaaaaaaatccccaatcttcgcaagactcgatgaacgtggatcacgatcagcctccctcggcgacgaaaagcccaggcgtggcagaccctaacggcgggtcctctaatcatgacggtggcgaactcgctgcgtcctcgcggtgcatcccgtccgacaaggacttccacttctaccgcaac

SEQ ID NO: 100651 - DNA, 230 bp, Glycine max
gtcggatgagcctagcaatggattggcgttgagcgaaactcaagcccagttcaacacaccctaagtcaggtcacgattcagcaagattgcaagatgtgctgcaaaatgcaaattgcatttgactgtaccatttacgtaccacggatcctaagaccatcaacgcatgttctttcactgcaaaatgagtctgatcaatcatatgcagaaaatacaagatgagtatcaatatt

SEQ ID NO: 100652 - DNA, 225 bp, Glycine max
aagcaaataaagaaaaaatagtatcgggggaatgaaatgcagagcatgagcatgaaactttgttcctctgtaccattcaattcaatttttccatttacgcaccaaatcctaacgaatctaatatactttctagcatagcatagcatagattatattaaatactctgttacttgtaaccaccaaaaccctcaaacctacctaactcactcgatccctttctgttca

SEQ ID NO: 100653 - DNA, 222 bp, Glycine max
  unsure (1)..(222): unsure at all n locations
aacaacaacaagacatcctcgtactacaacaacaaccaatggaatccaaatccaaaattcaactctttttcctcacccttttcctcttcactctcaccctccatgcagaaactcttggaacttacatagttcagctacaccctcatggcataaccagcacttccttcacctcctngctcaaatggcacctttcattcatccaacaaaccatttcctctgacg

SEQ ID NO: 100654 - DNA, 223 bp, Glycine max
cgggaaacggcggctttagcaatcactccctcgtcgttttcccccgttttctctcccttttccccgttttgcgttttggattcatttctctctctctgagactgagaatccgatccttcgtttctgaaattctcccgagatggacgataacgtgctcgacgatattatccggaggctcctcgcggcgaagaacggtagaacgacgaagcaggtgctgcttacc

SEQ ID NO: 100655 - DNA, 112 bp, Glycine max
atcttcttcgatgaaatgagattcgtaattacgaagaatcccattaatcttctcaactctcagggttcgcttgttcttttccgtggtccttctgttgctcgcaagtttccac

SEQ ID NO: 100656 - DNA, 266 bp, Glycine max
gtatcttatcttagcaatagctacgcctatcataacaatagctctattaggctaaaacacccaatgggataggaaaactagcagcctaagaatgtaatcgagaagacgcccgaggaggccgccgcagcccccaagaggcacgacggatacatccctgtcgtgtacatgctcggcttgcattgcgagggatgcgttaagaatctggagcgcacatatcggcactaccaaggtgtggtaatcgataaggtagatctatcgtcgacaaa

SEQ ID NO: 100657 - DNA, 264 bp, Glycine max
ctgtattatcgtgtaaacaacattgttgttcaaggttctggaaataaaccttgtattttttaaaatcctgaaagtactgtaaaatgagaatcatcttgtaccattagctaggatgtgtagttgttgtttcaagtgtattcttttactttcttcctatttttctagtataaggttattgataaatgtgggagtttcgattaggaaaaacttgttttaatatgcaattaccctttgatcaatgctaaagacatgtaccctatgaag

SEQ ID NO: 100658 - DNA, 249 bp, Glycine max
ctcattcgccattcagtcatgcatcgttgtggtgctgggattcggcttatcactgccttcacggggctgtatgtcggactttgagttggacttaatgggcctgatgctgctaatctggttaccagcactgcctgtatagttgtggacccagagactggggcttacttcggtgggaaacttcaaagctcatagttctggttcggtcttgtaggttttctagtcacaagttatgggctgatgtgaaatgtc

SEQ ID NO: 100659 - DNA, 263 bp, Glycine max
gcctgagtgtcgtccccaatccatagcttggaattccagaaaggcttcagcttcagcttgctgctcccttctcgacttcaacaatttcgggacatcagtattgctaatcatgatatggtcaaggctaagtaggagaactcatctcttgccataccttagggctttgcaaacagactcaattgaatccaggtgcctatctatcattcctaaaggatcaagttacaagttcattaatcctaataccagcttccaacacaatttct

SEQ ID NO: 100660 - DNA, 215 bp, Glycine max
ctcgagcctcatgtgcttcctttcaatctctctcatgacactatacaatctcagatctgaattatctcatctatctagaccctctatattatgtctcattgagtccactgaaaagatcatatttttcagtgaaacaaggattaagaatcaacccctccatgttgatactagtgcttggactagcttcagctactgtacttagtactgttgttgca

SEQ ID NO: 100661 - DNA, 257 bp, Glycine max
ccctcaatgttcaaatgtagcttgtttggaaagacaggaagagtacctgtttgcaaaaccagcaagggatgctgcagccaaagcaaaaatggaagctggagcaccatcaactgaggaagtgccacttcacgaagataatgaatggaatataaggtgtttaatgatcttgttcttgatcattttcatgtgtgtaacagaagatacaaaacacttatcaattgaacttgatttaatccctgatttacttgttgcaatca

SEQ ID NO: 100662 - DNA, 178 bp, Glycine max
tcccaccactgagcttacacgagcttcacaaagacgaatcggcgaaaaattgatcgaagatcgccggttcggttacaactgggccaaacggcacctcacaacaaacaacaaggctcgtcacaacacaacaaccacacatgacaaaacgcttcagagcaccgtgaagacaatacgggtg

SEQ ID NO: 100663 - DNA, 269 bp, Glycine max
gagtgccctgttttattggaggtagactctgatataaaaattcatcaagatgctaggaaattagaaggagaaacagattgctctgttttaatggagatagactctgatgttaatgaagatgcaaagaaattggtaggagaaacagagtgctctgttttaaaggagaatgactctgatatgcatgaagatggtaggaaaagagaaggtgaaacagatgagtctgtttccctgaagattgttgcatatgttcatgaagatgttaagaaaat

SEQ ID NO: 100664 - DNA, 268 bp, Glycine max
gaaccagaggtcagagcagacccatttaatggccttgtacgcataggtggaagtgccttttttatctacctatacactttctctagtctgtcctagaaaccttaagttttcactacttggcacgctgtgcagcattgcagctaattaagcaccaccatcactatcttataagggggggaaataacaacttgtgttgtgtctatatgtaataagtagtgagggggttaaggttggtgttctcatccatagttctcactggttttctctc

SEQ ID NO: 100665 - DNA, 246 bp, Glycine max
ctcgagcgcacccatttattaccaacacttcaccatcatactcctctgcctctgccaccagaactactctcttctagaactagtaaattctctcttccttttttctttctttctttcaacaaaacagaaacatgagttttgctaccacagtactgtaggtagagaaacagaaaccaccttgtttcggtgttctgttgcaaaattaggaagaaagaaacatactccattaatgggtggtgttagatg

SEQ ID NO: 100666 - DNA, 268 bp, Glycine max
cgcctccattgcaggtttctacctctattgctgttctttccttcgatcaaagatcagtgaccatgtatcttcagttttacataaacgataacggcgacaaagtctacaccactaagaaagagtcgccggtagggctacctacacaatctgctcatccaggtattttgctattttttttttaacaagcaaacatgtttaaaattaaaattaagaatgtttgaactgagcataagctatgcccatagcagtacatcataggaaatgccac

SEQ ID NO: 100667 - DNA, 261 bp, Glycine max
tgggaataaaagaaatctgaaatgaaaagcatcaaggagatttgtttaccaggaaaaatctaggggtaaagaacaatgaatttacctatcatatcagtacacggcatgaatgatcacaacatggaaaaagatataatgaatttctaggaattcaaaaaagaatgtggcattagggatgcttttgatccaagtaggatctgatgccagacaaatagttgagtttgatcatatgtgcagtctctgctatcaaattgatcaact

SEQ ID NO: 100668 - DNA, 262 bp, Glycine max
caaaatttagatacattatttatttatctatttttggtgaatttctccttaaaaagtgatgattcaagagctaggcttatcaggctatatggaccaagctgtaatccctccactgtcaagagccaggggtggtcgctgctatgcgaagctagcctccactgtcaagatacattatttttgcttgttaagaagttattcgtagctttatcgagagacaatcctattttaactttacaggattactataagaacaaaatatttt

SEQ ID NO: 100669 - DNA, 106 bp, Glycine max
gtttagtgtcttcatttgtagtttgatcctcatgagattgaccccctgggcatcatttagctagctagccagattaattattaattaggcaaataatgggaaaccc

SEQ ID NO: 100670 - DNA, 173 bp, Glycine max
ctcatgctcgagtcctgttatatctcagcgcgtagagcatggtcttatttggtctataaaaccactagtggtcatcattactatgtcaaggatctttcccactactacttcggatccttcaagatcgagcttgccgtcattcagatagacgacctcactgacttgccgaccga

SEQ ID NO: 100671 - DNA, 180 bp, Glycine max
ctcgagccgcagatttcctaaccctccccataggcagtatagcaacagaggttttcaagggatattagtctagctcttatacaaaacaagttaattgactattgagactttaaatgttgtccatgcaaatgctaattgttaaattgttatataaatagtgttcattatacggaattttac

SEQ ID NO: 100672 - DNA, 151 bp, Glycine max
agaatatttcaaatttcactctttctgtctgcacaatattttcccttctatttttgtcgtctgctcaaaactcacatattagtatgttctcccacaaaatttcagctcataatgttaattgtgcgatttcatccaatcctgcgaatttatt

SEQ ID NO: 100673 - DNA, 229 bp, Glycine max
ctcgagccgttcgattggaacaaccattactcgttcaattagtcaagttatagagaaaacaatatcatcagctattacagaatcattccagaagggggtgggagacaaggcattgaatcagctagaaaaatcagttagttcaaaacttgaagctacagtggctaggcagatacaggcacaatttcaaacctctggcaagcaggctcttcaggaagcactcaagactagt

SEQ ID NO: 100674 - DNA, 155 bp, Glycine max
cggctcgaggttccttgatcatgttttgatgaagagccagttaagccaatgaaataattgtacattgatgatgttaatgtgtggatttgaatgaaaattgaaacaaacaggacaatgttgggtggggagtggggttgggagtgcgggcaggggtg

SEQ ID NO: 100675 - DNA, 246 bp, Glycine max
cagttctcttcttttctctcttggcgacaccactgcaacactttccttttctattctcagagcgtttttagtgtttttcaagcaagcgagtacggtaccattctattctactccctcacgaactcatttgttgataaactgctacctcaaaagcagtgccaaagtggtgaaattttgatagacattagtagttcaatttcttgtgaatccccctaaggaggtccttgttgctggcctctctaatta

SEQ ID NO: 100676 - DNA, 177 bp, Glycine max
cggctcgagctcattcattcattcattcattcgttcttcttcgttacaatctattctcgaatgtatattatccaaagagactattattactttggtctaggatcactcttgtcttgtttagattcctgaacttccctccttgttcttaataatatttgttatcactttgttccgcac

SEQ ID NO: 100677 - DNA, 193 bp, Glycine max
ctttgatgtggatagatgaaaaggccgaagaattttcttcccgtattcagaagctagctaacccaggttctgcttcagatcgtgaactgacaggttcaggaatctggatgtcttgatattttcaaaatggggagatacacctagaagattttcatttgaatgaacaggttattttaatatttttttccccccc

SEQ ID NO: 100678 - DNA, 182 bp, Glycine max
gcgagaataagccagtggttgatccttctggtgtgtgcgctgctgttgctgatatcagaagcttcttatgtgccaatcactattgttcagaacgcggtagcgaaaggagctggtaaggaatttttgctgtgtcttttcatatatttaatcatgttcttaatctaatgcttattatgttcaat

SEQ ID NO: 100679 - DNA, 261 bp, Glycine max
cgtactttcaggttcttgctttgttgatgaaaatcgtgaggcttattgggtttggttgtctgttggcttgacattgtttgctgctggctgctttctattcttacctcaagagaaataagagaatgggtgcaaagaaatggtttaagataatagtcaaattgaagaaatcgaagaaagataaatccaaagaagaaaaggttatttcttttgttcctcttttcagaccttgcatttcaattttaaagtttgcaagcataatga

SEQ ID NO: 100680 - DNA, 229 bp, Glycine max
tatcgagccgaatcggctcgagaagaaattctgtctccccaaacaagttccaagattactcacttcgtgcagggacggttgatgctgcttagttgaaacttgtatggtgattagcgattaagaggaaagaagaacgaaaaaaacagtttaaccgctacagccttctcaaaaaaaaaagaaaaaaaaagaggaaaagaaaaaaaaaagaagaaaaaaaaaaggggggcgc

SEQ ID NO: 100681 - DNA, 257 bp, Glycine max
atctcaccaatctgacagggatcatcaatggcaaagcaattaattcccttcataatctctcttctcctcttcattttcacagaagtggaaggggctaaaaggtcttatggggtatacaacagcaaccctgtaaaactttttgtttttggggactcctatgttgacactgggaatttcgtgcattcagaatcatacaagcctcccagtggaatcacttttcctggtaaccctgcagggagattctgcgacggtcgcat

SEQ ID NO: 100682 - DNA, 256 bp, Glycine max
aaagacgacaaaaagctactactagtattttgttttgttctctttataataaaaacacaacctcgtgcgattccattgaactgttgttgttgctgctgcgcgcagttggtggtagtggtggtggcggaggcggtggcgaagagtggaaacaacaactggcattattgttgctgtatgtcagtggaatattacagtgggatttactacgccgagttcgctaaccctctccaatggccacaactcaggaaaaaacgac

SEQ ID NO: 100683 - DNA, 253 bp, Glycine max
aacagcgtgaactgaagaaaaggctccaacgtgaagttgatcgcctgcgggacagcttttgccggcaacatgctcttgaacttatcttcacagaagaaggagaagctcgtctaaatgcattaatatatttgggaatggatggtaatgtagaacaacctgaatggtttccttctccaatttttcaggagatttttgcaaagcttacggatgtggcaagcattgcagcagatctgtttgtgggaagggaaagatt

SEQ ID NO: 100684 - DNA, 254 bp, Glycine max
ttcgagccgattcggctcgagcacttgttccacccttctccaattaccttatctgtattcagcgcatcttcagagaacactactgtgagtcaaaagagacatggccttagaccagtattttgaggaggctatgccccagttggattccttcgaagataaatcgtttctcgaaacatggaaatgtgacagtgacgatatcgcagattctgatagaaatgcctctggtgtctttgattgcaacatctgcctggagt

SEQ ID NO: 100685 - DNA, 243 bp, Glycine max
ttctagcgtctctagcgctgtccagttcagatttctctcaatgtcttcggagtaacacgaagccttgtaccgcgaataagacatgtacgacgacgacgtacgattctcaggaggacgaagagtacgaagaagacgacgacgaagaaaacgtgccctctccctcaagcgctttcgttttcaccgtcggccgtcccggttccgccgtctccaacggcggcggtggctctccaatttggaagccca

SEQ ID NO: 100686 - DNA, 275 bp, Glycine max
aaaacccctctccgctgcgaagacgtactcagtctcttgctctttgtgccaaggtttagatggctttgcgaggggtttggcaacttgacaagctgattgtcagttattgcaactggggcggaagtagcagaggtataagggcatttatggagtctcatttgccaacgtttaaggagaagaatcctcaattagaggtggtaactgaactcattcggtggtcagcatccacatctgagggcttattagcagaccaggatcagcgagtgatatgtgtg

SEQ ID NO: 100687 - DNA, 277 bp, Glycine max
gggatatattttattttcccggtggatagtaggtctccatcccaaccaatttgaaggccaaaccttggagccgacaaaaaaaaaaaaacaatgggaaccccaattaacaacatgtaacacttggacatccaaaaaacatgaaacgaacccatattttccctttcaacaacgggcaaggaaattgcgcgatggtgacccccgcggtaaaaataaggtccccccccttttcgagcgggttgttccccttagcaagccctgaatttggattttttttttt

SEQ ID NO: 100688 - DNA, 178 bp, Glycine max
tctcgagccgaatcggctcgagaattccctggccctatttgaatcacttcccccgctccacgagataccagtaccatctttaaaaccctccaaccaatcctcgcactctttctagggtttcactttcactctttctcttcgcgattgcattctccttcaggttgctttgtaaatggga

SEQ ID NO: 100689 - DNA, 228 bp, Glycine max
cggctcgagaaagtaagttttcacttcggagaatcctagcgtcgcgtgtttttgtacaaaaacaaaaacaaaaacagagggaatagaacaacgaagcacaacgtatagctttttgaatcgctgtttgaggaatcaccgattctcaatggcttcttcggtgttctttactcactcccattgctactcttctaaaccttctcctccggttttcggcttcaaacggcaaat

SEQ ID NO: 100690 - DNA, 235 bp, Glycine max
gttgccacacatgttcatttatttgccttcacgctgaaacaagctacaacaacacctgtttcaaaccatatccaaaggaaacaactcccagtttaaaagaacaacaacaacacctgtttggtttggtgggtgggcttcaagttttgattttgttcacctttttctgggtttgattggcaaggtagagacaagggacaaggtagggctgattggtggaaaggttatggctttttgg

SEQ ID NO: 100691 - DNA, 171 bp, Glycine max
aaactcgaactcgagccgctcgagccgaaaaaaaaaatgtagaggaacctggaaacttccacgaggttttcactgaagacgaaatttggggctttgcatcgcaagatttgccctttccagtcgaagttcttctgccttcccctaccaattctttctctgaggcgttttatc

SEQ ID NO: 100692 - DNA, 271 bp, Glycine max
catacatccatccatacgcatctctctacctagtttccttattcttcttccttcgctgaatccctagctgttgctctctccgctccgataatggcctctctattcatcaatgctaacggcgatctcgcaaaatccgagaagctcattatcgacaccgaccctgggatcgatcatagcatcgctatctgtatcgcttttcaaagtccagacgtagaagttctgggtctgacaaccatttctggtaatacaactactgaagtttccacacgca

SEQ ID NO: 100693 - DNA, 109 bp, Glycine max
cccttctcactctccccattagataaacacataaagagagagagacactcaacctcgttcgtttcgttcctccatgagataatggcttccgtgtctactttctgtttcg

SEQ ID NO: 100694 - DNA, 154 bp, Glycine max
ctttaactggataatttcggaagatgagtacgtacagcatgtttgtagagtttctcagcagttacatgctcataggtatcagtatgatgctgtggattacatctggtataggagtctaaatggtgatagtaattctcttggtgtcgatgagatt

SEQ ID NO: 100695 - DNA, 119 bp, Glycine max
cttctacagcttgttctatcagaattgggcgctcacagtgcagagtatagatccaagatcagtttgggatggaaagtaggttttggagttccagcagcacttatgttcatgtgcacttg

SEQ ID NO: 100696 - DNA, 251 bp, Glycine max
cagctcgagcagctcgagcggctcgagctttattctgcatacaattctgctcttttgttcactcagttcttctgactgaagacttggctgaacttgactctttcttcatccatttatttgggaaccacgataacacgatgggagatgttgcaaaggtcctatcagctgggactgttggaggggcagcaccattgatagttggacacccatttgacaccatcaaggttaagctccaaagtcagtcaacacca

SEQ ID NO: 100697 - DNA, 273 bp, Glycine max
tcacgcgccacttgggagtgtgtcggtcagaaaggggggcgcggggggaacgtgtcgttgcgtcagcatcgaaatcaccgccatgtggtcagtggataagcgcggaaggtgtggccggtgcgacctcacgtggcctctccggcagcgtgatgctgctcggcctgccggctccagaagtgctttcccagcagccgaatgtctggcttgagcagcaaagcgctgcttctccttgtccggttgtgcgatcttggatatgcaatgtagggaagaaga

SEQ ID NO: 100698 - DNA, 260 bp, Glycine max
agtccagtgctggacagatagatctgaattctcatcccaaccgcgaagacatgcaagtggaaaccactggacttaacatgtctagtcatcttgaacctgcaacaaaccatacagtaggggaatttatgaaccaaaatggcctaagaaactttaataatgaagtgcaaactggtcagaattcttctttgcacactcctaaatctaatggagaaggtcagagatacttctctgatggaagatgctttgcatccattatgtgg

SEQ ID NO: 100699 - DNA, 255 bp, Glycine max
catcttgagtgcggtcatgccggaaatatttctgcaatgtctctagaaatggaacaaacagaagtcttccatttcacagagtcccttcacgctcttaggaaaaaagtggcagaggccatggattcccttttgaaacaacagtagcattttggtctacaatttctctggcatgtaacaaaagaaaagtcaaaataggttttgtgctcattcttatagcaagcggctggtgagttgattctctttgtatattattgt

SEQ ID NO: 100700 - DNA, 233 bp, Glycine max
atttactgcgtcttgacggaatcccacttaggagtcgatctccgtactcgtcgcagctgctacatagcactacttccatttcatatgtgtatggacctctatatatacatagacacatgtggatggatggaatgcaaggtaagttatgtaccagctagcacatagtctatttaatcagttatatgccatctcatcagtaggcatattagctagttcggtaggtatagtagttg

SEQ ID NO: 100701 - DNA, 290 bp, Glycine max
tctacttcatcttgttctttctcatcactcttctttgttccttgattgttgctatttttttctttctcatttgccaaagccatgaacaagtttaagaaatctcaagttctagttctcttagttctagttcttcttcttctcatcacaccctttttaccttcctctttgagaccaacctacttgtatttcattataaacttcctcatcatggcactttttgctgaagctggcctcatttcagatttttctaggcctttagaagataaaaagcaatctacttctgttaccaa

SEQ ID NO: 100702 - DNA, 297 bp, Glycine max
agtttcatttcgtgactttcataaattgttgtaaaacaaactcgtgccagatgtctgctaataatggatatatacaattttgtattttttatgggttgacgtggagaatattttagacggtagcacatgcgagaggggaagagaatgtggagtttgtctgtgatagtgttaaattatgatatgttcccacgttggatgatagacgaccaggggttcggaaaggtcatataattttgctcaacgccacttgttggataaaagtcctcaaagacgttgctcttactgagtcatcccagt

SEQ ID NO: 100703 - DNA, 288 bp, Glycine max
cttcaactgaacttgtcactctctctctcttcaatggcttccttttctctcacctcctcgtctcctacccttcacaaagccaccatcatcgacccttcttctacttcttcttcttcttcttcttcttctcatgccttccctcaccgtccccccttcgttttgcgaatgccccaccaaccccgtcgccttcaaacccctcttgttttgcccaagattcaatctttgcgccacaaaactagagctacaccagttaccaaagacttgtgggataattccattctgaaaagt

SEQ ID NO: 100704 - DNA, 254 bp, Glycine max
atctagaactagtccggctcgaacggctcgaggcccttttcacactctttcactcgcatcacacacaaactaacactcccattttctctcttactctttctctccgacctagcgagaccgagcgatccgatcctaaccccgcgatgctccgccgcgcaaccacctccctcatctccggcgcctcccgccgccgcctctccaccgacgtgccggcgacgccggcggcggattccgtcttcgcggaggcgtggaag

SEQ ID NO: 100705 - DNA, 221 bp, Glycine max
ctatactcatagtttactgatatattgatgaagcctcttactgattatgtgaatctcaacgacttcgctctaagttgagctcaagatatagatcaaacttttgtgtcatactcatgtcgagtattgtatgtagcactacgtagcctaaaatatatcctcttgaggacgtattggcgtgttgcattatctgattcgggtataccatacttatcgctattggt

SEQ ID NO: 100706 - DNA, 139 bp, Glycine max
cgaggtgttgttgatgtgccatgccatttgccacttcacactttctgacacgcacactgacaaatatcatttatctcttggtatctcttggctattataaatttggacatgttcagttgttagatatcactacggctct

SEQ ID NO: 100707 - DNA, 284 bp, Glycine max
gttcaccgctactctctgttgccacctcctccgaggcccacgcgcgaattccgagcgtgctgacgctatatgctctattcagcatgacctgggaacccctgatctggtgactcgtaatttaccggacttacaatatccaggcttgcaccatgcggtgaatgtcgaatgtatgtgtgacggtatcattttcgtcgccatagctttcatcacctcaacatcccaaggcgcgtgggctccacgccgcgaaactcgcgtcgtgggccgtgctgagttcccgatgttgg

SEQ ID NO: 100708 - DNA, 250 bp, Glycine max
gagccaaatgacacatcccagtcgaacagtgttcatgaacgcacttctactgatagcctcatttctatgctactgctgctacactatcactactcctactgcagctactactagtgataactgagacagtggatatcgatccacattggcgaggccgggattggagacggtgacgagttgtttgtcgccggcgttgtcggatacgatagcaggggccatgggaagatgcccagttagaacgccatgggtg

SEQ ID NO: 100709 - DNA, 266 bp, Glycine max
  unsure (1)..(266): unsure at all n locations
attaggctgcatttcgagccgaataggctagcggtttgccgtagattacagcagcattaagggaaccaactagagttgccantattcgagctatgattatgcccatgtctatgctagggtttgcagcaggtcatacttacaatcgtatatctctgcaagctgagtcaatgagtgagattcgtagaactacttgtccaaaagcatccagagtagaatctgcagctttagaacgacttgaagtatgcgtatgaccaatgtgttacaga

SEQ ID NO: 100710 - DNA, 185 bp, Glycine max
gttccctgcgtcctgacgcaatcccgcttaagagtcgatctccgtcctcgtcgcagctcctacatagcactatttccattgcatctgtgtatgcacctctagcgatacatagacacatcgtagatgcacgcatagcaggataagataggaaccagctagcacattgcacatgtaatccggaatat

SEQ ID NO: 100711 - DNA, 277 bp, Glycine max
catttctttcccctttctgtatcatagaggtagtaagcaggatttttgaaagggttcaggaagattcttgcattcaacatgacctgggaacccctgatgtggtcacgggcaatttactgtactgaaaatttccaggcttgtattatagattgaattttgaatgtatgtgtgactgtattatttgtatctccatagctttcattcattcaccataaaatgttgtagcgtttgggctctcatctccaatgaatcacgtggaaagtagccaatcaatgca

SEQ ID NO: 100712 - DNA, 270 bp, Glycine max
ctaaagtgagacgtgcagtacctgatcagcacttagaaccttcatcatccaatccccgaagatcagatgctaactaccctgtggatgttggatagaccgcaatcaatgcaatgcagaaagctgatgagaagagtgtgaaccaagcatccagagaatcttcagcaggtgcattgtaagagctagagaatatggatcgttggaaaactgatccttctcagcaacggattcctaatgacaggacatcaactgataggccaccaaaatctacag

SEQ ID NO: 100713 - DNA, 273 bp, Glycine max
cacagggggtccctattattaagatcacacttgccaaaggacatgctccttaaggtatacgagtttcttatagccttagccaaatggtactcaattcctgtgagtttttaatgcttcattgtgacttaggcatagtctagatttatagactagattgagttaattcttagttttggcgcttgagacatttagttataatactttagcaaatcttgagtgaagatttgtaaataggcaccataccctcttcaacaatttcataacatataaaat

SEQ ID NO: 100714 - DNA, 136 bp, Glycine max
tctgaagtgtagcaatggagtttcagcctcagatctcgtgctggatcatcgatccgagagatagagatagagaggagttggattattcattcatggaaccgcggagatgaagttctaccatatctacgggggggat

SEQ ID NO: 100715 - DNA, 272 bp, Glycine max
aaatgggagcatgaatgctcccatgcctggattgcaagatggtggagtagcttctgctgagacatctactgctggttcccgggagtggagttctccatttgaaggggaaagatctttttagtttaccaagacagtttgtttcttctccttctctgtaaaatgagggggataaagatgaatgaataaaatgaaagacccagaatgtgtgtgaaaaaaaaaaaaaaaaaggggggcccccaaatgatgagctattcgccccgggatttaattcg

SEQ ID NO: 100716 - DNA, 157 bp, Glycine max
attgcaggtagttctatggttggcaacaacccatttgattcttcttgcatgtctacagggcatcgtggatggtatcagtcaaactctggatcagatttgatggagaatgagaacatggattcacgcaaagatgatggtctaatgagattaaaactac

SEQ ID NO: 100717 - DNA, 273 bp, Glycine max
aaagctcgaactcgagccgctcgagccgatcgagccgtggaaaatagagaaattatagagtatagggttgtatctatactatgcatgcttttgtcgggtcattggatctctgttcaagctgccctgcagcctgtctcatcacacaactccctggctttaacgccaatttcccatccaggcacaattccggatatatacgtattgatggaaatactggaagtgggaagaactgttctactacttcgttagttcagaaagaagtccagacaagga

SEQ ID NO: 100718 - DNA, 110 bp, Glycine max
tagagaaagtttgattacagagctgataaaataatttagattgtcaaattaggagcgcagagaagttctaggtcgagataatgctgatgatgtgatacgtgagataaggg

SEQ ID NO: 100719 - DNA, 271 bp, Glycine max
ggaactctttggtctttaaaacgagaagattttcgagggattttaatgtcagaattctctaacttgtcatcattgaagttgcttcggtctgtagatctcctctcaaggttgtcaattttacaaatcagtcagatttctgactccctttctgaagtttccttctcaaatgggcagacaataatagacaaacctcaagcctgacatccaaagtgaggatgatgtacagagcggaaaagaactgtcaatagagaagcctgagggaagctatttt

SEQ ID NO: 100720 - DNA, 274 bp, Glycine max
tagaaaaaattgaatggtcatggtaaataaaaaaattatagagtattgggttgtgtctatactttgcatgctttttatcgggtccttggatctctgttcaagctgcccctgaaccctatcatcatcacacagctccctggcttaaacgccatttcccagccaagcactagtccggatattaagtattgatggaaatatcgaaagtggcgaagagcctgttctaatagttcggtagttcagaaagaagtacagagaatgacccaagttgttctat

SEQ ID NO: 100721 - DNA, 247 bp, Glycine max
cggctcgatctcgagccgaatcggctcgaggagacggtgacaacgacgatgagtactgaagcgaaatataacatttcagagagactgtcatgtttggagaacctctactttccgcgtgctctcgaatccaccgtcactctcccttctcaacgcaaggccatcttccgcgaccttctctctagagacgttgctcttttcttagaacgatatgggtccaaactcacgtgcagcgagcttagtgaatttg

SEQ ID NO: 100722 - DNA, 234 bp, Glycine max
atcctgaatccttcctcaagttcatcagttgattatcaagtgtcaagggttaactgaatcgccatctatcatgaggtgcaaaaagcagagccatagcaattagttcgaatcatggcatcgcaatcaaagcactgggaaaagcacgtgtcatgtacgtgtcggacattaagaacttgcggccagcacttaggttactagggtggcggggacccaagggaaagccgccggaaggtc

SEQ ID NO: 100723 - DNA, 187 bp, Glycine max
gaaggaaaggaaaagaatgcaatgactcaactccagatagtagatagttagtgagtgcagctaaagctacaaaaacaacaaccacacaaagatactcaattctcttctggtcttagtttggcttttactcattctctcattctcaacaccaccaaaatgggccttttttaccaggatgcgctcaacc

SEQ ID NO: 100724 - DNA, 247 bp, Glycine max
aaaattttgtggaggctactcatagtttgggacactatgtgctggaaaaaatggacgagagtagcgttcagtattgtaagaatcactcatcaggattcgcttcttcttcgtcttagttggtgtctttaatgttgctctctatatatatcgaccatctgggtatttatatagttgcactgtttacttctggagcttgtaaaagataatcctttcttcctttcctctttttctcgttttcggtttctgg

SEQ ID NO: 100725 - DNA, 272 bp, Glycine max
gctggaggggcatcatctgaaagggatgcagagtctaatcattctgctccaagcttattgaatacagaatctatctcaaatcccttcagttccaagggtgcagaagattctgcttgggaaactaaaagtacttctaatcagaactcctcatggggtgttgcagtggagaagactggaattgcttctaacccggaatcatttgatggttgggggagtggagggagctggggtcaggcagagcataaaactggaagcatgggtgatggcaatca

SEQ ID NO: 100726 - DNA, 267 bp, Glycine max
aaccgctcacaatgttcatgaaggaaagctaatgatcccaaataagtttgtgaagaaatatggaaaacgcttacaaaatactctatttctgaagactccaaatggtgctgaatggaaaatgattttgaaaaaacgtgacggtaaaatatggtttcaaaagggatggaaagagtttgcagagtaatcactctctagctcatggccatcttttggttttcagatgggatgtaacttctcattttcaggtacacatctttgatttgagtg

SEQ ID NO: 100727 - DNA, 266 bp, Glycine max
  unsure (1)..(266): unsure at all n locations
ggaaccatctcttctttttatcactcattacacccatcttccgcttttctcacacttcaactttatttgcctctgatcgataaagggcatgtttcaattctcagaattaccctcattcttatcaaagttcatgcctttgtcttgctctattgtttcaattttgcagtttggaggcttgtgtgtctgaaggcattggtaataggtactgaaaattganagctgattcttttgaagatatgggttggtctaattcggagttgaattcg

SEQ ID NO: 100728 - DNA, 269 bp, Glycine max
gtgttggagttagagagagatagaccaaaaaaaaggttcagaagaatcagataggttagatttatatacaaaataaagcatagatacacttggagttggagttacccattattctctctctcactcacacacactcagagtgcaagctcgagagatagagatggaggatctcgaggaggaagatcacggatcggaggaggtgttggctgtcaacttgaccatggagacggtggcggcggcgagcagttcattgagattcattatagggc

SEQ ID NO: 100729 - DNA, 228 bp, Glycine max
gttgaccaacaaaaccaccttccatctctcacaaaagttgctacccctctgcaatctgctaactcaccttttgtggtacccactccttcacctcccttggctccatctcccatgccaggggattctgaaaagctgatttctggtgtttcatcgatctcaaatgctgcaaatattggatatcaacaaacagggggtgcagcagcacctggtcaatcccttgccattgga

SEQ ID NO: 100730 - DNA, 230 bp, Glycine max
gacaaactcatctgatattcttcaaagaaccatccatccacagttagctcccttgaatggtggattcaaggaactgaatcagctgcctgatgtatgggaggatgagcttcacaatgttgtacagatgagctttgcaacaacggctcccccaactagccaagatgttgatggtactgggccagctagtcagatgaaagttgacctttgatgtttagtcctccatacataat

SEQ ID NO: 100731 - DNA, 264 bp, Glycine max
gtcgcggatggtggcagtgttgagaacgttcaggctggaaagaaggattcagagatagagggtgatgcgaagattgttgataatgttcaggttgtgaagaaggatttggagatagaggaagatgagacgggtgttgctgcttctgaatctaaaactgatgttgatgataagtcggagaatgtggcatctaatgttcctgagaatgtaagtatcagtggggataagttggatgccaaatatgaagaaaaagaggcatcagaaggg

SEQ ID NO: 100732 - DNA, 263 bp, Glycine max
ggacagtgaagtgaaagaagaagaaaaaggtcgggaggttgttccagaggaagttgagatatggggaattcccctgctgggggacgagaggagcgatgtgattctgctaaagtttcttagggcaagggatttcaaggtgaaggaggccttgaacatgataagaaacacggtgcgatagagaagaaggaaattgaagtaacagaagagaagcaggtagcagagtggaaagagagaggaagcaaggggaatgacggagtgaagaa

SEQ ID NO: 100733 - DNA, 267 bp, Glycine max
atactcgaagaaatcaccaagtcagtggagacaatatatgagtctgtttctgagttttctcacttagcccacttcaagagtgttgtagaacccaatgtctcaccagagaagcctccccttcttcatcgaggtatcataaaacctgttgtggatattgataacaccgtcgaccatgttgaaattacgatcccagatataactacagactctctagagacagaaaagcaccaataacaaacctcggacattgtaaataagtgtcatgtc

SEQ ID NO: 100734 - DNA, 285 bp, Glycine max
gaagaacccagttgaaaacaagaaagcagtttcttaatcaaatgaggttgcaattgacattgaattcctttacatgtaaccaaaagtgattattaatctcagctttcagattcctccattgaaatgaaaacggttctaacgtcattttcacagtccaaactgaaaacatcaagccccaaccaaacactcatcttcgtttcataaacatcgatatactctttttttttctccccagatctgacacttagatgatcatttcttcgacaagaagaaatgcgtagcggg

SEQ ID NO: 100735 - DNA, 284 bp, Glycine max
gtgatcccattgaaatattaaaactttattggtgcttcagcagtttagctttttcaattgaattaacgtgtaatgtaaatgctgttatttattctctttgatattttactttttattttcttttcttggggtatcccagaggttgaaaatgatggtgattttaaagttcatctgttctcttcatcatccgagttgcttgaaaagcttcatgaaaaatggagttcagtggagaaaccaccatacccagctatgtattctagtatttatggaggtatcatacttga

SEQ ID NO: 100736 - DNA, 289 bp, Glycine max
gagttcaggttgggtgctaaatactttcaggtaaatattttatgccaattccactacatggatgctttaacgttgttgctttccattttccctctttaggatgtttcaagggaatttaagagtacacttgagcgggagattggtcttgatgacaatttaagtcctacccagaacacatacaattccaatgtacgtaataccacaccaacttcatcatccactgttgaccccagtgagtaatctagtatcactttttttgttttaaattttatttgccatgcaatttaca

SEQ ID NO: 100737 - DNA, 285 bp, Glycine max
atatctttcatcaacttcagaggctgctgaggaaaaattttccctacttagagaaaatgaaactttgctgaatgcaaataagaggctgaatcaagaaaaggagaacttgttgaagaacaaagacatggcggatgctcaaatagtcacattaactaagtccttggatgcaatgcagaaagatcttaaagacaaagaaaacctggtgcaagttttgaagcaatccttggagcaccaaagaaaggaactcaatgattgcagagctgagatcacttccctgaaagtgca

SEQ ID NO: 100738 - DNA, 290 bp, Glycine max
tatcgagccgattcggctcgagctccttctttcctcctctgtcacttacactactctttcactttccaacaacattctcacacttctctccaacacccaaccttctcctttgacttttcccgacaacctccaacacgacctccttctctctctactctccaaacagcgcgccacgcattccactctctcccctcgccaccacgttgtacgtttgatttctaaactctccaacttccacggcttctctcctctcaccaccgttctcgccgttaactacttcgacaggttcg

SEQ ID NO: 100739 - DNA, 283 bp, Glycine max
tagtgtatcagacgatagggtccttacccgagtttagctcaatcgtgcggtgcggatcagcctctacttctacgatccaaatcgtcgactcggttttaatttttatttgaattagagagaagaagtgatttggattgttttctaataatctatggggactgaaaatcctggtcgtccaaccttccctccttcaagacctgcttcttcgccttttgccgctgcacagacagtgtcacctttttcgtcaacggtcccgtggctggatcagagcctcttcttttcg

SEQ ID NO: 100740 - DNA, 252 bp, Glycine max
atccacttggccttcctgtggatttattaatgattgaaatattcttacctttagatggtggaacttgcaatcagatccatatttactggtcccagtgctcataaactatctacattctggttgctagttccaccaccctaaggattgtatatctcaatcgtcaatacatccacgtggccttcctgtgagacctgtaagtacagcttctgcttgagtgatgccaatgagtttactagacatgtggtaagttta

SEQ ID NO: 100741 - DNA, 277 bp, Glycine max
ggaaattgtaatttgttctttaagggcattgaccgtgaaagagtggagaaaatggaagctcgattaaaagaagatatcctacgggaagctaaacagtatggcggtgccataatggttattcatgaaacagatgataagcatatatttgatgcttgggaggatgttacctctgatgtgattcaaaccccacttgaagttttcaaaagtctggaagccgaggggttgcccattaagtatgcacgtgtgcccatcactgatggaaaagctcctaaaagct

SEQ ID NO: 100742 - DNA, 283 bp, Glycine max
  unsure (1)..(283): unsure at all n locations
gtaacgttcgcaaacatgtggagagagccatagatgacccaagatcgtttgtgactacatatgagggaaagcacaatcatgagatgccactcaagaacacaggaactgtagcatctgaaagagattcacaggcttctcttagtaaagataaagcatgattgacacttcaattagttagcaagtatgattcaatttcaatggcattggctgtcatcagaaataattcagaggatccattccttttatatcctanagtatgctcagaataattgaagttgatcag

SEQ ID NO: 100743 - DNA, 277 bp, Glycine max
atcagacctggcttccactgtgaagcatcaggccactcatcgatctccaaggccttcatggccccagtcactctcacatcatccaaaacattagccaagcttgccaaagttatggattttttcaggtatgtaaacttgatgacttattacaccatgatgaacagagaagatgttgcagaatacagcatgaagatgagagaattagcgttgaaattggtggaggcaatttctgaaagcttaggtgagaaggcagttgggaagcatggacagcacatgg

SEQ ID NO: 100744 - DNA, 277 bp, Glycine max
gcaatacttaaaatgtttgattcttaaagctggaaaattcagtatcttctgcaagaagggtaccagtttccaaccaggaaaacagtcactggctcaacttcaacactgttttctcacaacctcaaggtgttgatgaagtcaaatttcctgtctattcttctatggtggaaacacaagtaattaattctgactactatgaaacattgtttgaccaaagccaaattggagcacctccagatgctacttcaagcttgactgttgcacaaaaacagaaatt

SEQ ID NO: 100745 - DNA, 279 bp, Glycine max
ttctcgagccgaatcggctcgagcggctcgagctttttcctttcccgtcaaaaaataaaaccagtcacattccttcttccagctctataagagtcacaaatttcccctacacattcattcttccatcgttttctctctctctccttaagattataatcctctctctctcatacttattctccctcgggcgaaagataaacacttttttggttgcaacttatgggaactgttgaagctgcaaacagggttgcatgtggaagcctcctagagaaatttcct

SEQ ID NO: 100746 - DNA, 277 bp, Glycine max
gttgttgcataagggggtctatgcctatatatatctctttcctcatctctagaaaacacaagcacaacaacaatctgagcaacaatctgatttctttctccctaaaattttctcttccttctatcataaaaaacttatttatgagagcaagaacattagtgttcgaaaggttcgcgaatccatttgttgcacacgatcggaaccaacgggttgtcgtatcttgggaaaggagcgcaattagattttcctaccagtgtagtgggggtattttctctct

SEQ ID NO: 100747 - DNA, 278 bp, Glycine max
gttgaacacagtttgctttgcaggtatcaatattcagttggagggagtgtggaagtggaaccatgtctttgttccttacctctgtacatttggtgttcatactctctagtatcattcagagagcttactccttctctgggccaaactctacaaattcaggtgccgatagcttaggcaataaaaacagcagctacgtaaaagggcctgttgtggaggaattcacttttcctgaaagatcaactcccttcaacagctgtcatgcttctaccattgttgag

SEQ ID NO: 100748 - DNA, 229 bp, Glycine max
  unsure (1)..(229): unsure at all n locations
caatcaaattcatccatctcagctaatactagtagcatctcctcactccaacttcaatgtggagtgganctcacttaaacctatgttctctgcggacatcataggcccttctgtgggaatttgggagatcgcatcagggggcggaattacagtagctgcttgtgggacgatctcattagcgcctccagtacggacggccatgagtggttgtgtacgccacgatgtgcgg

SEQ ID NO: 100749 - DNA, 273 bp, Glycine max
cggagttcagaattgtggaagatcgttgtgctgttaggccaggccttaaaacagcagtcccatttgactacttggataccagcccggggagtggttgggatcaatttctaagaaatgcagatgaagagttaagacgacaatctacaggagctggtgcatgataatcagatgtttttttttattatttatttttacatttcatttcgagagttttgacaaacaaggtgaagacacatctttgaaaacattaccccgtagaggatgcagttttcc

SEQ ID NO: 100750 - DNA, 228 bp, Glycine max
tgcaattataattcagtatgtttatagaaagctcattttgtatcatgcatgtactctagctaaactaagtttcaccttgaacttgcttgtgactctgctctggatatgtcatacttgtacagtaacgaaaaacgactgtaaccaggtccttttctcagggagattcaaaaattagttcgttaagagaatcgaagcaaactggttttgaattcttggagtcagtttgat

SEQ ID NO: 100751 - DNA, 223 bp, Glycine max
  unsure (1)..(223): unsure at all n locations
agaactgctagctaaggatctttggatggccatcttctagaatgtggttgccaactcacatggggatatttcatgcatccaggagacaagtaccgagatatgtcaaatgagtaactactagattagcnctgcattatgctgaaatctgtttagatggccaagtatgtgtatcaaagtctgacagaagtgggggagttttaaattaaaatacatgtgcttgaac

SEQ ID NO: 100752 - DNA, 271 bp, Glycine max
  unsure (1)..(271): unsure at all n locations
tggttggtnttgttcgtgtggttgctnccgccgctgcggcgtcgtttcttcttgtgcctttgccngncgctggnnncgggnnncccgtgctgctgggtggtggtggtggtggagtttgcggttctgtggccctcgggggcctcgtgcggtggcttggtttgtgcggtggcttgccggtcagggctgtcgctcttgcccctccgtggtccgtggngctggttgcgagtggtttgtcgtcgtcgtcctcgtcggtttcgcgcgccccgggggc

SEQ ID NO: 100753 - DNA, 182 bp, Glycine max
gatctttacatatccggaaactatcacaaatttacctctgaaagtctttttactccattcagaattcaagtgatgcattcttctccatcttaatgagaagtttatgatattaggactagtgtaaaaaattatataactttcttgtatttgtatattcctctacaggtgcagaagcaatgttt

SEQ ID NO: 100754 - DNA, 198 bp, Glycine max
  unsure (1)..(198): unsure at all n locations
gtttgttgttgtgttggaagccaaaaccctagcagccggcgagaatggcagacgttgaggttgatgtggcggcggcggcggcggcggcggctgcagggcagccaannaatagaacgttcaagaagttcagcttcaggggggtatctcgacacgcttcttgaaatttcactgtcgaactcgtgaagatgttcagtgctc

SEQ ID NO: 100755 - DNA, 265 bp, Glycine max
  unsure (1)..(265): unsure at all n locations
gagatctatcaactagttgagaatgtgccctacgtcttatggtgtggccacaccctctgtaaaaattgcatcctaggactgcaatgggcagtggtgaaatttacaanacagcaaatcaagattccattcttcatttcttgtccatggtgccacatgttatcattccggatcatttacaaggggaatcgtaaatatccatgcaagaacttcttccatctctggatggttgacaacctgaatggtgataagcataaagtcttttcac

SEQ ID NO: 100756 - DNA, 266 bp, Glycine max
  unsure (1)..(266): unsure at all n locations
gttcttccaaactaatcaatcaaattcttcttcattcacagttagggttttcctttctcaaccaagtccatcttcagtcacagtcagttagggcttctttcttaananatggctcgtaacgaggagaaggcgcagtcgatgctcaaccgcttcatcacgatgaaggcggaggagaagaagaagccgaaagaccgccgtcccttcctcgcctcggagtgccgcgatctctcagaggcggacaagtggcggcagcagatcatgcggga

SEQ ID NO: 100757 - DNA, 264 bp, Glycine max
  unsure (1)..(264): unsure at all n locations
gataaaaaaaatacacaattttagtgaagctaaagcttgtggtttctttctcgttctcaaccaaaggtgaaagaagagattcctgaggtaaagatacaagcttttcncgtctgttcactggatcgggttccaggaattgaagggtaggttcagtaggggttgtgttgatctgcaccaagatgcttaatttgcgttgaaaaatctcatcatttgcgagactcggcatcggaaatgaaccagttagttgaaagttcaacgactact

SEQ ID NO: 100758 - DNA, 140 bp, Glycine max
aggttcccttcttttcgagaaaccactctctatctctttcttaattcactttctctctctatgatcgcggctgcttctagaagatcatgcgggccagacctgatgacattctagacggcgggaaggtttcgcaattcccg

SEQ ID NO: 100759 - DNA, 266 bp, Glycine max
  unsure (1)..(266): unsure at all n locations
tctctctctctcctcttcccaattcgcaagtttcactgcacaatcacactgcatatacctattcatttagccacgaacttcacattggggtggttgcagcgacatntatctcacaccagagagggcacacgatttggactaagagtgtggtatttgaggtaaaaatgggagttattcagaagtttttcgttgcatcactgttcatgtgggcaattcctattgcaatattatatgcttttaaccataatatacttcctggagcatcc

SEQ ID NO: 100760 - DNA, 99 bp, Glycine max
tcttcttgtaataatggcgtattgttctctcaaggttttgtatggtgttgtgctctatgcctttgcgttccaacattgctacgctgatgcaaactcaac

SEQ ID NO: 100761 - DNA, 100 bp, Glycine max
atagagtgtagatccaagctaataagctaggttcagtagttagtgagtgatcgatatctggagatgggtcgaggcaagattgagataaagttgattgaga

SEQ ID NO: 100762 - DNA, 150 bp, Glycine max
ctctctcaaagctttcactttctgcttcatttgttgctgctacagtttttcactcatgaatatcttcttcatttgatgcatcacctttgaaggaagcccttcagtttcgatcatggcaaccaatccatctcatttgcctggacttcataa

SEQ ID NO: 100763 - DNA, 151 bp, Glycine max
tctggcgttgctgcaactgtgaagagaaacattccaacccggattctcacaggcatcatgttgtgcaggaacacatggggagtctttcaccacaaatgcagagacttctgccccaaaatgttgatagtgaatggattgaaatgattcttaa

SEQ ID NO: 100764 - DNA, 269 bp, Glycine max
caggagtacagaaagggaacaataaatcgaaaaaaaagcatcccatatccaagatgggtgctttctttctctatttattctgagtcacgaataccgtgattctccaattagattggcctttttccatttccatttcatccgctctgtcaaatttagtgcctgacttactgctttattgagggattcatttcatatatttaattatattgagttgggaaaatcaatagatttctccaatgcaagggcagagaggtacagttgtttcaatg

SEQ ID NO: 100765 - DNA, 262 bp, Glycine max
aaactgcaggtccatccaaacgttccctgcatgctgtttaccccaatctgtccacattcactctcatttagaccagttatacttccagattctgctcaacttgaattaaaggtgaagttagttactcactgtatgtctcattgcttatgatgcatcttctatggaaaaagaaaaaaaaaatgtttcccttcaaatatgctaaattgtctctaggcatgtattggaaaaagctacatggttaacatcgcatggttaataaaat

SEQ ID NO: 100766 - DNA, 274 bp, Glycine max
ctactcttctatgttcttttattcctttctctttctgtttgcttcggtgccagctcgttggaacctcaacatagtagaagaatgttgggtgcccaaaaacaagagcaagagaagcctttgaaaaacaaaaccaccgccaaaaaccaaaccaagccaatcaagcccactaatagtatttcctcaacgaaccacaccaaaaccacaaaatcaccccacaacatttcctccaaaaaccaaaccaagccactcaagcctagctccaccaattcagctt

SEQ ID NO: 100767 - DNA, 262 bp, Glycine max
ttactttgcacctttgggttgaaagcctctttcaacctttttccagaactttgaattttttttattttaattttcgggtaaacacatataccatctcgtttccttgactctacttccgttgtgaatggagagagaaggaaacgattgtgttgtgggggacacatctctcacagcttcaccttttgatggtgaagcttccattttgaggtccacccttttgttgtatcacgttggggaggtcaccctcaccttccactcagat

SEQ ID NO: 100768 - DNA, 125 bp, Glycine max
agactatatggtggttctccacaattcccatggaagctaagacacaaccccaagcggagaggtcgtccccaaaaccttggggaacatcagggtcccttttggggtcaagggcttttaaaaccccg

SEQ ID NO: 100769 - DNA, 262 bp, Glycine max
ttatctctcgattttggagaaaaacattatgtaacatgacaagatgatgagccaatatgttcgggtgaaattcaagatttggaaaatcatgacttatgatgttccttagattaagtgaccagcttgtaacacatcgtgaggcttgttatgtcaggtttgctattaataccaatttacaggattaaaagcaaacctgacataacaagccttagattaagtgaccagcttgtaacacatcgtgaggcttgttatgtcaggtttg

SEQ ID NO: 100770 - DNA, 271 bp, Glycine max
aaacagttttgcagtgttgatcatgaacatgataatgtcaaggggttccaggaattgagatttgatgaaatagatattgttgagtatgattttttcctgatgtaccaactgaattgagaaataacacagtggtggaagggacgtatgcatccccagttcagtttgaatcacaagaagttatgctaaatattggtggcagaaatcagcttacaactgtgtgtgtatggtgtggaatagagtttgaccatgatgctgttaattctgaaataca

SEQ ID NO: 100771 - DNA, 152 bp, Glycine max
aatgccccatgatggaaacattcaccgagaatcgcacaacagctccaaagttgcaaaatgtgtttgcttttgaaggagaaaaggaatcgagatggcagtgggaaggtgacttgaatgccaccatacaaaaagattttagaaataagcttttg

SEQ ID NO: 100772 - DNA, 271 bp, Glycine max
  unsure (1)..(271): unsure at all n locations
atatgatgaaactactccaatgttggcttccgttgccgttccccattcttcttggagtaatgaacccggttcaaccaacccgccttgggccggttttcgttgcaggtccttgttgaaaaggaaacattggcgccctctcctcctcactattcccgaataatctgttcgatcaatttcatcctatcacttccatttccattttttcccatagttctgttcgntatcaaagttttgttgcttttctatttaagtctccttaaatataattgca

SEQ ID NO: 100773 - DNA, 265 bp, Glycine max
gtccatggttgatcgcaagttcgtgaatggtgcatatgggctgttgtgttatcagttacaaagggaaagatcagtgaaaatcgtaattcacaagtgagtcaggtcagatcagatcagatccgatggaagagtacccggaagagttgcgcactccgccggtgacgctagcgtctctggtggggtgcccggagctccaccctctgatctccacccacttcctatcggcgcagctcccatcaacaccctcgccctccccgatttctcc

SEQ ID NO: 100774 - DNA, 263 bp, Glycine max
  unsure (1)..(263): unsure at all n locations
tgtcgagccgagtcggctcgagcagtacctctttcaaactgtctgtactgtnggctgtctcaaaccttgtagttgcatcccttgttgtgtcctttgtcctcttccatgtcgttgatgctgatgatcaatcggcatacgcacagactcagggttgtgttgttcagcagatagattgtaatgctgcatgtgctgcgaggtgccgtttagcatctcgtcagcgcatgtgccacagagcgtgtggaacttgctgcagacgctgcaac

SEQ ID NO: 100775 - DNA, 269 bp, Glycine max
ctactcttctatgttcttttactcctttctctttctgtttgcctcggtgccagctcgttggaacctcaacatagtagaagaatgttgggtgcccaaaaacaagagcaagagaagcctttgaaaaacaaaccaccgccaaaaaccaaaccaagccaatcaagcccactaatagtatttcctcaacgaaccacaccaaaaccacatcatcaccccacaacatttcctccaaaaaccaaaccaagccactcaagcctagctccaccaattca

SEQ ID NO: 100776 - DNA, 207 bp, Glycine max
ggcaagagtctctacatatggcccctgaaagttataggcctcttaggccttattgttctgtgcctgtggctggccttacgtcccaagaacccctcctactccattatgttcatctccatacaacatcccccaactcaagtgaaaactgcaccatcttttacagccttcaaattgaaaacccaaacaaggactcgagcatttactatg

SEQ ID NO: 100777 - DNA, 134 bp, Glycine max
gcaccatctttgaagggtatgtaagagcaactaaatttctaattttacgaaactgagtagaatagtagaagtaaaattgtacggttaaagagaagagttggtattaaatggaagggaatgagcttgggcgtttc

SEQ ID NO: 100778 - DNA, 261 bp, Glycine max
cttttaggtacgaagatgatgggtctgagcaagctcggaaccgcgataatgactataacggccgttactctggtggccctgttcgcggagatcgtgtacgtgctgtggcaacgccgtcagggctccgtccgcgtgtgcgcgtggagccgcaagaggcttcgctccagtgttcttctacctcgtcttctccgagtaacgatgatgacgtggagctcgaactcgaacagcacgtgatgaagtggcagcagtgtcataacggta

SEQ ID NO: 100779 - DNA, 220 bp, Glycine max
cagcgacctcgctgccaatttggccacttgctctcgtctcatcaaatattctgttttgtactgtttatcaaaggaagcagcatcagctggagccaaattgctttgctttccggaggcctttcttacgtgggtactaaggatggcgacagtgttcgtgttgctgaaccattggatggaccaattatgagccactactgctctttggccagaatcacatttg

SEQ ID NO: 100780 - DNA, 139 bp, Glycine max
gtttatccttggaacattcacttttttcacttgacacctttattcccattcttttctctctgtaattctaaatcttcttgacagagatatgatccgaagaggaaagtaagcaagcaaaggctctctctcgatgggttgc

SEQ ID NO: 100781 - DNA, 147 bp, Glycine max
taatcttgtagcggaagtaatgaagaaattggtggccattgctccaacacattgtgagctttttgtcactgagctggcagaagcagttcaaaagttgacttcatctgcaatgaatgagttcgtgtctttagtgaagcaatgaaagct

SEQ ID NO: 100782 - DNA, 259 bp, Glycine max
ctgatgacaagctcatcttccaagttctaatctcaacatggaagcaattccttattcaatcccctccaccaaattgcactcatctcttcatatttacaccggcgttacacgaattcgaccctccctcttcgccctcccccaatctcaatcaaacctctatattcccccaatttcctcattctccatcgccacagacttcgctgcgtcgctgaatcctccaataatcatcatcatcatgaccacgaccatcaccacggcc

SEQ ID NO: 100783 - DNA, 155 bp, Glycine max
ctttgctgtttggagatgtaccattaattaatttctattgttttaattggtttacatggttcaggatcctatctacagttgtgtgttgattgtacttttcagtgtatattttgctgctcctacaattctataagtttcttttcactgcatgcatg

SEQ ID NO: 100784 - DNA, 266 bp, Glycine max
ctgctcgagcggctcgagcaaaaccttaaaaacaaaaaaataaaaataaagcacacactctcattcttattccccttcgtttctcattcacacttttcattttctcaggaaaatagaaaaagaaaaagaaaaatgattggaaacttcatcgacgacattgactgcggcagcttcttcgaccacatcgacgacctcctcgaattccccgacgacaacgccgcgccggtcgctcctccggcgaacttctggtccgccgagtccgactc

SEQ ID NO: 100785 - DNA, 141 bp, Glycine max
ccctcactcattcatggcttcctcactttcttccttcgcttcacacatcacatcatatcatataaccctttttcgatccttctagttcttcttcttcttcttctgtctccaatgcgacaaccactcaccttttcgttctct

SEQ ID NO: 100786 - DNA, 272 bp, Glycine max
tttttgggttgcaaacacacacacaaacctttgatctcagtcaccagtaagcagtatcgcaactcatgctctgcgtctgtctccgatccatgcgttaagttaaccctttccgttgaaaaaaaaaaaacatttctctttattcgttcaaacatcaatggcttcctcatgccgcggctattccaaagcccaaatgtgcttcttcaagattctccgcataatttcatctaccccaccctccaaacaagaagaagaagaaccctttcccagcaaag

SEQ ID NO: 100787 - DNA, 258 bp, Glycine max
acagtcatccaatctaaaatacgcccccttgccaggaaccacagtaagggggcgtattttggcttggatgactgtttcaagatcaaaatgtttgtcagggaatcgctccctttctgtggttcctggcagatccttcattggatttttccacccagaaggaatggatgaagggagattcgattttctgaatggggccatgtctttcgataacatctgggatcacgatagtcatgctggacggcatgcactaacatgatg

SEQ ID NO: 100788 - DNA, 180 bp, Glycine max
gcgagactctcaagagatgtcagatcaattgccatttcattatgtggaaatctcaagacttctttttgatcatgcacgtgacaacattcctgatgtatatatggtgaggtctctaattgaggacatcagaaatgttcggtttcataaagttgaaactgatttggaagcatttaatggtcg

SEQ ID NO: 100789 - DNA, 278 bp, Glycine max
gaaattccctcctatattgttaggggtttcgttcattcactcgctcactcacacacacacgcgcgcattgaacaaatgatgtgaattcgttgttgttgccgttgcaaattggatcccactctctcgcagactcacttccgttgtaactaacgttacttttccctccaaacggtccctaacagcttctaccaaacaaactcatctaacgatgttggttcttatcctcattgccgattgcgcctccgacttgcaaatggagagctcaggcagcttcaatt

SEQ ID NO: 100790 - DNA, 279 bp, Glycine max
ctgataaggattatgaggacaataaacagcaagaaattgatgagcttgttcagaaaactcttaaacgtttgggcgaactacttgacattgagcccgaagaacctgttgctgatcaggaagatctgatgaaaaataaaagaatcttaaggaaaaagagcatttcacctcttgatgtttcgaaggaggaggaaacaactcgtaagggggaccaacctttgaaacccgaaacaccatggagttgtataaataatgcctcagaacattatcgcatattagtag

SEQ ID NO: 100791 - DNA, 283 bp, Glycine max
acttatgatctccaatttttttcagaaactcaagaatcaagtcaaatttgggtttcatttctctctctctctctctcaatcacactgatagaacctgcttgctaggtttggttactccaatctccctctgcttttcttcacctatttctgttttgtccacgcattccaacattaaaaaaattagtccccgttcatttatatatgcaatatctggttcaacagtaaaagggtctttaaattttatttatatatagtatcagagtagcctctgaggaagtctgaa

SEQ ID NO: 100792 - DNA, 177 bp, Glycine max
ctctgttctcatttactctctcaaaattcgtgcacgctagtcaccgagcgtgattcagctttttcccttctgtttcttcgctttctctgacaatcaaaacggaaaatgagaaatcaaagcgcgtttctatgaacccaaatgacatcacaatcaccggcatcacactgtttaatgcag

SEQ ID NO: 100793 - DNA, 274 bp, Glycine max
ggaatatgcaatatccagaggtggatctcctattagtgggagagcctgttcaatttgaatttgtagatcccacaactcaagtatgacaacatctcaatatccttcacaagtagagttaagtaattggctcactatactatctgcaagggaaatatctggtggggtgacaccgagacaattcagcttcccaaccaattgtctgtaccattatggatctaaaagtggctaatcctaatttggtagaagctgggaattgtgactcataggtgtgtca

SEQ ID NO: 100794 - DNA, 233 bp, Glycine max
acaatctattgttgcttccatcttcaatgtccttcgcatcattttttcttatcttcctttgttaccatgcacttcctgctcttgctgatccaagagccacagaggtagcagtgttgtgcaccaacacaacatctccaatgcctcagagacaagctttcttaacaaacttctatgatgccttggaagccttaaccgctttggttacaaggcaaaagtatgcttttgttgttaaa

SEQ ID NO: 100795 - DNA, 121 bp, Glycine max
cattgcattgcgattgacgacgacgaggaatcatgtcttccggcggcggcggtggtaagccgttcttctgccacgtgtgcagtcagaggattacgtgctccgatgagtcggaaccattctg

SEQ ID NO: 100796 - DNA, 261 bp, Glycine max
actcctcctcctcctcctcctaccctttcattttcatttcccacatttctctctctctctctcctatacttcctctttacactccccatctctctcacttttcattttcatctccattttttttctctaaaactccaatttcccattttacccctcactgtcgatccccccttcgccctcgctccgattcctaggaacagggttttcagttttcactgttccattaagttcccgagctcaattcagtttccgattcgccgc

SEQ ID NO: 100797 - DNA, 238 bp, Glycine max
gagtgcgagatcatagatagacacacacacaaccacaatggctgccactgcttccaactctctcctttgcaccaaaacgctagtcccaaccctcccttcttcctccaacaacctcaacaacagcaacctatgctcctcctttcccaggcccaggcccaggcccatccaggccctgaacaactccgtgactgtaataaccgacaagaagtgcgaggcaaagtgggtggtggacagctgg

SEQ ID NO: 100798 - DNA, 210 bp, Glycine max
  unsure (1)..(210): unsure at all n locations
tctcgagccgattcatttcgagntgcntcgagctcgagcgctcgagtgctcgagccgttactacatatatcttgagacatcaagcgnactagnagcatggtgtaaggctctccatctggcttcgtctgataaaaaagaaaagcatgagtggtttgcccagttgcaagatgggtttcatagctatttgtcatcattaaatactgaacatca

SEQ ID NO: 100799 - DNA, 261 bp, Glycine max
caaatataggaccagggagaggaacatagtggagctgttgattaaatttaaattgctcattttcttctgcaattggccagtgatgcatctcatttttgatgaattctttgtgctggtaagccttggagacacctcgacaatcttcatgcattgccttgataaatttatttatttttattttttttgtggggctgggagggcattctttatgtgactctgcattttcgtggttttacaaaatgtcatgtatggttgaggatg

SEQ ID NO: 100800 - DNA, 263 bp, Glycine max
aatggccttgagaattgcattccggataatcaatcttacggagatgaaagcagaactagcagaggagatggatgtataactgattcattcaatgatgatgactccagctcttcatccagcaaagatgcttttggatcattctcttcaaaatgtttgacaatgaaaagagatgatcacggattggaagagtgggaactcacggaaagtcctcaacatttttatcttaaagataagtccgcttttgacgttgtcaattgttcaga

SEQ ID NO: 100801 - DNA, 225 bp, Glycine max
actaattactaaaggcttaagcagaggtacactccaaacagggccttaaatttgacgcaggtgaaggtgagtccggaaatcaccgtacatagccgctactttaggcaaacgcaagtgaaacagacggaacgcattcgatgtgaaactgaaaccgaaagaggcgtttgcattgttgttgttgctgttcctctcgtttgctctgaaatctgaattcaataaataata

SEQ ID NO: 100802 - DNA, 174 bp, Glycine max
gggaaattgactatatatctcccagttgttttatgtacctccttgaccgccttctgctcttaacatcacacgggaagtggaaggggttcatttttgctacaaaatcatcgtttgttgaatggcttattcaccaggatgaaaattcctttccaaatttgagtgtaatggctgatg

SEQ ID NO: 100803 - DNA, 266 bp, Glycine max
gagagagcgagcagtttcagacacagagagaggggtttgggattggagggattgacgctgcgtctcttcctcttctctttcgatccatccctcattcctaatcctccaatccaaccacctcagcctcacactcacatatacacttatctgaacgggtatggcccctcctagggttaaaaggatcctccacgaggtcgctgattgcttgcagacacaccaacttcttgcagcgctggtccagtagctgaggacatgttccattggca

SEQ ID NO: 100804 - DNA, 264 bp, Glycine max
gtgtgaggaaacctttgcaacaacatgacaaagcagaaagagagaaggaaagagagcaagctgagcaggtacatgaaggcaccattaaggtttctgaagaaggcaagggacatgtacgtcaaaggcatgatcgagtgctccggtcagttatcctatgtggaggcctccattggatgccccaccggccagctctgcacgcttcccagaagcttcagcgtcggctcggccacccgattcaacaacgagcgacgacgatttcaagga

SEQ ID NO: 100805 - DNA, 261 bp, Glycine max
aagcgatggcccacaactcttgttctcctcataactcctcctccaatagatgaggatgcacgttgtagatatccgtatgtagaaaatccacagggtcttcctgaaaggacaaatgaagctgccgtgatggtttgcatctcacgcaaagcggcaatcaagttgtttttgaggaagtaattacaaagctgagagaggagggcttgatccaggaatcaataccagttgatctcccacttattgctgatattgaccctaatgacc

SEQ ID NO: 100806 - DNA, 268 bp, Glycine max
cggctcgagtccacatctaaactcataccatggcataaagagctgagtcagggttctgaaaggcttcaagccatcagtgtggcagaattagactgggcacaagctgcaaatagattggttgagaaggttgaggatgatgctgaggtagttgaagaattgccaatgatgaagtcaaaaagaagacttgtgttaacgacacagcttatgcagcaactacttaacccccctcgcgctgcaattctctctgcggatgtgaagttgcatcatg

SEQ ID NO: 100807 - DNA, 261 bp, Glycine max
gaaaaatcaagttaaggaaatgatgaatttgcaacgagaagtgaagagaagacgcctaagaagaacacaaactggtccgtggtagagtgaagattggactatgattgcagcgttaaaatatatgtacataattataaaaacgtattctgtagattgaggctgtagtagtttttagattagcacttgaaaactttcacgacttacttctcttttggactcatgttagggagggtatcatagtaccatgagaatatgtttcag

SEQ ID NO: 100808 - DNA, 260 bp, Glycine max
attgtattcatattcaagataagatgagggagaagaaaattttggctcttgtgatgtttgtcatggcttatggtttggcagtaacaacactcagtgcaagttatcaactttattttcctgaaacgtgcaatggatatagagaattacttgccttctgtgggacctatttggcggatgtgaagtccagtccaagttcttattgttgtaatgcagcaactattgcgtttcccaaagccagccgtagcagtgatttttgtaat

SEQ ID NO: 100809 - DNA, 264 bp, Glycine max
ctcgaggcgctgaagtgcttacaatggcggacaaagccagagctcttcactgaggagttgccgcaagagatgtgtcatctctcgcctaaccatccagaacgataccgtactgcctaacatgttactctttcgacaattcaacgttcatagcctcatccttaaaccctggtaataccctaggttcctgagcacgaagaagacacccccgaaatccggtacgaaattgatcgggaaagccgacctgaaagaagcgcaagccgcact

SEQ ID NO: 100810 - DNA, 264 bp, Glycine max
gcgaaggagtacagtgtgcaacacacgcacactcaaacaaacaaatcatcacaagtcaatgtgccgttggcggtgctttgcgtgtgtgttgtgttagttcatcctctctcactccttttttctccttttctaatcctttcacttcactcatcttttttcccccttttccctattttcatcttcttttgcatttttctccgactccgtttcatgcattttcccgctgcttaaggaccatcctccaataccacgccgcttcttctt

SEQ ID NO: 100811 - DNA, 261 bp, Glycine max
ctctgttccataaaccatggccacatctctctctgcacgccaaatcaagcccacccagaacccaattccgttttcccaatcggagatcgaagccgcgaacaactcatccaactcagcagcggagattctgaggaagatcaccacagcagcagcaacagctgcagctacagcgtggtgcaagggaaaccaccccaacagagcaaggttgattccggcggcgatgcttcgtccgtcgcagttaccactgcggtggagtccgaa

SEQ ID NO: 100812 - DNA, 266 bp, Glycine max
tccaaatgccctattggttcgtgaaggaaagggggcaaataaaaaaactgcaaaaggagaagctgctttttatttgttgaaggatcttgagaagcagggaatttcacatggtagtttcatgtccaagggaaaaagagataatcctgaccatgtctatggttcatctcatctcaaaatggattctagtattctaattgaagaacattcctcagagccagcatcacataaaaggcacatattggatgaaactaacttaactgcaatta

SEQ ID NO: 100813 - DNA, 262 bp, Glycine max
agttcacacactaagttctgaaaaatgagttccaaagtttttcttattctacttatgttcatggccactatacttttgatctcctctgaggttgcacccgatgatgcataccagaattttgaaaaaacagatgggaagcgtagtgcaaatggggtagatgaaagcaaatattggcgtggtggctatggcgactatggtggttggcgtggtggctttggccctaacgaacataatgaggctgggattgatgctagccctcaca

SEQ ID NO: 100814 - DNA, 276 bp, Glycine max
tacgcaagcactctactgatgcccttcactcttcacttctcattctctctcttaatatcttcctttctctttctctttctagtttttctctttcactctcttctctttcgtttttctctgcctttgaatttgccagcgacgaagcatcgagaacctcggaagagtaaaacgagtcaaacgtaatcggcagtagcgtaaacaaatctaattttcccgtttatcgttttcgcttgctttgcttttgatattgctatcctctgaatcatgatccacgct

SEQ ID NO: 100815 - DNA, 142 bp, Glycine max
  unsure (1)..(142): unsure at all n locations
gttattacgcaccacccaccacgtatccctgaaaagagagaaaaacacactgaagctcaagcanagccagcatgggttaaagacacacagctttaagcctatgctgctcatactggataccaacaggcagcttttgatccca

SEQ ID NO: 100816 - DNA, 274 bp, Glycine max
aagctcgagccgctcgagccgctcgagccgattcggctcgagaaaattcgagagacaacttacggtgcggacgatgaaatctcaagaaacattgttggacttgctcggacccgtcctgatatattcggtactaccgaagaagaggtctccaatgctgtcaaggcagagattgagaagataaatgatgagcaaccaaagcaggttatatgggatggtccccctggtagcattggacgtactgcaaaccagccatgtcacaaactattggaagcga

SEQ ID NO: 100817 - DNA, 170 bp, Glycine max
tgccaaatggcctctgatccatgtagctgacctcacttactcaaataagattttattgttgttgtttgtagtcgtttaactctgaatttcatgctgtattttctaatgcttttcattatttcacacctagctgtttgtattgccaatatggatgaccgatatgcaattgc

SEQ ID NO: 100818 - DNA, 278 bp, Glycine max
tggagaaggaagagttagttaatatagttaaactactaatgagttagttagttagttagaggggtttattagatatcaatagaggaagaaggataggagagagggggatcttatcatttgtagattgagcattatctctttgtgaaaggagaaatcctttgtgaaggggaaacccttagaggagagttttctctcctattttctgaacttttcttactagtcaataaaatcttttattttcttcctcatttcacttcttggttccaaacaattggttc

SEQ ID NO: 100819 - DNA, 138 bp, Glycine max
ccaagacacaagacaacataacgtagacaacgaagggcagaagaacgatgctatgaaaacccactccttagtgcctcttcaagagacgattgtcattgcgtgctgcgtgttaatcctccccgtgccacatttctgcac

SEQ ID NO: 100820 - DNA, 254 bp, Glycine max
cttcaggtgaatttgggacaacacggacattatggtctgagtaatctagaggacaaggagaagagataggaagaacctcctggagagacgaagagtggtccacggaggatgagaagaagggtgtgtcttcaaaaaaggtgacatctgcagacatatagttccgtctcatggtgggagagtagcatttgtaacctttttgaagacgagaataacccaaaaagacgcatttgactgaccttgcaaaaatttgtcta

SEQ ID NO: 100821 - DNA, 244 bp, Glycine max
cgtgctacgacaggcactgcacgcgttggtgcaaaggaaccttcgcgacaatcgctcgcgctctcagagcgctttctgcacatcggacaattcatcgccaaagggcacaacaggtacacggagatcggaggcggacattcacgaagcgtatcagccgcctcttcgagtagaaggatatgcgaattctaatggatagacttgatgctgctggtaagaccactagcctctacaagctcaatctcgg

SEQ ID NO: 100822 - DNA, 265 bp, Glycine max
ataaataataacaaaggaaaccgcgcgaacgaaggggaaagaagaagaactgaggaggaatcagaaacgaagaagaagaagagagtcagtgcagaaaaccctagaaacaaaacatggcggaaaaattagcccccgaaaagcgtcacagcttcgttcacaacggtcaaaaggtgttcgagtgggatcaaacccttgacgaggtcaatatttacataactttcctcctaacgttcattccaagcaattctactgtaagattcagtcc

SEQ ID NO: 100823 - DNA, 263 bp, Glycine max
ctccaatgtagtacgaggaaataaacatgcaacttttttctgcctccaatcgccatggccaccaccacccaatggagttccctttctctctctcttctccttctctccatcgccctcttccaaaccctaacccccaattcctcgccgtcgagccctcctcccatctacatcgtgcgtcttcagccactacgctgccgccgatcgtcaccgcgcctacctcgaatctgcactctgtccaagacgctggcggtggatcccgcggc

SEQ ID NO: 100824 - DNA, 236 bp, Glycine max
gaagggaaaagaaaatgcatttcaaaagttaacaaaacttatggttacttacacttacaccagaatttacaggacgcacaaatctcactctaagtcttaataaaagggatgcaattaacttgcaaactgcctacgcgtgatatagagatccagccactcggctgcaaccctgaagggaagcacagagagctattggtatttttttccccgttttacttgaaaaaaagattgcagaa

SEQ ID NO: 100825 - DNA, 191 bp, Glycine max
ctcaaagagcaacaccacaaaatgaaagatgaacaacaagaactagcactagagcaagttgaaagcgaagccatagtagatagcatttgtgagagtgaaacagcaactgctgtagtagccactgcaaatgctgaagaagcccaaggtggggatgacagctatgaaattgtaccgggagaaaatccagaaag

SEQ ID NO: 100826 - DNA, 262 bp, Glycine max
gttattattcaattgtttagttttatagattacagagagtttgtgtaagagaaaaaagttgtccccctcttttcccttcttctttctctgagatccaaaaaaaaattcaggtgaggtcttgtgtggtagataactgactccactcaactcaacctttttgattttgcattcactgagagagagagagagagagaaagaaaaacataaaacataaaacatcagcatcaatacagagtttaactgaatcatcatcagttttggt

SEQ ID NO: 100827 - DNA, 259 bp, Glycine max
gcaattctttaagcagaaggaaacaagtgttgcctaatggcaaaggaacaattcaacaatctctcaaacttctcattggttctgttagatcaaagagtaacaaggcagattatgttaaaagccttctaagtttcttagaacaacatccaaacgcctcgacatcaattttttggactccagccacaactcgagttgcctcactttactctgctgcagatggctatgttataaactctcaggtgctgggagaaacatttgg

SEQ ID NO: 100828 - DNA, 254 bp, Glycine max
  unsure (1)..(254): unsure at all n locations
ctccaactctcatcttctctgttccacaaccttaactttctgcattctgagaaagctggtttcatcattgcataatattttgaatttgactgctaaggaaagcccccatttttctgagttgtaaagtggcttatattttttgagctgaaagtatatctggaatcaaggattgtgtgcttagtcgnacagacttgctatctcagcatttatgtgagatccacggctgaaaaggagcacatggcttatactcatca

SEQ ID NO: 100829 - DNA, 254 bp, Glycine max
gatcattcattcattcattttacagcaccaaccagactcagacgaaagcatttctgacgacgacgttttccccaacaaggcgccttgcttacaccccaccaacaagcaagagttgccacttctggtgcggctggacagtctaagagggatcagtgatgcgaatgggaatggggaaggcaacacgtcttcatttgaggagccgcttgaggatgaggttagaatgccggatttcgacgaggagagagtgggtgcca

SEQ ID NO: 100830 - DNA, 255 bp, Glycine max
actcgagccgattcggctcaggcgagtcttccacagtgggaagactctttttctgatatactttacgtgcccatcaaaaccataagctctccactctatttcagtcaccaatcaccaatgactccttctttcactaacgtcaaaatcttctcttctctcgtcctagacggattcttcaacgctctcaccagacgcgggtacgcggtggcatcacaaagcgcaacaaaggaaggagtgggctttatgagcggcaag

SEQ ID NO: 100831 - DNA, 154 bp, Glycine max
accccatctcacattggtccaaagcaaccttcgcgacaatcgctcgcgcactcagtacccattctgaacatcgaaccattcatcgcccaacggcacaacaggtccgcggagaacgggggcggacattcacgaagcttatccgccggctcttcgc

SEQ ID NO: 100832 - DNA, 247 bp, Glycine max
ggattcggctcgagtagtcttcctgataaataacgctgtaatacagtggagaaatcctgtccctcttaagataccaatgcaggcaggttaactctgtcagcagcgtaatctgcattccactaccattttcttcaatccgatctgccgattgtcgtttttttcccggacggctgtttctcgacgcgaaagtccccgattccttcgtccgttccatttcggtcaggattcgcgccattcccttgtccga

SEQ ID NO: 100833 - DNA, 247 bp, Glycine max
tccctcgtttccccaaatgtcgtcaaactgctcactccacctcagtctcataagagacttcatcctcgtcttatcgctccgtcacacgtgcgagcctcgttaccactgcgctaatatcccgagaaatgtctccacggatctcgagatcttcgacactgcatcaatggctagaccactatgggaaagtttactaggatgcagcataacactacaaacgaatcttagtattcaacaacactgtgcagtt

SEQ ID NO: 100834 - DNA, 255 bp, Glycine max
agcagcttcatagttgttgcctatcagctgtattattctgttagccattgttttttgccatggtgcagttcattctggtagccattggtatttgcctgctgctgctgtcatgtttcgctttgtattttgatgattatgattatggtggttgtaaactgtatgatttttgtaaaaccgttctctcttttgtttagatattacgttgatgtccaaaaaaaaaaaaaaaaaaaaaaaaaaaggggggcccgccgattt

SEQ ID NO: 100835 - DNA, 273 bp, Glycine max
actcgagcgattcggctcgaggggatggggaacagagctcgaacgataaaagaaatggatcctaaggcagttaaagacggtggatcatcagcttcaaattgcaaattatttattcaagaaattgtgggaattcacctgagtaatgcatgttttatgcatggggcttgcacctggtgtgtcgtgtgtatagacacagggatgccaaaagtggtgaaccttgctagtgtcactatctacaaatcatagcaatttaccatcacactcacgagtcat

SEQ ID NO: 100836 - DNA, 270 bp, Glycine max
ctcacagtgaatcttcttctcccattcccataagaagtgctggtgtgagcctgttgtcgtggccggtgccgccgccgccgtatcgaaaccttaatttcaacaacaccaatactctctcatatggcaatccgaaacatcagcagcaacaatctcaggttcttctcaattcctcattctgcttgttctacctttcttttctctcacttcttctcaaacaccacaccctttttttcacctccccacttgtcaagttctttgcttttctcaacc

SEQ ID NO: 100837 - DNA, 266 bp, Glycine max
tttgaggagggaatcaaaggaatcttttgaagggtgaagagagtaaagaggtgaagtgttggtgggttttgctcagatttcttctctctgttgagggtttgaatagtagggaatgggttatgctgcagttgaagttgctgttttcccagatgcggattacttagacttttaggggatgttattctgattagtgattttgggaggaaactggacatgagtatgcttgtggggatatgctcgaaccgcgagaatctgatatacccgtc

SEQ ID NO: 100838 - DNA, 266 bp, Glycine max
acaggtaattcttgacatgctgttcagatttcgattgctattgtaacatgatgacatttttcactttggactgagctcattttactggaaggtgatttgatttttgttacaaattatgcatgtcaggatagcaactttttgttttcaatcaccatccatttccctgcagattattgtacatgatggttacctgtctgattgatatggaatccaaatttttgctttatacttgcttaaagactggctgttaactagaactatgtgtg

SEQ ID NO: 100839 - DNA, 264 bp, Glycine max
ccaattccaaattttcagtttcttcctcgcttttctgcaaaatcatctaaatccgtttctgatcctgaatcatcagtttttcccttgaaagatgggaggtggcaaggacaaacacaatgaagaagagaaaggagttttctcacatctggctcatggagtagctcaagctgctcatggttaccctccaggggcataccctccacctcctggggcataccctccttaccaagggtacccacctgctcatggctaccctccacaagg

SEQ ID NO: 100840 - DNA, 243 bp, Glycine max
cttctctcctctttgttagggtttgctcggttccatttttcccaaaccattcggcacaacatcgaaatatccccattgtccgcttccgcaacgaaataactctaccgtgccctacgataagggggaacaactcgttaatgaactctgaaatctcccactacactacaattttggggcaaggcagaggcatttttgttgattattgatttttcttaaaatcaagacagattcagattgtttagt

SEQ ID NO: 100841 - DNA, 249 bp, Glycine max
ctcagaaccattatatcctgacatgactaaacatggtgtttctgttggagatgttgtagcagaagagaaggctagccataaaactcctactttggttgagatgtcttccaagactgatgatgctgttacatcatctttaaagcagaactatgttggaaatgcttcagttaaagaaaaggatggagattgcttggtagctgataacgcagacgatactttagtagtaagaagtgcagcaagtcctcgcac

SEQ ID NO: 100842 - DNA, 248 bp, Glycine max
cacgaatatcttacactacaaagtacaaacacgttacacccctaaatctttctctatctacacgccaaaaattcaactatatatatggctgaagatgtttgtccagtgcaacttgaggataggaccagaggccagagcactaaagttggtcaagttcttcaacttgggtagaagcctcttttgccttttgataaaatacccctttggggaagattgattcaaaagtctaagatatggggcagatgtag

SEQ ID NO: 100843 - DNA, 247 bp, Glycine max
cttgctatggcttgttgctccccttcaccctcagttagacctaacataaagcaagtcctcaagaaacttgaagaaattatgttctagaatccatgagggcttttgtgatttttttgtgtagtattggccactttggctgcagtgatactgcacactttaaaattcttcaagttcatcattaacaatgatgtggttggagacaatataacatttatatatgagaaattaggaagagaaaacaagtaag

SEQ ID NO: 100844 - DNA, 200 bp, Glycine max
ccgctcgtaccgtccgaacgatgagacgggtgcgtctagcaccaagctttatacacggctcttccgtcactgctaaacgcgtacactcgcaataagtcatgttgaagctctaaggatctaacatctggtagatccacagactcggcgcaatgttgaaaaccatacgcggcgaggtcttttatattgacactggcaaacat

SEQ ID NO: 100845 - DNA, 196 bp, Glycine max
tgtgatgtgtgtgaccccatttgtagcctgctagccgaaccgtaaattggggtcacacacatcccaccattgtcaggcttctcaaaattatttagattgaaggaagcattcctcacattactagggattgctagattattgtgcctgtcatattgatatggccaccctatgtatccttctggacatggaaaacgag

SEQ ID NO: 100846 - DNA, 233 bp, Glycine max
taatattttgactttgtgtaaaaggggcttttgtatttaagtcttcctcttcgttaataaagccatcttcttcttcaatcatcgttgttgctgcaaaaaaaaaagtaaaagcaattgaagaagagggaaaaaatagttctctttcgttgcttaatttctagaaccgcgaaaaagtgcgaaacgtttccaaaacgatggttgtgttggtaaacaatttgcattgcgctccgaaa

SEQ ID NO: 100847 - DNA, 200 bp, Glycine max
taaaaactgagattgcaagaaactgaaggttgtttggtagatatgaaaaagcgagcattgaatgatagactaattgcggaaaaaggcttcttggatgcagatggacttcaagcatctctcgtgtttgggccttcaagcaaccatgggaggctaatttcttcccagggatttctgattctatcactaggtcgtcggctatc

SEQ ID NO: 100848 - DNA, 243 bp, Glycine max
ggaacacccagatgtgtcatacaatgtaactgcaccccttggactacatgaactatttgtggttcaacaacatcaatttgtgtctatggcttttattgctttggaaaagttttacttgagttggtgacaaaaattgttgatccttcaatggttgttgataaggatttcttagaggaaatatgggctacatccattgttgcgaagtcttgcctaaaagttgtgacatcagagttcttccgatgt

SEQ ID NO: 100849 - DNA, 233 bp, Glycine max
tttatatccaaaaaagggaaaaggaaaagagttgcttaattccacattctgaaatacaccgaaaatacctcccatcattatatcccatgattgtgggatctcacaataatatctgaaatatcttacttaaaggcacacacctcactgcccaaatctctattgtgatacatctctcattctcgaaagaccaacactaaatgagatctgaggatgtcttgtaaagttacatgaac

SEQ ID NO: 100850 - DNA, 183 bp, Glycine max
aaagtgtggcttttattaattgttatgttggcattgggtgggtgttgttctttgatttctacgggttgcattaagctcaggtctgcagcttccttatcttgtttcttatctttcgcacgccttgtgctagcttggttgcaagttattaataaattcgatcattgggctttctagctagctacc

SEQ ID NO: 100851 - DNA, 230 bp, Glycine max
ccaaaaccatcttctttttcttgtacccactttcattatttcagcttaccgcgttggacgatataaacataaaagcctcttcaatattcaattagcccctattgagaaacattcacaattatatatatttgtattcctatatggcaatgcaatattcattctcgagttggagccgcaggttacccatggagattatggtgcttgccttgtgcatccttgtgcttttgcat

SEQ ID NO: 100852 - DNA, 239 bp, Glycine max
catgcagtgaaacccgaaggagaagaagtcccacatcggaggaactttctagttggcctaggagggatttgtggtgctgctgaacaagaaagcttttgcttttgcctctcctgctctagccacgaccaccatgttccctctggtgttggattcagctgtgagcgcggtggttgttcttctgatcgactttgagggaaacgcacatccaaagtttgatgtcatcatcaacgcccaagatt

SEQ ID NO: 100853 - DNA, 234 bp, Glycine max
ataagtacatgtttggaattgtttcacagtgagttggggaaaatgggttccaaggctttgctcgttcttgttatgttcttggcttctgccctcattctttctgctgaagttgcccccaaaaatttggatgagaattttgatgcaaagcatggtgttgtggatacaaatgaggtagatgaaaaaaaagatggttatgttagttggcgaagtggtgttccattgcgttgtgctcat

SEQ ID NO: 100854 - DNA, 225 bp, Glycine max
cagctcgaaggccatcatctctgtgtaccaatacttcattggagactcttacattacatcatcagacttcagctgctactgatgatgctgctctcctacatgcatccacggtatgttctcctgctatcctggagcttgtagctactactggatcgtcaaatggctctcctctcaagaggtcgatcgagcataatatgatggttaccatcctgctgtcgtctcatg

SEQ ID NO: 100855 - DNA, 246 bp, Glycine max
aatcagagatcattttcatcaaattgttcaaaactcaaagcatcgatttgatgccatttgcgctcctgcttgtcgtagacattccccaatcagtcaccgtcctcccgatccaccagtctgaatggaagaaggtaagaggaagttgacgatgaagagaaagagagagagcacaggtggtggaaaagacagactgagtgagttgcctgactctgtattggtccacataatggaattgatggagacaag

SEQ ID NO: 100856 - DNA, 237 bp, Glycine max
ggagaatatctatggcacgtgcataatatatattagtatgtgaaaagttttagctttcaacaacaaaggttgcttctaagggatattcaaaggcaaactgttgatatacttggatacttgtattgaagacaaaacgtgctagattaattcatctatcacagtcaaattacacaataggattgatttgattttggagaggagattaaggaaatgtattgttttctcttctcctatatc

SEQ ID NO: 100857 - DNA, 235 bp, Glycine max
ctctttcacattttaatcacagacagacaagaatgattgcttctgggtgtgggaaattttagcacccatctaataataatccccaaaatcatcgcatcgaaggcatcagcttctaaggacgatactttagcatctgggatcgctcaagaggggtttagtgaggtaaaaagggtatcagctgacgtcatggccaaactgtacgtcaaggctgtgtcacaggtggatctgaacaagg

SEQ ID NO: 100858 - DNA, 234 bp, Glycine max
ccgatatctgtggcattctccctcgtattctcatcgtttccaggcgaaccgttcgcaaaaacaagttcgttgatttcgttggagaataccaccttgaccttatagtaagctacggtggggtgcccgtgattgtccctcgcgtttccggcgttcacacgttgctcaacagctttgagccaattcatggtgaagatattgaggcatgttggtatgatcacaacgacgatcatgaca

SEQ ID NO: 100859 - DNA, 216 bp, Glycine max
ctcgagccgattcggctcgagtaggtaacagggagttatccttgcagtctgataataatacagctaactagtatgtgatgtatctattgtcttgtttgttttcagaggagctgttttcaaatcatgggcgacatgtgtatattataaagatatgggaaagaggtggtatatttttgtggtatgtttctctttcaactccctatatatatatatata

SEQ ID NO: 100860 - DNA, 110 bp, Glycine max
gcagaagctggaacctgagttgacgcgaatggagggagaatcgaaggtagatgtttggtgcagagatacagtgtcctaggtattgaagcttgtctgttcgacacaacata

SEQ ID NO: 100861 - DNA, 233 bp, Glycine max
gaaatcccagtaagaagaaaataaatatcaagttccatcccagtgagtggcactgaactaaaaaatgaactgtcttcagaatctttctcgattctctgttttgcccttcgatacacttgttacgcgccaccgcaagaaccttcccctttccctgggtttcgtcaataattctcatcaaaatctaactatggcactcaaggctgcctcaggttctataccgagtgcagacacaa

SEQ ID NO: 100862 - DNA, 236 bp, Glycine max
cggctcgaggagataaatgcacttagagaagaagagctgaatgaaaactttttcaaggcattatctcatgtccaagagatttatgccaattgcaaagtgttgcttaggacacatcatcagcgtgctggtttagagctgatggatatgatggctgtgtatcaagaaggagcttatgagcgcctatgcaggtgggttcaggctgaatgtcgaaaattgggtgacactgacaatcctga

SEQ ID NO: 100863 - DNA, 105 bp, Glycine max
aaagaattaaaagcagcagtggaccgatatgagtgtcatttttctgcatatactatatgtgacggtgtagcaacagcagaagtctagagaagaagcatattaagt

SEQ ID NO: 100864 - DNA, 103 bp, Glycine max
catactacgctgatgagtgtgaatccgccgattaccagcattgtaatgaggattacaatggtgcctacgtagtaccactccttgtatgaatactttgacaagg

SEQ ID NO: 100865 - DNA, 265 bp, Glycine max
cactgatcatcattcattcgcgcagtcgatcggtatcagcattcagcatcgcttttttctattcaacgactccgttccgttctctttcttcttcttcgaaaccctaataagcttctgacttccttctgattccacttttgcttcaactgggaagatactgtagggcctgggccacctaatgatgagatatccaatttctacataagttgccattgatacttttttaatcaaatggattcagtgcatgctgatgtgtctaattcac

SEQ ID NO: 100866 - DNA, 158 bp, Glycine max
atttgtattgtctcacaaggcctccgtctattctggtctgatattcgtaactgcactcactatgtgacgaatactaatagcgaatagtggacatgctcattacatctacaatgggtcaatctctcatgcgtaattgagtgtgagagccaaatgcatcg

SEQ ID NO: 100867 - DNA, 158 bp, Glycine max
atttcttcttatctttcgtattcccttcgcaagtgagagatggagcaaatactgattcatgggactctacacgccaccgtcttcactgttgataggctcaatgctggttgtggtggggcaatttttttagcaagctcaagcataactttgaggagact

SEQ ID NO: 100868 - DNA, 154 bp, Glycine max
ctcatttctcatgtctcacattatgattcacatctccatctagatctctcgctctctctctcccaagaaatgcatcaacagacgtgtgattaatttgcgattgttcaagtgatcgagcagagattgagagttcagggggaaagtgcgaaaaaga

SEQ ID NO: 100869 - DNA, 261 bp, Glycine max
gtttttgttttcgtttcagcaaaacctctcttcttctgattgattcacttctcgatttttctgttttcgttttcattttcggtttacgatctaatatcgatgcgattcgccattgccggaaaatgagtcctccggcgagtgtccggtgatgatcgctctcgagagaggctgttgttgttgttcttcttcgacgtcatggttttgttctgaggtgctgtcagtgctcacagcgcgacgctgttgagttgaaatttcgctggt

SEQ ID NO: 100870 - DNA, 226 bp, Glycine max
  unsure (1)..(226): unsure at all n locations
ctctctctctttttttctatcccattacatcaatcatttctttgtcatgtcttcctttctttcttttgtagacacatctaaccctaattcatcaccctcggagaaacaccagagagacctactgaaccacgtcgaagcctacctcgcgaaggngacggcgtggacaagctcctcaagatttcgcgctacaccgcgaaactcatcctcgcaacttcgctcctcaaat

SEQ ID NO: 100871 - DNA, 142 bp, Glycine max
gttccagatccgtcgcggcaccctccgacttacacaattcttcttcttcttcttcctctgcttcgatggctactgtgcaactccaatcactaacccttgttcactctttcgcactccttctgccaccttctcccctctgatc

SEQ ID NO: 100872 - DNA, 157 bp, Glycine max
cgcaaggtaagttaattagaccaaaggaagaagaagaagtagtggagtgatcctggttgggtgtgaaaaatgtcgcacagcgataccataccccttcacccatcttcccaatcgacattgacgagatcgagaccctcatcaatgccagcgttcacca

SEQ ID NO: 100873 - DNA, 157 bp, Glycine max
cggctcgagattttattttgttggaattaggttttcagacacacttactagttatcattctcaacctccactcggcttctcgcgccgccgcttccgccggacatcgttgccatggcgttgtcattaccgcctttttcttcacaatattccaaaaatc

SEQ ID NO: 100874 - DNA, 255 bp, Glycine max
caaatcctggaaattttccaataatttttcactcttcaattttcaatcttcaatcttctccttgccttataattattattccccccttcaatatcaatcattaataatccatatatttcataattttcctttcaattcccaaaaacactttattaaaaggaaatcaaatcaaagcaaagacaacacgcattcttttcttccccaatttccaatccccaattcttctgccctagattttgtccctttttttattgc

SEQ ID NO: 100875 - DNA, 213 bp, Glycine max
tgaaataatttctctctctctctgctctctaactcgctccaccgcgccgcctactcagaccgtcgtacacacaccgggcgagaacgttgaatcgccgtttcattggaaagaggacatctctcttctctcagtctacaaagtacaaaccaatccattccaccaaaaccgaaatccctagaaacaattaaaaagacactcatagaggagagttca

SEQ ID NO: 100876 - DNA, 274 bp, Glycine max
gtttaggcctgtggagaagaatgagtactttgtgctcgacgaagaggaagaagaggctgccgagattgcgcttagggatgaagaatttgagctttgaagcaatctggctatataactaaatatcaggttcttcaatcaccttgctagctactgcatctactgttagagatgtgtcaatactggaatactgtgtgtatgtttagtttttgtgtttttgttttgcaattctgataaatgtattgtgcgggatagaaaaaatttgatcttgttctca

SEQ ID NO: 100877 - DNA, 99 bp, Glycine max
gccagtactcatatggttctctgagagattatgccattcatgtgtaacttttagctaattcagactgtggtgatgcgaatggatctttgggtcagttat

SEQ ID NO: 100878 - DNA, 270 bp, Glycine max
actcgagccgattcggctcgagcagttgatgaaatcaggcgcggatcagtatttggagttcaaaggaatcgacgagagcactctctacgaagctaacgcgggtttggcgaacgtgccggattctcgaggatcgattttcagagacaagaagctttcactgaaagagaagaaccaattgatgaggttcttcaagctggttcagcagcacctggatgatactcaggaggagaagattcccgaggaggatttggagattgcgtttgttagttt

SEQ ID NO: 100879 - DNA, 275 bp, Glycine max
actcgagccgaatcggctcgactgctcgagccggtcgccaccgattactctccggcgacactcttctctcgcaatgcaactataagatacactatcttcgtactgtaaatcaacttcacagtcactggttcgatcaccatgctctctcgtttaattcccaaaccctctcatctccgtcgctttctctctattccgttgaaaccgtcccacacggctgtgaatcccttcttcaccgtcgtcgttcccagacacttctccagcaaccgtggcggcgg

SEQ ID NO: 100880 - DNA, 192 bp, Glycine max
cacacacttattctgagtaatcacaaacacaactaagaagccaatccaaacgaatctgcggtgatccaaagaacctccactccccaccatcacatgtcacgtcgcccacgcagcgcgccgcgcgcgcggtcatcacacaaagcgtgcgcgaatgtcggagaggtgacgcgagcacacaccggacgcgcagac

SEQ ID NO: 100881 - DNA, 271 bp, Glycine max
ctcgagccgatccatcataggcataccatacctactaaaactcagcgacagatcatatcatatcatgtgataagctagcttatatatacacacaaacaagagggtagaagggaaaactcttgcagaaaatagcttgaaaaaaatatatattctataaacaattatgctttttccatctggtattctgaaaaagcaagtttaatttatttgtggaaagagatataaagcaagtattaaacacatgggtaggggaaaggtggagctgaagagg

SEQ ID NO: 100882 - DNA, 271 bp, Glycine max
atgattaattatggagaaactagatcatatgggatccacttgcactgaatcacattctttcacaagcctttgacatattcatatctcatctccttcagcaaccacaacaaaccacttcaaaggtcctatattgctgatccttgtttctaaattcctctgcatggccaacaatggtgcaaaggatcccttgctgtcaggatcacttgatgcgactcaaaagactaaacagcagttattagacaagagaaggctcctccgttctagaagtgct

SEQ ID NO: 100883 - DNA, 260 bp, Glycine max
cttttctccgcattctgtttcttcacccagaaaaaaataaaagcgattttattttatctttcttttaatttttcaattcaaagtgagaaagaaactctgctgctaaagttttctgtgttctctcttatcatcatctgaggatttggctcttacgagggcgatctgtgtgcaattttggggctggaaatcttgctcgcgtttcatgcttttgtgaatttccctgcgttattgttaggaatgaagaggtcaagggatgatgt

SEQ ID NO: 100884 - DNA, 260 bp, Glycine max
ctctcactagatccaactccctcaaaccctaacgctccaaaacaaaaaaaaacccctcgctcttaaatttcatcttccgacactcatcaaacaccatctatacctttgactcaaccacatgaacgaggattgcaattccagaacagcgtcgctgttgttgtcctcatcctcctccccttcgaattccaagaatttgaggtttgtgtttcagatcgtgggagataagcgtggaagctctcacgcgggtcacggcgctcgga

SEQ ID NO: 100885 - DNA, 264 bp, Glycine max
gcaaaagcggcgtacatggtgtcgctataatagcacgcctgactcttcgctaatacgttccttccaaccccaatcactcaatcaccgtccttagtcgttgcttcttccacccccaccactcataacccgacacgtgttccaccacactttcctcctcttcttgctatgtctctgcaccaaaactcagtgttctgatgctgagccaaaaccgaagcaccatggacatgattcctgggaagatccgaaaacgaggctgttcctcct

SEQ ID NO: 100886 - DNA, 253 bp, Glycine max
caggaattccatctatcattgaacatgatttcgccggagactcataaagctgttagtgaggtcattgaatcgtgtagaattcgatgaaagctcaaagggaaactctgtacagccacggcataatttagggtttgttgttattccggaggaaatgggactctgttacacgagtctgaccaacttttattctctgctcacagcgcttatacccttattcttgtattaccatgctggtgatgacgctgagttgttt

SEQ ID NO: 100887 - DNA, 281 bp, Glycine max
ctcgagccgctcgagccgattcggctacactcgagcgattcggctcgactcgagtgttctctggaggcagctagctagggtcatagtcatgaggagcttgaaaggagacagtggacatgccaatggcgaagttcttaccgaagctcttttgccaacacgagatgcacaacaacaacatcaaacagacgacgaggaacaaagatttggtgacaagctctggcttgaaaccaggaagttatggctcattgtggggccctctatattcagccgcctcgcgtcgt

SEQ ID NO: 100888 - DNA, 286 bp, Glycine max
gctaagctttgtggtgggtgtcttcctgattatgttcccaaggaaagcacacctcgcattgtgaggataagagataatcctggctgcccctgtggtggtactcacgttgctgacatttcagacatcaaacaaattaaggtttctcaaattcgctcaaagaaggggctgacaaaagtctattactatgttgaatcctagttatatgtggctgagtctggtgccatgaaactgctatttgagctccatactgatgactactcttaaataaacatcacaagaaactagc

SEQ ID NO: 100889 - DNA, 291 bp, Glycine max
tctaagtccaaggatgcaagatatccccttctgtagccttatagttttcttctttctaataggggcttctttggtttcccctttatatgatgggcccctatatgactccactgcctacactgagtgcaaagagaagccagaggaaccactttatggaggaggacttttcaagactgagcaacactctcgtcgtggcagcattgccaacaacagctatgtgccttcacttgttctgtataatctcactcagggcaccatttactctttttccgcatgggtgagagttaaaga

SEQ ID NO: 100890 - DNA, 272 bp, Glycine max
acactcactcactactactactcgctctccccacgctacactggttgcgcgtgagtctcaatcgccgcattctcttcgcgcgatctttctacgatcactgagcatatacaaatgagttcgaaaagagggggtgggagacctataaccgtggctaacaatgatatgtccaaagggaaaagcatatctgaagctcatccaaaagttgagcagttgactcagggtatcgctgacactaagctaaactcaggacaagatgatggtgagtgggaggt

SEQ ID NO: 100891 - DNA, 283 bp, Glycine max
cctcgagcgattcgagtcacggctcgaggtaaaatttacaagcggaggcaaaagaagcatcaaagaggatgggcaatggtagagcagtcggaccaaataaaatatctattgaactttggaaatgtctagttaagaatgaacatagcaaagttttataaatatcagaatattgtggtgaattagtggaaatataacaaaatataaaagcttaggaatgaatgtgttaagacaaaaagtcagagtaccacttattgatgacagatgatagaatttcaccttagat

SEQ ID NO: 100892 - DNA, 284 bp, Glycine max
cgtttccttacacacttgttgtatttttcctcctcccttctttctttcctcacccattgctctctcttctctcgtccaaaaaaaaaaaacacaaaccattcttattaagaatcacgcaagaatcgcacaacagaaagttaaacaacaacaacaacaacaacatcatatatatctcagatatatcatcatggccgttgaggcgcgccatctcaatctctttccctctcaattcatacccaaccgggaagtgatgaattctgttgaggcgaatatgaacatgtaca

SEQ ID NO: 100893 - DNA, 280 bp, Glycine max
gttgccactggaggatgaacaaggtgaggagggaatgcaagtgcaacagcagcagcagcagcagcagcagcaacaatctcaaggtttgggtgaacaggtttcaatgcctatgtataatttgcctcctaatttgctacacaatggtcagaacatgcctcatgatgtgctttggggagctccacctcgccctcctccttccttctaatcagccttgcattgccaatcatcatcatgtctttaattaatctcactgatttgtgaattaagtatgttaattaat

SEQ ID NO: 100894 - DNA, 283 bp, Glycine max
ataacatccccaaaggccatcttaatagagcaacgatctattaagaagttgttagataaacttggacccaatgacctcccaaagaagaagatactgagatatcttctgtatctactgaaaaagcatggaaagctcatggtgggggaacatgtggaggaggtctattctcgttctgaggaacaagctgcaacagagaactcgaatcacgattccctacgaagccatcatgttgattcagacacaatcttgaagtatggtcagtataaaactcacaccaatgagt

SEQ ID NO: 100895 - DNA, 256 bp, Glycine max
ggggtgcgatgatgggtagatatggtcaggggtgcttcgattctcaaacctgtgtgtatgaaaaaaatatttttttattaggagaaatttattccttaaatggatttccataccccataaattagtttctaaccctggatcaggggttatgctgggttcaagcaaccaaaaaagatgtcttatggtgtgatatgattgatagatagtcatgctgtttaagtatgtcatcagcggtccaatattcagtataactatg

SEQ ID NO: 100896 - DNA, 280 bp, Glycine max
ctcgagccgctcgagccgttcagccactaatacttcttccctcactgaactctttgtgtgagtttcttatacgaaatttgagtcaaacttagaatctgagacacagttttgaagctaagaaagatggatgaaggagaaatcatcacacatactgctttccctcagaacctaactgcttctgctgcatctaatgatcataacaaacctccttctgctttgaggaggaaaagaaacctcccaggaaacccagatcctgaagcagaagtcatagccttatcac

SEQ ID NO: 100897 - DNA, 272 bp, Glycine max
ctcaccaaaggttcatacatttcctattttgagttgctttcagttttagataatgttccagaacctggtgtagagtggggaggaggagaatcagaaccaggttctggaacattatctaaaactgaaagcaactcaccaaaggttcatacatttcctattttgcccggagtcataggtggtgctgtgtttcttattttttcaagcattggcatatatctttgtaaaacaacggtagctaatgtcagaccttgggccacgggactaagtggaca

SEQ ID NO: 100898 - DNA, 263 bp, Glycine max
gttcccattagtattcttgatgttattctgttttttttttttgtttttgtctgctttcaatgataaagtgattctatagcagtgttcatgttcactctgccacttccaaattccaatattaaactatggccggccacaacatatgcatggttgctacgtttctccatcctttggtctaaaactatcatagccattctccaatggccataaacttaaactagttctactccatttacagaccaccttgcttctagttctagaaa

SEQ ID NO: 100899 - DNA, 254 bp, Glycine max
gaaggaattggaacagcaatgtgagggttctggttctggggttgttgttagtttcggggagattgaggtttttgtaggggaagatgttgatgttgatgttgtaaggttcgttgtttcgggtttaacgaggttgttggagattcgtggtgagaaggtttcgttgctgggcgtggcggaaacttctcatgcttattccaagttcttgggattgtttcccaatgtagaaaatgattgggatcttcatttgctcactg

SEQ ID NO: 100900 - DNA, 249 bp, Glycine max
ctgcaccaacaccaacaccaccaaaagagcacaattttcaaaacccacgcgccgccgtgacgcgcagcctgtatgagtcatcgccgccatgggcgacgtcacctcctcgatcgccgccaagttcgccttcttcccgccgcacccaccgtcctacacggtggtcgccgccgccgagggtggcggcttctcggaccctgcgccggcgccgcggcgcctacgccattccgggagtgccgatcatggacaacg

SEQ ID NO: 100901 - DNA, 251 bp, Glycine max
catgggcccaacctcataccatttacaatgaattattttacggatacccgtgtgttctgttctgttatgttataatatgtaggttttgaggaattaagtgctagtgtgagtccgtgacactcataccacctgctttcatttgagccactttctcagtgccaaaaacactttcacgttttctcatctgaaaatgaggaccatctttggccttcttcttcttgttctgggtttgtttaaatatgcatttgctc

SEQ ID NO: 100902 - DNA, 281 bp, Glycine max
caagaacaagaagaaaacaaacaacacttgtcgcatagcggagcctcttctaataacttgtacttgagtaatagtattcagaacccacctcatcatcactacatgtcagccaccacactgttgcagaaagcggttcaaatgggttctacaaggatcagcgacaacgtatttggctccatcgtgggtaccaccaacagaaacaacaacaacgacaacaacaccaaccttgaggttcagaagctgaacgagttggtgagtatggaagctgggtgcaacaacaa

SEQ ID NO: 100903 - DNA, 281 bp, Glycine max
tcaacacactccacggttctctcaaccctgtttgccacttaggcctagatccatggcctccttcagcagcatatgccactctcggtgagagtcaactgcaaccctataccactcttcagcctatggctgcttggacaatctgcaggagcacaatagcaaattggaaatccagtttcacaaggatcttaggatcagggtattgtcgtaaatttggtagcttgtatctcttctggattgcaaagtagcaggttttccacctggagaattgtcatgctgtgcaa

SEQ ID NO: 100904 - DNA, 285 bp, Glycine max
atagaaacaggctctatgtgagcactctgggactctcaattctcagggttaccttctctatcagcttctgccgattagctggcagtcataaagagagaagaacataacagaagttgttcataggccctggatgttggacatttcttgttaggaatctttgggaatgcttccgctctggtactgttcttcgctccagtgtatgcattacatagctgcttcactgccctctgtgatcacaatcaagaggattatagagtacagctccacagagaagttctcgggcat

SEQ ID NO: 100905 - DNA, 283 bp, Glycine max
aaagaaacaggctttatttgagcactttgggactctcaattctcagggttaccttctctatcagcttctgcagattagctggaagaaataaagaaagaaaaagataacaaaagttgttcaaaggccatggatgttgcacattttttgtttggaatctttgggaatgcttccgctgctgttcctcttcttggctccagtgtatgcattacatagctgcttccttccctctttgatcacattcaagaggattataaagaacagatccacagagaagttctcgggg

SEQ ID NO: 100906 - DNA, 276 bp, Glycine max
cggataaacatggtatcatcgatcgattccttggacaaggcccttcttcccattcccgttgtggttctggaacaaaacccgggttctactcacacaccattaccgttaccatcaatatcatcgtcattcaccactctctgacacagacatggccgaagggttgttgtctcgttgcaggaatggcagggttggggcaccacctccccgctccccaccatggttgcccaaatcgtcgaggatttgaaagttctggaagaagatttagatgcccacatg

SEQ ID NO: 100907 - DNA, 287 bp, Glycine max
gatgaccataaactccacttatctgataccatataacattagtatttttgttttatgttttgtttgttgttacttcgtcgtgtagtgacctcactatagttataaagggttggcaaatgatgtgaaaatttcttatcctatacactgaataaatattgtgaagatcaaaaactccgcttattatctgatgccttccctgtcttaattttctcacttttagttttggttgtaactcttgagtgatttttgtgtgttgtggggtttgaaaaaactttatatgattttgt

SEQ ID NO: 100908 - DNA, 145 bp, Glycine max
ctcaccaccccctccttcaccacctccacctaagccatactattaccactcaccaccagcaccacgagcaaagaagagaccatagtagtagcagtctccacgacctgctcctccagagaggaaagcatactactatcagtcccca

SEQ ID NO: 100909 - DNA, 279 bp, Glycine max
cttgcgtgtgtatgtgcaaagatgaggactttaaaggctcaaagactaacaagtgtaacaagatgcacattcatgaaggtaaatttaagtgttttgaataactagtttgagtgattcaaacaaatttgttaatgtaaagataattaatacttaatccagtttgcagttgaactaagtacactcatccggtgtgacatttctgatttaaatatgtgagaaattgctaaagcttcctaacagtgagtagagttatatattccattagtcataatttctaat

SEQ ID NO: 100910 - DNA, 267 bp, Glycine max
ctcgagccgctcgcaagtcgggtgctctcgcttcaaagacaaacccaatggggtgccccttaaccagtcaaaggtcgcgtctttgcaggaagttggcgattgtgggggcttgaaactcaaccatgttagcgttttggtcaaagggtggacttggattcccgataacttggataacttgtactcttgctcttgtggcttgagctgcttgtggaccaaatcgcccgttctcgctgacaagcctgatgctttgttgtttgaatcttccac

SEQ ID NO: 100911 - DNA, 274 bp, Glycine max
ctgaagcactggaacagatctatctttggaattcggaaggaaaatcttgggaagtgcgagtgcattattttagaaatcgaaatacatggtatgctgcgtttaagagaggatgggaaagattcgttcgtgataacaagctcatgaaaggtgacacttgcatttttgaagttgaagaagaacaaggccattggagtgttcacatattcagaaccggatgtgcaccacattagtttgaatccagtgtctagctttatttgatttatgtcatgctagt

SEQ ID NO: 100912 - DNA, 263 bp, Glycine max
gtgaatttgacttcacggtagcagcagcagcactgacacgtataaatgtaggtctcagtggttgatcattagccacgctactcggcaacgatcatggcttcctctctcactttccattggttcctcttcctcatcctctggatcctggtcctctgctcccacgctcacgcgcgctttttcaccgtcgatccagtctccgacggcttcgccgccgcctcgggctccaagtggcagagcatcctccgcctctcaacggtgctgac

SEQ ID NO: 100913 - DNA, 256 bp, Glycine max
  unsure (1)..(256): unsure at all n locations
tgtagtattaagagcattgcaatgatgatagctatctctgcaacctctatgacttgcttctagtgttcgccatcagtagcattcatcctcaccatgttgaccctacgcgtaacgggganactccctgagtccgtagcattcgaccggaacggtggagggccatatgtcggtgtttctgatggaagaattctcaaatatgctggtccaaccgagggcttcaaggaatatgctttcacttcaccagacagaaacaaga

SEQ ID NO: 100914 - DNA, 204 bp, Glycine max
ttcgatggtttgggtttctcttcctcccttggagaaaaagaagagccaccgctgcgacgccgttcgtgcatttgtgaggtgccgctgtcatgtgtgggcgtggtggaacaaggatgggttataacgccaaatatgatgatatgctcgggatttccaaaaatgcgagtgaagatgatatcaagaaggcctataagaaggcggcta

SEQ ID NO: 100915 - DNA, 236 bp, Glycine max
atttgctttgacggcccacacctatgactcaagaaccacacgtggcagttttctgttccatgctgaactcagcacaaggactttagaagaagtgaaaaaccagaaacagaacaactgaaaacccgagcaaccagagaaagaaactgctctgggtctctgtcttgatttgattccttcaattgctcttgggggttattacaagttaaaaaaccaaaattcccagttgttagggaaaa

SEQ ID NO: 100916 - DNA, 247 bp, Glycine max
aagaaatgcaagtgaggataagcatgcacatgttaatgatggagctaattttgataaaggacggaaacaagacaagtttgggaaagatgtcaagtacagcaattcacatgctcgacttggagaacaggaacaagaggaatggcttaataatgagaagctttctatagaaagtaaaaggagagaatcaccatttttgacaagaagggataagtttaaaaaagagtttatgagaagatttattccttgg

SEQ ID NO: 100917 - DNA, 247 bp, Glycine max
ttcctctgcaactctctctctctcatcttacgtgtttatcatcgtcactcaaacgacgccgtctcctctccgattcctaagccacgtttatcaggtttcttggtgctgtttgtgcattgtacattattatttctacatgttctggttgtgaattatttgcagatctgattcaactacagtgtctattttgacacccaagattgcaagtggcagttatggggcatagacagttccataacacatcttc

SEQ ID NO: 100918 - DNA, 265 bp, Glycine max
gaaaaagagagaggtagagaaaagcgaagagtctctctcttcctatctctctctttcaatgtcagggcacaaatcttccacctctacttcttcttcttcttccttctaacctatatcagaaggaaacgcgaaaaaagataaaaaaaaaagaggtagagggttctagaagccgccaattttaatttcttttaatttgcctgagtcagatacgttcgtgattgaaaccatggattctgcgtgtgtcccaaacggcggcgtttctggg

SEQ ID NO: 100919 - DNA, 262 bp, Glycine max
ctgctacaaacaacagaaagcatcattggttagtggagcagaaactccttcattttgtggatgcttttcaccaatatgttatggatcgggtatgcacattgtattaagataattataaaaataatttctccaagaaaagatttatctgtaaagcacactatatacatgggacatgattaattggcattgaagaaatgatctagcataaacacaaataatagtagagcctgctaatctactaataaaatggcaagttctagtt

SEQ ID NO: 100920 - DNA, 259 bp, Glycine max
caagaggggaggagtaggagctaaattttatgcataagataacaatagctggccacaagataagtagacaagatagcagggaaaaaatcatacatatacttcaggtctttttttcttctttaattcattctgtgttgtagtttctttttcttccgtttctttttgtttattctttccatgagacaaggaaacatgcaattgagtttttttctctttcaccagaaagatattcggatatatttgattggttttacttttg

SEQ ID NO: 100921 - DNA, 259 bp, Glycine max
gtgggtacacaattgaagttaaattaaactgaagctgaaatgtatggaaccgaccattgtagccttttgaaaacccgaagcttcagttccttaatgtacaaaatattcacaaaatagcagccattgaaatgtcagaatgatcatttgtggcgtatcagaattcggtcaatttgtcgtaatcggttaactgaaatttggcagaggtcttttgagtacacagtatttcttctcatttcatgttttcttggtgccgggtgat

SEQ ID NO: 100922 - DNA, 263 bp, Glycine max
gaaaaagagagaggtagagaaaagcgaagagtctctctcttcctatctctctctttcaatgtcagggcacaaatcttccacctctacttcttcttcttcttccttctaacctatatcagaaggaaacgcgaaaaaagaaaaaaaaaaaagaggcagaaggttctagaagccgccaatttttatttcttttaatttgtctgagtcagagacgttcgtgattgtaaccatggattcttcgtgtgtcccaaacggcgacgtttctg

SEQ ID NO: 100923 - DNA, 262 bp, Glycine max
ctcgagccgttccaatctcaatttacatggctatttatgtaccaagattttgtggcagttcgcgccatgccttatcatgtcaaaacattctatacaacttcatgaacaacagggatgaagtatgttcatgcatgacggcttaagaggatatccatcacgttccaccattcttcctctacaatttttttcacagcagctgcatcgcggaattttatgtagagtcagcaaaggtgttcatctcagtgtgataagtgtttccttt

SEQ ID NO: 100924 - DNA, 267 bp, Glycine max
catcaacccctcgacctcaacctcaacctcaagactcatcctcctccaagaggcacttccactggaccaacaaggttggaaatgaagacccccaactcctccccacttcagaaacaatgtccaaaatcatagaagaagacacaaacacaaaggaagaagaagaacaacaagaaccagaagatgacaaggctgttccacttcctggccctgcagccacttctcaagcagcagcaacaaagagaaagcttcaagcagtggcaatctcaa

SEQ ID NO: 100925 - DNA, 261 bp, Glycine max
gataaatttgaaagcttaacatagcaagcatcagaccatagatcttcggtttgcttcttcatacaagcgcaattgctccaagacaattcaacttcgaccctccaacgccaaccacgaaaactatcacttcacacagggcgaggttttgcttattccctgtttggttgctcagaaaataataacggaaaggggcatagttgctgacgacggaagaattttttaactccgtgcgttcaatgaacgcacatttctgaaatctgc

SEQ ID NO: 100926 - DNA, 253 bp, Glycine max
gtgagagaaggtgttggtttggtttggcgagcgagagcgagaaaagaggaggaaacaatgggcgaggtatctgaaagtaccacgacgaagaggaagaagaagggacgcccctctcttttggatcttcaaaagcgatctctcaaaaaagaacagcaaaatcaccaccagcagcgacaaagcaacaactccaattcagccaattcccacaacaacaagaacaagaccaacaaaaacgctgttccccacgacgacg

SEQ ID NO: 100927 - DNA, 219 bp, Glycine max
taagaatcataattgatggttggaatagagttagctgcaaccatgaagtgcatctcagttacctctgcttgcttccttctttgtctttgtgcaattcgaagtgtgtcaacacaaaatgctatcatgcctccaagaggttggaactcctatgatagctttaactggataatttctgaagaagaatacttacagaatgttaatatagtttctcagcagtta

SEQ ID NO: 100928 - DNA, 206 bp, Glycine max
cgtgagctacgactgctcatggaatctcacctcctggcgcttaagtaattagccaacatggcgctgggcaagaattcccgaggtgaggagaggcattgtcgaactactgtgcacggtctctgcgtgtgtcgttgatgttgttagttgcgatggatgtaagcatcatgtgcattcgatgcgcttcgggctggctgtacatatgatgt

SEQ ID NO: 100929 - DNA, 270 bp, Glycine max
aagaagaaagccagtttctcagggaatggagcagtggaaaatgcactagattttcccccatgtttctcgggaacaaaaataaagaaaaagtctaaattccagaagcacttcagtttctttgagcgttctcttggtggaaaacaagcttcagaggaaccaggtggtttcgatgaaggatggaaatgataattttatctgtagcttgtgcttctgctgtggaaagaaagactaggtctaggggatgtcagagtagatgctgttcaatgacaa

SEQ ID NO: 100930 - DNA, 262 bp, Glycine max
  unsure (1)..(262): unsure at all n locations
ggaaatttctgcacaaaagcttctctgggatttggtgtagagtttaatctacattttttatattagtgtttttaatatattttttaattatttcaaaatgttgttcactcaagcacagacttagaaatataatttgttttcttacttagatatgttttgttttagaagatagattcatccactctagacagaacaactatgacanacagacgaagatacacatgaatggcagagagtggtagggaggtggtggtgtagtaaa

SEQ ID NO: 100931 - DNA, 242 bp, Glycine max
gaaatgttgagagtggagaaatacttgtggaaattgagtgggttgatgttgttggttgcaagggcttatcagaggtagaactttaagtgtgcttccatccttgaggttatatgaagcattaagagcttagatgccagctccagcataatgtagtgtggtaaattaatgtattgtgatgaaacctatgtgacactagtgttgaatgtgtaattctaagttgaaactagctcttgcactttatc

SEQ ID NO: 100932 - DNA, 242 bp, Glycine max
gtgttggggctctaaattacaaatgtttccttcttttcttgttctacacttttcttgagacgactctagtgactgcatccttgctgccacatttcataacattctttagcgatggagaaattcctggaacacctggctctcttgctacaacttttcttgcttttgttttaaacctagcctttgcactgagcgtcttaggatttctcatcatgcacatatctttggtggctgctaatacaacc

SEQ ID NO: 100933 - DNA, 248 bp, Glycine max
ctttgttgaaaggcctttgtttcttaaaatattattattctttaagtgccatctatctccgaagtttgaactaagatctagcagttccttagactctgtcaaatggtattttaccgaacattgtattcatcaccatgactagtcattgataataaacttggtcatcaaactttgttgaattacatgattagttcaactaattagtcacttcttgaaatggttgactggataaataaagatatgacatg

SEQ ID NO: 100934 - DNA, 245 bp, Glycine max
cctgaaccgattctctgaagtaggtttttcttcttcaaatctgttatcttttttctttcagatgttggttttgttttcttcaaatctgggtttttgtatatatgggttttgaagatctgctcttcaaaggtgttgtgcctcaacaaaggcagcagaaaccgtaagaaaattcatagatctgagattttgtgacagagaggtgatggacattcatagattcaagtttttatctttacagatttggg

SEQ ID NO: 100935 - DNA, 239 bp, Glycine max
gaatccggaaagggaagaagaagaagaagaagagagtgggttgggttgcgtgccccgttccgttcgttcttcccctttcctttcaattctttcttttcaattctttttcttctgaacacagaaaaaacagaagatgggaatgaaacaagtcattaaaaacctcgacgcctttcctcgcgccgaggatcacttgttgcagaaaacccaatctggggctctcgtatccgtaattggtctca

SEQ ID NO: 100936 - DNA, 239 bp, Glycine max
tctcgagccgattcggctcgaggtattggctttccgaacggtgttcagggttctagttggggagctggtcaagttgtgaggcatcttggtcctcctgaaatgcttgctcctaggttggccagctccggcacattgccaaagctggccaatggtgcgaggcatgactttgtgcataacaactttgagcagcaacggccggtacagatgcaaattgatttctcaggagccacttcgagggc

SEQ ID NO: 100937 - DNA, 208 bp, Glycine max
gcgaagctcatctctccgccgcggcgtcgttttgcgccaaccgttccaggaagcttgcggattttggacgagtcaacaaccataaccgttgattttgtatgacccgacccgacccggtgatgtttcatccttttgtttccggttttatgaacattcttcatttcatttcttcagcgtaaagggaaaaaaaaacaaaaaagggcggccg

SEQ ID NO: 100938 - DNA, 228 bp, Glycine max
aatacaatgagcaatcggcttgagtaagttataacggaaaacgagggaagcttcccacaacacgcaagtgtgtgccttgaattaaattaatagaggatgaaattctagtttaaggaaggttggttggttgggtgggggtaggagatactctcattcacctcccatcatcattataatcattcattccaacctacccttattcttcttcttcaatttcacacccatcat

SEQ ID NO: 100939 - DNA, 265 bp, Glycine max
ggccagtgaagcatctcctcgcctctcctcctccaggatggccatcgacagcgtttatacttcgtctccaccgtttcagagcggaccatccggccactcgcgccatttctaccttgcagtcgacaggctccacttcaaaatcaaacggtgattgaactcgtggatctggtggctcgacgtccatgcttgcccatcgtggtctgctgcagcacgcgcgacgacctcgactctctctgctcctctctctccactctccccttccttt

SEQ ID NO: 100940 - DNA, 212 bp, Glycine max
gccgaacttcgattccaaataatctttcactcttagtgatttgagctcaagcaacatccaaaaaatgcttttggacaagaatgatattcaagaaacccattatgaggttctccatgtcaaggaacatgcaaattatgagaaattcgggctagttaccgaagtgttgtaactcagcttacatcctgataagctattgaagacttccaagacat

SEQ ID NO: 100941 - DNA, 142 bp, Glycine max
gagtactgattctgaagacaggtatgatagagacagggagaagctcaaagatacagataaggatgtggaccgagaaagaggtcgagacaagaaaagggaaagggacagggaaagggagaggactgacagagtaagagagaag

SEQ ID NO: 100942 - DNA, 265 bp, Glycine max
cttggatctcattctcctaaccctcctccatggctccttcgttatctttgtgctactccttgtgatcctcaccatccttttggttctcttaatcgcattctccctcggactcttctcagttttcctatttgatttgcaccattttcatcaatcattttcgaatatttcagaatggtaaaggatgatcttcaattgggtgtagttcttgctctcatttccctcacccatcaagctgttgattttgtaatgggttcaaaaacgtggc

SEQ ID NO: 100943 - DNA, 262 bp, Glycine max
gtctcgtttacacatctctccaacctttcactttcgtttctcagttttattcgaatccctctctcaatctcctttccaaatggccagcgttgaggttgcacagcaaacaccaacaacagttccagaaaatgaaacaacgaggtaagcaagacccaggaaacaaccccagtcactgaggctcctgcaacagaacaaccagcagctgaggttcctgcaacggaacacccacccgtgaggctcctgcccaagattcaaccaggga

SEQ ID NO: 100944 - DNA, 263 bp, Glycine max
gttgatccagaagtatatgaggctcacaaggtataaagcattggcatgttaaattgataagtatgcagatctttacaaaatttgtgatataataatgcacaatttatattttgggtgatggcacaataaacatgaaagtatagctaaataaataagtttctttgtagaaaagtaataaatgcactgatatttgctttctatgaatctatgcactacaacaacaacatcagaagccttgtcctagtaagtgagtctggctacat

SEQ ID NO: 100945 - DNA, 266 bp, Glycine max
ctattcgtggtgaaaatagtgttagatatggtatgcggcagttggttccgcgaatttaagtcgcgtccaatgtgtttgatgaagtgtcccacttccttctctgctttattttgagcacttaaactaattttagtttcacttttaccgttgcctctgctctggatttcgaatggaaggtgcaatccagtatagattgttgggtcagttatggcagcgttgatttccaaaagaatcctacgttgttcttcttggtcattgcattcact

SEQ ID NO: 100946 - DNA, 274 bp, Glycine max
cggctcgagaattctttggaatcagactcggcaacgatgggttggaaataaaaagctcgagaaccgaacacaacaattacgagaacctaaattgaagtaacttacattgttggattaatttattagcagcttcttaattttttgtaattgcaattttgtttgtgttaggtttcttgcaaatccatttttctataagtttttgttctttttccttgtgtgagttttatatacaagttgacattgtgattgtggttatactgttgtacatttggaa

SEQ ID NO: 100947 - DNA, 282 bp, Glycine max
tattaattagcataagggaagtgaaaattaaaattaagtgcatccttacttttaattattttcaaaacaaattatttcagacttgcacaaagtcaagatgatctagaaagtagacaaaaataattataatttgatcagcgtgagatgcatcttcatcttcatttcattagtcgggcacaagaaacaaaagaataattgatcatatgatattttttaaggacaattattaaaaacttaactatttaaattagttaattaaatgcatagtatatatgaatatca

SEQ ID NO: 100948 - DNA, 267 bp, Glycine max
caatatttggaaagcacgtgtacttgataatcagttgccatttattttcttgaaatttatgttacagattaaatggatttgcccaactgctcctacacggcctgtagccttatttggtggatttccttgcactgcttggtttgatgctggggagatttcagaagaagctcctagtgatttggaggggttagatgcttctgcagcacacgttgccaatcttttgtcaacagagcctccaaatatcaaacttggtattgggggcttcag

SEQ ID NO: 100949 - DNA, 270 bp, Glycine max
aaaagttctacagtgatttcagaatctactgccccattaacataccctcaacatcagaagctgcaggggtacgtatcatgagaaacatgtgcaatttcggattgtactacacactctttgtgtggatcatactcttcataaccctcatccctcagcgtaaggtgtcattgattctgtttgtcatcatgacctatgtgacaaccctttattttttactcttgagggcatttccaaactctgttgtgcttcacagaatcatagacaaaagag

SEQ ID NO: 100950 - DNA, 265 bp, Glycine max
tgacataatctttccttttctatgttcatcttctcttcataatgatatagatatgccctctttttccataaaggttttaaattatatttggggttgcagtgtggtgctgcaattgtaataccaatggtgtggatttgagaatgttaactgcctagggtggcattcaaagcaccacacactgacaaggctattgatcttctgttttatttctttaaaaccaatggttagaacaatgctttgtttttcttatttgtgaatttcatct

SEQ ID NO: 100951 - DNA, 268 bp, Glycine max
agaattcagactgttaacaaacaaaagaaaaagatatttgaggcgactgcatcaaaatggagacaattaaataattggagaacatcgcaatcccagcaacatttccactttctcacccacctactcttctcctttctcttcttctgctgctcgatcgatcgatcgatctcgtcactctcttagctaccatggcgactgagaatcctttcaatagcattttgacgacgctcgaaaagcccggtggtgctggcgagtttggaaagtactt

SEQ ID NO: 100952 - DNA, 275 bp, Glycine max
atactgatcactttttggttttatgctctttattttttttaatttaattttttattgtattatgattgaatattcttacttgttgacaattggcacaacaagaaaactcatgattgttgcctatttctgctgaacactggtcactttttggttttctgctctcgagtttttctttctttttaatgttttgtgattgaatgctctcactccatgacagttgccacagcaagagaattcatatgattgtggtctatttctgcttcactacctagagc

SEQ ID NO: 100953 - DNA, 218 bp, Glycine max
caaatcctgaacagctaagttaatgtaaaatccggaattgtgaagaatggaatgatggcggcagctcattctctgcctctgtaatgtccaggagtcaggacatcagtattggtggcagctcacctacttgtgacgctcaatcacctacgttcagttgcagatcatcatgttcctcatgattgtgtggaaacagtcactccatgtctagtttctggtgg

SEQ ID NO: 100954 - DNA, 193 bp, Glycine max
  unsure (1)..(193): unsure at all n locations
acgatccagctcgagncgctcgagccgggacgatcgggtcgcggcagaagacggagaatcgcgcggcacgatttgggtgacgggtgcacgtgtttgggaacggagacgtttacgaaggggagtttcaccgagggaagtgttcggggagtggggtgtattattacagcaggagcgggatgtacgagggtgattg

SEQ ID NO: 100955 - DNA, 259 bp, Glycine max
actttattacctaaaatctccgaggaaattgttaatactgctgatgcaagttctgaaattcaaaaaagcattcaacaatattctccttcatacatttcatcaagtatgaaacccaactttgaaagatctttacagcctcaagtgactcaagaggatagcatgactcaagaagatggcacaagagatcagagatttaataaagattctctggagaaagttagtaatgtttctaaaactggagttctggatgacaaagaga

SEQ ID NO: 100956 - DNA, 266 bp, Glycine max
gttctttctgccctacgccaattttgtttttcgccttgtatctctcccaattcctcagtttccttctttcttcatctttgtgtcatggccagaggttcttcccagtctcagtcctccacttcaacagccacgtgaccaggtccagcaggcatggctccccgcggttccgccagcaccggcgttggaggcggcacaggcacgatgctgacgttctacacggacgacgcaccggggctgtagatttcgccgacggtggtgctcgtgat

SEQ ID NO: 100957 - DNA, 269 bp, Glycine max
atatacttgggtgatcttgctcgttataaaggaatgtatggtgaaggtgactcaataaaccgggagttcactgcagcttctagttattacttgcaagctgcatctctttggccttctagtgggaacccccatcatcagcttgctttgttggcttcatattctggggatgagctggtggctatctatcgatattttcgtagtctggctgtagatagtccatttacaactgcaagagaaaacttgatagttgcatttgagaagaatcgtca

SEQ ID NO: 100958 - DNA, 245 bp, Glycine max
atttcccttctttgtcctcctctggctctctctctctccttctttccaattaatgttccccactcctcactttactgaatttctagtcctcactcttcagtagttcagtttcagtctctcctcatttaagaaatcccatgtaactttccctttttatgtgttttttttaaattcaattttgttctactcattaattattaacttctggggtgtctatttcacacaaaaaaaaaaaaacttctggg

SEQ ID NO: 100959 - DNA, 251 bp, Glycine max
atggcgggtggcaaagaagaggatgaaagtaaatctgctattaagtggacagaggatgaccaaaagaatctcatggatctgggaaatttagagctggaaaggaataaaagattggagaatcttattgctaggagaagagcaaggagattgatggatgagaagaatctaatagacttagattgtgttgatattccctgtaatgttgcacctattgctacgaccaggcataacccatttgattttcctgatga

SEQ ID NO: 100960 - DNA, 198 bp, Glycine max
gttggttgtgactgttcgcaagggtcatgtcccctttcggttggttgtgactgttcgcaagggtcatgtccccttgattcacatcttctgaccttgtaccttttgggtgaatcgtaactattgggtggtttacaccctttgggtggtttgcaccccttgggtatttgcgggttacaccttggtgatgtgtggctaatg

SEQ ID NO: 100961 - DNA, 258 bp, Glycine max
caactttctgccttcttcagcagcagtgtgtcaaaaacttcatatcattcatggccaagccacaaaatacaaaacccgggtgtttctctttctcaagcttcctacgcgtgtttctatgtgctggaaatggaactactccaccagtgcacccttatcacattacagaatcagaagaatcagaaaatgcacatttcaccaaagaaaaaatggtggtgaatgataatgatgatattgcttctgcccctggagtggtggcaa

SEQ ID NO: 100962 - DNA, 254 bp, Glycine max
ttaatacctatggctaatagatctaatttcaccatttctcctaaatttttcattggaagaaagaaagaagaagtgggatgagaaaaaccaggaggaaattgcaaaggctgtaaaacagcttacagattttgatcaggtattcaggttcattgtaaaatttgcttgattcttcttatatgccattacttcaaaccacacatatgatctactcataaaaattgaaaatttaatttagtaggctttgaatattgtag

SEQ ID NO: 100963 - DNA, 255 bp, Glycine max
gccggtgttctcggtttgaagtcttttatgtgttcttcgggaattagtgactttcctttgactactattcaccatatcaaggagggattgtctgtgttagcaaaatatagaaggcctttacttgtgcattctgagattcaacaacattctaaaaaacatttggagcttaatgataaaggtggtccgcgtgcttacttgacctatctccacactaggccaccttcatgggaggaagcagccattaaagaacttgta

SEQ ID NO: 100964 - DNA, 203 bp, Glycine max
cacgtttcatcatcctctcgcaatcgccaatactccgatccccaaccagagaaaacctaagctaacaacaacatgagttctgattctccatcccatacccaagctaccaacaccaaaccggaagaatctcaatctcaatctcagtctcagcctcagcgtcactccggcgattatgctccataccctaaactggaccccaccga

SEQ ID NO: 100965 - DNA, 236 bp, Glycine max
caaccttctctttctttaagattgcctcaatttcggatcttgcacctctgggtcgctttgctttgctttttcctctactgggttgatttctgtttccctaaaccggtttagacgaatgtgaacactacttcttttgtttaattactctggaatacgtgttaggctttcagatctagttgaaatcgtattgcactttgagggggagtttggatttctaataagaaattgcccttttg

SEQ ID NO: 100966 - DNA, 228 bp, Glycine max
tctcgagccgaatcggctcgagcgtttacacatctctccaaccttagcatttcgtttctcaactttattcgaatccctctcacaatctcctttccaaatggccagcgttgaggttgcacagcaaacaccaaaacagttccagaaaatgaaacaaccgaggtaagcaagacccaggaaacaaccccagtcactgaggctcctgcaacagaacaaccagcagctgaggtt

SEQ ID NO: 100967 - DNA, 241 bp, Glycine max
ctccaataatttccatagccagcaaaagctatacttgtggaattgtaagacattatttcaatagctagaactttaggcctaaaacgcgtcaactcattccagccaattagagaagttgagctcttcaatctgtcaaatggattgattcaaagaaaggatcccccatcaacctcactgaagcagtacttacatcaatttacacaattgcttcaagggctgcctttggcaagaattgcaaaga

SEQ ID NO: 100968 - DNA, 224 bp, Glycine max
ggctcgaggaaggagagaaagagaatgaagaactagaaagcagatcaggtagttcccagatagagaaacttgaagaagttgtctgcattgaacaaggggaaagtaaagaagaaagtcgtaatgttgaagctgaagagttaaggaaattccacacaatgtaaacaaagagcctgcacaggcttcagaaattgaagcaaaatatgtggcattggatcatccaaagg

SEQ ID NO: 100969 - DNA, 200 bp, Glycine max
caagaacaacccttctccttcttcttcttcctactcctccgtctcctactccgccgtctccgctcccaacaaaccccatggccgcatccttgtcctaacccgacccacacccaaacccgtcacgccccccacccgcaaccgcaaccaccaccgccgagcccgatccagcacaaccacccttggttcgaaccgggatcgga

SEQ ID NO: 100970 - DNA, 223 bp, Glycine max
aggtcatgaattgttgggagttctgaattaagatggtcacacagaaacaccttttttttaacatatatttggtatagtttgtgtttgctaaatttcgtagttgtccttatatttagggctgaaatctgattgctagattttatatggtattattgttagcttctgtgagaatgctaggttttgaaagggtagttattattacagtattactattactatttac

SEQ ID NO: 100971 - DNA, 123 bp, Glycine max
atttaacgatatataaaaccatcagtatgagcaaggggtttactctctactcattctgacccttcttcttactcttcatctacattagtagttctagtgatacattaatctgcaaactcgcac

SEQ ID NO: 100972 - DNA, 235 bp, Glycine max
ctcgagccgtgaatttagtctcagaattttgagaaagagttctcattcagtggtgttaggggacctaaaaaagttacggaatggcacatcaaaacttgggcaccaaattaaccacttgtagtagagacaataaaatcaaccgaaagattcatcaaaagctgttggagagtgttggaatgaaaaatcaaggagtggaaaatggccaagaagcagtggacattcattgccatggaca

SEQ ID NO: 100973 - DNA, 230 bp, Glycine max
aacaaataataataattattattatccatcgtagatccactagtatatagtatatattacagattcactagtttattttatcattcaggaatagttgtgaaatcgtggctcaccgcaatgttcaatgcatgcattccgcacaatttaggaaattctcctctacacctctaatttctgactgcatatttgtagttgctcagcctgttataatttctaaattaaaaatatac

SEQ ID NO: 100974 - DNA, 187 bp, Glycine max
agctccgcaagataaagaaaggtcttagaatacttgcaaacacacaaacacaaaacaccctttttccacgcaacataggatagagatcaacctcagagctgtgataacttgttccaatgagcatgttagggtgagagacctagttctcatagctcaaaccccttattcccttcacgagcaacaccaa

SEQ ID NO: 100975 - DNA, 272 bp, Glycine max
tcgacccgttgggccgcgctccagctgcaagtcctatccatcgcgttcgtcttcctcttctactccctcctccccctcctcagcctcagcttcactctcccctctccgctcctaaacctcgtcggcgcgttcgccttcgccgaagagtttctcttgttctacctccagcgcaaggacccattggggtccgagattcgtacatacgatcccctgctggtgcccatcgccgtgtgcgtgttctgcacggttctggagctgggatcgccgcgctc

SEQ ID NO: 100976 - DNA, 271 bp, Glycine max
cgggatttcggccgtttgctccccaaaaaggtcttccctttctctctcattcactcactctgtcacgaaagaagtagattctgtcctttgaaatcaacaagaaaagatgtcaggtgaagaggtagctgttgcagttgaggtacctgctacttcaattccaggtgagccaatggacatcatgactgctctacagcttgtgctgagaaaatctctggcctatggtggtcttgcacgaggtcttcatgaaggtgccaaggtgatcgagaagcat

SEQ ID NO: 100977 - DNA, 100 bp, Glycine max
atgccattgccgacggagtggatgtgttgtcgctatcgctgggcgtattacctctttcccgaccaaagttgacatccgacacgattgctattggagcatt

SEQ ID NO: 100978 - DNA, 278 bp, Glycine max
cgtattatgacgcaatggttcccgttttgagtggaccccgccatagaagagttttttgggaatgaaggcctttgggttcctgtttgatttaggtttggacaacgcttctagtatggagtgtgtgaccgaaagtctatggctgtgctcaataacgttcgtgggatgtatcaaagttgtggtgttcagttgttgatagagatgtttggtctttcgggttcttctgagatactcgagctcctgataagaacggctgggaggaaggtgaagcattatcatgt

SEQ ID NO: 100979 - DNA, 147 bp, Glycine max
acagaactggagtgagcaagttgagcactcagtcacgtagggtagaatcgtgtcgtgttgattggtgttttttgcggtttaggcgattggaaagatttcattggataattgaggaaacacaatgagtggtccacctcatgatgatga

SEQ ID NO: 100980 - DNA, 271 bp, Glycine max
agatatttgtatagagccgccaatcgtaaataggttatcagattttatggcacctaatcaattttgattgagatgtcattgtactaagaaacctcaattttttttattttatatttttttctccctacccttttcttttatttgaataagatataggagtataatggttgataaactcttccaaatatctaatacagttgaatatctaatttcgtacttaaaatacagctgcataaccaatttcggacgtagataactttttctgtttagc

SEQ ID NO: 100981 - DNA, 276 bp, Glycine max
atttcacccaatgaggcggttactgaagcaagaccgaaatccaattggaaagtgaataaggatcctgtaaagggtaaacctttttcccgtggaaaatctgcgtttccttctgggaggtttctgccacggaatgcaggggtccatgctgaaacaatattacaaaatggagaattacatacggatttaagtgagaatttggaacgtgggagaggaaacatgtttgctacggtgacaaatactactgtggagataatagtttctgaacacgtctttggt

SEQ ID NO: 100982 - DNA, 268 bp, Glycine max
cagatattgtggttacggtgacggtggttcacgctactctcgtggtggcgatgtcaatggaagccggagaaactagagctggatgaacaagattagggtttatgattaagttcagtaattttaggtgtcgtgtggtttgggtgtctgtcattctatctctttgtgtacaatcgattgaatgaaatgataatcggagaagtattaaacagaaaaaaaaaaaaaaaaaaaaaaaaaaaaaaaaaaaaaaaaaggggggccccaaaatttt

SEQ ID NO: 100983 - DNA, 212 bp, Glycine max
atcatcccttcatgttcttcttggccaagtccatccccatcaagcaccgacgtcgttttcagtaggtcccactcgttcgtgggcccctgtcctcagtttgtcgcttcatcgaggcctctcttcttcctcgaatagtaagaggacgagggagaaggaggagagttaccatttggtcgcgaccccccaagaattgggccttccgatttccatat

SEQ ID NO: 100984 - DNA, 208 bp, Glycine max
acaccaccaccgaacaaaccagcagctcacaatgcaccagtgggatccaccggatcggcgcgttccagcggcttccacggcggacgagatgaagtcgacctggagacaagttgaagcgtttctagggttggacaacatggggtggtcgagtgcggacaacatgggatgcgcgctgtggatggctgcgacgacgtgcgtgtggtgccca

SEQ ID NO: 100985 - DNA, 242 bp, Glycine max
gatagagagaatgtaaaaggaggattgaagggtattagatagaagatgatagtaaaaggatattggtgattttataaatttggatgaatgtagttgaatggttgtgaatagagaatcggaaggaaaagtacgagatttggaatgaggggttatttcttgaatggtagttggctaaattgggatcagtattgtgtgattatagttgatgatgtgagaaatacacgtgcaagtggtgtcttgtg

SEQ ID NO: 100986 - DNA, 249 bp, Glycine max
ctgaattcgactcccgaaaaagtaacgataacaacggttacggaaccgaggcaggggatcttctctggaattataaccccgcgtatcagcctcctcaggtgtgggattttcagttacaaaaatcaagagattgccatgaaccaagagttgtaacatttgatggtctagaagttccaaaattatttcaggatgagcacaatatgaagtactcaacaattggtgatgacattgatattctatcaagaaata

SEQ ID NO: 100987 - DNA, 246 bp, Glycine max
cttatatgattatgaaaaccaaagattgttacttgatattaataggaatagagaatgcttagtagttctgaaactataatttgatcaacaacagtgcaagtatacggccgtgcctccagaagtcccctttaactgttctatacactggagattattgatgatgtgtaaatcagttaagcattattccatgactcagttttgacatcactgcaatatctcctattgaagatgtttactttccagttt

SEQ ID NO: 100988 - DNA, 247 bp, Glycine max
aggggtcttaagacacccatgtatcgttcttgctaggttacacctcaaaagttaaactttcctaggaataaaaaagaaaaagacaaaaaagaagacgacaaaaacatggttcgagctggggaacaagagcaggaaggttacaaggccaaactgtttaatttctgagggttatttgagggcactggtaggcttactaagagccttaacgttgacactgataccgtattggaacctacagaagatggag

SEQ ID NO: 100989 - DNA, 233 bp, Glycine max
gtcagcatatcggtacgagatagttcatactctcattgtggctatcgtgctggatgagcatgtgaagaaagccatgaatgagattactgctggtatgtttcctacagttttatgcacttgcttcaatttgagctattcgtatttcctttttaagcatgctaacaaaataaatgctagaatttagtgtggtgtctggagattacgctgctgaaattacggtttatgattggaga

SEQ ID NO: 100990 - DNA, 258 bp, Glycine max
gagatcatgttgcagaactattgaaagctgtcaatgggaacttccgtagtcatccttgtctcaataaacaggtaaagttctggttttcaaaaagttttgaagtggataaagaaatttctttcatataaatctctgaatgacttcttcgtgaattattttactgcagaagctactatatgcaccaatgggtaatctgctgattctgcagcctgatgagaagttttcaccaagccatcatctcctgccatcaggcagtgg

SEQ ID NO: 100991 - DNA, 252 bp, Glycine max
ctcagcagcctaccgtcactgatatcctgagaatagataagtaccttttttccgtcattattgtcccttcttgaaaactggtcatcattggtgatgttggactcatcttgacaccaccccacttccatagtctgctcctatctgtgcatcttctacttgtgctccatttctgacttctgggttcctcctgttctcttcgtgcgttctaagaccatgattcttagcatgcctccatattttgtatcaataagt

SEQ ID NO: 100992 - DNA, 251 bp, Glycine max
acggggtatcccaattaacaatgataagaaggacaagtgaaatacaacattcatatatggcctaagtctgtcaaaggtatggttagaactgtcgtctctgctcatttcatttcttctacagccctgtgtccatactgtctaattaatttataatatcgaagttaagatgtgtgtggtgaaatttggtacgtttttttggttttactggaattggtagtttaagatgaacagataccattaatcaacagcaa

SEQ ID NO: 100993 - DNA, 251 bp, Glycine max
acacaatcttcttcttccacatttcactctcgtccattgtttccctcataatcattttctcttctattacaattctctttccctttgaaaccactttttttcttcttctcttgtttccttttatccattgcgttcttcatttgcacttgaattttccttagtttgtaaaagggtgtaaattggggaagaaaattccatggaatctaaatactttgactccaatggggaggtctcactaaagcaaaaatcaa

SEQ ID NO: 100994 - DNA, 253 bp, Glycine max
tcgaagacaactctgtgacccagcgtcccatttggtcttcacccagagttcaatcgtaggaactgctaggggcttttattttgcctttatcgattttcaacacacggacgaaggtaacagcttggttgcggcttcaatatctgctaaccaaacccttagtcatctgggatttaaagggttggtgttgagcagatagagatgaacccgccaacactagtgaagcgcactcagaacatcaatgccagagaagctg

SEQ ID NO: 100995 - DNA, 251 bp, Glycine max
cgcaactcagttgtcgcctgacgcggagtgtcaaacgaaaagcgcgcgaactttgacattttttttttcttaattttttttaatcgcgtggcactcgtaaggtgttaatatgaagtacctggttgttttggctgtattcgctctggcttttgccgcagaagagaagaaagaaaatgacgcccctaagacttttcagcggttgatccctgctgatgttcttagagacttccccggcgtctgtttcgcgtcca

SEQ ID NO: 100996 - DNA, 257 bp, Glycine max
attcgaactactctgggtttcctctcttcatcactgaccatcacctcatcaacaaggcacatattccagatagtgaagaggaaagtggaaaacacagtcttaagactcagaatgtgaaagggaagaagttggttataaatttgggagcgcggaaaattaacgtggctagttccccacggtctgattcatcaagctgccaaaaagatcaagatccggtgactgttaatggaaatgaagatagaagccaatggaggaag

SEQ ID NO: 100997 - DNA, 250 bp, Glycine max
aagacatgaagagagctttaaagaatgccaacatgaagcctctaagccattcaacatatttgagattacaagttttgtgtgagagtttctatgacgctgatgagaagctgcattatctaaatgatttgtttcttgatgatctgaaggcatttatccctgggcttctctcccagatatacatggagggtctttgccatggaaatctgtcaaaagaagaagcaattggcatagcaaaaatatttaagatgaa

SEQ ID NO: 100998 - DNA, 247 bp, Glycine max
tgctggcggattctggagcagaattggcgagtgctgaccctcgatcggttcactcgtctttcaggttcagcttctgctctcaggttgaggttgagtccttcaacatgagctattctgcttctgctgctgctgcaacctttttgatggtgaatttggactatgagtctcaagtgaaggagttaaaatggaggagaatacagtcaccggagaaaagcttgtctccggtggccaacactttgatcaggtt

SEQ ID NO: 100999 - DNA, 244 bp, Glycine max
ggtttatgcaaatctggagaaatcttggatgcatggaagcttgttgatgaaatgcattactgttgtcaaccacctccagatgtaaccacttacaatatcttgttagagtctctatgtagaattgagtgtgttgaaaaggcaattgcattttttaaacacctcatctttgaaagaagttttgcacctaatgtttggagttacaacatcttgattagtggttgttgcaagaatagaagattggatg

SEQ ID NO: 101000 - DNA, 248 bp, Glycine max
ctttctcttctctgaatttcaacgaccatttcatggactctcttactctatccctcactcaacgcatcaaaacactatgggcctcggtttcggcttcgggctaaatcccagactcagatattgtctgcttcttcacactcctcattccttcaccaattcacctctctgcctttctccatcttctgctggagtcagggaaacttgtttcaacttcacgaggttatctttcccctcaacattttatgagg

SEQ ID NO: 101001 - DNA, 131 bp, Glycine max
acactttcagattcaaaccctccatctctcatcacgcaaagcagcttctacattcccaacgctcttctctaggctttctcactaaatttaaaaccacctccggagcgaattctcggcggctggttcagaaa

SEQ ID NO: 101002 - DNA, 273 bp, Glycine max
agcttgtgaatcagcaccacattcacctgagctttttgtgaggattccaaagcatggcttcccttgcagcatccactgctgctgcttcccttggcatgtcagaaatgcttggaaaccccatcaacctcagtggtgccacaaggccagctccatctgcctctagccctgcctccttcaagactttggctcttttctccaaaaagaaggctgcacctccaaaaaaagctgcagctgctgctcctgccaatgatgagcttgccaagtggtatggtc

SEQ ID NO: 101003 - DNA, 135 bp, Glycine max
ctcttcttcgtctcaaacctctgcgttccttcgattcgttccatttcttccataatggacaaagacccagttcgcgtactcgtcaatggagtcgcaggcaaattcgatatgctctagtccctatgattgctaggg

SEQ ID NO: 101004 - DNA, 246 bp, Glycine max
gcagagcagggtcatggactggctttgttttcagtggagtttcttggcgaagaatagttagccttgtaactttttcgctagcgattaatgacaaggaagtcacttaccaatatgaaaccctgaaggctggaactgttactatgttagtgatcaatccatcaggctttgtgcaacgtttgttatggtccgaacggactgggaattgggagattttatcaactcgtcccatggatcagtgggaatact

SEQ ID NO: 101005 - DNA, 264 bp, Glycine max
atggggagttaccctatcgatatgtcaccctggactccctcttgtccgcgccaaaattaacatattgccaacaacttcttctacattcccttccatttctaacaaaaattacataataatatatcaaaatcaaaccttatttttagttcgttaagatttatattttttaaataaaaaaaattaatgcgttgattgcagatttgggtcaaaaaattttgtattgcaaaaatgtgcttatgtgtttggactttgctgttcgccatg

SEQ ID NO: 101006 - DNA, 117 bp, Glycine max
gtactaggtatcattcattatgttacacctattaccgtggaatcattcattatgttacacctatgtatctgtaataaaataggtgtgacatactgaatgattccacggtactaggta

SEQ ID NO: 101007 - DNA, 241 bp, Glycine max
ctttcacgcactatcaaattccgacactactgtgtgtgtgctacattgatcaaggaagttgataaggagccagttcagttttctaccttaacgacagaaaaaaggaccgatcaaattctatggctggtgctgtaggtgtcgtgaaggaactaaggaggcgtttgtttcaagttataatattgtattggttctctccctcagatcaaaatagagttcggagaggtagcattgttactggcaa

SEQ ID NO: 101008 - DNA, 126 bp, Glycine max
ctcagcaattgagaccccagacgtgactgtctcaaagcagctaatgaggatgcatgtgcacaaccttctaaatatcttatgcccaaaagaaaggggcataatcaggctaagatttggtcttgagga

SEQ ID NO: 101009 - DNA, 261 bp, Glycine max
gatgaaacagggtgcgagtgagaacgaggttgctgaaatcctccttagcctcccaagtcttattcgggaatgtgagtgtagctgtggaatcctaccacctccttcgtggggttgcaagagaaagagatctacgattgccgttgatcctaaaacactacaaaaagcagcttcaagtcctgccactcctctctccttctcgctcagtgagtccgatgaaaaccccaccacgctcgtcagtagaagaagaagaagaagaagaag

SEQ ID NO: 101010 - DNA, 123 bp, Glycine max
ctgttccttcaaaatgcaatcttccatttcactctcttcttcctacgctcccaccatttcgggaccacgccactcttttcccctctccggtcgcactctcgcgccttcgaatctccgtttctg

SEQ ID NO: 101011 - DNA, 250 bp, Glycine max
cagtatacaatttgttcacttatgtgtgtcgttttggccaattcatcatctccctcatttatgccttttctccctaccataacaaagaacccaacccaagtgttgtaagtctaattaatttccattatcgcgtgaattgccacattccatgtttcgtcacagcaatgggaagaccagcacaagatagcagtcctcgtctgattccgaactccttgctctaatgacatcccggcaccgatggaccccattc

SEQ ID NO: 101012 - DNA, 132 bp, Glycine max
agctgagcttcatatatagtgaggtaaaatctccatgatattgtgtgcatgttctattgacaggtctgcgatatactcccacatgagatcaatggtgcaactgccacagccgttgtccatcggtctcatggg

SEQ ID NO: 101013 - DNA, 170 bp, Glycine max
gtctcttttgtttcgtcctttcctacaccactttgccctgttcattttcaggatgacaatacaacactccttgcaggattaaacttgacttcaattgatctaacctgtctgtgggttttttgtagattgattcagttcaatggctccagtaatgccacatggaactgaaa

SEQ ID NO: 101014 - DNA, 208 bp, Glycine max
acattgataaatagcttatagatgaatacatagaaagatcacgtacataagaagtggagatagtactcacaatagtagttttagccctagttatatgtgacatatggcaccagttagttcaattttaacaattttgctgatgacatttttcttaagtaaccttgttgagaatagaacatgctgattgatcatgattgtagtagttcca

SEQ ID NO: 101015 - DNA, 125 bp, Glycine max
atggatcccaagctcagattctttattatcatcttccttttgctgtctgttgaactgtatccagatagagtcaacagcttgagtatgagagtggatgtagacaaatcaccaaccagggtttcttt

SEQ ID NO: 101016 - DNA, 125 bp, Glycine max
aattgaagtggtgagataaagtcatggtcggacatcctctctagagacatacttctgttgatcaagtgcaattgtatatgcaattgtatatgtaccttgtagtcttggttacctccaccgcatag

SEQ ID NO: 101017 - DNA, 121 bp, Glycine max
gttcttcttcaaggaggaggaacaagccaagctggttgatcatgcaaatgaagagcaactggcattgataaaccaactgaattctgcaaacagtactattaaacgcttgggacaggagctt

SEQ ID NO: 101018 - DNA, 260 bp, Glycine max
gtagaagtgaggaaaaccatctacgaaagattttagttgtcagtgaaggtgctggtgattctgtagctctactaggtgttattcgcttagtgcaatacttatcacagaatcatttacttggaaaacaaaggctcatgaaatttgttgtagatgctggtactggcacaacagctattggtttaggacttgcagcccgttgcttaggactcccatgggaggtatatgctgtcatgttggctgacaaaattgatgggtacaga

SEQ ID NO: 101019 - DNA, 251 bp, Glycine max
ctcgagccggctaaaatgagtcataaactcataatctataaatcattgtaaagactcagcccatatggatgacaacatcactggaggagcttgtttttgtgcttctagtgctaaagcctaaagagcctaagcttgtttctttgtttcctccgggtgaaggttttctcaaggcccactgttactgcaatgataagtgaagattaaaataaattttaagaaaaatgtttattttaaatgagagaattatatat

SEQ ID NO: 101020 - DNA, 247 bp, Glycine max
ggtcgatttgccaagagaacagatgtagaagctgaagtggatcagatgttctcgacaacactaattacagaagttggatatggaattgttccctctttctgaatatgctgtgtagaacaaatggccagaagacattgaagatgctagaggatcatgattaatagaaatggaaaccacttgtgtactaagttattctgctgataatgtattttttatgtaatctaattgcttgcagttgtactaatcg

SEQ ID NO: 101021 - DNA, 248 bp, Glycine max
  unsure (1)..(248): unsure at all n locations
cttcaatagaagaagttgcaaatctctccttaaggtctctgatgtggcctccgtaagaccagtagcagcccttcctttcctttccacacaccattcgaaattantcactcatcaatcgaattcccaatcgtccaccatcacaaataaatgctcttttccctttctaatttattaccaatattattttttccggganaaattttcctattttccatgaatgttctggctctagggcgcttcctcacttc

SEQ ID NO: 101022 - DNA, 257 bp, Glycine max
cgaatcgtctttagcgatatcgtgttctgattcaagataacaacttctgtgtgtctgtcccttgctttttgattataaatcactgggaaacctgtcatgcactgaaacactttccaccaaccactgtccctaaacattatcacaaacttactttccaccaaactgggtcctctgcatgtggttcttctccaatctctccctcaattggtgagcttgaaaggcaagacaaaggcttgatcagaagagtccaatctgat

SEQ ID NO: 101023 - DNA, 246 bp, Glycine max
gtccttgaaaatttccattcaagtacatgctcctcttgtgaatcttctgatttaggcattgctgcaagagaagctactgcattgtggagggaatttatcttatcacctaaagctgggtgcattatgccctcagaaccccctgttgcaacaatgcctaaatcagaagattcacaagaggagcatgtccttgaaaatttccattcaagtcgcaccattagaaaactgattttggattgccccaacttt

SEQ ID NO: 101024 - DNA, 244 bp, Glycine max
gccttcttctccggcacgccgcaaacacttccaaaccaaaaacacaaacaagaaagaaagaagaacaagattttcaaacaaacctgtagtagaatcgttagggccggatattcgagtttctttcccttatgtaatgcatcagaagaaatcagaggttcagatcgggaaagaaagcgtaggcgtctcttccgatttcaatccgcaattccaaaaacacccctaccaccgccaccagcaattctac

SEQ ID NO: 101025 - DNA, 246 bp, Glycine max
cttgttgttgctgaactcactgtaacttctcgtttagggagcctcgaaatcacgagttgttcaatggcaaaagattctgctgatgctgattcccatcacagacgtcttggtcttttgaaagatcaagttcacttggttacaaggaaaggctttgatcgctatgagattgctccaatccaagaccaactagcatttgagaagggttttttcatagtgattcgtgcatgccaattgttatcccaaaag

SEQ ID NO: 101026 - DNA, 241 bp, Glycine max
agtttcttattattcttagcttctttgacatacacatctttatttagtccgtgcctgggagctgtccatgagctatctatgcaaaaactataagcaggtcccgcttctcttttccaattccaaaggtccctactatctatggaggaaaaaaacctagttcatgattttagagattgttgtgagttgtgacttattcctcctggaataaattcaaattcattcccctcttaagaatctaatt

SEQ ID NO: 101027 - DNA, 236 bp, Glycine max
tgtgggtcttgtaaaatgaattactctcccataactctggataatatgtgtaatatctgaactaagatttccaaattactttacttcatgcggctgcagctcatcaagaatggtattgctaaaaggcttggataaggacagatttgtgtggttagtaataatctgttatttttatgttagaactgctgaggcaatgctatttggcaaatgcttatttgtgttcgcctgctactatt

SEQ ID NO: 101028 - DNA, 253 bp, Glycine max
caacattcaaagacgaaaaagaagaagaagaagctcccatgcacgtagacatcttagaggccatattctcacacgtgccactcatccacctcgtgccagcctctcacgtgtcgaattcctggaagcgtgcggtctccacctccctccgccacgtcaagcccgccaagccctggctcaccgtgcacacccagagcccccgtgccccgcacgtgaccaccaccttcgcctacgacccgcgctcgcgagaatggtt

SEQ ID NO: 101029 - DNA, 249 bp, Glycine max
gtgatgagcgagctagtcatatggatatataactatgcgtataatcaaaagcaaaatgccactcagctgtagtgtttgttgaaattaaagttttttcttcctcagttttcatattagttttcttgtgttgtttgttgattaggtttgttgaattatggatattagaggtaattatctttattcttttctcctttggtgtttacatttttcttactcatattatctgtctctccttttttggtgtagacg

SEQ ID NO: 101030 - DNA, 232 bp, Glycine max
cttgtgcccacataccttggcaaaatggttttgccaagaggacaatcatcactttgttgaaacaactcctaccatactacttcattgcaatgttcctcttcaattttggagtagttctcttcttttagggtgttaattgaccattcacatgccttccttcatcctttaggacaaattcctcattctttattgttccctcacgaagaactctattttgtccctcttctaatct

SEQ ID NO: 101031 - DNA, 254 bp, Glycine max
tggggaacaaactcccttgtttgggagtttgaaaataggtaggatggaaaaggaattcaagagcatctattcaccctttgttccgctgaaaattggttggaattggaagaaattaaaggtttcttgcccttattaatcttacgaacaaagggaaagttagctttgttccattccttaccctggcctgtccaatttatccctaattgtcccattccattctataatcaaacactgttagagttagccatcccatt

SEQ ID NO: 101032 - DNA, 231 bp, Glycine max
gtgtggcacctggtttctttgacatgtttgttcttgcttttgttgagaggctgttcagacccacttacaagaaggatgattttgttctggggaagattttgggggagggatcatttggagttgtttatagagtgtctctggccaacaaaccctcttcaaaggaaggtgacttagtcttgaagaaggcaactgattatggtgctgaagaaatttggatgaatgagcgtgtac

SEQ ID NO: 101033 - DNA, 132 bp, Glycine max
ctctctctcacttctctctatcacatttttcttacaagatggcagcatcatcagcatgccttgtagggaatggtttatctacacggggtaatagagtaactcttaagagggacttcaatggaagacgatatc

SEQ ID NO: 101034 - DNA, 172 bp, Glycine max
ctgcagcaacagcccgttctgtgctcagggaaataaacaaggggaccgctacaccatcacttagttctttgagtgttcctaaagtcaagtcttgtactggtatgtgtcattccaaagataagcgcatggatgtcatacaatctataaggaaaagacagtctttcgattctga

SEQ ID NO: 101035 - DNA, 99 bp, Glycine max
gtttgggttgccacagatagctgttagacaacttgagatatacacaacagctgtactacttgcaacccttcgtccacctatcccaccccgagaagaaaa

SEQ ID NO: 101036 - DNA, 125 bp, Glycine max
gggggctctggagcagcagcagatgaacccaggcctgaaggattttctccaccacgatctcctacatctcaggttgatttgttaaaccggtcggagcactggacctttcattcttgccaagatag

SEQ ID NO: 101037 - DNA, 243 bp, Glycine max
gttcttgccataacgtttgttacgcgacgacgacgtatccattgagatctcgacggtggctttccatccgcctccttccaatctcctcctcctcctcctccgcatcagacgacggcgtttcgagatctgacatctctctctcgtaacagttctttccttgtctaaaagaatactggacagatatggaagtcaacaattggcataaggagcttaaatatgatgagtgggtaccaatcactgtat

SEQ ID NO: 101038 - DNA, 240 bp, Glycine max
gttctgagtgtagtggctgctatcaaaagctccggtgccaccatcagtctagttcagttcattgaggcaccacagaaagatctgcgtgtagcttccataaaacttcttcagaacttgtctcctcatatgggtcaggaactagctgatgcactacgcggctcagttggacagcttggtagtctcattaaagtcatagcagaaaatacaggaatcactgaagagcaggcagcggccgttggc

SEQ ID NO: 101039 - DNA, 237 bp, Glycine max
atttaccagtcatgacaaactgaaaaatggaattggaaagtgactaagagcttccatttgtaacatcttacaacttattgagtgcagggaggtacaaatacagtctagtctgtgcttcagtccattgtgcaatgagtaagcattgataatattgggagtctatcacctgctagataagttgtaagatgttacaaatggaagctcttagtcactttccaattgcatttaccagtcatg

SEQ ID NO: 101040 - DNA, 265 bp, Glycine max
  unsure (1)..(265): unsure at all n locations
gagactagtagatgtagaaagaaagagaaggaggaagacgccaccacctccatttaaaaatagggaaagtgtcacggcgccaacacgcatttaacccacacggcccaatggaatctcgccacgttgcaagtgctcctcgcggtcacttacgtgtgatctcacacttgcgctaattagaatagaatctctctttttcanaattctctctcatcacctttcctcactcgtacgtcgccgtttccccgatcccggcgaatcgaactcc

SEQ ID NO: 101041 - DNA, 268 bp, Glycine max
ccgacctgaaggcgttctccgccgcgctggccctctcctccatccccatctcacacacccctcgcatccaacaatgtctctcaccattccctccaacctctccaagcccgccgccctccgccccaaactaagcccaaagctaaggtccgctgccacaaccaccatcgtctgcagcaccaccaacaacaacaacaacaacaacgtgtcctccgacctgaaggcgttctccgccgcgctggccctctcctccatcctcctctccgcccct

SEQ ID NO: 101042 - DNA, 266 bp, Glycine max
acagctttgatttggtgactacgatgactacatgaatttgtgattgcaacaaatctgaattcgttggatatatatttagacatactccattcttgggtttgaaaatactctgttttggatcttctgattatcttatataaacctatccaagcttgtgttcaatggtcaaccttatgactgatgctttctgttttgaatctttggattatcttgtatcaacctatccaagcttgtgttgaatggtcaaccttatgactgatgctttc

SEQ ID NO: 101043 - DNA, 263 bp, Glycine max
caaaatagtaaggaatcctgatctatgttcagccacaatggaaaacaagaggtgaagtcttgataacttaataaattttaagaacttgagtatatcatgctccctattagcaaagataaatatttgtggtttattagaaattattagtttgagaagaacagagagctattacttttaaaactaaaaaatgcaatctctatggccttctcaccccatgtttttcatctattattggacaaatatcattcataattgcagttgga

SEQ ID NO: 101044 - DNA, 263 bp, Glycine max
  unsure (1)..(263): unsure at all n locations
aatcgagcgattcggtncacggctcgaggatcaaatcaaagagattgtaggtctattacggcaaagtgaaatgaaaagaaaggaaactgagaaggaactaaaagcgagagagcaagctgttgcaaccacattggcgaccccaacttctggaaactctccaaattcattgaaacactatgcggaagacatcaaggaacctttatctccagagtctgtgccagtacagaaacagcgcaaatatatgccaggcatcactaatggcc

SEQ ID NO: 101045 - DNA, 256 bp, Glycine max
cactgaaggcagtaagaaaccaggaggaggtggaagagtgaaaattgagaaggaaaattctttttctagtttggcatctgattcaagaagctccaactttaagcaaggtgttttttcggttactagtaatggaaagcatactagtaggccaaatgtttacgatggagttaatagtggtgaagcacacactaatgaacatttcactgagggtgttgaggctggttatggtaacgaaaatgttgttgaggatgaatat

SEQ ID NO: 101046 - DNA, 149 bp, Glycine max
ctcgagcgaatcggctcaggacatttctaatgtcccaaaactcactctttcccaactcatcgaccttgttctcacagagcaatgaggaaagtggccgtcgagagatgaaatccattgttctaaagctcttcagggagaacaactgtctt

SEQ ID NO: 101047 - DNA, 254 bp, Glycine max
aatatcgatgcgattcgccattgccggaaaatgagtcctccggcgagtgtccggtgatgctcgctctcgagagaggctgttgttgttgttcttcttcgacgtcatggttttgttctgagtaacatcatcaccataccttgttcagattctgctcactttcaccaaaacggctttactatttaccgcgtttcgctttcgtgtcaccaaaaatcatgaaaggaggtgttccctgtatccactccttgtcagggaag

SEQ ID NO: 101048 - DNA, 256 bp, Glycine max
gccacgtctttgcgcagtgccgcccatggtcggagctcatcgacctgagctccatgtccggacctgacgcaccaccccaccaaatccaaacaccgcctaacgatgctgccatgaaatccgaccagatctgacctcgattgttgttactgaacattggttgtggtagtcggagagcaagcgtgtcggatcactgccacaatggagacaacgcgccgccgcacagaccgcgactcgcatacgcgcgacccaagcatgt

SEQ ID NO: 101049 - DNA, 257 bp, Glycine max
  unsure (1)..(257): unsure at all n locations
aacaattcaaaggtgttaacagattctgaaaaggtgattcaccagtataacggatcttctttggggattggtaaagagaaagtcattgtagtcaatgctgatcatggtttggatgaaactgcaaaggattcaactaatgcaacacttactaaacaggcatgtggtaccgaccaatcaaagctccgggataggctttgtagtatatatgatgatattctggttnttgataatattcctcttgcagaggaagtttctaa

SEQ ID NO: 101050 - DNA, 249 bp, Glycine max
attgggatcatgatattttttatgatttctattccagcaatactgggctcaattcaaaggatggctgcatcttagttattcaagtctctcactattttttttgtctctaaatgttttaagatccgagataatccaaaatccaaatgtgttgcttaatatgttttgctattatattatatatttgtaggttgttttttttccttgcagatctatttttgtatttttatacaagtatttgtgaattgtgag

SEQ ID NO: 101051 - DNA, 252 bp, Glycine max
attcaaatccacattcctcctcctcaaattaacctttgttggtagcctatccagtatcaacctccaatcaaagtgggacactttacttggaagtttgagcttccataattccttaaacacctcgtaattattttcccctgagaagtgcctattgagcactttgtaagagctgcccactgtgtataccccactcaaccccaacaatcgtgctgattagtttgcactaccatgcccttgatgtcctccatgaaa

SEQ ID NO: 101052 - DNA, 245 bp, Glycine max
aggaatagccgtctccaaaacattcaggaggcgataaatagcgactgccctgttgaaagcctgtgacatgctttccattttgtggggtttcgagtttcttgcccttcgagcttatgaagaagatctaggtgctcgcaaattgtacacaaatgctgggtaccaagttgtgtctcgtgatccaccatggacaagtaattggattggaaggaaatgtcgtgttcttatgatcattagaactagtttct

SEQ ID NO: 101053 - DNA, 245 bp, Glycine max
tgaattatttagctatttgttttaaaacaatttgcaccattgatggataatgtaataggtattatgaaggcggcatttcatcagtttatttaactattttgtgtgttcgtcttgctgtctatataaattcaattatttagctattttgttttaaaacaatatgcaccattaatggataatgtcataggtattatgaaggtggcatttcatcagtttacatgtgggaagatgataatgaaggtttc

SEQ ID NO: 101054 - DNA, 242 bp, Glycine max
caaggggtcaataacatgttgggattgtaagcagagactcacccagaacatcgctgcaaagacctaagcaatttacaatccaggttgtttttgcctttggtatatcatgaatcaccatatatgtatgtagctgaagtaccatagttctcttgaaaagttacaacatgaagaaccatattatgccttttatgagaattattttcctttgttatcacatacttgtctatctttctggaatttcc

SEQ ID NO: 101055 - DNA, 240 bp, Glycine max
aagagggcacataaaaccgaggaataacattgttagcatgacaaatgactgaatcagatcataaatcgtaacagcgaagatatagtactattttaaattaagtttcaagtataggtggctatattttttggtacagtatttggatcctgtatttattttcacctaactatcattctttgataaatacactattaagagtaggcttcctgaatagtattttttaagagaaaatatatttta

SEQ ID NO: 101056 - DNA, 168 bp, Glycine max
accattttctacttctttcgttgtcgccgttcgttcacagcgtagctctgctctcgaagatggctcctcccagaggtggtggtgggttcaggggtggtaggggtgacagagtagaggaaggggtggcggtggaggaagaggaggagacaggggtacgccgttcaaagc

SEQ ID NO: 101057 - DNA, 269 bp, Glycine max
aagcaaagagagaagagaaagggcaaccaaactcagtgagatggcaaagagagcagttgaaaatggagggtcttctcatcttgacttgagtttgcttatccaagacattatgcaacaatctagtagcaaggaggaaataatgtcgacgcctaaagagtcacaattttcatgtaacgtttgattttttatttattttttaaataatggcgatgataagaaaagagactaagtcgaacttaaattttcatgtatctatgctagctcctact

SEQ ID NO: 101058 - DNA, 251 bp, Glycine max
attaatttgtctctcccttatattgtcaagctctgcaatattgcttctcaacatggggtatcgtctcctactcatttttactttactcaatcttggactggtggctatccatgctgctttacctcctgaagtatacttcaagtcggtgctacctactacgtcaatgccttaagtcatcactgatatcctttaccctgattgggtggattagattagtagctcattgaatgttggaggcaagtggcgtaaac

SEQ ID NO: 101059 - DNA, 265 bp, Glycine max
cgggagatgggtcatctctatgctttggactttgatggagttatctgtgatagctgtggtgagacagctatctctgctcttaaggtttatgctctctccctctctctccttcatttggttaccatggaaaaaaacagctgaaaacaattgaatgttttttatgatcacttacattctactcatggttttggtttcgaaactaagccgcgattactttgtttggtaatttgtaggctgccaaattgagatggcctccgttgatggt

SEQ ID NO: 101060 - DNA, 138 bp, Glycine max
accaaattatctgaaagtgaagaatctggtgcgggagaaaatggtgaaagtaaattggagaaaggattggaaagtaatgaagttgatggaagagccataaataattctcataatacaagttcctccatgttaacttcg

SEQ ID NO: 101061 - DNA, 256 bp, Glycine max
caaacagtgtcctggatgatcacatttcttcttatgagattagctctagtagggagtctatctttaagaagcctccaagtgaaaactgcagcttttgggggaattttcaatttccatagtaatgttgaggttctcacttaggggctggagtagggggggttatcaataatttgtaggctgactttgtggaatagttctctgtacttttcgttctcgatgtatttgtagcaacttgtttcaaagaatttagttatcc

SEQ ID NO: 101062 - DNA, 245 bp, Glycine max
gtgcgcaaacaagaatgacgccatcgttttgagggggagaattcatagaagaggcaccactacgaagtgagataaatgcctcgaagaaaatgggccacgtaaatacgagaccagccacagaaataaatgagtgaaatcagatagatgagaaaagaaatatataaagttttttggtttaaaagaaatgaaaaaaggaaagtagattataaataaaaatggtgctttacctttataataattgttgt

SEQ ID NO: 101063 - DNA, 239 bp, Glycine max
gtcgatctggcatcaccttgacacttcttgtggataaagctcttttttttctgcactctaaaaaaaaaagcgtttctctctcattttctttctgtcgagaaaatttagtgaacccaaaaggagagaactttctttggtttgtgtttcattttgttgtggttttctgtaagattaaatggctgaggttttgaccaaggcgagtttggtttcctcttcttcttcctcatggcatggggttg

SEQ ID NO: 101064 - DNA, 234 bp, Glycine max
atcaaaaatcccatttcttgttcctcttcactttactgatttttcaaggtctatttctctctttttattattcttttttttcttgttatgtgcccatctttgttttttctggtgaagaattttttggttttgagaaaaataaattacttgggagttttgtggtatggtattgaatctataacaagagggcttcttgtgttaggtaaggcaggcagacttgaattgctgatggtt

SEQ ID NO: 101065 - DNA, 99 bp, Glycine max
ccgatctagttagggttccttacacgatggagcggttgaagtgggcgcaactgggtgagaggctgaagaccggtggggcccagatggggcgaatggtga

SEQ ID NO: 101066 - DNA, 216 bp, Glycine max
ctttaacacactgtctttttctattatgtagtgtttgttgatgttggatatgcttgttctccttattataactgatcgataattcaactattggacagtggtaataattagaataagctagctgaggaggctaggggcgggattagtggttgttgctacttctgcctgggaaaggaaaaagagatgaagatgatggtttcaatatgggaagaacag

SEQ ID NO: 101067 - DNA, 195 bp, Glycine max
cgagctcgagccgtaacaattctcttttggcgtttcgatgggagcggtgacgtcgtcgatggctgcgaagttcgcgttttttccgccggatccgccgtcttacacggtggcggatgaggcggaggggagggcgcggatggcggaggtggctctgaggagaacgtggacgtattagaaggtgagaacggagagggg

SEQ ID NO: 101068 - DNA, 244 bp, Glycine max
atcgcactcccaaccctcactctccgaacccgacaacctctatgttctccccaatgcttctcctcgtccctctccctcacacccaacaacaaacccatttccatttctgctgtttttctcaaaccaacaactctgtcgtcgtctcgctcgttccccacgtcgtggtgtcgtcggatttggggcaggaggaggacaccttcagtgacggagacggccccagcttctcccccgaccttaagctctt

SEQ ID NO: 101069 - DNA, 113 bp, Glycine max
gtgataatgtagacccataaacgaccacaaatcacgggatttaatctcaaagatagctatgtaactatagttgagattaaatcccgtgataatgtagacccataaacgaccac

SEQ ID NO: 101070 - DNA, 159 bp, Glycine max
cgagactcagtctccttcactccatatccatatcttcctctctcacactctctaagtgatggctttcaattccaaaagggcaccgatctcaagttcaaaagccatagctgatgcagcctcatggtgctgtgcatgttttcttgtgtccctcttattgct

SEQ ID NO: 101071 - DNA, 144 bp, Glycine max
caacattgtcagacattctatgcaaaatgctgctgcctttgaagaggctgcactacgtttgaaagaagaacatgctgcaagtttgtcaaatgtgatacccgttaaggatggaactgaagtacctcatacactacaaaaggatgg

SEQ ID NO: 101072 - DNA, 139 bp, Glycine max
atttgtggcttcgcacaacacagcacaatattctcctctcttcttcacttcaatatatagttacctacctttcccgccagatttgaattgtgaatggagcgattttattcttctcaacgagagagccgtcttttagggt

SEQ ID NO: 101073 - DNA, 154 bp, Glycine max
caagtggttagtgaggaatgtagcgaaatgcgtattcgtttttggctgagtccttctgagggacgtggacctgccaaacgcagaagctccggcagaagttgcgatcgcaaagatgtcgaagaggtgtagtattatcgctcggtttcattctccc

SEQ ID NO: 101074 - DNA, 142 bp, Glycine max
cgtcgtagctttctgcactttgcttttcgtttgcttcctccattccgtgagagggattttagaccccaacgatttcctcgctctgcaatccattcggaaatcccttcacgacgttcccggttccaatttcttctcctcgtgg

SEQ ID NO: 101075 - DNA, 158 bp, Glycine max
gtgttaggctacatggttggctcggggttgccatcaaatgtgaagaaggtcttccatccgataatttgctgtgctttatcagcagatctgacagcatttgcttttgggtatttttccaagtcaggacttgaacctgtgctaggatattaccttacaaa

SEQ ID NO: 101076 - DNA, 143 bp, Glycine max
ctcaaagaaaagccaccttaacatctcttctctgaaaattctctttagagagatagagagaggaagaaagaatggcagcttgcactgtctactcaacacaatctctgagcgcaaattgctccatctcaaccccatcaaagacg

SEQ ID NO: 101077 - DNA, 150 bp, Glycine max
atttttgtataatgtatgtgacacgctgtaaggtttctcataattgttataattttcctactgtgtgtttgagttagtaataccgttttaagtgttaaaaatcatgtagatacgtgttgacacatgtgatgtgatagacatgtatgccag

SEQ ID NO: 101078 - DNA, 105 bp, Glycine max
caccgacaacctcgccggaaaattcgtcgccgtttccggttaccggcgatggcctcggcgacgtcgtttttgggcctcggtcttcgcgcctccgtcccaatttgc

SEQ ID NO: 101079 - DNA, 99 bp, Glycine max
ttaccttattccaatccaatagcaaggaggtaccaaaatagtgtgattcatggctgcaacgaatgcgtcaatctttgcatcttccacgcaaccatgctt

SEQ ID NO: 101080 - DNA, 114 bp, Glycine max
  unsure (1)..(114): unsure at all n locations
gtttttggaaattatgttatacaaaaacatcagtcatcagggcancaggatgaggtatgatctcaggaaatatcttggtcttctcggctactgagatcattcctcatgctcgtg

SEQ ID NO: 101081 - DNA, 279 bp, Glycine max
  unsure (1)..(279): unsure at all n locations
tgtttcttcatgtgtctttcacaatatttggaaagaaatgtattaggttcttaatcattcaaatttaagttctcttatccaatcacaaggaattgctgcaagtgacatgagaaagtatttaatggaataattcaaataacttgatagcctattgaaaaaaaatgcctagcaatgaacaacttcctgcactgaatcttgtgattggatcaaggaaaatttgcattggatctaaatagttcggattacatataatgagganattagtttttgaattgatag

SEQ ID NO: 101082 - DNA, 252 bp, Glycine max
gacctcgatcgtgccatgattggagtcgaccttggtctacgccaacaatttatagcagctctcgagtcccgattcttcttccttgctgctgatgcacgctctaccttaaggggttggaggccttcttatagtaatgtcttgcttcaaataaggcaaagattatatattccttgctcatcgcaattgtcgactcacgaccttgaacttgaaatcttccgccactcaggcactgcagctctactgcagagaatc

SEQ ID NO: 101083 - DNA, 248 bp, Glycine max
ctcgagccgttttagagaaaattgctcagcttccaactaaatcagaaatttggaataatattgaagtttctgtcttggagaacccagtttcattacggtttcggagaatgaacaaaaagtcttaaaatcctcagtttcattggtttgttctctcaatttgttcatcctttattaagtgataatgactttcagtctatcaaggcaatacaggaatggatcttgggctcaaagttacttatctacatgct

SEQ ID NO: 101084 - DNA, 246 bp, Glycine max
attgaatatagagtaaaacaccacgactatacgacgcgccaagtagatttatatgactctacttggcacatcgtatagtccttttgtattactctgccttctatttctccttggatactacggtactcgactatttcctagtgattatatccgttatgatcctaaataccttattgccaaggtttctgcaaaaaaaataactcaaaaagtccttaaaaaaataaaaaaacctaaaaaaaatggggg

SEQ ID NO: 101085 - DNA, 255 bp, Glycine max
tccgttaccttcgattttcctttctctcttgcaagtgtcatatctctctttctttctcagccaagcatatctccctttttcgtttccaatttccccttctcttaactcacctatttcgcctaccttgcgtgtccctttctcttcagattaaggctcggtatggttaggttaggataggtattcggtgatgcgatagatagagagagagtatcaggttgatggaagatgtatcgcgtatcaacgacgacgtttgtg

SEQ ID NO: 101086 - DNA, 241 bp, Glycine max
ggcaatgcatcatgtggcgtaattaattatatttgctttccttacagccgttggttggaactaaagcaaatataattaattaaggcaatgcatcatgtggcgtaaaataaaacttacatggattaatgaatacaagttacagcagtgcattgtagctgtgtcgttactgatttatcctttacatcaaatattcatatgaatgggatttcacaataagtacaagaagctctaaaatcatatg

SEQ ID NO: 101087 - DNA, 246 bp, Glycine max
aagaaagcggccccattctgttgaaagcacatcccaatccttccgcgcagggcagtgtcagtgacttatctaaaatcaggtaactccaagagaacacagatcatagagagtgaatggtttcgcatgtggacatcttgctgtacggcgtgggaagtttcgtggtggcgtggatggcattgcaggtggcgtgtcaggagcagctggtctacgtccctgacattcctgatctcagcaagtcccacgcca

SEQ ID NO: 101088 - DNA, 228 bp, Glycine max
ggacttcacaatttcatcaaggtggtgctaacgaacataatattgctcttgacttctttgccagagacattgtcacgcaagtgtgtgaatatcactcttctattgagagtaggctttgagatgcaaacatatgtgtttgtttcctatattggaactatatgcatcatttaacgatgaactattacagtcatgagatgtagtaccagggtcagatggatcacatgatga

SEQ ID NO: 101089 - DNA, 250 bp, Glycine max
ctcatccaacaagtgacacacagtcggtgtgggcttatacgactctgccaatttgcctatacatacatggacgccaacgggtctttcccttttatctacttcgcctcgtgacgcgtttctctgtctcttctctctctgctcctgaatttaacactactcagctatcatacactataatccctattcattggccacctgtcgctactcccacagtgctactacttccttatccaacaccaattcgcgtttc

SEQ ID NO: 101090 - DNA, 255 bp, Glycine max
gtatcaattagcttactgtatattgtttacttttatcttaaatctgaacattacgagctgatttggtacctttttgtttcctattttttctccatacagatttgtttcaaatatgtggtttggagctatcatatttggtggaattctggctggaagactttcatcctagcggcccctcaggatatcatccagcgtattaaatctattccccctccttccttggatgatgaggaagatgagtctggcctggaaatc

SEQ ID NO: 101091 - DNA, 251 bp, Glycine max
gcataacttgcatagactattgattaagaaagctattgtcattgatttgctagctccaacaatgggttctagcagattatcattcattttagtacttgtgcttgtaaccttttcatccatgatcattgactcaagggttgcagaggcacgtaccctgccaaaatcagccttattgccttccaaagttgatatacctactgttgttcctcttccactggtggcaccactgccaaatttgcctgttactctcc

SEQ ID NO: 101092 - DNA, 143 bp, Glycine max
atggggtgtgcttcctcgaagcgtgttgatgcggcagcatcctcctaccgtccctcaccctaacaagaacctcaacctccagaaaagaccaagtccttccacacggtggaagagctagacgccaagctcagccccaagctcga

SEQ ID NO: 101093 - DNA, 110 bp, Glycine max
ctcacatggaggcaggaaccacaatttgctacggtccctcctcttatatacttcttggctcaaatttactagagacatggacacttgaaatacacttcatctgctcatcg

SEQ ID NO: 101094 - DNA, 243 bp, Glycine max
aaacaaggccgtcaaaaccctgcagattgcataaccattaccttcagatacaccagttcagtatggtgtttcaccagcaaaagcggcccaagttgagagacacagttcaacagaaagtgaggaatcttctaaatctagtgatgaggatcaaagatctgccgagagaagtcgttctctacaaagatctgcaacacccagaaggtcagcatccccaatgcgaagggttcatataggaaaagctgg

SEQ ID NO: 101095 - DNA, 248 bp, Glycine max
gagaggttgacgatggtattgaaaccgtgtgtctaaacttaccagcagtaataacgtaagtttgattcttttaagtctgctgcatcaaccctatctatattcttaagaagctttgcccttttgcactttctctctttggtatatatgtatcacaccgcatggtggtggcctaagatggatttaatttccttatctctgtttttattttccactttcttttcatttcattcataacttaagttcaaatt

SEQ ID NO: 101096 - DNA, 249 bp, Glycine max
ctctttctctttctctctctctgaagcatcaccgtcaccatgaatacgcaaaccacaagcccggtgatcaaagaagaagaagaaaaggaggaaggaacaaaggaagtggttcaagaagaagaagaagcgtctcacccttacgcatttcatgtttctggtcctcgtaatttggccaaccttaattggagagaccttataagttcgagctggaaggatgcaaattacaaaagaactgtcattgcttgcttt

SEQ ID NO: 101097 - DNA, 256 bp, Glycine max
gtgaaaggctgttacacactgccaccaaagaccaacccttttttcctccattttgccttgccccaaatcagagtttttttttccccaaacacacactcacaattggtggttgagtgcttcttctcaaaatgggtgagaaagatgatgagtttgggttgagtttgagtttgagtttggggggagtgaatcaacaacaacaacccccttctttgaatcatatgcaccagcctcaacaacaacaacctgttcccatgaa

SEQ ID NO: 101098 - DNA, 251 bp, Glycine max
gaattgggcttggacttgaagagggcagactaatttattctataaaattagatcttatcttatctagatattatttagatttgatctcatctagatattatttcatctagatcttatcttatcttatcttatctagatttgatttgattttacttatgggcttggatttaaaacatatttgtaagctttggggctgaaaaaaaactatataacagcaccaaggttctagtttaggagcccccccccctctc

SEQ ID NO: 101099 - DNA, 253 bp, Glycine max
gccattgactctcctttcctcttttaactctttctgcctcgccagtcgccggaagttgcaaaacgtctctgcctcgccggaaaatttaaaaaaaaaagataagttcgacgcttccttggaatcgcggccactgcgatgtgcaattgaaacaaagttcattctaattaaacctgccatgcaaattaattcagtcagactttggtgttctatctcattacgatttgagtcgtctaattattatttttttctttgt

SEQ ID NO: 101100 - DNA, 249 bp, Glycine max
agaagggaatgtctttaaattctattcctaatttgttgatcaattttctactagtttttaggatgctgtttacattattgagcgtttgaaagtgaagatattgattccgggatacaggtacctcagatataaaagctctgttgacatgaagattttatatggtgggacacaagaattatttatgcacatatatgtatgtagtttttggtcatttcaacacaaataaaccatactataagagcttggtat

SEQ ID NO: 101101 - DNA, 263 bp, Glycine max
agtgaatatgatacttgttaggcagcaacaccagcagttacagtaggtgttgacggacgatgaagtggaagactaatttgtctaaaatgtaatgtttttatagtcttggagactatttttgtttatggttaaatgcacctttacagcttaataaaccttttgctatgagttgtgtacttaaaaaaaaaaaaaaaaaaaaaataagaaaaaaaaaaagggggcggcccccagttattacattcctaccccggggatttatttcc

SEQ ID NO: 101102 - DNA, 131 bp, Glycine max
cagtatttcccttcctagctactctattctaacctttgcaccgatctcctctacaagcaaaaccctccttaattcaattttgttgacattaatctctccaagttggcttgcttcttgatcatgattcatta

SEQ ID NO: 101103 - DNA, 240 bp, Glycine max
attctcctttgataagcttgctgaagccttctcttaccttgaaacaaaccgagccactggaaaggttgttatacatccaatcccttgaatcaaataacagggatacgcaatttttctgtgtgtctagtaaacttcacattctgtgcaaatcagagtttagataaaaactcaaaaaaatttaaagtactaagaatgtaaaaatgaagttcattatattcttagtactttaaattttccatt

SEQ ID NO: 101104 - DNA, 250 bp, Glycine max
accaattatgtcattctgaatccttgaggtagtaggcattacattttgagacggaccagttgctaaagaaagtggatcaagctggcagccaggtgattgacaatttcagcagcaatgcagtttctaagtcatttgagcaagaagtacgggaaatgattttggggacttttggtcaactaggtgtggctggtttatctgcttcgctactgacatctgtgctgcaaaccaccttggacgatcttcttgctct

SEQ ID NO: 101105 - DNA, 238 bp, Glycine max
ccaatgccaaagttatcttgtttggttcaatttcccttctttttgatggtgaagaaaacatcagggggaagaggggttgaatcaagttaccaccaacaactttggcaaaattttgggtagaaatgagttagcccagaatttaaaccagaaaccaaaagaccgcatcagaaaacattcacacagctattcaaacgcacatttgagcaatagagggtagacttcatcttgaggaattacc

SEQ ID NO: 101106 - DNA, 245 bp, Glycine max
tcaaccgtggaacatcgtatctgctaaactaaacccaccctctttgtaaccacaatggtagtaactaaggcattgttactccctcctcatccacaccccttctgttcccttccaattcccaccaaacttggaatcagacccttcttcacctttcaccaagtacacccattagtggtgcagcacacgagaaaaccaaagaaacatgtggctcatgtgtcactccatgatgaccctttggtttcatg

SEQ ID NO: 101107 - DNA, 257 bp, Glycine max
ctttcctctccgaaccctcgatcactctcacgcgctcctatattcgctcctccaccgtcgctctctcgaacaaccacaacaccatcttcatcacatggtcagtttttttctttctaattctctctcttccttttttcgtttatccgatttgttctcacgcaccaataactaaatccgcgaatttcgagttttttttttgttggattttgttgcatcggaatttctgagctgggttcgtatttgatctgatcgtttaa

SEQ ID NO: 101108 - DNA, 241 bp, Glycine max
cttcaaacttgcagctccaaatttgtgcttctgcagacacagaaacccctcattcacatgctaacataatttaatgttaaaatcagatatttagatgaagggctattttcaaatatgtacacaacttgcagttgcagtactgtttccacatatttaataacagatgaaattttgttgcacagaaagttcatagatttggatactcattgccgtctgcacagaaagttgtggaatttggagc

SEQ ID NO: 101109 - DNA, 236 bp, Glycine max
ggtgatgctatgtggtgtctcctcatgagcaatttccatgtgttgaaggcgggcggcatcccggttcctgttggaaacacgtgccctcctcctcctcctcctttgcccgagcttgagaacacgggatggagatttgcgaaagagggaggcttgggttttcctttgaatgggctcttttctgatactgatatgactatacggttacagagagatattgaattcccaaaaagatttga

SEQ ID NO: 101110 - DNA, 237 bp, Glycine max
gttaattgcttacactgcaattggagtaaattttctgtttagtaactgtaatagtgaagtttgtgatttgacttgtacactctataagaaatattaggtaatagatttgtgtttttcttaatattaccattattattactttggtgaggttcatgttatgattttttaagaatggcagtggaagcgaaatgtgaaaccgactttctgatttcagcagaactggttattttttatggt

SEQ ID NO: 101111 - DNA, 241 bp, Glycine max
cgtgatggttcgagaaagtgctagtttgtattcagcaataggtcagataagatcctgcaaccaggagtctgatgttaaaagtgacttggataaatcagagtgctttgatcctcagtcatttatcaagaatttaccagaactatcagaaatagaagtaaatgggcagccaaccctaattcctaagcaatctccaagaagaaagtcaataactctggtgctggacttagatgagacattgttc

SEQ ID NO: 101112 - DNA, 246 bp, Glycine max
cacccaattaacattaacttccaaagccttaacaattcacaacacacacacactctcgagtctctccctgtctgcttttggctccacatatctccatctcacagttttcttacatcaaacaatgaaaatgaagcttctcctcatgcttcttcttgtttttcttcttcttcaccaacccatttgggctgcagaccctcctgctttctctccaggggaggaacagcatcacatgaataagaaagtggt

SEQ ID NO: 101113 - DNA, 256 bp, Glycine max
  unsure (1)..(256): unsure at all n locations
caaccaacaagaattaaccgcttcttccactgtattgaaaccgtacagcgnacaaacaaaaccaagtagcttaagacaaagtagaagaacaaaaaaaaaacttgcagttaacacttttcaatgaacagaaaaagcagaagagcatatttgttttcagaatcctcgtttgttctacatgcctcatggctttgaatacgatgatacttcaatcatggccttttatgagccttgtttttgttttacttttgccacattt

SEQ ID NO: 101114 - DNA, 246 bp, Glycine max
ggatgagaaccacgcgataggctgattttgttgtatatcatttttgtagaataacttagtgagaataggcatatatgttggtggtgaaggaattttgttaacttaaagattttgcatagattttcgttatctgaatgttgtgtactaatatcaacttagggggtgtttggtacaagaaaagttattttttaccgaggaaaaaaaaaaaaaaaaaaaaaaaaaaaaaaggggcgccccccctttttt

SEQ ID NO: 101115 - DNA, 246 bp, Glycine max
attgaattaggtatcaattgaaggacgcctgagtcaatgtgtataaaacatttgccttgcctgtatattcctcctaattatgctaatatgaaatttggacagtactgaggccattttggattctctgttcttaatgaagcttgggtcatatccctatccctatatccaagtttggccggttgcatagcgcaaaaggcgtctataaaagcaacatcactgaggccttagaagacagaggatgggtac

SEQ ID NO: 101116 - DNA, 245 bp, Glycine max
ggcaaaggaaaagcaaatgtgaccgcactctctccgccgatgcaaaaacgaacctaagaaccgtgcttcccgtgcaatccaattcatcttcgtttggggattagcaaccctaattcaccttttctgataatcaaccaggtcatggctgctatgaagataattgcaatatgtcagtcgggaggtaagtttgtgactggcaaagatggttgtctgtcatataaacgtggtgatgctcatgctataga

SEQ ID NO: 101117 - DNA, 244 bp, Glycine max
agcgctaaaactgtgcaatctaacatggagcccgttgaagcacttctttcactctcacgcatttcgtcgaacacctcccgtgctcgttcttcgcgcgtgctcttcttccaccgccgccgccgacaccagggccgccggtcgcggacgccggagctcggagtcgtcgtccaccacttcgacttccgatagggacgccattcgagccattcgcttgaagaaggttgaagaattgagaagcaagggg

SEQ ID NO: 101118 - DNA, 250 bp, Glycine max
ggttgttgttgcgacgaagacgacggtgacattttcaggcacctcatgaattccaatttcccctcttcttcctcctccacctcttcttcctgcactgtaatctcaccgatgaattctcatttctctgcgctatcctccaccgacatcctccgcctcatctcgagaaccttccaatcatcgatctcgcacgtgcgagctgcgtgtgccgtctctggtgctccgtggcctcccagagggacatggtaactag

SEQ ID NO: 101119 - DNA, 249 bp, Glycine max
atcagcaccacattcacctgagctttttgtgaggattccaaagcatggcttcccttgcagcatccactgctgctgcttcccttggcatgtcagatatgcttggaaaccccatcaacctcagtggtgccacaaggccagctccatctgcctctagccctgcctccttcaagactgtggctcttttctccaaaaagaaggctgcacctccaaaaaaagctgcagctgctgctcctgccaatgatgagcttg

SEQ ID NO: 101120 - DNA, 255 bp, Glycine max
  unsure (1)..(255): unsure at all n locations
tgaaaaagagtagttgaatttatttttattatctggcatctgcagcttttgacatggctagcataggtttacaagtctaactggtatcaagtcttatgttatttttccctatataggtataccacaagcccacatctgttcagtggagatgcagaaaaggcattcatccgtgttagaagcaaggtctccacataatatgataaaatgatcanatataccgtcagaatatttagtttgaggcatgctatttcccat

SEQ ID NO: 101121 - DNA, 252 bp, Glycine max
tgcgtctgtattgaaaattgcgagaggcacttatttggtgaagcgtgactgagatggctggaggtgttattcagcagatattgaggaggaaatctccaccctcggtttactaactctcccttgttgtcacccatcgtagcaaaaaaagatgatgctggctctactggcagtcagtccttaagagcacttgcattaattggagctggtttgtcaggtcttttcagtttttcaacaatggcagcagctgatgaa

SEQ ID NO: 101122 - DNA, 255 bp, Glycine max
gcatgatgatgaatcagaagcgattaacattgccaagaacatatgcacaccagaaattgaactagacgaaaagtcaactgttgatgagcaatgtgaacaacacgaaaccaaggacaacatcggcatattacaacaacaagcagaccaccaatcagtacaatcaagtgtgccaagtgtcattacaaattatgcaacagcagaaggacatgttaaatcaaaaagcagcacaaaattaactgatgatgtcaatgtcga

SEQ ID NO: 101123 - DNA, 99 bp, Glycine max
attttacagcatagtacaatctccataataccctcaacgaaacgcaagaactggtatatagtcatggtcggaaattggaattaacttcccagaaattaa

SEQ ID NO: 101124 - DNA, 262 bp, Glycine max
tccacttgcttgcgctgcctgtttccttgtgatctaaccctaaaaaaatactaacgtaccctagtgctcggaggctcctcgttatgtgaaatttaaaggggagggtaattgtatgcagtcttacccttgcatatgatgcaattaggctgtttttcagatccccatgaccaaccggtcaccaaagaacaactttaccgctgtgccagggctctccctcgcattcttccttgtgatctaaccctaatgcttgccaatttatgtt

SEQ ID NO: 101125 - DNA, 223 bp, Glycine max
atgcaacgttaggtctctataaaaagatccttcgtcgagcaccaaaggctttgaataggtacttccataaccttggttgcccttgcaggttatcttgcatcctataacttcattctcaagtttgtcaacgtaactgtgcaggtgggagatgtctgcacagcctaaggtggttgtcaaaattgaaagcgaagaagatatgctggctttgcaagaaagggctaaa

SEQ ID NO: 101126 - DNA, 225 bp, Glycine max
tttacttagaatcttgcatttgaattccctcaatttcttgaaacccacgcattttgctcggtttctgcatttacgaatgaacgtggcgatgaattttatgatgaaattgaagatgatatgagaggaattcaagcagagtttaaaacattgcgcaagttggtcagagcccgtatccatagaactgcggttgtggttccattcgaagtttttagcaatgttgagttt

SEQ ID NO: 101127 - DNA, 120 bp, Glycine max
gcacaaacagataacattgagacacccgcatgcctcataagtcgtcagcaagtgaagtatggttgctttattaaatgtgtgggcaggttctgcattgatgctgactgacttttattgtat

SEQ ID NO: 101128 - DNA, 152 bp, Glycine max
aaaaattaataagttagaaaaacttcgtaagtttatttttgatagaaaaatagaaaggatccaatttgagcaaggttcaaaaaaatggttggaattagtaaaactgttttgatcaaaagtgtagccgcaggaattaaccttctatttgtatg

SEQ ID NO: 101129 - DNA, 284 bp, Glycine max
ctcaaagactgaaggcaaaaaaaacagagaaaggtctggctctgaatgatggatagaaggcactgttacaaggatttgctgccattggtggtgcttgttgccaatgaatgcaacaacacaggcttgttcactctcttcaaagcagccacactgcaagggatgagtaactatgtctttgtcacctatgcctattctgttgcctttcttgtactacttcctgtcacttttttctacagaaggttttgctgctgaaaatctaaactaaaaaaacatgtttctgagtt

SEQ ID NO: 101130 - DNA, 266 bp, Glycine max
ctacacggcagtgaagttattagaatctgtgttgtgttgtgttgtgttgagcagagagagagagtgagggataagaagagaatagggttagggttagggttagggttagggtttgattgaggatgccgaagaacaagggaaagggaggtaagaacaggaagaggggaaagaacgagacggagacatcatcctggttggactcagggactaccaggacgacaaggctgacgtcatcctcaagtacatgcccgacgaggccaggctcc

SEQ ID NO: 101131 - DNA, 130 bp, Glycine max
agtgaagtgaagtgtgaaaggatgaccaattttgttggactaaggttgcatacgaggttgtcattgccattgccattgccagtgttgggtggtgcttctcactcttgttctgccactgccactactctgt

SEQ ID NO: 101132 - DNA, 261 bp, Glycine max
tgtgacatctacgtcacaaggtaatgatcttggaaatggtcatggtatgatggcaaatcttggaaatggtctctttgcttgcgaggataagattatgtacatctaccctcccagactcaaccacattagagccttgcctcttggccatccagcccatcgttttcttatcatgactcatgacaactttacttgcttgcatacttcattatgttacttcctaaaccctggcaattgaatctttattattggctcttctacttc

SEQ ID NO: 101133 - DNA, 232 bp, Glycine max
ctcaccctcatgcgtacgagtttcttcattaatccggatgataactgtgaagagttacaaagaccgatcgactgtttcatatgctgctcacaatgataattaagatccgttggatggaatcggtattggggttgaaacgctagtgtgatgggattacctgcattgaatgaggaagccacgagaatcgaatactacgcaacagaggcagagccattgtgtgagtaatactatg

SEQ ID NO: 101134 - DNA, 259 bp, Glycine max
aaatgtttggcgagagaaaattctgggtttgaataacggaaagttaatttcgtaggcatgatataatattatagagaagaaggcacgttcttttgagggtgctactatcagtttcaaatttgattaaatttcaaaccttttttgttaattagaattataatttttgaactattttgacatcgttggggttgtacaaattgaaattgtgagcggtgaagatggattcggaaggcgagtgtgttagaacaccaaagatgga

SEQ ID NO: 101135 - DNA, 262 bp, Glycine max
ttctggacttaatctggattcttcctcttatgagatggagcaccttgccgagaatatcttcaaaatctgggattttgatattcaatctgaggaaggtgaactggttaaacagttggacaaagccctatcagagaattctttcaaacagtgccaccatcttttgatgattcattgaagttgaaggatagctcactcgatgatcttattgctggcattgctgacttatcattaaataaaaatgtctagagttctctgatttttt

SEQ ID NO: 101136 - DNA, 258 bp, Glycine max
gaggccagggtctgtagtgtgcgggtgggtttgtttatctcaaacacagaacagaggtgtagagaagaaagctctcaaaagtatggcggcggagtcatcactgagggtggcgactcccactatttgcaacctcaatggtctcagagaagaccaaccactctctctccgcttcgcttcatgggttttagccctcgaccctctcactctctcacttcctcttccctttcacacttcttcgggagcacaagaattaactcc

SEQ ID NO: 101137 - DNA, 259 bp, Glycine max
  unsure (1)..(259): unsure at all n locations
gcttaatatgtctatgtaagctgtgggaagttccttattaacaatctcctggctatgttttgcaatctgggaatcaagggacttgatggtttcttccttttgattcccagattgcagctcttagccaggagattgtaataaggttcttcccactgcttaatatgtctatgtaattttcatttcaatcccctcaccaaaggattgatcagtttcgcgttttggatgtgtctatctggcgatgggnaataattttcaatgt

SEQ ID NO: 101138 - DNA, 259 bp, Glycine max
aaagagattatgcctcttaaaaaggaatctttgagtttggaaatgctgccctcgatatccccaatctctaattcaaatgaagtgagattgatgagaaatatatgccatcttgaaagtgcttatttttccatgagatcaaacttcagctttctgaaacagatgcttcaactcaccctgataaagatatactaagaaatcgtgagaactggaatgtggctgaaaaaagcgaggaacaacctaagaaagatactttaggggc

SEQ ID NO: 101139 - DNA, 256 bp, Glycine max
agaataaataaattatatttagtatgtggttcacaattagtttctagcaatccatatcttgcatgccctttggttgtacaagtggtacactgaccccaaacatcattgttctccgatctagggaattaggatgtgtgttgagaagcaatagaaagtagaaacatctactgagtagcatgattgttaaacatttactaatggtatcacagttatcgatattgaaaaatggacctgccaactgaaactgtgaagtata

SEQ ID NO: 101140 - DNA, 248 bp, Glycine max
aagaagatgaacttgatttggacctaatcagaaaggtaaaaacaaaagcagaatttgtggagcagcatatcagcactgggattacgataaaacatgaactctcgctctcccagtgctgatatgctgctccaagaaatgaacttgatttggacctaatcagaaaggtaaaaacaaaagcagaatttgtggtagtcaaactaaagcaaaatgtatgccataatccatgagttaatcgaagggaaatcaga

SEQ ID NO: 101141 - DNA, 195 bp, Glycine max
ttgagttgtgctgttccttcctcctgttgtctgtctcttaacaaatcaattcatttccgccgtcgtcgtctccgccgctgagagcgatgtcttccgtcgaaacggagattgagccactcacgtcgggggcgagcaaccgcatattccgcttcttaaaggcctcagagcctacctcatcttcgtctacaccttctt

SEQ ID NO: 101142 - DNA, 266 bp, Glycine max
cttgctgttaactttttactgtttcagtcaatattggttccatatggaaatggaaatgccccatggtcttcagtgccccaaaagtatgataatgttagactttcattacattcaacaccaaagtacttcactgtttggaccaccaacaggtactgtttcagggttttctaactcctctgctttcattgctacggtgcaataagtgcataatcctattgttgttgatgaatttgggacggtaagaaaaaggggatgacaataatgta

SEQ ID NO: 101143 - DNA, 273 bp, Glycine max
catgtgtgcctcaaggaatttcttacatgtggtttttgagaaatattagcaaagtactccctaaaacacttattaacacacttttttagtacaatattctctattattagtagaaatttattgaaaactacataaacttagagtcctacttcatatttaactagtcttaattattcatgattttataatttttaataaattttaactaataataaaaaatgtgttaaaagatatattattaatactcctttgatttatcgattaaggttttaa

SEQ ID NO: 101144 - DNA, 207 bp, Glycine max
ggcgtgctgaagagtgatgacttgactcttctcacagcgtcgacttggtctaaatccttccctctctcactttctttgatctttctcatttctacaacaacaaaacgctccatcattattccatcaacatctctctcaacttcaactctcaactctgaagcctgcaaagtgcaaacgctccctccaaggccttaatcttcactttct

SEQ ID NO: 101145 - DNA, 260 bp, Glycine max
ctgggacttaatagcagaaattcaaatgcctcactggaagatagtgctacaaatcttgctgaggttctatttattttttatctaagctgtgaatttcacttgtatgctaattgtgggcaagataagctggtttttctctttgctgtttgtagggtttcagtgatattttttaatgggggaacagtcaataatatatttattgtaccatttacatatttcacaagttacccatacattttaagtacttttaaagtctattg

SEQ ID NO: 101146 - DNA, 196 bp, Glycine max
cttcttaagtccttttggaactgtaaagtttcttattccttaatttatgagtttccactttgaggtgggatacaagattggagggaggaaatagttggtggaaaataaaccatcactgaaggaagagttccggttttatgatgtaatttggcattatttaatcgttaatgaaaattctcaatggtatattgctttc

SEQ ID NO: 101147 - DNA, 259 bp, Glycine max
ctttctttctattcctaccaaggataggatatttacaccaccaccagtgcaccaccgattttctctactttcctctccccttccatcgcacttctcggcctttctatggattcttctcttccatttccaccaattaatcctatctcttctgcaacttctctatggtgaacatggtctttctgaaactggggaaatccgttagaatattaaatgtttccccttcaagttcgaggtttggctccccggccacacctcattt

SEQ ID NO: 101148 - DNA, 257 bp, Glycine max
atgaggcaaaagaaatatgcctcatccacagtcatccatcttcgttttcttgtgttcatctctggccagttatccaattccttctgtacaagcaaagggaacatggatgactgtggatgaggcaaaagaaatatgcccttatgcttggatgaaggaggctttggatgaattggtcagaagacaaactcaactgcattccaaaaagtatggggatatgagtaggttgtaaaaaaaaaattgtatagcgtgtttggttc

SEQ ID NO: 101149 - DNA, 221 bp, Glycine max
cttgcacgactcacctacaatcgcgcttgatccctcttatcgtgaatcgctatctatgcaattcctcacaccttactacctgcagagtgccagtgatggcactccctcagtccatctctgccttagtgaccacactcacgctcttctcgctgacaaccaaaccccagatagttagcccctttggcttcttctcgatccataagacacgattttcaacgtta

SEQ ID NO: 101150 - DNA, 229 bp, Glycine max
agatcattgaatgctactgggattccgcggacatcattgggtttgtatgcggatcagaatagacaaagccgctccaaatgatatcaatacctatagaaaggttatacctgttaaatttttccattctattgttgccagcgtctttaagttgtctatgcttttgtttaactagctcatgtgaaaagccttctgaacagtttttgttaattttttaacacaggtaatgcga

SEQ ID NO: 101151 - DNA, 229 bp, Glycine max
aataaattgagtgatgtgcaaaaattgagagaagacaccacttcaagttatcctccagtaagttgggaggattggctaggaagcaccaacacagacaatattcagggaaatgaactcaacctggagctgcttaatgttccaaaagaggttgtacttcaagatctgaactcaaccctaccaactcagctgcaatgtgtagaactgactaacatgaatagcaatttgctgg

SEQ ID NO: 101152 - DNA, 229 bp, Glycine max
cgccttcgtcgccgcaatcgccgccgttgtcatcattcccgatgactccgccgcgctcgtcgccgtccaggctgttgttgccgccgcactcggcgtcggcgccgtcggtctgttcgttggctccgtcgtgcacggcggattgcaggaggcggattgattgattgattgattgattgaatgatgtgggaatggtatgtggatgaattaattttagaattttttttttttt

SEQ ID NO: 101153 - DNA, 223 bp, Glycine max
gttcattttagcttatagagaaactgaatatgttcaatttagcttctcaagtacttatggaaaagtttttaagattcaaatattaaaagtttcttgtaacaaaacttaattgaactattcatttcacacccataatccattttcttcttagcgctgctgagttatttttgttttcacattggctttgtaaaaatttagaggataaagtgtagttataattgtc

SEQ ID NO: 101154 - DNA, 102 bp, Glycine max
cgtgcattatccgatagtgaccagagcagctctatccggaaccatagtgcgcagctcgggcatgacggggccggctatgacgatgaagaggctacagcgatt

SEQ ID NO: 101155 - DNA, 241 bp, Glycine max
catttattcaggatgactgtttcttttctagagaaaatttactagaatctctgaaaagagaaaatgaaaatgagataggttcctcatcaactgagatgccaagacatatcggtaaggtggagacaaaacctaatcatatggaagagatatggtcctggtctcacttgctcaacaatgttggagtatttagagagatgtcaaagggatagactcttcctcggttataaatacgacacagaaa

SEQ ID NO: 101156 - DNA, 103 bp, Glycine max
cttgtggcaagtcacttgcttctttccctcaaggatgtatctagtctgcagctgtagcgggatttgtgagatatgaggctcctgaacatccgattagtgcagt

SEQ ID NO: 101157 - DNA, 247 bp, Glycine max
tctgaattgggtcattcagggccatgccacttgtcaaatgctgtgttggcaatggtgaaggctgcatttgactccattgactttgaggtgcacactggtactcatcctcggcttggtgttgtggaccacatttgttttcaccccctgcttgatgcttccttggatcatgcagctaatgctgctaggtgtttagccacagacatgggttctactctgcaagttcccacttatctatatggagcagcac

SEQ ID NO: 101158 - DNA, 265 bp, Glycine max
tcttggttcaaatcctattttgtgttgttatactctatttttatgttcacaatcaacaaaaactagcgtaaacaacaaaaaagtaatgtactgggctgtgtgagaaagcaataaacactactaaaataatagtattctacaatgcgcattcaacaatggcggttccaaaaatgatgttgtattagaggcggaggcattttactaactaagacatatatttcaactacgtttgtgttgaagcgacgtcatctgcgcgttacaaaac

SEQ ID NO: 101159 - DNA, 241 bp, Glycine max
aagctaccagtaccaggagctccctatctacagtgtctctctctctctgcaaaagcaacgctgctgtgttctgatccttcaaattaggatcactctcgtgcgcctgacgccgcttgtaatttcccctccaacgcgcaatacagcttttgactgctagtaaaatcaccatttattgctggttgtatgtcattttgggagacttaaatggatgcttagccgtggattaggtcaatttgatctc

SEQ ID NO: 101160 - DNA, 264 bp, Glycine max
ctctgagaatggaaagcgtccatccaacgataaggctattcaagtatgagattgcctctaatgaagtttagtggtcaaattttttatatcaggacttttgatgctgtagagaaagctgcaacaaagctcttacaaattctccaagagatgatgcaaattgcaattggatttgacattgagtggatacccaccttcagaaaagaacgttggtggactgtcttgatgaggaatttcaagactcatgggaggcagagctctctattt

SEQ ID NO: 101161 - DNA, 251 bp, Glycine max
ctggtcttttttattcccatatcatgtgatgcattcaactattgcatgttgttatcttaattggccttgctagttgctactacttcactttctataatctgtgttggaagacatcatggttcagcacttcagtcagattctgttttttctggttctttttcacttttgatcattggtttaatggtttatcatcgctgacataattctctcgaccagatattcttatctcaggcgagcatgaactgagttgc

SEQ ID NO: 101162 - DNA, 237 bp, Glycine max
gacatctgaaacctccgtgttggtgttgcatatccaaaccctactttggcaattgatttgctcaagggcagaagattaagatggtactggcggagttctgtgcgtgcatttcgcgtgttctccagctgatgagcaatgcgacagtcatcgacgagccggagctccacgatcgcgtcaacgacaatcatcgcgctcttctccactccgatgttcaattcaagcttgctccgcgaaatg

SEQ ID NO: 101163 - DNA, 254 bp, Glycine max
attaattatgcggtctgaagctaatggcgactcagctgctttgtatgtgttgcgctgctcagcctcagcctcagcctcatgcagcaccgtttatgaggttcccatataggaattcagttcatcaacagaatcaaacgagtgtagtcagggtgcaagcagaagcagcagatatgactatgaattcaatcaaacacgggctgggtgatgccggggtctgaatctgcgggtggtgctggaatccaagctgatcttaa

SEQ ID NO: 101164 - DNA, 243 bp, Glycine max
gggattattgcagcatctggaggtgtgcatcttgtttgagtctgatgttctcttgcaggatgcggccattcattaccattatatgctgcgagtctctgagaagctagcttcagatgatgatggacttgattacttagttgatggaataggaaatcaacttgagatagaaaacatcatctccagtttgctagctctaactcagggtccagacccagctcactaccgagagcctgcattacgtgc

SEQ ID NO: 101165 - DNA, 261 bp, Glycine max
aaataacgagaccacttcactctcgtaatgagcacagagatatgctatacccacaacacaaacatcttttgcccaaacttgaacctcttacctcacaacatatcgcctctgatatgccatagctttggatgttcattgcaactggacatacaaactattggacttatttctgtagaacagcagacacactgacgaagccattcaggagaacaatgtgcatcataacattgtctgatgtgggtgcttcagatttcccaaatt

SEQ ID NO: 101166 - DNA, 235 bp, Glycine max
gaatcatttcatgcacactcattctctgaggccacacttgaccagtccgaagaagagcctacacttagtacttcctgtacacagttagattctgaaaaatcatatggggacatttcaacatccttgttaaaagcagagtatcataatgcttttgggagtgaggctgggagcaagataccaaatgaatcgttcgtttcgtcatcttaacaaaagatgacattttggatctttgtct

SEQ ID NO: 101167 - DNA, 250 bp, Glycine max
tttggttatctcttcttccacgaactttcggagatttctgtcgttaatgaatacaatctttggttaattaatgtgtccttgctggaggggtaattaatgaattactctctggtagatatttatacatatggagagtctggaagaatgagtgtttatgttcatggatgagcgatattatgatggcgattccaatgaatcatgagctgcatatgcatcatcatccctctgtgtctgcggagaaatatcgtgg

SEQ ID NO: 101168 - DNA, 214 bp, Glycine max
ttatcgcctcatcaaactcacaattacagatttcaatacgaagatagaacaagccactgttgtggagtgcaaaggccatgatgctgctcggttccacagcattgatcatgctcatggttgggacaaggatatcaccggtatgattgaaccaaaggatgggaagaaaagaatctcagtttcattcgagtgtgagacactgaaagctgggaaagca

SEQ ID NO: 101169 - DNA, 256 bp, Glycine max
ctgcaagggaaacgatagagcaggttatggcagatgccctttcaaagtgtggttcaaaacgatctttagtccaagctgtttgtttggctgtatctggtgttaaccatccaacagatcaacaaagaattctcggttggcttagggatatattcccaagccatgtgagactatatgttcggaatgatgctgtggctgctctagcaagtggaacaatgggtaaacttcatggatgtgtattaattgctggcacagggag

SEQ ID NO: 101170 - DNA, 246 bp, Glycine max
gagttgtgagcgaacacacactatctctttactgtgcagttgctgcaatgcctacaaagctgttctcccaactacgtcttctccatcccctcctccccatgaagccccgcactctcccgcttctgtcaagagtcttcttcttcccttcctcgacgttcctccgaaccgcaccgtttaaggttcgtgccttctcttctagggaccatagcagggaaaagcttccgctccgatcctccaagagcctcg

SEQ ID NO: 101171 - DNA, 211 bp, Glycine max
gcttttctcaccaaacaattattatttgaacaaagcaatggttgatgttgttaaaatttcaaccattgcttttctcaccaaacaattattatttgaacaaagcaatggttgaaattttaacaacttcatggtttattttatattttgtgcatataacttcttataatctcaactgctggtttttaaatgcaatggctattatgtatctaaa

SEQ ID NO: 101172 - DNA, 277 bp, Glycine max
ctaaccaaaaatcattcttgggtttgaccaacagaaatttgtccataagcaagcatgctgcagggaacaaacaaggaatgacagtttatcctctacaatgttgtgatgcacagtcagaggaagcaagaatattttcagtgtccaaccaatcaaatcaagtgagtcctgttcttcaatctaatcttgcctctaccggactgaacatggtcaattcagtcataaaaccacaaccttttggttccaaatcctctggcacactctatctattcttcatcaa

SEQ ID NO: 101173 - DNA, 270 bp, Glycine max
gattcggcacgcgcttcgatcgatctctcttccatctgctatgtagatgtctgtcaccgtctagggctctggctttggggcactatttgaagaaacaaatgtgcattctgaagacagcaacgcatcataagctgcactatgcagtgcctggcctggacacaggcagtatgatcgatttaacaacgtagcgatggtagtggtaggcatgctcgttgagcaatggggtgaagcgccttgtgccactgggtctaggtgatgatgatcaatgca

SEQ ID NO: 101174 - DNA, 168 bp, Glycine max
cgcctcgacatggattccgataattcctccgccgatgcgctcttgcaaggataatatcttcagaattcagaatctttcatatcattttggttatgaccacccactagctattggaagatatttgattctgaccatgcatctttttttcttattttcaaagtttggatc

SEQ ID NO: 101175 - DNA, 260 bp, Glycine max
tacaactacaaaggttcctgtaggagataagatattgaagtagtgctaagtgcctaacacctgcagtgagcaatggcctctgcatcagcatctcttctcaagtccacacttgttcacgacaagtctgagtgggtgaagggacaaacacttcgccaagcttctgctgcatcagttgtgagatgcaaccccaccagcccatcaggcatcaccatcagagctggttcctatgctgatgcgctcgttaagaccgcgatgacagt

SEQ ID NO: 101176 - DNA, 247 bp, Glycine max
ggatgaactaggtgctctatacgatagatacagagttggatatgccacagccgatgctattatttcagttcaaaaagtagcatctcggttgggttgtgataacttagatgaaattacaagagaagacatggctttggaggttgtaatttttatgcaagcaatttgaagtatgccataataactgtttcatgttaggaagtattagatgagcttattttttataaaatgagtaaagctttgtttttgg

SEQ ID NO: 101177 - DNA, 247 bp, Glycine max
ctggtactccgcaaaaattcagtgtccctcagagattagcttcattgattaggtttcgtgaaaagcggaaggaacgaaattatgacaaaaaaattcgctatactgttcgtaaagaagtagcattaaggatgcaaagaaataaaggtcagtttacatcttccaagtccaataatgatgaatctgcatcaaatgccacaaattgggggatggatgaaactggacagcagacaatagtggatcccagcag

SEQ ID NO: 101178 - DNA, 232 bp, Glycine max
ccaaaatccctttgttgttgtagctacccttcagagcaaagagagagagagagagagagatgtctcttccaagacccagtgagggtaaagccccttctcagctgaaagaaggagtagcacctgctgctgctgaagcctcaacctcttcttcatggaataataggctaaacacttttcctccgttatctctacacaacagaatagcaaaattgaagacagtgatgaggatatg

SEQ ID NO: 101179 - DNA, 249 bp, Glycine max
gcaccaccctgtcgtttcacaggagtacgggaagggcctaccggttgagagtgcgtgggtggggatgcgtgactatagcccccagcttgttgtgccatcgattttggagttcgtgaatcggtttgagggtgggattgaggggattatgaagaggaaccatgacggggttgtgaaaatgggaaccatgttggcggagtcgtggggaacggttctgggtcgcctcctgatatgtgtgctagcatgattatg

SEQ ID NO: 101180 - DNA, 246 bp, Glycine max
gtaggtgaaatgatgcactcagtggcaataattacttttggatgctggagataaggcgtgatgggcggttgctgttgttgttgttcttctaaggagactgtgttgagcgctccacctgcgtactactatgtgtgtgtgcttttcatgtttgaattttgtgcttttactttattttattttttttgctttagcctaactttgcttttctgagaggatttaatttaattgttgcgggacatgcatcga

SEQ ID NO: 101181 - DNA, 240 bp, Glycine max
ctatcattcaacaaaccagagaatcagtgggacaatgttcactgaaatattgccaaccacttctgagtcatcacaagtgtcagggattaaacgttctaaggatgtggcttctcaatctgatttttggggtctatcttctgaaagccctttagctagtaccctaactgaggatgattttcttgacatgtcctatgcagaatacctggaggtcatagcagatgccagaaacaggcaactaaa

SEQ ID NO: 101182 - DNA, 242 bp, Glycine max
ctttaggcaacccttttgagaacctatcccaatccataagctcaagaaacagctcacagatactaagtttgtcgaaagcctctaccgggttcttgccagcaattttatggactggaatgttcatacatcagggtttgatgtcatgtgtggcacgtttagaatgagtggcatcttgtttgcatctttaggggttcttggctttgttatgcgcttcttgttgtggtcttgctggtgctttttgc

SEQ ID NO: 101183 - DNA, 242 bp, Glycine max
cacacacccctcgcatccaacaatgtctctcaccattccctccaacctctccaagcccaccgccctccgccccaaactaagcccaaagctaaggtccgccgccacaaccaccatcgtctgcagcaccaccaacaacaacaacaacaacaacgtgtcctccgacctgaaggcgttctccgccgcgctggccctctcctccatcctcctctcgcccctctcaccgccggcgccgacatctcggg

SEQ ID NO: 101184 - DNA, 243 bp, Glycine max
gcatttaggagattatacgagcatgttggtcttggttgggtttatgccattacaaaatatgaaccaattgcaaaaattgctgattccatatatggtgtttgggctaaataccgtcttcaaattacagggtgaagtatgcaaagacagcaatgcttgcaagatgtaaatttccttaatatctgactccaaaaggctcgttatgtgattttttccatatttgatccccatcctttgaagcaggtc

SEQ ID NO: 101185 - DNA, 247 bp, Glycine max
ctcttggcttgtgaatcagcaccacattcacctgagctttttgtgaggattccaaagcatggcttcccttgcagcatccactgctgctgcttcccttggcatgtcagaaatgcttggaaaccccatcaacctcagtggtgccacaaggccagctccatctgcctctagccctgcctccttcaagactgtggctcttttctccaaaaagaaggctcacctccaaaaaaagctgcagctgctgctcctg

SEQ ID NO: 101186 - DNA, 243 bp, Glycine max
cacaatgtcacactaaggaactcataacaaacccattaagccacggtgcccaaaagattagggaagcaattgagttgctaaatgatgagtacataaggtcacaattggacttcattaggtgccatgagcaattggataggataagggcctcgtatttggaccaaggggagccaaaaaatgcaccctgctatggaaaccctaatctcactattgtgagttggatgagcatgcccgtttatgagg

SEQ ID NO: 101187 - DNA, 233 bp, Glycine max
aagatttgtcatggtgtgaagtgccaagacaaattttagtcatatattttttacgaaatagctattcatataaaaaaaatattcataaaactgataattgatcttcggatcaattaaaattaattcaagttgatataaggcagaccaaattaaactaaaccaatccacttggttggattatctacaaaaccaaaacagaccgaccccttctacttatctcaaggagacaaatg

SEQ ID NO: 101188 - DNA, 235 bp, Glycine max
cttcacctgtcaaagattgcattccatccagggaaagtgtggttgcatatttcagctttggcatcaactatgtgcgttccttagcagcatccagtaaatcttgaaactgaaaatatacctttaatcaactacatgcatcatttataattgttcacattgtttgtattggaattggagtttggcttcaaatagtgttggttatcttatcatatgtagttgtgtgaaatgtgtaatc

SEQ ID NO: 101189 - DNA, 233 bp, Glycine max
gaggaacagagtcgaaaagcacacagattattgctaaatttggcagaaaaaagccacgtgtatttctgagagattgtgttgtgtataatgaggactttcgttgaggattggaacctggagtgttgggggttaaggaaaactagaaccgaatgatgcgtaaagcaattgtcttttcttgtgacactggttttggttgaaggttcatacgtgggaatcttgttggtattaatgga

SEQ ID NO: 101190 - DNA, 233 bp, Glycine max
ctgcttcaaagccgcaaatgttgtctctcaggctgacctctttcacccacctcttctccccgccctcttccgccgtcatcgctcgccgctccccggcgattctgaggcggcgccaccacccccgtccatggccactcgcggcgtcgttctcggcccagagctcggcggcggagacccaggaccgagttgagaactcgaagaaccgagtcaccgagcgagtcataacgccaagg

SEQ ID NO: 101191 - DNA, 160 bp, Glycine max
ggcattacgtcgttagtcggctcgagaggctagcagagattgcattccatccaaggtttgtacacaataagccaaatctcatcaaggggcttcttcctgatctgctgcctcttctatatgatcaaactattgttaagcaagagctcataaggacagttga

SEQ ID NO: 101192 - DNA, 252 bp, Glycine max
ctcgagccgcgcggtaggtgaagcgaaagcggaagaggtaagttagtttgttagggtttcgacgagatggaatcgtcaccgtcgtcttcgtcatcgtcgatgtcgtcgtcgtctggaagcgataccagcggtggtggtggtggtggcgctgtcacgtggttcgggatgagtttcccattccgttctccgctatctctcgtcatggattactgcgcgcgcgaggattccgcggagctgtgattatcattcccc

SEQ ID NO: 101193 - DNA, 101 bp, Glycine max
cgcggtatcgcggctcgcgagagattgtatccaattgagattctagcaatggctgggataaacttaagagttcaattgattgacattgaataagtgcgcaa

SEQ ID NO: 101194 - DNA, 253 bp, Glycine max
tagtatttatcaatacctgtgattgtgaatatacaccccctctgtgtttctttctctttttttagcttttcccccgtttttttttatgcctttttattatggggcttaaattaaactacttcattggaacgtctctcttttcttcttcttcttaatttacagtttttgcacaaattgtttcttttgattggattgtgtacaaaactacaaataagtccaacaaggaaaagtaataaaagtaattttttaacaa

SEQ ID NO: 101195 - DNA, 117 bp, Glycine max
  unsure (1)..(117): unsure at all n locations
nctggacaagtgggcatgcaatagtggacaaccacgcgtatcagaggcattacaatgtcatgttagaagctgagacggcaaatgcagagccacagctgtgtgcgcatagcagttctg

SEQ ID NO: 101196 - DNA, 256 bp, Glycine max
ataccattccaattctcaacactcaaactaactgcaacttgcattccctagagaacacacctctgttgccttccttcacttcaggtaataaatgaatcttctcatctgcttcttcccttgtttatttttcactcttaattactctcctagtaacaaatctagaccgtttattattttatgaatatatcctacggctgttacctatatctgactccactttgaaacttgagaaactcacttcacgtacgttgttgga

SEQ ID NO: 101197 - DNA, 248 bp, Glycine max
attaaatttaaagatcaaacagcagaaccaagtggttataaatgccttttgtgcaagagggatctctcctacgcaccagaagggcctatttcccagccacctgttccgcctgctactgctgttctaccatgtggccacacctttcatgattactgtttggagcgaataacccctgatgaccaatccaaatatcctccatgcattccttgtgctcttctcgagtagtgaatttaggcttacattttgaa

SEQ ID NO: 101198 - DNA, 274 bp, Glycine max
ttcgaatgcacgatggtggctggatgaatacaagtttgatggattgcgactcgatgaagccaaatcctctccggtactcacgccagcgaccgcgcctccgtgccatggaagcataactccagcctctccttctccagcccgaagcccctcaagttctccagaacaatcagagcagcagccgccgacgagaccacagaggcaccagcaaaagtagaggctgcaccggtcgggttcaccccaccagaacttgacccaaacaccccttccccgatct

SEQ ID NO: 101199 - DNA, 191 bp, Glycine max
cagacatactgttctttcggtgtttctggagattggacagtttcaaaaagcaacttattgtcattgtttcaatgtttagttttgtacttgaaatttttttggtgacatttatttgtgtatttgagatgcaacgacattacaatgtcatgttcaacatatgccttatatcagatatggcatctataataaga

SEQ ID NO: 101200 - DNA, 197 bp, Glycine max
cgtaagattgcagtagtgctaagtgctaacacctgcagtgaccaatggcctctgcatcagcatctctgatcaagtcttcacttgttcttgacaagtctgagtgggtgaagggacaaacccttcgccaaccttcagcatcagttgtgagatggaaacccaccaccccatcaggcctcaccatcagagctggttcctat

SEQ ID NO: 101201 - DNA, 197 bp, Glycine max
cggctcgagatgctctactgaagaaatttggtttagaagaggctagtttcttgccaaccaataaagtggataatgatgaacagactaggctttaccaaatggacaaatttgacttcagaacatcaaacatgttccttgtgccaatggttgcactcctcatcatcaacatatcttgcttcatagggggaatctacaga

SEQ ID NO: 101202 - DNA, 204 bp, Glycine max
gccgttgccgccaagtatttaaaccttgactgttttctcatcctccgcacttctgacctcctcgtcgatcaagatccaggacttactggcaatcttctcgtcgaacgtatggttggagctcacgttcacctcatctccaaacaagaatatgccaaaattggcagcgtgacactcagcaatgtcctaaaagaaaaattgatcagg

SEQ ID NO: 101203 - DNA, 100 bp, Glycine max
cgaaattccaaatgtggtcgcttgcagttactctctagttagagcttcccttccaaattccaggtgattccgtcggagagcttgcgatggacgcttcttc

SEQ ID NO: 101204 - DNA, 195 bp, Glycine max
gcgcactacatcagtgagattattagagacgggttcacgtgaattgggtggttctccagcagcaacatgggtgctagagaaccacccaattcacctgaaccctgcgcactacatcagtgagattatcagagaaggcacaaaaaatggcactgctttctttaagtgccatggacatgagcaattcgagatgacggg

SEQ ID NO: 101205 - DNA, 195 bp, Glycine max
gttggaggattctaaggcgaataaagaagcaaatccaacaaaaaaaaagcaactaattaatcctcggacagtgtaaaatcaaatttccacatttccgagagagaggatatggcaaaggcatacgagcaagctattgaagatctccagaaattgttgagggagaagagtgaactcaaagccacagctgctgagaaa

SEQ ID NO: 101206 - DNA, 100 bp, Glycine max
atctaagtgagatacacagtagttaggtagcaagcataagtgtctaaccttagaaacatatctgctacatatcgtgtgcattttggaattgtgccactaa

SEQ ID NO: 101207 - DNA, 168 bp, Glycine max
tcgcatcttatcttcgctgccactgcaacaggcaacaaatggccaccttcattttcaaatgcttctgagacattatttcatcaataaggaagatgcatgagttctccattgttgatggttttgtggagataagtgaatgcatggcagagatgaccaagtacgtggcta

SEQ ID NO: 101208 - DNA, 191 bp, Glycine max
ctttctttctcttcgagggtttgggtttctcttcctccctggtagaaaaagaagagtcaccgctacgacgccgttcgtgcttttttgaggtgccacagtcatgtttgggcttggtggaccaaggaggagtgacaactccaaatattatgatattctcggggtttccaaaaatgccagtgaagatgaaatca

SEQ ID NO: 101209 - DNA, 187 bp, Glycine max
gttattcaccttttgatgattgaagatgctgaataacgtgatcatttaaacttcagagccagagggctctgtggacaacgatcacgttattcagcttttgatgattgaagaagctgaactgcaactttaggcaagatagacaccaggtgtacaggctccgtaactatcttctgtattaatgattgag

SEQ ID NO: 101210 - DNA, 188 bp, Glycine max
gttaaatgtcaccgcaaacctccaaagcataacccctctcagctcacctgtgtttccttccccagtttggttgaagacctcaacacctcggatttgaactcttccctaaattttccctaatcggattcgtgtgtttgcttctgcgttccttctcatcagacgcgcgttactgacacttggaggtgtca

SEQ ID NO: 101211 - DNA, 196 bp, Glycine max
cgggttctagcgaatcggctccatctgaacgcttatcaagatttagtcttagcggatttatcaattcatagaatgtctagtgttggaagaacagttcctagcttcaaatacctcaaggcagtgcaactactacttgatgaagttgttgacatccgaaaagctattaaaagacctgttgtgagaagttatagcacac

SEQ ID NO: 101212 - DNA, 195 bp, Glycine max
gttccgtggggtataaataagagtgttttgggaagagactctgctatcatcaccattgtcttcctaaggagagggagggagagattcgaattccaattagggttttctcatcatcatcgactttttctcttatgcaatgtaggttctccttctccgatttcaatttgattgaacgagtagtgttaagattatgat

SEQ ID NO: 101213 - DNA, 187 bp, Glycine max
gtgctatcactgttgctgtggatactacagtcccgggcatgtgatgacatcttgttcctagcactttctgcccatccacaggacgcgacattcaaaagaacgtctgcgtgccattaccattgccattgtttcgaaatgaggcgtactgaggatgcagatcggcgaaccacggatgtgacattgcagc

SEQ ID NO: 101214 - DNA, 195 bp, Glycine max
ctctggttttccttagagtatctcactacattatatctatcgagattgaattatgcttcaattatagatcattgtctattgtgtctgaataataataggcatttatgtcggcgatgacaaagtcattcacttcactagacatgggcaagaagtaggaaccggtactgcactagatcttctcctcatcagttcagg

SEQ ID NO: 101215 - DNA, 199 bp, Glycine max
ttttaagtttgcctgctatctattattttttgtccagtgattattatttatagtgtcctgtgtcaagtgtcgtcataaaatgtgttaaatgtctcagagaagcttgtgagtcggctttgaaggaaaaacattttcttgattactcccaaatggaaggatttgtggatgacgctactacttcccattcagaacaattaga

SEQ ID NO: 101216 - DNA, 191 bp, Glycine max
atcaacctcaaaagtgctgatgaaataacatctaagttttgtcatttgccaatgatgctgatagaagtgaagtgtcatctgatactgcaatcaagacatcgtattcagaagccgataagatggttgatggtatggactttggtgagctttgcaatgagtttgagtgcatcagcagtcccttggtagaatcc

SEQ ID NO: 101217 - DNA, 195 bp, Glycine max
atccatttcaatgagtactgtggtgtggtgttaagaattcaccataaaaaaaacatctagttgatttattatatatatgtagacaagctttcgctgtttcaaacttcatgaactgatgatgttgatgatcagtttttcacattttaggtgcttagatcttctattttttcaagttaattattgttatcattatta

SEQ ID NO: 101218 - DNA, 110 bp, Glycine max
gtgaattctatgatatgtatgtctccggtgttcctcacgaatactttgatttgcttaaatactgttactgcaagaacgaatggaatgagttttgttctgaatccgaatcc

SEQ ID NO: 101219 - DNA, 188 bp, Glycine max
ctcagctctcagtggggacttcattcccacacaagagatgtagtcgaagacccctccttccgagaccacaagctgttccctccagaacccagaggataatggagagtgtttcagtgagtggagaagttggtggtgctggtggcgcatactcatatgaagccttgaaaagattagaccagctatggtca

SEQ ID NO: 101220 - DNA, 127 bp, Glycine max
tcctttttctagttaatacatctcatggcttatacttgtataaggttgtagtctccaaaattacatggtgtttgtctgcaaaaggataaaacaccatgtaattttggggactacctcctttttctag

SEQ ID NO: 101221 - DNA, 212 bp, Glycine max
ctaagtttcttcctttctctgctctttgccttctctgacacatttcggtgccttgtcagagcgtgttttgggcaggtaaggtggtataggcgaagggacgtatgaggtactgctgagcgatggctgccttgctctgcggaacggactgaccagtgtacccctgccaccatgcactcactccacttgagtgctcgatgtgagctcatcaaagt

SEQ ID NO: 101222 - DNA, 178 bp, Glycine max
gcaagaagaaagctgcaaccaacatacgttccaacaaggaacaaacagtgattcttgatacgccattggactatagtctggatgactgcattgaatacatccaagaagatgaactagtagaggtcacccccgcaagtatccgaatgtccaagaatccaaaaattacaaacaagaaaac

SEQ ID NO: 101223 - DNA, 188 bp, Glycine max
catcaagataagcaagtttttattttctggtgtcaaactgtgctaccgttgtaagatacctacaatcaatcaagagactgcaattgctcgcacctgaaccaaatgaacactctgcatgaaaactaagggtctggagatactcataagaccaaattgataaaaatagaaaaaagggatcctgactttgg

SEQ ID NO: 101224 - DNA, 179 bp, Glycine max
atttatttccctatccctgttttctttcatcttcttcttgtgcccgtttcttttgtccttcttcaccaacaagtaccgcacacagggtaagtaaatcttttaatctctgcttggaaccgtgcctaatcaactcaatctccaagtttcgacctaggacgctccaaaatttcaaattaggg

SEQ ID NO: 101225 - DNA, 103 bp, Glycine max
tgccgaccttgtccgcctgatccatctgagccttgtcctacaataggtcggtctggtatctacaagaaattccagtgcccacctaatcactacaatgatcttg

SEQ ID NO: 101226 - DNA, 103 bp, Glycine max
gatttatagctggggcgagagctaaagtacatggtcatggcaattgatctgtcaaggatctctgtccggccattcaaggcaagtgaagatgttgacgatgtat

SEQ ID NO: 101227 - DNA, 121 bp, Glycine max
atggaaatcagtgggtgtgcagagaagccatgcatgcagctggctgcatcaaatgccctctccaacttggaccacatgtgcagcctggacatcgactccagggcttcatatgtgcgtcttt

SEQ ID NO: 101228 - DNA, 102 bp, Glycine max
cacactgcccagcaaaccaagcaagatgggtgccccgggagacgatgccatggccacagattactcctaccaatccagagacacacaagcaccgcctccata

SEQ ID NO: 101229 - DNA, 100 bp, Glycine max
ggatcttaaggcacagatctcaacacttgtagagaaaggcaaggagatgagcacggcagagactgaggcaggggatgaaggtcctattgtgactgacgct

SEQ ID NO: 101230 - DNA, 100 bp, Glycine max
tacatttctcacaaaacaagattatcatcttcatcttcaggaataacaatgatcccacgagcaacaacagttattggtactgtggaggatggaaatcaag

SEQ ID NO: 101231 - DNA, 196 bp, Glycine max
tgtttgatcagtgcagtcttccatatatgaaggtattgctcaaaaaacatatatggaagactgcactgatcaaccttgctatagctattggtgcagtatttattgtgtgcttgattttcacaagcagtttatggagctcatcaataattttgttggtgttggcaatgattgttgttgatcttatgggtttgatggc

SEQ ID NO: 101232 - DNA, 191 bp, Glycine max
ctcatggccagtgccaaactccttcttccctaccccttcaccaccaaactccccggcccgcgctactctcaccggcgcttcacctgctcctccgtcatcgcccaatccggatccgccaaggagcacctcctcgccctcatcgccgaccaggaccgtggcatcaggacccagagcgactccgcgaagccgcc

SEQ ID NO: 101233 - DNA, 195 bp, Glycine max
gccactccaagatcatctttggatggaggtgagaagaaaacaggatgttacattatagaaaaatatcatggacctgcactcggttgtaatggtcatgcttctgctgtcaaacaagaacatgattttcaattactttctgctcctaacaataaagtatcttcaatagcttatatttcaacttcttcactggaaaag

SEQ ID NO: 101234 - DNA, 206 bp, Glycine max
gatgaacttaggcgttcaaaacccactccagttgatgaagctagggcagaagtggaagaatcccttggtttatttatttttcaattctcccagtattgaatattgtggaggagtcactctgaaaagctgttcctcattatttacgtcgagttagcagcgctttaaagaagcacacaggaaaaccacttccattgacttgcactcca

SEQ ID NO: 101235 - DNA, 199 bp, Glycine max
ctaatagggaaaattttatgttagggtttcgatttcactgctccaattacattgaacagaatggcattggaggaaattaagctcctccagaagcagcgggaaaggaaatcgggaattccagcaaaccctagtttgcaggtgcagagtggaaccggcggcggtttagctgctaaagccgccgaaaagaacgatggcgatg

SEQ ID NO: 101236 - DNA, 198 bp, Glycine max
ggttacttctaatttttctagaaaatatcctatatattaatttggctgttaacaaccaaactgttgtgcctacaaaatggaccatttattgccttattgatgttggaatattttcaattgtcacagttagccagttaggtaatgtttggcataacatattttaagcttctcttctcattaaagggagaacttagacca

SEQ ID NO: 101237 - DNA, 204 bp, Glycine max
gtaactgtatttggtaattgatttcagaagtgaagaggaagttacacctttcaagtttcacaacttaaatctactcccctatttacatctaaaccagagttagttcccgatacagacctcaacaatggatgattggtagtgggctgcacatactaggggcattgaacatggcagttgaagaagctggttgtgattgttgtatca

SEQ ID NO: 101238 - DNA, 210 bp, Glycine max
tcggtctcaatctttcattggcaagtaggacctcgactgaaaatggatacgaagttttttcctccatatcttaataacactagtaatcatactttcaatgaaagcgagctcctacggatcaaaagcaagttcacaggatggctaattccagacaatgatacgtccacgcctcatgaactgattggcttcaatcttttcggttcttaccag

SEQ ID NO: 101239 - DNA, 198 bp, Glycine max
cacactctgaactctctcatgtcaccacttcgctaattctaaacccttccttccttccttcccaaaccaaaatgcaaaccattatttcgttccctcacctcactccatttccgtatcaactctctccagttccattcccttctctcacacacttctcctcgctctccatcccccgttctctcaccgtcgctcactgga

SEQ ID NO: 101240 - DNA, 190 bp, Glycine max
caaaaaccgtaccaacccccaaacaatttctggaatttccacgaaaaatttggcgcaggttgttaattgttatgtacacctagctgtacagtacaagtcccatctcttttatttattttttactttattcgatattaattatattcctgtttagtgaatactgtcttattccttggtttttgttctccat

SEQ ID NO: 101241 - DNA, 196 bp, Glycine max
catattaaatattaaatagaaaaaatggcccgatcatttatcaaaggccaatcttcggtagaagagaaggttcctttggaacacttatttctatttcagtataccgggtctctttctttcatttcaaaaaatttatagaatatcgattttgaaatgaaagaaaagtgtggggataaatataaatgacaaaaagata

SEQ ID NO: 101242 - DNA, 200 bp, Glycine max
cttgctagaggggcaaggcaacagacaaaagagtgtgtgtgtgtgcgacagagagagagaatttgagataatatgggtatgcgtatgggtggacaagtatgctaagtattatgtatgtagaagacatcaaatgattgaggaataaggggacgacgaagaaggtagactagtgaagcaaaattttatgcataacaacacaa

SEQ ID NO: 101243 - DNA, 264 bp, Glycine max
caaggactgtgctgattcctctgttagacactttttgagttcctgtcgcaatattttgtccaaggcattgcacggccagtgtgcgcgtgtggtgttggagttttgtaaattgcttaggagagtggggtctcagaccctttgtatctcttttgtcgtagtacttttgggtccttgttggaaactgctggagtttcctatggttccggttcggataatgttaaggggctggttttgattcaggatattttcccctttgtttgtgag

SEQ ID NO: 101244 - DNA, 260 bp, Glycine max
agatacacaagtatcagtatacgagtttaagcacagcaactaggctccaactaacttcttatctctctggggtgctttcaccatttacattggctttcagaagtcaacatcacaattctcgcttcagagttgcaatggctgtttcaacaagtatccctggtgcatagttcagacgctttgtcactgacatgtggctcatccaatgctgctactgccactgtcagcaccagcacccatgtgtcatgcttttgcaaaaccag

SEQ ID NO: 101245 - DNA, 259 bp, Glycine max
ggatttgtggattcgcacaacacagcacgatattctcctctcttcttcacttgcaatatatggttacctacctttcccgccagatttgaattgtgaatggagcgattttattcttctcaacgagagagcggtttttagggtacaataatgactatattaattctctgattccgaggtcgtctccagcgattcgaactcggaggtttatttcaccgacgtgtttgggcggccgccgcgggggtcttcggtgaacgaacgc

SEQ ID NO: 101246 - DNA, 256 bp, Glycine max
tgcaattgaagactctgatgtttatgtaccatgtacctagcgagtagtggaggtggagagagagagaaacgaagcaattgtagtttatcttttctctgttcttcttcttcttctatgcttggcgtctgattttcccttacgattgactcaggaattggctatggctgtacccgtcgaggaagccattgcagctctatccacattctcgctcgaggatgagcaaccagaggtgcagggacctggagtgtgggtgtca

SEQ ID NO: 101247 - DNA, 102 bp, Glycine max
aaagtacccaccagggttttcaactaagtctattcgtttggtcgaattcccaccaagtcagccagggttgtcagtagctatagtataggatcgttctgcgac

SEQ ID NO: 101248 - DNA, 117 bp, Glycine max
tgcgtttcatctcatatactactagcaccctcagagccggtgcccacttgcttgtcaattctcgtgcattgcccttttcgacgccctcgaagagttcaaggatttataccattaata

SEQ ID NO: 101249 - DNA, 177 bp, Glycine max
ctcaaaagctcaaccacttgccatggcagcagcagcgtcaatgtgtatgagcttcaacctggcaacagcattcaagggtctctctttttcttcttcttcctcatcgttcttcgctggaagtgtagttattctctccgcgcgggtcccacctcggtggtgtcgctgccccgcgctgcc

SEQ ID NO: 101250 - DNA, 178 bp, Glycine max
ggtttaccaagaacccaagaggcattacccttcttcagaggatgggaattgagccttgtagtccacacattgatcatggtcattgcatctgggactgaaagctatagcgctcaaggttgcaagagaacatggcgtggttaaaagtggagggcaagttcctttgagcatattcattttg

SEQ ID NO: 101251 - DNA, 187 bp, Glycine max
cggctcgagggaacaagactctgcaatgaaggaacagaggaaccatcatggttctttgaggaggctatctgtgagttctccaggggtgaggttgaggatccactcgccgagaatcgccggcaggaggggccggaaaagcgtgtcgtcgtcatcgacgagacaagttccggctcccggagaagcctct

SEQ ID NO: 101252 - DNA, 230 bp, Glycine max
cttctttagttgttgtgagtgtttcatttgctgaaactgaacaacacatcacaaggccatcgatcatgagcatgctgcttgccccgaatgggcatagccaactgcaagtacgcaccttcactagagactcttgtatgctcccaaggcgcctctactgcctgcttcaccacttcacctgcgtgcgcttctagataggcaatttcagcttgcactgtataaggccatgccaa

SEQ ID NO: 101253 - DNA, 225 bp, Glycine max
cttcttcaactgctccttcaacttggagtacctcgtccgtcgttaccgtccaataagttgtctcagcgattctcccaagtacctcgtttttgcgacgccttcttcgactgtgtttggacacttgtcgtctgtgtgtacttggtggcgacggtgacggtgccggttcagtcgccgtttaatgatcgagtgacgtggtcagaactcagcgacgatctgcgattctcg

SEQ ID NO: 101254 - DNA, 226 bp, Glycine max
gtaaccgttgatggcctcggtgacgggttttctagtctcacccgcgggagctgtaaggcaccactggtttggagttcgggcggtgttgtcatctgaatctggaacagtggcagctgtgaacggatcttcttcgcagatggttccttggcacttaaggaggaaaaaaaggtgcctttgttgcgaggtgaagaagaagaagaaggtttggcagcactttgggatgatg

SEQ ID NO: 101255 - DNA, 243 bp, Glycine max
attggtccaagtatggcactggcatttcgagaaagagcatcaagacgccttactagatggagctgaattactatagttatcatgcacgaatggctatcttgcgagctgcatgcgtacctgtgcagtgcctttcgattgttaactcagaaaacaaggtaataacaaattggaccaagatttttagagggaagaaacaccactagctagcaacactctttctttctttaagctgggaattgaaac

SEQ ID NO: 101256 - DNA, 201 bp, Glycine max
caactacaagactagcatagaatttgcctaatggcaataccaatcattgtaaaatcctacagtttaaacaattgaagtgaaatgtgtacccttgtcatttgtgcttgtgcttactagatttgcctcacagcatcgtagtcgtaacttgtatgggaactacttgttgcttgttaattcaatcgttgaagttgatttccaagc

SEQ ID NO: 101257 - DNA, 211 bp, Glycine max
gtttaatgatgataaatagcttgtaatgtgaatttgattaaggctgcatatgtgaaaattgggatgtttagtcaataattgaagagttgtttgtcattgaatggagaattgtatgcgactggtttggttatatagagggagaaaagaagtttcagtctatgatactatcttatggctttgtttttggtgatcattttttgcagctgctgat

SEQ ID NO: 101258 - DNA, 246 bp, Glycine max
ctccgactccttcccctccctccaccactcccctcccaatcccatcccaacacaaccaccgacacctccgccgccggagctcatctccgccgtggacatatactacaagggcaaacccgtcttttcccgcgtcatccgaaccgaaacccacaaggggtggttcctctgctcccccctctgggtggacctcctcgaccccaccgaggtggtccccactcccctgaaattcgcccaaaccaacgacga

SEQ ID NO: 101259 - DNA, 247 bp, Glycine max
ccgttactcgaagaacctcgttccccaaggttctcatcgagagagactctgactccgaacagagttcatccgaagaagaagaaatacttgaagaagaagaagaagaagaagaagaagaagaagaagaagaagaagttggggttactactgcaaatgagaaggccgaaaaactggacctgggttccgacgcaaacagaaaagggaaagcccccatcactattagtctcaaaaaagtttgcaaggtgtg

SEQ ID NO: 101260 - DNA, 168 bp, Glycine max
ggaagaaagaagaggttggacgagattggtaaagaggaggcctggttcaaaaagcaaactggggaagcaccaattgaggtggcagttgcacctggaggtcgctggagcaggttcaagacttactcgatgatccagaggacgttggagatttggggattcgttataacg

SEQ ID NO: 101261 - DNA, 218 bp, Glycine max
  unsure (1)..(218): unsure at all n locations
aaaattttgcaggaccttcttatcctccattatatttttatagtggaggagtcaaagaattccttgctacaataaagcaacatgttcttgcttgtgagatctgaatgaagatngccaagcgatattcccttagtgaagtgatttttgcagaatagcactggcacgagggacttgtgtacttgcctgtggacgatgtcccaggggctagttaccccttt

SEQ ID NO: 101262 - DNA, 189 bp, Glycine max
ttcgaggaatcggctcgagtcaagattgctatttatattggtagatatgcgtaggggtattatgattgataaatgataactaattgtgatttgtaattggttttagccttaactgattggcagattactattattaagtattaagaaattgtatctgtttgattcttaaatataacggataggatattt

SEQ ID NO: 101263 - DNA, 204 bp, Glycine max
cttttaagcaactccttttgctttattgatgtattcttcattttaagcaccatcatgcttcctattttgttttccaatattgctgtttgttgtggtaaatttttctgtagttcatcatcatgctagaaggcaaggctgtgattggtgagactgacatgcttcagaccatgcagcaagatgctatggatttagcatccaaagcac

SEQ ID NO: 101264 - DNA, 194 bp, Glycine max
gtgatatcagtgttattcataactatatcatttcatagtatatgtctctataagactgacatgaatggtggggatcagttcatcaagtgggacttctactcttgatgcaggaggagtttcagagtaaaagcaaaccaattagtattgccaatgccaataagctaaaagtgtcgacctcccttggagggagccca

SEQ ID NO: 101265 - DNA, 193 bp, Glycine max
atttgcttttgatggaaagcctcggtcaaataaccaagaaaaccgtgacgaatgggctgctcctaaagtttataaagacatcatactttatctgaggaatgttatctgccggcatttgctttgatgctacatccatcaatccggaaataaataggagaaaaagataaagaacaaatttcattcaagaagctcc

SEQ ID NO: 101266 - DNA, 192 bp, Glycine max
aaaaaacaaatgatcaagagtcctattctagaacacatactgaaattcatggagtggagggtaataatgaacctatggcagtccaactccaagaagatgcagaagtgcaacctactgaggtacctgttttgtctgagagtcatcagtctaaggttaacttgggatctcatgatattgatgctcatgggcaca

SEQ ID NO: 101267 - DNA, 198 bp, Glycine max
tttcagtatcacataggaagaggtcatattggagcaactatgaaagcaaaactttatcacttgctggagcatagagcttcagaatggtattcatttttatcaatattgatactatgaatttgtgctattctagatttccagttctcagcattctttctttatccttgcagccgatattttgtcattcctttatggagg

SEQ ID NO: 101268 - DNA, 188 bp, Glycine max
atttaacacaaaaataaaaattataaaaataaaaatagttattattgtttggggaattagcattgactcaatttgttgaccgtcgtgaagaagatcacgataagcaatcgtcgccaaacaccttcaccggccaacaaccagaagctgaatctcctcacaccaacgaaaacgattccaagcttcgtagt

SEQ ID NO: 101269 - DNA, 255 bp, Glycine max
cacacccttctttctcttctctctttccctcttggcttgttttgtgtgtgtttttgtgtacgagtccatgataccaacttatcgttactcagtgtcttcgcctatgcctatagatcttaatgaagatcacacccaccacgtcttcagtacaagccatcaagcctcttcttcgtcttcttctctatctttgtctattctcttcaacccggatcatcaaggtcaaggaggaacttgttgccactgggaatcaaagca

SEQ ID NO: 101270 - DNA, 170 bp, Glycine max
catttaaaggacagtataatatacctaaccgacccttcaccattctccaatgtgatagagaaggaacaactctactctgtctttatcacattggacaatggtgaagggtctgttagctattttatagtgtcatttaaaggacagtgtctagtttctttctggggtctgag

SEQ ID NO: 101271 - DNA, 214 bp, Glycine max
agcaaccatggcaatggcaacccaagcctctctcttagccccaggcctctccggtctcagagccagcgaccgcgcctccgtgccatggaagcagaactccagcctctccttctccaggccgaagcccctcaagttctccagaacaatcagagcagcagccgccgacgagaccacagaggcagcagcaagagtagaggctgcagcggtcggggtc

SEQ ID NO: 101272 - DNA, 168 bp, Glycine max
cggctcgaggggtacatcaaggcataacaagccaggaccctttatttaaagacaccattatttacttagaattgggtacagaataaacataagcatatgttagtatgctgatgtatatttatgtatgcttgggctgtatttaaattttacgagataaaattgaagcgg

SEQ ID NO: 101273 - DNA, 252 bp, Glycine max
cgacattgggaagggttgaataagtcatattttggtggctttggtttgtgtttgtgcattaaaagtggaaaaatgttaggtccacccacgttcggaaattgaggggtttagaattgaaatgaaatgtaaaaaagtttagtttgattatttttctacggcatttctatttttctagtgggtggcgcgtttgccagaaagggaaattatcgtcggcattgtatcctgtcgttctctctttatctctttcttttt

SEQ ID NO: 101274 - DNA, 249 bp, Glycine max
cttccacacacgcgcgcagatgcagagtgagtgggtaaagcataatcatcaagtgttgttcctccctgcacttgctctcttcttcttcttcttagttactcattccttccttccttcctttcgatttccgcattcattcaatggcacttacaacactctctctgctcccatcctccactcctccctgcttctgcggcatcctccatctctgctcccacaatagcttcctttttatccattctccttctt

SEQ ID NO: 101275 - DNA, 246 bp, Glycine max
aacgtatcagaataaacaaagaaagtcctctctctaatggagcggtacaaatgcaagctctgctccaggacattctccaatggcatagccctcggtggccacatgaaggctcacttagccaccctccctcttcccccccaaaaccaacaaccaccactttctccctctgctgctgcttccttctcttctaattcctcgtcagaacaagatcaagccacacacggtgaaaagtcgctgatttatggg

SEQ ID NO: 101276 - DNA, 196 bp, Glycine max
cggaactcagcaccgcatatctgcaccccactctcgtcttctcacaaccgtcaatcgcagtcacagcgcacagcttcgagttcagaggtcccccccttcactgcaacgtcttcaccttgatttcttcagctctagttctctctcacaagctctctccagctttgcaactagctctgtctgactctggcatatattt

SEQ ID NO: 101277 - DNA, 180 bp, Glycine max
tgcagattctgaaggagactctggctgctttagtctatgcccttgcaacattggccacaaggaggatgatgctgaatcttgtacctgtgacccagctggtatgtgtggaatattgaagaatgttaaagtcatgaaagtgagaaaaggtgtggtgaatactgtgctgatgaagatgagcat

SEQ ID NO: 101278 - DNA, 222 bp, Glycine max
tcggctcgagctagatctagatcgcgatgtgtcttccttattgtagatggagtcgtcttccataatgtgctgcttgattctccgcatcggatatactggcggagtatgatgtcggcaatatactggtctcacagagaagcactttcgctttccctaaagctattgaggcttcaaaacatgctagatcacttagagtttcgcatgactggaaagactatctca

SEQ ID NO: 101279 - DNA, 208 bp, Glycine max
ggcccagaagattgttccttctagtgaatcatgggagcatccagtatctgaaaaggatgataacagaagtgatctcaagctgagagtttggaagaaagaagatatgtgtgaaaatttacaatttggataatttcactaagtggatgcgtttaaagatgagaatgatgcggaggatgatggtgtcagatgaaacgggttttgatacaga

SEQ ID NO: 101280 - DNA, 208 bp, Glycine max
cgaatctccaccgagaccttggaggtctcgccgccgccgcctcccgacttcaacttccgccgcgaaatcgcgcgcctcgccgacctccgcgacaggctctccgcgtgctctactttaaacgagaagctccgcgtgatcgacgccgactccagagtgaagcgcttcttccgttcccgccgcggcctcgctggggttttggcatcgctgc

SEQ ID NO: 101281 - DNA, 173 bp, Glycine max
gacagcgtaaagttgctgagaggagctgctttttctcgggtatgtgctagagcatttaaaggtacttgagcaatttggaaatgtcgaaattattgcggcaatctttgagcaaattcactttcagtcacataacgggaacaccaactgggcatagaagtagtagcaccagaaca

SEQ ID NO: 101282 - DNA, 165 bp, Glycine max
cttttgagagactttgcttattctttaggcctttccgaattaagtacttgtttcattatctctctaagcaagataaatgttcatcgagagtttcaaggttgagagtcctaacgtgaagtacacagagactgagattcagtacgtgtacaactatgagaccactga

SEQ ID NO: 101283 - DNA, 108 bp, Glycine max
gatcataataatattactaccctcaccaaattaattagtcgaccattattgaccaccacccaaattcctgaacgataacatgactgccacagctgatcaatgcatgca

SEQ ID NO: 101284 - DNA, 180 bp, Glycine max
gccatggaagagttcttcaacccattagggacttcacttttggtaccatcagttcaagagttggctaaacagaatttgtctaccgttccacatagatacattcagcctcaaaatgaagaagctattagtatccctgagattccaattattgacatgcagagcttgctctctgtagaatct

SEQ ID NO: 101285 - DNA, 183 bp, Glycine max
gaaacacaagaagaagagtactatggcgatgatagacttgtgagcatgattcagtcattggaggcagagatcagtgacactcaaatgggtcaaatgtatgagatgggacacgtggacgatcgagattgctccacatcagtcagtggccctgatcattggattgacatggaattgatctcttcc

SEQ ID NO: 101286 - DNA, 189 bp, Glycine max
gcgtaccctcatggaagacctgaagatacgtatagcatgggtatcagacagaagttggcagaagagtttggttctagccctaacaaggatggaaaacttgggaaacagcatgccaaagacgtcattgtgacaccagagcgttctgaaaactatcacttggatctagcaagctctgttttctgtggagtg

SEQ ID NO: 101287 - DNA, 198 bp, Glycine max
taaggattagtgcagactttgaatccgatccttttctattgataactcctctgataaagaagctattttcccttcaagttctattttctcagaggagttatcaatagaaaaggatcggattctaaggattagtgcagactttgacaattttcggaagaggacagagagagatcgcctttcattggtcacaaatgctca

SEQ ID NO: 101288 - DNA, 189 bp, Glycine max
acgaaatcgaaacggttagatcggaaaaatcaaagggtaaaataaaataaccaatgatgacggtaaaaaatgaaaatccaccagtaaaaaaatatttaaatatataattttcttatttgaaaagaatatattttttaaaatttagtttagatgtatcttacgataatgtgcaggcgcgtttggatacga

SEQ ID NO: 101289 - DNA, 187 bp, Glycine max
ctttgaatcttctgaagatggtcactgggaggttattgatactgaggaggccttgtgtgccttattgtcggttctggatgatagaggaaatcgggaggctcttcttattgaatctttggaaaggagacaagcatcactttgcagatctatgtccaggattaatgttaatagtactggaaagggttct

SEQ ID NO: 101290 - DNA, 182 bp, Glycine max
gataaacataaaaattctgggttgatgcctgatattgaggctaaattagcttctgcagcagttgccgttgcagctgctgcagccattgcgaaggcagcagcagcagctgccaatgttgcctcaaatgctgctcttcaagcaaaactaatggctgatgaagcattgctttcatctggttataa

SEQ ID NO: 101291 - DNA, 193 bp, Glycine max
cagaagaagaagagagaggtctctcaacaatggccactgccactgtttcacttcattgattgtaggaacaagttctggcactcttagagattctcctttactcagaacctctatgggctgcaacctttcaatgctcaatcactttccttctaactcttacaagctcgctttctcgtctcgctcacctctttca

SEQ ID NO: 101292 - DNA, 195 bp, Glycine max
gcaaaatttttgttgcagaggcagagagaggaggcaacgccacaccgcaccactctcactctgcaacacccgaatctcgtttcacctaaacgacctcgtttttgcgttcttttcccttttcttcttctgatttaggtttcagagagaagaagaaggagcagcaatggactctcgcacgtataatcctcgcaccgt

SEQ ID NO: 101293 - DNA, 192 bp, Glycine max
ctgatttctctcccactggagcaaggaagaatgctgctccgtcacttgcagagctgtctgccatggattttactaccatcccacacccatctctcatcaatcaccaacaattccaggaggcatatgccctgccacttcagctggatcatatcttcagcattacgcacgcgttgtcttagagtgcacggtgaa

SEQ ID NO: 101294 - DNA, 185 bp, Glycine max
gccaaaaccaacaagaagaagaagactaagaagaagcaaaagcagaatcccgatgacgccggaggattagaggatcctaagaaccgaaaccctaaggcattcgctttcacttcctccaacaaagccaagcgcttgcaatcacgcgccgtcgagaaagagcagcgccgcctccacgttcccgtcat

SEQ ID NO: 101295 - DNA, 190 bp, Glycine max
ccgaaaccaaaaacaacaaagttctattctattgaagagctccagcacgatggcttccctctctacattgctcccgaacccgaaccttatttccaagcacaacagcaccctttcttccactcacccatgtgcttattcctggaaaaacaaaaccccaaccagtaagggtcggttctccgtttcttgttct

SEQ ID NO: 101296 - DNA, 265 bp, Glycine max
gttgaagaatagaaacttagttaatggcaagaaaaaacacgttaattgaaaacccgaatgtgtaatgaatgatgaaaagtaaaacgggtagcaccgaccacaataacggaaaccacgatctctgaccgactgactactaccacgatctctgactgactgactattctcactttccaccgaatcgaattctctctcattcgaagaaaaacgaactcaactgtgtctgcgagaactccaattcctaaaccctagcttgaatccaacg

SEQ ID NO: 101297 - DNA, 257 bp, Glycine max
gggagagtgtgcaaatagctatccgaccaaaggtttcatggagtggttctagtgttgcagggactgtgcagattcagtgcagtgacctatgctccacatcaggagacagtcgctgctgttgcggcgagtggtccaattttaggtgtacctgatgctcttgatcctgttgatcttccagtcagtcagataaatctatttcctggggagacgactgctctttggatatccaatgatgttccacgttctcatactccagg

SEQ ID NO: 101298 - DNA, 259 bp, Glycine max
tgctatggctttgcgaagcggatcatgtattcacagcggagactgcttcacgggacggggctacagtgtatcccaccgtccgtttaaacggctcgcccaagagcattctcgtcgcttatatccgtctcgcgctttccacaagtccgtttcggtggacttggtcgagacggaaacggagcgcgtgggaaatggtggtggtcgtacggttacgctcaaggtggggtcggaggttatttcgggctcacgcgagacactgctg

SEQ ID NO: 101299 - DNA, 256 bp, Glycine max
gtttctggatgcacctgtcccctacatagttggtatcaagaacaagaccaatgaagttcagtcaaagttaactaataatgttatcctgattgacgtcagcagaaaccaggtgtgtgtttcatttcctttctttttctgttctccaatgccataaattgtagtctctaccccccttccccaacagtattttatacattgaggaataggttgcatgactacgtgtctcctctaatcttacaaaattcagggttttttt

SEQ ID NO: 101300 - DNA, 256 bp, Glycine max
catgaactgtcaggcacggctttgtcactcacaaaaatgatctcatcatgctaggagatgggaaggttctgaatccatagtgcgaggtcacgaattgaggacatggaagatgatcagcatggttcagtagatcaataggggtgggtatcaacagcgatgctgctgatattggcagtgaagtgcatggaagtttggttggtggtagtagtgagggggatttagaatatttccgtgatcatgatactactacacacag

SEQ ID NO: 101301 - DNA, 239 bp, Glycine max
tgcactcagcatcttaatggttctgtctcttgggtagctgatggaagattctgtcttagtttgacttgcatggacagccagtatgggacgtatatatactagttcgtcagatgatgcacttggaggagatagtagtccatggaggactcttctgcactgggctactaatacagacaagagttcatataatggcgcttgttctaggcgggatacttcttcgaaaggggaaaatagttcaa

SEQ ID NO: 101302 - DNA, 245 bp, Glycine max
tctcgagccgattcggctccgctcaaattcaaggaatccatatcatcttgcccatatggagtcttcctctcttggaatacatctaatcacttatgtaattggcctggaatcacatgcaatcccaagcttcaagagttacacagttaaacttgacacgatacaagtttgagggatccatatctccccacgtaggatatctctcttatatgataacgttacacctagcaaccaacagcttccacggg

SEQ ID NO: 101303 - DNA, 258 bp, Glycine max
gttcgagagaaacgagttaaacagatcgggccagattgacctttgggccatgcgtaacccgtttttattactagtttactcaaatgctctgtttctgactccacgcacttaaactgtttgatgaaactccccatgagtttctactctttcctccttttgaagctaccaatactaaagttttgatgacaacactgtgaacctcaatgcccaatgtaaaaattcacttgctgatttcaagcaatagtcataatggataat

SEQ ID NO: 101304 - DNA, 256 bp, Glycine max
tgagcataccacaaacccattccctttggactcttgcttgcttccaccattttccttcgatgctgtgctcccaaacgaaacgaaaagtataattcttcctttccttttcgccagccccactccacacgtctcaatgccaagccacacccttttgatcaaaggccaaaaatgtctccaccttttggtggggctttgtttagcttctcttttcaaacatgggttgtgtccatggcaagtgctgtaaccgttacccttc

SEQ ID NO: 101305 - DNA, 194 bp, Glycine max
ctcaacaacttcaccttcttcctcctcgatcatggctcaattcaagggcaagtaccatgaagctctgatggtcaacatctcatacatattgacgcatgctgcgggcgccacattcgataatgaccggcatggccaacattatagggtgtggctagcatcaacgtatagagcatgcccttctgctggcgcaatgc

SEQ ID NO: 101306 - DNA, 135 bp, Glycine max
tgctctctctgccattgagcgatgaagcacgttaattgagaacccgaatgtgtaatgaatgatgaaaagtaatacgggtagcaccgaccacaataacggaaaccacgatctctgaccgactgactactaccacga

SEQ ID NO: 101307 - DNA, 267 bp, Glycine max
aagacatcaacatcttttgtctcagaatttaaaattggttatttttcattaaaaggaaataatttttattaattaacaaaacaagaggtaattggcaccgttaagaaacattatggtctgatgtcatatatataagtgtccaccgcgtggctgtggtttgctgaagaaaaacgcaagctgcttgtttgatagggaagagaagaaagagagaaaacaaagggcggtggtgagtgcttctgcttcatcatcatcagagaatggcggcta

SEQ ID NO: 101308 - DNA, 108 bp, Glycine max
ttaggttttcaagtccatgacatctcagcagtcggatttcggtgatttcaagctcagatctggcatctcctcgacagtgtacgtagacctccgccttgctatatctga

SEQ ID NO: 101309 - DNA, 167 bp, Glycine max
aatgcagctgcggaattaaaaattgaagaaatggaattacgaattgaaaagcttgaagaggagcttagagaagttgctgctcttgaagtgtcactttattctattgcaccagatcatggcagctcaacacacaaggtgaacacacctgatcggcgcctttcgaggct

SEQ ID NO: 101310 - DNA, 188 bp, Glycine max
gggcttatcatcctattcttactcagaggactaaaagcaagtttgtctttgactgggcattccagatcaacgggaacccgtttgagatatatagctccggagcagcttccggtgaactacggtgggcacgcagacatagggagttcgggaataacgatactgttacagaagtcgcagtgaggccggga

SEQ ID NO: 101311 - DNA, 259 bp, Glycine max
gccattttcgccattatcactcctctcgcaccaaaagcgatgaagctctagttgctgctttcctcgttttgatccgtacatttttcctcttctcgctttgatccccgaagctgcgagcttgcactgcctcgattgcggtcttcatgtgattctgcttctctctctacccaagtttacatttgaggagtagctgaatcatatgaggcagatggtcctttggaaattccctcaacttgggtagacgaatctgcctggggga

SEQ ID NO: 101312 - DNA, 245 bp, Glycine max
cagacgtctgtgcttgggagcttccatttgaaatcaatttatctggccctgagtgtcattgtgggagttgtctactaaggaaagaattctcaaaggatgctcttcctgagtcggttgattggcagctaaacaaagagatagttttgggatttggggttttaagcaatgaccttgctgcgttactgtgtgaaccagatgaaaatgggggttttacacttataaggctaaatgtcatcaggaaggtt

SEQ ID NO: 101313 - DNA, 260 bp, Glycine max
ctcgagccagggaagacatcaagaccatgaagatgagcaatatcatggagtaaagggtttgtcatcatatgaaccagatctaagtgctgttgaagaaggggaggtatccgcacttgatgacattggtgtagggcttccatcacctaagtcaagcaatcgcaagagaaaagcaggaagctcccctgaaagaggggtggaggggaaacgtcataattatggccccgggcctcaccacaataatcgatttgattacatggggg

SEQ ID NO: 101314 - DNA, 247 bp, Glycine max
gttgtctctgatgcaatgtttctcgatcttagtgcaaccatggtcatcatattcactatagagtgttgacatgaacacctcttcattataaacaccctgttaacacttatttttcctattacatcataatacctgtcatacatatacttctctttctttatccctctaggtgtccaatagcatatggatgtctattaatcattttcctgcgctatagtattagagcatggggagactcttattttgg

SEQ ID NO: 101315 - DNA, 132 bp, Glycine max
caaaactcccttgtatattgttgcagctctagctacggtttcgcaagtgcgatccaacaacaacaacgacgatggcgatggctgcagctctgcgtcgcgaacgaaggtgcctgatccaaccaatcaacgccc

SEQ ID NO: 101316 - DNA, 235 bp, Glycine max
atcctcacatcggcaataggatttgaatccacgtctttgtggaatttgagtccaatccttaccaactggatcaacttttgttcgctgcatccattttagttattttaaaacattgtgattagagtattcttcttttctttgaccaggttgccatcaatttgcagacttaacagaatccataatgttttgatttgaacactagtccagtaaactttgaaatttcactcagaatcct

SEQ ID NO: 101317 - DNA, 224 bp, Glycine max
ggggctattttcactgcactgtgctggctatatcatggagagaaagggtcaagtatgtctgggtcaatctctgaatattccgcttatacatggtgatacaacctgattaaccagtccaaggttgttgtcctgaaacagaaaatttcacataaattatcagcctgtcgcatagacaaacaatttcagagaaatcttattaagtaaccacataagaaccggaaatt

SEQ ID NO: 101318 - DNA, 243 bp, Glycine max
catgaacacaaggcattcagaaatcaaataatatcaacaataaacagcattcagaaagtgtatacattgaacacaatagttcaaaaatcaaataaacaagctaactaataaattgtatttgtgttccgtagaaaacatatgaacacacaattagctgcaacagcagtttttccatgttttagattgcaagaatgcctatgcccacaagtcacataaaatcaatcacatgataacaaatgacaa

SEQ ID NO: 101319 - DNA, 236 bp, Glycine max
gggaggcgagaagtgagagcctacgcgttctttgcgctcgcactcctccgcaacggcgtcgttttcctcttctctctactccgaagtgttccgttccgttctcgctttccgaaaaacgcgttcgcgtgcgtctctttaagcggcggttaccgttttcttccgctagggttttgcatttgccgcttctaagttcccagtgcttcttcttcttcgaatcgcgtttgctgcaataaaaa

SEQ ID NO: 101320 - DNA, 261 bp, Glycine max
cggctgcgcgaggacgagagatggggaagatgaggggaaggcacataagtaggaggcactccttgcaactggtagcaatagtgatactggctacattgctcatgctccatctgagtcaaacggtctatctgatgtactaatagagtagtcctattttaactggcgtctcggcacgcgcacgtggtctcgcagcagctgctgctgcagcagcagcaggcggtgtatctggatttgagtttggtgttgatccaaacttggacc

SEQ ID NO: 101321 - DNA, 264 bp, Glycine max
tacggctgtgagatgttgacagatgggggcgtgatatctattctatttttcttattttttatcccttaatcattgggaattactcctcctcctcccgtactaggacatctggatttaagaagtactactataacatcacgttttgcatccccaatctttgtcttatcaatttgggacggcacctgcagtagcagaagaagaagaagaacgataatagtagtaatggaaatcaaacctggtttgtcagcactcattactggtggt

SEQ ID NO: 101322 - DNA, 211 bp, Glycine max
gtggataaattcatgactgcatccagcggttacatacaccctatgaaccttagtacaattattgctttagattctacaacctatgcaccattactgtatgagttgtcttcttatcttgtctatgcacacaaaatacatacaagatattgtatttttcttgaatgtttaaaactatgacgttaattacttaagtattttttttttttccaaa

SEQ ID NO: 101323 - DNA, 220 bp, Glycine max
actgcctatctactttactagaatagaatatactatggtttataagatgtaaccaaactccagaaccacatattttaagcaactttcctgaggggattctaattgcacaggtggatgaccacatcatagataaagttggaacgaaaacaaatgatagacaacctttagatctcccacgaggagtagtagtgcttatggaattttgaattttatgatatta

SEQ ID NO: 101324 - DNA, 239 bp, Glycine max
tttggcaacaaaacacgccggtcataattattttcattggattagtaaaaacaaaaaaaaaccctttcagacagaaataccatatatgaatcacctagattatataatatatatatatgatcgtgcagttcagtaatgatttttatatttgagtggatatattccaaatttgttgaaattgtactatcatcccttcgatcaatttctaaaatcagtaaatatctatatatggttagaaa

SEQ ID NO: 101325 - DNA, 158 bp, Glycine max
aaatacggcaattagaagacgacagaaggggagagaagagaagaggaagaaggcgaagaagaatccacaagcaatcccatctatgtgtttgcacatcaaaagggatggctatcaaactcaaagagcagtggttgtgtggatgctataaaaggcctaca

SEQ ID NO: 101326 - DNA, 238 bp, Glycine max
  unsure (1)..(238): unsure at all n locations
ttccccaaactatatacataaanaaatanatanattagcaaaaataagattcatcagagagatcttttgtttccccgacaaattaaaccatttagatatttaagtccaaacatgccctcagccgcataacaaaaaaataatgcggattagacttaaatttcagtgagacaaggataatgtaactataaatagatatatttgaattgaacccatgaacttgttgcatggtggaagatca

SEQ ID NO: 101327 - DNA, 132 bp, Glycine max
  unsure (1)..(132): unsure at all n locations
acgggctgcgagacacgacagacgggggtgacgagggacaacacaacagacaagaccggggccanaaccanaagacaaatcagaaactgaaaaggaactgcccctaagcattcacaaaacaccacccaacgt

SEQ ID NO: 101328 - DNA, 236 bp, Glycine max
gaattcaaaatatatcatcaattataagcatgggtttgtggaacacaacgaatgcagtgtcttgccgctttcacaagtttggtgatgaccaaaagaatctggtcttccaaggtgatgccacgtcttcttccaggggcatagaactcacaaagttagacggtggaggaaaaccagtgggtggcagtgtggggagagtgttatactcttctccagtgcacctttgggaaagctctaca

SEQ ID NO: 101329 - DNA, 236 bp, Glycine max
gtcacgttcgtttatcatccgggtttagctgggaaaattgcacacaagaatggtgtggatggagaaatggaaccgtttttcggtgaggagagtttgattttcttgtgtggttcaaggaaactgtgcagcatgctgattttgtggttctgaagatgcatgctggggaagttgaaatgaagttccttgcggatatatttgagagtggagctatatgctctgttgatgagttgtttctt

SEQ ID NO: 101330 - DNA, 273 bp, Glycine max
acgacagaaggggaaagtgatgaggaaggtgattttgggattggtgatgatgatgatgaagatgaagatgaagatacagagggcatagaaaatgcaaggtatgaagacttctttggagtaaaaaggaaagggggtcaaaaagaaaagctcaagcacttcaggaatctgattattctgatgaagatgacatggaattggacaagcagacgaaagggactgcatctgcccatgataagcaactggaaaagattcagtccaagatagagcagatgg

SEQ ID NO: 101331 - DNA, 260 bp, Glycine max
tcacggcttgagaagacgacagatgggggggggaagaatttgcttacttaactttgtgctcaaatcgttatctctttttttcctttctttttccaaaattcctattgtggtggtaaaaaagtggtgaggctacaaatagagtttttgtggggtaagagggaagagggagggaaaatagcttgggtgaaatggaataggatttgttggcctaaggaggaagaagggttgggtgtaaaagatatccatctcttcaatttagc

SEQ ID NO: 101332 - DNA, 243 bp, Glycine max
ctagccactatcatagggatttgcacaaagaatagcaaactctaactcaaggttccacgagtatggaggactactacaagaagatggaaatagcctgattagagtcaatgttgaagaagatcgtgagacaactatggtcagattcattggaggtgtaaagaaggagataacttatgtggtagaattgcaacattatgtggagatggaggacttgttgcacaaatctattcaagtggggaggta

SEQ ID NO: 101333 - DNA, 237 bp, Glycine max
gggttcgaacttggccaacatagaacagatgaagagggctcccagttaccaaatggatatacacatgaattggaaaatgcaccttctggtcttcatggaggtgttattgatccccatcaacagttattgattgttctaagcaatatcggatattgcaaagatgaactttcttatgagttgtatgacaaatacagacacatctggcagcattccagggggaaggatgaaggaaacagt

SEQ ID NO: 101334 - DNA, 263 bp, Glycine max
tacggctgcgacgacagaaggggacgaaaaaagagatgcatgccatgtgggtctccttgaaggataatgtcaaatgcggaaacaagctcaacgatgtaatcaagcagcaaacaaatgcggcaaaggaagtggctatgttgcagaaaagcgagaaaatgaatggatatgatagacctctaatggaaactccaactactagcctagtggtttcaagaccaagcaacgcactgggtcggcttcatgagctgagtgttggagaccca

SEQ ID NO: 101335 - DNA, 242 bp, Glycine max
caaaggaaatggatcacttgaagtaaatgaagataagaaaccatctgtacccaaaaaattattgaagcacgttgaaagagaacagccttcacatcaactgcctccataaaatcaaagggaaaagacactgatgttgctaggaaatgctttgagccttcggaagtgaaaaagtgggccattgatgatttgaataaaacaattcagtggctggaaagtcaagaagaaaagcctgatccaggtga

SEQ ID NO: 101336 - DNA, 245 bp, Glycine max
gggacattccaaacgaaactgaaagtcttaaaccagtctttccttttttggttattattggtcgaaaaaacacggttccttttattttttatgcaactaatcatgttttcttaatatatcagaactctatgtttggccccagaaaagtaggtccaattttgatgtatacggacagtttttcactagcagcccagctagcaagcttttgttggtgtccatctctattgttgtcaagaaacttattc

SEQ ID NO: 101337 - DNA, 266 bp, Glycine max
ctcttgctgtcccagagttcagaaactcagttacctttgtccagaaaattgcctaacaccactcctcctccttgtctcctaacactaccacactaataaaaatgaaatatataacgtctgcatattaaatatgtaactgtcctacataactgtttgtttgcataattaaatatgtaattgtcctacataactgcataactgtcactgtcctgcataatgccccacgacagagtccttatacaccccatgccctcttcaattgtcta

SEQ ID NO: 101338 - DNA, 233 bp, Glycine max
ggaagctgctcttcggtgtgttttcattttatttgtttctgcctacttttgtatttgcatttttggatttgttatagatgtgtacaaatcacattctcagccatttattttcttatcaactgttatagttgaattttattctccaagtttatatttctcactttagaagagctagattctgtttttttttttaaaacttctatcattctatcatgttcgtatatattttacct

SEQ ID NO: 101339 - DNA, 233 bp, Glycine max
attgccaattgtctcctacatgtttgttttatatattttttatcttatttataatttatccatcacataaagtgaaacttctgactgctgttaattgggttcaatttttctaagagatattatgcatggttgatgaggtatgtatatatatgttgagacccttcctttactttgctggtttttgggtccaaaattcaaactttggaagttatgttatttgttatatatatgct

SEQ ID NO: 101340 - DNA, 260 bp, Glycine max
tgagaaagttgatgaactgtgtgatcggtactgcctagacaggtttttggacatcaaagtacctgaaacaagtaatctgcaagggcgttatttacatcttgatgaattattggttgatagcatcatttgggttgatgaagttgaaggtttgcttgatgcaactaggcatattaagggttttaaagttataggtcttgattgtgaatggaaacccaattacgtaaaaggcagcaaacccaacaaggtttctatcatgcaaa

SEQ ID NO: 101341 - DNA, 252 bp, Glycine max
tacgacgatagaaggggtaatagtgggaggacaggaaacaatagcctgaattgaatttgtctttggatcttactagccaactttaaagttgaccttatgagtagagtggggtatgcgggtaaaccctcccagcgaaacccgcattcttaacatgcttgttattttgagtccaaacccgccctgcatagttcgcgggctgagtggaccgatccacatttgacaaaaaaaaatttaaaaatagaaaattaaatt

SEQ ID NO: 101342 - DNA, 195 bp, Glycine max
ggagatgagaaccaattcatctttgcagcttagggagttatttgtagggacgcaaaatttattcaagttttagatttatttatcttaaattcagaagtaatgacagattcactgggtgctaattcagttcaattctccataccatgagttagttcaccaaaaaaaaaaaaaaaaaaaaaaaaaaaaagggggccc

SEQ ID NO: 101343 - DNA, 238 bp, Glycine max
ctatcgagcgaatcagatcgagtgcgagaagccggagaaggaggcatcagttcaaaatgtatcatcaattataagcatgggtttgtggaacacaacgaatgcagtgtcttgccgctttcacaagtttggtgatgtccataagaatctggtcttccaaggtgatgccacgtcttcttccaggggcatagaactctcaaagttagacggtggaggaaaatcagtgggtggcagtgtgggg

SEQ ID NO: 101344 - DNA, 239 bp, Glycine max
actggaacaaatgagattgaacaatgggaaactcaggcttcaacactctttgctgtataacagatttctgctgtcaatgaaacattatttgaaggaaaggtctgtgaactaaatgagatgttctcgtgttttacatactgagaaaacaggattgcaaagaatggtggaagatctcaagactagatatgatgaagccagggttatagcttgaggaaaaggctagtcgaattttgaaattg

SEQ ID NO: 101345 - DNA, 214 bp, Glycine max
gaagttcttcttggtttccttgcttgctttgctcataacagcttatggagttgcaggcagcataatgtgtgacaacattggcatgctcgaagaacttaaaagcctagaggccctggacatagaagaagaagaaaatgaggtagaactttctgacatcccttcatggagaagcgagcgcggtggaaaagttcttgtgaatattgatagctttggt

SEQ ID NO: 101346 - DNA, 223 bp, Glycine max
ggtaaaccaaattaaataaaagcagaaccttaagttgacttgtgaaagcgggaaatgaaaaatttccatgagagttaggttcccatagcggtttaaaattccagcagtagcacccacgaaattgccgtaagtttcactaaataactcattgacgcacccactcacaccacaacaactaactcttgtctttcttccatgatgacgacgacgccaacaacgttgg

SEQ ID NO: 101347 - DNA, 213 bp, Glycine max
gacggtaaagtcaaatattatttatagacacccctgtggacggtgatgaggctcatggcaaaggcttatccattgatacgccgactctgattctgataaaaacagcacttattcaaatattcagcttagcaattttcagttcattcagttgtgatttcctcaagacaagttgcaaatacatagttacatacatacatgcatgtagacaaaaat

SEQ ID NO: 101348 - DNA, 221 bp, Glycine max
caaagacagaaagtcaggatctattggcggtcgccaaacaaatatgttcagtgatgattttgatggatcatcccagcagtcttataggaacagtagggggtctcgggaaaatgaccataatcggaagagttttgaagattttgatggaccgtctcggcaatcatatggttatggtagagggtcccgaggaaacaacggtaatggatcatcccggcagtctt

SEQ ID NO: 101349 - DNA, 209 bp, Glycine max
  unsure (1)..(209): unsure at all n locations
agtacaactaatgttactattgtcactaattnatgatttctatttatgtgggttaggtgttaagaaatcaaggttaaagcaattggatgaaattcaagttaaaactatcaatacttctaatgggaagaatttacataaatgtccagctttaatctttgacatcacatgtgttgcttttggtataagaattaataatttacaactagcat

SEQ ID NO: 101350 - DNA, 236 bp, Glycine max
ccactctaatatcttctggtcatctctgttaccttggtggcgaggttcgttactgcttttactttacttttccaccttcaaaatcgtaaccaactctactttatttatttattattattgatgtaattaagtgctcaactccttagttacaatttaggactgttagaaattgatatcgtcttttttgttttttgcagtggaggcaagatgttgcttttgcgggttttgaggttcca

SEQ ID NO: 101351 - DNA, 165 bp, Glycine max
tggtgttctgggcagtaatgagagaagtaacaataatggttatggtagtactaggcaagaagtggtgaagacaatactcgtgataccaacaattggtccctgatttggatggataaaaatagaagggagttaaaggaaaacgtttaaaaattagtctagatctca

SEQ ID NO: 101352 - DNA, 234 bp, Glycine max
tacggtgatttgtatttcatgtctgcattgcgtgctttcaaacgccgatttgcatattcaaatgtggactatgatcatattgttggctggagaacatcatccattagacgtcagaatggacctgcaaattggatagataccatcaacgacaaatatccacatgttgtatatggagagcattgcaaggcttgttctgatgcagagcagtgtgactcagcaggaggtaacagctac

SEQ ID NO: 101353 - DNA, 246 bp, Glycine max
actagtagttttctcctgataaaataattatgcttccttcttcagcaataaaattttccatatatagcttagttcacaatcgttatggggtttttgagaagattaaacttttggtatttagatgatcaaaataataggttgaagttgcattcattacagtgatgcttacaacccagttcctgggctgatggaaggggtgccctcgtcaggggattataacggagggtttgcatccaagcttatggt

SEQ ID NO: 101354 - DNA, 281 bp, Glycine max
agttcggctcgagacgcgtcccagaagacgtcagaacggccctatttatgcaggatgttcctcaacaaatttgtccatatgtcctagttttattggatctttgacatcacaccactatacgagcatagtcatgtctcttgcctacatggtacatggtgcatgattgtatgtgtccaatatgtgaagactcaacgtctttataatattgtcatcatgtctcaacagtttggctcgtacatattggtacaagactaatttcttgagatatctaagtcagtcta

SEQ ID NO: 101355 - DNA, 221 bp, Glycine max
acagggggagcatttaccattgattaattttagagacggtgcaaggagcaaatgagggaaatgtttaagacagtaaggcatgtgtgcagctctttagtatattcggatggaggggaacgattgaatttctaagggtttctctctgtccttaccaggtgatctgactatggcttctttaaggcaatcacccttgttgatatgcagaggaactggagagcttc

SEQ ID NO: 101356 - DNA, 246 bp, Glycine max
catttactaaatgctgaatcacctaaccctaagagttgacttcaatatgacgtgttttagtttcttgtttggtattaagggggcaccgagctctccatggattgtgaaaatagcaactaatataaatatacagtactggtctatttaaatttatttgttaaaataaatacttattttaataaactaaataatttttttaaaatgtttgtctaaatttttcttaactttagatatagatttttttat

SEQ ID NO: 101357 - DNA, 229 bp, Glycine max
gggggttttcgttgaaactaacaaattcaatatggttggaagttgcttaattagaggacattatggtttatacaatagccaatcaccccattttacttcaccttttttctcttcgagctgttttaatctcaagctgtctcgcgcagggtgtattcgtcttatagtaatttttgggtcacaggccaggtaaaatacaatagcattcgggtcgggtggttaggagatatgg

SEQ ID NO: 101358 - DNA, 257 bp, Glycine max
  unsure (1)..(257): unsure at all n locations
aagtaagataggaattaggatagagaagagaagattgaggaagatattgggtttgggaagaagagtgaagatgttaatgagataaaaattaaataaattaatattaaaaaagaagatattgttgttgatgtgatcataaagaaaaagaataaggtgaagataaatcagattgacatagattaattggttgaaagtgatgngaggaagatagtttaaggattgataaatgatgagggtaaaataaatgaaaatggaga

SEQ ID NO: 101359 - DNA, 236 bp, Glycine max
  unsure (1)..(236): unsure at all n locations
aagacaaaaggtcaataaagccagatgatgttgagtttgaaccaaagtcaagagattctgatataagggaagataaaaaatcccgtaggagggacgatgatgattttttaagcaagtcaagagaacctcatagtaacagggaagacatgaagtgaagnnagcacggtgaagatgaatctgcaccaaagtcaagagaaaattatgctaggaagcaagatgatagatcatatagaaat

SEQ ID NO: 101360 - DNA, 234 bp, Glycine max
agccacatttgatgtccactacttcaacaattttagattttttcttcttatcctttttcttcgtaactggacttgtctccagtggaaggttctggtaaccaagaatgggtatttgatgggtatgtttgccattaagttttgttttggggccaatcccaggacttatatggtttaagatgctactacttctgctgctgctactactgctggcttcaaatgattttcttggttgtg

SEQ ID NO: 101361 - DNA, 236 bp, Glycine max
tgggatcagttacatatatatacatcaaatacttattaactgtggtatatctgaagaaattgctatgcataggggactcatgcaaggagagattttattgcaccttttctttttcttcttgtagagtaattaatgagaagggcatcagagttggggtttaattttaacatattcaaggtggacagtaattgtatatgtggtttcataattataatatgcagatgacacattgttcg

SEQ ID NO: 101362 - DNA, 222 bp, Glycine max
aggacacactagtaatcagacagttcgtaatcattcggtacagtcagatctcaatgaaggtactgatagacgcaggggaatagcaggtagaatgcctgccaagtcataagcatgaaagcgatgacctcaagaacgaacctaggatatgggggactaagtgcgggcgagaggtgcacccatgcattgcacttggacgtgatagtcagtctcaagcgcgagttc

SEQ ID NO: 101363 - DNA, 139 bp, Glycine max
tagaagacgacagaagggatgtatgagtgtccacatggatgtgtgtatgatcagttttgcataaatttctaatcatcattgttatatgtgtgacatggacatgatttggggcattcacttattcttgaaccgctcgcta

SEQ ID NO: 101364 - DNA, 133 bp, Glycine max
ggaatcgaaagcgtagaaggatttcactcctcccttacttcatcaattctttcagtttgaatggcgagtgaggatgatgcagtgaagaaggcaatgatagtagatgctcgtccaagaaacattagtcataatg

SEQ ID NO: 101365 - DNA, 110 bp, Glycine max
acctcaacaagtagtatagtagaaatttgcgctctactacaaacagtttaggaaggtaagaacttacagtgccgctatcttggattacagaagacattacgccagctgct

SEQ ID NO: 101366 - DNA, 215 bp, Glycine max
ttctgacatctaaatcaataagtacaacctctcatacttctatctgcatatcagtccgattcatgtttactcatcccattgagcagaacaatctaattcatacaacatcctcacagatatcttcagttgatagtatccaaggatttaaattacagttgcaatcacagtcatggttaccgaaatttcaggcgaatgtggctgatacagcacaaaac

SEQ ID NO: 101367 - DNA, 141 bp, Glycine max
tctcgagccgaatcggctcgagacggctgcgagacaccgatgacgagagaccgattgactcatccatacctcacttactgctagctactcacttcttccaagtcgaaccaagcatgtctctctagacattcgtaaggtcag

SEQ ID NO: 101368 - DNA, 140 bp, Glycine max
  unsure (1)..(140): unsure at all n locations
ggaagaagaagaagaagaagataggattgggtattccagctactacgcctgacatacgtcggtcnagttctggcacttgttatcagcatactatggacgtgctcttggtcctcaattttaggggtggctagacgagggat

SEQ ID NO: 101369 - DNA, 275 bp, Glycine max
  unsure (1)..(275): unsure at all n locations
tcggctgcgcgacagacagaagggcctaggctatttcaaatagtgaataagagtgggaatagacatattaaagtatcaataaccctaccttgtacaatgacataataaattatttaaacgggctatttcaaatagtgaatagagtgggactagacatattaaagtatcaataaccctaccttgtactatngactaataaattatttaaacatagaaacaataagggaaagctaccactagggtaagcaatgaaagctcaaaagaaggcccgcgag

SEQ ID NO: 101370 - DNA, 116 bp, Glycine max
gggatagtagttttactggtacaaatttgagtgtatgcgagacaagagaaaactcagtgcgagagacatttcttccaccgaagtcattatccttaaaatgccaacaatggatgtgt

SEQ ID NO: 101371 - DNA, 164 bp, Glycine max
gctgagagatgacgagagaagggattgaggatgatagtaaaagatagctaaagtatatgagatgtcaatttcatgagaattcagtcagagaaaaatagttagtattcaggcaacagtgatggtttgtatggagggagcacattggatttggatattttgatgta

SEQ ID NO: 101372 - DNA, 226 bp, Glycine max
agcctgtgctgtgtctttgacatccgtaataatctaaggtcactcaggctcccatcatgcagcaccagaatcagaaatttccatgccccaaacaactccaattctccactccaatcattgacacgtggtaaatcacggaggatgatttcgaaacctatatcagcggctcttcccgctccaccgccacttgacctcacagaaaacaacgtgaaacaggttttagagg

SEQ ID NO: 101373 - DNA, 237 bp, Glycine max
tcgaattgagtgagctccgccttgctcacaatgagattaactctctcccagcggaattaaagcttaattcaaagctccggagtttagatttggggaacaatgtgatcacgaggtggtcagaactaaaggtcctcgaattgctcacgaatcttagaaatcttaatctacaaggaaatcctgctgccacagtcaataaagttatgagacagattaagaaagcactgccaaaattacaga

SEQ ID NO: 101374 - DNA, 111 bp, Glycine max
gggagggcgcatgtgtctgtagcgtgcacccttccacatactgtctcgttctcgctctctctcgatttatccttcccttttctcgcataaacgaggtgcttcagatttgct

SEQ ID NO: 101375 - DNA, 245 bp, Glycine max
tgtccatataagtcttacttagttcaaacacgattttgtcacgtgtgatttctagaaagaaatatcatttactattattattattatatgatattgtataaaggatttgcctgtttgtatatttaaattaaattgtattgaaaaaaaacaaaaacacttctcaaatatgtgtaggcgttggtgttaattaaaaaagtctttgaaaagaaggtgccaacgttaaaagtgtggattcatcgagccac

SEQ ID NO: 101376 - DNA, 261 bp, Glycine max
gatctatatttccagaaaaatcaacaagtcagctcctcaacagggaagagtggagagttaagatgactcccatccaagtcttgttcttaacatgtcaaccagtagctcacattacagctaaatgtatatctgaagcagatgattacccacccgagattcctggtcatatcaccaaattcttcgagattcaaattgtcctcgaaaattacgcggaggatatcaataatggatttgctgttggactgttagcaggttataact

SEQ ID NO: 101377 - DNA, 306 bp, Glycine max
ttctgagtattgctgcgttaagatttcagaatgttctggtcggtccaattgatatgaatagcgttactttattctatgctaaggtactaagagaagctaattgtggtaattgttctcttcttttcttatttcctctattccttatttatagattgtgttattaaatatcctataatttgttataacaaaattgtgaatattgtcactaatggtaatgataataaaacgtgcaaaatgcttgggttggcatccgttgaatagcagaatgcttgtgttggtatccgctgaattgttatcagacacctt

SEQ ID NO: 101378 - DNA, 274 bp, Glycine max
ggcgacggagaggatgaaagaaaggattccctgtgcacaccacacggtggcgtcgccgcaacccactgatgatctgacgatgggtttctttgacacagtggtttcacgtgttggtggcaacgggttctggtttgagggtttgacggtggtgagtggcggagttgtgacgtgtgcgaaggggaacaagaaaaggggaagaaagcatgcgtcgtcgccgccaggggccgtttccgacggtgtcacacggttcaacacagcgacgaaggtttcacat

SEQ ID NO: 101379 - DNA, 254 bp, Glycine max
aagctcagatacatatctggcatgacaaaatcaaagttttgacagaatacaaatgtaggtagtagaatacctcttcattaagcatggggctttgcacatttgcatcattaagctctttgcttgatccatcatccccttcatcatcactatattgcccaagtaacagcaggggattctgtggttgttgacctgaagacaagaagccagcatgttagaaactacagaaatgttggattattgtccatgcaatatca

SEQ ID NO: 101380 - DNA, 297 bp, Glycine max
cggctcgagccaagatttaaaatgtcaagttagtagatatgtaactgaaaaagtttcaaaaacatttcaactttcttcctctcgagtccgactttcttcttgacacttcctgtttatttgatgtgcatcctctttcttcccctcgggtctgacccatattctgtgtcgacacctgagttgtgtcgtgtcaacacgggtatggtggggggaataggcaagtctgagagcatcacagctggtagcagtgtatggctcacatggccaacccaactttctcgctttcctctttcactgcca

SEQ ID NO: 101381 - DNA, 295 bp, Glycine max
gcgaagagtattggttaccacaaatactaaacctagtaaagagattgtttcaaatttagcgagagcagttcagggccaggtggtggagaaagtaggaagatctgttttcaagggcaatacaattgcagataatctcctgatcttatcttgtgaagaagattatgcctcttgtgtgccttttcttgaaaagggggcaatggtgtacagttcagaactgttgctgaatggcatagttactcagaagctggagtatcaaagttgcaggcatcgactttttgcagacaatgtgaagaaa

SEQ ID NO: 101382 - DNA, 260 bp, Glycine max
tcaataaaactcctataacaagaataatcacaaaactctaaaaaatcaacaatgtgagacagcatcatacctagtttatagttcaatctatcatatctgtgttcactgcatacactaccttgttggcaataataagctgaattataagaactaattaatataacagaataaaatcaagcatcaaagagtgttaaacttaaacataagataacaccacagctcagttccccattctgttttaccctcataatcacagctgg

SEQ ID NO: 101383 - DNA, 269 bp, Glycine max
ctcttaccatcatatttactcgtgctttattccttttttttcaactttaattaatacttttgttttttgtgctggagaaaaacagttctgtggggagggaatctaatttggtttttcatacatcaaactctaagattttttaaaaaagaagataaaaacttaattttgaacataagtaactgtactttatataaattaactcggtaaacattaaacttatttatgaaatgtctatgtaacaatatttattctgttttctatggcactca

SEQ ID NO: 101384 - DNA, 298 bp, Glycine max
  unsure (1)..(298): unsure at all n locations
tagggaagcacttgtatgttcttttgctttgaatcccctgatccaattatactgcttcatccttaatgctatatgtctagtacctgcttctaaatttgtttatgcagtgaattctgatagttggttcagcaccaattgaacttgcagttaagtttgttctgtgatatagtgaaggaagatttgtgttcactgtccctttatttgctgtctgggctgtaaaagctttcaagtgatttatgcaataactaataactatacctantatggattgctgacattttcagagtttctagggtag

SEQ ID NO: 101385 - DNA, 271 bp, Glycine max
tggcttatactctgtctaattaacataataattctgatggataaaaggcaatgaatgtttcccagtcatggatcaagtttgtctagtgaatgaaagagtccgagggtacctgcattacaatgtgggtgatgggccaccatatacgcgaatgaaaacttacatgtaaaccttgtcgatctaaactttaatatctcacacattataatctatggcatcatatacatgttgtacataatactgttatgtattggcaattggtaaatggcaccac

SEQ ID NO: 101386 - DNA, 223 bp, Glycine max
  unsure (1)..(223): unsure at all n locations
tctcgagtcgattcggctcgagctgtctgcgtanaagacgtcagaatctggagggcatacacactagatgaaaagttgttgatgcatttcttccaggaaagtcttactggcggcagttgtcatctagtacattaatctggaaccttcctgagtccattctcggaaagaactgctaaggcatagctacagaacttgtgcaaaagggagccgaatctttccaaag

SEQ ID NO: 101387 - DNA, 213 bp, Glycine max
gtagatgaaatggagtagaaggaagaattgaatgctttagttgcagcccagttggcagacattaaggaattgcaggataaagttgagaaaatgaaggatgatttgaatgaagctagtaggaaggttgaattggggaatgacatgttagtggttgtgaggaacaagagtgacgaaaatggtgttgaatgtaggaaaattaggttttttgtatgc

SEQ ID NO: 101388 - DNA, 239 bp, Glycine max
gagcattaagtatcgtgtaacataacaaaaaagtagtggcttgtgttgtgtgactgagggccaaaggcaaaacatggaggtggatcagatgcagagagagtgcttggactacaccaaatccttattcttggaggtaaggtagataaacaacagtatgtgcaataaattcacatttaattctgtggttgttttcatcagttgtgattttgtgggtctagtggttttcctaacatatggtg

SEQ ID NO: 101389 - DNA, 170 bp, Glycine max
gacattgtattttacacttgttgtcaactaaagataacaagatataactggtgcagttaggtgcacgcctcttattttactacatgatatagataagtacatgtttcttgctttgttacataacacgagacattatttgatttttattattttatttccacacaacatag

SEQ ID NO: 101390 - DNA, 220 bp, Glycine max
gctgtttaaatatttagataatacaacattatgattaaattaaggaactatgtgacataagtccatctaggatttagcacatggtactataacaaaaattatatattttttcgtgggtcaaaatcatttatcaagtgtctaaggttacacttgcattatactaaagcatatacaatatctcgtgttaatgtcttgatcaaaagttgatggtctatataga

SEQ ID NO: 101391 - DNA, 145 bp, Glycine max
caacccaaaaggtacaagcaacgctctcaaggttcttactcaatgtaaccttccaacactctttgagcctctctaatcctttctttcatagccctcttacccctgaccatattacaagcccaataaagcccatgtggatccagga

SEQ ID NO: 101392 - DNA, 241 bp, Glycine max
tctcgagccgattcggctcgaggcgagaagacgacagatgggggactggatgatgatgcaatcttcaggattgatacatatacttgctcagatatttaaagagaagaaaaatcaagctggaggtgaaactgctcattcccagctagtgctgttcaaacttagaatcctttcgttgttggaaattttccttcatgaaaatccaggtaagcctcaggttcttatggtttactcaaatttggct

SEQ ID NO: 101393 - DNA, 136 bp, Glycine max
ttgtacggctattagaagactacataagggggatagagagagagagagagagaacatcgttgcagtggcgcgcccaatggctctgggaatctcaaacatactgcactgccccaaattgagtttctcccacaaaaat

SEQ ID NO: 101394 - DNA, 270 bp, Glycine max
cggcagacgacagaaggggaaggagattgatgatggtagtgaagaagaaaattttgatagtgatgatgacaataacgaagaaactagcctcgaacaatttttagatttcatgataaagaagatagaaactcaggaaatggaggcttaaaagaaggaacaggaggctaaagacgaagaggaacagcagaggaaggagattgatgatggtagtgaagaagattttgatagtgatgatgacaataatgaagagagaagcattactgagttaaa

SEQ ID NO: 101395 - DNA, 145 bp, Glycine max
ggttgaacattcaactgctgtgcagcaacgccttgaatctgcacccacttcgttggcaatgacactaagggattctattaattcagcatcatcaattactcaaaccttgagtagagaagtgcttgagggccagagaaagctagtg

SEQ ID NO: 101396 - DNA, 240 bp, Glycine max
ggcatcaattcaaaatatatcatcaattataagcatgggtttgtggaacacaacgaatgcagtgtcttgccgctttcacaagtttggtgatgaccaaaagaatctggtcttccaaggtgttgccacgtcttcttccaggggcatagaactcacaaagttagacggtggaggaaaaccagtgggtggcagtgtggggagagtgttatactcttctccagtgcacctttgggaaagctctac

SEQ ID NO: 101397 - DNA, 258 bp, Glycine max
  unsure (1)..(258): unsure at all n locations
ggagttaatttcctttgacatatactgtgcagattttgagttttgtcattcttacaaagacaattctgaggctttgaaactggtattcctaattcctaacaatatacaatatatgngntgcgtgtcagtaccttctaatgcaataaaagcaccaaggaagatccgtagacggataacaaaacctcgtctaaagttctcaaatttctntcctggtgagatcatcaagaagaggaatagcaatgcaggggcacgtgtaac

SEQ ID NO: 101398 - DNA, 249 bp, Glycine max
ggggcccccaacttgagggaggacagattgatcgatgtctaactctaagcagtactgtaaagccacggtgtacttgggcacaaaggaagggtaaaaaaatgaaaaagaaaagtgtgcgttggatgatgaaaagaccaaagctattgaattgaaagtaccctttgtgacactgtgctttcaaccaaattttatttttaattctaatatctaatgatgcgttggtaattagtggggatatgtcttaaagca

SEQ ID NO: 101399 - DNA, 225 bp, Glycine max
agacgacagaagggggaggaagagaatcgcaagcgtgaaggtgaaaaggttctatttgcagttgaaaacacacagaatattggttccgcactgaaaaatttgcatcttaattgtaaagctaccgagttacttaagttagaggaagagaaaacaaaactgcaagcagagatgaagatctctctagaaaaactcggggttataagaaaggaactggggaatctaaac

SEQ ID NO: 101400 - DNA, 176 bp, Glycine max
atccataggttcttcaaaacttttttgcgtacctcttcttctccggcgacaaaaaccgaccaaaatttaccgtgtactcctgaacaacgcacgtacaccaccggagaccaaatatgcttcaaaatcgaccttaacggaagaaacttacactaagtgatggagattttgtgggaaaa

SEQ ID NO: 101401 - DNA, 258 bp, Glycine max
taggtataatttttaagataattgttattaaaggaagaatttattatacatgataatatgtggtataaattctttttataatgtcaatacattttaattaaattcttcaattcttcaaaggacaccccaaacactgtaaaatcttttgatttctgccatattttattatattttttagttcatttatatcgataaagtggcttacgcatcatttctatcaaagaaaaacttaattgaaatacagtaccatctaattat

SEQ ID NO: 101402 - DNA, 242 bp, Glycine max
aatttaaccattttcaatgaaagttcatgaaatatttttttatatgaaatttaaaacaaattttgaataataacctttttgtactctattttgatctgtggtacctatatgcaggttctgttctgcagcacagagaatgggcggtcatcgtttgttcggcaattggaacctgattggcatattgattcaaatcctgaaattgtcactcagttggctgtatgtttctatacatctcagtttca

SEQ ID NO: 101403 - DNA, 238 bp, Glycine max
gacgaactgacctttcatatgttggtgccgtggacgaggatagttgatttacaagattttttattggttgggagtatgcaaaccccttatcaggtgtatttgttgtttcattgtccgttattgatggcatgactggcatgaagatgtcattttgtgcttgcccttcctgtgttgaagggaagttgaggggtcatcaatttgagaaacaggtgaagggatgttttctttgttgaagaga

SEQ ID NO: 101404 - DNA, 142 bp, Glycine max
gttagtactttaataaactatcacatttttaactatggaaacttctaaagaaacataatatagtttacaaatagattaaataatatatccactgaaagtataaaatgtcatccaatatgcactgattaattaaagaatttaa

SEQ ID NO: 101405 - DNA, 134 bp, Glycine max
ggggggagcatctaaatcgggagagttacgtacatagtgattaaagtttagattacttgatcgtttagcacttctattcagtcctcagaagaacacctctcttaagtctggtggaatttagatgtgtggtttgt

SEQ ID NO: 101406 - DNA, 278 bp, Glycine max
aggcagcaaaacgtgtgcggactagagatagggacagacaagctttggaatttaagtttcagttgagtttgctttaacgctttcactttgcagcggtcaagatctttgtatctactcttggttacatcttcaattcatctacgaaccgcgtttctgctgttgactcatcccctgtctctgtctcgctactcagtaaggatgtatgataagtatagggaggcaccgagtgtaatgagcgatagacttaactgcaatggactcgagactagtctggtcgg

SEQ ID NO: 101407 - DNA, 273 bp, Glycine max
acaggcatgcagcactgtcagtgtgtaaaagtttaccagttagaaatcttttttattagttattataacaatctcagacttatcatatgataatttatagttagatgataatgttaaaggtcatcggtgcatatattatttattctttaactaatgtatattacattacttatatctgtcaaaaaaatgtattaccattattgttgtgaatttatgagagaaatgcatatacactgattttatagttgcgtgtaaattaatcaatggctataa

SEQ ID NO: 101408 - DNA, 301 bp, Glycine max
tctgtggaataatccgcaatatcctatcaactaatttcctgagttctgtgcacattgtacgatgtaccttcaaacaagaattaccatcaataaaatgcttagttccatccaatatacaaagtagttgttaaaaagggtaatattttttacaccccaatagtgcaaatactcaataatatccctcatttctttcagttttcttcctgtggtatcatatcacctattacatttatcatttctctctttgctatttctttctctatcagggtatagacttttatcagggtgtccacggaacatt

SEQ ID NO: 101409 - DNA, 269 bp, Glycine max
atttaactgatgccttagtatatggctaatcatgggtttcgattgtattggtaatttttccaatgacttgtgcatgaatgcaatgttaagctagtttttccaagagtttgcatcaggcagattagcttcctttagtgagaagtatcgcagcatgttatttatgtagaagagttggtacttggtagccatattttgttgctttaaatgtaaacaagaatacaagctggttatgctattcagttgtctgatagcatgagggcttgctactg

SEQ ID NO: 101410 - DNA, 258 bp, Glycine max
atataacctttttttgccaaccgaaataatatatttgttaattgttattgacaccatgcaattgtattttgccggccatacagagtttttaaaggagcagaatgaacttaaaagattaaaattttgatattataccggacggtgtatataattatttatattctttatttattgacactataaaaagttatagtcataatgttacgtttttttttatatataatttactttggaactacaaaattttttatcgatcat

SEQ ID NO: 101411 - DNA, 277 bp, Glycine max
  unsure (1)..(277): unsure at all n locations
gatgggggaggtgagggttggttcatttgatctgcgactgagagtagagaagagaattgtgatgtggggaggacagggtcaaggcacgaccgccaaaagatgtaccattcatcagccnaagcgctggcacgatatcaccggcaacggtatttgcgcgatcaatgtggtattgggtatcctacagggcaaggcagatggtcatgtgtaatggtacactgtggtaattattcaatttgttctccaccctcctgtctgtcaaatcccctctttttttttt

SEQ ID NO: 101412 - DNA, 271 bp, Glycine max
ggaggttgatacctacaatgtctgaaatctgctgagttacttactttcatggagtacaatgtgaaaagccttctctttcctctcgaactcacaccgacccattcgcagcaaccgcaacactattatctctctcacacacacatttcattgaaattgtaaacacgccttgtaacttgtgagtagtatcccacgatttgtatttccctttccttcaatcatcaagttttgtttccttgggaaaatcgacacttgtgcctggaagacactcttt

SEQ ID NO: 101413 - DNA, 262 bp, Glycine max
gtatggttaatgcttatgctaatcatgggcttgttgagaatgctgtgcaaatttttattcagatgccggtgaagaatgtggtttcttggaattcaataatttgctgccatgttcaagaagagcagaagctgtgaaagttttccacaggtagtgtatttcaggtgtgatgcctgatgatgtaactcttgttagcattctttcatgctgcagtaacatgggtgatctggcattgggaaaacagcccacatttacatttgtgata

SEQ ID NO: 101414 - DNA, 201 bp, Glycine max
tttgtctttaatacttactgtatttcttgtcggagctcccctccaccccaaaattgcatccacctgacttataagcttttgctgaatgacctaacttataagttataacttaatgcataaagggatgatttggttgtgttcaaattgctagcaaacgagagaacaatttcaaattttatgtggaatacacactttactatt

SEQ ID NO: 101415 - DNA, 144 bp, Glycine max
ggagaagatgtttatctcttcagcagctatagtttttctgaactaactgcactgccactgagcacacagcaatggcagcttcttcttctcttttctcctcttcaatgcatatggagatgttgctccaaggcatcaaagtgtccc

SEQ ID NO: 101416 - DNA, 103 bp, Glycine max
cagcatacgctccgtgggatcttccagcgggttacacttgcacctacatcagataccggtctagcatagtcgtctacgtgagctgcgtgttgtataggtctct

SEQ ID NO: 101417 - DNA, 317 bp, Glycine max
taactcggaatgaggctcgagctcgagccgcgacagaaggggtcctacaattgcagcggcctcaaaaagatgctcaaaaacctacaaccactcgaccagagagccctcgacgactgtctcaaactgttcgaagacaccaacgttgaagcttcaagccaccatcgacgatctctccaagagcaccatagggtcgaagcggcaacatgacctgcagactatgttaagcggagtaatgaccaacttgtacacgtgcctcgatggatttgcttacagcaaaggacgcgtgagggacagaatcgagaagaagctgcttgaga

SEQ ID NO: 101418 - DNA, 100 bp, Glycine max
tacggatgagacaagacgacaggacaggatactcatctactctacattgtactctcactactctccaattgaaaaggcttctttatctaaagatggatgg

SEQ ID NO: 101419 - DNA, 164 bp, Glycine max
aggggtcattcaattaacttatttgaaagaagcaatagtatctcttatcatttaaataacatatttgaaaggtgcaatagtgattggttggtaactgactcttgatatggtattctgcaagtggtaatgttgattcaattattatattgctggtgttcatagtg

SEQ ID NO: 101420 - DNA, 114 bp, Glycine max
gaatgatattttccttaagatagaaaaccagttgtggtatgtaatacatgctaacaaaagccttgacttcatagtccataccctaagattcctcttacctcttctgcttcttct

SEQ ID NO: 101421 - DNA, 267 bp, Glycine max
gataaaagagtgtttgatactaaagatgttgaggctaaactaaagcaatcaaattgagattctttaaacaaatttactaagttcttatcttagatttacttgatcttgttcttttgacttgattcaatccatgctcatcaagtaacctttttggcatcatcaaaacttgcatgatatacattcacaaaaatatatattagatcagcatgacgaaatacaattcacgatttcgaaggaaaaatatgtatttgaccaaattcactttgc

SEQ ID NO: 101422 - DNA, 265 bp, Glycine max
gtgggagaagggtttggaaaaatgacactaccttaccatgcatcatgtcaagatacactgtcaattttcaccctcttccctcaacttagctcatgtttacttgcacaaggcacgagattaatttatcaatctaacaaggctgtcccacagaatcatttgctcaaactttataaacctatgttagtatgtaaccaatatattagtgcattattttttatttattaaattctatatgctgccagatcttcttgttcagctgcgcaag

SEQ ID NO: 101423 - DNA, 201 bp, Glycine max
acgacataaagtggttataagatataggtagcaaaagcaaaggttagcactgtgcatatcagccaagggagaggacaagaacgcttatgctttttctttcacaatttttacaacgattctatccattcttatttggcatatcagggaatcctgcacgtccctgtttgccgtacgagcagctggtggtatgtgactttcccc

SEQ ID NO: 101424 - DNA, 264 bp, Glycine max
ggaagcaaaaattgataacccaaagtgcttctctcctctgtctcttgctctctcttgctatacttttggctagtcgctatgctgcaagtggcactccaagaagcgcagtgccaagccaccatgtcacaacattcagcagaagtctcgcacttccagtttactcgctggcattggtccttctgcttaccaggccgaagtagcagcatgtgtagatgggagaggaccaagcatatgggacacctacactagacagcatactgaaaa

SEQ ID NO: 101425 - DNA, 251 bp, Glycine max
gacgacagaaggggtatcatatttgtttactctttcccaatcaatggttcaattcaatattttgtttactctagtattataaaataattctccatgctttagattttttgatgatataaccatggtattgttcagtgcaagtttcactttactttgatcattagatatgaaaataagagacaataatgatttcctgatttcttcaactgaatctgagtcatgacactgataattgttacatcgcacaacag

SEQ ID NO: 101426 - DNA, 263 bp, Glycine max
atctcatttatgtaatatatgttctagcataaccttctaacggtgatgctcttttgagagttcttccgaatgatggtgaaaggaactagtgaaatgtaccttcaaaagtactttgacagcatataagaatacaggttgaattattagttggacatacttgaccttaaagaccttttatatgatagttggattgtaatttcatactgcaagttaatatttttcaagtagatatgtaagtattatcttgtagatgattgtgtata

SEQ ID NO: 101427 - DNA, 147 bp, Glycine max
atatgagataacttttacaaaattagtttatgtctaaattaatgttagcttatgaagaagtttattttatttttcgtgcttattttcttctccaattagtgttaagttcttactagatgaaaatggtgggacaatttttaatacatt

SEQ ID NO: 101428 - DNA, 115 bp, Glycine max
ggaatccacacctggtaaaaaattcacgagtctgttagcgtctctcctccaaaatggaatagcaagacgcactaaaggttccatccatttggaacttgggagtgtagagtaccat

SEQ ID NO: 101429 - DNA, 199 bp, Glycine max
ggagtccaataaacaatgagcaatctaagctcgaaggttcaacttctgaagaaggagctgcacctgatgaacacaaaagaaagcgtggacttgactataattttactttcagttcaaataagaatgctgagggggaagcacttaaagattcttcctgggaagagctgtgatgatgatgtgacagaacaatgtggaaagg

SEQ ID NO: 101430 - DNA, 192 bp, Glycine max
tacggctgcgagcgacggcaggaaggggttctaatgttttattggttggtggtgtaactcggtcctcctcctttggtggtccggggttgtggttggtttttcccctaacttgaaatttcttgcttccgttgtaacttttggttccgaactccttcacattcggcaacgggttccgaagcttccagatgttcc

SEQ ID NO: 101431 - DNA, 190 bp, Glycine max
ggagtcataatataagagaattcaagggcaatgaagtcaaaaaacctgcaatgtagatagattaagcacgataaacaaatctccatgataactacatactaagaaaagagagcagcttacttaggtggaatctgtcctactaactagttaaattaccgaagagaaccttctttaaaggagaactgaaccg

SEQ ID NO: 101432 - DNA, 225 bp, Glycine max
gattcacaacttcaatccctcttttgctttaccaaattccattttccaattcaaaaccctaactccgttcgaagcaccaaatcgtgatggcaccaaaggcagagaagaagccagcaggaagaagcctgtggaggagaagaaatcgacggtgggagacaaagctccggcggataagaagccaagggcggaaaagagccttccgaagagggaagcggcggcggagaa

SEQ ID NO: 101433 - DNA, 252 bp, Glycine max
gatgcttggaaaggtgaagacctttttacttatattatgttttcatgcatgcaaggaaaaaatgacacttcttgaagttgatcttgatgagctatttgcatttgatattgatgaaatgtggaaataatagatttacttgcatagttctcaactgatgtactgcattcaatagcaaattcacatccaatatatttatgcttcaatttgcagagagaatcaggaactgaacaattttgctactagccaaatata

SEQ ID NO: 101434 - DNA, 253 bp, Glycine max
catcgattagctttaatgcccgtataaaaatatagaatatagggaagtcactggagactcagaggaagaaaccaaggtagatccaaaaccaaggctgagtcattaatatatatagcatgtttcgcgcctccaatgttctaatcttttcaatagaaaatcggacatttagtctctattaaatgtaccattgatgctgctcttattttgacaggattgcatatggtaaatagttttattaacccattgttctatt

SEQ ID NO: 101435 - DNA, 208 bp, Glycine max
gacagaaaagaccgttgaatttcaaacctcagccatgcccgctctcagaaagcgaaatcgattgtcggagttcgatgccatatccaaccacgacacacctcatgaacagaagaagaatatgtctgagtacgagctgtcgagagagccgagaatcccgcgaaaacgcgagagtatgggaagctggggatcttggacttcccttaatctc

SEQ ID NO: 101436 - DNA, 173 bp, Glycine max
tgagttgcatgcatttggtggaaacgctaattatatataattttcttaaaataaaacttgaacttaaaagtacgtaaaagccgattttttcacaggccttagataaaaggaagaggagtgtaatcatgtataaggatgagagtaagatgaaatagggaaacgatgaatatggg

SEQ ID NO: 101437 - DNA, 251 bp, Glycine max
tgtattatttaagcatgcaatggtgtaattttgctctttcaagttttttttagtcaatcaaatttctcattttcaaaattgaggatattttaccgctttccgttttcttctacaaaaaagcttcgaatttttattttctactctaaatcttcactcattaaatcacattttatttaaattaacaaaaatatcaaattttacccaaactaatatcgtcttaaattttctcttcaaattctaacctcattcta

SEQ ID NO: 101438 - DNA, 187 bp, Glycine max
ttacttgtaagttgtatcaccgattacattgttttaattttaattgtttgtgttattgtgattagattgcacgtcgattattgggtaaaattttaattgatctgaggaacaactcgcgaggaagccattagtgttgctgagttaaagagaaccaagaccatgattcattctctgtgaaaactgaaaa

SEQ ID NO: 101439 - DNA, 229 bp, Glycine max
gagtgtcaatagaacatattagcacaaaccttataataattgatcctttgacaaagggattacccccaagacatttatagaacatgttgaaagtatagacattattgttattgatgatcattagtgtaattaacttatggatttactaaactctgagtttattagatatgtctcaattacgtccttatgttgtatgctattgtatagataatgtacaatttgtttgata

SEQ ID NO: 101440 - DNA, 251 bp, Glycine max
gaatgacagagaggccaacgaggaagagaaaaatgggagacacaaaggagagagctacgaagaaacccgcggcaaaatggcctctcatcaaacccaaaaagaatcttcagattagccgcctccgagatttcgatctcttcaggtccagaatttttctcctccgctgaatcaaaagcatcgtaaaattgtgagaaattggtttaccatcagggatctagtccacttatgcgacattcaggatatgtcgatgt

SEQ ID NO: 101441 - DNA, 228 bp, Glycine max
cggggcatcaattcaaacatatatcatcaattataagcatgggtttgtggaacacaacgaatgcagtgtcttgccgctttcacaagtttggtgatgaccaaagaatctggtcttccaaggtgatgccacgtcttcttccaggggcatagaactcacaaagttagacggtggaggaaaaccagtgggtggcagtgtggggagagtgttatactcttctccagtgcactt

SEQ ID NO: 101442 - DNA, 180 bp, Glycine max
gactcagcctaattaataaaaggggaagtttttgcatagtgttgagttttgtcgcagcattccatacgaggccgagggaagagttttgttggttgggaggtagtaggttgcgtgaaagaaagatgggaggaaagagcacaagtacttccatgacactgagctcatcatcatcctatctca

SEQ ID NO: 101443 - DNA, 159 bp, Glycine max
acctttaccaatatatcaacatcatctctgattatcacacttccttcaggcctaagaatcctatccatctccaacaaaatgtcttccaattcacatctacaaagcaaaagtagattacttagattctgaagaatgagaatatttcaaatcacatcttag

SEQ ID NO: 101444 - DNA, 252 bp, Glycine max
gactggattagttttaaagaagcttcacaactacaatactacatcgcattgttggtcttgactcatgagctaatctttagtcgtggatgtatttgtttgctccacaaaacaatgacttgaaatttaatagggaaagtatatttatttgttgtaacttgtaacattctactgggcaggaaatgaaatgcatttggggtgctttatgctttcggatgtctttgaacactagccagctctaaaaagggatactca

SEQ ID NO: 101445 - DNA, 174 bp, Glycine max
ggaacctcaaaatcagcctctaatatttttctcactgtctctccagagaattgatagagagatggcagctgaacattggtgctggtaatggtgggactctctgagtgagacagacaacctctgcttgatggagcaatgtctcgtacgtatccaagctcatggactcgcgacaag

SEQ ID NO: 101446 - DNA, 251 bp, Glycine max
atagccacagtgatagttatttgtactcaaatatgggaaaataacaaacacgagtattgatatttttagcaacaaatgttgctatcaaaaacactcacaacgactatgtggttctattcgtggaagcatacaaatctgttagttctggagcagcatatcaccgatagaataactaattaacagttatagagttggttttcggctttcttgtgtgattctataattgtttttaaaatggatcaagtcacatg

SEQ ID NO: 101447 - DNA, 271 bp, Glycine max
acgacagaaggggtagaagaggtatggaatgcctcttgtttgtgtttttggtttctataattgcaattagaattttgtagtttagtttgtttagggttttgtgtttgaagtgttttagttaggctctgtttagataaactcttgcatgataagaaaataagaaactaaatgcattggcgtttttcataagctgaaatgcgctttaaacttgagaagataaatgataatacaagaatctcaatttctttgctatctttttaacttacataga

SEQ ID NO: 101448 - DNA, 242 bp, Glycine max
ggggtcaaagtaatttaccattttcttttgccacttatattgaatggatgctgtagctctgatgccataggaaagggtaagtttagggaagggatgaagaagaactccaagcttgtggcttatgctaaaaagcatggccatggaaactggcgcacagttcctgccaaagctcttcttcgaaacaagtgagctttcttttgcctctgagatttttcttttgttaaaatggttaataatataaa

SEQ ID NO: 101449 - DNA, 251 bp, Glycine max
gagcctctttgatcctttctttcatagccctcttacccttgaccacgttacaagcgcaataaagcccatgtggatcgaggaatgactaattttgcttttaagttgggattctggaatggaacccgcacacggttatgattgttgaaaaggaaaaaaaaaagaatccttgaggtttcgcacttgcacatttatgaagaaaactcatttgaccaagagctcgtgggaaatgctcagtgacaattgtgatagta

SEQ ID NO: 101450 - DNA, 250 bp, Glycine max
gaggaaaattcaattattaaaactgaaaacaaggatctaaaatgtggtcgaccctctcaaattattattcaggattatgatgatgatgatgaatggccagaggaagattctgatatagggggatatggtggaaagactcatcccatggtgaatgaagatgacatatctttcagtgatcttgaggatgatgattatggcattaaacccgttagttccagtacaggttcaaaggtgatatgaaacttcaaac

SEQ ID NO: 101451 - DNA, 244 bp, Glycine max
acgcccctcacgatccatatactcatggcacgtctttattctctaatgtacccacattaaggaaacacaatgttagtgatcttcataaattttctcttcctgaatatgataataattcaaacttcaataatatcaacaaggggtagtgttcaaagccacagttgcagatgcaaagttctgcatagaattgaaaggggcatggtattttaatagagcaccaaacagccacacaaataccagggta

SEQ ID NO: 101452 - DNA, 240 bp, Glycine max
gaaccaataaaacacccaagtctgaatggataaaaaatatattcaatcataaaaggtaaaatacatacttctctgacagttctgtagtcatttataggattctcagtggcagcatcaacaacatggaccaatagccgggtcctcctgaggtgcctcaaaaaattacgaccaagaccctgaatgcgaaagacaaaaagccttcatatttagcatctcaatggtttaaaatggggacatttg

SEQ ID NO: 101453 - DNA, 225 bp, Glycine max
tggtagtgcattgggaattgttgattttggctattgattctccttttcattctatttattttttcaatttttcaaatgttattttatatttttacattgaaaaaaaaaatcaacaacattttatcacatcgctaaattaaactagtagtctacataacaagtttgatggctatcacatctatatcataactaggaatgaagagactaaattatctagaacatcac

SEQ ID NO: 101454 - DNA, 225 bp, Glycine max
cggagcatcatcaacaatggctctacgccttttaaaatattcactttcaaatggatctgagggacagagaacaactcaaacaattgtttctttttctttgttgtgtatacgttggttatgttacaatattcccttggcccctaattgaaatgttcttgggtttaaaaagtgagagagaaaagaaaagtcaattattttgttggggattatgtcattatacttgac

SEQ ID NO: 101455 - DNA, 248 bp, Glycine max
ttccttagttaaactaatttaatttttaagttatacgtaattaataaaaagtgaaaactctaatcctctcaggggcattaatcttccaaattttcttccaatttccagactcattcaaagtatgaaattgattgattctttgaataggttttgttttatttaagctagtataagaacttcgccgaaaaaattggggtaaaataattgactcagaaatgaagagaatcacgatgcattttccacactga

SEQ ID NO: 101456 - DNA, 255 bp, Glycine max
agacgacagaagggttgtgcataattttatatcaaacaactacattaacatatgcagtgtgagccggaaaggtcaataggcattgggagctccgaaaactatgatttattaaaattaagggtataaaaaaaattagaggaaattaagggtatcaattaaaaagtgaatatatatttaataaaagttacatttttaaaaattcacgggaacaagattgaacttagcattttccttaactaatctttgattttgtat

SEQ ID NO: 101457 - DNA, 262 bp, Glycine max
gaagaagaaggagcatggccatgagcatggccatgacagcagcagcagcagtgacagtgattaaactgctgcatcacctatatatttaaaaggtttatgggaccatagtagcgagggctgtgccttaatttctctctctctctctctctatatctctctctctctctttttcctttttccctatcttgtgatctatttatgagtgagaaaaacaaaagtgagaaattgtgcgtgtatctggttgctaattcgagtgctatta

SEQ ID NO: 101458 - DNA, 235 bp, Glycine max
ggaaaaagataggtggccttattgccatgttggcatccttatacctgttatcagaaggatgggctactgcaacacattctccattctcatgggaagatagagatgattctgaggttaaaactgaaccagttttgggtctgaggaaaatgttagtccctattattgctggtattctatctgcactcaggagagtgattgctaggcgtgtttcaatcaagaatcaacttaaaaggcg

SEQ ID NO: 101459 - DNA, 264 bp, Glycine max
gctggcgaagaagaaacgacagaaggggtccccacagaagttagtcaaaatgaagcacatgcttggggtactgtacaaaactggtaaagccaaaacattggggcaaacaaaccacaaccaagccattgtgttgagttgtgcattaaataatgcgtatttactattctgattctaactacttctacgcatcaaaagggctttagttaacagataattacaaggttaagcagctacttttttggcacgtaaaaaggaaattaatca

SEQ ID NO: 101460 - DNA, 261 bp, Glycine max
agacgacagaagggcttctttatttattttccctcttctcttttatcctttgttttgtccatatttgtgtataaactttgctatgttattgtgtttggtgtgtgtctgtctatctatttcattcgtagttagaaatatttttgttctatgcacacatgacacctacacctttgcacacacattgagatattaggcactatacccaggtctatgtgagccataaggagtgaaggtcgatctgtggttatgctgggtctctga

SEQ ID NO: 101461 - DNA, 208 bp, Glycine max
gaattatgatagattttaaagccaatgaagaaaaccaagtttctccttattttgaagtcatatgatattctaagataacataagagatacagaaatttttaaattataggtatatctaaagagcaaaacactttgtatataaatatgattgggaggaactatttcatagtgcatatgcaactttgttagtatgaaattgacaatttct

SEQ ID NO: 101462 - DNA, 108 bp, Glycine max
atatccttccaggccttgcatctttatagaggcatgaagtaacagaagatctccaaacatttggaggactcatgaaagcaacaggtcatacatggaattcaggattaa

SEQ ID NO: 101463 - DNA, 104 bp, Glycine max
tactgatggctccatcaacttgaaaccagtaacggtgactgcctgcaccttaaacaggttgaagcagagcatgatggtatacttttcgccatgaccatgatgtc

SEQ ID NO: 101464 - DNA, 189 bp, Glycine max
tgagaccgatgatgaaaacacataaagaaaagatgaaagcaattcatagtcatagtcatagtcacaggaataggcatgcaaattgataccacatcacaaacgatattgcacggatcaaaattgattgaataaacaacaaactgaattttttttttaaaaaaaagagtgagatagagaaacagagttggt

SEQ ID NO: 101465 - DNA, 174 bp, Glycine max
attcggcgagaagtcgacagatgggggagctcagcagaagcagaacgaggagaagcagaaggagcaaaagcaatggcgccgaagaagccgagaaccacgacaaggaaccctgatttggttagggggattggcaatattcgaggtcgcaaatgtaccaaagaggggctctgggcc

SEQ ID NO: 101466 - DNA, 167 bp, Glycine max
gaagcagttaacaaacatgagatatgataatgttagggtgtaaaggaattcattatgaagatggttcacatccaaaccaagcttaaatcccacaaattgaccttaatgagaaattcattgttgaacatgcctaaaattgcctacccaccgattttacacaaattaaa

SEQ ID NO: 101467 - DNA, 200 bp, Glycine max
aggtagtatgaacacttactgagtttggtgatatattactagttagtatataggattaaattttatttgatcaaatttttggccataagcaacctcaaatatcaatgaacaaaagcagcataaagaggtaggaaaatgagtccagcacaggataatagaatgcaataggcgggattacaaataaaaagtgtgaaaaagta

SEQ ID NO: 101468 - DNA, 128 bp, Glycine max
ttcggctgcgagttgacgacagatgggttgcacccaactagcctctaaagaatcagataaagaattttcaaaattttccgttgctaaagagttcattgtctcagaacatgacctggtaccctcatata

SEQ ID NO: 101469 - DNA, 202 bp, Glycine max
tcggggatctcaaacacactaatcaaatgcacaatatacgcaccattgggtccgaacccaattgtgcatttgtgcattccattccatcacagtaaaattgaattgacacccccattccctcgctctctctctgctaccaaattgtctcactcataaaggtgctaaccactacgcagtaactaccactgtttttgacaaaact

SEQ ID NO: 101470 - DNA, 235 bp, Glycine max
tcgagtacggcgagaagacgacagatggggctccaaaactttgctcaataaccacattacgcccctataaaaacaccaatttaacaataacaatcgtgatcaacaccaatcaaaatgaagggactactattgatatgtttcaagcctggatccaaaagacattctctccccttagacaaccgaataaataagtggttaaaaaaagcggggtccccaatataaaatattttacaac

SEQ ID NO: 101471 - DNA, 243 bp, Glycine max
cactagtctttcaagtagagctttcttttcttgcaatcctagtttctctacatcaatttcattggtttcttttggagttcaattctttttgcaaaataatatcattaaaccttaaaaaagaaaaagataaaaaaaacttgatgtcaagaaataaagtgtattatatatgtaagtagaggatatatatagaaccatgtccaacaaggacgaatgtatcccatatgcttatttttaccttatttc

SEQ ID NO: 101472 - DNA, 140 bp, Glycine max
ttcacttggtcccctgtatatgtgcgtgatgcttattagattaatcccccctttatctatatacctcttttcgtgtggtcaacagtgtcgtggccattatatatgtgatcagagacagatcacatggtaggccaagtttc

SEQ ID NO: 101473 - DNA, 150 bp, Glycine max
gtcagcagcagagcaaaagatagaaagaaagaaagtgcaacctcctctgttttgctcccctgtttaagccttatcgtaagcttagaatggcacacaaggaattttccattgccctagtgactctcattgttctctttgtcaacacgaacc

SEQ ID NO: 101474 - DNA, 238 bp, Glycine max
gagtcagtatttgaaatgctactagtggcgagttttacgtaagaaaagccttgaccatatgttctagtacaatatatatttgaataatatagatggactccaaaccaatacacacacaaataacaaataccagacgcgcatcatcataggtacttttgaactatttggcgaggaccatcctttgcacttgcatgcagattgcaacgaaagatcaaattatattaggagctagtgaaca

SEQ ID NO: 101475 - DNA, 217 bp, Glycine max
ggaggttgtgatttgcattatatgatacttggaatttaagtttttatcagtgtcacctagcataggccactataatattctttgcatagtttatatgaggattttgttgttaaaaatactgtttctcacattcacacagtatctatctctttccatacaggtccatagtgctgttattaaatcatgatgtctttgaataaatggaaggaaccaatat

SEQ ID NO: 101476 - DNA, 272 bp, Glycine max
tggggcgctaactatggtcatgattatgaaactgatgatcacttgtttttgcactgtccatttgggcaccaaatttggaattggatctcctctatgttctattgttgttttgatctttcccccatccagaacgtccttgctacaattaccttttcgttcttctttatttagaagctgagaaatcttgtaaaattttaaaatctgtcataagttataattcagccagtgttcagctttttggttctatctcttttggttttatgactaattca

SEQ ID NO: 101477 - DNA, 297 bp, Glycine max
acagctgagaaagggtacttgtgaattgtgataatatggtttacggataatttatttaggtcgggtagttaaatggttctgggtcccaagtgtaagttacacatgctcgtacttgtcgatgaagatgactcttagattggtgattaagagctcttcggtatgtaattgtatgttcattacggtacctgctacgtgtcttttatgaaatttatgattattataaattatttttctacagtttatatgtgtttctcactcttttaaacaagcagagggaaatttcatttcagtcttcta

SEQ ID NO: 101478 - DNA, 271 bp, Glycine max
cagaaaggtgaatggtaatagacaacaacaacacagtgacagaatcactggcactgttgtggatgccccaagtgggttttctcaaagaggggactcaaattcaaagctttcaaactcaaattccctcattgatttgaagctgggtcgatttgctgaccatggagatttcactgatcgggcgttttccaaagttttgtcttcttctgagtcatcaacgcctcctaagagagtgagagcttcagggttgcactctcagactgcatattgccaa

SEQ ID NO: 101479 - DNA, 217 bp, Glycine max
gatattcctaacacaggcaaagatatgagattggaatattccaggacaaagtgaagaagtataagcaagtcaggaaataaagtagtaaactgtaaaggtaaatatcaagtataaatggaaggcattagttattatagataatctcctcatttcttatcccttcaaattaggagttatcttttataggacatttgaattgtagtacttaatctaaatt

SEQ ID NO: 101480 - DNA, 227 bp, Glycine max
ggagactgttacttgcaaatagttaggaaaagaggagatagttggagtgtgtggtttgctaatagacatgaacctgttgacgcggaatccgcagttctgttgctagatcactctggtgtactgaaaatagaatcagaacacagggaattacccatcattctttacttttcacctcaaccagccaacaacactatggccacactcttagatacaggcaactttgtgct

SEQ ID NO: 101481 - DNA, 267 bp, Glycine max
  unsure (1)..(267): unsure at all n locations
gattgcacctaatatagaaattaataatgcatacacatcccttttcttctttcccacaacgacataccaaagtaaaagcttccaatatttgcaggaaccaatttgtactcttcagcatggtctcatttgcatgctattcaacgtcacatggcttttgttaacaatggagacacaaacaggagagattcagagcacaagttcattgggaattcctagaatctcttcagttgctagagactcagatctcaatgataatctancatacac

SEQ ID NO: 101482 - DNA, 256 bp, Glycine max
atcttgctaacgctttttttcaagtcgcatgttaataaattaaaaaaatgtatttgtttttacatttaataatttattgttttcttaacttgatccctaaatatactgttattaaaattcccgttttaaataaaagttcataacctatttttttaatattgaattgataacctatttcagtagcatgcgtgtagtaaattaataagtaacaaatacccgcactaattaatttatgtactatgtcagttttaataat

SEQ ID NO: 101483 - DNA, 285 bp, Glycine max
tatgctacgaaacattcctggaattggagagtacacttctggagccattgcttctattgcattcaaagaggtgggcagtttctgtgttttggttccggaaaagtaactattggcttttgctcatgcattaaattatcaggttgtacctgttgttgacggaaatgtggtaagggtgattgctagactgagggctatttctgcaaatccaaaagactcagccactattaagaaattttgattaaggaaattagcagctcagttggttgatcctgttcgtcctgggga

SEQ ID NO: 101484 - DNA, 250 bp, Glycine max
atacctatatatttatgcccacaattattacttacactttcctcaggtaaacaaatcaataaaaaatatcaattaaaaattattataagtaaatttagaattcattcttaaatcatttaaatataaaccataacattaaaagcaacaaagcataaccttcggtcattcaaacacatgtcataactaaacaacgttataaacgtaaccatctaacattaaataataaaaaactacatattcacttacttat

SEQ ID NO: 101485 - DNA, 149 bp, Glycine max
agaaaccaaactcttgagaaaacgctgattagtgatacttcctctgaatgattcaaaatgaagaaccgttgttatggttagttgtgtgacctaacatggagaacgaggaagccaaagatcacaaacggatcggccaagggaaatagatg

SEQ ID NO: 101486 - DNA, 107 bp, Glycine max
ctagaatacgacacataaggttgtataaaaacgattgaactggggttcaaagcacgccgttattcgctgtctctcccatcctttctcaatctcaatacccttttaat

SEQ ID NO: 101487 - DNA, 261 bp, Glycine max
gagagtcgaaagagaatagcaaaaagcacagaacaatccgaaaatggcggaacgcgaaacctccgaatccgaggacccctcgagttcaggttcagagtacgaggatgcacaaacggtagagggcaatggtgtgaagaagaagaagggtttgtcggagtacgagaaacagaggatgtcgagaattgccgagaacagagccaggttggaggctctgggtttgccccaaatcgcttcctcgttaaagggttcttcgcagcctca

SEQ ID NO: 101488 - DNA, 122 bp, Glycine max
cgggagagtggtggggtctgcagaagagcgtcgcagatgtaaccctaatcagaagaagcgcagttcaagcgagtgacagccaccagccatgggtcgtatgcacagccgcggtaagggtatat

SEQ ID NO: 101489 - DNA, 270 bp, Glycine max
gaggtgtgattccccttaggtgcgctcaggcaatgtgtgagtggagtgcttgtcaccctggggacgtctgacacaagcttccagctgatcatggtcagcctttagctttctcaactcctattcatgtcgtcgctctatctccgtgatgcgattttggagttgttaaagagtatttgtgtctgcatagttgtcggatgaggatggaagcttttgaaagaggtctcacttttgaggctagaccgagtgctaaccatggatgaccaggagaga

SEQ ID NO: 101490 - DNA, 259 bp, Glycine max
cgggggttagtagcatgatggtactagtggccaaaagcaagaagcagactcaggattctgaatccactcctccaataatcacatccaacgtcaaacaaaacctccgcttcctaaagctatggaaggtaatactaataattatcatacttactcatccttatgctatttcaaatcaaacagagcttccagaattgaaattctagcaccgcaagaagaaggtcgagaaggaaataacttaattaaatcctttgggtcagtt

SEQ ID NO: 101491 - DNA, 217 bp, Glycine max
gagatctctgtaataaaacatgtttgtgtgtatttcaataacatttagtattgtgtcgtataccattcaacacttcagctctctccccacaacctaaagaccccttttttatggttttatcgagatgtaaaatgttaatccgatttcttctataacgattttcaacattatggatcgtttcttacccatgagcgacttaatatggcgtgcaagtaat

SEQ ID NO: 101492 - DNA, 225 bp, Glycine max
cctacaaaaattttccagccttctttgtctggtgcctttgattttttaaaggtaacaacttttttttctttctttggtttaatactccccctttttctttgtccatgtcataagtcttatagccgaccttcttattattctgattttttttaaaaataacagtatggcaaaataagggatcatcaaatcctcctagcaccaatcctggatggaaatattgtactc

SEQ ID NO: 101493 - DNA, 224 bp, Glycine max
cttatgtcttgattatgtacaaaccttttgagtatattaaaatctataattagtaaatattaccaaatattgttcaaatatttattctcaaaactagctagtcaccgcaataagagatttctattctctataattactagtgaaactacgtgaatttcattccttcaatttctttaattacattcaaatttcattaatttcagcggttggattaatttgcttat

SEQ ID NO: 101494 - DNA, 200 bp, Glycine max
atgatggtttgaggggtgctaattattaatgttgagcacacaagatccactacttcaactcgaagagaaagagtgacacacacaattttaattatcaccagaaacagctcatgatctcaggctgatgataatgtccctccataatatatgtatgttttttttaactagcttgacattttttacgactaagttattaaata

SEQ ID NO: 101495 - DNA, 188 bp, Glycine max
cattgttttaattttttccgaagacatcacatcattgcgagcaaagcaaaataagaaaataagagcaaaaatttatcatggatgtaaagcctttaagtcattctttatagctgtttgaaataatgaatgagccttggatgatacttagatgagagaattttgtctcatctttcttatcttgatgctat

SEQ ID NO: 101496 - DNA, 222 bp, Glycine max
gatgcatataagcaaatagctgtagctggaggcaccaacattcgtttttcgatacttgcttatttaggagttgagtttcccttggaattagacccgtggaaactattacagaagcatattttgattgattacattagtcatgagggacatgagttgacattgcgtgtcctctacagattatttggtgaggctgaagaggagcctgacttcttttcttccaca

SEQ ID NO: 101497 - DNA, 219 bp, Glycine max
gggttttgttttagatgtgttgttgatgaagtttctaaaggaacatccaattcagtagagaggacaaccgtggaatgtaatgcagataatcataatagtaatagtgactgtcatgctgaggattccttttcaggaaaagtttctgtgtctgttgctgatacaggagagacggctgttgttgtttcgatggttgaccaaacaaaatgggttccatcaaca

SEQ ID NO: 101498 - DNA, 220 bp, Glycine max
acgacagaaggggaccgagggaggtagaatattcaaatcatgtaataataataataataacaataatctgattttgatctgccacctcctctttcttcttcttccttcaatttcaaccttcgctcgttgtagataactgttcaccaaaagaagaaaaaaatagttacaacattattagcaccaaaatttgaaaacgatgaagatgcaaatgcgcgtgcca

SEQ ID NO: 101499 - DNA, 201 bp, Glycine max
tagggaccaactactaagctttcttgtgttaagaagccgtttgggtcattgttaagtgactcgactcttgtcttttctaataagattcgaacaaaacagaaatgtagtagtcgtgtgtctttgtaatttcattggcttagttgggtgtgttttgtgattgttagcttgaaaaaataacaaaaaaaatgaaatttttagttg

SEQ ID NO: 101500 - DNA, 240 bp, Glycine max
ccttagcactagaaaagtgatcatgcataacaatgtatttatatctaatacctacctcaattttatttggctctctccaacttctcatatttgcttctatccctttccattaaaaatgtttgacaagtaaaaataaaaaaaagctggtattgtttgttgtaatccatgattgccatttcataatccttcagacattgaatctcctctttttccttctgagtatgttcttcgagttgaaga

SEQ ID NO: 101501 - DNA, 203 bp, Glycine max
gggggcagcaaatagcaaagcataaaaatataatataccccacgcgctttaatcccccgacgaaatttacgagcaagaataaaaaaaaataaaaattatgaggtgacattcaaaatatcgttgagcaaaggaccaaccagaaccaaaaccagaagataacaattaaaccgttcttcttcgattcaagttcgaagaagaagcga

SEQ ID NO: 101502 - DNA, 182 bp, Glycine max
ggagagaatagagatccagtcaaaacaatatctttctctctctgtttggtttggcctcttgctgtaagaagccagccacagtactgttgcgctcctgtggaaccatcgatggtgtgtttctcattctttcatgttcctttcgcagtttcaatctgtttggtgaataaccacaatccttttgt

SEQ ID NO: 101503 - DNA, 218 bp, Glycine max
aatggacatttggatactgcacaatagttctttttttgccctgaaattagtgctagctacagaaattgtgatattgtccgagccactcatttgtggatattgtctagtggtatatccgacaaaggaactattattacggtacgcaacacgctcagaatacattaatttaacacatgtttttttaatatatttttaagtgtaaggtaaaatttatggat

SEQ ID NO: 101504 - DNA, 205 bp, Glycine max
cgacggcccgccttttagatgtataataataaataaataaataactggaaagaaaaatacatttatgaaaatagtcaaaggtcaacattatcggtgggcaaggtgctgtcgttttattcaaagaccttccgcgtggaaacagaaacatacaaacttttatccaattctcaaggttgttggcacagtcagcataatcattaatggc

SEQ ID NO: 101505 - DNA, 162 bp, Glycine max
acactcaaaacacatttaaattgaaaaatgttatatgatacatacaattaattttaattcacaaaactcacattacatgcaattccataaatacttttggtattgcgtttcagtcagaattagagttacacctcgctaattttgaatctcaaattctgattg

SEQ ID NO: 101506 - DNA, 155 bp, Glycine max
gagaaacagcagcagcaatttgagtagtgagaaacaaagagacagacaaatccatgtaattgaatagacaaagcactttcggtttcttattattttgattttcattacatcacgtaacaataataatacagccaagcacgcacgcacgcacccac

SEQ ID NO: 101507 - DNA, 238 bp, Glycine max
gtctgaggaatgagagtaatgtactaagcacagtattaagaacttaaaaaaggtaatataattatgttctaatgtcagggcttcaaactaaggaaacctaatctctggcataggagagaagagataactgttatgacaagaatttcaaaaagaattatcttcgctcgtacgatctcccagattcgaatggatgcttggaagattctagataatttctaccttcagcatctgtatgttt

SEQ ID NO: 101508 - DNA, 244 bp, Glycine max
gatgatagagataaacttctttttttaagaggaaaccaataaacttattccatcttactttgtctatatgaaaaaggttctctcctcttagttttccactcccccacatacaaataaacacaatctgagtgaccaaaactgatctaaaaaatagttgaggcagtatctctaaacctcccaacttcttcgccttgtatcttctcatttgcttcggcttaattaacctatgcctctcgtcctagcg

SEQ ID NO: 101509 - DNA, 237 bp, Glycine max
ggcatcaattcaaaatatatcatcaattataagcatgggtttgtggaacacaacgaatgcagtgtcttgccgctttcacaagtttggtgatgaccaaaagaatctggtcttccaaggtgatgccacgtcttcttccaggggcatagaactcacaaagttagacggtggaggaaaaccagtgggtggcagtgtggggagagtgctatactcttctccagtgcacctttgggaaagctc

SEQ ID NO: 101510 - DNA, 232 bp, Glycine max
ggaattaagactagatatgctatttactatttagggggtattttgaagagttaatttatagcttatttgaacttatgcttatgtataagcatttgtgtaagtgtttgggagggctcatgaaatagtttatgatctgtccatattaagctaggccctctaggatagcttacgtacaacttatcaaaacaatttaaacttgttttctcttggattgtataaacaatttatacat

SEQ ID NO: 101511 - DNA, 241 bp, Glycine max
ttcccttggtgtaacattgagttgcctattatcaatagttggcatcgtatgtaaagagatgtatgacgcgatgtaaatcaattgtcatctaatgacttgagcctatggtgctgtgagatagaaatttaagatggtagattggaatgagaattgagtctattgattttattattgttgtacgtgtaaatggtttaagttagcaaatatatcactgactaaagtcaacgtaatagtgcaaaat

SEQ ID NO: 101512 - DNA, 278 bp, Glycine max
tgctgtacctatgttagcttaagttgacacgctccattttatattttttttcttggttaataaactaatagtcaactccatcattattggctttgagcctttaaaaattatattatctgtttatatcaaaataatttcgcctgaggagaggaataatggagcattgatagttaagttgtttaaaagaaattaattagaacgctaccacagtgttttatatttttattatttattcgtcaaacgcaaaataacacaaaatatctatattaactcatctt

SEQ ID NO: 101513 - DNA, 239 bp, Glycine max
ctcactaaggaacctacctatgaaattcagataacattagggcacgtcgtaaaggggcatgtgaagtgaaagcatttgagataaccattgcatttgtataatactaaatttgcattgtatgattatggagattgttgaagtaaaacttcaatgtgattaaaagaaacataaacaatacttaaaaaactatatcaaggttttctttatgctattatttatagcaactttaaacaattaga

SEQ ID NO: 101514 - DNA, 194 bp, Glycine max
ctacctcttaattactcattatactctttttacttaagggagtaaacccttgaagcccctcttcctttctgaaaatgtccttttggaaataacatgtacatattcccaaaatatatacatgaagatagttgacattgtaaagacttattacatcctcatatttgttagtttatttatgttctaacattagtgtt

SEQ ID NO: 101515 - DNA, 236 bp, Glycine max
ggaagaatctctctttatttctttcactctctcagaaccaaaattttccaaactcctcaactctcatcagatatcaaccttctctctctccaaactctcgcacctttctgctctgcccttcaatttattcacctctgacaccctcttaattctgcttccagttcctctgagtggttcaaaatccgtggttgattttgagaatgttaatgggagcagggtgacggataggccctttt

SEQ ID NO: 101516 - DNA, 227 bp, Glycine max
  unsure (1)..(227): unsure at all n locations
atgcagactatcagaacatgctaaaaaacatgaagacttgaaaagtttgggggtgttcaaatccacatttagggatcctgtttcttcaatcaatgcattaatacgaaagggtggcttaaatggttgagtcatatgataattcatgactgganattcaccttctggttgtacctatcaaacatgaaacagtaattagtcaagggactcaaaagtacaacatgctaatg

SEQ ID NO: 101517 - DNA, 205 bp, Glycine max
gaagggcacattaccaagtcatatgatccaatgataaaaacttattaagcagcttttttttaattttgatcaactcatgaaaccccatgccagagatgctctaagtgcttgatggctctgaaatttaaataagacgagacatttttattactccctccgtccgaaagtaattgtcaccctatattattttataaaaccattagaa

SEQ ID NO: 101518 - DNA, 213 bp, Glycine max
ttcattgatcactacataaattcattatttaatctttatttttataatacttaatcttattgaattttatatgtcaaatttttttattattgaattttagggatatgatttcattcatatatgtactcccaaccactccaagataggcacacattatttatactagctagagaatatgtagccatgatgtgaaaaaagaaaatgctgatgtgg

SEQ ID NO: 101519 - DNA, 144 bp, Glycine max
agggttcgaagagcgcgacaggggggctctatactcatactgaggactggatctgatagccagtcacaacgtctgtggcctctagaatagggtgtatatcattgtcacccccatttcagctactgccagtcttcagggagaaga

SEQ ID NO: 101520 - DNA, 157 bp, Glycine max
agggctggcttcttgattctggaatgttacaagaggggtaataaacaaacacttattcctcgtcatttcatctattgacaagtatttcatagggccaatgtagtcattcatgtccctttgttggaagggggagtgtatgacagtatgaattcaacta

SEQ ID NO: 101521 - DNA, 231 bp, Glycine max
gtctgcatcaatttcttctatctcaacattactgtggccatcttcgtctgtgatctgtccacgacttctggcattctttcgtgacgagcccacatctccattagcagccccagttggtgtcctaaatgaattaattggaactgcagtagatattggacccgcagccacgcgttgactggtcggggtttgcgcattctgttcagagagcctctgggattctggggagatgaa

SEQ ID NO: 101522 - DNA, 236 bp, Glycine max
  unsure (1)..(236): unsure at all n locations
ggaggatgccccagaggtacagggtactgagagcaaagatgaatgtttaaatgaattgcatggacaggccatctgtgaatctagtggtcttgtttgtttccttaaggcggatgaaaacctaagtcccaaattttcttcagcaaaatgggtgggaagacaaggttccattacaagttcaaggttcagaagtgctgttacttccatacaaagaagaaagttnctctgctgctgagatc

SEQ ID NO: 101523 - DNA, 232 bp, Glycine max
gttgataacatctttctagattttgtaatttattatatcttttttttcaatttggattctgtaattctgatgctgattatttgtggtagtaagttttaatcaaagctgaatgtggctacacatggaaagttttcaccttctgttactggaacattcttttatttattttttattttttttatgtttatttgcatttcaaattcctgaatcaactcaataccggttgagggag

SEQ ID NO: 101524 - DNA, 233 bp, Glycine max
caccatattcttttgagtacttatcaaacaacacacaacataatttttgtgttgtgctccatgactagcaaaaagtgaatagaacaaaaaactgaaccatgactcatttacttgtctgtgttatatcacttgtactatcgttccatgcgcaccgaacccaccgtacatttttattcacgaatttaacaaatctcaaatgggccattgatgttaattacgttttgcttttatga

SEQ ID NO: 101525 - DNA, 259 bp, Glycine max
aaaaataaaaatgtgagactcaaaaaaaaatttaaaaaaatcttcttttctcttgatttgatgtcaaccaagcaatctcttttgtgattttagattaaaaaaatgattataataattaaaaaattaattttagaagaaaaaaaacagctaaaatcacaaattaatcatgataggaagataaagaacaaccataaaacctaattggtaaccattattaattactaactatgcaacattaattaaaaaaaaatgtgggcaa

SEQ ID NO: 101526 - DNA, 251 bp, Glycine max
aacatgcagcaggtaacgtgtcaaaacattatttcaaattaaataaaatatagatgaaaaactacttggccgttttctattgttgctgaaggaacctggctagcaggttcagtcattgccaacgcgtacaacagaccgtgtttgaaaaattgaaacacgtgcggacccaactttaaatatctccttcgaactttccattttacaatgttaaatttggacaaataaaaaagatagaaaataaattattccac

SEQ ID NO: 101527 - DNA, 259 bp, Glycine max
gtattattactagtatttgtatagtttttgctaaatgcaccccacttattcttttttttacagtcgcactcattaattttaattttcagaaaagaagtcaagatggcgcccccctcagtaatatgtcggtccgcccctgtatgtatcccatatatttccacatttacattcatacataacaatgataatgttaatctgtagctaaaaataatttaaaaacaagcttcaaatcagctacagtaaactccaactgatttcg

SEQ ID NO: 101528 - DNA, 254 bp, Glycine max
ctaggccaagattattcaaattatgcttattgagagaacaaaatgccatcaaatttttgtagttaaacttaagatgaaactcttatgtcataagttcgtattgaatactacttaatgaagttgtcttgccaacaaaatatgtcttgtggagatacaattactggcaagtaatacaagttatgagagaataaattaattaatttattagggtagttgctgacagaagtactgcagttttatatttacgtacacaa

SEQ ID NO: 101529 - DNA, 249 bp, Glycine max
gatagcaatgagtggactggcaacctgtacttctttctttgacaggcattgctggtcctaggtctggttgggtaaaaaagctggggcatagcttctattgctggcttgtctgccctgtctcacttataattgaggacttttgcggcgatatgtcgatcaaaaagtcactccattttgacatgcctatctttgaaaaacgagtggagagcttttcccctatacggagatagcttcctgattagattagga

SEQ ID NO: 101530 - DNA, 247 bp, Glycine max
gtctgggagtttgttattattgttatttttcattctacatatgtatttgttgcgagtaatgggtcatgttggttggagggtgcagtccagaaagtcaaaaattataaacgaaggttttggtaccgacttgtttgagttccaaaaaaaaaaaaaaaaaaaaaaaaaaaaagggggcccccgattagtgacctcgtcgcccggggattaattccgggccgggaacctgagggaacaagtttcccctatg

SEQ ID NO: 101531 - DNA, 257 bp, Glycine max
ggggggggagtataaacagaagtaggcaagagaaaaatataaagagacaaaacaaggaaatataatatctattgattatattcagagatttttctataaaaatattagtcgagctcaatcccagattattaagtttatgtactttgagaacatagaagtgtttttaccatgtgcaaccaaaacagaaatttgcattagataatgtaaaacacaacagttcacaattaaaacaaacaaatcacctttttaattagcta

SEQ ID NO: 101532 - DNA, 252 bp, Glycine max
gtaccacaacttttaaaaaccatcttttgatcaaaacttcgcctttcgtcgttaatattgttttatttaataatttaatttattgctcaaagtatttcttttgaattattttttttccaaagaacaaattactttaccaatttttagtttagaaatttcgtgatgttgatgcccacaaagaagcacagcaagttaaagtactttatattaaactgtaaaattaaagccgactaccatgaatatataactttg

SEQ ID NO: 101533 - DNA, 250 bp, Glycine max
ggttttatgggaaagacaatagaaagttggctacttcccttgtgaaaattgttttagcaaatagtcaggcacaatattagggatttattggtttagaatttgatgaaagcagcattttgcaacattatgtggcaattacaactgattctgggtggtattatgcagaaggagaaattgggtgctatgttggacgaagacccggcccttatggaaaggagaaatcaaatagctaaaggcttgaattatacaa

SEQ ID NO: 101534 - DNA, 259 bp, Glycine max
gagaactgataatgttataaagaaacaataattatgtatcaacaagaattacccattaaaacaaagaaaagaaaatttacttggttgagttggtctcaatgattatattagcattgaaatttcgcagcgaccaaatctgttatgaaccaattatatctctaaaagatttgattttttttggagaatcgattgtcttgggtgttatatatactccaacggtagcattaagaaacaaccaccttctttcctcgatcacttt

SEQ ID NO: 101535 - DNA, 237 bp, Glycine max
ggacatttgttttggcctatactcaaaagctgaggtcggagttctctgtttcttttccatctcacaagaaatgggaaggtgaaaaaaaaggttcctatcattaacttgacacataaagatatcacatttcgggtttgccaaactatagatagaaacgccaaaggagggcgttttagctcaatagcttattacactaatagtatttgattcattgtgaagcaaaaaaagcaacagaga

SEQ ID NO: 101536 - DNA, 261 bp, Glycine max
acatctcataattgttgtgggccaataaaacccagcagtatatcctcaagtactaagagatagagcttcggccatagcttgtaagaaacgggctacttttactgaattatgtttttttttctttttctaaccaccgaattatgttatgtagccaatggaaataaagcagcagaacccttttaattactgcgtcactgaattagcttattattattattattgttattattattattaagctatgagttaacttttaaaaag

SEQ ID NO: 101537 - DNA, 259 bp, Glycine max
gtatgacaaaaatacatgggatttgatgaaaaaaaaaggcccactagttcaagggtggtagttgtaaatggattttcaaaaagaaagaaggtataaaaggtgtgaacatgacagatttaaagcgagaattgtttcccgaggctttactcaaaaggagggaattgacttcaatgaggtattctcacttattgtcaaactaaatttgatgttcaacttgaagaaatggatgtaaatacaaatcttgtatggagagttagat

SEQ ID NO: 101538 - DNA, 248 bp, Glycine max
gtgttaagattcatgcatgcttcagacctaaaagagaggataggattgggagataaaatagaactgaaaataggatatgtatccatagtgagaaaaggtgtgtgcaaagtgattgtttcaatcttctatataggctaacaaactagcttagcttctacccatcttttaacaaatttctaatcaattagatctctaataggtcccccaaacgggaaggggaacaatacatgtataggaaatcaaggtga

SEQ ID NO: 101539 - DNA, 245 bp, Glycine max
ttctgctggaaggaagacaaaattgaagactcctgaggaagcaatggaactgattgagaacatggcagtcattgaccatgctatcttgcatgatagaacacacattcccacaaagagaagtttattggagctcacatcataggatgctttgctggtgtagaataagctattagctaaacaacttgaatcattcacagagattttaagcaaattgccaacacagttgccatgctcaacctattcat

SEQ ID NO: 101540 - DNA, 251 bp, Glycine max
acccctacagttttcttgtttgttgccggagcagttgcatatggagtgtttaagtatttgcagaatgaaaaaatcacagagcagaaataatgtcacaggtataatataaaaaaacctgatgctctacgtacaagtggcagtgactgcaatcatactctggcttcagtttcattctattcccccttgatatcggaatgaaagatgacaagaaagctatgtgaactctggaaaccctttaagaaccatttcta

SEQ ID NO: 101541 - DNA, 247 bp, Glycine max
atcgatgggttgtgttgtgctgcagctgcagcgatgacgacggggtcttgacatttccgaaacaaaacacataagaaaagctttaaaataaaattgtagtatactctactaataaagcccgaaaagtgagtacaactgtaataataacatcacacgcacatgctaatgctatatgcctggactcaaggcatgaggagattatgtgtctttgtctatatgtgaacacggctcttctagaaactgtaaa

SEQ ID NO: 101542 - DNA, 226 bp, Glycine max
ggggcttatccaagtaacctagcccttaccttaccctaattttctttcttcaaatctcgcgcgctcctcacttcgagtgttcgactttcctcctccgaccacctcgccgggaattcccgcggcggcgctccttgtctccgcagcttccctctctactgcagccctagagcgagaaaatcataaaccctaattcccctgtcaagctcgtagcatcgtcacagccatg

SEQ ID NO: 101543 - DNA, 244 bp, Glycine max
  unsure (1)..(244): unsure at all n locations
ttaccattgtaagcatgtaattattctggcaaattatgtcttcctttgggccgaacacaatttgcatgaataattccatgcaacatccatataaatacaatcaaatcaacttacacaacagaggttattttggcaacatgttgtttcaatcaatttaaccaaaaagtacaagacaatttaatataataaatgagatcttanaattacacttttttncactttgaatttagttataaaaatatat

SEQ ID NO: 101544 - DNA, 272 bp, Glycine max
tcggctcgagcggctcgagctgctcgagaattcgagcggccactttctttctctattttaggtcttcatgttcttcagacttatctcctattatccctcaaaaaaccaaaaaaaaaatctcacaaatgaacttaatttagcaaaaagaaaaagaaactaatatcatgcaaataaaagtgaaggatctaaatctaacatcatatgataaggtggttcttttgatcaaagatacaataaaaaaaatgatcaaagaaaaaaaaaggggggcgggg

SEQ ID NO: 101545 - DNA, 245 bp, Glycine max
ggtacacataatcgtttttctttgaacaaatagtcattatgtcgaaagaacccattttgagtagtgtcagaccctaatttcatccggggactattattcattgatgttttgattctcactggctgaattgcattgttcgacaccagttaccacacaaaacgaagacttgttcaatgttttgatcaagaatacgaaagataccaaaaaggaggggcaaaagggttttttcattatttcctggaccc

SEQ ID NO: 101546 - DNA, 240 bp, Glycine max
ggatgaccaatagatatagactgtgtcgttgtgtgcacccttccctctcacaagatttttctctttctctctcacttttttttttctctttctctttctttccctctcacaacaccacttcacttaacaccaaactcaacttcaagcttcgggtttatgtccgtcctcaaacgtatctttccattttttgacatgttcctactttccctggtcctccaccaccctctttagcgttcaaaa

SEQ ID NO: 101547 - DNA, 239 bp, Glycine max
gggattcgaatttgttcgaaagcccattggtcggacatcgtcttcactctctcaatcactattccatcgaggcatctacccatcgttctttgctttctcaatccctcccaatcaattgctgaaagtttgaattgctcaaatcatagttgcaaatctctaaggaatcgtactttctcaattgctctcatctcaatcggtagcgttgaggttggtgaaagacaagcgtctttgttggttgc

SEQ ID NO: 101548 - DNA, 261 bp, Glycine max
tgccacaacagagaaacagtcaaacaatgtcattttacaagggtacagtgcgaaatagatatgtgcaattatatgataaattagttagttttgtatataaaatattaaccaacatatttttcacatatccaatatatactcgacatgattaaaagtgtctttaaaatgttcaaaaaggtcaaggtggctggtttcagtaatgtacatacaacagttgcatttaaaagtggtgttcttagtgtttatgtcatacatttagaa

SEQ ID NO: 101549 - DNA, 259 bp, Glycine max
acgacattttggggagaatatgaactattgtgttggtttcacaagtgatgtaatcccattaactaagccatgaattgtgagccccttttacacggttaaaattatttagcaaggaaaattaaaagaagaatactataaaatatataaatgaaacaaaaaaaaagtaatatatatatatatatattaaaagtttcacaagtcattggtatttaagccaataattgtgacctgattttagacacttaaattattccaaagg

SEQ ID NO: 101550 - DNA, 216 bp, Glycine max
tggaaccttaatgcaactctgtcagggtaacacagtcgctacatcctcagtttgattatttgcttgctaaaaacatcatcataattgatttcaggaaaatgtttctacaacgtaaagtcttcaacatacacaggcgttcatggtatagattgaagacaataagcagctaaacataacacaaaatcaaagaatgccgatacgaaaaaaatggcgccg

SEQ ID NO: 101551 - DNA, 268 bp, Glycine max
atgacagaaggggaggtatatcaaagcatatatttatggacaaagggaaaagagactattgaatttccagttgatcaatgagtgctaaagaagaaaacaaacctctgctgcctttccttgaaaaatattgctaggaagaacaccggtgcggttgtacaaattaatatattgatttatctgaaacccaaaaaacacgtgtagacatgtcatccccagttaggcattccatataattttagatgttcagaaatgaatgaagcccatattg

SEQ ID NO: 101552 - DNA, 207 bp, Glycine max
  unsure (1)..(207): unsure at all n locations
ttattcttcttacaggcctcacgttcattgcacatgactacattagtatgcatgcgcgctgacgcatatgcatgcttagggggactcaggcacggctatcgattactctgaatgaatggacgctaaacaccacttaggttggatattgggtccagtgaaatgggttagttcntaagcacgtgatacattattacttacatcggttga

SEQ ID NO: 101553 - DNA, 260 bp, Glycine max
aagctgacgacagatggggtaccccacatgcatttgtcaacgttttgactaaaataatactgaattgaaattgggcatttatacttcacgaccttaccaagaacaatatttttttgatagtgctttccgccgtaaatattttaatcatgcgtataaaagtttattatgatcaggcaagagaaaaatatttttaaccataaatatattttagaacattaatttgtagatgaatagagataatgtattttcactttgcaagt

SEQ ID NO: 101554 - DNA, 269 bp, Glycine max
ccggctgtacttgaaggatacaacgatgcagattggaacactctttcagatgattccagagcaaccaacggctatatatttagcatagctggtggggctgtttcttggaagtcacaagaacagactatcttagctcagtccactatgggatcttaatgatagcactaagcactgtagtgaagaagcatgttggctgagaagctacttgcagagattcctttatgggaaagaccgatactagttgtgttgatccatgtgatagcacgcgg

SEQ ID NO: 101555 - DNA, 304 bp, Glycine max
ttcgaccgaatcggtcgacggctcgagacggctgctagaacacgacataagtggagatcatctagctcaaatagcatggcttccaatctgattagagtgagcacaagcttggttctagtagttttagtagctctcacagttcgaattttctacatgttacccatagatccagttttgccaacataaaacctgctccttcaccaaagacaatcaattacaggatatcattaagcttggagaaggacttttgaaggaaccagaagatgttgttgtagataaagaagggactctctatacagctact

SEQ ID NO: 101556 - DNA, 133 bp, Glycine max
taggcctcgatcagtcatcattcctgaccgacgtcgactgtcatttttttcgatcaatatcggtcaataatatctttttgccgaggtgggctaatgtttccaggacaaataaacatgccagtttcgggcgaac

SEQ ID NO: 101557 - DNA, 171 bp, Glycine max
cttcgacgacgcggcggccagcacctggtggcgccacagcgtcttgccgccgaagccgccgcacacgtagggcgaggtgacgtgcacctgcttctcgtcgaggccgaatatttccgccatcgaccacgacatgtgcgccacgccctgcgatgcgtcgtggatggtcagctc

SEQ ID NO: 101558 - DNA, 161 bp, Glycine max
  unsure (1)..(161): unsure at all n locations
ggcacctttccattttaatactataaatatattctctggccatcttcctctccaaccaacaaccattcatttccttgacactctcagctttatatatcctntacattgtcataagcattatactgatcaaagaaactcaaaatggtgtggctgaaattggg

SEQ ID NO: 101559 - DNA, 255 bp, Glycine max
gacagcatatatatcaataatctattttatactatacctacattttgataattttctttgtagttgatagccatggctacccgtggaaagcttgaggttgacattgatctcaagtccaacgcagacaagtactggcaaaccttaggaattctctgaaatatccctaaagcatccacatgatacaaagcatgaggttctgaggtgatgcaatctctggtcgatgcgcaatagtatgggaagtcacactgtgaatca

SEQ ID NO: 101560 - DNA, 143 bp, Glycine max
gatacgaacaaactagaacttagggtacgatatctcatttctctgatttcatctcagattcgccttcgtcggatcaagaagagaagatggggaacagatgtgccggtgaatcaatgatctgcgtctccctttccaccgagata

SEQ ID NO: 101561 - DNA, 207 bp, Glycine max
gtaccaaagttccctggcccgcaaatgtgattgaattgaaggttttgaaaaacaaggacattgggaaatgggtggattcaactaccccaactgcagcaatagattaattttaagttgttggaataacgctagtagtatagacacattgacctaaatgataataatacttatgattgaccaacagagtagtctccttaatccccgctc

SEQ ID NO: 101562 - DNA, 115 bp, Glycine max
  unsure (1)..(115): unsure at all n locations
cgagaacagagatctcgtgtggaacaaanatgagtcgcattagctctatgagtaatcctcggccttattgtcgcctcgtgtcccggggttttcagcccggtccgctattcggggg

SEQ ID NO: 101563 - DNA, 128 bp, Glycine max
ggtctcgtggaagtgtaagcaagcaaaaccctagcggcgcctgctttctttgttcgtgatttgcatcaggatggagtactcaggtgagcacgcactttgttgtacaaggtaatggggtcgtactggga

SEQ ID NO: 101564 - DNA, 119 bp, Glycine max
cacgggtacctcaacaacacgtatactcatcatgagatacacatgatgctctctaggggtgcggttcagctaagatgaccttcttctcctggagctagtgaagcgagctgatgtattgt

SEQ ID NO: 101565 - DNA, 235 bp, Glycine max
gacactaacacatacacactcggatgatgtttgtgttgggtgtttcttcctccgccgcagccgctcctgctgctgccacctcctccactcaccaccttctcagtggaacccttcactctccttctaccctcttaacttcccatctatttccacaacttcggtgctcccatctcactggacttcaggtgcgttccaatcaaagccatggctgaagttgatactatagcagtgtcaa

SEQ ID NO: 101566 - DNA, 282 bp, Glycine max
  unsure (1)..(282): unsure at all n locations
gaagaacaaaacctgcaagaaaggctagtggcctgcagggatctagtttctccattgagaagctcattaaaaaagaagaggaattactggaagatcaccaagataattcatgctcgcctgacacttcaaacaagtctgctaagaatggtggaggnagttgtcaccttgtaaaatagccaatccatatgcaatagagcaccacagaatggtgctgagccacacgaagcaaaatgggatctttgganaactttgaattatttagcagaggctgcaagtaggagt

SEQ ID NO: 101567 - DNA, 219 bp, Glycine max
ggcatccttacttcagtgcatagtccttcaggtactgaggcttgttcatttccctttttgacctctgcatgctctatttttgctgcctcttctacatctttcgattttgtattttgttttgttgctgcataatgttcctggttctactccccttccataacaattgcaaacgtgattttcacataagaaccaaagttactggttgtagtgtgtgtttag

SEQ ID NO: 101568 - DNA, 257 bp, Glycine max
  unsure (1)..(257): unsure at all n locations
tgactagaaaaaaaatccatgtgacacatgctcaaaatcagttgttgtttgcgtgtgtgcttttcatgtgtcttgaaaataagatagcatgccatctaacagtacctagtctttggcattcattgctttgttcccaagtttgcatatttaaaacctttagaaataagtggttacnnntatcattttacctgttttcttttccttagaacttcatttctatcctttattcgttgagccttccttagagaaataaaaag

SEQ ID NO: 101569 - DNA, 256 bp, Glycine max
cacgcgtgctcggaatccggatcgagtaagacgacagaaggggcttcacctaataggataacgctcagttgctattgttgttgtaagattaatagtcccatcttgagaccagaacaacagtaatatggaatcaacaccaataactataaataaaatcattacaactaacgtacttccgggtcttcttctgccactgataagcgcatcgacagcattgctgcggttaccagaatgaagagaactctcagggaaagga

SEQ ID NO: 101570 - DNA, 212 bp, Glycine max
ttccccccatgtactcaactgtgtttcacacgagtatagtcatggcatttgcactcatgctaaagggaaatttcagcatccttgttatactttcaatttctttgttttgcttttactcaggttatgattatatctatctatggcttcaactaagttttctttttaaccatttattctatgcactacggatcctaatttatacaattttgtgg

SEQ ID NO: 101571 - DNA, 216 bp, Glycine max
ctttgccatcgtgtattactacatgctcgctgttattggacaatggaagcattcaactgcttcccggcaagaagggatgaaaggggaaatgtcaacaatataattgtgattggtgaagctgccaacgttcggcctttgttcagcaccaacagaaagtgtgtttcaaaccaatagttttttttattttaattaatctacttagagtctcatgatatg

SEQ ID NO: 101572 - DNA, 164 bp, Glycine max
cccattgtgtgtaacatttgcctaaaagaataattatttagtctcatgagaagcaaccaatttccaatttagtaccatttatcatatatcaagattggaaaatgcataataaaaaatttgttgaatatgcaggagtatcttaaaatgaaaaaacaccagtaggg

SEQ ID NO: 101573 - DNA, 215 bp, Glycine max
ggagggtttcccagttggaagccatagctaagatgttagaagaaaaaaaaaaaaaaaaaaaaaaaaaaaaaagcggcccccaatagggggccccgcccccccgggatttatttcgggtcgggaacctttgggggcaaggtttcccctagagggggccgtttaaaccctgggcgaaataagggaaaaactttttccctgtgaaaaattgtaacccc

SEQ ID NO: 101574 - DNA, 200 bp, Glycine max
ggttcttaccagatggctggctcagttagactcttatgtttgtcctttctctcgttgttcatctctttctccatagctcaaacctatataagaccaaaggcacttgttcttcctgtaaccaaagatgtttcgcatcagttcctcagtatgtcacacaaatcaaacaaagaaccccacttgtggcagtgaaactaactgtt

SEQ ID NO: 101575 - DNA, 225 bp, Glycine max
actcgagccgctccagacggatgcgagaacacgcagaagggggagattttactttttatcattaatcctgagcctccctctgccgctgcagcctgcaaattcaatggcttcagagtcggaactagtcgtcccaatgacggtgataaaggtgcaggtactcgtactcagacatcaacgttggcgatagtggaaatcgtcttacatagccgccaaggtgttggtgca

SEQ ID NO: 101576 - DNA, 205 bp, Glycine max
ctataccccatcgagatatgaaggcacggtagaatttgcttaaaattaaacaaactcttatttatatacttttgtaaaaaatgcttgatgttagaccttacaacaatatattatacattaattaattgcacaatagcttgtagttgaagatattcgttcattatttcagtgtaacacgattcttagattaaggatatgagattga

SEQ ID NO: 101577 - DNA, 209 bp, Glycine max
cccctgaatgttcattcaatagctataagttgacatccttcctttcattttcgggcacaaggaagattacccttagcataagtatattgtttttctaagacatggtgttctcgcgaatgatttatttttcttgcaaaaagcatgtttgcctttttaggtggaaaaaacccggtggaccattcggtcctgctacccctttttcggagccc

SEQ ID NO: 101578 - DNA, 222 bp, Glycine max
agtggttccctaatgatccattgcttctgttgaagaatcctttggtttctctctctctctctctctctcccgacattatctctctttatatcagttgtcttaggctgagtttctaaagcaaaagataaagaaagcaaagggttggcattgaccccttgcacaaaggaaaagagggtggtgctgtgttaaaaaaatattgaacttggttggttcagagttgaa

SEQ ID NO: 101579 - DNA, 234 bp, Glycine max
tggctgtgagaggacgacacaggggggctgcagtccaagagtcaggaggaaactgcatcttcctcagagatgctgcaatgttcaggatcttacagaatcttagggtggcacaccaggaatatcccattgctctagagactatcagcgtcggacacctgtgaacgtgatcatccagggggctgccgctgactatggtacttcgcagtgcgcccatgctaatggttaaggcagggg

SEQ ID NO: 101580 - DNA, 193 bp, Glycine max
gaaaattctaatcagaagaagataaactcataaggaagacaaaccggctcccggttaatctcttgctcaacagggcaatcatctcagagacggaacgcacagggtcatcctgttaccaaagatgggtcgtactcagagcctcaggatgtcacggaaatcactcttacaagcccaaatttggaagcggcccaaa

SEQ ID NO: 101581 - DNA, 170 bp, Glycine max
cggcaagacgacacaagggctggactacactcatattcgaaagaagcttcatcctactccctagcatacacactcacaaagtatatcgatctaggcatgtgtcacgtcaacaacaacttctaaacatatcataagtaaggctgataaacccgagtaagtcgcataatgga

SEQ ID NO: 101582 - DNA, 177 bp, Glycine max
gacccaagaacacaacgaagccatgtaaaatttgcaggcaaaagggtaggtcccgccttaaaggtagtctcagacattcaaacaaatccaatcacattcatccttacaaaacttttgtgatggccattatgaacacagaccatgcatgcacccaaacacaccaagagtgttttctcg

SEQ ID NO: 101583 - DNA, 268 bp, Glycine max
atatccattacacggcacagattgaaattattatgagaaaatcgataagcctaataatgttattaataatactccagcaaacctttaaattaagaaaaagctcacctcttgtatccaagtattgaacccctgacgtaaagtctggtaaacaacaaaaacaacgataattaacaaatattcatgaaatgtgcatcacgaatatcatgctaacaacttctaaactttgtgaaagttaaaacgttataatgagccaataaaaccacagatc

SEQ ID NO: 101584 - DNA, 278 bp, Glycine max
gtgttttttaagacttgtgaatttcaatgcaccatgaaaaagaattttggaacatgggtgactatttttgtgatggttgtagggtttcatcaaaggagaaaattattccgttgtgcttttgttggtttttattattgtgaactagttgagtgttgttttgctcagcgagagacaattttacttatgattataagttaaatttcttttcatatcaaggattagttggtgttttggtttgtcaaatttgttgcgagcaagataattatcatcattgaact

SEQ ID NO: 101585 - DNA, 269 bp, Glycine max
caactccttttgttgatgttgcttatattctataaccaacaaatatgaaaagtctataatagagataaacatataatatataatttttatgttagcaaaaggttggtgacattgtcatgtataactgtcctttctcagaacacgaataatgtgctaaatcacgtattgagaaggatcaacccttggatctgggatatgagcaaccatttcctccttagtgttgccctcatcatatccttgtgagttcagttcatagttaaattgcctcc

SEQ ID NO: 101586 - DNA, 264 bp, Glycine max
tccctatgacacagatgttatcaaccaattcttagaagagggacaacgatgcgaatacattgagagaaaaatccaatttgcaggttttgatggagagaccataggtaagctactttgctcccctggacatgattttgtacgaagcgtagcagggaagcgggtgcatcatgcacaatagcatgactactttgactcaaatctggatgactcttctacttagtaacatccttccgaatgaccacaactctgatctcgaactaccaa

SEQ ID NO: 101587 - DNA, 251 bp, Glycine max
tacacccccacatgatttaaaaaatttatttctaacatagcctttcaacgaaaatttgtttctcttatataaaatgagtttaatgtttatgtacttatgctatcattcaatcataaatcaccgtatgaattactttaagataattattaaaagtcaacaaattatcatacataatgagttgtgattggatgattgtgtacaactttgactaaattgcaaatttgatccccctatttattttagaattcaat

SEQ ID NO: 101588 - DNA, 281 bp, Glycine max
gacctcttttattcatcccttcctttcacttctccttcaaaccacaatcccaaaccaatagcaaacaaaccaaacacgacataaacgcaaatgctaactccgaccaccggagtaccgaagcgccggccgcgatctggccggacgccgcttcagctcaagaacactcctgccgacccattcatccttccgcgaagcccaagcccaagcccaagccgtatttcgagatttcattgatcgacaaagagaacaatccggttgccgccgtcgcggttctggtggcg

SEQ ID NO: 101589 - DNA, 270 bp, Glycine max
ctttccttatgcttaaattcaacttgtgttggttgtgtatctatctcttcatttgtgagatgtgaacctcctttacatcctgtctcaagggtgcctagagtttgctttggtacccttggaagtagctttacttctttgatctttgtttgtcaaagtttgaggcaaaaaaaattatcatggtactatatactagcttaaatcaaaacaggtgctctccttcacttcaactattttttcatgtgatcttgcctatcggtagggccggcccta

SEQ ID NO: 101590 - DNA, 249 bp, Glycine max
  unsure (1)..(249): unsure at all n locations
ccataagcanatcattattattagatatctaagtgtcatgtgttactattatgtgtcggccttatctgattttcatgtattcaatttctanaattctattttagtatttatattagtttatgtgtttcataagtttgatgtggccgggatacatttggattgtagatgtccaaaggtgtatgntgatctctttgatttctgaaataatgaatttaaaataataacaactangaccatcattttcgttat

SEQ ID NO: 101591 - DNA, 231 bp, Glycine max
tccctcctgttaaaaatacctctccaagttgacgtgtaaaattcgggatctcactctagcacgtccactttgacatgttacgattccagattttgataagaataatatgtgtgtgcgtgtgtgtgccacgagcgtaaaatttgtataaagtattgtgaacattcgttgttcgataattaaagtttcatgtcgataggaaaaataaaaataagttaaaatgtatacaagcat

SEQ ID NO: 101592 - DNA, 167 bp, Glycine max
ggcgcacccagagaggaagcttagagagagagagagagagagagagatgagagagtattggcgcgtcatcaaaatgggtatttctagggattccatgcacaataggcgtgccactcgtggcaagaaaaaggcgtggagatagaagagatattatgagcctgggcgtc

SEQ ID NO: 101593 - DNA, 280 bp, Glycine max
tcgagccgaatcggctcgatgcagcgagttgcgacagaatggtcctcatcaatctttaagactatgtctcagctcatcgcgcgtaccaaatgtcctattcaaggaaacaatggctagcttactcagcctctgcactacactgccagttgccacacgtcttagccctaacattattttatactcattctcatatccattcaattctatttgttgttacacatttttcctaggatgtcaagtcccggatgatttctcattcggctaagagttagaacataaa

SEQ ID NO: 101594 - DNA, 249 bp, Glycine max
gtggaatcaaaggatgacccagttgtctcttatactgattaggctcaggaagatgttgttcaaactggtgatgacaccgatactgaatctaagacggtcattggataagatacccctgaagagggtgtacatgatgtactctatgaagtttgaaaacggatatatattgagcggaagctatattccggaaagtgatatctctatcagatgtagtgtgtacatgtgtggattattccctagatcagcgga

SEQ ID NO: 101595 - DNA, 253 bp, Glycine max
aagatgttcaagtggaaagatggcaacacttctgggaagaaacttcatgggaagaagtccccaagtttgtggaaaaagctgaagatcatggatttggtgttgtatggatctaatccaacatgtgcttgatgatgatagatgactggtagtttttgagtccacaaaaagttttatttaaagtgaaatatgtatactttttggcactttataaggtagcagcagtaggttactaggttatttacttactcataag

SEQ ID NO: 101596 - DNA, 266 bp, Glycine max
tcccatgatcacttttctgggcgaccacatgactagggctcggggaccctcagatacttctggtccaactccaccagctcccgcaccagcaccttccagcccctctgctcagagcacagagattttagtgctgatgctgcagagccttcaccatggcttatcctggtgatgcagagcatccatgacctggatcagcatcaagccattatgagcatggagggtttcatgggtcaggtggcctagccaagagtccagcgttctccttt

SEQ ID NO: 101597 - DNA, 245 bp, Glycine max
gcctctatcatttactgtcttggccaaactgtgctgtctttttgtactgggaatggattttgacttgtcctcaattttcttaacagaattagtttcttgatcaaactccaatgttgtatctgggggaaaacttttgataaatgtggaactgttccgttgacaaaactccaggggcttgtagatttcacgctacttttaacccggtcaattcatcatggtaaataggcaacttgtccaagtcatct

SEQ ID NO: 101598 - DNA, 255 bp, Glycine max
atcgaataagataaacaattacaaaaatacttggtgttgaatatatggggtgtgataatggaaaaatagaagttgggggtggtctccatgtatagcattttctggccaaagcccatgtccatttggtcacatttctttacggtgtatttttaggtccacttaagatgaagctggtaaatttggtctccattaaagatattgtgccatgggataagaattttttcctaactatgagtagctttgtgacacacggtg

SEQ ID NO: 101599 - DNA, 266 bp, Glycine max
tatgctttcttataatctccatcataagtatcttttttctcttagttttttaactaatgttttaaggatatcagttagcaaaatcctataaaaattagtgcgggccatagaatttaaaatcaccttataatttttttcgtatcagttagctttgataacatgatagtgtgtgtttagattgatgatgattttacataactgattttgcaagcaattgaaattactcctatttgtttcaattccaccatgatttttttttccatcat

SEQ ID NO: 101600 - DNA, 260 bp, Glycine max
gcctctctaagttgcacctaacttcgaaaccctcctgcaacaattgcaaagactgttgtatggtctgatgatgacttgtttcctctaacatatcttcgaggcccaataagctctgcatggtgcttgacaccatccaaaactgatcttgcaaaacatgtcaattactaactatttttaaagtgacaatttaggggggaaaattaacaaaatccattttgatttacctagcaagagtagtctccacctggtacatactctgc

SEQ ID NO: 101601 - DNA, 139 bp, Glycine max
ggcacaatagagactagagaagagagaggtgttggtgccctaatcgtgagaagaaaggaaagggaaaagaggaaaatggtgtgcataaggaaggcgacggtgaaggaccttctggcgatgcaggcgtgcaacctgttct

SEQ ID NO: 101602 - DNA, 221 bp, Glycine max
gaagacgacagaagggggtgccacgacagacctaagatgtatatcaatcatatggaggattttctccgacaatggtttcttcattttggcaatgtgtttggtgagttgggaagcatggaagacatgatcgcaaaggatcctctctctaacaatgaacgtcttggtggagatcttaatcgtctctaacgaactcttgattttcagttcgagaacttccattg

SEQ ID NO: 101603 - DNA, 218 bp, Glycine max
ggaacaagtggctatataagagatgaagtttcactctctttatagcatttttgtgggatgcgtcagtgagaatggctagcaagcaagtctattagtcacctttgttttagggtccatttctcgtaccccattttgttacacacttgatatatgatttatcttgctcaaaagaagtctcactttaataggattttattcatatatgcactatgcagtgt

SEQ ID NO: 101604 - DNA, 244 bp, Glycine max
ttcgaccgaatcggctcgagtacggcgacagaagggaccggactgaatcaagaataaatttgtatgctataaatgtggtatcttattgaagtcccccgaagagggcatcgtattgttttcgacgagaccttaattatacactaacaacaaatataattagacattattgtgtcatatgaaaagtattcactttgattaaacgccttatgaagagaaccgagttgatgtgtggacaaaaagtatg

SEQ ID NO: 101605 - DNA, 144 bp, Glycine max
ggtgatagtattacttttaaacatatattgcatgctcaatcacaaaacaatcttaatatagtcatgaatttatgtatattgtgaacttttgtagggaaatggaaatggggtatttggaaagaagacctatttggagggtattat

SEQ ID NO: 101606 - DNA, 245 bp, Glycine max
gcaaagtgttcaaagtaatataatgtgatcaagtcttggatcaatgattagtcctgcagtcagtcctttggactgaagctcatgtagataccttgggttccaccagaagtcaaagactctaattaggatgattaaaaaattggactgcacaaactatttattgttaacaatactaacaactagttataaaagtggtagcttcactgaagctcgtgaaaatatcatgggtttcacgggaaaacaaa

SEQ ID NO: 101607 - DNA, 241 bp, Glycine max
ccccacacctgtttgcttaagtatgtaaaatcttgacttctcccactcattgttcaacagctccctgattctgcgaaccaaaccttgagagttgagaataatccataatttggaacttgggacaaaacagaaatgaggtatttatgtattttgtcactcatgtgtcgttgcatgatttactatagtttgtgcacttgtctcaatttgaaactgggctttgctattgtcatttaatttattc

SEQ ID NO: 101608 - DNA, 230 bp, Glycine max
ggagcatcctttaattataaggaaccaatctggtagtttgcatcttgctaattcaatggagcaagctaatagtctcagtgaggctgggcaagatccaatgcttgtttcagttgcaagtgagcatctgccttccaagttattgcttcctcctgcagttgaacctgatctgtctagtatgcgaccaaagaagcgtaaaacttccacatctaaactcataccatggcataaag

SEQ ID NO: 101609 - DNA, 216 bp, Glycine max
atttatctactttcttatgcttcccaagcctaccttgagtaaaatttaaacttggaagtttagtatatgtgctccaaaaacatatcaatagttataattcatatattatttcagttagggatgtcaatggccaggatgagggtggggagtactccctccatcccgtaaccccatctccatcctccattcccattgtgggggatttattttctctat

SEQ ID NO: 101610 - DNA, 208 bp, Glycine max
agacgacagaaggggatggtaagaacataccaccaaatgcccacttatgcgaagttgcatttgagtgaaggaacatggggtgcacatgtagataatttttggcatctgcagcccaaaaagtataccaaagagataagaagtccagaatggaaaaaagtctttgtacctactacaggcttagcatctagcatgtgagatctgaaactat

SEQ ID NO: 101611 - DNA, 224 bp, Glycine max
ttcggctgcgagattcgacagaaggggacacaagcaagaactagcacttgttcaccaattaagatttcaagagaaactgtttggaaaatgggttccaagagtttttcccttatcctctcccttaacctccttttcttttccatggttagctccagcagtagctatgaaccaccatcaccatccccctctatctcagcaacgctttcaccctttaactcactatt

SEQ ID NO: 101612 - DNA, 190 bp, Glycine max
atggttacgatacaagttatgtccaaccgagagttctactattttgcctctcaatattgcgcagaaaatcactagaaagcaagcgtttggatgcttctccgttgtaactgacagcaatatgattgaagggctgctaaagaggaagtacttccccaaactgaaactggtataggcatgacaggatcaatga

SEQ ID NO: 101613 - DNA, 216 bp, Glycine max
gctcagaactcagaaggaattaggaaaaatgagttggatgtcggtggatgagttcctggtgcagtgcaagaagtcaggagacgctgcctacgcctccttgcggtcgctgctggagcgcctagacaatcccgagacccgttctcaggctcggatctttctttcccaccttcagaagcgtttccccaccaaggactcctgcgagcgtattgcctttac

SEQ ID NO: 101614 - DNA, 140 bp, Glycine max
tgccgagatagagtatataagtggtggacaaccctcacccatgaactaacttttgggattgagttaggcccaaacctacattttaagatggtatcacagtctatcctaaatccatcaaaagggtcacccactatattatt

SEQ ID NO: 101615 - DNA, 190 bp, Glycine max
ggaaggtcaaggagcaacatggatctgattggaaatcagtagctgaagcattgggcaaacatcgatttcatgtaaaggatgcatggcgtagaataaaattaaccaacacaaaccaaggacgatggacccaagaggagtatcaaaatttatttgatttagtaaacctggatctacgtgtgagagcttcaca

SEQ ID NO: 101616 - DNA, 231 bp, Glycine max
gaatcgtgaagagtttgttcatcgaagctgccatctccatgaatctttcaccaatcttggaactgagacgattctccacgcaatcttcaatttcatgctcaagagcacgatttcgtgtagcatctgccatgtctggtcacacttggaaggttataggctgataccacttgttaaggtaattctagaaggagactcgaagaattacagagaagagtagggacgccatgaaag

SEQ ID NO: 101617 - DNA, 259 bp, Glycine max
ttatagattattaatatcattgatgttttaaatatataattatgaatgtgttaaaatttgagtttaatttataggcattttaagtataaaaacattttacattattgatcaattgaaaataatagttgacattctttttaacatgactattataaatgttcacaaacttattatattatgctgaaatgataattaaatttttttttacacaatcaacatatacattgttttctcaaaattaaatgtgtacatatttgtt

SEQ ID NO: 101618 - DNA, 295 bp, Glycine max
ttagtaaaagatactaaattacacgtaaatgtatagaagttaattaataatcttgtctctctctgtgtaacagcaagatgggaccaccaattaattcttttattccaagatacaagtggatcatgcctatgcttttacgttcaaacaatcgatgtgatgccaataaaagagctttgcattgatttgacacctctatatatattatgtaaataaatatatgtcttaatttgtttgacgtacatgatagacgtaacaacgaacaacagtaaagttcttatgcctgaaaccgaaagtg

SEQ ID NO: 101619 - DNA, 258 bp, Glycine max
tgttcttaattggtgaaagaaacacaaccccacatgtttgaagacttctgcttgaaggaaatgacaccaatcaaagtacatcatattccttggacagttagattcatgttaccaaagctactctttgtttcttcaactgaaatgttttcttttctctctttttgcaacaagtgttttggagtctcaattttaaaattgtaactaaagaagaatgataagccacccaaggaaaatgttcagaataattaagcctactaa

SEQ ID NO: 101620 - DNA, 259 bp, Glycine max
taccctcatcggtgccaccattgggcttttcatcccaatagcctacattttcgagggtgtttttgagggtgacaaggaagggatcaaggcagcagcaccgcatgtttttctcttggccagccaagttttcatggaaggagtggcatcatcatcatcacaaaggttctcggctccggttcgagcttttgttccagcattctacaatgcaagaaggattttcaccattgtggattgttaggagtgaggtctataagataga

SEQ ID NO: 101621 - DNA, 256 bp, Glycine max
gttacattggtcttactatgattttttcccttgaactttgatcactttttttctgctccccatttattatataacgctgactgcaatgcacgatctccaggtgggttccatttgacattgcaaggcctctgcttgacaggaaaccttatgttgtcttatcagattcttccattttacaaaatggagagtcatccctacctcaaattactgacgatgtaatgggaagggattgatgatgttggccaagaagatgcaa

SEQ ID NO: 101622 - DNA, 238 bp, Glycine max
gataataaaagaatgtgaatttttttatttaaattgaaaacgagcagcagcgccatccattgcaacgccaccaccactaacacgtgctgtggatttgggccttgagatggatcgggtagttgcaacaacacaaattccttagtctcgattccacgcttctctccatagaacaacgtcgctttcgattgtggccaccggttcatcatactctgtgattctatgaaaatgtggtaccaag

SEQ ID NO: 101623 - DNA, 178 bp, Glycine max
cctcccagcttgtactacaacaatcgtgcaaccctatgcaagagttttaggtatgcatgacaaccacaaacaggaaacagaagctggtgtctcgtgtgtgtatgtataactgtaattcactggagtggcgggacaatagggacggatagaatatggtggtgagccatggctaagttaa

SEQ ID NO: 101624 - DNA, 262 bp, Glycine max
tggtgttgtgtattgaagagtttttcggaaagcagaaaggaatgttcaaaaggaaaaacaaaggcatagggaaaatatgccagggtggttaacaactttttaaagctaaaggcctcaccttaccacctttttcttccctctcatagtcccatgtactatttatttttttagctccttccacgacagatgctgacttggcaccaacagaagacccagaaaaaatgtgtgaggaaaatatattattgttacaaaagattattca

SEQ ID NO: 101625 - DNA, 257 bp, Glycine max
accaaccaaccttgtgatggcaaaataatgactttacttgggactttaaggtcacctgacaagctcatataatcaacttagcttgcactgatattggcctttttaagtccactttcatacgttgagtgccccttatacgtgtcacttactacgcatgattctaacgatttgtcgcataagacatgttcatcgtaatcacctaacaacttttcctaacaaaactacattaagggtcttgccccttaggtatgaatact

SEQ ID NO: 101626 - DNA, 184 bp, Glycine max
tctcgagcgaatcggctcgaggcgagaagacgacagacgaggatagcatagctgcttaaaaaaggaaacactgctttttaacttttttttgcttccgtcttataggccacacagttgctttgcttctgctctctgatcatatattaatgccattgttactatgactttgagcttcgagaactgt

SEQ ID NO: 101627 - DNA, 214 bp, Glycine max
caggttcgttcttcctgttccagttttccctctcactttctccactgccgatattaaaatttagaatactgatgcaacgacgtcgtattactttcttgttcatatctattttttgttctttttctttttctattaatccctattcatatctctacttctccattttctgtataagaaatattgctgacatttttttcgcacgtttattgtatgt

SEQ ID NO: 101628 - DNA, 263 bp, Glycine max
ggtaaatttggctcacatcaaacatgtcaagtttagcatgctttcaacaaattccttcacaaataactaccataaggcattaacctagtaaaactacccatcatatctcccaaaaacccaatacccacgaaattcatgtgagaagaagtctacccaaacctgaaattcgaagtcccacaacgtagaggtgcgcttcacgactccaaaaatggcttccttttgcaatttggagtagaaatggtgagcaaagtttggagctttat

SEQ ID NO: 101629 - DNA, 251 bp, Glycine max
gttgaggggaaggggaacaatagtgttgatgattggattggggtgtgtaggaagataaggttgttttatgatttgaatggtgggaggagcttagtggaactcgttggagggaacaatggtgttggtgtaggtgtcattttggagcatggggaagaggagttggttcaagcaactgagtatttttgtagttttggtgcgaagaaggaggatgtggcgcggttgattgagaggacgggagttgttggagcttg

SEQ ID NO: 101630 - DNA, 252 bp, Glycine max
tactttaataaataatataaccaaacacttattattccatataatagtttttttaacttttagctaccatctctttttcagctttcaattaattgttccagttaattttattaagtattataaaaagtagaaacactcatcgttacttaatgttattttggggaatatgttcattatgatacgtttttgtcaggtcttgttttttttatataggcaaaagaaaatattatgaaatcaaaaggcacaacaagc

SEQ ID NO: 101631 - DNA, 227 bp, Glycine max
acgacagaagggtgttcaattcatatcagttttatagaagggtaaaatggaaaaatcacacaattgcttggtgtaccagcaattttgtagggtagacatagcaacgcccatgcaaaagtcatcattagaggtataaacccaacaagtgtttatattagcccaattattctcgtaaaaacataaaagcccagttgaaaggttaccgcacaaataggaaaattatatag

SEQ ID NO: 101632 - DNA, 236 bp, Glycine max
gtacaagtgaatccaaacttaattagtgcgcatcaaatattgaatactataagagttaacaatcttattcatcttactttaatcatatcttggccaccaaacaagctttcatttaggcatgactattaattcgaacttgtggttttatgaccttgtataaacttgtttcaattgagattgggtttggatttatcttaccttgtagatgttgagaatggatagaggatgtgaaacgc

SEQ ID NO: 101633 - DNA, 252 bp, Glycine max
gaagaaataaatcagaatttgcttacagcattgcaaattacaccatctcttctcttctcttcgatgagttgtcttcattgccgagacggagaaagaagagacagagtttctagcatatgttcttcatcaaaattctcacctaacaataattctctcaacgttacctttattcctcaattcgatatcttgtttggttttgtcttcgttgttcctgttgaattattcgttttcagctaacttagtttatttcat

SEQ ID NO: 101634 - DNA, 246 bp, Glycine max
ggaactgcttttgtctcaaggtctttctgcccttgcaatttgcaaaagtattaactacagtgagagttaaaattcaaggtttcaagaaagcttataaaaggagagaacatctgtttttatcaagctcgatggcagggttaaattttgaagccacatatactggacaccatgatattctgaagatatttgcagctgaaggtgttgaattccttgtatcttgtgaaaggaaaggtaccgtatcagaat

SEQ ID NO: 101635 - DNA, 223 bp, Glycine max
gttccttgagatggcgaagaagggaatcaaggctgatgttgtggcatataatgccttgattggtgcattttgtaaagtaaataagtttaaaaatgtgcatagggtcttgaaggagatggagagaatggtgtcgctcctaattcaaggacctgcaatgttattataagcagtatgattggccaaggacagactgatagagctttccgagtcttctgccggatga

SEQ ID NO: 101636 - DNA, 208 bp, Glycine max
ctgctcgagcggctcgagcggctcgagcggctgcgaagacgacagaaggggggagagaaatggagagcagcgccgtctacacgaagcattcgaccaagttacccgatctgcccctctcgacgttcttcctctcttctctctcaccaatctccctcctattcgagccctctctttctctcaagcttcgcaagcagttccctctcatttc

SEQ ID NO: 101637 - DNA, 224 bp, Glycine max
ggctgctagtaatatcagaactgaacttcatcaagaaaccaaaaacgagacaacattttatatagaccaaaataatttcagtttcaggctgttggtaatattcttatggtagttttctgggttcccactcacactcagatgttgggtggtgcacttttaacccaacaactcaaagcctcaagggcacaaggaacattgcaatgctatatccaactcctagatta

SEQ ID NO: 101638 - DNA, 208 bp, Glycine max
ggagtgctcgaggccgagctagctacctagcacccgcgcccaagtcacttcctccaaccctttctttatctcagtatctgtgctccaaccccacttgcttctctgcattttttttgatccttcttgtcctctggattctaatccatgcttcttaatcacttctcaatccattgctcctcgctacctggagtttgggccttgccataga

SEQ ID NO: 101639 - DNA, 105 bp, Glycine max
gaagggggtttgataaaggttgacattgaaatttgaagccatggttcttgactccattctgacatctcctcgtctcaagtctccatctttcaggagacagtttaa

SEQ ID NO: 101640 - DNA, 235 bp, Glycine max
gaactgcaattacgacaaccacattggggttaaggcatagtcatttcaacctgtgtttgacaactccatattttgccgtaattgtcccaaccttgttttgaaatgaaactgcgatttaaatacactcagggtttctaatacgtgcattcacaacacaaaattgaaaatggcttcttcacgttttagttccattttccttctttctatcatcttgaccataagcaaatttgcattg

SEQ ID NO: 101641 - DNA, 193 bp, Glycine max
agctattagagcgctagaataggactggtcaaatcacccaacaagggtgtatggcctatagactatattaggtcaggctaatactttttttttgaaaataaatcagtcattgaccttaagtaaataatgattttaattcacattgcttatacttggttttacataaaatatgtctctattggcctattagttc

SEQ ID NO: 101642 - DNA, 238 bp, Glycine max
atatttcaaattactatatgatacgggaattttctgcaccaatctaacacgtacaaactcacgtgtttacatattatttgattgaaatgttaaattttaaaaaatagaaaagtaaatcttacggaattcaaaagttttgcagtattaatatagcttttgatatacatatatacaaattcttaacaacaagcatttccctttcaaaacatggtgttagcatctctaatctctaatgcat

SEQ ID NO: 101643 - DNA, 134 bp, Glycine max
ggagggaggaagtggaacacaaaactgtaaacctataaccccacaagaaaaagaagaagaaagaaagttgaagtggtttgagttagctgagaagagggtgctccattaaggggcactctcataaacactttgat

SEQ ID NO: 101644 - DNA, 260 bp, Glycine max
tctagagaaatatcaaaggatatcggttcagcaaaaccaaataattcagcatatgggagcatacaaagaaacaggatgggaatgggatttcaagtggaggagaccactatttgacaatgagatagatcaggcggttgcatttattcaagaggtggaggggatcagaattcagaatgacattgatgaccaatgggtgtgggaggctgatcttagtggaaggtactcggttaagagtgcttacagtgtgcttagacaggatg

SEQ ID NO: 101645 - DNA, 223 bp, Glycine max
catatgcatttttttgccttttggtgttctaattaatatatgcattctttataataatatcacattttcgttttttttaggaaatatatatattgatacgataggagcatgtatatctaaatgggttcagctttgctttcttaaaggtatgtgccattaattgtgtgattgaaatttgaatatcattttcttgaccgttcttaagaccctgtcacacttctat

SEQ ID NO: 101646 - DNA, 237 bp, Glycine max
tggttactcatgcaatggatgactataaatatgaattaacacaacatagatggaatacaaagatgtcagttaatttattccactaattgtgcttcaaatgagaattataattttaaatatgtactattaaatttacatttttttcattcattcacctagtttgttttaatatttttttataagatgttaaattaattatcttcataaaaatgactataatagaataatgcatgagtt

SEQ ID NO: 101647 - DNA, 235 bp, Glycine max
atactagtgcgttaactatttattctttgaattaataatgtatactagcagagtgtcatgtaattataagcggtcacatataaggagtttattaacatttataatagtaactattttaacaatgatgattccattgattgagagtaaaaacttctacacaatatttttttggtacagtatgatactatatgtgtattaaactctttgcttttattgttgcatttgtgtttggagt

SEQ ID NO: 101648 - DNA, 174 bp, Glycine max
aaaattgaacttttgataagttgcaatgaacaatcgtataaggaaatttgacaacacactttaacttaaaatctcaaatcttagatttatggatcttctcctcacttatatgatgctcaacttttttcacttttactcgatttgagactttacttcccacttgtactctaaatt

SEQ ID NO: 101649 - DNA, 220 bp, Glycine max
tacggctgcgacgacagaagggcatttataattaaaaaaattgtgccaaattaaatccatgaatgttataactactttacttggagtgacacaattaagaataataggcttgctaacaaaaaaagggaaaataattaaaggcattgtacttattctggctatttaagtaaactagcgcataattgtaatttccactaagaatattgccttatatttgcag

SEQ ID NO: 101650 - DNA, 221 bp, Glycine max
gaggggggggaagaagagataggggtggtggcaatgtgttacgagtgtcgtatcatatgttcgttcgtcttcttgggttagggttctacgcttgcggtctcctttgacacccacgcacgcttcagccgtttcagttcgttgcctcacgcgaccgactatcgttgttggacacggtcctgtttattaagcggtttggatgagagagtagaagcgtaagatgg

SEQ ID NO: 101651 - DNA, 215 bp, Glycine max
ggtgatgcgtatgtgtttttgcctaattcaattcctctttcaatctccctctaaaacttcaccaacccaacaaccacatcattttcttttctccaaacaaattaaaattaaaataatcaaagccttcatctataaatatagccatcaacacttccccattcgttccactcgttctttagacgaatcaattcatgtgtctctcccacacctttctc

SEQ ID NO: 101652 - DNA, 158 bp, Glycine max
cgagaaggagatttcgtgacgagtgaggagtgaggacagagcaagaaggatgagggacgggtaaggtcggaggatgttcgatgaggagagaggagaagggaagaaaaaagagaaaaagaagatcaaggaagtgtcacatgaatggtccttggtgaaca

SEQ ID NO: 101653 - DNA, 221 bp, Glycine max
agatcataacttgtgctaaggtagcctttcaataaattaaatttttgcttataaaaaaaaggttaggaaactttatcatttcgagttgacccaatgaccaaatcaatccaaactaaattaaaagagaaattttaagttggtttcaaaccatcggtttagtttgcagtccatgtgcagcaagtatagtgttgcttatttaataaatatcattttgcctttaa

SEQ ID NO: 101654 - DNA, 223 bp, Glycine max
cacctaagaaattagagattagaatatcacttttaaacaatgctcaaatctttggattgctattccataggtaacaaactactaatctatggcctgtggagcaaccatagctgctggcctgtagtatagtactagttttttttcccccaagtccttatgggaatcttatattgctatccgagagaaggagcatgtaagatatacatgatccttatccaaacaa

SEQ ID NO: 101655 - DNA, 263 bp, Glycine max
ggtcatggtaattatttacttaattcaattattctaacatgtcaaaacattttgtatttttcaacagaatctaatcatcttaggaacaaaacataaacaattcaagcattaatcaattcagacaaaattcaattaatcatacatattcaaaattaaaactaaatatagttatttaaacattgtaaacacaatcaaaaaatttcaacaattattttctattagctacaaaaataaattaactgaaaatattactcataccttaa

SEQ ID NO: 101656 - DNA, 233 bp, Glycine max
ggacgcggagggggagaaggtgttcaaggggagcgaggtgttcggtgacacgtcaccaaattacttgaagaccattttggccctggcgttgtggctcggaaccattcatttcaacgtcgcgttggcttttcggtctgcttttcgtgctcatggtaattcctgttgatgaaaagagcaaattcggtcgaaaattatccaggtacatatgcaagcacgtttgcgcttactttccc

SEQ ID NO: 101657 - DNA, 230 bp, Glycine max
ggagataagtaagaagaaaaagaagaaaaaaaatagagaaagaaagtggtaaatgtgacaagtgatgtaatagaagagagactacgagagaaataagaaaaaaaaatgtcaggtgaaaatgaactagggtgctaaactgccaatttttatttttttttgcttttgaaaatggaaatttgacgatcatagggtaccccatcaactattgtttgatggggtttctgcctctc

SEQ ID NO: 101658 - DNA, 258 bp, Glycine max
gaagacgacagaaggggaatccaaaccaagtatgtggacaagtggcaggaaatatgatgagaacctcaggctttttagtgaaccaaggatggccattgtttattagtgagtttggtggagacttgagaggtaccaacgtgaatgacaaccgctaccttaactgcttcttggcagtggcagctgagcttgacttggattgggccttgtggacacttgttggtagctactactttagacaaggagttataggaatggaag

SEQ ID NO: 101659 - DNA, 262 bp, Glycine max
tcgagacgacagaaggggaattatggatttatacagaccctcatcctccgccttgactcgaccaatttcctaacccttgacctttcccctttcgcttaaccaccatctcatttgcagctgcaatagcgaaataatgaaggaggaggaatcaatagtggttctagttgaggacgaagatgatccttcatcgacgcttctggatctcacgagttactagctccacgaccttgacttggtcaaagtgccatcgcgttcggcgtat

SEQ ID NO: 101660 - DNA, 233 bp, Glycine max
ccgcgccgatggaggagtgaagacgttgtttgtgatgagaactgaaccatattggtggctcggcgagccgcgacagtccacgccgccatgcttcggtgctgaagctgaactaaacggattaatggagattgcagttgccagacgaatagaaaatgcgacaaagttgctatttttatgtaccagaaggatcggttcccttccggcagtaaaaattatttttagtacaatacaac

SEQ ID NO: 101661 - DNA, 230 bp, Glycine max
ggaatccatattgcattgctactgataatggctggaggaactcttagtgctactgggagattcagaggtcacagtcactgtgccccaggggctgaattttgctgtaggtcatgttctggctacttttggcgttcgctcttcgccaaccgatgcatataatacagagattcatgtcaacaaattctccattgatcagtatcagagttgagaggtttcacagttccacaccg

SEQ ID NO: 101662 - DNA, 234 bp, Glycine max
attcatccactctgcgtgtgaaacttagttcttctcgaatcccagtgttttgaacagtttggagcttaatctcgtcataagtatctttaggtatgcaggaacatgctaacccaaattctgcacatctcccgacttcatccaaagcacaatctactgcattctgaaatgcatctgaattgctctgctttacaacattagagaaatgagtcctaaagagctttagctgagatgact

SEQ ID NO: 101663 - DNA, 260 bp, Glycine max
gaagacgacagaaggggggtatgccgtgacaggttaatataacagtctacaaatgaacaaagactcaaacacatgaaaatgtaattttgcagtaattaatccagcaccataattccacatcattcatttattagttacaaccataggctagcacagggtaacagctaatctcacttgaaacttgtgagtcatccacagcaagtagagtaataataggccatagcatacagacaacagacactaaatgaaaaactaacctg

SEQ ID NO: 101664 - DNA, 238 bp, Glycine max
cacactagaaaagataagaatcaaaaccccatgacttaaaaattacgttaatgagtaggttaggataaacttataagattattatatcttgttggcccaataaatttatcttggtgagttattctatactatacttgttggaattttctattccgataattaatgtgggctaatattataagacaattgtattagctatttatcattagtgggttttattttaagttatcaaattaag

SEQ ID NO: 101665 - DNA, 232 bp, Glycine max
ccccatattaccaactatgcagcgtgagtacatggttcatgtaggcatgctgttcatcaatttttacattataatgagaagactttctttaaagagaaaccaatacagtgagagaattctgcaactatggacaatcctataaaactttttatgctatagtaaacaatagtgtatcaaattcactaatggtgtaaaagcttggtcactgaaaccaaattaaatccagataaaa

SEQ ID NO: 101666 - DNA, 232 bp, Glycine max
agggtaatagaatcaaagtatggcgggtggaggaatttgagtgaagcaaggtcagccaataatgaatctacatggtggagggacttgaagattgtagatcagcatcctcaacagggtcaattgctaaataattcgatagcgtggaaggttggacgtggggataaatttaaattttgggaggacacttggataggggaagataacagattactagagaaataccctaggctct

SEQ ID NO: 101667 - DNA, 241 bp, Glycine max
ggaggggatgagattttctcttttaggttgctttcaataggaatgagatttaactttagccagctgttaagagctttgatgtaatgtttctgttgagttacaagcttctcaaaatgtaaatgccattcctggatgactttctcaagttgcacagtgcgatcgtaatgatgcttggttgtttccttaggagcttgagaaatatcaagagatttgaggtctgttactattttcagctggctgt

SEQ ID NO: 101668 - DNA, 239 bp, Glycine max
ggtagcgacgaacctcaagggatgcagtaaagtcggagaagccagtaaggtgagaggatgaactaacatcccacttggcattctccatttatttgaagcagaagcagaagcaggggatgaggaagtgaagtctacgctccttttcaatggcaaactataagctgaatatcattctcattcacattctcttcctctctttctcctccttcgaagcattagattcccagcttaagcaacaa

SEQ ID NO: 101669 - DNA, 268 bp, Glycine max
agatacaacagttacaggaaagaaaactttaaactaaaaattacagtcacaatgatatccaaccttttcaagcttatatgtaattctaacttctggatttggggaaatccatccttttcctgggcttcaaacgatagaacctaaggtccatccagttaagctttcctagacatttaaaccctttggttcagctggctctcctttccataattaatatcatcagacttgtctagagagaaccgacgacataatggtcagtcttcagctc

SEQ ID NO: 101670 - DNA, 297 bp, Glycine max
gttattaatcagaattcttcctcaccacaattttgtggcagagtttgatcttttggttgccagcacaagtttctagaggggagatttctattgtccacatacaaaggggggatgggagagcttcttttgagctaattaatgtttcattatatctttggttgctgtaggggaattcctcatcctcctattctgttcttttctatcatctaatgaactttttttgttggatattgtatctatggccttttgcaatgggcatattttaggatctacataattatggtaattagacaatta

SEQ ID NO: 101671 - DNA, 270 bp, Glycine max
tagggtgtttctctacctgcaaacagcaaacctgctacgaaataggattatggggggtgttcaaataatgactgcttcaagggagacccaattttaattttacaaagcttgggcagcatcattgcatttcagtttccccttactctttaggttgtgatttgctttatctgtatggaggatgccttccttgtagatgttctttccccccttctattctaatgaatttctctttagaaatccatattaataataatgctactatgcctaatc

SEQ ID NO: 101672 - DNA, 144 bp, Glycine max
tatcctaaacgttagctcacaaattctcaaaataaagaatagatagacttgcgtccaaatacatttccctgcttagttaagctagccttaatttccagcagagttgtttagctaattcatctagttttcagaattatcagaccc

SEQ ID NO: 101673 - DNA, 244 bp, Glycine max
tcagctcgagagacgacagaaggggcctagggtgagtgtaagaggactttgtgcatgttctttttacttggtatttgactattagttgacatttttttcatgatattttagctttttcaacaggagaaaagcagttgcaatattccggaaatggtcaagagatgtcctcaattggaaaaataacgtacattcaggggattagtctgtggattgccgggtgtggggaataaaaacataattaggt

SEQ ID NO: 101674 - DNA, 271 bp, Glycine max
tatacacgtataaatcataattttcaaactatacatacagtcaacatcgtttttttctttttttgtcaaaagttgtagtttaacctttgagaagggtattagtgtagtactacgagctgaacattaacgcagggcacagtcaaccatgaacttgttctgattgaagctgaaaatcacggttctggcccaaataaatgcatgagcggattccatagtaattatgatgtttgactactttctaatccaattactggtatgggtgggggatttt

SEQ ID NO: 101675 - DNA, 295 bp, Glycine max
cgagatagtgacagaaggggacgacctgtatactaaggctgttggcttcaatttggcccttaatgatttctcttttaaggtggataagtctggattcgtttagataagttcgaactgaaattctgaatatcaaaactgtaagcccatatatgcagattctagtagtactattgcgattactggactgttacatgaacctggggcatatggacctgcattaatgcatgtaataattaagctctatcgctatgaagtaatttcagctggttcatcaataggttacagcaattgctgg

SEQ ID NO: 101676 - DNA, 131 bp, Glycine max
tacggcatcttgtgtcatttactcacttgacaaactctgcttcatctgacaaaactgcaacaacactgcataaagccactgagaatcagatgggcatggatcataagatcctgtccatcaatgtgcctcat

SEQ ID NO: 101677 - DNA, 197 bp, Glycine max
cgggggtgttgataagataagatacacgaatgtgtgacactgccactatggctcaatgattatatatgaacacaggaagaagcagtgaaaaactttcctttgggtgatgaacacctttaaaggactcttaacattgaaggtttggttttgttgctcattggctgttttagtacaattctttaagagattgaattgaa

SEQ ID NO: 101678 - DNA, 153 bp, Glycine max
gagtgataaacatctttagtgctataccttcccttttgcaccaaaatggacaaaatgacgtcaatgattagcaatgagtaacatattagaattccaacagctaaatcactctccattagatactgatatgataatctggtaacaccatcggct

SEQ ID NO: 101679 - DNA, 267 bp, Glycine max
gtggaattgttataaatgcataacgtagtgcctgttgtgctgttatttctatcaggatcgctatcaatacccaccgctccaaaaacaaccttgttctcaaggttggacaataaaaacaagcaaaaacaaggatgagtttaggaaacaaaaggtacgtaagtcaagtggctttgtttgtgcgctagtatgggtcctaagaatgataagtcactctcagggtacctcagctgcaatgctccatgaacccttggtcctggaacgcgcaat

SEQ ID NO: 101680 - DNA, 130 bp, Glycine max
  unsure (1)..(130): unsure at all n locations
cagagtngggaatgttgtggtatggttgagtgtcaaatggcggcgagtagaagcacttttgctctgatgagatacttgagagtgcgcgtggacgctcttccccacgacagtcccttaagcctcggtccca

SEQ ID NO: 101681 - DNA, 225 bp, Glycine max
ggcgccaaaccatttgatttcaaagcggagagttgagttgattctgttttcttctccacaatcacaacagttttattatcgtataattatttctgataaaaatctgaacatcttttctcccatctaaagatttgagactttccaaaagtttagggatgccaaatctcctgcttctctacacatggagccggtgtcgcgtgctaattccttttcattccaaggatt

SEQ ID NO: 101682 - DNA, 217 bp, Glycine max
cgaggttgggaccttcactggtgggacttcactagtcagccaatcgatgagatttactcatattatggggcaaagattgcaatctattttgcttttcttggaatgttcacacggtggatgctcttccctgtgcattggggcttacttggcatttgttagatttggggtcattgaagttagttgtgcttcctatttccttcatcatgatgatacttgg

SEQ ID NO: 101683 - DNA, 270 bp, Glycine max
cggccttcatataactcaagggctgcatcaactctaaattttaaaagattttgtgtcctttagtcactgttccgtccacatgcaccttcccactaaggattccacttgcaaagccatttaaggccgtttcatgtgggattggctgtatgctgatatggtatgatgatataaaccctttttggaattaatgcacacacataaactatggatttgtgggatgagtgatgacctatgatttcttttggttgactagtgaagaccgggccctaa

SEQ ID NO: 101684 - DNA, 170 bp, Glycine max
gggggggggaaggaggtttcaaaggtagtcatcgttactgacatgctggtaatcgggtaccaaccatgacaagggaggtgataagggttttaggttaattggataacaatcaacccattatacaaaccttgggcctagctgtgaccccaaaagggtaaaaatcgggcacc

SEQ ID NO: 101685 - DNA, 247 bp, Glycine max
aatgttaaattaaaattgtctaatacatgacatcatgtaaattgatattttgttttcttgtattgtgtagattgacttcaagttagtataactggctgtcaagttgtaatggcattggtctctggaagaagttctgcactgaacccaaatggacctctagtcattactgctgctcttcgcaggtgaagattttccactcaatgtgggatcttgtgaaatcttcacatggttcgtgattatggttgag

SEQ ID NO: 101686 - DNA, 163 bp, Glycine max
aggatagatatagagaagaataggatagagaaggatgagagaagaagacagaaaggggaatatacaaaggaacaaaaatattattaagatgatcaaaattattggagaaattgttctactatttgaatttatcttactaagttgagtgtatgaacaagacaca

SEQ ID NO: 101687 - DNA, 294 bp, Glycine max
agataggaattaggatagagagacagaaagggattgaaattgtagtttcaatcaacacattaatttaaattgttaagtggtggaaaaaacaataatataatggaaaaagaaaacatgatcaataagcatccaatagttacaattcaagatagaacaccagaacatgaatgctagacaccaaatacagttcaacaaaaagaacacacaatgatcataactaatcaaatgaattgagcaagaatgttaaaaaagatcgtattagagtcaaaaaggcattcaaatacccagaaagat

SEQ ID NO: 101688 - DNA, 212 bp, Glycine max
aggatagagaggatgagagaagaagacagaagggggagggtgaacagtgaacaaaataaagggaagcatcgacatgggattgagtattatgagaagcacttccatttacactcctatctcttcctccagatccagacccattttatcaactcttgttcgttcatcattcgaatccatttacaccacaaagtgtgttactccaaccactcttt

SEQ ID NO: 101689 - DNA, 171 bp, Glycine max
agacgacagaaggggacatcacgaagtcacagtcataatgaacaaatggaaaaagaaaagtgtgtacaaatccatgttcttccgatactcatgatttatcaagtaattgccatgatgatcaaacaattaattggacgatgaaggtggattatatagttacgtttgtttgtt

SEQ ID NO: 101690 - DNA, 261 bp, Glycine max
gataggaattaggatagagtaaggatgagaagaagaaagaagggggatggaaaataggagtattgtagagagtggagagaaataaattgaaatttaatatatttatgagaacgacacaaaattcgatagtagattgattaaattaaatgggataagtaatgataagtggaaatgaaaagctaaatatcagaacaataaaagggaaaggattaggtttaaatggataggatttgaacggtcagaaattaaaaagagtgagtt

SEQ ID NO: 101691 - DNA, 236 bp, Glycine max
  unsure (1)..(236): unsure at all n locations
acgtcacattcttcatggcgggtagaattcctcactagactattcaacccttacttcatcttcacttccactagaggaagggcaagnagtagtctcctcttgattactataaatgtattgacccctcatgataatggatttatttgtggggaattgagaggtaatgtgacctttcccaagacatttgaagcatttaatgttgatagtcatttattgggatctagtcttagaggtgt

SEQ ID NO: 101692 - DNA, 251 bp, Glycine max
ccctacaacaaacaaactaaacatggaaaagttcttatgagaactaggacttagagaatccttgatttattcgtcagcttaaaattctggatcgtcatgcactttcaaaatagcaatatgcttcgacaagaaagggttgttcactcagttgcatatatgtctttacaatgccagaaaggaagaaggggtgtcaattaatccaacattcaacgtttctgttatatttggcaaacgggatgaggtatgcttga

SEQ ID NO: 101693 - DNA, 280 bp, Glycine max
  unsure (1)..(280): unsure at all n locations
gctgcgagaacgacagaagggcaccttagtttaaatcccaccttcaacaaaaaatcttaggaatttgagagaaatcctagaatttaatgcaacataactaggaattagtatttctattataaagagacgctttgaatgaggcagagaacgagtcatcccattgaacgagaggggcatagcttcactgaaatcaagctacccatttaatgtaaaataagtataaacacaaatcacaaaagaanaattctatgctatcctcagaaatttaattaggtgtttt

SEQ ID NO: 101694 - DNA, 246 bp, Glycine max
gaaacattacaaataagaacaaaagaaacaaagtcactatgaaatgtctattattagccgaaaaccaaataggaatcaagaaatgagctgagaaaattaatgaacctaatatcacttacttgggcaaatgaaggaagtgtttgtattccagtactttcaacaaatcaaatgcagtctactatagagaacacatcttgtaccgaagaaacaaggagccactcatcaacacacatactatgaaacaaa

SEQ ID NO: 101695 - DNA, 252 bp, Glycine max
gttgtatacagttatatatattgtttttcaacaaattaattagaacaaataaaccccattatatgatgacgccatcgtaacctacagtagatatatatcatggtagttatagtatgttaggggacagctatgttagctttggaaggtcaccaaatctgaaattacttctattttcagtgaaggaatccaaggtcaccaatctctaaattaagtggaacagggcactaagactttgtatttctttgcccgtta

SEQ ID NO: 101696 - DNA, 237 bp, Glycine max
gaggcaattactcaatcaagattttactttttatttttatttttttttgaaattacttcgcaattttaacttttatttttcattttcccctctttttttattcttattacgtgttttacaccgcgaagaataatttgattgattgattaacgtatcaggagaaatttcagttacattgcaaacttatctgaacttgattcagttttctatatgcttcagctttagtatataattata

SEQ ID NO: 101697 - DNA, 251 bp, Glycine max
gtatatctaagaccaactcaactaaattcaaaagtttcaatgcttacataaagaattgagctaataagataattgattatgtataaaaaaacacaagggtgctcttagggtcaattttagcaactcattatttgttgcattgtatactcgtgggcagctacaactttcacttccttttatcttattttggagtggaagttggaaggcatgagacctacacttttttcaaaactttcatctatctttgactt

SEQ ID NO: 101698 - DNA, 258 bp, Glycine max
taccatgaaatgttgatcgcatgcatacttctatttgatccataatgtagattccagtggatcacatatgcagatacctcttaaaaattggtttcagtgccatgatctaaattgcatgcaatttttgcaccttcaaactcctaattgtggctagtaatatcaaaaatcacgcaaggaacatttcttaatgtgttgttattggtgggaaactttttctatgggaaattgggaggcccccattgcaatgtatggttactg

SEQ ID NO: 101699 - DNA, 232 bp, Glycine max
atgtttgctcatacatgatccttgtattttcctctacaaaacaaaaacaaaaaaagggaagcatgaaaattcatgatgcattcttagttgcatgtgttaggtaccgtgagccaaccatgttgggatcataaacccatttctaaaaaaaaaaaaaaaaaaaaaaaaaaaaaggggccgccgaatgtgggccccgtgcacccgggatttaattcgggacgggtacctgaggggg

SEQ ID NO: 101700 - DNA, 251 bp, Glycine max
ctatatataataagagttaaaaaggctcaaacgcaaaaagaaagaggcaagactagcaagtatttggtttaagtcattgtttaattacttcaagacaaaagacacatcaatcttgatctttacatgatttcaaggaaatatccattagtttttttttaaaagatctttgatgatcgaaggaaatgaccatgtttttatttgtttttctttaatttagatttgaagactattgacggacattgccatgtcta

SEQ ID NO: 101701 - DNA, 271 bp, Glycine max
aggatagagtaaggatgagagaagaagaaagaagggaaattggaggttgaggggaatgggttaaaaaagatgggtattaagatttaaattaaaattagtgaagagaagaagaaaggagaaaataaaggaagaggagaatatgtaataattaagtgaactttcaatgataaaattacatgaacgttattagtaagttattactagttagtagataataaatgtattagtttttgattttgaagttttgaattaattatatgaacagttaggg

SEQ ID NO: 101702 - DNA, 203 bp, Glycine max
ggagggaaaggatggagaagaaggtgaaggaagtgagagtggagtagatatgagtgtgaagaaaaaattcttccaaagttttaatatttaaatcaaagggtcataaaaaaaatgatctgaacattcgatttattcatctttttctttttcatagtccaaaatcactataacacaatgaatagaacttgtttcaacaagattgt

SEQ ID NO: 101703 - DNA, 243 bp, Glycine max
gtctaactaactgaaatgacagtgaatgttcaaaaacctccaatcttctttctaatttattatcacttatcagggctgattttctaacatgattttacaaaaacctccaatcttctttctaagctcacagaaattttggttgtgcctgtccgtatcacattactaaagttcctctttcttcacaaacttaaagtgacatgtatttatgagtgataccatacttccaataaatttttaaaacac

SEQ ID NO: 101704 - DNA, 252 bp, Glycine max
ctcatctataccatatgatttttttattaacaaatattaattattaaattttgtttaccaaaaaaatcgaatccataatttttccatcatttctttctttcttaaccattcaattaatcttatatttccacgatataaaattattgacacacatgatttaaaatttcaatacaaaagaacaccattacagtgaataaaagtgtcaaactgcaatttgaaattttatttgtatcgacagtaattttttcattg

SEQ ID NO: 101705 - DNA, 281 bp, Glycine max
cgacggctgcgacaagccgcccgcaggggccgcccctgcttccccatggcttcttctccctcacatccatcctttctgtccctcctgaacctgtctgcatccattcccatttcttcttccgtctgcatgttcccaccgtctaaaaaaccccgcaacgcaacaaaacggcgtcatgcctcggcacgtagcatgcactggtacccctagcactcggcgggcacttctgctcggccttggaggactctatggtgctcccacaagtctcccacgtaacaacactg

SEQ ID NO: 101706 - DNA, 251 bp, Glycine max
gagccatggtaacaacacttctaattgacttgtttaatatagacttctgcagataaaaaaaaaatgttaactttatcgttatcaatagcaagtacaacaaatacttacatctaatacttttttcatgcaggattctactgggtttgtattcaggaactatttctatttggaactatcagacaaaggtaaagaattatatctgcacttaaatactcatcatgaaactggaataattgatattaatgaaaaag

SEQ ID NO: 101707 - DNA, 245 bp, Glycine max
gtaatgatagaattcatgtcatttaaagttatatctgttgcttgaattaggaagttgaaacttggatacctgtacatatcaatttagacttccatctaaagtagtagggactgcttgttttggctgagagtgtgaaaacctatattgaacaagttgaaattttggaagaaaaaatcatctaatgcttgataaaataaaattgagaaatggttgaaaatggtatatatcccgtttttcattttcca

SEQ ID NO: 101708 - DNA, 276 bp, Glycine max
tgagacgacagatgggttcccaaatcttgtgcaactgcatctgtacaactccaggttgactaatgatgtattgaaatcactaaacaatatgccaaggttgttgttcctcgatttaagtagcaatgcttatgaaggtgaaactttgcattttcaatgtggagggtttcagaaactaaagcaactgtacctcggatctttggatcaattgaagtgaatccgtatcgacagaggagcactgtgttctgtggaaaaaattcttttacaaaacctctccta

SEQ ID NO: 101709 - DNA, 257 bp, Glycine max
tggataatgcaagtgttcatgacacacttgactttggaacatttttgtttgttttttgtgaattgactttggaacatatgattgtgctatgtggtggcatggtggttaggtggtgttgtgttatttgtacgtgggacagaaatcgaaaattttagtatttgatagagaaagcatgcattgaatttcttggtgacaagctagatagcttgcctttttagattagaagtcattctttcatgtcaatttctatttgaaaa

SEQ ID NO: 101710 - DNA, 277 bp, Glycine max
tcatacaacataggtttccaaaaattacgcagaagctgaatttaatttccactatctaataatgaccacttcttccattggcagtgcaagcttctagcgtgaacttctccacattgaattcgatttaataatgcatctaattatgttctacacgcattgcctagtattatatgttattttggtcaacagatctacaatcgatcaaacattggatcaaaacgggtttagcacacgttctgctatctctcgccactagtccgatttagatttgggctac

SEQ ID NO: 101711 - DNA, 255 bp, Glycine max
cagaatgaattgaaaatgaaagagcttttgaaccaaatagattctaaagccgaaacaatagaacagatgtcacaagaactagaagttaagtcgaaacaacttgaggatgcacagaggcaaaaggatgaaaaggatgcttcattttcaaagcaaattcaaatgctgagatctcaaattaagatgttgatggcagagggtgcattgtctgaaacaaacctaacaaagaacacgactgagacccagaaaggagaacga

SEQ ID NO: 101712 - DNA, 228 bp, Glycine max
gtatggtaattgacacgtagtcatgcatgtccttgcagaatggttagattcttaagtcggtatacatggaataacatctattcagagaattagtaagtctcttgaatgaatattaatagtttgagagcttactctttaaatcttgagaaaaaatatcttcattttaaccaaaataaaaaataatagtatgttttagaatattattttctttttacatattctatttga

SEQ ID NO: 101713 - DNA, 252 bp, Glycine max
aacacaacaatagttattattatcattattaatctttaaacttttgtgattccctaagttgttggttgcttttgcttcttgtttctaacttatttgttgattcactttctttgtatatttgtagctcttctttcttccatttttctgcttcttcagcaattgtaacatatttattatcttggcttctgcaattgtaacatatttatcatctatctcattatttgttactatgaaagtgtatacatacttctg

SEQ ID NO: 101714 - DNA, 258 bp, Glycine max
aaacaaccaaaccaaacacttgcacgtagggatagcatgttatactttggatgcatcagcagaagaaagatatatataaactgagaaacgatttgattgggtctctttgttcacaaaatttgcagttaggacctttctaaaaattgacaaatgcagatttcattgaagttatagactttgagagaggcactgaatgcaaatattacggagacaagtcaaattacatacattatgttctaacctcggatggctatggaa

SEQ ID NO: 101715 - DNA, 270 bp, Glycine max
tacggcgacagaagggggggagaaagaaaaggtaaggtaaactgaataatttgatgcccctcttgtctcgtaactaacgatggcagcgttccgacggaagagctttgaggagaacgaggatcaccctgaactgttctttcactttctttgaagttaatgctggaaaaagtctatttgtatcatttggaaagaagtaagcttaagctgcctaggatattatttttaatgttgaaaaatccagataggtattgcatgagtgcctcatccacg

SEQ ID NO: 101716 - DNA, 253 bp, Glycine max
tggattcttttgtacatttagtgtattttaaaaatagaataaaaattgacacaaggttaaaaacattacagctttgattccactaaaaatgtaaattatggaggacaacattatcattgcatcaatgcttgacatcatcataaataaacagaaatttcatgtaaaaacaaaaggcaacaaaacaagaaaatgtttttgacgaaattaaagaattataataaacctgatttgtagttaatgtaggttgcccttc

SEQ ID NO: 101717 - DNA, 244 bp, Glycine max
ggatcttcacccccaacttttcgcaagattactttagaagcagaaaaaagtgcatgaccccatttccccttacgcaagactgagctgtgaaaatgtgtactatgatcggttagctaagttggttatctagctggtaaagacctccaattttgagcactccacctcccgagttctgccacctactatataaccacctcaaactacttacacatttcgctcactctcttaataattgaaagctatg

SEQ ID NO: 101718 - DNA, 247 bp, Glycine max
ctgataattgaagaaacccatgaaccagaaatcgaaattatccacagttactatttctatgtacttttgtgacggcttctccacattctgacttttgttgacagactttaattttgtaaggtgccttgagacctgacatggcatagaaattgacgtacatctcagcaaaagtatgtagaaagattaaggcgatagctcggaagcacttgcatgatagacactatataaacgaaattacaacgaaagt

SEQ ID NO: 101719 - DNA, 269 bp, Glycine max
tgaagacgacagaaggggggggctgtgattacaaagagagaggcttgagtgggaaacctaattcgattgaaggtgccgccatctcctttggtttggtatctcattctctgaaattgaattcggtttttttcccacagtgacggtgttttcaaaatttacacttgatatgagccctccacattccttattttcttttagttaatttcatcaatttctgtccgatcttgtgtagtttttattttacattttttgcactgtttgtgttctgt

SEQ ID NO: 101720 - DNA, 250 bp, Glycine max
ctacatattcacggtgatgtttgtaacacgttttcattgcgtctttaacattttaatccttcctcttttctttcatatttatgtttaacttttgacatttgtttcatcagacatccttacaatgatgatactttattttacactttgttcttcatttcatggttattatatctatattatatgcttatgttgattatagactacatattcacggtgatgtttgtaattctgtcgactagggtattcatca

SEQ ID NO: 101721 - DNA, 251 bp, Glycine max
ttcccctatgcataggtgtggaacgaggcaatttataatttatttgactgggatgctttttaatcaatcagctcatgaaaatagtgaatagggggttccttcggattaggaaaacatgtttttgaaatataatttgaagcactataaattaatataaatgacataataaccttggagatgagatttgtaatttttttaaaatcttgtaatttatttccgtcttgtaaatgagtacttgattttgaggataa

SEQ ID NO: 101722 - DNA, 263 bp, Glycine max
gtcataggataatgttatacatagtaaaattgataacttttgcatttaaatcatatttaagatgtttttttagttaattgataatgcatcaaagttaaattattgctatcattttgatcaatgagagatttagtggaaattatcctaattagtcatgaaattttatggagttatataaactcttcttgtttttttaatcatgacactaacttcccttatatgagaggttgatgtaacgttttcaaataattagtaaaattatt

SEQ ID NO: 101723 - DNA, 266 bp, Glycine max
gtgcctcctatgagatgcaaagaaaaatgtggaggagaataagaggtggaggagaaatgcacaacacatagcatcactgcgagatgcaaatagaaacgcagaggatacaacaagacacgacggcgacgagggagaagacattacctatcaccactgcagagcatgatgctttttgcaccacccagaggagacacacaaaggaaacttaacatcattacaataggggatactaatgtaatgattttaaaaggagaagagacatgtat

SEQ ID NO: 101724 - DNA, 262 bp, Glycine max
gaccgtcgcacccattattcattgcatcatcgttcactcgcatcagaatcacaggtttttatttctttttctcctcttaaatataataatattaataatttagaataaatttgtcattctcgtttcttgggattggattttgctgattatatccacctaacccttttgtgattgttttctggtttgtgatcagaacaatcttggatccgattgtgcgttatttgattgtctcttgtcaatttaatttcatctatttgtgatc

SEQ ID NO: 101725 - DNA, 271 bp, Glycine max
acctagtagcttacacaaccctgcctgggcctatcttcttgctggtcagatcactggtgattggaacattaaatctgcaccaaatacttctataaaacactggattagtgcaattccagccggctacaacagtcagttcccaagctgatttgacaaactcaacctcagcctggaactgtttcggctcatgcaaggacagatgatattggtaaatcagtgatgttagaacatcctctattgatcatccactaggaatagacatcctctacag

SEQ ID NO: 101726 - DNA, 262 bp, Glycine max
gaccacattccaaaacacaaacacatacattgtagtatcacttttgtctcggaatttgttcttttgagttatggcaagcttaaaggttgcatgtgtggttttgatgtgcatggctgtgatgagtgcaccaatgatggtgcaagccgtgtcatgcaatgatgtttctgtgaacctagcaccgtgcctatcttacctgatgcagggtggagatgttccagaatcgtgctgtagcggagtgaggaacatctgggttctgccagca

SEQ ID NO: 101727 - DNA, 259 bp, Glycine max
gatattaactgtttttgtcatccaaaacagatcgaataatgagcgtagcgggtagtgaacagcttcaccataacagagttcgtaaatgacaaggctaagtttgatggtttcgtgaatgaatggtttgcgaggatagatgagaatggcgatgggaagctttcgcgtgacaaaatccgagggaggttagggatgctcttgcctttcggttcggagttgccgccacagcaagagaacgaagagatattcaaaaggttcgatg

SEQ ID NO: 101728 - DNA, 259 bp, Glycine max
gggagcattctttcagtcttcttcttctcctcatatattcaaaggtggagccgttgaagacacttgtggggagggagctagcaatagcaatggcaactcgaaggatgcagcgttcaaaggtggagcggttgaagatgctgttgcagcattctttgagtctctttttcttctcatccagttttaatttcgcccatcccgttccctcattcactcccgcccattagtctctctctctcaaccaagttgcaggttttgtggc

SEQ ID NO: 101729 - DNA, 250 bp, Glycine max
gggagcaagtaggaagaagaaagcgagtgacgagggaaacgtttaaaccatatatgttttgttgtttctagctccattctatagcaatggccacgtctgttcttagtcctcctttctttcatcctctgcatcaacttcaattctcgaaatgcccccgcctttcttctaaatcccactttcgccctcgcctcctccgctccatatcccaaagaaccattcgcgctatctccgcagttgccgcagaatcaga

SEQ ID NO: 101730 - DNA, 233 bp, Glycine max
gacaatgagttgaagacaacattttttcaactctcccttatctctctctgacacacaccagcacgcaaacactgaaccacacacagtgtgcagcagcagcagcaacaagagaaggagaagatggctttgcaactatgggagacactgaaggaggccatagaagcgtacacggggctctctccgaacaccttcttcaacctgctggccctcatcctggcgctctactacgtcgt

SEQ ID NO: 101731 - DNA, 256 bp, Glycine max
gggatcaaatttcttgtgaattgtttcatcgcgcagtccatgtcccaattgccctagccgcgctaccacacaatactcaatacctttgttaacaacggcgatagttattcttccctccctcgtcgcttgcaacttatctctcattatttctcaaatctaaaaggttgagttttcgttacgatgaaagtgatgaagaaggggaaaagaccctcacatagtggggaaaagaagaagaataagaggaacagggaacaaa

SEQ ID NO: 101732 - DNA, 263 bp, Glycine max
cggctcgagcggctcgagacggaagacgacagaagggggaaaatgtaactgaaagattacacaatagagccattccttttatgcgtgaaaagtttcacaaggtatccttaattggagatgtcaatcttacaaatcaaaatatagaggaatcatttttagtcagatggttgaaggaaacttctttggagaataaattggacatatgcttggtggtaattgaagaagggtgcagaaacttccaaagtaatgactatttcaaaact

SEQ ID NO: 101733 - DNA, 248 bp, Glycine max
ggatgaccatgtgatgaatttcacacctttgtattactgggtgacttcatttgtattcaaaattggatattacataaaaaccagagggtggttgccatagaagtttttttttttttgggttttaatttgttaacaagatgcaatcaagggttttgacccttgaagagggaaaggagagaatcaaccaatctaataagcctttgagaccagtgcggttacttgtgttgttttttgctctatgtgtcctg

SEQ ID NO: 101734 - DNA, 256 bp, Glycine max
gatattttggttggtgaatttttgcaatacacaaatgggaacaaagaggagcttcaattctccggttaatgttttgattgaaaggttgaggaaggttccaatgaaagtgaagattttttgtggggtattgtttgctgtttttgctttggtggccttaaagctcaccataacaaatcactactatttcttcatagcttctgaaacggtccatgttgctgggataattgccctcatatacaagctttttgccctgaag

SEQ ID NO: 101735 - DNA, 247 bp, Glycine max
gggcttcaatggcttgtaagaacccaggctaggtggtgagttgatgatttcgcatcatccaccgaaaccatgccaagggcggcccctccatatagaaataagcaattgtaagcctgtcggactcaagtgttgcgtggtactcaaaaaattgtgtgattttgaacatccatcctgaggggtctgatccatcaaatcttggaacatcaagtttcattcgggaaagattaattgtttgtggggttggtgt

SEQ ID NO: 101736 - DNA, 251 bp, Glycine max
gtccatcgttattaataaaatagtctacgtgacacggagggacaaatttatcattaaaatgattgccaacgattgccagcatatagagacatatttgtcataatatttttttaattttttgtcttctcatcccgctgacaaatatgttcctgaaagataaaaatacaaaatttagttttcgaaagtataaaaatgtgacaaatatattcagatgttaataatagattgtgactaattattattattattat

SEQ ID NO: 101737 - DNA, 255 bp, Glycine max
catggtaacaatattcaacattattgctcgtatgagtaatcatccaatggtcacatgaccttgttttcattaagttatatcttgcgtccaatgcgttgttataaacaagtgtccaatcatttgtgaaaaccagtgtgtacacactatgttcttctataacgtccaaaggacttattcacttgcacatctttttatattatgcataagtgatgtctaatcttgtactggattcatgttagctaaaaagagaagtgc

SEQ ID NO: 101738 - DNA, 251 bp, Glycine max
gaggcctaaacctctatttggaccatttggcccttgaagcatttgatttcgttgcatattggttaagacatcatttgaattctaatttctattaaccaaagcaggatttgattgttctctatcattcattattcgagctaggatattaacattttttttcaggattattattattaataggttcctcttgtataggtacttcctgaattacatgtctattcccaagttggtttctaggaatgaccaaagta

SEQ ID NO: 101739 - DNA, 246 bp, Glycine max
ggccgaatgtgtctctccgcagcagccacacttcttcgccgtttcagctgaagagccatccgcaggtggttttcatcgctttagagttttgttttcttctaattcgttgcgtttttggattctactcgtaaatcatagttgtgtttgggattcacttaaagatgttcaaattatcgccgtttgtggcttttgtgtttcttttttggttttgaaagatgtgactgagacacgttattgttttgtgta

SEQ ID NO: 101740 - DNA, 226 bp, Glycine max
tcggctcgagcggctcgagtacggctgcggacgacagaaggggacttccaaaaaaaaaaaaaaaaaaataaaaaaactaggggcccccgattagtgaccccttcaccccgggatttatttcgggccgggtacctgagggggtacaattttccccaaaagggagccgtttaaaactttggggaattcagggcaaaactttttcccggggtaaattttttacccgccc

SEQ ID NO: 101741 - DNA, 231 bp, Glycine max
agggttctcctatggtacttgtaaacgttctcgaatatctccttgcacttcttagcacttctattatatcctagctctgctaacttcctgaatttataattaattcattcagttcaatcactactatattattacaccaaaaaatgaaagactatatatatacaatacatttatgaattaagtgtaacattagtattactaattaaggaatgatagaaggggtttcagttg

SEQ ID NO: 101742 - DNA, 241 bp, Glycine max
ggagtaccatatttgacacagtcatcatttcttttcctagctatggccttggaataacgatcaaggtcaagtagccatgccatatgggaaagttcttctgaagctagcacctcaggatcagtttggtttctgaaggtccaatgtttcaatgtaacacttccaacattgattttaagcgactcctggagggtctatgactgcatgcatcggatcattagctaagatttgcatgcttcgagac

SEQ ID NO: 101743 - DNA, 257 bp, Glycine max
atatatattttatcttatctaaaatctttctaactaaattaacatagttaaatagttagactcaaaataacacttttatatttcaagagacaaaaatagaataatttttttaaagaaacaaaaataaaatttgaaaattttaacgaaaataatatatttttctctactttttctatttaagataaaatgtacacaactgatttgatatgtaatatacaaatcaagaatgcataaaattaggaatgaaaaatgatgta

SEQ ID NO: 101744 - DNA, 246 bp, Glycine max
accccacttattttgctagattttctttatctttactgcattgtcaacttcacaatttgtgactttcttttttccagcttcatccacgggtttgattatgaactcatggaaacactctttggatattcaagtaacaatcaaagccatgaaaaaaataggtgtctttcaactacagccaagtccaactccaacacaccaactcaattattcattctggaccctcgaaaatcccaaaacattgcaact

SEQ ID NO: 101745 - DNA, 243 bp, Glycine max
gtggtaaaaaattattaaacaaacgcttaattagtctgtttactcaagcgcatgtatcaaggaaatgttcttctttttgtagttttcaaataaggttccttttgctatttgtaggccctagtcactatcttctggtctcattaaatcgacggcactgaatggctccaaacatagtcaaagacaagcatccatacaagacagaaaaaagttatatataaaagtgcccacactttgtacttttgc

SEQ ID NO: 101746 - DNA, 248 bp, Glycine max
atagtgttttcgtaacagttcaaataattaaaaagtaagcagacaaatggcgcccgataatgttcctaagatctggccatttcaacaacaaatgatgcctacctctcagctcccaagtagcacaataggttaatacaatgaacaagctttctgctaataattcagcaatgttctcttttgatgtcacaattcaagagaacatgaattggctattgatagtgagtacaattgacacatgggagttatga

SEQ ID NO: 101747 - DNA, 277 bp, Glycine max
acgaccgggagaagcaaaacgaaaatcggatatcgccgcaaaagtcgctatgccatggttaacatgatcgaacagcaacgatcaagatgacactttcaaaattcaagcgagacaactaggccaactagtatccggaatcagccgtgaaatttgatgatattaacgacaatattatatatgactgctacccttcctagatcagataaaatgtacacaactgatctcgaatgtaatatacacatcaagaatgcatagaattcggaatgaaaaatgctgt

SEQ ID NO: 101748 - DNA, 209 bp, Glycine max
acatcctcataagaaccagcagatgcatgatgagtaaaaacagtaactgcaaggcgcgaaccaaatagtgcctaaaaaagcacaaaacagaaacatacaatgcaaagcagggttttttcccaaaataagtccgatggagttgaaactccaggggcagaggcgcataaggtagacgatgcagtagcaggaaatcgcgactggaaaaggtg

SEQ ID NO: 101749 - DNA, 255 bp, Glycine max
gtcttagtcaattccaatgttgtgatgacatgttgatctcataacatcctttgcacacattcgtggtctgtcacttgcagtaggcataatgcaaaaacccgctaagatcagttagacttcgatgcacctggagataccaatggtctggtagacctatgcgaacaatcttgcggatgcagcagttggtattactcaaaggcaggcatgaatcctctagtgtggtatctgctgttgaatatcttgtccatatatgtg

SEQ ID NO: 101750 - DNA, 285 bp, Glycine max
tttgaccagttgtgctgggaatgcaattacttataggataataatatatgcaaaacctgaacagctggaataggatggttacacatgttgtataatgctctattagacatttagtttgaatggaatattggaggggatgagaaaaaattatctgacaaatgatatacatgtgtcacagagaattggaagcaatgtgaccaaaggtgataatctcgacgataatactgtagatagtgccacatataatgtaaaatcttcaaatgttaaggaaccagttagatcacc

SEQ ID NO: 101751 - DNA, 266 bp, Glycine max
ttcctgttgaaaagcagtctagaaaaaatctcctccaccataaattaaagaaagtaatacagacatacacacacaaaaatcatagagcataaaccttgggtaatagaaaaatttgacaatagtagaaaaataaagggttgatagattaagtacctgatagcgtctgaaacgaaacttggttctgtgagtttaaatccatggacattcaccctgtcaaaaccaaacctggaactctgaaacccaaaacaaaggcaccaaaaaatcaa

SEQ ID NO: 101752 - DNA, 270 bp, Glycine max
gtcctacacattgcaagtcattatgaaatgattttttatgcaatctatcatttgcacctttggttttgagctctcattataacttggactaagatgtatttatttgttataatctcttcttgttaatgtttcagattttcatgtgaaaagtattgaattaaaaaaataatcatatatttgatatttttaaaatataaaatgttcaatattttttcttgcgcaatatctcatcgagtttgatcttttatttaggttgggttggtttttctg

SEQ ID NO: 101753 - DNA, 260 bp, Glycine max
gacgggatttttgtgataataggatatcctttggtatccacgacatcctcaaacacccgaaatttgacattctcatggtcatggatagtgaagtgttagtaaattcccaagttccaagaccctacctcgctttctgcttctgaatatcaagagtgcacacaacataatccacaccctttacacctagagcctctaattacactggtgctgcatccaaaccatgtctacgatcatcctcagagtagcatggacgtatgatg

SEQ ID NO: 101754 - DNA, 266 bp, Glycine max
tgaccacagacttctcaataatttataaactttatgaaacttaagtatcacttaatccctatcactaatttcccctgttcattattcttaatagaaatttatagatggtcaggtttatcagcagagaacctttagtttccattgctgatcttacccttttcgttcattcataacggttcttcagttgatttatcttaatgtttggctttaatacacttgtttgggctcagctgttgatgaactaatccaaaattgtggtgagatag

SEQ ID NO: 101755 - DNA, 269 bp, Glycine max
ggggggaatataactatttaagtattatgtttatgtagatagcttcggtttttgtttggggtgaacttgtacatatatagcttctgaagtcgttgatatgtcaataacttcttgggtgcattgtacatatataatgaactgaggttattgatagatcagtattggaacacacgtcactgtctcactgaccttatttctatcctcatttctcaggtttccaattattcgaaggaagtggaggagatgaaacatgtaacaaagcaagaatt

SEQ ID NO: 101756 - DNA, 258 bp, Glycine max
ggggtgtggctatgggaagggtcaggagaattctcagttcgctccgcatatcaggccagatttgatgatggtgttattcatgaagaagatcaggtatttcagcatgtgtggaaattaaaaattccaccgaaggccatgttctttatatggagattagttgttgatagattacctacttgtgataatctcattagaagaaatattattatgcctgatatatataatgattctcaaacgtatattaatctaaagttttca

SEQ ID NO: 101757 - DNA, 259 bp, Glycine max
ccccgggcaggtatcagcggactacatggagtggtttttcaagatatctcacctatttgtcacaccgacccacgaaggcgatgagcccaaacagccaactaccccagatgtggatgcatacgtcgagccacatgtcccccggaggttccaattgcagttgatctccccatacattcagtggtattttaatttggttaagtagtttgtaatttgttttttatttaatattttgtaatcattgtgtttttatgactgtcac

SEQ ID NO: 101758 - DNA, 252 bp, Glycine max
gactgcaattcaaggtaaaactcttctccattctcaatcttctcattgcattccaaaccctactcccccaaaatttaaaattttccccctttccatgtaattttctttcattttctcgggaaccaaacggtacgagactgatcaatttgccctttcccttctctgctttaaaaaggtttgaacttcccatggcgagcgctgttgatgcttccggaaacccgatcccaacttctgcggtgttgatggcgtcgt

SEQ ID NO: 101759 - DNA, 193 bp, Glycine max
ctgatatgatgagttacaaaaaaaaaaaaaaaaaaaaaaaaaaaaaaggggcggcaaaaaaggaacctcgtaaaccgggaattaaattcgggacgggaacttgaaggggaaaaagtttccccaaaagggggtggaataaaagtttggggaaatcagggtaaaagtgtttcccgggggaaaattgttaccggct

SEQ ID NO: 101760 - DNA, 185 bp, Glycine max
gctatactcaaattctaccatctaaaactcaattccaaactaattttgctatgccacatcaaaaaacaatcttcaacttccaaaccacacaccttacatacaatgtcatttgctgcaactatagttttcctagccaaattctgcagtgtgggagaaatccattttgggacaattttcacaccaag

SEQ ID NO: 101761 - DNA, 213 bp, Glycine max
acctcatcgatgatgtatcacaggatgctctatcagcttgtggttctcgtcttgaagtttctatccaaaaggcagctatatgtcgcacagccatgcaccgcggtgcagcgcttgctgcaatgtcatatttatcttgtaagaaaaaattctattgcttttggtgttgtcgtcttaattgtttaaatgcaaaacccctttcctccgtggaagggg

SEQ ID NO: 101762 - DNA, 263 bp, Glycine max
caatgatgaaatgattttacttaacacaaatactcttattaaaagagttaaatgtagttacgaattattcgagtattgaagtgaaataccaataaatgaaagacaaatatttttagacaagctaaaatgagacatattatatgcaatggagaggatactactaacttgaagctcagtcatttcaatgatagaactcagtttaactaacttgatgcgtcggaaataagatagtttgttaactgtaattacattttagaggaata

SEQ ID NO: 101763 - DNA, 145 bp, Glycine max
ggaatcggtcagacgtggagagcgaagaggggaacctgagttgtgtctcaacttgctcttcttcttcctctcagtcaccctccaaatttactcactctctctgtatactcacctagtcagtttaaaggcgtcagatcacgatcga

SEQ ID NO: 101764 - DNA, 206 bp, Glycine max
aactattgtaggtaagtatagagaaagcaagataagtcagatgatgagaaggaccctggtgtcttttgcgaagaatcccgaaaagggcaatgtagcgagaatatatatgctagagcctgaaatatgacctttgtaattagaagcagaccataagatagagacatatatacatactaaaaagggttacccccctttggtccccaatt

SEQ ID NO: 101765 - DNA, 266 bp, Glycine max
atacgacagaagggacgcgcatcacttttcttgagacaattcaaaacaaactcaatgcacatttccccggtaaaggctatgtttggatattttgcgaattgaattgcacattttttaattcttagggggggaaaatgaagaatgtgttagtattttagaaataaaagtgtttttgaaaatctcaaacttgcatccaaacatgtactaattcatttagattagaaacaagtttgaggaaacaggagtggggttgcaaaaagtgcagc

SEQ ID NO: 101766 - DNA, 163 bp, Glycine max
tgtctccattctttaggtcccggtgcttaatgtagagtttgaatgtcagcaaaatcttaactagtctacaaactttttgggcatggtccatctttttagttcttttttatatccagcgttacttacattactatcacgtgaatttgattctcacgtgtcacta

SEQ ID NO: 101767 - DNA, 218 bp, Glycine max
atcattcacctttttaaatattcttttttctttattattttgaatatatagtagatcacgttaagatagaagcaattaacaaatcgttattttgtgtttttttctgttataatgtgaatcctactaacacacgattcactgtatcaacatgcctgtgatcttatcactccttagcacttctacatgattcatgttgtttgaagtatatgcacaactaa

SEQ ID NO: 101768 - DNA, 192 bp, Glycine max
tcctcaaataaacgttggtggcgactccacgcgccttcctttcttggaagacgcacctgtgagccctcgcgtcgccctcctgccgaagggtaggttgcgataacagtcaatttgtgttttccacaaacggaaaagaaccaaaaaatcaaatcaccaaaataggaaaaaatcgtgtgaacaatgcaccatttt

SEQ ID NO: 101769 - DNA, 186 bp, Glycine max
atcattaaacagacatacagagcaaaacacaagtgtgctagtgataccccgggaagttgcccagccagaacacccagaaatcctgttgttccaaccacagtaaaaagaaaagctgcctgcaccatcaaagatttttgttacttgttggttaagaatgcatacaacctacaagaaacatgtggtttc

SEQ ID NO: 101770 - DNA, 248 bp, Glycine max
tagccatatattcacttggaaaaatactttttaaagtcaaagttgaacaacaaaaagttactccatgtaattttgagctgtatttttatatatgcataaaaataaataagataaaattaattatggccgaaataatttcttgatgtcaaatttttaacatactagaaactgcattcacatagctggttgaccagcaatcgtgcaacgcaaaaggcaagttgaagatgactctctctgagtcggttttt

SEQ ID NO: 101771 - DNA, 144 bp, Glycine max
catttcacacattcatattaatcacgtgttcaatataacacatgtcaagtacaacacaacatatcaccctcacacaattcattacagatcatcacgtaataagtcacgatgaccattacataagcgttatgcaacagatacatt

SEQ ID NO: 101772 - DNA, 205 bp, Glycine max
gggtgcagaacaagatagataccaaaccataatgttgctgcaacattctatgttctgtgccattcctccctctcacttcaccccaccactcaaacaaaggaacccatctcttcaccgtcttccctctcctagaaagcccaaaggcttccaccctaagatttccctcccttggcgctggtttcttcgatgacatcgtccaaattgc

SEQ ID NO: 101773 - DNA, 277 bp, Glycine max
gatccaactaaaattagaatgtgtttttgtatactaaaattaaatagataataatgagattggtaaacaggtagataaaaaaactaaagaatatatagctagttatatacttttgatgcaacttacatggttttcaaactttttatttctccaatgtagtttggaatgggaccagttattaagcaattcctcaattccctgagtaacagagatatgatagaagcctaaatgaattatatagttcttcgcgtaagagcagtgaaggtttcaactcaca

SEQ ID NO: 101774 - DNA, 256 bp, Glycine max
ccctcattcaattcttcaacttgatcctgaagtttaatatggtagatataaatgtttgaatggactagaattattcttgaggtcctatatttttgtaaagaaattgtttcttttgatgattacacttaaactttgatagttttgcctacatgatgcctagaaaattcatttcttgttacaaagttgatcccttcaggtctaagtgagtaaatgttattgttgactgttttcgttgtgaatcattaatacaaggtgg

SEQ ID NO: 101775 - DNA, 289 bp, Glycine max
tggatgcgagaagacaatagacgacagatccaaaatgaggcttaacagcactacagtccagctccaaccatcattactcaaaagcttccaccggaagatccgaatccgcaaaatggatcaatctccggagcggtgttcaacataacaacaaccatgatcagtttcgccctcaaatccattccggcgaccatgaaggttttaggcatagtaccggggttggtggtgatcgagttggtggcactgataacagatgtgactgtggggtttatgctaaggtacacaagttccg

SEQ ID NO: 101776 - DNA, 293 bp, Glycine max
tataagacgacagaagggggggataaattaagacattcaagtttgtgacaaaacccgaaaaacgcgtaattgtcccttaaattgcatatcccgaatcctaatcgcatgcgatccattcttacaaacaaagccgtagtttagttggaaagggtctttttctttcctacttggaaggtttcttcttcgtatttctcgtaaaactctcaacctcaaaggaaaaaagaaaaggcatttagttatatggataacaaatcaccaagcaaggagtccaaggaggagacacgtgagtcgct

SEQ ID NO: 101777 - DNA, 260 bp, Glycine max
gttatagatttattagtatactattatgcgttaaatttatgtttaatttgatcaaatatttttgtactctacaaaatcaaaggaaaataaataagttaaaaaaggaaattaattcatgtttcacattaaaataaaataaggggatgtactaaattgatcttcttacaaaattaacacataactttctataatttggtataggtctttaaagtaacaacaataataacaaacgagaaggtaattgaaatgaaaattatctt

SEQ ID NO: 101778 - DNA, 281 bp, Glycine max
tgttgtatacatatccttataagatactctaagtccttcaacttaaatgttaggagactgcattagttaatattttacatagcattggaagatgattgaggtgtctgtgttggaaatatacctgacagtctgagcacctcaagtggaagacttgtatgtgctttataggcaatgatgcttataaatatggttctgtttcagcatatatctaaatagatatggcttttacatggagacgtacagaaagaatgttgcttatagaaaattcattttggtaatca

SEQ ID NO: 101779 - DNA, 228 bp, Glycine max
actgaaattgatattggcttttgtgatgtggaggaagccttgcagaatgatgtcattgaggaacaagctgataatgaactttgtaatgtggaagagaacatgcagaatgatgtcaatgaggagcaagttgatagttccgatcgtgatgcggaggagaacttgcagaatgatgtcaatgaggagcaagttgatgccagtcagcaagtatgcatgcgcatctatgtaatg

SEQ ID NO: 101780 - DNA, 254 bp, Glycine max
aatggtcctgaatacagtttaagaggctattgttggatacttcacatgtcccgaaatgaatatattgacaaaaatagtgaaagccactgcactatgccatggtaaaaataataatcaggtcagcttgaggtggctcgttggctgaagtcccacatggactaaagcaagagatgaaactgacagacgctattataaaaggagttatcagacacagtggcaaagcatctttgcgcttggggcaatgacgcagctag

SEQ ID NO: 101781 - DNA, 255 bp, Glycine max
gaccacattccaatacacaaacacatacattgtagtatcacttttgtctacggaatttgttcttgtgagttatggcaagcttaaaggatgcatgtgcggtgttgatgcgcatggctgtgatgagtgcaccaatgcatggtgcaagccgtgtcgtgcaatgatgtatctgtgaacctagcaccgtgcctatcttacctgatgcagggtggagatgttccagaatcgtgctgtagcggcagtgaggaacattctggg

SEQ ID NO: 101782 - DNA, 113 bp, Glycine max
ggcacaagtatactgaggtagctagaaactgctagatggaagtgaaggcgcatcaatggaccaactgctacactcatggtagcatatgtctgccacagctcagagtagcagaa

SEQ ID NO: 101783 - DNA, 139 bp, Glycine max
cctccaattcccggatgaatcattgagtgaggcacttgaaagattcaaaagtctattgcaaaaaatgcctactcatggtttttctgaaccaatacagctcaacatatttatagatgggttaagaccacaatctaaatag

SEQ ID NO: 101784 - DNA, 219 bp, Glycine max
ttaccatcgatgcaaagtctttgagcctaaagtgcagctctcctactgtctttcatctctctcttgctatccttattggctagtgtgcctgctgcaggtacaactccatgatgcgcagtgtcaagcctccatgtttccacattcatcagatgcctttgtccatccacgttactctgtggaatcggcacttctgcttaccatgccgaaggtgcagcaagt

SEQ ID NO: 101785 - DNA, 241 bp, Glycine max
gacacagagagtccagcaatataccaaaaatgctgtttggaccattattttgataaacctatacaagtaacaggagatgtacggctcacattctatgagaaaatgataggagggcgcctgttctactgctgttttaatacagcttttattaggaacagcttactacagctcccaatacaagagttggacaaagttgggaagagaggaacatcaatatgtggccctgacttctgcttagaat

SEQ ID NO: 101786 - DNA, 234 bp, Glycine max
gtgggtatccggaaaactttgcatagtgttagaaatcacgtatagtagagtctgcaatttttttttcatttgatgtgaaaacacggggaaaatgagtgttgaaaacgcgtgtccaaacactccataagtctaatatgttttggctttttaattaattgcgaatgcttttttaaatgaggacaacaattttctactttctgatatctaaagtgtagagagtacttcagtgtacat

SEQ ID NO: 101787 - DNA, 249 bp, Glycine max
tcctgttatgatgtgtatatctatttagctggagtgacccgtccttttgattaactcgtaaccctttaaacttacggagaataagatgattctataaggaatgagttttcaaattaatctttttctgctttctaatttttttttacaagcaacagattagatgttttctctaatcttctatttcttttcctagccagaacacgtggggtgcaacattgtttaatttaaaattaaataggcataaaatga

SEQ ID NO: 101788 - DNA, 247 bp, Glycine max
acattgagatttcctgttgtcattattgtttaagtaatctggctctaagcatgattagggacttaatctttcttgtctcttaccaaggacttcctacctcatagagggttgaataaatatttgacaatccctagctatacctgtatggtaaacatgaatgttaaaaatatcttgtagctcaaatttgtattataatataaatacttatctaaagttaattacataacttaatactaaaatgattaat

SEQ ID NO: 101789 - DNA, 174 bp, Glycine max
tatgcctcatgagctttctcatattcagcaacttactggatttagcttgggtggtttcccttttagatacttgggtggtccccttttatcatctagattaaatgtatgttcctaagctcccttggtttcccagattactggcctgaatccaggaatgaagaggaagccttaacc

SEQ ID NO: 101790 - DNA, 184 bp, Glycine max
ggtatatgttcttttatcaggcaccatagtgaaatataagtttgccgctcaatttaatgattcaactcaaaattttatattccaatatgagttcaagtagaaaccaagaactatttctctgctgggtactaagttgcacttggagtaggaactaattgaccacattcatcaaagcctctttaaa

SEQ ID NO: 101791 - DNA, 201 bp, Glycine max
ctatgtatatcgggagtaaaatttattgttttctcatttagggagtaaaacttaaaatggagacacctagaatccaagtgaataatttaactttattttattttcggaacgtcattatattctaaacaccccggactctcttttcttatcgaaaaaaccctgggctctaagaatgagggaagcagttcctttaatgataaa

SEQ ID NO: 101792 - DNA, 236 bp, Glycine max
gggctcagcacagacattgtcagttgcagtaaaaaggacacgggagagacgtaaggttttcaatgctggcaactgcagggattttggaagttccaaaggaggccaacaagatatattgtgaagctcaagatatgtaaagactgacaggaaaaaatgatagggtcaagataagtggatatttttccataatagaaaggcatatacatagtcaactgttggacattgtgccacacagc

SEQ ID NO: 101793 - DNA, 214 bp, Glycine max
gaatacaaatatttcctgtttcatgcactggagagatcgaagagaaggtttttttttcttctttctttctgaaactttagtgggattggtcatggagaaaagcaatcattccctgaatactactgctcctacactgaatttggcttcagtgaaagggtccaactcatataatttaaatggtccaaaccagaagggaattgggtattctgcatca

SEQ ID NO: 101794 - DNA, 248 bp, Glycine max
gacaagtttgttgagatagctagaagcaataagatgaaaatgaaagtgcttgttttgtttgttgctacagttttggtagcatatgaatgccatggctcagactacccagaagttcctcctccaatgaaaactgggttgggtgggcaatacagcaatgaggtggcatgtgccaattggaggctaggcgtggaagcaaacaagtagtcaagtggcaactgttcctgcagcttgcggagagtacatagctg

SEQ ID NO: 101795 - DNA, 121 bp, Glycine max
gacagcaaaataactagttatagaattgcagtggcagaagcgaagtgaagtgggaaagagacagaaccgaaaatggttgctactttgaatcttccgatcatagacctctcttctccccatc

SEQ ID NO: 101796 - DNA, 241 bp, Glycine max
atatgatcatttgattatttttacaaatcaacacaagatttcttaacatattttattcttactcacatgttatttatctcataattactcaaagctcaatattattagatttggacaaccatgtgtctatccatcttagattatgatgcataacctatgtataaattattgattgatattctaattagtttctggacaagtgggcataattattatggtgaaagaatgttgtccccaatta

SEQ ID NO: 101797 - DNA, 221 bp, Glycine max
aacaagagagaagagaaaagaagaggacaaggagagtggagaggaagaaaaggattgaagttgttgctgtgagaaagagaaagagtgaaatcggagtttgggaaggaattacaatcaatggatgtgataagacgcagcaatctcatctcgacaatcgagaagtggtggtcaccctctcggcttctcacatcgcgacactacacagatcgccaagacatcgc

SEQ ID NO: 101798 - DNA, 195 bp, Glycine max
caccagttcagtcatgttccattgtttcaccttcttccctcccgagggaaaaaaactctctgagatcattggtgtcagttgaaaaagccactgcacctttctcgagttggttttggagatttgctgggctctggtaaggcgtaacgtggtgattccgtggatattatgttatgagctgatagatcagaggtggag

SEQ ID NO: 101799 - DNA, 254 bp, Glycine max
atgtcccttgtcttatctcactagatgagatcagctacatgcataaggacatattgtattttatcaaatataatataggtttaatatgtttcttagttcctgaaaatatggtacattttgattttagtcttcaacttttttttattaattttggttcttataaattttaaaagttttgaacatggtacttattactatttactaatgatgtggcatgcatctaaatatgctacctcacgtgtcatctcaaagta

SEQ ID NO: 101800 - DNA, 213 bp, Glycine max
tgagcaactaaaataattagtcccataatcagcaagcaaggtagttcacaatgctaaacctcagattttaaaagaaatactaactcagtcaattttgtttagatttcttgcatttcttatattggaagaaaattatgtaagactttcttatgacggatatgacagtaagagatcacaaaaaacatattaggaattcatatgaaaaacttgcac

SEQ ID NO: 101801 - DNA, 112 bp, Glycine max
gcacttggaccttttgtagaattccaactgggaccgttgtacttccacgaacaatgttatctgactacacgttacgtagaccgtgtctcctggtccaaatttccgatgcaac

SEQ ID NO: 101802 - DNA, 222 bp, Glycine max
tataagacgacagaagggtacaaatggtgatgctgtggaggatcataaatcagagaggaagaagaaaaagatagaaaagaggacattggaacaagagatggaggttgacgatcaggctgaagatgatggtgccaatggaatcacaagtgagaagaaggaacagctaaaaagaagaataaaaaggatagtattggagaagcattcgaagctggtgaagtgtct

SEQ ID NO: 101803 - DNA, 239 bp, Glycine max
catccttctgttatggaagataacaacattatttgataatggcgttgaatgccgagaagccttagatgctattattgatagatgttctgcacttcaaaacattcgtcaagcagtcttacagtatagacaagtattcaatcaacagcatgtcgagccaagggtaaggactgtggcgttaaatcgtggtgctgagtacttggagcggtactttcgtctaattgcttttgcagcatatcttg

SEQ ID NO: 101804 - DNA, 159 bp, Glycine max
gacagcagcagagcaaaagaaagaaagatagaaagtgcaacttcctctgttttgctcccctgtttaagccttatcataagcttagaatggcacacaaggaattttccattgccctagtgactctcattgttctctttgtcaacacgaacctccaaggtg

SEQ ID NO: 101805 - DNA, 149 bp, Glycine max
acatacaggaatgattaggatgagatatgtatatcaaaggaacattgaaagaatacaagcaaacaggaacctaaatgtagccatcatgcataccatcagagcttcagaaagcccttcagcaattgcagcatcattaaagccaccaccat

SEQ ID NO: 101806 - DNA, 193 bp, Glycine max
tacttcaacaagagcatcacagtcacatctagaagcacacgtatgcacaggttcaggtcgataactctcaagctcatccaaaattgttcttagctttgtaaaataatcaataatattcatgtctccttgtataattgaagccaatttatgttgtaaatcaagaatttgaagcgaatcaccttgtaagtatcat

SEQ ID NO: 101807 - DNA, 179 bp, Glycine max
tggtgtggtgttgaccatcactcaaaatgactatttgttcgtcttccgatttgcaggatccggatgacaagatgtaaatgcatgcatgtttatgatcggacgttaaatgtaacaattaaacatgtgttatcgtgttcaattttacttaaacgcttacaacatcttgttgatcgagccga

SEQ ID NO: 101808 - DNA, 247 bp, Glycine max
  unsure (1)..(247): unsure at all n locations
tgaatacaaatacaaagaagggaacaaataacaaacaaaaatataaagataaagacccctaagtggagtctatcaaaagcttctccaggatggcctcagtgggatagttccacttgccaacagctattggatccacagttaaaaagagaaaaaaacattaatcttgtaagggtanaagggttttttcataaatctaatcattctgtttctactctatttctcttcaaccaaatcacctatatttctt

SEQ ID NO: 101809 - DNA, 167 bp, Glycine max
tgaatacgacagatggggtatggcgccacaatggtttggtccggagaaattggtgggacaggatggtcgcatatggatgtatgttcagtgcatctaaattaatcaggtgaccctttttctgtgttcttacttgtatcattcggatgactaagagatgaactgagctg

SEQ ID NO: 101810 - DNA, 213 bp, Glycine max
ggagaaagaaaagaaagaaaatgcaaacagatatggtgtgggccccagcgcgaaacgaaacgcaccgaatgtgaggaagcggcgagagcgacgggaattggagctggagatgaagtggagaatgccggacacgcacccgatggtcttcgcgtgaaatctctccggcggagtttctcgccgcgacgatgacggcgacaccgcgctgctctgtct

SEQ ID NO: 101811 - DNA, 127 bp, Glycine max
gcccttctaaaaccttatctctttcagttatcctcggccatggcgtctctactgctagcatcaccttctccactctccgttcaattgcacaattccacctgtcacctttccttctctcactcccaaa

SEQ ID NO: 101812 - DNA, 245 bp, Glycine max
attccatcactatgggtctatggccacgtctagcaccatttgcacatgtcctcgtagttaatcaaatgcgtcttggataaacactttcaattcttcactcattttctgcaaaaattaacttgggcttatagtgcttttacaagaaaatttcctccaaggtcaacatcatgaaagtacaccagaatcaccccaattttataaggaagttttttttaacgaagaaaaaattaaggaaaattttaaaa

SEQ ID NO: 101813 - DNA, 235 bp, Glycine max
ccctccgtcgcatttcattctttctgcataaaatttgtagtattactcttcacaattttattgatggtcattcgtccagatcaactctaaaactgaaaagaaagaagaaaaaagagcataaaaaagagcacgcacgtaggcaattatatgcgtggctgaaattttttgtaatttatgcaagtatatgttaagcacatggaatcggagtttcaaaatggaattaaacaatgaaaat

SEQ ID NO: 101814 - DNA, 235 bp, Glycine max
ttccatggttttcataacactggacaaacaaacaaaccaaattgttgaagattcggtgttaactagcgatatagccattggtatataaacgaggttaagtctcactttacaaaataaattttataagattgagttaaactctccttttcttgtttcaatgagtttacaagtgtcaagaaaatttgaagcacattgcaacctaccttggttcaatgagtttacaatcgtctaggaa

SEQ ID NO: 101815 - DNA, 237 bp, Glycine max
tgtcccaatccaaatcctagctcgtacacatccccatactcggataaatcaggcacccctgcttcatacaaaccagaaaagaaaactttatattatatcagaatttaaaagacattaacattttcataccacatcctacttaagtagcagccaaggaataccttgtttttatcctcagcaaataacgtgcgtatgtcacctgtgtatgaaagactacatactttggcatatagatct

SEQ ID NO: 101816 - DNA, 156 bp, Glycine max
gactcacagcagagccaccaaatacttgtgttgtgtcgattctctgtcatccatgatccatcacttacaaactagtactacttgctttcaataaaaacaaaaacacactctttggtgaccacaacaacaataacaatggctgcctcactacaagct

SEQ ID NO: 101817 - DNA, 167 bp, Glycine max
acgagacgacagaagggggagggatggttgtgatgttttgatctcgtcggaggatggatcgaattgttggattttgataatgatggtacgcattacgtgaaaaccttgtggtaattttgaattcttcaatggcgtcctctagctccagcaagaagatccatgctgat

SEQ ID NO: 101818 - DNA, 236 bp, Glycine max
gggacagtgggacccaacaattagaataaattaactattttgcttctaattggattctgatttgaagtgcctacctttctgctttgtctaaagttggtagggattcagtgaaacccttatgattaaggaataagaaatgtctcgagatattaaagatcctacttaatcataccctaaagcagtcaattaaagtgtgacaagttaatcattaagttcatagaaacttatgaaaaaca

SEQ ID NO: 101819 - DNA, 257 bp, Glycine max
tggttgcggccatgctattctacatgtgtgtgaggttcaagaatatggtgcatgcatggagtgaactggaggaattaataaatgggaaagaaagtgtgtggtttagggtttaaagcggttttcttgttgagggttgcaggaaaacaaagtgttggcgtgacttctcctgcatgcatgtgaataatcacgataaggctctatagccagtcacctttttttctctattttaaggaaatgaaaattactcaacagagaaa

SEQ ID NO: 101820 - DNA, 131 bp, Glycine max
cagggataccgtcctagatattactgcacagccttagcattctgatcctaattcttttctagttttaacagcctttgctttcccaaaccctggtagatacatgcaaagtgcagtgcacttaaagccctcat

SEQ ID NO: 101821 - DNA, 229 bp, Glycine max
gaagacgacagaaggggtacttcttatttttataggattttagttagcaatctaatcaggaaatcaactcagcccattcgaactggttaacattattgggtcctctttaataataattatgttcacaatcaaaatttatgagattaattcttgaagtatagaaatcactaaagtaactttttcctctttaaataaagttttttttatatacataattagagatttaaac

SEQ ID NO: 101822 - DNA, 230 bp, Glycine max
ctctcatttcagagataggtgaatttactcatgatagttggaggtgggacatgaagtgtaggaggaacttatttgatcatgaaagtgatttagctgtgcagtttatggaggaaatcagttctattcctattcagatcattgtcctattctaattaaagctaaaaatgtggattggggtcctaaaccttttaggatattaaactgctggctaacagataattctttcaaag

SEQ ID NO: 101823 - DNA, 234 bp, Glycine max
gatggggttcttcagcatcacaaataacggtttaactagaagacattctgagaaattgcatacttaataaatataaatgaatttgatgcttggttttagagatctagtctaccaagtatgaaacaattatcatgcatttggaccggtccatgacaattgtctgacttgtgctcaagatttggaatttagaccatatttatttgacctgaagcacttccaaaactctatccttct

SEQ ID NO: 101824 - DNA, 122 bp, Glycine max
agacatcacattcaataaacatggcaatggcatttccgtccgtaacctctgtaactgtggagaacgtgacattccctcccaccgtgaagcctccctgctcccccaacaccttcttcctcgcc

SEQ ID NO: 101825 - DNA, 231 bp, Glycine max
tctccaataaaaaataagtaaagaggggcaactgtcataccctaatttcatccggggaccattgtttggtggcatgcaaccttcgcttgaccacctcgaggtacttaacacccgtcgttaggtaatccgtcaagtttctcaacattctgaaaagaaaatgtgtatcattacgaaatttgtaaagtttcgggaaggaatcagcaaaaaaacacaaaagggatgtatttagta

SEQ ID NO: 101826 - DNA, 254 bp, Glycine max
cgacagaaggggacatggaaaacagagatggatgactccattcatgaagaaaatattcgaaaaccggaggtatgtcaaggccctattgctgaccaagaaattggaaagacagaaactgactgcaaagttggtgaaaagaaattggaaaaggtgtgtgtggaaaatccaagggataacaggggaaaaggagcttctgaaatgtcccaaggagaagcagagcattcaggaaaggtggcttgcactgcaacaaattt

SEQ ID NO: 101827 - DNA, 231 bp, Glycine max
ggtaagcggtcaacacaagaaaattactatccctggaaagaaaatgcagaccgtggcagaacgatttgaagaagctttagggacatcctctgttatgactgaagaccatggcagaacgatttgaagaagctttagggacatcctctgttatcactgaagggacacatgttggagcacttaattcattgagacctggaatatttggaaaactacagcagatgatgctgaaag

SEQ ID NO: 101828 - DNA, 100 bp, Glycine max
cagagaaggaaattgaagcatcaaactcgaagatgctatcatgtttaacaactgcagaagaacttagaagggagattgaggaggccaacgaggagcaagt

SEQ ID NO: 101829 - DNA, 230 bp, Glycine max
ggagaagcaatgattgtgttatggtaatcgtacgtaatagcatctattcaatggcatttttcattgttgctgtgtaaatggaagcagttgttattgaacgatttttccaagtatatcagatatttgctggggattaagtgaaaaagactcaatggtaaaaccaaaagtgtctactcaaccaaaaatatgctacaggcctattcgaccttctgacctggacattttagagc

SEQ ID NO: 101830 - DNA, 213 bp, Glycine max
gaaggaaggaagagagcaccaaggcaattagtcatgccatatttgttatctttatactctctgtgagtgcaagatgttgtggacaagaagaccttgataatgatatattagctcctatggagaaagcagagcaggaagctctatactccaccattcaaggctttgttggtgattcctggaatggctcagatctctatccagatccttgtggtt

SEQ ID NO: 101831 - DNA, 221 bp, Glycine max
gggaggagattgggcaatgacgtcacgtcgaatggggtcccgcaacccactaataaaacaatcaagcaaggccggttcagtcaatccctcgacccgattagcaagtgtcatgaatttggtgtagtaatccgccacagaattggtttgggataatttgaacaactgggcccttgggctatcaaattgggatgggccaaattgtttctcaattgcttgcgcaa

SEQ ID NO: 101832 - DNA, 241 bp, Glycine max
ggtttaactgctgggttgttagatttccgcacatctgaagggctaatatggaaaaaaaaataaaggcaaattattgaaggcttgacaactattttaatttttctttgactggtaataatgcttgtgcctggtttcctactgattttcatgaacagtttgtgcctggaagttcatcagaagtacttatcacttcttctgattctcggattcgacttgttgatggtattgaattagttcataa

SEQ ID NO: 101833 - DNA, 223 bp, Glycine max
gagagaatcatggatatacctaaacaaacacttggtagtttggccatggtaatattactctttgctgggattattttggtgtaccactggaactcttccttctccaacgaattcgttctgacggtaaaggaaccactttgcaagcaatcatatcttaccactcccaatattgaagcaaatggagatggccttgacactgctttggccaaagcctccatgggaa

SEQ ID NO: 101834 - DNA, 230 bp, Glycine max
gatataccattatttaaatgcattgatgattgttatgtgagcctattgtattatttattttgatcttttcagttgttgcttctatatctactaatctgaattcaattccgttcgtaatggtacaaattttaaggactggaaagagaacatgcaaattgttcttggctgcatggatctaaaccttgcattaaggagtgagaaactccctactcctacgaattccagtacct

SEQ ID NO: 101835 - DNA, 240 bp, Glycine max
gcttcagatctattggtatattccaacattaaaactggccaatatatatgagaattgagaactccaagttatttaatcttcttgtgatacacaatttgattctaacataaattagacctcttcttgtgttactctttagacactccactaatccaacttaagtcattgtacaagcacaaatggattttctgcggtgcttgctattggttattattcttccgttgtgttattctattgatg

SEQ ID NO: 101836 - DNA, 239 bp, Glycine max
ggcactgtgaatcacagaatccccgttagcactctcgtctcgacgattccctgtgatctctcagtcttctcttgctgtggttcagacttcagagcaggatccaaaagccttggtcaagactcattcatgtctgttcctaatgaggaaaacttgttatattcccagcttttttattttttcttggatctccttgattccatcatagtcgacgtggcatcagagtgtcacagagtagcaag

SEQ ID NO: 101837 - DNA, 242 bp, Glycine max
gggaatcgaattgaggaagtgaaaaggtgggccagtctcaagtggcagaatgattcttcaactacatctcccttgtgtggaagagagcgagagaagaaacgcaagaattttgatagggattgtgaattagatagtacgattgtggttgactattcgccaacaccaaaagcttcttggtcacctgcataccataaaatgtttgttgacttatgcatcgaagaaacattgaaggggaacaagtc

SEQ ID NO: 101838 - DNA, 262 bp, Glycine max
acggctgcgacagaagggacccttggcctactcctgagtagtttagagccattgttgcatggccaagagataggcctattttttaggaggaggcaggtcctgcagatgcttaatgagctgcccaagtagatagaagaagagcaaaggaagatgaagacatggtggatcttgttgattatttcatgggaggaaatggagcttcccagccatgatcttcaaaaatttgtgacttgtctttattttcatttatcgctttcactcc

SEQ ID NO: 101839 - DNA, 242 bp, Glycine max
gtctgtgtgataggaaagaacacttggtgagaaatcatttgttaggatccctgaaactggttctgacttttgagggataaagataagaaaaacaaagaaaggaatggaaaaagaatgtttcggcagcatttgtaaaattatagataaataacgtaaggagaagattctccttccaaaggtttccccatgccatcctaggaaacacgcagagtgaaaaccggtagcagaaaactggtttgaac

SEQ ID NO: 101840 - DNA, 244 bp, Glycine max
ccgtatgcatacattcacattctctccctttttgattcgcgttatcaagtaaattattttggtatcatcaaaatttgcatgattcacaaaatcaaacaatgaataaccaaaagccaaatttacttggtaataagcaatatgtacgaggctaattccttcatcttagcacctccattattttaaatcatcaacatgtcccttaaaatatctctttaatttttcggttcttagtgacatcaatata

SEQ ID NO: 101841 - DNA, 235 bp, Glycine max
ttccccgatgattccagcagctgtctgtcaaatggaaaaaagaagggaaaatggagtaaatcaataacaacattgattcaatcctagtacaaattataccaaaaataatgccttccaacatgatacccaaatatttcattttagttacaagttacaaattacaactaacaaaagcgaatgattttcaatagtaaaaaaacagaaacaagatttagcaccaaataagcagagaacg

SEQ ID NO: 101842 - DNA, 237 bp, Glycine max
gaaaaaaaaaagagaaaaggatctgcaacgcattttgtatctgaaagaaaaagagggttctcatttcgcaaccatcggccgcacttactcttgttctcaagggattcgattttctctgcactcacttctagggtttcctccgcgctatcagcaatcatggccgacgaaacaccaaatgagatgaaggaggaggttccagaaattgttccttttgatcctaccaagaagaagaagaag

SEQ ID NO: 101843 - DNA, 234 bp, Glycine max
caacccatatcccatataaaagctggctctattctgaatcatggttggtgcagttcaagtatacactatacaaaataaaatggctggctaagtttttcaactttaaaaagtggaaaggataatgacaaaaaagccacaaggtaagcaaatcatgttaaaatagagatcgcatgcattcaaagcacataacctacaacaaccagggcataacatataattccagaagaaagtaac

SEQ ID NO: 101844 - DNA, 266 bp, Glycine max
tcccaaatacaataaaggaagatggcaaaatgtttgatgaagagacacctaacaatagagctgacccagtcttaatttgtttccatgctcattttctttgtttttgttaaaaaattgtgccacatacctaacagatgagccattgaataatatatgggaaaaaccatattgcatttgaccagttattcagaaaaaagagagatttaaaacaaagatagattatagaaaaaagaaatgtatatataagtaaatggtccataagatag

SEQ ID NO: 101845 - DNA, 198 bp, Glycine max
actgagtgagacaaaaaaaaaaaaaaaaaaaaaaaaaaaaaaggggccgcggaatattaaccccgcggccccgggaataattccgggacgggaccctgagggggaccaactttccccaaaaggggtcgttataaacgcttggggaaacaagggacaaagtggttccccgggcgaaattttaccccccaaagattccaa

SEQ ID NO: 101846 - DNA, 267 bp, Glycine max
agcatcaattaattaaactcttttcaaaattcttgagattgttatcattcgattttgccaaatattttttttttatatagatcacaagaaacaaacttactaaaatatggtagaactactggattttgtcggatatgttgatggcttaatttagtaccttgaaaatttatttatttaatatattttactttaacgttataattcatataaagtattaacatattataccagaataagtattaacatacaaaattagattgatggtaa

SEQ ID NO: 101847 - DNA, 294 bp, Glycine max
ggctgcgagacgacagaagggatattacactaattctttttaatgttaaaaatattacatttatatctcttctaagagatgttgtaaacattaaataaagagtattgtgagactaaaaatctcaaatgtaatttacttggttataggaccaccactaacattttttctctccaatggaagcatagaataaagtaatatactgttaactaaaattatgaccgagcgagtacattgtgtatctttaagaaaacattagtcgaattatttgtttgtttaccctaattttactgagat

SEQ ID NO: 101848 - DNA, 266 bp, Glycine max
gagcggccgcttttgttagttttcttctttacgttgcgtccgatatcccttatcccttttgcatgggccgaactaaaaattttggagaccttcatctattagaagtcgccatgattttacactgggaccacattgcgataaccgtatctggatcactcattcatcccttcttcactcttccattaccagtggacactcgattggatcctctatcgagcttcgaatccacatttcattcggttggtcccccgctgaaaaatgggctt

SEQ ID NO: 101849 - DNA, 256 bp, Glycine max
cctccaaaatctggcgaaattgatcaatttttccctgcttgaagtactccctctgcacacatacatgatattagaagtccagttgagttcaattattatcaaagcaaagaaaacaaaaacagataatatgcaatctgtgcatttaaatagggaatacaatatgtctgtataaaaatacacttactcaatcataaatgagtaacagtgtgtttgggttaccattttcccaaacttaaccagcattttttttaaaaac

SEQ ID NO: 101850 - DNA, 243 bp, Glycine max
tatatacctcatgatataaagcacaagtttttgtagagaacaacatggaggttggcaagtaatgggaaataacatccagtgggatatcctgagagctccaccagtagatacccctccatggaatctacacgtgtctgattgggtacaagacttaaaaccagaggatcatattgagatcccgtaagccgataatagaaagtacaccatatggtatggttcttgccatattgccttcttgttgtc

SEQ ID NO: 101851 - DNA, 275 bp, Glycine max
atattgcgtagtttagttcctgaatcttatgggaaaaaaagtgttttaagttccttctcacgatatgaagttaaattacgtgtaaaaattaagaaataaatacatggattaaaaacatctttttatgaagttcagagataaaattgtatgatatgaaaataaaatgaaacggtatgaattcttttttctctactttttgtatagggaaatagtagtgtgtgagtatcttgaaataaggtgtaaatgtatgatttgcttaaaaaaaggtgtaaatg

SEQ ID NO: 101852 - DNA, 252 bp, Glycine max
tatctttacattagcgaagagttgcagccagcctatgaagaccgagtaagatatataagtagtggtgtgaatagttccttcttcaagacacgaaagattgcatgtggaggagaatggttgatgactgaaacctaaataattggtgattgtgagagaactaagatttggagtagaaaacaattttttgttgaatggtgtccaagatcttcaggtctttcaggttcaaaatggaaaggttagaattagatatga

SEQ ID NO: 101853 - DNA, 257 bp, Glycine max
ggctgtcaaactttctttttgtttcttttctgttaatttcaaagaatgatgatgttgttgttgttctcttccgttttcctttttctatttccctgcctagaaggaacttcattataaactaatcaattaaaattaaaacccggaaaaagtgcatcgcttgtgtgtgatgttttgaatcgtgcatgcttttggggttggaagagtgtgtgcaatgcagaaactgagattggtgctgtgagaggaaaagagaaacgatg

SEQ ID NO: 101854 - DNA, 156 bp, Glycine max
cacggctgcgagcgacgacatgagggtctcattgtccggctcaacggcatgagacagatgagcgactcggggtcctattgtcgaggccaaactccatcggggatcataactcacgcgcgctccattagtccggatgattggtctccctgatatctc

SEQ ID NO: 101855 - DNA, 259 bp, Glycine max
tctggaggtaacaaagaggagtagctgtgcagagaagcctagggttctacatttttagagagactagtgagtgttagagtgattgtgaggtgctaagaagaggatgagggatgccctttcttgtgtaagcaacaattattttgtactctctatctcatttgtgttagggtttccttgtatggctggctaaaaaccctagttggggatttctaatgaacagttgatgtatttacttttcatatctaattaattgtgtttt

SEQ ID NO: 101856 - DNA, 261 bp, Glycine max
ggaagaaaggcagagttattgccattgcctctgcctcttgcaacaccaaactgatacacacttaataatattatagtaaaaattagccaccaaagtacactaaccccttttttcatacaactcaataggtaattgcttctttcttactattccttatgctttcttctgcttgaaaaatgaaaatctcatccattttttttataaagggtccttttgtgttgcaaaagggttcatggtgatcgatctttttatgtaatataa

SEQ ID NO: 101857 - DNA, 263 bp, Glycine max
tctcattaaaaggatcaatgaaatgtgccagatgattgaattggaatcctattatctaccccaaattctaaagaggaaaataactcacgtgcactccattaatccaaatgttaattctcccttatatctattgaaacaaacaaacaccaattgaaccattaggactatccaagtgataggaggcttgagataatatacgtgagatcataagttcaaactttaatacgatcattatacacaaacgaatggacactagttatctc

SEQ ID NO: 101858 - DNA, 239 bp, Glycine max
catcatattatgcgtgacatgctacaccatttgaatgacagttttgagcaaaagataaagtgtgtttagaaacgtggtggaccatcttgagaaaacgtaaccttaaaagttactacattcaattttcacacaatttaaattaaattaaattccgcaaacaaggttacactgcagtgcaaggaattgctgatcgtgaccataatacaagcatatgttaaaatttctctagaagctgacca

SEQ ID NO: 101859 - DNA, 260 bp, Glycine max
ctgcccaatgcatgaggctcctgaagaggtctaaggtgggtagatatttgcagcctaaccccacacccaaggcaacagccttaccattgggcaaggcttctaagtcacagcaactcattcttttttcccaccctctgttctgctaaaaatgtagagcttttttggggtagacgttttttttcaagtctaccctaaaaatgatgcagtagcaggatagaccaacaaaatctccaaaatacccaaaagaaaaggtctacgct

SEQ ID NO: 101860 - DNA, 252 bp, Glycine max
tcccgaaatacccatatagtctgaatgattgaatttattcctttataattctaattctttcaaaggttgtaataaaaaaaagtaaactgaggtttacgtattcctgttctgaatgattgtttatgctgcagtagtcttgtagtcctgtactccagtattggtcttgctcttctatcttattcctgtgatagtcttgattttaaaagatgcaatcatcttatatggtgacttaatgtttctcatgcagcggaa

SEQ ID NO: 101861 - DNA, 260 bp, Glycine max
atctcctcctccacttatatactaagtacaataacaatcacaagaatatgatctactatatatcattataaaatttggacctaacttaaacccaaaaaatctaactcaactccacttatatattctgttttagcattagtcaatgtgagattttaaaaaaatgcctcaagcttattaaataagaagaaagagacaagcagcagattaatacttgtagaattgcatcgttgaatacaagacttccggatgatgtttcagat

SEQ ID NO: 101862 - DNA, 261 bp, Glycine max
ggcacatagtaagttgtgattcagcaaacaaagatacagacacagattgttatcccaacgttttatcctttcagttacagctttcagctcaccgaactaactcaactcatggcggtgctcatccgttgctcttgtttcctcactacgccctcgcttctcacaacctcaattctacgccaacaacaccaaacccgtactcccaggaaaattagcttgtctttctctaaaacgggacaagggtgttccacactttgtagacac

SEQ ID NO: 101863 - DNA, 255 bp, Glycine max
ggagttacgaaatcgcagttccagcagagcagcaccactaccatttctcagttttgatcgaactcattcttttcctcgaccacaatgctctctgcatcaggttcccggatcggatcgctcaacccgatctcgaaccgctctaacaacaccgcctgcgggtcgtcgtcttcggcctcggaagcttctggagatccgaagctgcgttcggttgattaccgggcgttgttcgcaccaccgtctgctacgacggcggat

SEQ ID NO: 101864 - DNA, 212 bp, Glycine max
cacagcgatccgctgcgagacgacgacgaccacagaacagggggaagcacgctcgaaacatcgtgcatcataaggacgacggtgacaagcgacagcattcgacctgacagctcctgaggacaagatgaagtgcgttgagataacggcgtggaccggcttgagcgcacgtgaccttaacagtgactacaggcaatcttcacacaattggacac

SEQ ID NO: 101865 - DNA, 284 bp, Glycine max
acggcgcgagaagacgacagatgggcactaccacaatcccatacccctctccttatttcttcctcagtgaagatgtccaccagcaagttattttcatgttgcccaattaacaaatttaattcttatttcccaggtgagattcatttaccactatgattaatcttagatggcagtgtgagcagccaaccaaaattaaatgctatactagatagcagatctcagagtggctgccacaccaaagcatttgctagaatgaaaatactctgaaaatattaagaacctac

SEQ ID NO: 101866 - DNA, 255 bp, Glycine max
ctatgcaatattctcagggaaggaaacaaattgaatctgagttatcctacagtaatacacggtccaacacaccagatgaatttcaagcaaatacttttgtgaactggatgacttatggatagatactttgccattgaactttgcatatgatctctttcattaatatataattgacatttttttgttggcttggtttgaaaatgcttaatagaagaaactagagagaatgaaccaggtacagaaaaagaatcagac

SEQ ID NO: 101867 - DNA, 256 bp, Glycine max
gtgattccaagatcaatgaacgtgagtcgtttggttggactcaggtcactgttgagcacatagcaaagacagctcaccaagatctttaaacacaatcactgccagcatatgtcctaagcaaggtgaactaccactgtctgaaaggattaccaaccctcattaacttgcattaaggccattgattctcatgataattgttcaccccctcaatttgtacatttcagttgtggtgataataattgttggtttagtagat

SEQ ID NO: 101868 - DNA, 264 bp, Glycine max
gatgtgcccatgtaacaccctctactaccacctagatttatttataaaattaggacaagtagaatataatgtttttgtttttttttaaaaattttcttataaaataagatgatatcatataacttcaaatgttttaaaagtcatcgcatagacaaataatactagtttaaatcgcattggctctccaaaggtcatttaaaatccataactaaactattacaataaaaagaagtccaaagaagaaataaacatgagtctagtcct

SEQ ID NO: 101869 - DNA, 290 bp, Glycine max
tttcttttttctatgtaggtggatctagcagccgtatagattctgttagcagggttgaaggtaattttaattttattttcctctggattgtgagaatttatggcatggtcccagagcatccaaacaaaacaaaactaagggggtctatctagcttagtatgtgtgagatattgtaaactttctgtcacgtgtctttgattcattacaaaaagagcttccaaacaaaacaaaaccaagctcttcgaacgaacaccttattacatgcttctagaccactatggttttgacta

SEQ ID NO: 101870 - DNA, 211 bp, Glycine max
gcctggccaggagtccagccttctcctttgaggggaggtgaggcttctacagcccaggagcctcagccagagctagaggttgctcatgaggccactccagaggcgactccacaggtttcacatgctatttcacctgttgtggaggtctctgagggtgaagaaggcgccgatgacatcgactatgcagtagatctataggcagtgcagagta

SEQ ID NO: 101871 - DNA, 256 bp, Glycine max
acaagcacatattatgcatgaaatgacttagttcacagatccatgattagtaatattcagaatttctgtttgatctattcaaatttccccatcctatataattaacacattagttcaggttcctagtttctaaatgacgcaccttcatctatgattaggtccaggttacatctatcacaacatcaaatgagtagtcacaatattaacttttcacaattatacttgttcagacactccccgctcttaacactttaaa

SEQ ID NO: 101872 - DNA, 252 bp, Glycine max
gagacaaaattttgtttgagaaattgatgattatctgaatgcgtgcatggtttggtcatgattttgcagtcagaaatcctcacgagataccaccaccaaccccatgacctcaactacaacatcgccagggtcagggacagtgacaggaacaggatccgaaggggcagtggtgtacacgggtgcagacaacggcgttgtgtataatacagttacgggttccgggtcaagttcagtaaccggaggagaaacaat

SEQ ID NO: 101873 - DNA, 255 bp, Glycine max
ggctctgtgccagttaacaagtcaactcaggttgaaaagcagatggagcaaatacagattaaaccaaatgttgaaatccgtctcaatgatttgaagcttgtgcttggaccagagttgaagatagtttatcctttgattcttaattttggtgtaagtggagagcttgagttaaatggtcaggcccatcccaaatggataaaacctagaggcatactgtcatttgagaacggtgaagttgatctagttgcgacacag

SEQ ID NO: 101874 - DNA, 252 bp, Glycine max
atccttcttgttcttgtttcattgtaagaggataattgagttgtgttggtaatagtagctttggaagtggagaagaatagagagaacgatgatattataaaaaagaagctcaaatgatgatgagctttcatggtgaattttgtggacttctctgcttattatctccttatgatcatccacccaataatacatcgctggtttttgtttctgcaaattccttagccggaaagacaaacaaaaaagaaaataaag

SEQ ID NO: 101875 - DNA, 250 bp, Glycine max
aagtctatttcattaatctacataataaatatttatattaaagattaatataaattacgaaaaatcaaattttaattttaattagaaataatttcaaaagcacacaaaaaattacatctaagtattccatcagacatttgatttgtctcaactacttgcattagattgttgtcccgttgggcgcttttgatttcatcgaactccgctaaacctagtttggtgaattctccttaaacttgatgagttaggg

SEQ ID NO: 101876 - DNA, 249 bp, Glycine max
tatatctgatttctactgaacattgtatatacgggcttagatggtttctattgttttggtgacaactcaggagacatgtttctgtaaaagctagtatcaagctcaagcaacataaacagttgatagtttctgtaattctgtaaatattgacaacatgaaaagggcacaggaaacgttcttcttactttttttctattggcatgtttaatttaggttttgcaaattatagtttgatctaatggaaaagac

SEQ ID NO: 101877 - DNA, 256 bp, Glycine max
agaccctatgttaaatgttttattaatattgacttagtactgatagttgataatctacttttgaaattcccattttggaaataatgttcgatttttagcatagaatatctgaaatagtttgataagaccaattgggataaggaaatatagatgcatctataattatctattaagctctgattgtaatttgcatcttccaattttctatattaaagtgcaacagaatagaggctttgcttcttggttaataatgacg

SEQ ID NO: 101878 - DNA, 245 bp, Glycine max
cttacctctacatccttccgttgataccatttccctttcagcatgaactcctgatccaataaatcacttttggggtcatattcagctctgcatccaaaataaaagatatgatcacaataatttaaagttgaagttaaatttgaaacaaaaatagcgcaaataaatcagctaggcatgtactgatgtgcatgataccagtcaattcatcttaaggccataattgcagatagatgacttgaagtaca

SEQ ID NO: 101879 - DNA, 242 bp, Glycine max
gaccctaacaggagagataacatagatagttgactactggtataatgctattatttcttgggtggcattgctactaagacctagcagttcattattgtcagcaatcatcattattcattacagattaaatcaagtttcccctcagtcatcgaaaattgattatccaaagcaatcttctagttcaaaatccaaaaatagataacacaggaaatcttaagtataagatccaaaaaatgaaaaga

SEQ ID NO: 101880 - DNA, 245 bp, Glycine max
gggtgcacttacattgcctccgcgcaaactgctatcctgcgctgtgctgggaagacaacctctttcatggctcgaaagaaggtcttgtctaattagatctttgagcaacctcgatcctgcagagcatctctaaactagaaatggatggtggtggctacaacttaacaacaacctctttgagcagttcaatggagcaagtgatgagacccaaatcaccattgccgggcttagttgattttcatggg

SEQ ID NO: 101881 - DNA, 248 bp, Glycine max
gatacccgacggtatagggatgagacaataaacttaaatccgtcagttatcgggtacgagtatgaggatatgttggagagtcgggataaaggattgaggagacaatacccatactcgtcccgtcccattgccatggtctatttttgtttctataagtcaatttttcatttcgtttgctcttaattcaaacaaaaaagaatggttatccatattattctttttctcgactttcttttttccaaatgtat

SEQ ID NO: 101882 - DNA, 244 bp, Glycine max
gccctgtctaatttagaggtcacgactttagtttaatcaagtaataagaactaagacgttactaattgtgctacacgacctacctgacaaaggctaacatgaaccacttatggaccacctttctaatccgtcaaattcatcttatccatacagtcatatgatgcaccctctccattatatttttttcttatttctccctctccctcctcctttctccaaccagtgacggcaaccctttttctaa

SEQ ID NO: 101883 - DNA, 240 bp, Glycine max
gggttcctggcaaagaagctactgccgtatttagatgcagctgagaatgagactgaggaaacatacacatttcagggacaattggaatctgaatcatctgatatgcaaaactcagttcctatactcgaaatggatagcatgaagacatgcattgaataggaggttgatcgcgtttacgagaggttacaagctcttgaaacagataagggatttctacaacactgcatgggttccaaacag

SEQ ID NO: 101884 - DNA, 246 bp, Glycine max
gcaatccatatgcattatacggaattcccaatccaaaaaacaatcagaaaaatagagaggtagggagcacgaccacttacgacggacacggcagtgaggttgtcactgacggggcaatgacaatggagggacagacagtgtggattcacggcatgacgacgaacagtagcagcaacgcgataaagagggaggctgagggagcaggctttttaaatttttgtactgaaagacattttcgccacttca

SEQ ID NO: 101885 - DNA, 213 bp, Glycine max
agagatacacataactatagtatactctccccactttcactttcacatatagactatatatcaaatatattagtcttgctgtattcatcggctaattgctgcagagactggctgctggagtgtataaccatccaattgttgcttttcaatcccattctcacatcaactatttgaatcaccagcagaactttaataatttggtaagactggtga

SEQ ID NO: 101886 - DNA, 246 bp, Glycine max
gagtacgggattactactcattagcgatagataaggataacgcggcactcttctcttttgttttgtcaattcggatatgtcttctgatagtgcaaaggaaaatgcatcagtagttgattcatcagtcactgaagggaggaatgacattggaaattcagatgatccagagagctcaggttacaagtttaatgaaaacattaatacaactagggcagataaagggggacattctcatggtcagatagg

SEQ ID NO: 101887 - DNA, 240 bp, Glycine max
gttcttggaattcacagatcccaaggtcaaacctcaacctcagaagcacttagagccaaagcaaaagcttataataataataatattaacatgtgtcatgaaccgttgctagcatcttcttctgtgtgctctcttggagcctccaacgacccaaaccttggtttcaggaaacatgaggacactgatgactcaacgtatttaagtgataatgatggagagcctgaagatatggtaaagcaa

SEQ ID NO: 101888 - DNA, 194 bp, Glycine max
acattggagtgccaccatagaaatattagcgtccctcaggcatcggcggaacaaggtcaacagactatacaaagcaagagaagaggtttcatttctctattttaccctttgcccatgtttccatattttatcctttggcaatgtaatgtaatcagatacaaatactagacagcaagaagccagcatagtgcata

SEQ ID NO: 101889 - DNA, 183 bp, Glycine max
cagcaaagtgactaaagatacggtcattcctggaggacagcattggcacatggagaactttgaaagcttaaaatggtgttccctcttcactattgttaagacaacagtggcttttgaagtaaatacactcatatgaaattaattaataattttactttttaagacaatatgtgttgtatgtga

SEQ ID NO: 101890 - DNA, 163 bp, Glycine max
tacggaacgacagaagggggggatttgaaattcaaaaggcaggcaggcaagtgtccgttgctcaacgattcgatttctgatttatttattatatttaaaaatgttgcaacggcctatataattgaattgaagagttttatcggcgaagagggactcatttgag

SEQ ID NO: 101891 - DNA, 207 bp, Glycine max
ctccccttctttttctttgtttgcagaggaaaaggaaaattactgggcggcaaaagagagaggaacttgaaaaagaggtatatatattgatacgcactgcacaatttgatggcaaattctaattgcgatgtagaatcaatggactctccatacacacacagcatgagaatagctcttaaatattggcttagttcctaaaagcgaatt

SEQ ID NO: 101892 - DNA, 230 bp, Glycine max
atactttcatttttcagttttgttatacaactttttctgtagtatattatatataacatatctccagttcattttgtataattatatgtatgaatttttggtttgagtattgtagctgctatttgctggggaataggaaaacctgtgactgtggaagagatacaagtagaccctcccaaagccaccgaagttcgagttaagatgctttgtgccagtatatgctccacaga

SEQ ID NO: 101893 - DNA, 182 bp, Glycine max
aagctaagaggcggcttcattcatttaaaggaaatagtcttaagacatgggatgaggttatggagaaatttctgaagaaatattttcctgagtctaagactgcagaaggcaaagccaccatctcttattttcaccaatttcctgatgaatctttgagtgaggccttggaaagattctgtggt

SEQ ID NO: 101894 - DNA, 233 bp, Glycine max
aggttactacctacccattactgtaagggcttttatttttatgtgatctttgttactaatttgtgcttattaatttacatacatgcatctcgttttttatttttattgagatgaaaataaattggtataattgatcttcgggagtgctattttgatcgattctgagttatgctaaggagcgatcgtgttcataaaattgctgtgtgttgtctgtggctagggttagtggcgct

SEQ ID NO: 101895 - DNA, 232 bp, Glycine max
ggaaactgtaaggcctacgggtcggtggccccaaaccatcctctgctaagggacacagtagactgtgtgctgtgcaagagctgcataatatagggacataaattaccctccatccatcatttttgcaacttcttaacaaaacttaaattaatttcccctcctaccaaattatgcacagttcacaagaatatgaggaaaatgtattggtagaggggcaaggaaacagacaaaa

SEQ ID NO: 101896 - DNA, 229 bp, Glycine max
ggggtgcagtgtttagagtagaagggaacgtcataccttcacacgagattggacaaaacctaatcatttcaatattcttttcgtgtcttacattatacacacagcctaacattaggctggttttatgcgttgcttttcatgctatttaaattactaattaacaatttaatacgaatatttgaaccttcgcacccccagggttataaactattaactattattgaaattg

SEQ ID NO: 101897 - DNA, 161 bp, Glycine max
tagcagaagacgacagaaggggagaatcagaataaaggtcacttccaactttcatgccatctgcattgactatcctcctctctcgatgaggtcccaaaaacagacttataaaatcttcaaattaatgctgcaagaaacacgtactcaattatttccccaac

SEQ ID NO: 101898 - DNA, 210 bp, Glycine max
cttggaggtgagatgtatgattgaattttataagagtataataaatgaacacattattaaccatttttagactattataattaaaataatgtttccagtataaaaaaatatttctggctaccttactgcagaagattgttactgctaaatggaagactgctacagcagaagagaagaagccttatgaggggatataccatgcggggaaag

SEQ ID NO: 101899 - DNA, 229 bp, Glycine max
gggattcgttggaaaaaagtaagactattcggtgataacatgtctgcttgcttttttgggacggcttttttgttaagattttgggttgaaaaggttgaggaagatgcttatgcttgcaacttttttttaaacccattttagcaccaagtataaaaaacagttcttggtcttgtttccaagtgttgaggtaggtgataggggttttgagcatgtgagtgattcatgcctc

SEQ ID NO: 101900 - DNA, 147 bp, Glycine max
cagtattcaagtctagtatttctatcgggacttaattatggcattgtcgtttaattttattgcaatttatttaatgtgtactttgtctcaatcacgcgacaattacgaaaacctagctcttagtgaaataattacatgagatccctc

SEQ ID NO: 101901 - DNA, 262 bp, Glycine max
atgaacaagagcacaacataatgataaaagagaataaagaaaatgtcacggtaaaattgcacactcgatcaaatggcttaactctctaacaagtccccagtggagtcgccatctgtcgcaatgtgggccacaatgggacgacgaataaaatatttagataattaaataatttgttttccaaaaaatgaaaaacttgggaagtcgccaccaacatttatttaaggatgttaccatttttagaaaagactttagttttatgata

SEQ ID NO: 101902 - DNA, 231 bp, Glycine max
ctcccatgaacaaaactgctcaaaacaaaatgactcatttaacatggtttgaacttgattgaaatgtgtggtatgtgactcaaaatcactaaaggcacaaatgggaaggattctagtgatgttgtcataactgaattcagtaattataactaaattcagttgtcataactgaattggtcttagtaccaaagtatagtctttgttcctagagctagcaactagagtatatat

SEQ ID NO: 101903 - DNA, 174 bp, Glycine max
ttatataggttttcaaccccaaagcttacaaatctgatttaagtccaagcccataaatacaataaaatcttgacaagataagataagatttgatcaaataaaatctagataagataagataatatgggttgaaataatatctagatgagataaaatctggataagataattttg

SEQ ID NO: 101904 - DNA, 198 bp, Glycine max
gtggtgaaggaggtagcacagaggaagaggtggttgcggaagaggagggagaaagagaggaccttctcaatgttttttttttaactttaattaattttggggggtttaaactgacagaaattttaaattggttttagaacccaactttgaaattttttgagcacacaaaatccgttttacaaatttttaaccatcccc

SEQ ID NO: 101905 - DNA, 181 bp, Glycine max
gtgtgacacaagctaaagataaggacacgagttgctgaagattccctcatgccttgttcgcaatttttgttatgacaacctaggatttatttatcaattccattacttttattctctgaatatagtgcatgtacagctggccaatgattggcagccatattcctcagctgtattatgaatg

SEQ ID NO: 101906 - DNA, 212 bp, Glycine max
gacaactatgctattatgtttattattcagatagtcttttttttttgtattaaaaggggtgaaaaccaaaagaattccaaaatcataatttcaaaagaattccacaagagcaccttgctttcataggccgaaggtttctcaaaacccaaaacctcatcttccataataaaaatgtgtaatttgtgtaaaaaatatcatgtgaggtttcaacc

SEQ ID NO: 101907 - DNA, 136 bp, Glycine max
gcgggttatggacactaatgtctctccctctctcctactttctctcctcttctttgcaagagtcttagggcttgcagtggcagtgcttgtcctcatatgggcccttgccttcaaatccagcttcctcactacctca

SEQ ID NO: 101908 - DNA, 153 bp, Glycine max
gatgcgtcaagctagtgacgttaaagaagcgcttactggaagacaacccagcttttctttccctcctctatcttcatttttatttcttgcatgtagttaggacatcttgcttgtgattgtgatttatttcaacttgtttagtaatgaacaaaa

SEQ ID NO: 101909 - DNA, 134 bp, Glycine max
gtctcttgcaaaagccactttccctgccggctaacggcgtcagtctgtcatgcttgcgttgcatgtcctcgtgggtccctcctttccaagacaatattggtgtccaagaagaaaggcagcatgatcaggaatct

SEQ ID NO: 101910 - DNA, 235 bp, Glycine max
cacgtttttccattgtatacgcaaagcaagaaagtaaacaaatgacagagttaccagtttatattgttggaggtggataaaatgacgtcaaaggtgatgtttagttaggaaacaacaacttaggaaatatttgtgcagttaatttgaacatttatccgggtttctttaaaactggacatactatttggatatgggatggagattaaaaagaaatggagtacagttattgtcttat

SEQ ID NO: 101911 - DNA, 236 bp, Glycine max
ggacaaccaacgaagataaacaaccatagtggttttctctctttttgattgttttcccaacgtggtgaccaggttgttcccttaagttgcaaaaatgtttgttgggcccagtttgtaaaatcccggggcagctacagctaggatcatcaaaagcacccctttccccctatgatgatttcgttcccggaaagggagaactcagatcggattatccaccgatggggattttgcccgtg

SEQ ID NO: 101912 - DNA, 238 bp, Glycine max
ctcgagccgaaagacgacagaagggggcagaagaagcgagagagagagaagaaagaatcaagacttagtcaaagtgtctgtgactgtcacacacagtctttaagatctggaagcgcttctcacttgcccacaacaacaattcctctcaatttcaaaattttcagcttcaaaataataacaccctaagagaggggttccaagcatatgagaagcgcaaagatgttcacggttttgatgt

SEQ ID NO: 101913 - DNA, 151 bp, Glycine max
gtaccttaattgggtcttggcttaaatatggttgttattatattctctagcacaattttcaacctacctacaattgcatccactatgtttcaactccctctaataaacccaataataactgtcatagaaaaatgtgataaggaaataattg

SEQ ID NO: 101914 - DNA, 213 bp, Glycine max
taccttctgtaatatatttgtgtcatatttttggtaatacaggaagatctgataaatcttgaaaattacacgggcaaggatcttaaagtacgaatcaaagtagcagcaaaggagtaattcaaaattcattccttactactaatatttattataaggattaaacaagaggcaattacttagtaaattcgagaacatgtccaaatacttgaacgc

SEQ ID NO: 101915 - DNA, 249 bp, Glycine max
acggtccttcgacctcgacacaactctcaccaccaccatgcctaaactccttgcaccgccattgatttttgatctccagtaaatggaaaatggaacatgttcatcaaactgaatctcagtattggaagcaacaccaccactttgtgacactaactttttttttgttacatgtatgtgattgatctatctctgaatttgattatattaagatttaattaagtttttcatacttgaaatatgggtcgtttc

SEQ ID NO: 101916 - DNA, 250 bp, Glycine max
cttgttcaacaagctccagcagtggcaatatacaacagcttcaaaactccactttaacatttggtgctgcaagacctttgcctagccttttgcccatgactgacagataagatccctatggttttaaatcgggtgatttacttgatcaagtatgctttaggaatcttgggtttgttggcaaagatagctgcattccaagtaggtttgtagaaaatgaaattgagtcatctgtaagtgattttacccaaat

SEQ ID NO: 101917 - DNA, 157 bp, Glycine max
cggagacacaaactcacacactttgtactctccgtccttccttcttcgatccagatctctctccttctccctcaaatggcttcccttctgcaatgttccatgcccctcgtctctctttccaatcgagctctggtacccggtaccaggatctccaacc

SEQ ID NO: 101918 - DNA, 249 bp, Glycine max
actcctgatcacattgttgataaagttaataggatgggaattcctttgtccatagtgtgggtgatcatgcttctagtggtcggtttggttcatggggtgaacttgttcttgcgggtatagaagtttgtaaagaagtggaagcagaagctgctgcatggctaaaagtcacagctctagtgggcacagatgtttgtaaagcaagtggaaccagaagctgctgcatggctaaaagtcatggctcgcgagtta

SEQ ID NO: 101919 - DNA, 222 bp, Glycine max
atatatttagtagtattgctctaataaaaaagataatatactaattaatatataatatgagtaaagtaaaatttaatagaaaatatttgatatattagaaaattaaataaccctaacaatacatctatgtgtataaccacctgcaaagtgtgtcgagaatttaagcttaattggtattgaggcattgtgtcaagtatcagtttttattacaactctaataaa

SEQ ID NO: 101920 - DNA, 242 bp, Glycine max
gatctatgctagcaagaagaagataagggaaaaggaaaaggagagggagagtgaggctagcttgttttggaaaatagcacctgtggagaacactgagaagaaagcgatgaggccttcgcatttcaggtatttccatagagggcagggaacgaagccgtccgagggggatttcttggttatgaagctcaagaagaagaagtgggctgagcacgaaatgctgtggaaaaattttgacatgggga

SEQ ID NO: 101921 - DNA, 240 bp, Glycine max
aggtatcccaatctgttctaagcaaaggcacaaatatgaaactcggttaaacaactggatttcatgtgtaaattggaattatcacaaggatacaaaatgaatagaacaaaatgcctctggtaatagtcaagtagtctttcatcaccactatgcctagctatgacagcacccagagcacaaacaccagcacgcccacagataaatgtcactttgctgcaactcaattaaacaaaaataatt

SEQ ID NO: 101922 - DNA, 216 bp, Glycine max
ggggtgcctgtaatcgaaagagagaccaaaaaggcagttggtaatataagtttgcgagacgttcaattcttgctaactgcaccagaaacctatcatgattatagaggtattacagtaaagaacttcctgactgaggttagaagctacttggagaagaataaaaatgcatccccaatgttaagtgaatatgtcacatgcaaaaaggactgcaccatc

SEQ ID NO: 101923 - DNA, 260 bp, Glycine max
tcggtcatttactttgcaagtcatcttttaatgagtttgaaagtaaataagcgaaaccaaagttaaaatcaacacataaacaagcttttatccataaaaattgcttgaatctgttcaaaggtccaatgccttaatggtctctttcacttttattggttaaaatgatactttccaaagtttaaagatcaacctgcgcgtaagtttcttgctttttaagaactacgtgggtctgagttcctcaccgcacttgaggatacgta

SEQ ID NO: 101924 - DNA, 254 bp, Glycine max
gatgatcagtctgaattagagaacaataggtttgggaaaaataaaacaatatggaagtgcatgagaatggtgggtctcctaggcagagccagagcctctcagagttgcagattgtgactatgatgagcgtgccacccctcaagatgaccgaaccacgagcagttcgcaaagttttggtgagtgaggacaacacaagggccattcatggatgctaccaagtagttatgtattatgagaatttgaaggagaaggag

SEQ ID NO: 101925 - DNA, 258 bp, Glycine max
acttttaataaacatcactgttttttcaaaaagatgacgtagaacagaagtaaaacaggtaatttatttaaaatggggaaattcttgatatattatgaatataagtttatttttcattttctttgtttactcaattagatactaaagagatattttattcatttttcttattagcaaggcctattatattcccatatttatctacaaattggttggtaattaattggcttggttgggttgggttgagttgagttggga

SEQ ID NO: 101926 - DNA, 109 bp, Glycine max
taggggcttcaacatggtcaccaaaaaccagaaccggcctccagtatcactcacatccacaccagcagctccttcgaattcaaagaatttggagggtggtgtgctcctc

SEQ ID NO: 101927 - DNA, 221 bp, Glycine max
gacataacatctgacattgtggaatgtgaagtgaaaggaaaagaaaaaatgatccctgcatcaaaccctaatcctaaaaatgtgtacctcatcagaggtctgtaagtggagtttccctaccaacctatggatctcagtttgtgtttatgggtattgtgatttccaccttaatctagctcagaaagaaggccattgtcgcacgttgcttgagtctccaaccg

SEQ ID NO: 101928 - DNA, 261 bp, Glycine max
gatgttagtcgctcatgcagactccttaggattccttttgaatccaacggtggtgtttgttgtataaattcttttgggatcaacccatgccatcatgttttagtgggattgatagacccatggtatcacttataatctgaagtcaggaaagtttcatttggtcatacaccaaagtgtaaccatccattgccatccttcaatggtacatgcaatcgggtccaaaggcttatatgttcttactgtgcaaaattgtcaaagttt

SEQ ID NO: 101929 - DNA, 259 bp, Glycine max
atctctactggaatttacttggcaatttaaaattcccagattttatgatttttaagtaatatttattcaaatccttggtgaatttccgagtgttattattatagtctattgaggaatgaggaatgctaaacagctacaagattgtgattatccacaatttaaaatgcattgatgtatatggtactatggttgtagattatactcccttcgtccctaaatataagactctttcaattaattcatgctccttaagaaaagt

SEQ ID NO: 101930 - DNA, 258 bp, Glycine max
accaagtgaaaaggaggagaaaaatgaatttactactaaacagaaagcagacgtgtaaacatcatttattttcagttcaccaatcaataacgtgtgattttgacccaaaccgtggactgtttaccaatctaattaacacgcatggcaatggtgcactcgtgtctataaatgaatgagaaatatgagaagtgagaacacatttcaaaacataaagtggtcaagtagcaataacagggaaagaacaaggtcaaaaaacca

SEQ ID NO: 101931 - DNA, 258 bp, Glycine max
taaagtaaagccttcattgaaagcaacttcagattcaggaaagccatcttcagcctttgtaaattctggttttcccagtaatttggacaacactaataaaaagaattcggataaccattttgaagattcaacaaaatctcgttctagagttatgcaggctcatttgcaacatttgagagcagatcatgcagaagttggatctcaaaacaaattggcagaaatgagcagtaaatatagaaatagtgaatctggggttag

SEQ ID NO: 101932 - DNA, 259 bp, Glycine max
agttgtaccactctaatattggtcttgcttgcatggaaagaaaaatagaaagataaaaaaacaagttttttcttttatttgattgaagatttgaaggggaaaaaaagaaaaaataattgacttgaaaaaacaaaattctttagctttaatttttttatttctctcccacttttcttcttctgcacaatcaatcatagtataaagggcaaaaaaatcgtcgaaggtttaaaatttaggcctaaaattggggatttttttt

SEQ ID NO: 101933 - DNA, 113 bp, Glycine max
ggctcctcctattgcgacgccatttcgaaagttaggtcatctagggttatttcaactctgatgcctaaatgcaggttgggtcaggtcgccctaaccaagtttcaactcaaccc

SEQ ID NO: 101934 - DNA, 277 bp, Glycine max
aacttttaatgatatcttacatgaaaattgaatctaaatctctttcataaaactcaaattatattatcaacttatagttttaggatataaatatgagagacagaaaaatacacaccttaacaagtgaagttttctaaacgtgaatttaatttaattctgaagcacctgattcttttcaataaaatgtttgcccaatcaaatcatcccagaagttatggacctcagcctcatacagttggctctgacaagagattagtggaaggactaatggacgaat

SEQ ID NO: 101935 - DNA, 233 bp, Glycine max
catgtaccaatgaattgttgttctgagtaatcacatcttggtctctttcaataagttctcaaaaaaaatatgattgaaattttttttttattaaaaatattattttcaaacaaaaattaatcatcgacaaaaactaataaatacttcaacttaatatcttgatgaaaaaaatttataccagatttgagatggtttgagcataacaagataagtttgaatgccttaagtaaaaa

SEQ ID NO: 101936 - DNA, 161 bp, Glycine max
ggatattcatgatcaaatggcaggtcttttagagagggttgagattgaactaacttcaaatactaatattgagatgctatcaagaaatccattacatctggtaaacttataagactaataatttcttgcaacgcggatcttttatattatactgaatctaa

SEQ ID NO: 101937 - DNA, 240 bp, Glycine max
catcttcacagcatcttctgatgactttaatgatctctgcagtgcttcacatcttcttaggtaggcataatctttacaatggaccacttctttggcagcttcaacagtagccttgatgttgttcaaatcagccttaaaagccttggaaatagcctttgtcctatctgccacatctttcttcactttctccaacattgacttcatctcctcctccctctggagaatgttttccctgcttga

SEQ ID NO: 101938 - DNA, 223 bp, Glycine max
ggagcccatgactaaatatgatcctgaagtagtcatggagttttatgcaaatgtctagcctattgaaaagggcgtcatggataagtgctccagagtgtggggccaatggattccctatgacatagatgctatcaaccaattcttagggcatccattgatcttagaagagggatagcgatgcgaatacacagagagaagaagccaatttttaggttttgatgaa

SEQ ID NO: 101939 - DNA, 224 bp, Glycine max
tccatcatgaacctcaattcacgactttcccattttcattaagttttattgatcgatatcttcaccactctcagtgttttatccttgatttagtctttggttcataactccatcacaaaggtcctatgttttattccaacttcaagtaattgcatcctccttgctttaggaacttagagtctcatgttcatggatttaaaatgtttacacttttaaaatggggg

SEQ ID NO: 101940 - DNA, 279 bp, Glycine max
cttgctattgtttgatgcttcaagcgtaaacttgtgaagcatgatttgatgacgcataagacaatttttaatatttgtatttatttgcatgtaatcaaaataattaggaatcatgatttgcattaagacacaaatgtcttttggcttaacacaactcttcttatattaattggcttcatgaaaaagtaatcattgtctctaaacgacattcattatgcatcttagtcatcgtttgaaactaggtgtttgttggagcatttaatgtaacatttaatgttt

SEQ ID NO: 101941 - DNA, 253 bp, Glycine max
atctcaccagaagcataaacaattagctaaaaagtaagaccacattgctttactgatgtctggaaagtagaggaggtggaagagaaaattgtgccatgtatggagaggttgcagctggttctagtaatgaaagtttttatataatctacaaaaatttgcaattgcttaatgtaacagaatacaccaccaatcaattatataagtagttgcacttctttgaatctttatgtcataacataaatttaagctcttc

SEQ ID NO: 101942 - DNA, 250 bp, Glycine max
cctccacacccacctgctctcagctcaaagttgaatctggggtggctggtttacccatctactcccccaaactcatggaagggagttgtaaccatcgaggattgggtcactttttttttccccttcaaattattaattattaatgttctacattcacgcttcacctgcttgctggttgaaagataaatatttatcttggtaaaaaaatgattaaagtatataaagtgtccagtgtcctcacttaaatcta

SEQ ID NO: 101943 - DNA, 250 bp, Glycine max
ctctaccaaaggcaagcataagtggtacaatagcataagtgcaagaagccataactgataaagccattgaatatgttgctgcactatacccatctaactaacagaaaacctaatgtatccttccaaaaagctgttttcttttattaaagtggtaacaaaatcctctaaagtgagcttgtccctgaagtatgggtgtatacaccattaaattttagtaagtaaagatcacgatgaactttaaaataaataa

SEQ ID NO: 101944 - DNA, 216 bp, Glycine max
gttgctaacacaagtaacagtgataagccagaagagaatgtggctgtcactcccagctgcactgaaagaaaacctacaaaacaagtattcttagacatatctattgatggcgaccctgttggtcgcgttactatagggctctatggagatgatctccctgcaggtgttgataggtttagtaagattgcaagtggtgctgctggtattctctacaga

SEQ ID NO: 101945 - DNA, 256 bp, Glycine max
cacgacagaagggatgggaaaaggttaataccttagtcaacacaaccttgctaaaagactatacaagtaaatatacattgtcgatgggttaagattggagggaactaccccaaatgggtcaacctccttgagtagacaactcaatgttttacatgtcagaggacacttgatatttccctttccatgggacacacggtgtttctcttcacataggacataagatgcccaccatgctaaaggacaattaatgttcgaa

SEQ ID NO: 101946 - DNA, 240 bp, Glycine max
cactcccttcagtttaatcttttggcgttgattttgtccattgatctcgtgcttgcatctatttactgcttgtggacttgtttggtgacccaaagtcactctccttgccaacaggcttggtttcaatttcatttttttggatctcctagaactttttgctgtttgaagcttcgaaatgttgtttagagaagtttgggacttgctaagtttgattgcttaccattaaatttccaacaggct

SEQ ID NO: 101947 - DNA, 129 bp, Glycine max
ggtctcgtggaagtgtaaagcaagcaaaaaccctatgcggcgcctgctttctttgttcgtgatgttgcatcagagatggacgtctcccaggtgaacgcacgtcgacttagttagtcaaaaattcatggg

SEQ ID NO: 101948 - DNA, 246 bp, Glycine max
aggatgagtatggcatggttacatattagtaagtgtaagcaaaagccatagggacttagtgtatctttctgtaatcaacgtatggtactgaatcaaggcactacgtactatttttctgcataattctaagtttataaggcttagtggtgactcgtaggtaaggtcggtactatgttagtcagggaatgataaggttgcactatagaacgtaacatgtgactagtacttaattttaaattaagtctt

SEQ ID NO: 101949 - DNA, 238 bp, Glycine max
ttatggatacagatgattatgctacagggctatatgcaggagatgatgcagatggtgaaaaattagccagaaaggttgggcctgagattatgaatcagttgactgaaggatttgaggagatgactagtagagttttaccatcgccattaggggacgagtttttggatgcactagacatcaattatgcaattgaatttgagccagaatatttggtggagtttgataatccagacattga

SEQ ID NO: 101950 - DNA, 239 bp, Glycine max
tccaccccctaacatggacccaaatctattgtccaggcccagttgtgtggtatttccctttcatcacctttacattgttttttgccactcagtcttcctcgatccttgtgttcacctgcttcttggcacctaaattctacatctcgcatattgtcatatagattttcacctcaaacttctcccctttactattttcatgaaagatcaccacgtcctcatggcaccctttgttgtctaaa

SEQ ID NO: 101951 - DNA, 241 bp, Glycine max
catgcagagacatcatggctatccaattttatcactttcaaggcactaaggttttttctgatgcccctgatgctcttttctgctctttctaattgacaatttttgctaattgagctattggtcggtcaggtgaaggttcagctcgaacgaaatttgtgtcttatctttacttctcttttatcttcaataaaagataagtaaagaggggcaactatcataccctaattttgttcggggacat

SEQ ID NO: 101952 - DNA, 243 bp, Glycine max
gtcctgcaagacatgaaagaaaaagacaaggttcacacttcagatactttgttgcacaaaattttaaagtacatcaacagaagaggggctaatgaaaaggcaagacaaagaggtccatgaagacatgcctgccaatttaatatggtgaaacggtgatcaccatatggtcagtgcttaaatagaagaaaataaaggattacaaatatacagatgtaacattatatccaatttgcctcatggcca

SEQ ID NO: 101953 - DNA, 211 bp, Glycine max
cagtatagtttacaatgtcatatctctcatgtttataggccattgggatgagttgcttctggctagtgcttctttggcaacatcatttgtcaatgctactggtttcaacgtgttggtaagttgacactattttctaattttatgttatagttttcccatttccagaatgtgagatgagatctatccatgcttgcatgtatatatatgcatg

SEQ ID NO: 101954 - DNA, 232 bp, Glycine max
gatggaaaagaaaagaaaggaaattaagaggggtaaacaccccctaagggaggaacacggtacctgagcagcaggtgatgaagacccaacaggggcatccagagatgcaaagtctcatcactagccagtagtgcctgtggttctcaaaagacagctgagggaagaaaggtggcttctcttagaacatgagaagtattggcggacagtgccttcgagttagcgccatgatgtc

SEQ ID NO: 101955 - DNA, 238 bp, Glycine max
gacccgtcaagcccaatgtaggttaaaagtagtcgtataaataaaaaaaataaattttctcacgacaagttttaacataacaaggtcctactaaaatcttatatttatcattatcttgaccaaatataattcatgaaatagacccttctaagtaatgtaatatgctggggtgttgtaagagatcattatggcggcttgtgcttgcaacctggggagatgttcagtggttcaggccgag

SEQ ID NO: 101956 - DNA, 263 bp, Glycine max
agacgacagaaggggggagcacaaactgagctttggtttcgtattaccattttctggttctgacttggtcgcaacattatgcgagcgtctttctctcctacagttttggtcctaatcctacaattataaatatcctttgcttcttccaaacaccttcttcttcttcttcttcttcttcttctatccattctcttctccacacgcttcacaacttctcttcttctgaatctgcatctgcatcttctttctattgaactttttct

SEQ ID NO: 101957 - DNA, 233 bp, Glycine max
ggtccttctcccaccgcaccccacacttccggcaccgtcggaactcagcaccgcacatctgcaccccacactcgtcttctcacaaccgtcaatcgcagtcacagcgcacagctctagttctctctcacaagctttctccagctttgcaactagttttgtctgactctggcatatatttttgttcttcagaagaatactaatggattcatcacaaagtgcggctcttgggggaa

SEQ ID NO: 101958 - DNA, 260 bp, Glycine max
acctatcattatcacacgtcaaattaattttcaagtattaattagtcttcagatgatatcaaacaaataattctacattaatagttcgattcttctacagtaaaattgttcagtatttggtgccacaaaccatttaatgacttgcataagtaaataatcatgcatcttatcacactaaatctgaccttactttgaaatttactttaccacatcaaatacaagagttggttggaactatgcaattccaagtttgagtttgt

SEQ ID NO: 101959 - DNA, 237 bp, Glycine max
gattacatgaattcgtagataacatgattttgaaacatttttaatgtttagtggttgaacctcacctaagaccaaatagcgaactaccacctgctcttagtaaaatgcatttattctaaaatgcaattgataaaaacatatttggtgtctttgctcttgagccatattctgattagaaaacaaaacacctaaacaggtaacaagaaacaattttgaaaccaaccagaaaacttaggt

SEQ ID NO: 101960 - DNA, 201 bp, Glycine max
gtaatgtgccatgctgatgccaatacttgtcctgctttctccagtcaatgacttgtgccaatggacaattactaatgtcattatctgctaagcggatcccaattgcaatatggtaccagaaaggttttggcttgctgttaaaaagagcaaagatagctgtaaacaccctcatttaatgtaatgcaaaggatcaaaggctgg

SEQ ID NO: 101961 - DNA, 212 bp, Glycine max
cggtgtcaagattgtgaagttggaagatgcaacacagtctttgttagatggcttaaaagctgaaggaattactgtcaatgttgaagaggttggtgactacaagcttgaaaatgacactgggggccatgtcccctcccagaggaatgaagatactcgtcactcaattgatgctcagtctcttagcaaggggaataaggatcctctaggtgcat

SEQ ID NO: 101962 - DNA, 196 bp, Glycine max
cggctcaagcggctcgagacggctgcgctatgacgtctgctggggatcgaagctaggactgatgacccacagtgcttctctcgtctgtctttatctctctcttgctatccttttggctagtggcactgctgctagtgcaactccaagaagcgtagtgacatgccatcatgtttcatcaggcatcagaagccttctt

SEQ ID NO: 101963 - DNA, 173 bp, Glycine max
gttcctattaacaaattaataaggttcgaaggaaattttggtatcaacactgttggactgcaaagaaatcataattgctagaattttaactaaatatagtgtctagctacagtatcgggcataatcagattctttatgcatgggttaaatggctttatgtatttcccttacat

SEQ ID NO: 101964 - DNA, 263 bp, Glycine max
gtcccttatgatgggcgcgtggggtgctaataccttccccatgcgtaaacaactcccgaaccctcattttcaaaatccatagaccatcgtcttttttttggtttttctaacattttcctcaaataaacattcgtggcaactccactcgttttctccctcggagacaaacgctttggcccattgttgaggccttttcgcgcccccgttaaagggtaggttgcgacactatgttgaatttttttttatgccactaagccaaatag

SEQ ID NO: 101965 - DNA, 184 bp, Glycine max
gggaacttgaaggaattcaaatgactcgatccgctgaagtttatgaccccagccagaacaggtggggttttatctcagagatgagaacatccatggtgcctttgtttggttttgttcacaatggaacatggtttttcaagggaaatgaaattgggagtggtaattccacgtgtgaagcctattc

SEQ ID NO: 101966 - DNA, 180 bp, Glycine max
acgactccgcaaaaaggggcgaaagggtctcacagctgttccatcctgcatcaaccatgggaagtagagccacgccggcttcggctatcacaaacaccatcgtattgggcgcaaggaagttccaatccacccaccgattcgcgttgctgacctcttcggcaacatgcaccgccagggccc

SEQ ID NO: 101967 - DNA, 109 bp, Glycine max
gacctaaggtcatatcagcagctggagagcgactgcaagcttcctcagttttgctcccctgtttagggcgtttcaataggcttggaagggcggccaagaattttccaat

SEQ ID NO: 101968 - DNA, 163 bp, Glycine max
gtgttgttaggtttgttaattgttattatcatctttagcttagttggaagggttggttgggaccaaaattgacctatcatcagattgcgcatggcacacgaggtgtctgttgcaaattttaagaaaaaaaaaaaaaaaggacctgggtcgcaaagcctgcttg

SEQ ID NO: 101969 - DNA, 216 bp, Glycine max
cgcatggggggggaagttgagagccgagattaacaacggcaccaaaggcaacaggaacgttggaaggggatccagatcgaggttaaatctctatctctatatgcggtgacacgaaacatgtcttcgctgggttaactctcatcaacgctgtttttaccatccatagttccttatgaacagagggaccaacacaatctcatcaagatactgggaaaa

SEQ ID NO: 101970 - DNA, 208 bp, Glycine max
ggaaatgaggtgcattcctaccactacatgcgtttggaacgctgaattaattttcgcctaaaaagacaattcggtgggatctaggttagcagcaaacagcgcaatctgggacttttccttcttctccccaaaccagatcaaaaatcactctgctcttcgttgattcaaacatgtctctcgttggtcaggatctactcctcggcctgca

SEQ ID NO: 101971 - DNA, 247 bp, Glycine max
atgtggtatgtttaagggtgtcaccattggtagggtacatcatgcaaatgcaaaagcttaatgtcatagctttcatggaggtcaaggtcgacccttgggcatagctaaacgtggcaactaaatcttattaatagttgtgtagaattgttttatattctttgataatttttataaatgagttgaaattattttctcattttatgtctatttattcaaattaaaatttgaactgcaagaagaaagtata

SEQ ID NO: 101972 - DNA, 254 bp, Glycine max
ggacgggagagaatctagaagaagaaggagaaagtataggaataatagaagtacaatcaagttaaagcataaacatcaatggacgaaccgcaacaaccaggacagacatgtgggcccacaatgcctattaccctttctaaccccctttctctctcggacattctctctctctctcatttccatcaacattcccactaaccgtcccgttgatcatactcttcttcttccctcaaaactattcaattcccttcaaa

SEQ ID NO: 101973 - DNA, 210 bp, Glycine max
gacatgggtaagtatgcatatggttcaactgatttctgataccatctattttttgcagggatcgcacccacaaagacacccagtggaactgaaagagtccagaagggccctggggtttccagctctggttacgggcctctgtcggccctacagagtttccgtttcccctagaaagttcatgtcatcgtggcataggtaagtgtgcacctc

SEQ ID NO: 101974 - DNA, 242 bp, Glycine max
ccgaagaagaaggagcatggccatgagcatggccataccagcagcagcagcagtgacagtgattaaactgctgcatcacctataaattcaaaaggtttatgggaccatagtagcgagggctgtgccttaatttctctctctctctctactctctctctctctctctctcttttgcctttttccctatcttgtgatctatttatgagtgagaaaaacaagagtgagaatttgtgcgtgtatct

SEQ ID NO: 101975 - DNA, 221 bp, Glycine max
ggtttgtgtagatattgaccaatgggatttaccggagcatcgagcatcgagcaactattaacgaagagaaagagagaatttccggtggcacatttcacaggctctaatgaacaaagtatagtcaacaaccagcttgatatctgaaaactgaagtgtcaaaaattgtgttgagatatacaagctatttctcgcgggtaaagaatcatcttgatgatcaggca

SEQ ID NO: 101976 - DNA, 256 bp, Glycine max
cgggagggtgttggacattcttgaaggatattttgtaatccaagaggggattgttgttccggatccagttcaggcggtttgtacttcggtggggaaagatcaacttgcaaattgatctacccttatgttgcggttggatcttcaggagatgattacgatattcttgcagagagtgttggagatgggagagtgttcttcgctggagaggcaactagcaaacagtagttcccgactatgcacggcgcgttcctcagcg

SEQ ID NO: 101977 - DNA, 238 bp, Glycine max
acggctgacgacagaagggaaccacaggagagctgcaggcagagatacaagaacaaatatataataagttcccaaaatatgaaccgaacacctaaaaaaaatattgaatgaaaagctaacaccactataacttcattcaagtcaggggacacaattatattgcaggcagattgactgactcaccatttaaggggatgactctaaaatgcattatacgtataatcatgggccttgttta

SEQ ID NO: 101978 - DNA, 275 bp, Glycine max
cagtcaagctataaatatgacgggggcatataaatatatctgttagtaatgggtaacttgaattaataatattaataataagaaattaaaatatccagcaaataacatttttggttatggagtgatacttaggctccgaatttattgaggacagtgcaagataatttaataaccaaatgtgtgaagccgtgaaagattaacatttttgtttaatataagttacaatggtcacgatccgatactctccttttactttgacctagatgacatccttt

SEQ ID NO: 101979 - DNA, 253 bp, Glycine max
gaatgggtttgggttgatgggtgtggttacacaaggggaaacaagtgcataatgtgtccagatcagatgggggcaccttgttccatcccaagtcttggctcctcttctatcttttaaacgttgtaatctcctttttggtacaagttgcaagtgacattgtgaagtgttgtgagataaataatttatgtttgaattcaaaatgtaacttggctttgctacaaacttattaaaaaaatgtgaagcaggtgtaaaa

SEQ ID NO: 101980 - DNA, 250 bp, Glycine max
tggaaaaaaaacaatatgacctttgttcaactactaccttcattcaatcatgttcagatgattctgtgttgactttggtttggtagttgtaaacttttggctcactttcattgcacatgttgcttcaaaatgcttgaaaaggaagatcttaagcccccgttgggaacatattttgagtttcagactgaaagttttgaagaatggttcccatttcatttttaaaaaaatttgacacttcattcccaacttt

SEQ ID NO: 101981 - DNA, 116 bp, Glycine max
ggcagcgctagatctatatgctcatgcaagcatcagttaattcaggagagcatctcctcgattcacgctacccctgttctgctcttcttactacctttcaaattttaaaaggtata

SEQ ID NO: 101982 - DNA, 202 bp, Glycine max
tagcgagtagacgacagaaaggggctgttgctcgtcctaaaacccagatacagatctagggtgtattttccttttcttttcagatttgacaagtttgcgtcttcaaggaattagtggagattgaagacactgaggcttcgaggagagtcatcgactacgagagcagcttaaaagtcccgttcgctaacccgtactgattggc

SEQ ID NO: 101983 - DNA, 242 bp, Glycine max
gaacagcaaaaaaacactgcaatcattcagtaatgacagaagatcaatgtgaaatagtttccgtacttaagaacatggaagtaccattaaatgaatttatgatcatacaaacttgtacaaatacactagcatggtaataaacttttaaaaagaatcggttaacttctctcgacacagtttctaattttgaagaacatacatgattagatactaacaactttttttttcttatgtcttaaaat

SEQ ID NO: 101984 - DNA, 268 bp, Glycine max
tctcgagccgaatcggctcgagacgacagaaggggactgattataatattaaattttgaaagtgccataatgcgtgacttacactaatattttcataaactgtggacaaactttttgatgtagactggaattcttttatgtcaaactcgtatgcaatttcatcattactattatgaaggatgctttctaatagggggtcagccagacgttcaagaaggagaaagcaggctcatttaactgagctggagacacaggtctcccaattacg

SEQ ID NO: 101985 - DNA, 224 bp, Glycine max
  unsure (1)..(224): unsure at all n locations
acagacagtctcaaataaatgtaaatgtgctactacttttacagcctacctgtgactctttcccattaattaatcttgctctgggaatgaccatagccgagcagcatatctcattgtgaacaacccattacattgaatcatttttntttaactttgtacagcttacaacgttggtattgggtgggattttatactctcagcttaaatcagtgtggtatgagaaa

SEQ ID NO: 101986 - DNA, 105 bp, Glycine max
gggggagaaaacacatgagatcatatggatttgagagctcatccctttcttgtaaatgaccacagaactctgcagagttgatagcaaaagaaaagcaccagagag

SEQ ID NO: 101987 - DNA, 205 bp, Glycine max
gaagcaaaaaatggaaacccaaagtgcttctctcctctgtctttttctctctcttgctatccttttggctagtggcactgctgcaagtgtaactccaagaagcgcaatgcccaagccacaatgcttacacatccaccagaagcctttttccttcaactttcccctttggaattggtcctcctgctacccggcagaaggagcagca

SEQ ID NO: 101988 - DNA, 299 bp, Glycine max
ggtgatttctgcgaaacagaggattgacaatacctccaatggtgtcattacggatgcaggattgtaaaactatgccttcatgctgtaatggttttaatgtttcggactggtatagctagctgttgttgtttaatgtatcaccattgcacacatgtgcaaattttgtgctcagcctaatgtatgtatgtacagtatcaagccttgagaatttacttaaattggtagcatctgttctctccccaatttttgggttctctttgactccaccacaatctattgttttgatcagggtgtttttg

SEQ ID NO: 101989 - DNA, 276 bp, Glycine max
tgggtgattagttttgacttatgactaagtttgactcggttgtctatccatgatatagggttttgtttcacctttttaaaataatcagaagttaaaaaaatctaattaaaatcaaaatttgttaattttaattagtttatcataaaatcaactttaaaaaaaattgtagatgtaaacaaacataaagtaggctgtacgtactttctacaaaataacatacgtcatcaattgataaggtaaaatatactatcatctaattataaactattatttata

SEQ ID NO: 101990 - DNA, 211 bp, Glycine max
cgaattccacaagtcctcatcgcccaaaaaatgcggttccacccaagcgcaaatagcagtgacatccacctctcaccagacgaagaagccaccatagaggcaaagaccagagactcctttgatggggttgcaccacaacgccacacaaagcctcaacgaagtgagtattcagctcaatatgtggatgctttctccaatgtccatcactctt

SEQ ID NO: 101991 - DNA, 260 bp, Glycine max
tcccattattagagaagaaagagaaggctttgaagaccaaaactccaagtctatttccacttattttatatcctcttttattaacttcataataatgatttgtttggtgatggttttcatctttgtactttctctctctcacacccacacctacacctacgtgcgcaacaatatgatattttcttgatctaaaatgttatgttgacaatgtaccgtgcatttaatgcaaatttacaatattgcttttcatgcagaaaagt

SEQ ID NO: 101992 - DNA, 263 bp, Glycine max
gactcacacactttctatagctaccctcaatctatagctagctagcaatattctctcaatatgatgcatcgtcagattgagatggagaattctgagctcttccaattcctcacaaacaccaacgatagctttcttcaacactgcatcatatggcctccctgcggcacctgcagcatcaaccatgcagcacagcttctctggctcctattcttattaccttttggaagcatctcatgatcatcatgccccttctcatgaagaca

SEQ ID NO: 101993 - DNA, 278 bp, Glycine max
ccacaaacatacatcacatccacgtacgaaacatgggcgccatcaagtacatgaccacggatgaattaaagctcctaagcatcccgtcagaaatacttaaattctttaaccactctattttcccacataagggacatccgacaaggtcactgcaccccccccatgaacatacacaacatgcacatctcaatgcatttccaacatcatcaacattccatttcaatgtcattctcaacataaacatcatcttatttccatgacatcaccaataaccataa

SEQ ID NO: 101994 - DNA, 234 bp, Glycine max
gagaagagaagaggggttagaccgttagaggttagattgtgatacataattgtctacatctatgtgtattttatatagcatacatcctaacaagtgagatcactagtttattatgactttgaaggatgagatgtgtgaatccacaatttgatcttatgtgaatggttacgattatagacttgatttgcatgtgtgtgtgcattggaatttatgatttagttagttattaaaaat

SEQ ID NO: 101995 - DNA, 228 bp, Glycine max
ggataatagtgatacaaaattacaaattgtgttttactaatatttgcatcaaatgaatggttgggttgcagctgaaaacttgggcctacctacttctccaccttatctctccctagtatctaaggtccacaacaacaacaagaagaacgtatctttcttgggtggtgttaattttgcctccggaggtgctggaatatttaatgcctcagataaaggatttaggcaatc

SEQ ID NO: 101996 - DNA, 299 bp, Glycine max
ctcgagcgaaagcataagaaggattttaaatgattgtaccaatttttcaatggtctattgcaccctccctaaaaaaaaaggctttttttttcaccttttgcatttgggttgcattgtagtgtatgtcatttgccgtgattgcaaaattttgcctttgatgttcatttgtgagacatgcaatcaaagtattaatcttttttctgatatgaaagtgggtatgttagattttatcggtttaaattgtctctgggtattgttgatcgattattttttagtctatgtactgttatttaagtgag

SEQ ID NO: 101997 - DNA, 270 bp, Glycine max
atctccaataaaagataagtacagaggggcaactgtcataccttaatttcgtccggggacaattgtttgtcaacatgcgaattttcattggccaagttgagctacttaacatcaatcactacgcaatccgtagggtttcgtgacgtcacgaaaagagatgagcaagatactcagaatgggggcaatttttgtcaacatagggattttttccagccgagttaagctgcttaacggcgatcactatgctatccgtagcgtttcgcgacgttt

SEQ ID NO: 101998 - DNA, 274 bp, Glycine max
cctcccatattggcacgcacccatcctatttggtacactaacagcattataatttcgttgtgttacataaattgttataattatgattcttttgtattacaaattcaccctggaacagaatcacaaatttcattgtatgttattctgctgtgacggtatacggataatactacaaggtcatagttctaggaaggatccattctaataacgttgtaaggcatcttacgcattcccatacctcgaagattatgaatgtaatgctgtatcgacaagt

SEQ ID NO: 101999 - DNA, 273 bp, Glycine max
agggctgaaaggaaccatttatgagagttttcttgaagctgactattagtcgtagtctcttctattctaactgctggagaaaggtgtaaataccataccaacttttctgatcttttgtctccccaggaaagcctcagggttcaaaggtattaggataagttctggaacattacctcagtgttctgatgccttttttttgtcaaccattcgtgatcaactaacaccgttgatgaattgaatgcttcttgtttctttgtagtctttattttgttt

SEQ ID NO: 102000 - DNA, 140 bp, Glycine max
ggggatcagtaactgcaattcccaatgcaaattttcatcgggcgtcaaggatgcactagtgtgcgtctaggagttgactgtgcgttttgtgcgtaacagggttcaacaatgaagagcacatgacagtggaggtagttggc

SEQ ID NO: 102001 - DNA, 285 bp, Glycine max
ctgtctatgcaaggtactgtgttccttttaccaatttttatattcactgaattttcgggacattattttaaaaatctagtttagcttcaattaattctttgaacagcaagcaagtaagctggcgtactagagcgttagtagtttcagactggacaagacgttttatttttggaagggactcaagtagcatctgattccagagtcttttgcattggcaatgtggcagagctccttgatcctagttcctacataggaaaaatttgtttcgattccatttattctttg

SEQ ID NO: 102002 - DNA, 225 bp, Glycine max
aggtatgctcacactattggtcgattggtcggaacgggaacaggccatgcaaccagacccagtctgatattattagatcagttatgtactgaaaccaatggtaattgtaataagataataataaaattaatttcaagtcatgatttaacaaaagtaattcgtggtaacggctaaaaattaagggagaaaaactttggagaccaagatcggccaatttttttatta

SEQ ID NO: 102003 - DNA, 248 bp, Glycine max
ggcatggacaatcatttataacttcacatcaacatgacaacatgcaaatgggaactctttcttcattctgcgttcacatactcatcatataacaactagacttcagtttcctactgatgcactgaacaagcaatatgctatgtcgtcgtaaggccggtgtcgaaaagtttgtacagaaggatcaaccgggtagtagcagagctcttgtggctggagcttgtatggcttattgattggtgggcaggagt

SEQ ID NO: 102004 - DNA, 276 bp, Glycine max
tgccagtttaatatataaggaatgccaggatattattcctaaacattatggaaatgttagcatttttaatcttttccccactctagacattgatttatgcacatttatgtcaggatataatttctgaacatcaagtaattttgttaattatattacccttaagaccattgccaataaaactttcattgaaatcctatacttgatgttaactatcgataaaccttctattactcttttgtttgccaattatctaattcttctaacagtattatatta

SEQ ID NO: 102005 - DNA, 278 bp, Glycine max
tccttagataaacttaattgtcgatgtcatgttccatccttttatcaaatattgtactttgtccaatgttttttgtatgtgcttgtcctcggaagcttgttttttttatgggtagttattaagttcaaagtatgataaccttataaaattttagatctttgatatgattgtgcattgtatgcataatattttttcagaggagagatccatcaacttatttgatgagtaactcttataatactttttatttttttacttgtttgtcttactttggagca

SEQ ID NO: 102006 - DNA, 309 bp, Glycine max
gaacaatggtatctgttccatcccattccttcttgttccatcctctttttatatatccaaacaaaggaatttaatcccattccattcaatctcatttgaccaatccaaatgtgcacaaactcacatctaggatggttgaaattaacaataggcatttgtgtataccctttatctcgagagtttgggtgaatgtgaatgggacagttggtatgcctcaaaaatatttatggttataacattagcaatagcatgtcaacatgtacttgagatactgagaacacgaagtaaacaaagagcataacttcacta

SEQ ID NO: 102007 - DNA, 289 bp, Glycine max
  unsure (1)..(289): unsure at all n locations
gtgcaagcaacttgttaggcaccaccnttgattcagttgacttgtccatactcacaggtctgctactttaatgactcttatagcaaagtccttgagttgagtgatactagttcagcttcccatgatgcaaggagggatcaggaaaatatacctccagaaaaaaatgcacaagaaactacaccaggtaaagcagcagaaaccagagatgttttgagagatagccacataactatccctgagaccccatctccagatcagccaggtgatgcagcatatggggtggttaaaa

SEQ ID NO: 102008 - DNA, 305 bp, Glycine max
tacgggaagacgacagaagggttactgactagatgtccttgtattcattatagtggcgtgtttggttcacttctgattccattggatgtcctaatgctttatgctttcttttttcaaccaatgaatatctcctttgaggtatatgataatatgaatagttgactcgagaagaagatttttttttgttctttttctgggagaattataaataagaaacactgttaaaaatattttccgtaaaagaaaaaaacacttgaggtggttattttgtgttgaaatatataagttaacaacaacttgaccat

SEQ ID NO: 102009 - DNA, 148 bp, Glycine max
  unsure (1)..(148): unsure at all n locations
gatgttttaaaggacatgagaaactanaagggtattgtgatgatgaggatgtggaggttgatggagggaaagttggttactataaaattctcctcagaagtggagaggaaagtagagatcagatatcacattctcggatagttagagt

SEQ ID NO: 102010 - DNA, 285 bp, Glycine max
acggagacgacagaaggggtaggattgaattactaccactcaaatcccgagttaccaacaatgatgcactcgataatgggtctcggttcaaaggtcataatgtatgtattcattctaattttaataaattttcgtcccgtttaattttatgcgtctttctaaactctttactctttccaatctccatttcttctctaaactatgcttttatcctatctcctttgcttgttatcatcggtttcataccgagattgtatgattagaattattataaaaactattact

SEQ ID NO: 102011 - DNA, 308 bp, Glycine max
tgccatgcgcctcaatttcttgtacatcacccccgctgtcaccgtccagacccaattttccgaccaagttcattttaccggaaaatcttctatgtagactatcgtgttttttcctttgcaattgggcgctttaaaaaagggggttttccagtgtggagcatcatcactgaaaaattgtagcaccatcgccgattcataaaacagaagaggaatgtaactgagaagttctggatccttcgcgagaaaggaaaacgattaaattctcattctttttcttaatttttccaattatttgctttctctgctct

SEQ ID NO: 102012 - DNA, 193 bp, Glycine max
cacagagttcagcctacaaaggttgaacaacaacactggtgctgctggccttgacaacctcaggagatcagggataaaagtcgtggcactccctgatggcttaggcccagaagatgatagaagtgaccagaagaaagttgttctctcaatcaaaaccaacatggcctctatggttcccaagctcgtacaagat

SEQ ID NO: 102013 - DNA, 223 bp, Glycine max
ggggtttgtgaggactgtggacaatgcttccgtttttgcttttgcggttgagtttcgttgtgcaaaagtcaaacagttttaagggcaagataaaaagtctctcaagccttccattccaatccaaaccaccctccaccctcagatccttctatgttttttttattattattattattaacatagcaatataatattaatcaagaaattaagcatgcttcgagca

SEQ ID NO: 102014 - DNA, 270 bp, Glycine max
tctccatttacaggacccatatgtccatttctttaacatatcgcccatgttgctcttctcaagttgatcatatctctatattcctcctctacatacgaaccatgctctcttttcaggtcaaatacagattaagcgcctctcgttaattgtatttgtagtcaacaaaggctatactatgcgaatcaggctttaaattaatggatgctaataaatgttttctacattattgcataactaatccaccatgcctggccctttaccttaccttaa

SEQ ID NO: 102015 - DNA, 283 bp, Glycine max
  unsure (1)..(283): unsure at all n locations
ttgactggtccccaggacgacccacggagagatcaatctctacactccaaacagacaagttatcagacttccatcaatcctattgaagaagcaggatatcaaagcacaagagacaactccaaatcccagcataagctcgagtatacaccagtgtcaacaaccctaaaacgaatcattaaaaaagtgaccctattctatatctatgttaaattacaatcaaacccccaaatttgacnattcaaatgtaaaggttactgaatttgaaatacgcatatcaatgggg

SEQ ID NO: 102016 - DNA, 278 bp, Glycine max
cagttagatacgggcatgatatgcttttagttattgggagatatcaaattgacttgttgtctagaattaaatagtataacataggataggacaattctaaattaattacaaattatgataagctatagtagtttgtctatttttgtatgttatgaaacacaaacgcaatatatatttggttttgttcacagggaggctttcagtgaatatgcaagggagattggctcattggtgtagaaggcttctaggtttgttatcaatagggcttggaatagaag

SEQ ID NO: 102017 - DNA, 204 bp, Glycine max
agacgacagatgggggcgtcgttgtttgttgtctcccttcatctattttttcttcgcccccttttgtgtttctttttttggttgtttgttctttcttctcgttcgtcgctttgtgatctctctctgcaaccatgtccgccgagaaagagagagagacccaggtttacttggccaagcttgccgagcaggccgagagatacgaag

SEQ ID NO: 102018 - DNA, 232 bp, Glycine max
gggtgccactctctcttactcctctgttttttctccatggctagggttttgatgctactagtaagcacgaatggtacaactactgtctagtcatctcgcatgaaacaggtgttaatcaacatttatttggggtgatcatatatttttttcctaaaataaatttagagagagcaacaaaatgtggaggctgaagatagcagatggtggaaaagatccatacattttcagcaca

SEQ ID NO: 102019 - DNA, 241 bp, Glycine max
ggaccaatagcaggaccctgtatcaactcaaatagaagactagtcaaattgttctggaccagcccataacaaaattgggatggactgtgtctacatggttcatcttcaaacatgcttcttagtgtggaattctcgaatacacaacttagctcaactataatcatgtttgtggctcatcctcaattaatgtcatgtaaatactaaataagatgcccacaactatcttaagtatgtaagtctt

SEQ ID NO: 102020 - DNA, 196 bp, Glycine max
aggggcagtgaaacatgggggactcaacttgtctcatgcaacaaccattctgttatgcttcagggatttccaatgaagccagtgaggctcaccttgaaaaaaactgtgaaacttgtgcgtttcagaacaacccaattcatgcacttgagcagtcaatttcgtttgggagattcatgtcagagtccctggcatggga

SEQ ID NO: 102021 - DNA, 261 bp, Glycine max
gctcctttacagttggattaatacacattgatcatcaatatatttaattaggtttttcttttaaaaatacttttatgcttaaaattaactaattcaaacatataaatttagcattagaaaacgaagggaacaaattttacgtgcattcgttgtcctaaatcaaagtgtacatgtgtagttgaaggcaagcaatcatctaaaccgattacaaattaagcaaaagattaggctacccaatcgtaaaagaaaatcaaaacctta

SEQ ID NO: 102022 - DNA, 233 bp, Glycine max
ccttattatgatcaaaaagaataaaacaaaccgaggaacaaaaaagacagtgattacgtattgtatttgaaatgaaattaggtatatatgttggttttcttgcttttgtttgctaatatcagggcatcataaagaccaaacaaattaaggtgttggttggttagcaagccagcaaggatcgcatcagtgaaatgcactcaaactgggaaaattcatccacacttcacaaacta

SEQ ID NO: 102023 - DNA, 235 bp, Glycine max
ccaagtcatttccaactactccctccgtgcctttttataagacattgttttgaaattttttttgtccctttttataagactcttttttacttgtccattagattaattatcttttactaaaatactgttagttaatttaggtaataaataatagacgctatggattgtctctttctctctctctctctctctctctctctcttatgaggattggagaatggaagagtttagtttt

SEQ ID NO: 102024 - DNA, 252 bp, Glycine max
actcgagcgaatcggctcgagcttttcagctttttagtcatttacttttgagggcttcaatcccatctgccaaaccaactcatgttgtttaatgacaaattttgtaagagtgtacataaatcaaattgcctaaatcacgtcaaattttcggggtaccgaaatttcgatctgtaagaatttttctaaaccccggaaaagaattatttattatatgccatggccagaaaagctcttttgaaacctacaagtgcc

SEQ ID NO: 102025 - DNA, 229 bp, Glycine max
gattcaataagcacatagttcttaagtgaaaggacagtaacttaaggcaaggattaatttcatcatgcattttttttcatgctatgtgctgttataagctgttttgtcgataaacaggcttgtgtgaatggcgtggaatcaagaacaagagtatgctatgcaagacaaggattgtggatgagaaaagcatatatcaactaagatcagtgagaacaccatgctccagaag

SEQ ID NO: 102026 - DNA, 233 bp, Glycine max
ccataccatacaattaatatactttacacccactaccattaacctgaaaatttggctccaccacacattattggagtctctgaaacataaaagcaatgtaggacaacaatataattatgcattcgaatttgtcaaactaaccgtgctaacaaaactaattttgataatgatgctcatgatttaaacttgattttgttaaaactgtacatatagccctatataagggggaatga

SEQ ID NO: 102027 - DNA, 221 bp, Glycine max
aagttgttttaactgtgttgggagttataaagtggtttggtagttggagggagagtgatatcaagattttggatttaaatctcccagtcccattaacataatatatttactactaatatttgtggataaaaaaaagttgcttaagtattattatttatcattgctcagtcaattatgtttctccttttttttaatctttagttatttatttttctataatt

SEQ ID NO: 102028 - DNA, 250 bp, Glycine max
gaagacgacagaagggacagcaagaggatataaacagcgtaactttactcacagtgcacaaatgctacagatacgactcctttttccacaaggtaaaatatgtataactaattaactgccgacgttacagttacactccttaatctatactatagcagtacctaaattgtagtgtatattaatataatataatgttaggatgagcttataaaggtgtaaatatattctaaaatttaaatgacaaaaagat

SEQ ID NO: 102029 - DNA, 228 bp, Glycine max
tgccattacaatgtcactatttaagcctccaattaaacccaactgtgaaacaacttcaggaacacaagatttcttcattgcagattattctacttcagccaaatagtcatcaatttcagctggtgtcaataccctgcaacatcattaacatgctattgctaagtcacccagttaaacaatctaaatatgaaaggatggctttgaagtttgaagtctagattgatttag

SEQ ID NO: 102030 - DNA, 235 bp, Glycine max
atcttacaagtgttaaggcattgccaactagcaactctccccaatatattggttaaatttgaagtattagaattatagttcaattttcatgctctcggtgtaaagatttttacactaggaccttttaagtatctagtacaaaagtcaacaatcgtagtcagtgtaaaaaacttttacactattagtgcatttaaattaaattcttcgacttaaagtttagccctgctttacattg

SEQ ID NO: 102031 - DNA, 252 bp, Glycine max
ctcgagccgaatcatgcttctgctgggctccccttcatcacagatcaggggatcagttccaccttcagttgttttcccaggtttcttcatcaagcaacataaaacaaaagtcctctgcataattttttgagtataatcagcatttatttgatgcaattcacacaaataaaagaacaaggaaattcagactaatttatacagaagaaattgacagtctttgatgaacactgatgatgaattttgagagtgctt

SEQ ID NO: 102032 - DNA, 229 bp, Glycine max
gattggagttgtgaaagatgcagaaatgggagttccttgcagcccaaagcttcaaggatgaaattcttcctgcggttttggactgaagggagctcctacttcttcactttcccatatttttttgtctttgctttttatcgaaccaaaggcttcaaacttttcttgtaattagctattgattccttgaagtttggtgatctcgttatgcacttctgctgcagtaagtata

SEQ ID NO: 102033 - DNA, 235 bp, Glycine max
gacgtactcaaattccaaatgcaaattggtttctttttcgtggctccaaagtcattttatgttatttgtgaactcctttgctacaaccccttataaacatatacatacattatatataatatatgaggttagcataaatcatattttgattttaaagggagagaaaaaaggggaacttggtgggagatagcacggaccacaggggctggtctcaaaatttgttgcaaagtgtata

SEQ ID NO: 102034 - DNA, 199 bp, Glycine max
acagtacaagaattagcaacacagctcagggagaagattcttgatgctgagccagaactggagccagaggagcaggagatgattggagatgttatggaactaatggaagaaatggtatcgcttgattccaccgatgaagctgccgctcctgctcctgcccctgttgctgcggaagcataaatttgcaaataacctcaaa

SEQ ID NO: 102035 - DNA, 234 bp, Glycine max
atacggctgcgagaagacgacagaaggggatcataaggtgccttcattgagatcaactctatccgccaagaatttgtttgcggggaggcctattctgaatcagatcacggaattctgcaatgaattgaagaaattagcaataagagctaaggagagagagaatgctgaaaatttgagcccaaaagagagtgaagaggttgtggagaagaccccttgttctgttcaagctttggc

SEQ ID NO: 102036 - DNA, 233 bp, Glycine max
gggtggtggaggtgtaaaggaatagcctttttgttgccacctttacttttatttaaacacttggtttctccgtctttcttggagacacacaacacactctctctcatgactccaccaacttacccaccaactaatctttttaattccaaaccaaaccatgcctctttttttcacttcacaactttcatttcagtttgagttctccaatggcagttcctgcaccattctctctt

SEQ ID NO: 102037 - DNA, 233 bp, Glycine max
ggatcatatattaatgccattgttattatgactttgagcttcgagagctgtgctaagacattgtcttgttgtctcttatatattttataaatatatatacttccttagtttttccataaacacaacaaggaaggaagaggtcaggtttcttgctcggcttttgtgtttcctccattcccactatccttctaagtttgagcataaattcaggatcttgttctttctttcttgat

SEQ ID NO: 102038 - DNA, 233 bp, Glycine max
tggggagggaatgtgggagaacattcttggaaagcatcagcagtcgctgaaatccctattcctccgaagcaagccttcttcccccaacgccgacgccgccgatgactatgccaattccccaaacccatccctcagctctctcctctcgccaactccgtcgtctctcgctgttccaagatccttggaatgtcgacacaggaattgcaacactgcttcgattcggaactccccat

SEQ ID NO: 102039 - DNA, 227 bp, Glycine max
ttcctttttgtataaactccactttaagaatatattaactataatcctcatatgccgaaaataattaatgaaattaagccagttaacgagatttacaaatataatttatcaaaaaaattacatgattctcttgttggtcttgttcgtttttttaataacttgacaagttaatgaattactaacgtaattattaagttacagtttaatgttaacattattaatttgac

SEQ ID NO: 102040 - DNA, 219 bp, Glycine max
atcccactaatccaatcttatcatggaataggacatattggattaagcacttttatcatggtaaacttacttgtggttagaaaagtatttgtacctttcatggtggtatgaatgactttctttagcgcaaagcttatcaattttaaaacacataatgcttgactttacttgcaatagtaccattttaagattacatactgttggatatggccaacgtct

SEQ ID NO: 102041 - DNA, 230 bp, Glycine max
ggtgcagccaaattttgaggagagagaaatgtgagaggagcaaaggctctacaatgcatttttcattttgagcacttggatgcaaaggatttggagtgaattatttcagctacagagtacttcagttaacaaatccacatcttaccatccacaaacatccacaaactgatggtcaaaatgaagtggcgaacaagtgtttggaaacttaccttcactgcatgtgttttagg

SEQ ID NO: 102042 - DNA, 220 bp, Glycine max
gacacaagaagtggtgctgccttaggtttgtgctgcaaaaatgggactcctcagaaactttgtcgttgttactgtgattgcactctcagagtttctgagtataggactggggaaaccaattcctcatcacaaacatgtgattttcaagccatattcaactttggtgactctaattcagatactggatgcatgtcagcagcattttacccagcggctttgc

SEQ ID NO: 102043 - DNA, 226 bp, Glycine max
aaacgtatagacaccaagcaccagtgcaacaatcttacaagtaaggaaccccgttataaatgcatgtagttttaaaagtaacaggaaattcaagcacggaatacagataacacagttttattaacacaagaaaaaatgccttccatacctgatttaaaaaaagagtaaaatttctgaaaatattgaaaacaatttgtcatttaaataaaaatctaattgacgtaac

SEQ ID NO: 102044 - DNA, 227 bp, Glycine max
gaacacgtcgcttctgccgcaatagaatcgcgatatagacaacgacgacaggtgtgcatatcagcaccacataagaggactttcactactgattacactatgtctggagaagtgagataggatagggggcgaagatgaattaattcattttagtttcgtgaaggtgagttcaatctacgtagctcaagtgacagaatgtgtgggggattctgttagacgagtttcat

SEQ ID NO: 102045 - DNA, 261 bp, Glycine max
ttatgcactgatattctgaccacttttttttaagaagatgaatggagaaccaaatattgttaatagaagtgcattaaaatttttgtttaagcttttaatgtgtcttttaaaattacatggagggaaataaagagaataggctatatttttttaaaaaaaaatgatattctacatcgatcatgtaattaaacaatgtagaaagtgactatacaacatcagttatagaaaaaaatcaataaaatcaatgtagaaaacacactt

SEQ ID NO: 102046 - DNA, 228 bp, Glycine max
tacgatatgaaattatacagacaagctttagcttaatactatcaaatagcaacggtgaggtaggccaacgccaagtcctggctcatattttattattaatattattggaattacgctgcatgtgtatcttcgggttcaatattaactaaaaacaatgaattattagtataaagggattaaaaattataacaactacataattttttatttatcagtgaacaactatac

SEQ ID NO: 102047 - DNA, 219 bp, Glycine max
tatgcttagatctacacattatgttttcattgctctggaactaatcaattaacagagtttcttaatggctgttttaatgagtttaaccttgctcctcattattctcatgaactactgtctactgcacttgaatgtggccacagaatgaccaagtttaacttttttgttgcttccaaattaggacatctgtatacatgaacagcatggtagctgatgttc

SEQ ID NO: 102048 - DNA, 247 bp, Glycine max
ctcgatccgttaatttatggcaatctttgggtgatgcggaggtattgagcctgagggaggggatagtgaactcagttggagttaaaacactggtgtctgatgatgatgattacttgatggaacttgcattgaacgagatacttgataactttcaatctctggcacggtctgtggctaggttgggtaagaagtgtgtggatccagtttatcatcaatttgaacattttgttcataacccggctcagaa

SEQ ID NO: 102049 - DNA, 222 bp, Glycine max
ggagcctctcggacatggacaacgtcctccagagctgggacccacgctcatctgtacttggttccacatcatctgcaaccaggacaatctagtcactcgagtttatcctttctctttctttgttctgtttatttttgttctttgcatacatactggaacatagtcctttgtctcataatcactgatgctggatatgagtgttgtcgtgtgttacgagatttt

SEQ ID NO: 102050 - DNA, 221 bp, Glycine max
gtatggtacatgtttttgttctcattttttatgatagcacccgtatgttttttattacttataatctcgcaagagttgctctcacccgcgtcatgaaattatttaagattaataacaccctaaaatttagggtgcaatttttgcattcttaaaacttgttcattgattgccatacttatgaagaatttaattagaatatattgatagtatatttttttaat

SEQ ID NO: 102051 - DNA, 129 bp, Glycine max
ggaacaagtcgtttctttttcaataaaattagaataaagccaacgacaacaggtgtgcatatcagcaagacataaaaggactttcaatactgattacactatgtttggggaagtgagataggggagggg

SEQ ID NO: 102052 - DNA, 258 bp, Glycine max
ggaggtgtaaaagtaaaagagtgagagggcaagggtttgaatcgtaaaaaaaataaggtcaaagagtgatacatcatattattaggatttaggacaagtcttaaatcttaattaccgcgtaattttaaatttgatttatttcactactttttgtaacctgttattatagtatagagttttttttccctactagtggagtctgagttggaattcacttgccaattgctatgatcccatgattgattgctctaggtgggt

SEQ ID NO: 102053 - DNA, 248 bp, Glycine max
gggttttgttgttcctttaggttttggaattttgcgtttaaattttatctttaggttttgttattttttattaatatgcacttattccccattgctcctttattcctttggaatttagctacttattccatatttttccctaccttgtccttggccccatcataaccttaaaagaccttttgatcctcatgtgcttgtgtttatgggttgattgtcaattttagaatcttgccaagtttatgtggtgt

SEQ ID NO: 102054 - DNA, 250 bp, Glycine max
gcaattaattttttttaaataagtgttacataaaaattagttaggaccatatgtctagagttacctaataatttcccactcgcaacaatatatatgttttgatcgtttcattggtttttaaattttggcataaaaaagacgaaactgattattcagagtggcagaattcactacagaggagggtggtttgtcggaggaagttataaagaaggcgttcgaggcaacggaagatgagtttttgcgtgtagtg

SEQ ID NO: 102055 - DNA, 254 bp, Glycine max
ccatacaaaattattatgtaccatcaatagaacaccaaatggtatactctttcaatccactatcactcctactcatgatgcaattttgtattacaataacacgccaaagtgggtttttaggttactccttcattataccaaatccaataagatttgacattcctcttaatggaattcatgaatcacggtgagacgagtgttctttcaataatcagggtcatactaagtattcagaaaatttaatcgaatatgaa

SEQ ID NO: 102056 - DNA, 254 bp, Glycine max
ggggaaaatttctgtaaatccctggaagagatgacaatcatcaattgccctaaactcaacagttggtggaaaccggggacagaagccaggccgtcatttgaaaagatttcaaaactacacctccatcgctgtcctctccacactatgcctctctatcctcgtcttgaagagatggtcctccacagttgcaccttaaaactgctgcggtagaatactatgtccattccccttacggatcttcacattcaagattg

SEQ ID NO: 102057 - DNA, 172 bp, Glycine max
atatcaataagcgaaaaatcactcctcccctgtgcaaaaaaatcgagtcgtccgatgtgagctctgattccccgtggatattctcggaatggcatatccgcaagggcagactataccctgaagaagagagatagagggctgctgctgctgaagcgtaatcgatctcatatct

SEQ ID NO: 102058 - DNA, 227 bp, Glycine max
gatcggcgcaacaaatgtcaacgctcagtgcttctctcctctgtcatatcctctctctggctatgcttctggctactagggcagctgcaagtgcaactgctcgaagtgcagtgggaggccacgctgtgtcgacgctcttggcgagtcttgttgcttccacttctctccttggaattgggtcttctgcttaccacgccgattgagcagcaagtgtatatggctgagga

SEQ ID NO: 102059 - DNA, 250 bp, Glycine max
gagctacaacatcaacattggcagaaggaacagtagttctagcttgtgtccatttcaccgactgattgcataacagatttgagggtaaaatgaatacgtagttcaacatagttccacgcctgaagactccttatctgccagatggtctaaatggtagaattggatgtatcaggcttaacacctatgcgggcatcatcgataacgaagatgcagtccctagtagattcgacccttgacaccaacgattgat

SEQ ID NO: 102060 - DNA, 239 bp, Glycine max
taactatgcgtttggatacgtgccaactagccacatctgttgtaaaattcacgtcaatttgacaaaactaacacggaagctagtacttgctgcttttgtattgacgtgaatttattggtggctaataggctgccaaacaaacactaaattcatcaacataaaagtataaaaaccttgcccatgtttggccaaaaatataggaactacaagcacatttttaccttttttttttttagtac

SEQ ID NO: 102061 - DNA, 253 bp, Glycine max
aatgtcgttattaagtgttcgtcacgtgattgagcattttcctacatgatatgagaaaaatctaacaaaagcaaaatgggtgatgcgttatgcgtgagacaaaattttacttgcacataacataacatatacagatttaactgtgtacaaaccccacctatcctctctccaatgccaatcatccatttaccctactttatttgtgatactatgcaacatacattctaatttgtcacagcaccaaagaagcttc

SEQ ID NO: 102062 - DNA, 245 bp, Glycine max
tcatctattgtacgaaagttgattcaatatttgatgagggagactctgccttcctggtttttatcagctaccatgttcgagcaagatggtggagaatctggagttatggttgctaagctcaaaggttatgcactggcattttttgtttttcttagtgcagcatttgcctggggtattgacaattcgtattcaccataacaacgggcagaggttgtcggcttgcatttgagatttcttgcaagcac

SEQ ID NO: 102063 - DNA, 252 bp, Glycine max
gggatgacatctattagaaatgaattgaaactaaaagatagaaggagagagaaatagagagtaagagaaagagagcattgcgtaaaatttgcggaagtgtgacatttaatttcattcccaaacatttttagtaacattgtacattttatagagacctatgagagttgcatagcaaatttgtacaacttgcagactaagtttctaagacttgcagagcaagcttctaacagctagctgccagctctcacttga

SEQ ID NO: 102064 - DNA, 240 bp, Glycine max
ctcgaaggtggagggatctggcagctcaagtagcgcccccaataacagataaagagattatcacaatgatagtagacacattaccggtattctactatgaaaaatggtgggttacacaccttcaagttttacaaatttagtcttcgccagcgaaatgatcgaactgggtctgaaaagaggcaaatttagtcatcctgcttggacgactgataaaactggggcaaatgaagaggatgagat

SEQ ID NO: 102065 - DNA, 223 bp, Glycine max
tagggttttgtgagtcagaaaaccccttcttggcgggataaatgtgaaacttgtttttgaaattcacatttgtaatctattttagtattttgttgaaattgtgtgtaatttattacatgacgtcagaacataaggttccaacaatccaaaaacacaccaccaccacacacgtgttatctcgtgagggttatgagttccttgctccgaagctcatggaggcaaa

SEQ ID NO: 102066 - DNA, 151 bp, Glycine max
cgctgcgataagacgacacaacggggagtcgaacaataaaggaaacggtagctcgaggacgagcagactgtagctgtagtgaatgattgtagttgctgctctcagtaatagtcatagcgaaatcggtatttgggtaggaattgcgatcaat

SEQ ID NO: 102067 - DNA, 231 bp, Glycine max
atcctagctagttaacaagatttaagtgggggacaaaaaagatgacaaggaatgagaacaggaaatttaaattattaaattctttatacatattctaaatgttacaccataggtgaatcgtcagggtaagaagcatgtatactttcttaaccacttgcccaaccaaatttaggtgcttatatacagtaacaattttatgcacacaaactacgtttgtatggagattgaatt

SEQ ID NO: 102068 - DNA, 266 bp, Glycine max
acatcaattatttatgggttttttgcttctcctattgattgggccattgatttccggaaacaagaagaggaaaaacatataaataaaaaaagaaagcttaaaaatagttgcgtcaatgcatttgggtcaagagcttacttgaggatgtgtttggaagaacttacttaaactcatttttacaagaactggtgtttgggagagcttatgatctgttcataagctgttttttcccccacttatttcaataaactctttaggatagttta

SEQ ID NO: 102069 - DNA, 242 bp, Glycine max
ggtcgcgcgcaggtcgcaaggcatcgtagcggtagcgcgtgatcccatggccactctccttctacccctcaactcctattctcccacaccaattcgaaaccctaatctatcttctcttaaaatcaaagtcaaccagcgtcactctcctttccaaacccgacgacttcatcgcaccccattcgttcgtgcactggaggaagattcgaaccctgaaacagtccaagatggcgaagtgaacagtt

SEQ ID NO: 102070 - DNA, 165 bp, Glycine max
gacacatgggtttctctggctgcattacatttgcaatttaagacagtctggttctggtatagtccttggactaataaaagctaacaggtggtaggaagcaagctgagcttttgggattcaacggttacattcgtccatatgcaagggctagaggccgagatatac

SEQ ID NO: 102071 - DNA, 237 bp, Glycine max
ccttcaccaacaaattcatgtgaatatttagacattataatagatcaattgttattaatatagctggtaattaagctgcgctgttttaagtgtcgtacgaaccttgggcttgttaactaaaggccctttaactatatttcttccacaaatatagaaagaaataaattcacaaattacgatgatatatttctttcacacttactcacaatattctctttgttcactgcagactttgag

SEQ ID NO: 102072 - DNA, 236 bp, Glycine max
aggtatcttatttggaaagagagtgaaaataatatatatgatgtgatgtaatgtaaacttaaatttgtgaaacaagtcacattataatactagcgtaattacaataacatatctcttcttttataccttatatttttgggtatacttggcttatttgaatagatgaatattagtaaaattaccataaagtcccattatccttctgtccccatgggaagtgttcatttttctttatt

SEQ ID NO: 102073 - DNA, 214 bp, Glycine max
actttctcaagaatattagttatttttattctcgaaaatactcttttaatgaaataacttcattagatattgcattcatttttatcttagataatttctcttcaattatttgtacggtgataaagtttttctaaaaccatgtacaaaagaaaaaaaaaaaaaaataaaaaaaagggggcccccatttagggaacccttgacccggggatttatt

SEQ ID NO: 102074 - DNA, 234 bp, Glycine max
ggcatcaattcaaaatatatcatcaattataagcatgggtttgtggaacacaacgaatgcagtgtcttgccgctttcacaagtttggtgatgaccaaaagaatctggtcttccaaggtgatgccacgtcttcttccaggggcatagaactcacaaatctagacggtggaggaaaaccagtgggtggcagtgtggggagagtgttatactcttctccagtgcacctttgggaaag

SEQ ID NO: 102075 - DNA, 241 bp, Glycine max
tggaagagggtgacgcaagttaaacggtatcttttcctttaggattttacaaaagtagtcacatagtaactgaaaaaggcttctggagtctggaagacttattggataaaatgtgagttattttaaattttttactactttcgtttaaggataaaaaaatacattataatctttcattgatatacctcatttgtaagtaattatgggattaagtctatttgaagaaaatgtttgtattcaa

SEQ ID NO: 102076 - DNA, 235 bp, Glycine max
ctagacatctacaactctgagaaattgaaaattaaagctgcttactcatagaaaagatcaatgactcgttgaatggttcctgagttggccaattctttttctgccacttcatttccagtttttagaagtactgcaataaactccacgatctgaaataagttgcaaattggtcagagaatgaaaatgaattcaaaaatggcatcagcgctctatccttgctcaggaatatgaatgt

SEQ ID NO: 102077 - DNA, 193 bp, Glycine max
ggctgaacatgatgccagtgttgttgatcttgaaggtggtgcctgttcatcacccagtggaaatgtgatgggagatctgggtgatgtttacagcacaatgctcacaagccttgatttgggtttggcttgtttctctgagaaagtttccaacttgagcaattttgtgatgcatgtggaaaccaaggagtgtgaa

SEQ ID NO: 102078 - DNA, 242 bp, Glycine max
catacctgaaggactaaatctgccacaagacctgagctcaaagatctgttgaagagatgtgttgaggattttggagcatttcactatctaattgctttgctgaatttgtgaatgactaatgttctcgaattctgcagttgcaaggttgcggaatcatgcaggggcaacttgttttacattgagcgttagtaacagagatgctgttagagaacagatacgctcacaattggaagatatgctga

SEQ ID NO: 102079 - DNA, 233 bp, Glycine max
ttctacaatacttattagatatctgtttctaaggattaaaatgtatgtagaattagaagtcttgagattccaacacagggattttttgatgtagcataatcattatcttatcctatatattcagtattttttggatcaaaagtattagtattgagcattgttgcaaaggttttaaattgtggttgactggttgcaattacaatttcagacaaaccttgatattgtggaaaatt

SEQ ID NO: 102080 - DNA, 241 bp, Glycine max
gaaggcagtcggagacaggccaagtatgctgtgcatgctctggctgcaataacaaaggatgatggcctcaagtccctttctgttctgtacaagagacttgtagatatgctggaggagaaaacacatctacctgcagtattgcagtctctggggtgtatagcacagacggcaatgcctatatttgaaactagagagagtgaaattgaagaatttataataaacaagattctgaaaagtgata

SEQ ID NO: 102081 - DNA, 126 bp, Glycine max
gtgactagttgattaaacgtcgttaatttggcgtcaatacatttccagtcgtttatgcattcgttttgggctgaattgtagattaggatagaactacaaaactgtagataaaaacatctcttggtc

SEQ ID NO: 102082 - DNA, 245 bp, Glycine max
ggggaagctgcagtgtggataggcttgaggtgttcgaagttggaccatgcaaagatggttaccaaatgggtctcttaatcggccaaagattctccgaaaccataaggagtagagtggcctcagacctcattctacaaaaccagcttcgaccctttgccctctcccctcattcacagtcacttctcaaaccacttttttataacaaatcaaccaaattcccaagatattgcttatcaacttaagga

SEQ ID NO: 102083 - DNA, 164 bp, Glycine max
gatgcctccaaatatttacctcttcagctgtgattagactggcccagtcgttgtctttctcaacgcgaagggcttacactatgcattgggcactgtggcgcttctgtgttcacttgatgctacttgctagcgacagctatgcaccttttgatatggcgacaact

SEQ ID NO: 102084 - DNA, 234 bp, Glycine max
  unsure (1)..(234): unsure at all n locations
ggatcaagacttgtgaatgatggtgaaacatcaaattcagtaagcaatgggatgagtgcaaagcatatcctagagtttgaggatgtcgaagcccaacagttgaaacaggaaaaggaggttttgtcatctaatcttacaaatggatctattacagacatctttgacacaattggccgcaactctattgaggaagaagcatgggacctactaagggaatctgtagnttattattgt

SEQ ID NO: 102085 - DNA, 150 bp, Glycine max
ggaagaagatcggacctggcatatacaacttgactacagtggaggaggctcaacgcattttgaccaacgaaactaaagttgttttgggcttcctcaactctttagttggtcctgagagtaaggagcttgctgctgcttcaaggcttaagg

SEQ ID NO: 102086 - DNA, 244 bp, Glycine max
gccgtgaatgcgacaagctttgagtaagggttctctacttccattccttgtgcggcttgtcttatgacaccattttttttatatatagttgagtgatcattatttattctaaagtgtccacttgataactaatactgcctcaaattttattttacctttttatcggtttcgaattcaaactccataggcatctgaaaaatcgacaaaattatggctgttgtcgcaaaacatgcttcattaaaca

SEQ ID NO: 102087 - DNA, 240 bp, Glycine max
cgggggggtgttggcaactcttgatatgatactcaattcttccgataaacaaaattattctaggctatgactttgacaacatacagactatggactaattgaacatataggtacatagggtggccaatatcagatagaggagttcgtacacttgagtatacaataggcatattttacacttgttaagtcattacatgtattagttgtactcaatcagataagttctagcatgtaaaaata

SEQ ID NO: 102088 - DNA, 246 bp, Glycine max
atctatattgataatcatttgtacaatattaagtggcaaaaacaaacttctgtaacatttgtagtcctagcattttgtaaaagtacattcaaagtcatttcacacagtttactaaacaataacaaataaaacttagtagcatattgtgtcttatgttatttgttttcttctgattttaaatctctgcctgatacattctaaaaccattagcgcacctatcaagtgcttcaattccttcgtaaaagg

SEQ ID NO: 102089 - DNA, 230 bp, Glycine max
gttgttccttttggctaaagtaaaaagttcatcatgaaagatatttaaatacaaacagccgtggctaattttgcatctttcaccgaaattaatgttctgtttcattgtttgtgatttgaataggtaaaggttgttccacagttcttatacctgctagagtagtacaggctttgcaactccactttgagcaaatggctgccacgactgggcccaacctggtggcttcctcc

SEQ ID NO: 102090 - DNA, 236 bp, Glycine max
gataggcaaagaacacatagaatgtaattccaatattcgaatacatgatacaaaagagataatacaacccacatattattttaggatgagaattaacagataaaatagctaactataacctaacaattgaattacaatttagttacaactttctatctgattaacaattaacaacatgaatgaccctctgtgtggcaatctcgatccaacccttggacatgttggcctttgtttga

SEQ ID NO: 102091 - DNA, 243 bp, Glycine max
agtacggtgtttatcttaattgtagtggaatttaatctctttgaaagaagctatccataagtagtttgctggctttcttgaccaatgactataatttggttttgctgtatttagttgcaattgaatttacaaatattgcttagtgtgctctgagtgcaccaataacctggagagatcaatttgggtaaatgatactatatttttcaaaagctttctcatgatgttgacaaaaaagcaattatt

SEQ ID NO: 102092 - DNA, 238 bp, Glycine max
ggtgtgtgaagcaaacggttaaaggattgtgtttgtgtctgttggctatagctatgcactaaagttgtgattttgaaggactaatacaacctaaattataagggttggtttctgggggtttctgagaattcatatttgaataggtgaagatacaaaaaatggttgtgagaaaaagcatggggcgggcaaagtcactgcttttgctgctcatggtcctatattttcctttgccacttat

SEQ ID NO: 102093 - DNA, 225 bp, Glycine max
acgctctctctcctttaatgtaaaatgaaagtaaggaagtttaaatctagaatctaatgcaacctaaccaaatctttaacaactagactctctctttctttttggccttcagtaattggaaaattatttgagaagatacaccataatcctttcaatgtataaaatttgttattaagatggatagaggtttggacaaaattcaatttgcattgatttccattatat

SEQ ID NO: 102094 - DNA, 251 bp, Glycine max
tcacattatcaatgttattcgttgcatttaaggaaggaaaaagaacacaagaaaaattgaaaaaccaacatgagaaattgtgtttcaagttcaagataaatgaataagattagtatggtataatatgattgatgcataatcatgatctttaattattattatactcttaaataaattttttatatataaaacaatggatatgtgactctcgactatccaaataagggggaaagtgctcatgaagggtgcta

SEQ ID NO: 102095 - DNA, 247 bp, Glycine max
aggcccctttctttaaagcagtaatggcctgtcaataagatcaataaaagacttcagccagcatatataacacatctgaagataaaagaaaacttataacatattataggaatcaataaataagcacagttcatggataacattcaactggcaagcaccaagagcagctactaaagtctaaaaattcaacaacatactgtcaattagtcaatataatagtaacagtataatgcatttgccttgtatt

SEQ ID NO: 102096 - DNA, 241 bp, Glycine max
tatgacattgaatcatctgccatatttatgtttctttaatttctcttttatcacgcagtagttcatgcatccttttcattgggaaaatactaaaaatcatctgccatattagggtttaagtgttgtgtgacttgcgcccttctttttgcaccgtagcacgatgcgacaaggaagagcagcaattattggattttacgtgtaaaacagtgaagactagctggcaatacagtgctcaacgcaa

SEQ ID NO: 102097 - DNA, 239 bp, Glycine max
ggcatcaattcaaaatatatcatcaattataagcatgggtttgtggaacacaacgaatgcagtgtcttgccgctttcacaagtttggtgatgaccaaaagaatctggtcttccaaggtgatgccacgtcttcttccaggggcatagaactcacaaagttagacggtggaggaaaaccagtgggtggcagtgtggggagcatctgatactcttctccagtgcacctttgggaaagctcta

SEQ ID NO: 102098 - DNA, 237 bp, Glycine max
gtccagccactttctcctatgtaagatctacgggatataaaatgatgcttcgtgttcataatttctcacccatttgccacaaaactttaatgaaccatgtaagtccaatttcttgtttaaatttatattacacaaacacgctcacattctctcttatagatgttaatattcgtcggagatcgaattcaactattggaattcttctatgaaataggcatcttttatttatttttacat

SEQ ID NO: 102099 - DNA, 196 bp, Glycine max
ggtgggatacgaacgttgactaccacgcccgtacgtaccattggttcttccatttcggaagtttctggattaagcaagtggattttttatttgagctgatggatcacaataaaacctaatatttgtgttttgggtttgtggaaaatacccaggatttgaggtgctggagaagaagggataaagtgtatggacatgg

SEQ ID NO: 102100 - DNA, 195 bp, Glycine max
ggcatcaattcaaaatatatcatcaattataagcatgggtttgtggaacacaacgagtgcagtgtcttgccgctttcacaagtttggtgatgaccaaaagaatctggtcttccaaggtgatgccacgtcttcttccaggggcatagaacaaataaaataaaccggtggaggaaaaccattgggtggcagtttggg

SEQ ID NO: 102101 - DNA, 234 bp, Glycine max
ggtgccgaaccacgttaaattcttgtgtttggtattatttttcttacggtgtaatctttgttgtgttctcacgatcctttgtgggtttgaataattttatttgtgtgagcgttgattacccaagatatcacataatgtaaaaagacttcatttaagtttagaaagttacaccttgataaatatgttttgaacttttgatattcatattatgtttttggttgaatgctaacttag

SEQ ID NO: 102102 - DNA, 140 bp, Glycine max
ggcagagtggcaagcagagaccatcaagcactgatgcgattgtagtcgagacagctcacaggtagagcgagcaacggccatccgatttcgatgtcacgcaatcgtgagtcacgtgcaataccacgggtaacagcggtcca

SEQ ID NO: 102103 - DNA, 290 bp, Glycine max
acggcagacgacagaaggcgataccacaccaacactcctctcccacaacactcctctcccacttcctaattcgcctcccaattctcttcaattcaagcaccaaactttcttcttcacgttcccgaacatgaacccgaaatcgaacccgaccctacttcgattgcgcacgctcacctgctcagtaccagacggcaacgaccacgaccacggatggtgccacggactcttcttctcttacggtgaagcctttcttcagcagaaaccagcaaacgagtcttatgagctcaaag

SEQ ID NO: 102104 - DNA, 216 bp, Glycine max
ggatgagatctacaatcacagaatcacaggttaactaagcactcatcactagaaaacacaaggaagaatccaaaatgccgtcgagttcattttgtgtcacatggccatatttgtggtgttgggactccaccagcttgcatccaattctaaccattctagtcacactgatcagtgtgctatgttcgctaagggggttcaagatttcacactatgcca

SEQ ID NO: 102105 - DNA, 262 bp, Glycine max
gtcattgttgtacattggattgtgggttcaattttatttgggaaaaataaactaaaatcggtttgatctgggttccatgttaataaatgaaaagccaaataaatttagtaaattgttgagagtcgttgacaagttggaccataaaatggcttttataatattttgaagtttcaaggatttattttgcaacttggagcatacttaaataattaaaaataagtacatgctttgccttgtctcaaaatgaaatattgaggttttt

SEQ ID NO: 102106 - DNA, 255 bp, Glycine max
gttccaattaatcacccgtctcctagccttagccggaaagcacttactcctaccttgaaaccattcttgtgcacaataattaatttcacacttagcatgttctgcaattcctctgaaaggacaaacaaaaatcaaccacctccaaatgacaatctattgggctagatttaacagtttgctaaaattcttagttgctagccaggaaatgaaaaacgaattgattaattaattaatcgaaaacaagtttcataccaa

SEQ ID NO: 102107 - DNA, 252 bp, Glycine max
ggtatgagttcacacttttatagacagccaggtccaatgaaattatttcttccttctgttttctggtcgattaggatattactccaacatacataagcaagagttaaatctaatccttatccatccaaaggatcaacaaaatcattcaaggtttgtaattgctttacaatgatctccaccggtcattgattcctggtacaagttcttaatgtagaaaccaaagtatgaatgtcatatgcccaagtatagatg

SEQ ID NO: 102108 - DNA, 289 bp, Glycine max
tcgaatgcgagatacgacagatgggaggacatagttcagacttcagacttccacttccaatttccaagttttatcaagaaggtgagtagtgagcatggagcattatgccaggtaaattggtgtccaacgtgctctcatggttaccatcgaaggtgttgcttctatgcaagtacgtgtgcaagtacagattcggtctcataaccgatcctcattttgtttcaattactatgttgtctacaacagtcttcaaggccaagaggtgcatctcttggtaattcgaagacccttt

SEQ ID NO: 102109 - DNA, 203 bp, Glycine max
ggggcggcaaacaaaagcgagagtcttcctttcttgtaacttcaacaaacagcatcagcggaactctctccggtgttggtgttgccgagggatcttaggcaaaggtcctgacgatatgggagcgtgtctttcaactccacaaggttgcgtgggcaggaggttgacctctcccaagaacaaaacccggaacaggaggagagagg

SEQ ID NO: 102110 - DNA, 240 bp, Glycine max
tatgaggaggaagaagaaaaaaatgaaaaaaaaaatagagaaaatgaggaagagaaaaaaaactaagttggccaaagaaaagaagaaggagattgttccatgcataaggaatgaagcaccataccctttggtgccatccaagaaagacaaggaacaacactttcctcgtttccttgatatcttcaagaaattggagataactatcccatttggagaagccttgcaacaaatgtcgctcta

SEQ ID NO: 102111 - DNA, 196 bp, Glycine max
gtctgtttcacagtcatcacaacggaaaccaaccttcacctggagaaacaaaatctagcatctatgttttgtctcttggaaagtgtgaacggacttaaaagtgcattccaatggttttccaaacataccataattgtatacttctactgaatttcctaaaagtattttaacaatttgattcatttgaagattgcat

SEQ ID NO: 102112 - DNA, 284 bp, Glycine max
aagctcgagcggctcgagccacgtatagattgaacatacagtcatacattaaccacgttattctaatgtccgtttatgattattggaaaccaaattccacacatgcaaactccctttcattgaaccttggttttgggacagtgcagtgaccatagcagaagaagctgtgatgtcaaacgcagcagagcaagtctcggagtaattgggaattggtctcacacagagccccatggggaaaatatccacatttgttcttctggtttcttctttggatatctagttaa

SEQ ID NO: 102113 - DNA, 253 bp, Glycine max
tgggttcttgatacccgctcgtgacaatctcatacacatcttgaaaacccagaagagctttcatctgcacatgtcatcgatcaaaattcttttcaccaagaactgggagattgttcatcagaactccattgctcgtcatggctcaaggttcttcctctactcgaattcgtcttcctcaaaagcgtggattcacacagaatctccttcgattgcttctgtcccaggtccctcctttcacgggttgattcacata

SEQ ID NO: 102114 - DNA, 239 bp, Glycine max
tcttgcatcttactttagcatggccagagaagttataaggttagtttagtagttgaaggaaaaaggcccaaaaaagaaaaattcgtaggttcatatctttttctcctaacaaaattaataaattaacagttattgattaaaaaaaactttagcatgttaaatgcgaacctgttttcagtatgcatatcaagtactactggtacacttcagtattcaacaaatggaaaagaggtgcgagt

SEQ ID NO: 102115 - DNA, 250 bp, Glycine max
gtatcctaaaacaaaaaccgacgacgtagtccttgtatgctgtggaccattttcatgaatgcagcaagcttaacctagactaggtacattggttcctcaatcgagacatgactatttctaaagaacatgatccacattaatttgtccattcccattcttcttttgtcggtgtaacgaggcctcgacgaactttcatgtttcgagttcaactctatatattcagctaatcatgcatctttcgctactgctt

SEQ ID NO: 102116 - DNA, 221 bp, Glycine max
gacttaaagtggcaagtttcgtcttactactagcgatataaggtgatgctccaataatggctctatcacgattatgtcgatcggatgatctctgcacttcaggctacgtgatgatggttcggagaaacgtcttgattgtaaccttcggattcaaaacagtttagttgtgtgtcacggttctgatgcgggtctcttcaaaaagtcaggcttgttggaagtgg

SEQ ID NO: 102117 - DNA, 145 bp, Glycine max
ggtagcagttggtgacatggcaaaagcagaagaaattggggattgccattggtgaatgctattgctgatctgattcaatcccttatctttccttccttccccatacccatttcatatcacttccttcaaacttttcaacttcact

SEQ ID NO: 102118 - DNA, 180 bp, Glycine max
ggaagagaagatagtagaaaatattcagggtttgcacgcaaaggagacgtaaaatactcgggggaactctgtatagataacacgccattgaagatctaattcgaattccatcacagacactttacgtttgacctcacaaagttttgttcttattggcctcgaattgatatacagcgcaaa

SEQ ID NO: 102119 - DNA, 254 bp, Glycine max
ggaatggctcagacaacgctcaagcaaagagagaagcaatgtcaggaactcatggctatcctgctgaactccattatctaattccagtgtttttacaaatggagaagaatctatgaaagccattttactaatatgcaactgcacaaaaagtcgagccagctgatccagcacagggtgttgttgtaaaacatctcgttctacagaaaacatgccttctcggaaagatttattcatgtacaagcactggagtatac

SEQ ID NO: 102120 - DNA, 244 bp, Glycine max
atgttattcctgatttactatgagtgtgatgaaatgagtaggaacattaatatgaacgaagatgttgtaggagaatttagataactactgatttgctatgagtgtgatgaaattagtaggagcatagtatgaatgctaagctatgaatctggaagaatattagtataatatatgatggtggaagagtaataatattagttgagttttagttcagctgaagttttagtaaattttctctcgagat

SEQ ID NO: 102121 - DNA, 243 bp, Glycine max
tttcccagggttgagttcctacattgcatgagttgtaggaaggagcacaagctacgtcttaagagtaaaccaaacagtaagaactaccatgatgctttgaccaacaaatactggacatgttatccttggccttatcaaaagtaaggtattatcttgtgaactttctagtttaggtttcagttttatatttttcaaggtagttaacaacatctacatacctggaactcaaactcaagaccattt

SEQ ID NO: 102122 - DNA, 243 bp, Glycine max
tccagctaaagacgttaaagaagcgctactaggagacaacctagtaccttttgaatctatgcttgttatttgatcactttttatagtaggacgcacctagttgctcatgatcctggggatttaaataaaacaagcgcaagctcggaaggtagtcatacctcacaaaatatatatatgtatgtttaggtagtgaaaataccttagatatgcatgtatgtaaacaaaaaaatacttcacaaaata

SEQ ID NO: 102123 - DNA, 279 bp, Glycine max
cgacagaagggcactcctacctatcctatgaggatgtagttttaaattaaatttcattaccaaataccaatatgagaattttataggaagtaatctataaacatatttatatatgtaattattatttgaggtgtgtaacttatcctaactttaagaaacctccaaaaatttaactcacctttactttcacatacgaaaaataataattggttgaaaatagcatgttaaacatttcacataatgtatatatagctttggggtggaaattaagctacattt

SEQ ID NO: 102124 - DNA, 241 bp, Glycine max
ggagcctcgaaaaattctacatttatctatcttggttctctctctcaatctaacgatttcgccattcaacagcgatctttccgtctccatcatcgtcatctacgctcccatttcctaaacctcaggttggttcttcttcttcgtgttcccgtgtttcgccttttctctctctttctttcaatctcaaaccacagctatgatcctctttcgcggaattcggtaattcgccttgttgttggtt

SEQ ID NO: 102125 - DNA, 233 bp, Glycine max
ctacaccatatcgtctagtggagcccgtccaagtgatcgaggtaacgtcatccgaggaagacgccgaggaggatctggaggagctacctcctgagcctgctgtggatgcgcttgactatagagagggtgatgaggatccagttcttgaggtggattctcccgaggaagtcatgtcggcatctgaggcagactctacggaggatagtggcacgggggagatggcgatcagcgga

SEQ ID NO: 102126 - DNA, 242 bp, Glycine max
cagtgtctagtcatactattcttagatgataaacaaagttaatgtccacatgtaataaacattacaaaaacaaatgatgtgcatcctatatagcaaataatataaatcatgatggatattttcatatgacattgaagtcttgagccatccaatgcaggatcccttaaattatgtaaaagctaagtctttagtctatttatcaaacaccaaataacctgtacacaattctgattcagaagtca

SEQ ID NO: 102127 - DNA, 244 bp, Glycine max
agaagggcgtatttatatttctagtcaatgtgagatatttagcacctctaggaggttaggaattcttacacaatgtcttgagcctgatatacacatggtgttgaaagcagggacttaaacttagttatcatagacaatctgctttacaaacactgcataccattttgtgacggtcaccatatttctctaccaagtttaattatgcttgtaatttcttatttcggtggctgattccttttgtgtt

SEQ ID NO: 102128 - DNA, 241 bp, Glycine max
ggaaacagctgaaaagaatagcgtgacaatcagcaaaggcagaaagagctgaaggtgtgacacaaaagtagcaaatttcagcattagcgtagaaaatggagttcgttcctgaagaaggcaagcaccttcacgaggattgctccactctgattttgcctgctctgtcaattggcaatgtggggcagctggttgcagatcttttgatttcatcaatgggatcagagagagttgggtatttgga

SEQ ID NO: 102129 - DNA, 281 bp, Glycine max
attccctcacctttgagtccctgagtccgaccattaacttggcctacatcaggaagaactactggaacccataggatccgacgatcacatttcttgggtcccgcaaggctagggctcgaggtccttcagatgcttctacttctacccctgctcccactctagcacctgcaccagcactagttccttctctagcaccctccggccccttcacttcgagcacaaatgtgatagtgtagatgctgcagagcctccaccacggcttatgcctggtgatgcaaagt

SEQ ID NO: 102130 - DNA, 106 bp, Glycine max
gactgagggttgtccaggagaacgatgtaatttaggcagagatgagttgtatcatacatatgcgggatatctaagaaataagcgtgtcattcttctacaatcccaa

SEQ ID NO: 102131 - DNA, 214 bp, Glycine max
ctatcatgtatccaaggatagctgagcaagttcaataatgattggttaatagattcctgtcaaaaattgaatgagcatcaccttaattgccttcagaaactagaatttacttggtgccacagaactattctaagtacaaccgattttgtttcacagtattcaagtcaagttcttagtggcaaccttacatatagtgagtttagataatatacaa

SEQ ID NO: 102132 - DNA, 251 bp, Glycine max
actccattacattcataaaattgtgtagatgaacaacaacaatgtgttttgcaaacgacaaggaataaaatacgtgaatatgatgcgttttacgtaggatatactaaaaaagcatacggtaaaggtattaaatttaacaaaatccttatatcactagaggtttcacaaattcaaagaatgtaggtcctaaagaagaagaaaaggataagagagttgttttgataagcttccacgacatgcgagttcaagtg

SEQ ID NO: 102133 - DNA, 233 bp, Glycine max
tcctccatgagataacgaggcaaaacaatcggattgatgacaaaatgctgcaacttgtgcaacttgataactggttctacatgttgacgccaatggagatagtttaagtcatcaagtttctcagcgatagagtttgggaacaactgagaaatgaaattcgaaggagtagaagccatggatgcatggatctggaacttgtgaagggacgatgattacgaaaaatggctctagat

SEQ ID NO: 102134 - DNA, 250 bp, Glycine max
cagacttgtaaaatcgcaaaacaagaataaaaataaatttaaaattagcatcttctcgtaagttttcgaaatgttcagcgaatttgtcttccaatttttcttttgccatccttctagacacaaatataatagcctaataatagccttgtccttatgctttgggtggttccattaattgatagtatttgcttttttatttcttattgtcaactaatttgtcagccatctatttttcatggtagtcatatga

SEQ ID NO: 102135 - DNA, 256 bp, Glycine max
tctccaagcatataccagaacagacagtactgtacattgatgtgaaatcaaattattacatgatcgcataatagaggaaacaagtcagtaaggacaagcaagacagtgggacaaaaaatgttatgaatggtaacctagagcataaaacttttgactaccacatctaaggttagctccatagttgtagacaacatcagcaaggtagtgtatgggagatcacgatttagtatagattagatgttagagaaacagccgt

SEQ ID NO: 102136 - DNA, 264 bp, Glycine max
cctacgaccactatttactttgtatttatcggtggttggcgtatttcaacattaactaaagtatggacactgtgctttaatttatacatcaggagagccaatgttagattagttaattagatgaattagcatagattagttattagagatttttataataccaaattgatgagaattgtatggactctgctttatgagtggctcatgatgattaagtcactcagttttagtagtgataataacttcttttacaccatatttttt

SEQ ID NO: 102137 - DNA, 247 bp, Glycine max
aatgtccactgatttcttgctttctggtggaggcttcttccacaaccaggaccccttttcctcctaaatttgaccaaaagtactgggtgagaccatcaaagtatatagattatagaacatcaatagtggaacaacacgtaccactcaaaggatttcaaaaaataattatggttatacgtgaatttaatcctacaaaacataaatcaacctatcaacagcaaaagggcaagaacaacacttacatcaa

SEQ ID NO: 102138 - DNA, 269 bp, Glycine max
agagatcggaagtggaggggaaaaaagtagaggtgttgaagttggtttaaaagctcaactgccataaccaatcaatgggaaatgaaaagagttggagtagttagcgttggtattttgtgtgtgttgtgacctctgtagaactagacatgttaagctctgcaagtggcatctgaaacaaattaacttaatatggtctcacttctcacacaaagttggctgtttttcttgcttatatctttagtcagctacgcaaatgtcatatcaaatca

SEQ ID NO: 102139 - DNA, 279 bp, Glycine max
agaagacgacagaacggccgactgtcaccagcgcattatagcacaccacacaaaaaagcaaagcataaaacaactgttacttacacacgccatgcgtatgcgtaagggtatgggtattggttaatgagtggcaaatgagtggttattgagcagtatcagtcaataccactcgcgattcagcgcctatgacatcggttggtgtggcaccagcttcgggtttgagccaagccagtgggcatggaccagcaggcgtcgatagatcgccacaggagatgaacg

SEQ ID NO: 102140 - DNA, 249 bp, Glycine max
atcgtacttccttttctactcattttgctttatagtggggcaggtcccttctctattaaatgcactttcaacgacgactaaaatattttcactccctaaagacatctttcccattagttgtaaaaatggtttttttttttttcgtaagtcgttgaagatgtatatggggctgttcccgatgatgggagatttacttttttaccgtatagccttgtgtatattaaatgacttttttttttccattaattc

SEQ ID NO: 102141 - DNA, 238 bp, Glycine max
gctccttccatttcattgcctttaataatcattaactagtgcatgttcccgtgcgggacaaattatgtgtgagaagtacaacttttttatttattttaaaaaagtaaatttaaaactttggggtctaagtggataagtcatttgtaatttcgaattgacttaaatcaattcaaatagttttaatattgaatttgtcaattggttgagccattaatttaaatattactgattattgatt

SEQ ID NO: 102142 - DNA, 165 bp, Glycine max
tgggtggcagttgtgtgacacagaaataagctagagcttcatagttgtcttcttctttttctcagccttcctctctcccttcagacaagggacaaaaatcagtgtgtgagagagagagagaaatccaaaaccatgtcccacagtcatctaaagttcgccttggga

SEQ ID NO: 102143 - DNA, 228 bp, Glycine max
  unsure (1)..(228): unsure at all n locations
atgtaggttccaatctcactacctatgtgaggacctttcatgccctggctcttataaatcccaagtgcacaactcacctaaacttttcattaccaaaaaacatggggtatattctatctcatatacaagtaaacatattatttttccttaacctgcaatcctatcagcataagtacaagaatcccacacaactatatgaacatnattaggctaacagtctaacaccct

SEQ ID NO: 102144 - DNA, 257 bp, Glycine max
agcatgtttggatttattacttacatttttcaacagtgtcaggtcgatcaaactagcatctatttcaatactaatcacgtgtcacttgggcttaaatcatgtatgcaaagactagagctttagatcagcgggtaaaccaacctttgaatttcatgcacattgttcagtcaggcagtggaagaaaaccatcataagcaagtcagctttttgccttcaaaagggggagagggggacaaaaaccattttatcaagcaaaa

SEQ ID NO: 102145 - DNA, 239 bp, Glycine max
ggcagttaaaaaactgagtgatgatggactacacctacgacaccaagcatcgcacaatgggggttgggtctagcggaaggagctagtctcccataacgtggagaaccaatgttcgaattcctgccgggagaggtgcccacatttagtgtctaaccataccttgaacaggattgcttccgaaggaggagacctgtgcaaaaccaaaaccaaaaaaaatgtcattaatttatgcaatgtaa

SEQ ID NO: 102146 - DNA, 272 bp, Glycine max
aaataaacgttggtggcgactccacgcatttttctcatgagaagatgcatctttgagtcttgcgtcgccctcccgtcgaagggtaggttgcgatagttggcgactccactggggaacgacgtgttagagagttaggctattcagtcagtgtgcaatgctttatcatgacttcttctttatttattttcctttttcccttttatcttttgttttgtccatatttgtatataatcttttccatgttgttgtgtttggtgtgtgtttgtttatcg

SEQ ID NO: 102147 - DNA, 228 bp, Glycine max
aagaataatggtggatattacaaatcccccccctcaacatgaccaagtcattctattacctcaaaatcaaaaggaagaatgatgattgatattatagattatcttccaacataatcaagtcatcctgttacctcaaaatcacaaggaagaatgatgatgaatattgaagattatctccccccaccccccgttgaaaaaaaaaactgctccaagtcatctcattatctc

SEQ ID NO: 102148 - DNA, 248 bp, Glycine max
taccctcttctcgagtgtctaacccttaaaactgattcatgcatactttctttagaccttaattagaagttaccctctcccgagtgtctaacccctaaaagaatataaagatgagaatgcaagagaaacatagaaaagataatagaatagaaaaacctggaaaagactcatgtgacattgataaatatagaaagtacaccatacatcgttggttttttaggcctgctagatcctaactaggggtttag

SEQ ID NO: 102149 - DNA, 253 bp, Glycine max
gataagtgtgaatgaaattcacatcagctaagaagaaggttgaatcctatagtgtggataaaattcataaatttaagctttaaaaactttaataaatgttcttattggatctttcatataaaatctaatattttattgtctctctctcaaaaaaagtacatttattatacacataaaaaagtgtgggcaagtttcatttcccttgagttagaatcactttatacttggaagtttgaaccccaaagacttttat

SEQ ID NO: 102150 - DNA, 245 bp, Glycine max
ggatctggctgttatttggcttttgtgatggtcttgttggagggtagcaccttggtgctttgtattatataatctctggtaccactggtactggttttttttattaataatatatatattttcagccttccaaaaaaaaagtgatatctggtcctatttatactaatattcttgatcaattactagtgtgatactatgaattaatgcacactgaagcccaatatcactcctaacataacactact

SEQ ID NO: 102151 - DNA, 253 bp, Glycine max
cctctgcattatgcttgaggttatggtccgcaggcgtgacggattactcgagttgcttctcggtgatgatgttggagaagacatataacaatctgtttgagggcagtatttcaaggtacactttcctgaccaatgatgaattttgacatcaaattccggaaaaagcagtcgtcccataacttgaacatgagagatgctgcaccatatatagtaatccaatttatcaaagatgaaaaacagatcagcaaacaga

SEQ ID NO: 102152 - DNA, 241 bp, Glycine max
tatgtacatatgctactaaattagtttacaaagataattagttcttaaggccgctcagagatgaatgcttccttctcagattcatcacccctggtattttagtcatgaattcttcaattcttcactcttctttaaatgtatgagtgctataatatgtttcgtatgttcttctcggtccatatatacctgagtgctagaatattttcgtagaaaaaaaattaacagaaccatgaaattttgt

SEQ ID NO: 102153 - DNA, 234 bp, Glycine max
catgttgatgaaagctatggtactgtggaggaggatggggaaatctgtggccacttctgctgccagttgtatcatgacatctctgtggaccaattcttgcattctctgatgagcttccattagcactgagagctggagaataatggcaacagtcagaagaccaaatctattctattcaccacgaaagaaagatgactacattttttggctctggagtcaacactgtgggaggca

SEQ ID NO: 102154 - DNA, 242 bp, Glycine max
gttgacattggttgaaaaaatcctagttgacatctgtaaaaaaatcctagtcaaggtctgtaaaaaaaatgcctagacaacatcggttaaaaaatagtcctaaccgacgtcgaacaaaaaacctagccgatgttggccaaaacatcactgaccgatgtcaaccaaaacagtctgggcaacaacgacaaaaaaatatccctggtcaatgttgacaaaaattcccatgacccacgccagtcaaa

SEQ ID NO: 102155 - DNA, 237 bp, Glycine max
ggagagtgttggttttatattttcaattagttcagggggggcattttaggtgcaatactataccagtatgctctaaaggattatgcattcaggaacttactcttctggactcagttgatttatggcttgtcagggatgcttgatctgattctggtctttagattgaaccttaagtttggcataccagattatttctttgttgtgattgttgaaagcatagctcaaatgactaatagg

SEQ ID NO: 102156 - DNA, 215 bp, Glycine max
ccatccaaaatataaaataaggaaatagataaatataggcaaaattttacatttaccatatccactactatatacgtgagtacactagtaaggagacatacacggaaaagagtgagattacaatcaaaatactgattcattttgtaaaagaaaacagtcagatttacttcttcatacagcaagcaagaatgtattcaatgttgacaagcatctac

SEQ ID NO: 102157 - DNA, 211 bp, Glycine max
ctcctcataaatgggggctactggtgtgagaaagggagagactttcctttgaagggaagacataagtctctgtctacagttgtatacacgatagttcgtacaatgaaccatcaccagaaaaaaatatatataatttttttaaaaataatatcttatatacctcaaatcaagttgacttgtttgatattccaagagattatccttttgatag

SEQ ID NO: 102158 - DNA, 263 bp, Glycine max
gaacaatggtatctgttccatcccattccttcttgttccatcctctttttatatatccaaacaaaggaatttaatcccattccattcaatctcatttgaccaatccaaatgtgcacaaactcacatctaagatggttgaaattaacaataagcaattaagtataacccttaaatccagaaagttagtgaataatgaaagtagacaagtagtatgcatcaaaataattttagatataacattagcaatagcatgtcaacatgta

SEQ ID NO: 102159 - DNA, 239 bp, Glycine max
ggaacaaacctatgttttacacatgtaagaatgagaaacacctatctctattttaaactcggttctcccttctcaactttctggcgtgttaacatcaaggggtgtctcaaatcttgatctttatcatccatccttcgctcagagaagcttctaaagaggaatagtatgttcgttgaagatagtgggaaaaatcatgtcaatttcaagaactcaaatggggtgtctcttggtgctcatac

SEQ ID NO: 102160 - DNA, 263 bp, Glycine max
tacgaagacgacagaaggggaaatcaacaacccaacatcaaatagcaattcactagccaccaatctgaattttgtccaatatcttgaaaaacagaaccgaaataaacaaatcctggactaaaacctaaatcaccattttgtcctaatgtgtacgatgtttgtaacttttctgttttgaatcaggccattatccaccttgtacagccttaggaaagggtatttgacctctttaaacagattgccattttttttatttatttgtc

SEQ ID NO: 102161 - DNA, 220 bp, Glycine max
atactggatcaaatcataccaattactgattcactagttggatcattgattcactgtctcaaccaaatcaatgattggactaagtttcataactttaggtggtatccccttgcagcataacaaaaatatcttttcactaccttctttttacttggtttttttgtttgaaatcctaaaactaaagctcctaaacatgagttatttaatttccagagtgcct

SEQ ID NO: 102162 - DNA, 173 bp, Glycine max
agggggaatgatgcatgctcagccttctaatgctttgccaagttcttgttgtctgcttctgattgtgaatacattctcaattcagtgtgttctgtgaaaatccttacaaattgcaatgtataatgtaataataatagtagtaacaactaaaaattgattgttgactaatgggc

SEQ ID NO: 102163 - DNA, 222 bp, Glycine max
atccatgctctttggtagggatttcctcttgagcttcaatctctacaatatcttcttctattctggccacatattgagtcacttcttatgccagcttaccaacctgaatttcttgattgtagagttctaactcaggtgtttgatcgaggtcgtacccgaatcaaataaacattaaaaatgcagtaagaaaacgtgtaacaaattggggggggggtatttgct

SEQ ID NO: 102164 - DNA, 235 bp, Glycine max
acggctgcgcaagacgagagacggggaatatcaagcgaagcatagaaacatatggatcagacagctagccaagatcatctagaggtgtctctctaccagtgaagtcacgggctgtaaatctaagtagcattgtagaactctcgagtgagacaccatcaaatcgaagcacggatcagaggtcgagttccacgacacggggacgaagcacaacttgatctcctagtagtctaaggat

SEQ ID NO: 102165 - DNA, 208 bp, Glycine max
tacggctacagaagggtatcattatgggattattctaggcaattccctccccgaaaaggaaagaaattagtacacgctttttactttttttctttcgatatctgtatattggggattataaatattatctatctatttagtgagaagcttggattttgttcttatctactcgcatattttactctctagtgttttaattttgacataa

SEQ ID NO: 102166 - DNA, 217 bp, Glycine max
attaggctggtaatagaatcacatatcccaacaattctacagttcaacacaaattcatccacttagaataatcgaaaacaaataatcttgagaactatttgaaatttggaagtattgaagtggaaggggcttacatatggtaaaatagtatattgattttagcataacctcgtatttatataattaaattgagcttacaacagtgttgaccacctgg

SEQ ID NO: 102167 - DNA, 221 bp, Glycine max
gggaacacaaagcagaagtagttcttgagataaaaacggaaaggccaaaggttgcaaagagagaagaaactaaagaggcttccaaactaccattcaaaagagagatgggaaaaacaattcaaagtgcagaagataggaggcctaaaacaggagaaataacttcagagtttgaaaaggttattgaattcaaacaagctgtagaaaaaatgcatgaaagtcac

SEQ ID NO: 102168 - DNA, 233 bp, Glycine max
ccgacaggttgagatgagacgaacaaattggagggatgcatctgatgtccattccttctacttcacaagatttctagaagagatgaacgaaaaagacttgtggtatgagtttaagaaatggggggacgtgcgagaggttttcattgcaagaaactgaaataggcatggcaggaggaatggtttcgtgagattcaagggggtgggcgatgtgaggaggtttgaaagacaactgg

SEQ ID NO: 102169 - DNA, 229 bp, Glycine max
ggagtggaagtagtagcaagtacgtcgtatatgtggttgatcttttgctggatgcttgatttggtccttccaattgtcagatctggatcaccggactcactcttcagactcaatcacactgaatgggctctgaaggcgaccatcaacatcaacaacaacaccatcaagatcacgatcatcatcctcatgatcatgatcaccatcatcatcgcgacagaaggggagacat

SEQ ID NO: 102170 - DNA, 240 bp, Glycine max
acggaagacgacagaagggcatatgtctatgataatcacaagaaaataattttgtgagtgtcatatatagaaaaaaggcatcagatttcttcattgaactccatctaccaaacattagccgttaaaacaacatgcatgatgccttttcaactaagtgcttgtttggttaattttattttgaagtaatatatcttcaaacattagtgttcttaagtttgggtttagcctaactcagtcgag

SEQ ID NO: 102171 - DNA, 206 bp, Glycine max
gtgatgtatatatctcagtaatatcaataattgaatttttatcaacaacgagaattactcaccttgctacttaaagtaaattacttattttagagaagctagatctcttaagctaatgtcttaaaaattcatgtaaacttctgtacataaaaatgtcttgtaatataaatttctgtacagcagaatgtcttaaaagtttatatata

SEQ ID NO: 102172 - DNA, 229 bp, Glycine max
ctcgagccgaataagggccagggtcaggggttgtcagcagcaagtggccatgtggatgatgagggtgccttggtttctgacttttgttattaatgtcttttccttttttgctttcaataaaacatttatgaagcctctctgtttatcaaccatgtaaaaagtgatgatgacatggaaaatgtaaaaattatctttgctcatgatgtggatgcttccctgtgtggagagg

SEQ ID NO: 102173 - DNA, 253 bp, Glycine max
tctcgagccgaatcggctcgagtacgcgacagaagggggggaaccaagtacataatagacagagtgctgaacctgatcaggaagtatggaccaaggtgataagaaggagggaagcaaaggcagcaaagaagaactatacccagaacagatcactacataacctctcggcaaaccaccccaactggagagacaaggaggatattacatccttttacttcactaatttcacagacaacgttaatgaagtgaggct

SEQ ID NO: 102174 - DNA, 193 bp, Glycine max
  unsure (1)..(193): unsure at all n locations
ggagatttnaaaaaaaaaaaaaaaactaaaaaaaaggggggcccccaattattgcgctcttgacccggggatttattcccggccgggacccttgggggttcaaattttcccctaaggggggggttttaacctttggggcaaatcggggaaaaacttttccccggggaaaatttttccccgcccaaaaacccaa

SEQ ID NO: 102175 - DNA, 223 bp, Glycine max
ggaaaaaaaaatgccgggacacgaactcgaactgttttaggcttttagcttctctgagttttgacctacaacactctccaatcccctcttgtgtgttgtagccgccccgtgatcatcaatggcggaaactgctgacaaatctcaatctcacataaaagaatattatgtgaatgacaagcaaacaactgtagttgaaaaagctgttgaggtcaaagaagttgaa

SEQ ID NO: 102176 - DNA, 199 bp, Glycine max
  unsure (1)..(199): unsure at all n locations
cagtactatcatgtagttatatattagtagtattatgtttggtacaattatttattcttgtaataattatcttaaatgtcacatgtanagttatctgtaattggttgcaagtgaagacttnttttttacattaccaaggtatcaatacactctgggtataacattcacatagaagcaagtggaaaacacgatagggtac

SEQ ID NO: 102177 - DNA, 254 bp, Glycine max
ggacccttcgcttctacgagtccttttttttgtggaatgtgttccagttatattatcagatcaaatagaattgccattccagaatgtcatcgactatagccagatatcaataaaatggccatccaatcaaataggccccgaactattgcagtacctggtatctataccagatgaagaaatagaaaaaataatagcccgtggtcgacaagttaggtgctggtgggtgtatgcttcagattcagaatcttgttcag

SEQ ID NO: 102178 - DNA, 238 bp, Glycine max
gatcgaagcatagtatgggaacccaaagtgcttctctcctctgacttggactctctcttgctatccttctggctattagcactgctgcaagtgcaactccaagaagcgcagtgccaagccaccatgtgtcatcattcatcagatgccttcttccttccacttttctctttggaattggttcttctgcttaccaggcagaaggagcagcaagtgtagatgggagaggaccaagcatatg

SEQ ID NO: 102179 - DNA, 235 bp, Glycine max
acctctcacgttctacgtctattagtgactactgtagtattgctacacgtgggctcatttattattgcgtggacggaaagtcatcttctattaacatcccatcaatttttcagatccatccgttcattttaccaccgacttctctcacccccttagatttcatccacgtgtccattgtgccacccacccacccatagcattcatacaacacacccataatcatcattccacaaca

SEQ ID NO: 102180 - DNA, 246 bp, Glycine max
atctcccttgtagaaagagaaaagttttgaaaatgttgccttgttggttttcttattttcctttttgtgtgattgtgtgaaccttatgttagacggataaatgggatccgcgcaaatcgcaaaatggtcccctatatactcattgttcccatactctatttggttcattctaactgatgcctaccttacatacaacacagacaatatgagaaaaagagagggaaagaaaaaagcatgaaagggtgc

SEQ ID NO: 102181 - DNA, 247 bp, Glycine max
gaatctgttggattcacaacaactggtcgaggcactatcactgtgtgacgatctactccaaagccagtctcccagtagagatggaaaacatgaagatcataagaaccaacccggtctttctgtttatgctcagctaggaccagaaaatctgaagaagtatattgaagagtgtcaaaatcttgcccttgataaagcaaatatagagaatgatacaccttcagagtttcgactaagtcagctggaattt

SEQ ID NO: 102182 - DNA, 250 bp, Glycine max
tcctccacaaaattgtttaaccattaaaaaatattttatatgagtgaaaagataaaatacgacacactaaagataaattaagaacctaaattaaattatattattatggtaaaaactagctactattcttaaatcctgtgacaataaaagatttatttaaaaaaagttaattaatacttacattaaagatacattaacgacgagaaaaaagagggtttacgacattattatattatggcaaatgctaatt

SEQ ID NO: 102183 - DNA, 205 bp, Glycine max
tacattcttattcatatatattttttttaggctgaaccattgcaaaagttaagccttttgatctctttcttaaaagaaaagcagaatttcgtataaggaaaaaaaaaaaaaaaaaaaaaaaaaaaaagggggcccctgccatgagtcctcttagcccggggatttattccgggccggttacttgaagggtgacaatcttccccaa

SEQ ID NO: 102184 - DNA, 250 bp, Glycine max
tcccccttgcgagctaacaaagcacaatcccccagtatccaattacaacatattatttatggtaagttttataccattacccaaagggccaatgaagctgcaaagagctaattgatcaaaggaatagtcctcaactagcaacatgtccagacccgacaaccacttcataataaggtgtggacccaatttgtgtgatggagatgattcagccaccatgtcatcatccctacctaacctataataggaataa

SEQ ID NO: 102185 - DNA, 257 bp, Glycine max
gaccaacaacaacgtcgtaaaagttcttccctttcactttctcacaatcccatagtaaccttctcttctttctgccactttttctcagtctttaatggctgcccgcatcaaaattccgcgttaaacaatcgtgggccggtgcaagttagcatttttcttatcttttgggatgtcaaaaagatacccaataggaaaagtcttttttcttcttcttttggggtgctttttttttgtcaaatttgattccagtttcaccc

SEQ ID NO: 102186 - DNA, 252 bp, Glycine max
  unsure (1)..(252): unsure at all n locations
aatgcaaaaggcgacactctccttcctacgtggcatgtcacgccaatgccagtggcggcttcaccattctcgctagtggctatggcgggttaagctctcttgctagtggctatgacagattccacacatcgtacgtaaatatngaaccnnttcttccttccggattacaattcattattttcccagcttctttggcttttcaattatccttccaagaaggagctctattgctctctcggatcgccctatcat

SEQ ID NO: 102187 - DNA, 236 bp, Glycine max
ggtggtaaattagagaataacaacgtgccatgagtatatggatcatgagggacgtacccaacagtcattggtgatcagtactccaaaatatcataagcgttatatcttgccagaagagggcgctccccatcaccatctttacaacctcagagatctggagctttttcattcacttcgaccatgcctaaaaaagatttagagaggcgatcggtttcaccataccggttcccccttct

SEQ ID NO: 102188 - DNA, 249 bp, Glycine max
atcctcaaaaagttactactatttctttgttcttaatcgagggggagccaggggggattcattgcttcagttttgaactattgatttccagcatttaattgcatgtattgataagtatggatgggtggtaagctttcattttattatattgaaaacaaacctgaacagcagatatactaatggctccatccaaaactccaggacaaattcctagaccctgaaaccaaatgacaaagtgacagagaaaca

SEQ ID NO: 102189 - DNA, 251 bp, Glycine max
tcaccataataaataaattcctccgtcactctcttattagttgcaagtcaagtcattttaggcgtatcctaatacttagagttgatgatgaaaattaagaaagcccgtaacttaaaaaaaaattgctcacttttatccaatttgtgttaaaagagttgaccaagcaatcatttctttcttaattataagatattttaaaaaaaatatttgaatctttttataattttttttaatttttatatgtattaatt

SEQ ID NO: 102190 - DNA, 248 bp, Glycine max
ttcctaatcgacatcatgcaaatttcattcagggattgaatagaaaactcaatagccgacatcggtcgtgaaatggccctgactgatatttttcagccgacattgcgcaatttttttataaaaaacgctcgctggccgataatgtgttttcttacggcaggggaagttttcttgtttcggtgttgcataaaaaacttacattgtaggtcggctaagtttttccgtgcgagctcaaccgatgtttcatt

SEQ ID NO: 102191 - DNA, 245 bp, Glycine max
  unsure (1)..(245): unsure at all n locations
acatgatgctaatcataatgtttagttgattaccaaaggaaattttagcattgtttgataattaaacatttgtaaatttctcactggactactggagaacttatcacgtaagtttcagaaattaacgttgctattcttcattatatttacgaaagtgcaataaaaataagaatanaactaagaattaacctactataatgctcacagcagcaaacaacacctggtagaacataattcatctactg

SEQ ID NO: 102192 - DNA, 240 bp, Glycine max
agggttgtaattttttagatgcaaatctatgttgagtcatgatcaatccatcaaggccttgatgaatgatcacgaccttgatgaatgatcataggcttgatgaaataatcaaggcctcaatggattcatcacaaccttgatgaaatgatcaggactttgatgaatttttgacactgagccctaatgaaattaacacaaccttgatgatgttgaagttggtcatgatcctgatgattaatc

SEQ ID NO: 102193 - DNA, 270 bp, Glycine max
  unsure (1)..(270): unsure at all n locations
tacggaagacgacagaagggctttgtagaatttagttcttaaaaaatattttataataaatacaatcaaacacactgttctgctgaagctgagctgaccagagaaacactcgtctgcccaaatactgagacaanagattcaaaagatttcttatatatgtgatcttaagaagagaggtatagcatgtttaggttgttgttcaatcctcatgaacgtatttttatataagaatgggttttgtatcttttgctccaaagatacttttaaaag

SEQ ID NO: 102194 - DNA, 244 bp, Glycine max
tgagagacaaaccttcctatcactcactttctcttcaacgacacaaaaaaaaaaaaaaaaacctaaacccaaacccaaattctccgaaattagattcctttggggaaagtttttcccaaaatcaaggcttccttaagaccgggatcgcttttctcccttcaatcaaattctccgcaacaaattttgcgatctttccgtggttccgaatcgtggaatttggggggaaacgcccccatttttaaaa

SEQ ID NO: 102195 - DNA, 227 bp, Glycine max
ctccctggtcatcttaataccatgtgagtcgatccgattctagctttataagaatctatgctgacctagtgactgatgacttgtctatggatttgatgtgtgattgcattctaaatttgatttgtctcggcatgctttacaaattcatgctcgttgggctaaagtgcattattttgagttgctattctttttgtgtctcttgcatccaaacttatgctagattgcta

SEQ ID NO: 102196 - DNA, 229 bp, Glycine max
cgcgagaagacgacagtagggtacctgtattagccataatgtaatgatgaaaggttgatgaggataagattgattctatgatcttccaaatgtagagtgccttctttcttctttgaatatatctcttctgatggggctagaatcaaaaaccaagctgtaagtctatggcttctctctacaaatgggggccataacctaaatttgatacttgtaattggcccccgcatca

SEQ ID NO: 102197 - DNA, 242 bp, Glycine max
gactgccttcattgctagcaatacttatcgctacctccgacggttttacttgattcttgcgtagagactttttggctgacttggagtaatctgttctccctaattgagatgatctagcagtttctatatagcatgaatccccatccttgaaattattacttggaagcacaatacaagacaagtccaatcctttacccccaaggttgctaccacagctttcactgggtgatttatctccagaa

SEQ ID NO: 102198 - DNA, 188 bp, Glycine max
gaaaacaaaaaccgtcaccaaaaaaaaaaaaaaaaaaaaaaaaaaaaaaggggccgcgacttagtgatcccttgaccccggaatttatttccgggcgggtatttgagggtgaaccggtttccccaaaaggggcccgtttaagagttggggaaatcaagggcaaaaggtttttccgggggaaatttttt

SEQ ID NO: 102199 - DNA, 248 bp, Glycine max
ccccttggtgtgagatttccattgtgtgaaaccagatgttacttttattgcctgctctgctgatatttttgctggtcttgaaaactaaaatattgagaataaggagaagaccttataacctcatatttgtaaagaaaaatgcatctttgcaactggttaaaaagaataagaacattttaattttaaaataagggtgaaaaatttatggatgaaatatatacgaaacattgtatgaaaagctcatccct

SEQ ID NO: 102200 - DNA, 244 bp, Glycine max
gacagagtagtgcagttatcaggagatgttcctgcggtaatgaaggctttggaggagataggttgtcagctaagggaaaacccaccaagacaagtcatttcaattagcccaacatacaattatgctgcaattcgaccatcccaaccatatcttgacccaacttcagttgattatgttacattcgagatgctgatttcggaaacaatggttggtgggttgattggccggtgtggctcaaacatat

SEQ ID NO: 102201 - DNA, 234 bp, Glycine max
tttatggataataatatggtactctaataaaatacagtataaaaaaattaactacaaatatgtatttaattagaattatttcacgtatatttcaaaacaagtaaaagtattgaaatgagaaaaatggtctcaataaagaatttgtacggacaaaagttcaaaaattgacttcaaataatagagtgatgaatgaaggaagcaacctgtaatccgcgacaaagatttgggagtagc

SEQ ID NO: 102202 - DNA, 202 bp, Glycine max
agattaattattattgtgtatcagaattattgggatatatctctatgatccattaatgcacaagaaataatgtctcattaataaggctcttaaatgattcattaatactactccattatgcttcaatccattaatgcaggggatagaatctttagtttcagtgtataaaaaaaaaagaagataaaaaaaaaaaaaaggggcc

SEQ ID NO: 102203 - DNA, 242 bp, Glycine max
tcatctgtaatacagacaggctttgaatatagctaggttcattacatagtcaactacaatttgtatatattggtgaactcaattcttatctgtttttatcacgttcagaatgcagtgcgacagcaattgtatttgttcgaacttagcctaacttttcaaggacacgtcacctcttctcttcaatagctgcctggataattctatgggcgaaactgccaaagcaaagcagtaccggagggaaa

SEQ ID NO: 102204 - DNA, 258 bp, Glycine max
  unsure (1)..(258): unsure at all n locations
acgacagaagggggagtttttggttatctgagttctgaattctgaatcctttccccaaatcacacttgcgagcccactctagtgccccatttcatgtcatgcttgctagattcagctacacagctaagctaagatatatagtatagctcatcacacgctttcaagttccaggccatagacacagacacctcagacctgacanaatacttactactatatctactcacatttacattcccactctttctttcgccttac

SEQ ID NO: 102205 - DNA, 231 bp, Glycine max
acttaactgcttaagggttggagggataaggaggatgtaagctccaattactaacattttccaataaaaaaatccaagttaatttattggtcgttgaattattccaacagccaagatcatgtagcaaacgacagaactgctgcagagaatccaagctgagttttcgtgcttttagccatggaatagaatttgaaataggtgcacagtgacatatcaattagttagaactta

SEQ ID NO: 102206 - DNA, 224 bp, Glycine max
gggagctgttatttttcaaagagaggacaactgtctacttcttcctcctatcaaatttagattggaggcccactaatttgtcagagtctgcattttgtaaaccagtctcatctaaatagtggtggttcagttactgtctctagcatgatcgtccttcactgctgttctctttaccactactcggtatacgcataaccgggtgctttttcatcaggtttaatgac

SEQ ID NO: 102207 - DNA, 134 bp, Glycine max
accggaagaattatgtatgcattcttctattagaccaatactaaccacgcacggtgagcggattagtctccaatttagtgggtctataggagacattcgtggcctctcacccaggaaaaacattgatattaatg

SEQ ID NO: 102208 - DNA, 236 bp, Glycine max
gcgtagtcgctcgaatcggtcgagacacagaaggagggacgggaaagcagttgatgatgtagagttggtgatgtaaatagtacctgatgaagctcgagtatattcatatatcaagggcgagtatctagagttagtaaaaattgataagttagaaacacttcgtaagtgttatcatgatagacaagtagaaaggatccaatttgagacagggttccaaaaaatggttggaaattagt

SEQ ID NO: 102209 - DNA, 233 bp, Glycine max
gatgacatgcaacttaatatctctatatcttctccatcagttatacaagtgacctacctagacattggtgcaactatttttgtagatataacgatggatgttctggaagacggtgaagtcatgcctgtcgcatgcatctcagtggaaattagtgcttcatgtgctgtggaaattgtaggatacaatattgctggtttgctcatagtacaaacattttctgcatacttgaagtg

SEQ ID NO: 102210 - DNA, 221 bp, Glycine max
aagggaaaaatagtaagggattagaagaattaattagataaatagtgggaagaactgaagaaggcattcagagaatgagcagatttgaaagaaaggggaaaccattggaggaaaagtttttctccttgttctcttcaatttcattcaatcagaaaaaaaaaaagacgcttcttttctttatgtccattttgggaacactgactgccacctgatctaacctg

SEQ ID NO: 102211 - DNA, 118 bp, Glycine max
ggcagtggagagcgagtgttagcaccaaaaatgtcgcagttgatcttcgtgttcgctgcactaattcctcttctctgcacctctttctcgcaagagagaccctcaaatcggcgcctcc

SEQ ID NO: 102212 - DNA, 252 bp, Glycine max
caatacaaaagtttttttggcatttcagaaaagaacacgaaaatacccgaaggggagggcaaaagggtcattttaaatctttttcagacccctgactcgctcaggctagccttttgctcgcctgggccaccaagataacttcatggtgaagtaaccagctcgcctaagtgagtagtcatgaccccaaatgctttgtttttctataaataagcatgaggtggggctaagagggaggttcagaagtctagaggt

SEQ ID NO: 102213 - DNA, 158 bp, Glycine max
ctcttctcatttccttgatgtctattagtgattttgtgggttccagtagtggtttatgccattattgtaaaccatggttacaatgctaataaaattgataaatttggcatccttgtctcttatcctctcacaattacatcttttcttatttaactccc

SEQ ID NO: 102214 - DNA, 197 bp, Glycine max
gaatacagaagacggttgctgaaacttgaagactctgctgcagatctttattcagcagagtatggaatatctgaattggagggaaccagtttattgggggatgaagaaccgtcatgggacatcagaagatcctgcttggaatggtgcactgatcacaatattgagtccatagaggcatgtggttcaaatgctgtttt

SEQ ID NO: 102215 - DNA, 205 bp, Glycine max
gtagttggttttatgaaatgttgattgtgaataggccacaacagtgaagaaatcgcccataattggtcggaaaagggatggatatttgagaaccagtgagaacagagtctggatgccggaaattggccagaaaagtcttcacggcagcatgcaacaatgagtcatgctttaaactcgcaggggagtgcggaaaagagctctacag

SEQ ID NO: 102216 - DNA, 157 bp, Glycine max
acccaaacagaaagtggagactatttattttaggcttaggcatgggataaatccgcctatggtttcatatccgatcccaagctcaggtaaagaagaagagtggtgttaaggcgtctgcaactaacatagaacttaccagttgtaattgttcggaacc

SEQ ID NO: 102217 - DNA, 147 bp, Glycine max
gtccatggtctctgatgcttcttctggacctccatattatgataatgaatgctattgtcagaatcggtatccttgcctttcttctacaaccaaagattcccaaaagaagaacaagaaggtcaaagaatatggcagaagtcaacagcc

SEQ ID NO: 102218 - DNA, 238 bp, Glycine max
acccaccattacaataatcccaactttccccctcacaaatggaaaaatgacaaaacacatccgctacactcacttttggcgcgaaaacgatatgagctagcttcaggatataataacaataatgtaaaaaaattaaacaaccattccaatcagtgctccatggctcctgacactgttgacgaattcctcatacactttctagctttcaggacatggttcattgaatccaccctagtta

SEQ ID NO: 102219 - DNA, 120 bp, Glycine max
gtctagcataagggttagtatcgagtagtatcatgtaatgcgatgaattaagatttgaatctttgtcaaaagagacatatttatgttgtgtacctgattgtgccttgaataaaattgtct

SEQ ID NO: 102220 - DNA, 155 bp, Glycine max
ggatggggagagtggaaggctggaaggtgagatcataaccaaacattttgagatgctttaaggaatcaaaatcatcattgataatcgataaccaaaccaaaccttaaacaatttgcttttagtatcccacaaaatacaaacataggctgcattga

SEQ ID NO: 102221 - DNA, 186 bp, Glycine max
gggaggccggtggcagtggcactgtcaccaccgccaccacttccgaccacggtgacaaggagaatgtccctcctccgcaaaagggtagtaagaacaaaattccccccgtcgttcctacgtctttcaagaagaagaagcgcagcaagagaaagcccaagagggtgcctcttgctgacatcaaaagcc

SEQ ID NO: 102222 - DNA, 225 bp, Glycine max
gcgtgaactttctgtacaagaacttcattgcaatttgtctcagttttttgctctgaatggaaaatgtgaaggagagataactatctaaattcaaatttattttataaccttgttaccattttcacctttccaaatttttggttacatctaactactacagtggttgtctaagtatacgtaccattttcctttggtaacttttagcaaatgctcaaattcatcctc

SEQ ID NO: 102223 - DNA, 235 bp, Glycine max
ccatgtcaacctcgttgagattctcatggatgtggtatgtttctattctcttattctattttcaaaaaggttttgtggacaccattcaggtgtcttccctggagagaaaaagaaagaaaatgttcaaggtacacgtatgggtggaaagaagagagtcaaagagaaaagttaaaggaagaaactaggactcataaatataataaatgatgtgatagaaaatgaaaagagataaaaa

SEQ ID NO: 102224 - DNA, 236 bp, Glycine max
tctgcacctccaattgcttcctgcattctttttcgacttctgtaatgaccaatctgaaatgtaaaattacatttcagattaattacagattttggcttctggaatggttaattctgaaggtaaaaaaatatatatatttcagaaaaagtgcaggaagccactgccccatttgttcctgcaggaatagcccaattggagctacgccagatatgaaatctcgagagcttttccttttt

SEQ ID NO: 102225 - DNA, 191 bp, Glycine max
  unsure (1)..(191): unsure at all n locations
acgacagaagggagtatagaaggttccttttgttttactttgatgtggagggaaattttctgaaagtgttttatggttgttggattggaactttacttgcatgctacatggagttcggtttatcttgttcgtgttgcttgttggtgtggctagtggtacaattgcttgcttntggttttattttgtttggt

SEQ ID NO: 102226 - DNA, 167 bp, Glycine max
gacagcatatatatcaataatctattttatactatacctacattttgataattttactttgtagttgatagcccatgggttaccgtgggaagcttgaaggtgacatggactcaagtccaacggagacaagtaatggcaaacccttaagaattctactggaataatcc

SEQ ID NO: 102227 - DNA, 189 bp, Glycine max
taggcagttgtagcttccatattttaacaaatttagcgcagttttctgcgttacagacgtgtatccaacaaattcccattcccaagaatgtccgggtaaggcattaaatggcaggtttgccgtggcttccggggcctagccaaaagctaccagtggtagcatccatacatttaaaaattaacctaaatt

SEQ ID NO: 102228 - DNA, 137 bp, Glycine max
accctaactaagtgtttagccactcatgaccattgaggggctctgtcgtggtgtgttcgtagccgcgctcagcacaacaccccctcgctcaacacaacacccctcgttctcagcgcgtgtaagtcgcgcttagtgcg

SEQ ID NO: 102229 - DNA, 199 bp, Glycine max
tcggctcgagtcaacaagttccctcattacagaccacacagatttgtttactagcaggtgaaagttatgcaggtatgcatgccacgtcactgttcactcatcatttctagaaaaaactgaaatttcgaaatcttgtatttattttacacatttttctgcacaaaaaacatcagggcattatgttccacaacttgcaaag

SEQ ID NO: 102230 - DNA, 178 bp, Glycine max
  unsure (1)..(178): unsure at all n locations
tctggtttatgaagtgcttcttaaaagccattgtgaatccgtgtatagtcatttttgcacttcaatagttacatgccatttttttctgcacattaaaatgatagangaagtgtttgatagattgaggagaatggaaaaatagacaaataggagttgtagtcttccaccatgacttttg

SEQ ID NO: 102231 - DNA, 168 bp, Glycine max
acggagaaaggatggaacttgaatttggggggagttaagctaagattttggaaagggagtgtgcatccataaaggccgtgttccttggaccgggatccagaagggcttatcagaagaaccccaatttggccaatttgattgttgaacccgaattttcaaaggaaaatg

SEQ ID NO: 102232 - DNA, 172 bp, Glycine max
agggaccgcacagaattagaggtttatccaattcacagaagcaacacatacgaaccaacatatggcgcagctccagccggagtcccagccgcaacacgggcaagcaacgctggagcaggtgcagtgcttcggtcgcaagaaggacggcggtggcgtgacctactgcaaacgc

SEQ ID NO: 102233 - DNA, 177 bp, Glycine max
gaggaaatggatattcatcacctgtgtttaatgtcatcagtgatgcaactgaggcttctgagtcaccacttagaaagcagttattgtcacctttgaatgggatgctgcttgcagatcattttaaaggtgatccactagacataggtgctggtatttatcaaagtcgttcaaaggctg

SEQ ID NO: 102234 - DNA, 144 bp, Glycine max
gaggtaataaacagcttccatttctttgcggtcttcctttccttgagagagagcatctgaacgacattagttgcaggagatctggagcatctctctatgacatgtgatgaacgctcgtcggcgatgtatgctcgagttaagtag

SEQ ID NO: 102235 - DNA, 163 bp, Glycine max
cactatcatttaccaatgatctattttagaatggaataatattctctatcatggctaaattctttcagaaacgaatgctaataaaaatatatataaatagaacctctagctagaggccatatctaagtattcatgttttttacaactacttatcagtcttact

SEQ ID NO: 102236 - DNA, 191 bp, Glycine max
  unsure (1)..(191): unsure at all n locations
gctcatgatagtttagcctaatcctgatcaagcattgtctgcagattcctcttgttggactanactcaaccaggaccgcattaagacacacatacacaactanattatcgcactgcgattcctcgtgatagtacgacaacttagggctgtcnttatcaagagtnntagatcagaccagttcccagtgtgat

SEQ ID NO: 102237 - DNA, 147 bp, Glycine max
  unsure (1)..(147): unsure at all n locations
atccaacacttcttattaggtgtntgatttcagaaatactttttgttagcttgaatacttagattgtcacctttatataactaatacacttgaaaaatcctaggagataagttaacaaagatgattataccttcatttaaataattt

SEQ ID NO: 102238 - DNA, 248 bp, Glycine max
ggtccttcaaagggaatggtttgatgaatattctgagaaacatttgcgacatggtgagagacccctgaatcaggataccaactcatagaaggggctgaaggaacacttgtcagattggcttgaggaaagttagtgttctgggggtactgattgtactgagactgatgagactgttgtatctgatgggaattagtgttctgattggagttagcagaggtctgagattgattctgatcaggatactgaat

SEQ ID NO: 102239 - DNA, 201 bp, Glycine max
cacctaaaaataaaataacatatacattgtaaacacataaatgcaggcaaacacaaatttccctaaacacacaaaatataaaattgttaacatgaacataaataatcttcaatccattcaactgaattaacttaaacaacatcaccctaagtaacaactatatatgagcatccatcaagcagataaaatcaacaaatacac

SEQ ID NO: 102240 - DNA, 246 bp, Glycine max
acaaccatagattctaagggtggcctcagtggcttcatctatgccatcttttctagaaggtgagtttgctagctgctcatctgtgaggtagaacgtgtcaattgctgtgtagatcatccctttatcctttaccctaacataagagggcacagttttggtcatgaaatttcaaaactctgttgccaaaacttaaaagtgaatcaagagattataacaggatgggagcattacactattacagtaatg

SEQ ID NO: 102241 - DNA, 216 bp, Glycine max
accccagaaagagaaattgaacatatgtttctaagatctaacatgtattgattggtgtgttgatggcctcatcctgatggtaccaagttctttaaaattagattttaatgtggctggatcaaccctatcatatactttaaatttcattcccttttcctttttcatctatgtctttttttttcttcttccttttaaatcattcgtgacggaatttgc

SEQ ID NO: 102242 - DNA, 248 bp, Glycine max
ctattacattcgtagttagaaatatttttgttctatgcacgcatgacacctacacctttgcacacatattgagatgttaggccctatacccaggtttgtgtgagtcatagagagtggaggtcgatctgtggtcatgttaggtttccgactcgcttgataacagtgaaacctaacctagagttttccttttttggtgaggcattgtcgctggtagtccctaccgccacaatgttgttacctaagaggat

SEQ ID NO: 102243 - DNA, 242 bp, Glycine max
gaatgaaactctgaagcaaaatcgtcttttgagagaacgaggggatgataactcattccccaattctccaaacaatagtagtagtgatgcaaatcttcagaaaaatcgtgaccaaggagcttcacaaaaggcaatgtcattaccatcttcaccacatgattatggaggccaggcttctaagagaagtggatcatcaagatacggagtgaatgatgaaatggagtcaacatggaataaagtac

SEQ ID NO: 102244 - DNA, 269 bp, Glycine max
acggctggaagacgacagaaggggattgactgtttttattttcattttttaataaatttgtcgcgtctagggattttcttcttctgtgtgggttcctcaaaactttcgaaatgaaagagagatttctacgaaaaatcccaatttttgggattttcactttcagggttttatttatttgaaaatttttctttctgggttttgtttatttgaaattttcacttttaggggttttgctaatttatttgaatataccttgaaagattgtagaa

SEQ ID NO: 102245 - DNA, 251 bp, Glycine max
aatagttgcaacattaatctctgaaaaaatgagctgggcaatatgatggagaatacataggataagaagcatcagggattcatggtcaatggaccgtatgatgaattcatgcaaagggcaaagggggccatgtcgcgtcgactggcatgaaaagaggaacgggaactgaggaagtttcaagatgaagctacaatcttaatttatgaattatgatgattttttgggaaaattagagaagaaaaacgacgtcg

SEQ ID NO: 102246 - DNA, 239 bp, Glycine max
atgtgtaatggccacatcttcttcaccgctctttcatgcatattttattattttaaccttttttcatatcaagtgttaatttacttccaataaagtctaataattgatgtgaataatgaggtgttgctttcgattccgcatcctactacatttagatccagaagatgcaaatggctctcatctaaccataggatagggaagggatattgaataaactcgtccttaattacttttctttc

SEQ ID NO: 102247 - DNA, 242 bp, Glycine max
ttcttatatattttcctttattaatacttttcaaattttaatttttctatttttttttctcatatatacacaaagggtcctaagggagaggggggccaaagcccctgcttgccctcccttggatccgtccctggttagtggtgctgtggtggtcagtgaggtagttatcatgtgctaaatatactgactaaagaggggtgggtgagtctaaagtggcattgatatgttctggccatatcatt

SEQ ID NO: 102248 - DNA, 240 bp, Glycine max
gttcttagtacatgatagattatactgtaaagttaaccagaaaacttattcttataagctaaaaagagcttattttttaaatttcaccaaacttgttaaaataagtttaaaaataactaataagagtcttcataaacagagataagctccctataaattcttccaaaaacctctgagaaatgtacatgcttgggcttttggatccagtcaaattcatgacttaaaaaacgaacttaccct

SEQ ID NO: 102249 - DNA, 205 bp, Glycine max
gtacatataaaatcagatggaggcatatgaacacaggttagcaaaatcttattgggccaatagcaagcagaggaaagacacattggcatgtgcacgtaagggaatacacataaatatataagcactgaaaaaacatgtgtaagaaccaacaatgttaaatttacaagtaatgacaacagtaggctaataactaaaagaacaaatg

SEQ ID NO: 102250 - DNA, 203 bp, Glycine max
tgtagcactcacgcatagaaggagactagccaccgagtacgagcaatcaaattagctttcagcctttggaaaataatgtgttttagccagctacacatttgcggaccataggtgatgataatttatagtctacaagtccctcaatcattatcactactgataataccgaggacgttgatgttgaaagataaagttgaagagaa

SEQ ID NO: 102251 - DNA, 249 bp, Glycine max
accattaaacagtaatgttctgaaaaatctataaattggaagtatttcatatatcaagatcagtaacacttataagggtcttctttccaattgagatttaatatattttcacaaactcaaaatactgctctaactatatatgggcatgaatttttaaatatagccaccgcattgatgcagctggtacaacaaaggtgatatccagactagatgtattttatcattagagaaagaacatgtagacatgtt

SEQ ID NO: 102252 - DNA, 241 bp, Glycine max
aacctttgctatgttattgtcttttggtgtgtatccatatatctattacgttcatagttaggaatgtttttgtgctactgaatcctgtggtagacgacatgtgacatacgtgttgcatctacctaggagttgtctgtttgcttggctagtagggtggggtaattcttagattgctctatgcacacatggcacttacacttttgcacacatgttgagatgttaggccctatacccgggtcta

SEQ ID NO: 102253 - DNA, 235 bp, Glycine max
cataacaggccagacaactaccttaagggaataattaacagtgctttgaaaggacttaatgatactccacaacctaaatccaaggctgctgccaggtagattgttgttaagtgtaatatgcaaaaaggaatcactgaatgtggctactacgtgatgcactggatgtccacgataatcttaggatctttcaggaataattgggagacagtaattgtttatttcaaacaaagttggt

SEQ ID NO: 102254 - DNA, 142 bp, Glycine max
cttattacagtctgttaacatctagtttttcaatatcaaaacatcaccattttatatttcttgccttcaggaaaatgttctgatagccgggaagcgttttgagcaaagaatatcatgagattttagttgtgcacatgcattc

SEQ ID NO: 102255 - DNA, 160 bp, Glycine max
ggcccaaattttttcatagcattttcagaggaacaatggcgggtagggtttcgacgtgcttcttcttcgtgtttgctctttctctccttcttccttttcagatctccgctgaggaatcatcggagaaagagttcgtactcacattggatcactctaactt

SEQ ID NO: 102256 - DNA, 238 bp, Glycine max
gactaatggccttgtttggtggggttttgggcccaccccagaagaagctcttaaggaaaactttagaagatggaagtgttaataaaggagggaacaaagttattaacacatggattgattcaatgagagcctcttctcccactcgatctgccaaatccacacaaaacaaccaaaaccaagacccaacaagtccttggactctttaccacccttcggcactgagcatgtttgatcatat

SEQ ID NO: 102257 - DNA, 225 bp, Glycine max
gtggtaaggtgaatgtctatgacagagtctcgcctgataaggcacgagcaatcatgcagcttgcaacgagtccagtccagcttactcaggatgatcctttaaatggaaatgcagctgtttggacttctccttgccacttaccgatggataaggatgtcctcgttcctgttgatactacaatccttcaggtgcccaagcgcgttaagatggtggagtatcctctgc

SEQ ID NO: 102258 - DNA, 233 bp, Glycine max
atacctcacagaagtgaccattctttgttccaaatatggaacggggactttgagatggattcttcttcatatcagaaccatgggtcatgccattaggattaccaaggaactggagccctgcgtgaccaattccatgctgcagataagtgacattaatcagtaatcagtaatgagaaatggaaacctatgaaattaatattgtaaaccatctacattgatctacaaatgacgac

SEQ ID NO: 102259 - DNA, 158 bp, Glycine max
cctgtcacttcctgatactttatgcggatgggtgtcaaattatgatgatagtctcccaattcattcattggaatatctgttgtagcaaagaaagtacacaaatgaaatatagttgtcaaaaatggtaagtaactattagaattataccttgcgctggc

SEQ ID NO: 102260 - DNA, 255 bp, Glycine max
agacgacagaaggggtacaaacaggtctgtgaagaactggttcaagctcaaaaccaggcccttttactttcttctgaatctcttgaagaaactaaaatagttaatgcttccttaaaaagagaggagattttgagaaagtttgctgctgaagagaaaacaaagtacttaaaagtcatgaaggagcttgaggaggcgaaaaataagttttccaaagagtcatatgaaagacagatggctgaacttgatgtccttaga

SEQ ID NO: 102261 - DNA, 265 bp, Glycine max
gacagctgaggtcgtgcgaggcccacatgatgctcctggccattggttggtaacagctgctaagcttgtgactgatggtggtaagattggattacaagtgaagtttgcattgttagattattggtgattccaggcaactgttcactctattcagggtatattggttgccatgtgttgcttaaaatggttttgaaactatagacacttgtatatattctttctacaggctgtgtacagtacaattacaaaatgagtggctgttgaa

SEQ ID NO: 102262 - DNA, 226 bp, Glycine max
ggaagacggtaaaagtacaagatagatattttatgctcaataccatttattctatacccaagtagggcctgtccaaaagattgggttgcgtgaaatcgggactggggttttgctgtccgttggaggtgctattttcatcaatgtgtttctcagtcagagtactcgtcccggaaagtttccatctatagtttttccaattgatattaaaaatatccaacgcggcaaa

SEQ ID NO: 102263 - DNA, 252 bp, Glycine max
tcaactcagactggatcaaagtatgtattagagagcctggtaaggaaaaagagagagaaaacatctttgagttgtttcagttttttgctttgtaaaattcttgtttgaatataatttttaaaacttgatcaattttgagtgagaagtaatctagtaagtaagtataaagccattttagaaaatagcttttaaaactaaaaattgaaaactgaatcgatcatagcctaaatcttttaacaccttatgaagact

SEQ ID NO: 102264 - DNA, 226 bp, Glycine max
ctgcgtgcgacgagacgacggaaggtggtattatcttcattccatcactatcctgtagaatcagtcagcgaagcgctcgaataggtccactgatacctcagaagacgcctccgcattggttcagtgtgtcggtgcaacttaatatcttcgtagatggcctgcgtccactatcgccgcacttcctttacgcttccgcaatcggaacagtctagttgaacactcgggg

SEQ ID NO: 102265 - DNA, 224 bp, Glycine max
gataatataaatgaacttatattgtaatgaagtgatacttgatgggagtgagagtgttaggattttttaatataagaaggctaaaggaggatttctaattagatcaagaagcttataacctcaaaaaggtacatgaaatagcattttaaacaacattataagctattgaaatgagcttctttaccaaacaaatctattttggtctaacaaacttctaagttagt

SEQ ID NO: 102266 - DNA, 250 bp, Glycine max
gacgacagaaggggggtgtttgatggagcaaacgatatggggtcatttgccggtgctggtaagggcaaattcaaaagaatctattgaatacattcttcaggccctttggagaactcgaaaaactggtcttggcactaccgaccgatgcatcatccaagaaatgctccagctccaaaatgaatctgatctcgacccacttctggtttgcctccgaatgttaatcaggaggtgtgtttatgagaacactagc

SEQ ID NO: 102267 - DNA, 223 bp, Glycine max
atataattctataattaatttacatgtaagccaaagtggctcacacccattgcaagaatatgaaggattaatatcttcttcatggttagattctggaagtatattaaacattttcatttggtgagacatacctcgtaattatgattttcctattttcaataagaattctgaaaaccatcatgaactaccgtattattttccatgaactaacaattctcaagaa

SEQ ID NO: 102268 - DNA, 219 bp, Glycine max
ggaagaaatcaaaatagaccgctggagaggccaacacaaggctaccgttgctacggaacccaaccaagtagtttgaaggttattgtgattggttgagtatgacttctcagctgaggaatggaagtgggagttcgagctcaagtttgaacagcatatttctggaaacagaggatgaccaaacaattgcaagcatattaacagaggacgaaaatctcaggg

SEQ ID NO: 102269 - DNA, 144 bp, Glycine max
accctgacatatagtataaataaacacattgaaaagaaaaactggaatgaatccaacaagagagagcaaaaggaagaaaataagaggtttacgaaagatcacgcttgagttcttgtttgtaaccgagttctttgagacgggcgt

SEQ ID NO: 102270 - DNA, 222 bp, Glycine max
gtgacatttataaggacgccttggttctggatgaactgcgttcattaaatatcttatcattgttagtacacaggcatacttggtattcctaaacaaaggaacatttttcacaacagcaagaggctaattgtctctttttcacggataaggcagttaacctgtagaaacttgctaggcagtggctcactagattcaagcatggcttgagcattatcttttcca

SEQ ID NO: 102271 - DNA, 185 bp, Glycine max
aaaatggaaatatcttcattccatcaatttcctgatgaatcactcagcgaggcgctcgaccatttccacggattactcagaaagacgcctacacatgggtacagtgagtcggtgcaactaaatatcttcatagatggcctgcaaccacaatcaaagcaactcctttacgcatccgaaatgggaaa

SEQ ID NO: 102272 - DNA, 226 bp, Glycine max
gactggtatatatactatttgatttgacgttgcttttcttgggtcattgctcatttgctcttatttgaaatccttgctttggggtgaaattgtagttaacaagaacatggtttctaaaaagaatgatggaaatagtcagtttaacatataaaatagaatgccaaaactgtcaactgtcaattccttattattgtcctttttttggtcagcagtggaagtaaatctg

SEQ ID NO: 102273 - DNA, 238 bp, Glycine max
gagcaaaggaatggagagactgtgaaggaaagcaagcgagagggatggaaggtgtgcttcaagggaaatattaatggcaaagtgtatggtggcagatacacattgaagaagtgcaataaaagggagattgtttcagttggagatatgggtattattatcgggagaaagagaaggtgctcctgttcaactcctcgtgaggaccatcatcttctcattctcactttcttggtggccatac

SEQ ID NO: 102274 - DNA, 201 bp, Glycine max
atacactatactgacatttaatgtattcataataaatttcaattttctataccaacaaatttgtctatttatatgatatactatatacagtagtaatatagtattttgttctacaaatactttaactttaataaaatattacactaacaaatgactaatccaataccaaagtattgataaatgatactttttaggggattt

SEQ ID NO: 102275 - DNA, 302 bp, Glycine max
gaccgtaaagacgaggactttgcaattgaaaacgcttcagggtcacggaaaagaaaggtgaagagcaaaagtttgaaaaagaaagccagagtctctgggaagaagcatgttagtaattcagagtacattgattacggatgatgatgaagctcttaggcaagcaattgctctttccttgcaagattctgcagaaggttcttatttgcctgacaagaatgtagtgaacacctgcaagaacgagaaaaagggaagcggtcatgttcaagaagataagggaagaaagaagaacaaaaaatcgtttg

SEQ ID NO: 102276 - DNA, 211 bp, Glycine max
catggaaaaataattaactcattttttcatgattaagtaaataaagttttaaattgaaacaataatgaagtagtaatctttgtagcacaatgaggtgttacaatgattactacattttagataattgcttggtggagaaaggtaagtataagagttgtgatagaggtagtaggggtcaaaaaatcgctatgggtgaatagttatagatgtt

SEQ ID NO: 102277 - DNA, 254 bp, Glycine max
  unsure (1)..(254): unsure at all n locations
cagtcatagaagacactacaagtattcccttgatgcgttatagttagttgcatacaaaatgaaatttaattcagagcttaattttaatattgatagaccccagattgaataagaagaaacatacacagtagtttttacaccttgaacatcccttcttccagtgaatcacataaaggtcatacatggcatgaatcaggacaaaagctatcacttcattnggaatcgatttcagtagtaaagattcagacaagtat

SEQ ID NO: 102278 - DNA, 263 bp, Glycine max
taccaataagtaacaatcattttatctattattttttaaacaagggcttagactgtacgagataaagattatttatggttttcaggattattatggggtcccttaatttaaagtggaatcatcataaatcttcatggcctcttcaaaatgcctccgaaaactacttgaactctttcagcgccattagtgctccaaatctcagaacgtcttcgacccaataagagtcacaactcacaacatgaaaaggctgtgacatgtgtatg

SEQ ID NO: 102279 - DNA, 194 bp, Glycine max
gaagacgacagaaggggttcatgaggaagctaagatagtaggaaaaacaagctatgccagcaacttgtctgggtatgatgaatatgttccaatggtagacatacctgttgatgctggttggaagaagcaagcatctctacagaggacttacacctctaaaggagcacctcctcctgacactcagaaaactcctg

SEQ ID NO: 102280 - DNA, 269 bp, Glycine max
ctctataatataacctttgcaatttggttgaaagaaattctacttcaataccacttgtgaggttgctgataattttggagtgcgtatatttaagtaagtttcaattactagaaaaattaaaaagattgtacaatgaatttgagggtttgatgtgttgtgtattctagtgatcccatttaacaacaacaatgatgtgctgcatttcattatttagttttatttgtacattttggcatttaggacttagtcctaactccatttctctattt

SEQ ID NO: 102281 - DNA, 137 bp, Glycine max
tatgaaatgcaattcaaaatcgttacaccataatgatttggtttctaaatctctctctgaaattagattccatactatgtttatcctcttttctttgttgtaaatagcattttgaatcaatatattggcatgagtca

SEQ ID NO: 102282 - DNA, 252 bp, Glycine max
gagtgtaagcaaattgagctttcaacaatgacaataccaaatctcacccatttcaggtaacggtgaataagaaacaatttggtttaattttggagctgaagtgatgataagagtttctttgtcgcattgatgaggtaaaactttccctccttagctactacctttttggcattttggcaaccatttacaaattgagcataaaggaaagagctgaaagtgtgccaacttttttccttaaagattctttggtat

SEQ ID NO: 102283 - DNA, 283 bp, Glycine max
acatgcccatttttttttgtgtctaacttgttttcatgttttatatatggtttgcagggtgattatgagtgctttggatcgttgttgagaggggaaatgagatgttttggctttgaaatttgaatagcattcggcagagacagagggattacgtttaatttctgtacacacggcaacacagattccaaattccaaaagggaatcatcaatcatatcataatatggtcttttttcagcagattgagccaatgcttcatgggattctgcggatgtagaggagtaa

SEQ ID NO: 102284 - DNA, 133 bp, Glycine max
caagctgttcaatgctgtaaataaggcacaagctgctcagaaaggactgaacccctcaaggactaaggatgcaaaagagatacgaaaacgaaccaaacaggccttcttttcagagttagggaaaccatcattc

SEQ ID NO: 102285 - DNA, 239 bp, Glycine max
ggataaagagaaggagcaaggacagaatcgaactgatgcaaaaatataggagcagagataggaattgttttggctattaaattactttcttttgaggtttatgactgtgttgggtgttcactatgagtggtgttcctaagatatctcatgaggattctgttcatcagtcttcaaagcatccacatcaagattcaggtacatattccaagttgatgccatcagtttcaaatgaccaccat

SEQ ID NO: 102286 - DNA, 243 bp, Glycine max
ggttctctgtgaagagaaggaaaatgcaaaagcagaatgagaatagggagtggtagggttaattagagaggaaattggtaatgagaagcgtgtgcagtttacatgccccaattatgtggataataaagcaagcaagcactaggctgctgacctttgtgtcagtttaaagatgagtggaaaatcttcaagacttgggacatcttcataatgtaattaaagtgaaatagcttgaattcttcacta

SEQ ID NO: 102287 - DNA, 156 bp, Glycine max
catttcctgagattatcaatagaatcgatccaactacccaagtattttttatgtctatcaatgcatttactacaaatggaacatatatagattcaagtatcaagtaaaaaattccatgtatcaaaacaagttatttggtgacagcagatgaaagaa

SEQ ID NO: 102288 - DNA, 161 bp, Glycine max
agagcgctaagttaatgctaagaccctttaaaggcgacgagttaatgctaagaccctttaagggtgaagagttaaagcacaacgagtattgtgatggaaaccactgtgggaacccgacgggtttaatcacaagcgcgacaagataaaactattttgagaac

SEQ ID NO: 102289 - DNA, 233 bp, Glycine max
gaaccagttctcacagagtatgctgtgcaagacttaaatgtgaacacaaaactcccatttgcggataactcttttgacatcatcactaatgtggtgagtgttgattaccttacaaagcctcttgatgttttcaaggagatgtgcaggatacttaaaccaggtggactggccataatgagcttttcaaaccgatgcttctggacaaaagccatttctatatggacatcaactgg

SEQ ID NO: 102290 - DNA, 107 bp, Glycine max
gatcacaacatcatagtaagcactatagtacaaacaggacattcattcatcctatggctacccttattgctcccagtaaccactctccccaagatgatgctgaagct

SEQ ID NO: 102291 - DNA, 232 bp, Glycine max
gaagacaacagtgctcccttgtttcttgacactggctcatgctctcagtccaacacagactgcaggagtaggtatgtttatggagagaaagaggaggtggatgagcatgctttcttcacagaaccttgtggtgttatgaaaagcttctctgcttcctctatggatgactcatggcaactcacaccattgactatgagctcctcatcttcatcttccaagcagaggagttcct

SEQ ID NO: 102292 - DNA, 237 bp, Glycine max
gtgtcacagctttacatgtgcatacgttgaaactgaagtgtctttctgtccaagataactaaaagcctaaaaccacagaagaagattcttgaaggaattttctatctattttaaggttgatgctgtcgatcgcaacttgttcataactgtttgtgtttgtgaaataactttagttttcagatgtattattactgatattaaaaaacagtatatgtctggtcagtaggtacagggaag

SEQ ID NO: 102293 - DNA, 234 bp, Glycine max
tctctagtctccagtaagcttgaaattagttttccatctattcattttcaacaagggaacatttccccatacaaacaaagactctataaatgtataaatgtataatgtaccacatttcaagttcattaaaattttatgggctactcaaatggaatacatgtaagtagtaaaagacataaattaagctcataccagcatattcatgaagctgaggaatacatataacaaaatgta

SEQ ID NO: 102294 - DNA, 195 bp, Glycine max
ggggatttgattgtgatcttcttcgtatataaatatatgtattattgtgtgtgggtgggtgagtttgtattttgtctctgtgactttgttgttgtgtgtggactactgtggacaaggagaaggattgaagattcttagtgaaatttttagggttagttttttttttatttttaatttttggtagtatttcgagtg

SEQ ID NO: 102295 - DNA, 138 bp, Glycine max
ttcattccaacagttctaattaaaatgaactcacaattttgtcagagatttcttgtgccgctatagatgtcatttggccatatcgctttgttcaggccatcttccatttgacatgtcttgcaatcggggatgaagggt

SEQ ID NO: 102296 - DNA, 256 bp, Glycine max
tacggctctcgcgaatacgacgacagaacggggcattatcatttgagttcaaacaaatcaaagccatcgccagctccaacttctctattgttctctccgtctccctagccttctttttggtgctacttaccaaggcacactcgaccgataccgtttctttcaccttcaacaagttcaacccagtccaaccaaacattatgctccaaaaagatgctagtatttcatcctctggggggttacaatcaccaaagttggc

SEQ ID NO: 102297 - DNA, 149 bp, Glycine max
gcgagaagacgacataagggcatcaagaatggcagcaagggtttctaagtcatcatagatattccttgtgcgctttcacttcaagaggtcttggcagttaagcgtgcctatcacaaccgttacaagagatcctttgaagatgatgtacc

SEQ ID NO: 102298 - DNA, 212 bp, Glycine max
tctcgagccgaatcggctcgagcagctcgagcctctacattacttaccattttatttcctagaaaaattagatcttacattcacatttcaacaatcacatacttattattattaaaaaaaattcacaatactagtggccaatgctatttttagaatgacaaaaagttacattccaatctaactcaatcatttgatagtggaccatatccata

SEQ ID NO: 102299 - DNA, 240 bp, Glycine max
tacacgacagaagggggaccaacacctgtgcagccattctctgtcaccaaatttgatctttctagctctctttctttggcgcgcatgtcagcaactggggtatcttataattttcaagggcttaatactggcgacgtgtactagtgcattcatcggttccagtttcatcctgtaagataagggtcttaatcgtgctgtctgcacacggtactcgtgcatgattcgactggctatactcat

SEQ ID NO: 102300 - DNA, 185 bp, Glycine max
gggttcatgatcaggaattcccgggcagggaatctttcttcttatgggaatctcgtgggggattcatttggcaaattcggaaaagctctggtgcaaatatgcgttataatcaacaacattggaatgctgattatttacatgattattattggtgatgtgatttctgaacatctccttctggtgaa

SEQ ID NO: 102301 - DNA, 231 bp, Glycine max
accgtgctgtcatttgatttaaatttggatttagaaaagagtaaaagggaattaggtaacaagttttgttcatgaagtgataactaaaaggcactccttttgggtacggaatgtatcatactaaattactaatataatgtgtataaagctttcattgccaaccaatcagattggttagtgagcttccctagatggagtacattacaattgttaaatgtaaagtgtagtata

SEQ ID NO: 102302 - DNA, 228 bp, Glycine max
ataatttgaaaaatgtttgaaacttcatattttgaaatatccgcttatagcaatttcaggatcatttgctcgtaccaatattcgtatccatgtgtaattccccttagttcaacacttcagcctacttacataaatccccctatatgcatgtgtcaaaggtttatctgcttgttaattgtataaaatcctttaaaattataggaaaatggtatatcaagggtattgtga

SEQ ID NO: 102303 - DNA, 236 bp, Glycine max
gggacttaattcagttctggtttctgaactcctctgtattccttagtgaggctaatggtgaaaatgatactagcactagcaatgggcatgatgatgatgatgccatggtattcacttgctgtggacattgagcgagtgagggaagtagcagctaagcataacgtgtcttgcatcctagtttttgggagactcaagtgttgatgcagggaacaacaatgcccttcacaccactatga

SEQ ID NO: 102304 - DNA, 200 bp, Glycine max
ctccccattttccaagcagaaaatgagatccatgaaggtaaaaagaggaaatcaatggatcttcctgagacaagttcagctaactcaactcctgcagtttctgaaagtggaagcaagatcaaacatgtaaattccttctactatttttttctccaattatttttggccacgcaccatgttctgtatcatggcaagacaca

SEQ ID NO: 102305 - DNA, 178 bp, Glycine max
ttcggctcgaggagaatacgacagaagggtatatcaattttgaagtatcctttattcaaatgagttagaaaatacgttataagttggtagtttattgtgtgatgatgttatacaaatttaacactattgtagtttgtggtaatagaagcagaatactcgcaatctgggatatattatt

SEQ ID NO: 102306 - DNA, 261 bp, Glycine max
ggcgggaatctgtctgatgccacatcccaagtcagtctcagtaactgctcaacactgacacactcagctaccactctcctctctctagcttcagtaactagcttgccattttgctcaaactcaaagctcaataaatgtgcaaactttgaattgaaaacgtggaggaatcaatcaaggtggcgcaaagagaggagaagaggtggtagagagaaagtgatgggtcaggggctgagttgcagagggagccatgagcatggccta

SEQ ID NO: 102307 - DNA, 262 bp, Glycine max
gaggaagaatgaagaaattccaaaggtttctccctactttcgaaatcactatgggaacaatggaggcaatggtgaagagaatcaaggaaaagttgcaaccagaaagatcgttttagcactgcctgcctactgtccccagaaattaccaactgtggttgacttaaaggagccgatgaggacgaataaagaagcttataacaacattaagattggacatgatttgtaaagtagtggcaatgaaattggaactggaaacactaca

SEQ ID NO: 102308 - DNA, 283 bp, Glycine max
ctcgagccgaatccctcaccaccctcaagtttgcagacatatccaccgagaccccaacaacctctgatttcgtttctctcgaaagattgtgccttttcgattgtcggttcgagtgagtagaggaagaggagcttgatcttttcaggggctgtgttagtttgaggtgtttgtttctacatgattgtcagtactatggcaggtttaggaggttcaaaatctttgccccccaccttgtagacttcagcatcaagggaatgagagtggatgaagtgtttggttctga

SEQ ID NO: 102309 - DNA, 234 bp, Glycine max
acggggcagcactgagcacatgaggaaatgcggaaccatgggaaagcgatctacagcgctggtaactggattcgaggaacttgacaagccattgatcatctcggttagcgtctacagggcggttactacatccacaagcagctctctaggcatcgaactctgatgaacatatttgcataggctcctgttgttgataatgatctatttcttgagtcaacgactccgtcattggag

SEQ ID NO: 102310 - DNA, 256 bp, Glycine max
tttgttcgtctcatatggtgctaggtgccacgcatttctcctccacctcttattctccatcgtgtttatgttcgcatctcatagaggcacgtgtatcccttgatgcttttaaaatataacacatgtaccccttaaggttgtaaaaatgttacacatggggtctttaaaaaataatacaagtgtccctttgttttacaaaaatttcacctaatacccatcttccatctcactcattgaatgtaaaagaaatacaaca

SEQ ID NO: 102311 - DNA, 129 bp, Glycine max
acggctcgaagaagccgccagaagggcatacccaggggccacgaatgcgtctatgatataggatatcgtagcatctgctctccgcgacttgagatgcctagcatgggatgcgcacactatgtactagaa

SEQ ID NO: 102312 - DNA, 237 bp, Glycine max
acggtcaaagaatgattcatatgttatgtctgcttcatggggaaaaatttctctatgcaagatgatgacatctaagacaatgacaactttcatgtcacctccaccagctgctacatggcttgcagtacattttcaagacaacaatattagagctattggtcaggaggattcttccatacagaatctataatgttagagtggacgaggtcataactaagctaaagggtcatctgaaga

SEQ ID NO: 102313 - DNA, 160 bp, Glycine max
agggcagacttgactttagaagatttttttgcgttattccttgagcagctggaatctgttattcaagggaaagagacttccataagtcatgaagagcttgttcttagaagccgagatcagtcagtatctgaatatgtcgttatgttcttcagatttgtta

SEQ ID NO: 102314 - DNA, 257 bp, Glycine max
aacacaatcatggggtgtatataaaagaggttaaaagggtataattggcaataaaaaatttaatgagaaggaaggggtgaatttagtaaataggagcagtacttaacaagacccggatatctcagcctgcaatagaccagtccattggacccgaattgactgtttatagtttatacatgtaagtaccatcagtgattacctcagtaaacatgcaattagccaattacccccactaaacatgtttttagccgcagtta

SEQ ID NO: 102315 - DNA, 125 bp, Glycine max
cctacttaacgcgggtgttgagtctcacgcttaacgccctcgtttagcgcctgtgtcttcagtcgcgctcagcgcgagctgcacgctgagcgaggcatctaggctggatcttgttgctggtttct

SEQ ID NO: 102316 - DNA, 243 bp, Glycine max
actctccatttattttatcatttagcattgtcacattggactgcttcagatcattgaaagaagcctacctaagaagcaaaaggtgaagaaagaccctgctttgatagagaaggaggaaatggaaagatgtggaaaagtttgggcaaatattgtaagaagagacataccaaagcatcataggaacttcactaattttcatcattttcagctcattgatgccaagagggtctcagaaacttgtca

SEQ ID NO: 102317 - DNA, 148 bp, Glycine max
tggtacgaaagacacttaattcccactcattagatgtcacttcctctccagttgcaatgtttccttctaacatttacagtaccactaccaccactactcaaaagctttgtgtcacataacacagtcctttagtgtccaggacaaatat

SEQ ID NO: 102318 - DNA, 183 bp, Glycine max
gaagatgactggatatgacaacgagattctgctaaacaacagaatgctgcaaccatccaatgctttccttgctcaatatttgcctgccctttccttcctcccgtacccccatccatatttttgccacccaattctggtatcacaacagaattccttctccactcagcatgtagatttgctccc

SEQ ID NO: 102319 - DNA, 201 bp, Glycine max
tggtattagtgttgttgttgttgaaggtggaagcaagtccattaagaggtatgggaaacttatgcttagacgtattaattggagtgaagtttcaaaagataaagaagaaaatgaagattcagatgatgacaagcctgccaataagtgtgttctggtctggcaaggaagtgttgccaaacccagcttcaataggttcagtgt

SEQ ID NO: 102320 - DNA, 203 bp, Glycine max
gtacatactttacgcttaatcgactatttttattgttagaatatatgaaaatatccattatccaatattatcttgatcatcttagatcatctcatagtattagtttccctatttccttattttatgatttgtttcctatttagttagaattatgattagcataaaattagggttagtgctctaggtttgtttgatgaacatat

SEQ ID NO: 102321 - DNA, 142 bp, Glycine max
ctcgctccaagaagacgacagaagggcgtcgcggaatttggcactcagacagcgtaagtgttagggatagacgtatatgcccagcatccggtctatcatgctatggattttagtgtcgcttttacgttttctggaagtatca

SEQ ID NO: 102322 - DNA, 206 bp, Glycine max
gggatgggtatgccagaagacagccaggaaatgtcgtggacttattgggtacgactgaccaaaacggggatgacgacttcattttgtggagacatattggggacgatagtggcctacatgcacatcaccgcaagccagaattaaagaaaaagggaaaaaaggaaaattttgaggggaagccgacggtttcgaggaagctagagagt

SEQ ID NO: 102323 - DNA, 161 bp, Glycine max
agggtatgagttgttgaaaggtcagaagcaaaagaagaatagattagcaaaggaaagcaatattgttccaaagggaaagggaaatggagtagtttcatgcacagaggaagttggaggggttgtgaggatgaagattgtggaaaaaaagagcgagttagagc

SEQ ID NO: 102324 - DNA, 207 bp, Glycine max
cactccttctagatgtcctatgcacagtcacccaatgaagaatcagatgtcatatcaccatatttgcctagttccgagcacagattccagacagggctcagcagtttttatgcctcgtttcagagaaccagtgttattatatggttcacgtatacaattatctcgcacaggttttacccctagtgtccagataaagtacatttccag

SEQ ID NO: 102325 - DNA, 189 bp, Glycine max
gagtggacttttatttacaatttaattagtttaagcttttgctaaatgtgagtatttttagttttgctgaagctgaagcagttaaataaaattcggagagatgaattatgaaagcagggttgttttttctggtgttagtgttagaggaaagacatttaaacagagcacgaagatgaagggtctcttcaa

SEQ ID NO: 102326 - DNA, 202 bp, Glycine max
gtttatatggattagtggtgactggtaggtaaggttggtactatgttagtgagggaatgattaggttgcactatagaacgtaacatgtgactaatacttaattttaaattaattcttattttgttctcacttcttagcttggtcacactaaagtatgagataaataaccttttctgcataattggggactgcatacataggc

SEQ ID NO: 102327 - DNA, 152 bp, Glycine max
  unsure (1)..(152): unsure at all n locations
tgtcgagccgattcgggctcgagacgggcttgcgaagaagacgacaatagnggggaagaggaagttngaagaagttggcattgactgttcctgttcttcccctgacatacgtggttcaggttctggcacttgttgccagcatcttggtcgtg

SEQ ID NO: 102328 - DNA, 203 bp, Glycine max
accataacacacacatgtacatttgtattttcagacttaaacaggccaatatggatttcaaagtttttttacaagttttctatgattatgtttgaataggtgttaagtctgcatgaaactcgtgcatcatatggaagcgtgtattacattggaactattgttcctgttgttatgattcttcttggtaaagtaattaaacctgg

SEQ ID NO: 102329 - DNA, 131 bp, Glycine max
tacagctgagggtgcagcattggttcaacaagctgaagaagcttcgagcaatcagactactagtggttctggctttcaggcacaagtccttgtccgaaaatttctagagctccatgacaagtatatggcat

SEQ ID NO: 102330 - DNA, 188 bp, Glycine max
gttgtattgattgatcacttgggcttcatcaaaccaccattgaatgaagaagaaggtcttgtcttttctcagcttttgaatctatctagattcccaaagtatatgtgaaatttacgtctctgtttcaggtgtcaagagagaggtttccttatctggatttggctgctcttttgtcccaagttgtcgct

SEQ ID NO: 102331 - DNA, 195 bp, Glycine max
cagtctatgccagctagctgaaaataattgaaagcagtgctagcctatacatgtggctactatagggtcaaacgttttaaagaatattgttcccatctttccccatttcagattctgaaactaaaatcctaaataattactatttggaaccccaattccatacacaatctcttcttataggtaatctcccaattg

SEQ ID NO: 102332 - DNA, 197 bp, Glycine max
atatgatcgagtatgaagagaagtgttgtgaaagactttggaaaaaaaaaagaagtgcctgtgcggcttacatcagagctattcaagacatgtacgatggggcaaatacaggtgttagaactccagaaggcaagaccaaggactttcctgtaaggagggaattaaataaatgttcaactgtgtgtccttgtttaatc

SEQ ID NO: 102333 - DNA, 196 bp, Glycine max
ggggggaacataattatttaatacatttaagtaaaatttactttgtgaaggaaattgttctcatagatgtcaatacagacccgtccctctccatataattaataaaacctctccttttttcctcccatttatttaagtcaaattttttacaaggcctaaaggtcattttgtttttccgttcagtgtatctgccatg

SEQ ID NO: 102334 - DNA, 222 bp, Glycine max
gcaagagtcaagaataatctattcagatattctgctttcttttatcaggagaaaatttgcatttgcatccttacatattcgaattttgtgagcataagcctaccattaacttctacaatttctcactccatatagatatttaagtgtaaaaatattgaagtaggctaagtagtctctttaatggagttcaacttcagtttgcattctctttcatgctattct

SEQ ID NO: 102335 - DNA, 224 bp, Glycine max
tttctaaatcgaacccaaatacctatgggaacctttgttgtcacacttcaagcgttggaagacaaaattcgaagttgttatgcagtgcgtattaaatataacagcgatgatttcttaaagatgattctcattgatggttgcttcataattgagctttttttgagactctatagatataactattggcggggaaaggaccctgtgttgctaaaagactggatgcg

SEQ ID NO: 102336 - DNA, 179 bp, Glycine max
ctgggggtcatacaaagcgagccagagcactgggcacatgcattctttaatggggcaaggtacaatcttctttcatcaaattttggacagcaattctacagttgggtgtcagaggcacatgaattgccaattactcaaatgattgatgcattacgaggtaagatgatggaaacaattta

SEQ ID NO: 102337 - DNA, 177 bp, Glycine max
tctattactacacatactctgacaatagatgattgctccaactttctaccaataactattataactgacccaaactctcaattcccatgagatagcataagtttgctattatcattagagtgtaaaggtttctatctaatcatagattatctatcaacaaacatccggtaggtccac

SEQ ID NO: 102338 - DNA, 121 bp, Glycine max
ggggagtggaattttcattggaggagaccatggttccaatggggataagccatggtcactagtttcatgaacaaattggaaggggcgagtttggtggcggataggcaagattcattggtgt

SEQ ID NO: 102339 - DNA, 111 bp, Glycine max
gagaacagggacaagctaggagagggggtttgtttcacttcacgtttggttaattaggcgtccgtttgcgcgagctaagaacgactgaagtcgtagcagtaaaacccaatc

SEQ ID NO: 102340 - DNA, 248 bp, Glycine max
ggttatttctgttgctgctgcaggctgcacttcattattgctacaaattaataaactctaaaggtgagtgattcctgagtttgtgtccagttaggagggatctggacgacgctattgaaagcacacataatcagatgcaaggttgtcagtctcatttgtcttgcttcttatagagtgcaaggcataatttttcacaattttgtaataatagtatgatatggttgaacataatctgctgtacttgtaat

SEQ ID NO: 102341 - DNA, 255 bp, Glycine max
gtcctgttgtgatgcctttgcaggtcatagctttatatataaaaaattactattgcctatgatattatgataaaagaccaaattagtatatgtataatactatagggtatttaaaaaataaaagtgactctaaagcaatagatgagaataataattccaaatccagtgtttagtttaatttagagttatcaagcttccaataagcatggatgtctcaaactatgcctagctttttgcaaccataataaaataact

SEQ ID NO: 102342 - DNA, 163 bp, Glycine max
tagggttccgacgacacaagggcaagggagtacaagtgctgctgttgatgcatactatgcgacagcattgctgggtctagcatatcgtggctcacggcttgttgacactggatcaacgctggtggcgtttgtgactcttgctgcacgaacctggtggcacgtg

SEQ ID NO: 102343 - DNA, 272 bp, Glycine max
agacgacagaagggctatatatgggggaaccatatattatatatagcataaaccctaggaagttggaaccatacttatataacaagcagataacgaatttcttcttttataacaccaaaaaaaagtgtttttgaaagaaccataagatatataacattaagaaacaaatgacaaggaatctttataattagtacgaatgttggatgaagccttaagagctagctgttaaaaggttggcagggggagagaaccaagccacttaagtacttcac

SEQ ID NO: 102344 - DNA, 229 bp, Glycine max
ggattacacagactagagaaggagcggaaggcaaagccaaaggggtctcgttgcgtcgtgttactccgccagcggtacacatgatctcagccgataccttcaatgcgagttctgctgagtctgttcaagaccctgttataaggccaactctagaactacgacaggatgatgctgaaatgcaagctcaagttgatgccatgtgggaaaaatgaattcacgagtatctcat

SEQ ID NO: 102345 - DNA, 271 bp, Glycine max
agcaattacattgtcaccacaaacagaaaaatacattaattttagatgatgtcaatttgcaacgttgattagtgatattcattattccagaagcaaaataaaaattacatattgatttcagcataaagtgagaagtgtatgggctaaaaaagacaaatcaacaagtattatcaccaatcaccataaagtgaaataaatataccagttttagaatttaagatcaatactcgtatgaaggatactagttagcaacattgacaatcattaattc

SEQ ID NO: 102346 - DNA, 272 bp, Glycine max
acttctcaatcaagctgcacttaataacctaagattaagtcatagttaatcacacttgcttttggaggtcaaggtttccttaattcacagggcttgccttaatagatattcatgattctgtgatcttgctgttttttcctctctttcctcgtcttgtggcttgcttctgtctggtttggcaatatatacttggtaaatacattaatttattcattttattggatctgtagtaggaattattgctgctacacaagcctactacttctctctgt

SEQ ID NO: 102347 - DNA, 276 bp, Glycine max
tatatagtttatactataagttttggtgtaatctatgtttatcaatgttgaacttacacaaggtaacatatgctgtatttatatattgccacaacaacaatccttatcagccaatggagaattcaatcctaaatcatctaagttaaggactcctacgaagagagaattactagtctctgaatctcagccgaaaccagtaccatttgaagacctgtcatcaattcaattatcatgttccaaattatccaatcatatcaagtctgagtaaaataactg

SEQ ID NO: 102348 - DNA, 242 bp, Glycine max
ggggtatctgcatctatgtgtttgtgcagtggggtcacatggaggagagagagagagattggacagctatagaacagctgggaggagagaaaggggttgggtctcctcaactcaacggcattactggaaagtcgccagtggtttaattattgaataactagtgggaatcagccaccacgtgcccttgtgaccgtcccttttagtaggataccccttataataatagtctcatcatttatata

SEQ ID NO: 102349 - DNA, 245 bp, Glycine max
ggaacaagttggttcatcgccccatgtccacgtggcatcacaaagctgagacccccattagcctgaaaccaccaaaacccaaccaaacccttaagaaccaccttgaatgtaacaggcccaccaaggtgcttctactcttcagatccttcttaagaaaaaaacccactctcaacctcattgacagtttttctctgctgtatgccctcaaagcctgcaaccacaaacacccctccacccaaggaaaa

SEQ ID NO: 102350 - DNA, 243 bp, Glycine max
gagatagatatgtgacactagccctggagaagtgttgcgtgtattagagatatgagatattgcctcacttgaattttgaatttagaataagttttagataatgtttttgttattgttgcagattttatcttttatattttgtgtttgttaattaatttaaataaatatgatagaagatagattaagttgtttaggattttcagtcaataagtaagcctatatataggccatctcactttatga

SEQ ID NO: 102351 - DNA, 198 bp, Glycine max
agtattattgttgagtagaattactacaatctacacttcatatttcccaaatgatttttcaatatataatttcattatagtgtaaattttcttaaaagtgaaagtgtatatagagtcgatttaaaatgagttaagtttaccaaatatcttaatttaaatcagtagtaagtagtatattctatattttgcaaccaacaa

SEQ ID NO: 102352 - DNA, 246 bp, Glycine max
ctaggtgtaatgtgagctaaacaattaagaaattttttgtagagagcaaaaaagaagagatgtcaggtgcaatttggaaaacacacgggggtgcgagtgtaatttactcttgtttatttgttgtaaaatttaattcaaaattgtattattttttatattttaaatttaggtaataaggagggaaaactaaatctataatgaatcaagaaaagaagggggaaaacatcaactctgaatgcagaagaa

SEQ ID NO: 102353 - DNA, 259 bp, Glycine max
gaagacgacagaagggggatattggttctattctctatatctgtttgttcactaactatatattgatttgttatctagcgtaagataccattttcatcattcattgcataatataaatggcttcccgtaagtatttctctattgttatctatgcttttatacttggagcttttgcaaatacggcattctcatcattgtctcgtgattactatgactactcgggccctaatgctttgagcaccattagaagtgttgtgga

SEQ ID NO: 102354 - DNA, 273 bp, Glycine max
ctcaatcattaaaaacaaggagccaaagtgccaaacaaactatttcctactatagtaatccaaatatatttaagagtttttaggaatgaaatgtcaaaccctagatccaataggtatattaatccataataaaggcccaaataattacacttgaagtttaaaataatagaaaaccatatcttaattcccacattaccagatgcaaaaaaaaaaagagtaaagtcccacccttcaggaaatctagagtcatatgcaacaacaattttgtactaa

SEQ ID NO: 102355 - DNA, 234 bp, Glycine max
gtttaatatactttgtaatgtatacattattttacttcttatgtctgtttgttatgataacataataaattaatatattatgtttgtaaatacatgcctatctatacacaattgaccaaaccatttgttgtacatacttgaatatcattatatttgataaatgcatttgtgaaatattgaaatggtagcattattaagccacatgttgaatttttttcttctaattttaatttg

SEQ ID NO: 102356 - DNA, 240 bp, Glycine max
actttaagtaaagtcattacatttgtggtggtatatgacaatttttgcgacagacagcttgggaagcttttgctaaataattttgctagtttggtttttttcttaaacataagcagttccaaagttgtctttttacagacatttcattgaagacataaaattaatatttatatttactaaaatggaaagatgaagtacaaacctagagcagggaaaattcctctgcttgaaataaaatgc

SEQ ID NO: 102357 - DNA, 228 bp, Glycine max
tacgtattttatgatagtttaaaatcatttagtgataattttgaatggtcaaagtgacattttttatcatttagattaaaggatcaagttgaatgaatttaaaaaattaaaagatcaaattaaacctaaaaaatattaaaggacgaagttgaatataaaaatgcaaaagaaggagccatgatccgtccagtaaatttacgtttagccttacatttagcctcactagtg

SEQ ID NO: 102358 - DNA, 246 bp, Glycine max
gagagggagattcgggagcttattgagcaacgtgatcttgctcaatctcaggttgaggatttgctgcgcatggttggaaatgatcagaaatctagaaaagaaaggatgaacacctgggaagatgatgattcaacatcagagtcatcaagcattaccacttctgatttacgcattagagaattcaacaatcctcactacaacaatgaaaacagtgaaagtagtcctgataaacaccctgatgaatgt

SEQ ID NO: 102359 - DNA, 141 bp, Glycine max
gatgaaagacaatttgcattcatagggggcagacatttgttgcatagtgcgatcataacaaatgaggtggttaaggaagttcataggagtcaaaaatcatgcctgatgttcaaagtagactatgagaaggcatacgattca

SEQ ID NO: 102360 - DNA, 225 bp, Glycine max
ggattttagttttagtattttagtttgggtgaaattgcaggaccctgtgtagtgtgtagtctccagacaaacatggcgaaaaaggtaaaagggtctcactctgcttcttctgcctctgcatcttcccgcaaactagtgctgaggattaaatcaaacgagggattcaggagtccattgcggcagactaattcaagaaagaaacccaaagcatagcaaaagaagaac

SEQ ID NO: 102361 - DNA, 221 bp, Glycine max
gactgtatgagtgtaactatccccccaaacgatatgtgcctcagcttccacttcgctagttttctctcacacttttgaaggataggatcccacaactgacatcttctcggattgtccccaatgggggcccccaagtaaacaaaagggatggacagcaggctacaattcaagaaatcagctgcacttcgcttccacggttccggcataccaattgatccaaa

SEQ ID NO: 102362 - DNA, 144 bp, Glycine max
actatattcaaaagtgcttacttccaggcacagttagatgcagaggacccagctagtagtattttttcatcaaatttggtgtgtagatttttacgaacttgggagtcatctattcataacaccacatgacatgggactatgata

SEQ ID NO: 102363 - DNA, 165 bp, Glycine max
gaaacgggataacggagataaaggtgtagagtataggataaacaagtttctgtgcacagtacagagtttatccagttatgaagccttcgcttctcttcagtgccgatagaagccatgatggatatgcttctatcttcttatgctgctacacataatctcatcaaa

SEQ ID NO: 102364 - DNA, 252 bp, Glycine max
gatgccacaatggttgtcccgcgtaggcactttcttgttttctctctcaccctcatatccatcatcttccagacccatggagcgctctctgaggaatcaattatcaaggtaaccaggggtctagcaacgggagaggaactgatccacttgcaccttttctaccacgacgtgctttagggcaatagaactccaggggtgtgaaaatcagcgagatatcagcgagcgaggtccgtgacgcaactgggtttggaa

SEQ ID NO: 102365 - DNA, 262 bp, Glycine max
gactcactataaacattaattagaaaaagaaaacatattacttaaattgctttgatttttgtcttctaatgtgtttgggtttttttattagacaaaaataaataggttaaattataatttttaatttgtaattttattttttatctttaaatctgcaaattttgttcttcaatattctaaattatgcaattctagtccgtccgttgactatcggtggacattttcatgccttttaattaatacttttacaacattatttaaa

SEQ ID NO: 102366 - DNA, 268 bp, Glycine max
taagtggtttccgacagaaaaggtaagtagccactcaaccaggttaatgactgtgataggatttcagttggctctctaatattgttcatctctatgccatgaggtttgaaaaatcaagttgaaattaattagtccttccatacaacctctagagaaacaaagttcagtattggtacccatgctgcaatagtttagtgtctctcgctctctaatttccaaaacttagtccttccgataactctagaagtgcaacctaagggaaaatgca

SEQ ID NO: 102367 - DNA, 250 bp, Glycine max
ataatcatgatgactttgtagtaaattaagaattcaatgtttgaacaatctaacagtttggatcatattcttgaaatcggctcttgaaatcttcaacaatttccttttcttcatctttgctatgtttgcgattcctccaatcagcattatctggcatattaagcaacccagcaagaacctgattcatgtttactagtgttaactctatctgataaatacaaagagttgcgatcttataacaaaagcatgc

SEQ ID NO: 102368 - DNA, 257 bp, Glycine max
ctatataataagcacacagtttagcaacaaagaaaggcctactttgtgatagtttagagaggaaaattactttggagccttggctagcgaggcagagtttggtggtggcaaaacggggcactgatagcatgatatgaagtttgaaggtaaaatccacaaactatttgctttattcagtgattcagacttatctaaaactcaagaaagagttgagaaaagctaaagtggaaaagtaaaataacacaaccagtgcttac

SEQ ID NO: 102369 - DNA, 258 bp, Glycine max
aggatttgacataaatagatatgctgagagaatgaaagaggatgacaagaagactccctctctctggacaagggaaaactctccatcatcagtcccaactcatgctcctttagattcgactaggttagaatcagatactgatgcttcagacaatgagaaaatagactcttcccctgaccccgtgatggatacaggtatcattaaccctgatcagaaaatcttggttaatgaaggagaaaaaaatgccagtgcagatat

SEQ ID NO: 102370 - DNA, 259 bp, Glycine max
ggaaccaaacaacaaatattcatggctttctttattctctccttcctcttccttcttcttgtttcatctgccactgcttgtgatcgctgcttgtatcaatccaaggcttcctatttctccaaagcttctgctctttcatgtaattaacaacattcattattattattatcttcaatttcaggccaagtatagaatgatcatactaatttaattattatgtgaatttgaaattgaattagctggggcatgtgggtatggc

SEQ ID NO: 102371 - DNA, 256 bp, Glycine max
actacacccacactaccatccagtttcttagatggctttgttattccttatgataattgctgctccttgcaagcagaggaactgcaacagaaactcttctccgagacacaatatggtgatacttgtgttgatcttccatgtgagaagaaaggcaatgagagaaccatatctccacagagtgtagcgccgagagaaaggagaagaaagttcactaagaggactcaagagcttgggaagttggtccctggtggaccaa

SEQ ID NO: 102372 - DNA, 255 bp, Glycine max
cctaggacacccatgggggttccattgaaaaggcttagcttttggatttagatttgactttgggttggttttgggtatggataatgctcttgtagtgtgaagtgctagtggagttgaggaaagcttcctccatagacccaatgttcccccttttctttcttcctcttcacaaagttatattttgatgtttgaataggtaatggaagctttagccttttctatgcttaggttgctttggattggtttaaatgttgc

SEQ ID NO: 102373 - DNA, 255 bp, Glycine max
tggttgttgtgctctaatatcttatgctttaagccgtacctattgttcatacaacttagacaggctcaaccacgaggtcacaagacttcagcgcaagctacatacatatcctatctgcattctatggatccttaaccctccactgacatgctcaatgtcctcatcaagcccagcttaccccgaggatcccacctaaggagatttatagagacactagagtcagtattcagtacgcatgacattgagagatcgctg

SEQ ID NO: 102374 - DNA, 257 bp, Glycine max
gcatccaataacttaggctcattctgtattattgaggtcagcacgtgattttatctaattatgacaaagaagagacggtgttgttaatattttaacgtttactagtatagagacaaaaaggacaacattagttgataattttaacgtgtgaaatctgtttttagcaagcatgatcttgaaggttgcaacctccatgattgctccaagcgactagtttattattgtgaattattgtgtattcttttattacgtgggat

SEQ ID NO: 102375 - DNA, 268 bp, Glycine max
cttgcaacgaactccacggaagaccagagagaagggtgccccacctctgcctcaacccttcactttttttccctttatgctttacattatagtttattttgaaattaaataaaataaaataaacaatcatcttccttttatacattaaattttgttttttcttctttgtagcttcaatcttgtcgtagatattccgtaaaaaaaaaatctttgtcgtagatgttataatacaaaaatagtttaattattctgtggttaaactgttttt

SEQ ID NO: 102376 - DNA, 255 bp, Glycine max
gaggcaacgatgatgatgatgcagtaatgagccagccacgacgatgacatagtgacgacgaacaggtagcgacaccgaggaggcagcaacgaggccgtagaacattttagggatttcgtggtatgaggcttttaggttttagggttaccataaaaaaattaccacactgattaaaaatcgtgaatcgtttgacgtgcctatttttatttaatttactgaattagaggaaaaaaaatttcatcttttaatttggtt

SEQ ID NO: 102377 - DNA, 253 bp, Glycine max
ccattcacatgaaactgatgatcagtatgatgaaaatcttgcaagaaaccctgcgtggaaggagttccataaggaagctgatcttccatgcttggtttcaagtagttttcatgcaaatccattggctgtgactgtgaggcacagttttctgtgaggtatgtgtcaatgtccatgagaggagtaacagaaactgagggcaacatctgcgtttcaagccatctccgtttgtgttccttaataggagagagagatt

SEQ ID NO: 102378 - DNA, 253 bp, Glycine max
acccctaaaccccatgagactttggccaaaggaattttttttgtaacctctcaattgttttttccactcctccaggtatcctaaagaaagacaagaatataaagggagagaatatattatcaagtttatcaagtaaagccttcccacaaatgagagggttatatgtttctaagagttcaaccttatagcaaatttgtccataatgggcttccacattttctcctttcttggatttgcactaatagagatccca

SEQ ID NO: 102379 - DNA, 277 bp, Glycine max
tacgacagaaggggacattgacttaaatcactaagctctgtgatgacaacgcaaagaggcattcttttatggggaggtgaaaagagatcctgaacataatgtgaaggataggtaaaagtgattttgtattattttgttagggatatactatatggtaagaaaataataagcgaccagttataagttattagctagccaaagatataaatcatgtcaagtacactcttaattacaactacaagaattaaatcccacatagaaaattgcaattaacaaa

SEQ ID NO: 102380 - DNA, 245 bp, Glycine max
ggaagatcgaattaggaattagcttgaacattttgtattttcttaatgttcaagctaggccacatagaagagcctaaaaatgacaaaaattaaaaatttgttggaccaaagaacagtggttgttatgaaattaatggaccatagtatctggcaaggtggactcccctccagagtccagatatcatattcacacacccctgatgctaaaggttaattatttactatttgtgctcctagtttacaga

SEQ ID NO: 102381 - DNA, 255 bp, Glycine max
ggtacaccaagattgaaggcaacaaaaaggtagcaaatgtgggtgatgaagtgaagagtgttgcgatgaacgcgaaagtgaaagtgaaggtgggtgggtttctatggttggaaggtttagtagaggcgtgttgccttcatcgcgttgttattctgtgtatgaggtccaacaagctattgatgcgcactggtcagtgtttcctcttgaatggttccatcttcttaggaagtatattcgtcctaaactcggttgtca

SEQ ID NO: 102382 - DNA, 254 bp, Glycine max
aggtccctatcctgcaagtcccaggttttaatctcattgatatcatatagggtgtgattataggagaagaataggctcttacccccattatgcaacctctaaatccttggaagaacttgtcaggttaaaccatagtttactagaactacaacagaaagatgatccacacataatgaagcacacttcaagaagcatccactcataggattgttaatgaactatacacaactaaaaaactaaaagggctaagtcaa

SEQ ID NO: 102383 - DNA, 246 bp, Glycine max
ggatgatcggagggattaaaaaaaaaaacctattctcctgatatggtctactcttgtgggtggtgggtaggaacaattcccagtgttctcagattggaatcccattgactctaccatggccacgccctctgatccttccaaccagtaagttctccccttcccctttctttacctaattaattgtaattctcaacttcgtccccttctccacagagaagctgttgtaagaaggagaaacaacggacc

SEQ ID NO: 102384 - DNA, 146 bp, Glycine max
aacccagcattccatctaaaatcttcaagacctgtgtcattagcagcagatttaacagtattcttctgaagattctcaagttgtatgactagacttctctcagcatgaaggtagacattactcattttggcaagaacacatcttcc

SEQ ID NO: 102385 - DNA, 244 bp, Glycine max
agagataattagttatgacagcacagttcaatatatatataggatagtgtctacttgttggtggtgatatataacaataatgagaatttatgtttttgttaattgattgattaatttgtgttttgatggatattattttgtattacagcaggaagaggaagagatccttcttggaggaatatgagaaaggaactggaaagtctttcaaaatgggggaacagcagtggcagtgcgatttgagagc

SEQ ID NO: 102386 - DNA, 245 bp, Glycine max
cgatctcgagtcgaatcggctcgaggatagaggataggtgaacgtaatacaaggcgcagtaactgtagctatggttgtgtgcctcttcttgaccgtgggtttgaacactctcagaaaagcaaacatgtctaaaggaatgagcaatttcgttttcgttgcgtattcaaaccttctcgcgttcgtttttctgctactagcaaccacaatccgccacaggttcgttgcctcagatccaaagttccata

SEQ ID NO: 102387 - DNA, 248 bp, Glycine max
gatatataaacttgtttgtcagcaatattctttccttggtgccttctcctcccaaacctccccgcaggggtgagaaaatcacctaaaactccttcattcatatttcatgtcctcgatcatggaaacacaacctgaatgcgctgtcatcaacatcccaaacataaaaacagagcaacatgtgtccgtgtccccaaagaagaagaacggtggcggcatgcgctttctcagggtggcactcttcaagatgc

SEQ ID NO: 102388 - DNA, 146 bp, Glycine max
gggtgcacgagtgattttacaaaagatggttgcaccactcaaaacattcatcataccacctattttagggatttgatgcctaataatacctattttgggcaccaacaatgcacaaggatttaagctcttgcgaaccaaaccctcat

SEQ ID NO: 102389 - DNA, 156 bp, Glycine max
tctcgagccgaatcggctcgagcgtgctcgatgaatgcaacgtttatgatcccattgaatgatcggtttctgatcctattgcatgtgctccaacacctgaaggagaaactgcttagtaaggtttagctttttcagtagctcagtagcacttgatta

SEQ ID NO: 102390 - DNA, 230 bp, Glycine max
gacacaataaacaaagagaaactccatacaaaagtcttctcttctgtcaccagctactcaaacaacaaccgttgatcatggaccctcatgttcttttcatgcgattgtgtctgtttcaactttgaaacaacaaagttacttaaccacgttggttcctagtactgtgttgattgcttggaatgctgttgttacaataacaataatattaataatggttgagagaaccgtgt

SEQ ID NO: 102391 - DNA, 259 bp, Glycine max
cacacctaacctaataagataaagagataaaaatagaaagataaaaatgaatataaaaggcggtataaagtgatagaaagatagagatgatcaaatgatgaatgctaatgtgatgtttggagtgattgatgattgtttctgtatcattattcaaaacaaaaacataaaacttaggatgtaaaaatcatgaacatgaacaactctaggtgttatgttacagcaaattatcaatggtgttctccaaagccggaagtcacag

SEQ ID NO: 102392 - DNA, 259 bp, Glycine max
gattgtcctatatatgatcattcttctcatctattagatgccatactggagtagctggaggagaagtgtccaaaggcagaactggtatggtctggccctcatgtatctctaagataggaatggaagagtctactacatgctgaggtgaagatggatccactcttggaaatggtgcaacagctgatgttggcactagtccatgatgagtagcactcatggatctcgtctctaatcttctttttttacaatcaacagctcc

SEQ ID NO: 102393 - DNA, 248 bp, Glycine max
gatgtctaatttattcagagtgaagtgagtgttgctgcttggattttggtgatgtgtctaagttagtgagagggtccagaaaatagggaagtagggtaggataaagctctgatgcttggactcgcctattccccactatacccgtgtcgacaccacacgatttgggtgttgacacgaaatatgggtcggacccgggggaagaaagagggcgctgcaagagagttgaaatatttttccacttacatatc

SEQ ID NO: 102394 - DNA, 249 bp, Glycine max
gtccgttacaacttaaaccggtcatttatagcactttttttttgggtataaggtcgttgttttgctttgatatctctttcgggtcaattcttccctgccattatgatgtccatgaagacatttagtactgttaattagcattcgtgtctcctcgttaacgatgcttatttatatctattcttctacttgcgatgcaaagcagcctaaatcattagtaattatgagaaacatcatgaatgaacattagtt

SEQ ID NO: 102395 - DNA, 246 bp, Glycine max
gttggtcatcttctttgtttcccgttgtcacccccaattgctggatcatttcccacattttaaaagcttcctgggcctgtatagtatcttcatttggctcctgttctaagtctctgttgatatctcttgtttcacttctggaattatttctgctgctattttgctgtatgatatttggttgcttatggcttccttccaaatgtatctgcccttctagcctttgatgtctcctatgggaccaacttc

SEQ ID NO: 102396 - DNA, 231 bp, Glycine max
taggttcttcaacttaggcgtttgtgagaaggtgaaaactaaaatattttccttgaatttacctggtgaaagcaaagaaatctgtcagccagagcaattcattaatgccttgtaaaatacataactaaatgaacaccaagcagaatagacaataaattaatacagatcaaacgaaaacgcttctctattctgttaaaacagtatttgcaaagaatatgagatgttttataa

SEQ ID NO: 102397 - DNA, 245 bp, Glycine max
tctcgagccgaatcggctcgagcggctcgagacggctcgagatagacagctcgaattgggagataaccagagacgcgggcagcagcactttttgctactgagcaagattcgttgcagaggcttcaagagccgagatatgctgcttcacctgccattgtagatgctcgagaatagcagaggaagatttcatcacgtgaattggctactttctctaatggtggtataggagggatgccaggagccga

SEQ ID NO: 102398 - DNA, 225 bp, Glycine max
ataaagttccttttttattccccccacatttctatcaccggcataacacattagccttttacagcgtcttcaattctcttgatcctaatttccattttttttgtcacaattgttgctttccgtatattctcctcctccttatctctatttaaatctgtctattacaatttgaaagcgatggatcaaggagagcttgcacgagtttttcaaatgtttgatcgaaat

SEQ ID NO: 102399 - DNA, 269 bp, Glycine max
acccaagtacccagcatatcaccgtcagtcagtgggtaaagaaaaatgttgcaacttacacattccccatgaaccaatttaaaaccattttctagaaagaaaatgtaattgtgaaggactacaaccaaatagaaatacgtataaaatacaatgaaaaaacattaaatgcaccataaacaggtgaaggtggttgttgctgttgctgttgggcaactgaccattccagctagactgtatttgtgtatacaatgatgctcatatgctgagtg

SEQ ID NO: 102400 - DNA, 263 bp, Glycine max
attgtttagtctctcatatgtcatggagactttacaagtgtaaaatggaaatatttagtaaaggggaaaaagataagaaagggaatgaagggaaaaaaatgactctcattgcttgcttttcctttttctagcctttgccctctataaggaattatattctgttagaattattgtgtgtcttctccttcttctctcttcttctgttataggctgcaattagtggacttctgaataaatctgatgtccttaatactcattcttcc

SEQ ID NO: 102401 - DNA, 145 bp, Glycine max
agatatatatataatagaacgtaaaacaaaatagagattattaattagaaaaaggagcttgttgattatatagaaagtcaagggcaacaatcattttttgataccatggatgaggacaccatcgctgacataattacctatttaa

SEQ ID NO: 102402 - DNA, 221 bp, Glycine max
ggagaagattttgcttgcactgtttaagacattggtataacttcacctctttttcatgttgtttatcttcttgtctatgactgttttataatatatcatgctattgtatgtcatgtttggtagggtactatctatatgacgtttatctgagtcgccactggattgccagctacaagtcctgtgcccatttcatcataagttatttccggttactgttttga

SEQ ID NO: 102403 - DNA, 116 bp, Glycine max
ttgatcaagctgtacatttcgatcgacaatgatcacgagggtggcaatgttagttcaaactcagctcagctaattgctagtccgatattagatctttatctcgcatctgcagctgc

SEQ ID NO: 102404 - DNA, 171 bp, Glycine max
gacgagatcggtagacatgccatcgtaagaatgaatggctgctgttgcatgagtatcatttcctaaccctgtgacgctcagctggatcaacctagcctaatgaccattgtgagatgtgttcacaattcatggtcgtcatgacagtggcaaggttccatggagatccaggga

SEQ ID NO: 102405 - DNA, 267 bp, Glycine max
  unsure (1)..(267): unsure at all n locations
gggtctgggttgtcggtccttctctcggaatcttcaataaattcaacgggcaattggaatcacattgaataatggtggggattcaccaacctatgccgaagtggttgaagtggctctagaaagttaacggcggcttcctgcatgntgtgtatccgtgtggtgatcttgatcgcaccattaagtttatactgaaatgtttgggatgaagctttgaggaaagagatttccagagagaatatgccatgctttcttgattggccctgacat

SEQ ID NO: 102406 - DNA, 238 bp, Glycine max
taaggtcttgtgatgatgaaagctataattctattcttgactagtaaacatgtttatggtcttgtttaacactggcatagtgttctgtttctgaaatattatgctagtttcattcgtggacctcgtgtgaaactaaactccataaatttcattcaggaagcaacttgtacttctggctgtccttcgttcctagcattttgatgcttatcattggtactagattgcatcgagtggtagt

SEQ ID NO: 102407 - DNA, 286 bp, Glycine max
tggttgttcttaattcatgtagataaaacttaaatattaatcattttgaaatgaagtataaattttgatggatctcactaattatttaattactttatgttttcctaattttattatttgtaataaattacaaccaacaataaagaatgtgttgaagagctctcacaacaaaaaatgacttattttattatatataaaacgtcactcccttcaatttttttattagaaattagtcttaattagtcacttgatgcacaaaagaatcccaactatgttcgcccctttt

SEQ ID NO: 102408 - DNA, 239 bp, Glycine max
taatattgaatagtattatcatgtaatcaattggaaactaagtaaatgagaacaaacaaaaatgaatgtagactaaaaaatttatgatcaacacatttaaaatgatttgaaggttaagataaataaaacatatattatataataaactgtcaattaacaaagtatttaaatttagaaacattgtttgtaggaaattctgaccacataggagtgtctgttacaaaactgacactggcaca

SEQ ID NO: 102409 - DNA, 287 bp, Glycine max
ctctctggtagaactaattaagatatgataccaaacatatggagcaaaaagaagtataaagatgttgtgtctgaccacggatgatctggcggcctcttgtatctggagctggtgagtaccttcgaggagatacataccttctgtcaagtttatccctcaagtcattacctaaatagtctctcctcactggaataaaaaaaataaagctccattattagcaactactataaaagaccatcacacattccagaatgtattacatgattacttaaccaagcttaccatta

SEQ ID NO: 102410 - DNA, 224 bp, Glycine max
ttatatgcctttttaattcctcattcttcatttcaatataaataaacaatggatacaagtgggaacggaaagtttaatgctatgtttgatagaaattgagggtgaagaaaaggcaaagaggaaacatagagaatataccagaagtttcatattgtttgatactgtgcaaatagagagaccaggaaaaagagttagcatctcacatcatgttatttcattgcttg

SEQ ID NO: 102411 - DNA, 187 bp, Glycine max
tacggcagacgacagctcggagaccaaaaaagcacaagtctttaagttttagggagaaacaatgaaatttaggccacgacaaccatgatgtggtttaaaaagataacattaatatgcgagtaaaccttctagaatcatctgtcaaaagaacccggctagatgatatagccgacgattcgatagagct

SEQ ID NO: 102412 - DNA, 227 bp, Glycine max
cagatcggagtctatcattcactcattcaagacaaatctgacgccatatagagaacatgtctaacacgatcgaatacaaatctcaggctgcggcttaaagaatctaggctgcagccctgactgctgcgaaaggccttagtcgtgctcaggctgacaggtgtgcgactgcagctgcccgtatagtcgatgcttatgggcagaaggaatatggcccagcagatggtagg

SEQ ID NO: 102413 - DNA, 271 bp, Glycine max
gtccaccttgttagatcaccttgcaaccaatagtatgacaaacaaaagaaacctgcaagaggttctagtgaaatgtagataaagcacacaaattatttttagtcatatgagacatgcagcaaggtaagaaatttgttttgaccttccactgttcaattaaatatacacatctgtggtttatccggtgtgctcgaaatgaagttatcttagatgacaacaactggttcgagatgagtctggtaattggatttatgggttcatgggatactgc

SEQ ID NO: 102414 - DNA, 254 bp, Glycine max
  unsure (1)..(254): unsure at all n locations
aggatctatgtttcttcacttatttttcacaagtcactttattttatgttttaaaaaaaattattcaagaaacataaaacatatttttaattatattttgttttacctttttatacaatcttttagaaatacaaatacaaaatatctttccgcacctanatgactcgttatntttgtattttcttcatggagtggtgacaaagctcatagtaaacacggatcaaacacgtgctattanagttttttatactgct

SEQ ID NO: 102415 - DNA, 298 bp, Glycine max
  unsure (1)..(298): unsure at all n locations
agacgacagaaggggattaatcaatcattcagggcgcgcgaggtagccaccctctctctttcttggccgcctccgccgcaaccaccgcccacacattcctatatagctanattattcattcattcatcttcaacaaaacaaagaagtaaattaaatagcgccttgtgcgtatatactacatatgtatatatatatgggagaagtagagcgacaagtgcagttccagcagggtagaacagagttgcaacatttggcattgagaaaaggagcgnntgttgtcgaagcagcatcgatgttg

SEQ ID NO: 102416 - DNA, 127 bp, Glycine max
ggaatatgaaaggtgggataatgtcaggaaaaggaactcttaacttggataaattggggactcatacgaaggaacactgcgttacaatgggcaatgatgccatgggcttgggagtttaatactttgg

SEQ ID NO: 102417 - DNA, 139 bp, Glycine max
gggagctgcagctgaggaaacccccaaccccaacctcaaccttaagctctcctcactttcttttcaaaccagaataatgttaaggcttttaaagttaagggaaaaccgttgagacctggcggaaattgcgattggcgga

SEQ ID NO: 102418 - DNA, 251 bp, Glycine max
cggaaatgtctagaacaaaatcccaatcttgtccgaaacccagttatgtgtggatatggagtgggtgctgccagtaaccagcctatggaaatcttgaactgtagccaaccaagcagactaaatatcccagtaaatcagtccctgcttcctggaaagaaaatgtttcaagcccaagttaaggaaaaaaactcagcaggatatactattgaaaccgttattgatggaaagcctcttcatggagttctgtttaa

SEQ ID NO: 102419 - DNA, 258 bp, Glycine max
gtccttcggatcaaaatccaaaaactaagccaacaaacacatgctccaatgtctaatctacagatttttaatatgtcaaagaaatatttgattctagaccatggagaaattgaatatttgcttctttaatcaatatcgttccttttatactataaaatggactcaataatacttgcataactaaacggccttatcttaaagttacatgagcaaccgagcctctttgtttttttataattagccgagcctttaatttct

SEQ ID NO: 102420 - DNA, 150 bp, Glycine max
tacgacagaagggggttgtgtgagtgcgagaaacacgaagagaggttcatgggtactagtacgaggagtacgttttcagtttgcagatcacagtgaccatttgtgtatgaatttctaaggtcttgtcatggagtgtaatgcaaaatctct

SEQ ID NO: 102421 - DNA, 283 bp, Glycine max
taagacgacagacgggaacacattcaatgcaaaccacaaagaaagctcagtggagggagagtaacatcttaggcacaagttccttatcctttgcagggtagaacctcaaccccgtctggcagtcttgcattatttaggttatcccaattcctcctccttcattctcagagaactcttatggcggcaacattcattctcctaaagcttccaatccttcctaacaagccattactgccaggcccatcaacctcagaactttttcacattccttccatctattcaa

SEQ ID NO: 102422 - DNA, 256 bp, Glycine max
gaagcatagttgaaacaagtcaagtcggaagaaagggagaaatgccgaagcaaacaattcaaaggtgggaaagatgcatatcagcatcaagaagaaggggtgatggtcatacgaaacggaagaagcacttatttggcaaatgggtcaggagcatgagcagcagcaccattcaaagtaatgataataggacaacctgggacagtgttccaaaggagagagtggagtgtgtggtgatagggagctgtgtggttggcat

SEQ ID NO: 102423 - DNA, 268 bp, Glycine max
aattacagaagaagctattgagttttgttcaaagtacattgaaaaggcaaaacctgttgggtttcttgagtctcggcatgacgaaagagtgagaggtaaggattcaagagaattgcatgttatcactctaagtctagaagaattgcaacaaactcatttgtatatactgaataacagaaatgaagttctgccatacatagtttgtcactgagctttagtcaaggaaagtaacccaataatgaccaagaatagggtgttgaaagagcat

SEQ ID NO: 102424 - DNA, 249 bp, Glycine max
aatttggtggcaccccagcgggacagcttgggagataatctagccaagcagaatactgctcaggagaagccagtggaacatgattcctctcagggaggtaacggtcggttaacagttaaactttggaggccggttagccagcatggaactaaagatctattgccacttcaaaatggtggtacagaagctgatgtaattaatggaaaatatgacctaaatttgtcaggtcaatgtagtttgaggttgtgt

SEQ ID NO: 102425 - DNA, 247 bp, Glycine max
ggagagggattggagttgggaagaatagaatacgccttggatcttattcagctcaactcaggtatgtatgtttcctcccttcaccttctctttctgcctccttccatttcttatacttatcattcttccttccttaatccgttaagtcaagcaatttgcctttcaactgtttgatcaaagttgccaatgaaacaaatagcttttttttcatctttgcccaataattctaacttaactcatctttcac

SEQ ID NO: 102426 - DNA, 253 bp, Glycine max
atgccaggaacagctttgttgtagtttagctggctgccaaaataatttttcagaatgatatctataaatggagcgtatgtaataaatcgtaagtttgtctagagaatgaaacaaaatcctagtttgagtcactgtgtttgtaggtatactttcagaataaattaccactgaagtgtaggtctttctaaacattggttcaagaactaccttcttgtgccagagtgttttctaaaacatttactgcaaatactag

SEQ ID NO: 102427 - DNA, 256 bp, Glycine max
cctattaattattgtcttccactgtcacaattctcaactaatattttctaacattacaatctcacatcatcacaacggcaatcttccacaagcatgaagttgaaaatgattggagatttttcaagtcaacaacaaacaacaaagttgacaagtatgaatgaagatttttcaattgtctaccaagctcgagtatttcaaagtttaaactgatattcttgtggagaaatatcaatattgtcatttatctaaggggata

SEQ ID NO: 102428 - DNA, 253 bp, Glycine max
ctctcatgtttgtaggctatgtggatgagttgcatctggctggtgtttctttggcttcttcatttgccaatgttactggtttcaacgtgttggtatgctgacactattttctcttatgttatgttttacaccaactttcaaaatctgtcagatctgtctgtgcatcttgcatcatattatatatggactatagtctatgagggtgttaattctttgtcatcaatttgattaatacccattaaatagagaaaac

SEQ ID NO: 102429 - DNA, 233 bp, Glycine max
cgggaaaaaatgaggaacgttgaagtattatctcaagctagaagaagagagacaacaaaaattgcatgaggaggaggaagctcggaaacgtgaagatgctgaaaggaaaaggaaggaagaagaggaacgcttgcggaaattggaggagatagctgaaaagcaggggcagagagagagggaacttgaagaaaaagagaaacaaaggagagaagcattgttgggtagagctgctg

SEQ ID NO: 102430 - DNA, 249 bp, Glycine max
tcatttagttttcagtaaaattaaagcatcaattcaacatgattatcttattggatgctcacttaacaaaagttactagatactctctcaaactagtaatcattcaagaacgaattgttatagattgttttgacaaaagaaaaagattaatataggagaattgtaacccacaaacagaacgaaatgaataatttcagtacctagcaaaacatggccgagcctattcgttatatcatcaacaatctaaac

SEQ ID NO: 102431 - DNA, 204 bp, Glycine max
gacactaaaaacttttcaagacaagatatcgttagtttacttattggttctaactcctctctccctctacattaacttacattctatgtatgcgctggcttgcttctctggtactcatacatgtgtgcttctttctccagcacttgcaggttagttggaagcagattgggagcatttaagaaatcagaatgaaagttgcgttac

SEQ ID NO: 102432 - DNA, 212 bp, Glycine max
gcatgtttgcgtacatgcacacacatgcatatactcagacacctgaatacgaacaccctctgtgctgcgcagcctaggcccagtgccgggcccagggaggggaaataatcctctggcaaggcaatgtgatcattttcccttccttccgctgatccagccccaaggtctagacaggaaaaggcacgcagagcaggaaggagggctccgtgtga

SEQ ID NO: 102433 - DNA, 264 bp, Glycine max
gcatgataaattgagcgatgtgaacctgattttgtgttataattgatatagttgtcagggagagggggaagctttgtccaaattacattttcaagtgatatatagccattgattatgctaaaattcaaccagcatgtaattgtctagccgtacatgcatgatgactttcttgggattgtctggcttgtatacttgcacattggctcagtattagtgttatgaagttactaagttgtatacttggattaaattatttactaatgt

SEQ ID NO: 102434 - DNA, 237 bp, Glycine max
tatgctttatataagtataaatattatggttagaatttacagaataaccatgcccaagtgagtcaacatatgcacttgaaaaaatttatttttgatattcattattttagtaagtagttgtgcattcatgaaacacttgaaaacattgccaaagattactactaacctaatccttcgctacctatatatgaaggaaatgcatttgggaaccaaatctatgtatgctcaagaaaacat

SEQ ID NO: 102435 - DNA, 237 bp, Glycine max
gatcgcaagctcgatcattttcctatacttcgttttttatgagtctgatctttttgttctccgacttatgcatcttcttgtgctaaaacaaaaggtctttggtctaatttcttcgagctgagaagatcgatgcacttcacgagggattcaaaagcactgtcacatacatgcttacaaacaaagttttttttccttgcttcaagatctttttcaatatttcgctctccagctcgtttt

SEQ ID NO: 102436 - DNA, 248 bp, Glycine max
tataagacccaacttaaactagagagttgttatgggattttctaaaattaatctatttttgttttattatgtgacaagtgaaagtgaaatgcgcaggtatatctcaacttatgctaatttacattgatatatccattttttttttgtaataactcttgtttctcttttgagcttccaaatattgaaactatgctcaaattttataaagcttaaattccctcaaagtcaagatagttattatctccact

SEQ ID NO: 102437 - DNA, 252 bp, Glycine max
gagccgtgctacatcaactttttctctataactgaataatcaaatcaacaatagaagctttatataatggggaagaggctcaagatgttggaggtgctaggacataatatcgacatattaaccaaattaagaccaagaatgaaccaatcttaggtaaattaagaccaagaatgaaccaatcctaggtaaattacacatgttatgggctttgcatgacaacatattgtccacacagtctattttttataggta

SEQ ID NO: 102438 - DNA, 251 bp, Glycine max
gatccaaacagttggtttgaaattgaaacaatacactagaacccttcaaaacttccacacataaataaatgatttgggacttgtgaaaacttcccatcatttagcttctcacacaagaattttgaacttcactctatcatggaggaaggggtggaagcagatgaagtggtaaggtcattgagcagcttgaggatgaacatagggtctttgagcaggaggagttgggtctcagaaactgttccagagatgtg

SEQ ID NO: 102439 - DNA, 237 bp, Glycine max
atattgcaattattataaaagttatttttaatagtggactataaaaatgaggcttttatttatatttttaaggcacttattgattaatttcaagaggaaatccacaatgctataattcttaaattattttttatgaaggaaaatgtttttctatatatgtgtgtgtgcaagaaaatcaggtagtcactatgtctgaaaaaaagtagaagtcaatagtatagataatgtgatgtttct

SEQ ID NO: 102440 - DNA, 193 bp, Glycine max
aatttagttgatgtgcgcaataacactgactaaactatgataacgatgagacaaaaaattaagcatttggtctttttacatatgatactgctttagaattagctgtgttaaaagtgaaagttttactcctttactacctttattaatacaaaatggttcatgaagttacatttttcttaactacaccagtaaa

SEQ ID NO: 102441 - DNA, 197 bp, Glycine max
agaccatgcattgatgagttacagattgaccagtaaccaaataaaataattgctcaacaatatagaacaaaagaaatccatgcaatcaacaccatgtcagatttcttacatgtatagaaaaacacttgcactagactcaatcaaatatatgcccaaagtgtcttgaatatcacaatcaaactgctaattgttcaagg

SEQ ID NO: 102442 - DNA, 239 bp, Glycine max
ggatcgaaacaatgtaaatttgacaaggatacttttcatttgtttatttttcctggtttatcaagtaaaatgacatggagattattaatgatcatggagattattaagcatgcagatacttgtgtttcctagtgtcatttctaatttccatggcatcatttttgtgcatttagaattagcacttgttacctaagcctaataaaatatttattgcaatcatccagagcttgaggaaacta

SEQ ID NO: 102443 - DNA, 230 bp, Glycine max
gggtgaaaatcggaatcgaaaacaatggagaaagagaaaggaattgaaaactggagcgaagggtcggaagacctggtagacgccggcgacgttgaatccgcgatctcactccttgaatccgtcgtcgaaaccctaaacccttccgattcggcttcgcagcttcccttggcctctgctctctccgacttggccaacctttactcctccaatgtactctctctcaaagccga

SEQ ID NO: 102444 - DNA, 241 bp, Glycine max
ggaagcaaacaaacgcgctttaaacatgattatttcattgcataatagattgaggcggtgaaagaccgaaaggctaaatctttttgaacagacgaaggaaaaacgcagtgattaagcgcagacatgtatcatccaacaagaggtggcgttcgtggcggtcgagatcgtaagtcatgttcaatttctcgctatttcccaaaatttctctatctctctcttttgggtattgaatcgtttcgga

SEQ ID NO: 102445 - DNA, 234 bp, Glycine max
catatttaaaaccaatattacctgtacataaattttgaaggacctaatgttgcagttccaacacgagcacctgagacaggtgacaaggatgaggaaggtgctggacctctgacatggtttacctggtgggccttaaaaattaattatgctgacagtgtacgtaagtcaagaaacccctgaactagtatgaattatgctatgagcaagttttacctgttgtcccaacttgctaat

SEQ ID NO: 102446 - DNA, 234 bp, Glycine max
actcgtaagtatcttagtcatgtgatgagaaatttatgtagtaacataataacatgtcaaacttcaactaacaagttttcaagctatgattatgaatttgctctcttcctttttgtttaatactttgttggttttgtttcaacatgtggtttcacagacctttataactggatataattgtggtaagtgtcataaagtgtttcattatagaaaagttataacaagtaaattctt

SEQ ID NO: 102447 - DNA, 258 bp, Glycine max
tttaacttaaaaacaactacacaatgcttctttatttttttttatatagaagttttatttaaatttaaaaaatacttgtgcattttatttaaaacttgttaatttaatagatgtaatattaattttcacaaatgtgattaaaaaaaccacttgattaagttgattctcctataaatttattttagtttttcataccacaaataatgttattaggacatagttttgcttttcataccacttgaatttgagacttttggt

SEQ ID NO: 102448 - DNA, 226 bp, Glycine max
tctcgagccgaatcggctcgagtacgcgagaagacgacagatggaggtgaagaacaagtcatgcattgggtggagcatacttagaaacagcaactatgtctctcatgcagcttactagctcccctgttggctcactggtccgtttcattgtaatatttgctttatggtaaagaactatggctttggccaggttgccacaaaacgcttcatcagttccagcagtttt

SEQ ID NO: 102449 - DNA, 122 bp, Glycine max
ggagagagagagttcgatgcagctaccggagatatagatggagaaagagctggagatcgcacttaacacatcacacagcaagagatacagcaatagaatcgtggttcgtatgcagaagaaga

SEQ ID NO: 102450 - DNA, 198 bp, Glycine max
tggttaggtaaacatatgttatatatcattattgtgataaaaccactgatgacttgtgtgatgtgtttttcttacatattgtcactgttttttttttattaatatatagccactgttgttattgtgattatcatgattgttgtattaatattattaaaaaacattggagaaagtttcaccaatttaaggaaatttttt

SEQ ID NO: 102451 - DNA, 164 bp, Glycine max
tccgctgcgacgacgacaggaggtgaagcatatttaatgtctagtatctgacaatcatctgctgcgaaagtcacatattctctaatggtccgatcagatcgttacctagctccgaatcggaatcatatattttcatctcaagtcttaaagcttccgcgtgaacg

SEQ ID NO: 102452 - DNA, 248 bp, Glycine max
gtctcatgatgctgaagcaattgctcttctcttttctattaatcggacgtctaggatgcagctccaaaacatcatctttgagactcactgcctgcaaacagttatcagatattcttctcctcaaagcgtaccattgaaaccgagtttggagatattgtccaaacgatgtagacagaatctgagttcttctcctaactattctgttagttgtgttggtcgagaagtgaatcatgtcactcgttattcag

SEQ ID NO: 102453 - DNA, 248 bp, Glycine max
caatatacatattgcatgtatatattcaatgtacattaatttgaattcttcaactcttttggtcgttgtggggtctttatacaggcctggaaagaacatggaatataatgtagttgccagaaaaaagaattggtggaatgtgattcacatgcatgtgttgtggtccggtttgttagtacttatgtcttagctcgatctcgagatatggatgttgatttacagttgaaaatatgataataaatttaacg

SEQ ID NO: 102454 - DNA, 190 bp, Glycine max
atacattgtactgattgtagagagagagagatgatagatgcaagacgttttaggatatccaagggaaagtgaatcccaactctctcgagagccacgaaaccagaacttcgagtgactcaacctcaaaaaagctaaatcctttgatgaagaaaaagcagcagaaaaagaccgaagattctacaacagtttc

SEQ ID NO: 102455 - DNA, 246 bp, Glycine max
cacctacaacttgttacaacttacaaggccattcccacaatattgcatatatatagcaccccataaggcactgcacccactaccatcttaatttctccttcaattgctacttcaattctgattgcaaccacgacactactccaccttccaacatgggcggtatcagccttgaggaaatcaaaaccgaaaacgtcgatctggtatatacatatatatattttctctctaccattcttcttcttccct

SEQ ID NO: 102456 - DNA, 265 bp, Glycine max
aatcgtcatgacgatactctagaagagagctcacaatgttgcaaaccaactaatcaatcatcaatgcgccgaatcgtgaaatcccacctaggtaatacacccacacactgaactgcagaatctccttgaacggcttggacatgacctgaatcagacgagaatggcagtatccagagtactgctgaagcagggagcgggtgagattcaggacatcgtcgtggacattggccatatgaccatctccaggtgcgtcaagggcagcgtc

SEQ ID NO: 102457 - DNA, 238 bp, Glycine max
gcaacaaatatataaaaattcaaaataaataggaattgatgctgaaatatcaagcccaatccaatggtgtccattctccgagattgtctcactgctaagtcccgatccacaacctacatcgattattcataagccaataaaattcgacaaaagcgacaaagaatagctaaattgaattaaaatttaaattaccaatatcagggtgtaaatagaaataacaaaagagaagaagagtgat

SEQ ID NO: 102458 - DNA, 223 bp, Glycine max
acgggaagcaaatccatcgaaatggcagcatcgtctacttctccttcaaaggagccacaactcaaggacgaggaggatcgggaacaagaggaacaacaccaacagccacagccagtcaaagagtgcgtccacaaaaccaaaacgatccagtttctcggacgtaccactccgatcgttcttcaaaacgacaacggaccctgcccgctcctcgctatctgtaatg

SEQ ID NO: 102459 - DNA, 208 bp, Glycine max
gagtccaaatattactcctccaatgtcatcaaatgatcatgaggaaactgattttgcagaggatgagaagttaagaccagtacaagatgatgtcaatatactacgacataattcgcctatcaacagtgtagcacctaagaagactaaaggttctcaaaaaccactttcagaagtaacaacaatctctgaaatgaatgagttactgctt

SEQ ID NO: 102460 - DNA, 230 bp, Glycine max
ggggtttatttccatcacaggtgaaacatgccagaacaatcatactgttctttttgccttttgtgcaggtgaatagacaagtgatactccccaatccatactctagtgtctacatgctcctgtcacctgtaactgcaatttttctgcaaaggatgatgtcaagactccaaaatgcccctggattgaatcatgctggctgagctactggatgaatagtaatccttatataa

SEQ ID NO: 102461 - DNA, 227 bp, Glycine max
acggatgacaataatagtagacacattaccagtattctactatgaaaaaatggtgggctatgcaccttctgagctttgcggatttggtctttgccagtgaaaggatcgatgtgggtctgaaaagaggcaaatttagtcatccagcttggacaaatgagaaaactggggcaaatgaagagggtgaggatgaaggagaagcccgtgctgtgactgccattccaatacag

SEQ ID NO: 102462 - DNA, 264 bp, Glycine max
acaactacaaagggtttcaatataagctaatagcttctctagctaaactgataagagcttactctgctatacgagtatgtttaacattccccttgcagacttggtggataaaattggctaaacagcataagctcatcttgacgattatagaacctagtttgtacaactcctagtgaggacatgacgtgattagcctttaatggtttacttttgttggtttagacgtaccttagaggggaatatatgtatgtgtctatgtgacaa

SEQ ID NO: 102463 - DNA, 267 bp, Glycine max
ggcacgctattttaggcactttttaaaaataattaaaaattataaaattttatgaatctcacttcttatttttaaaaaatctagatgactcataattttataaatttttaaaaattcaacaaataaaaaagaataaactattataaaaagtgtgataaaatatatattactatcactcctctctatttgtaaatacacattattgatccctacaacctaatccaacttaattttcgttttaacttttatacacaaaattatactgta

SEQ ID NO: 102464 - DNA, 237 bp, Glycine max
gatcaattcaaaatatatcatcaattataagcatgggtttgtggaacacaacgaatgcagtgtcttgccgctttcacaagtttggtgatgaccaaaagaatctggtcttccaaggtgatgccacgtcttcttccaggggcatagaactcacaaagttagacggtggaggaaaaccagtgggtggcagtgtggggagagtgttatactcttctccagtacacctttgggaaagctcta

SEQ ID NO: 102465 - DNA, 236 bp, Glycine max
tcccaacgttaaaatgtgttcattaagtgctgatatgacaaatgaatgttcacagtagcacgacacatgacagtcacttgacatggatgccacatggaggtgtgacatgacaccccaagaaagtgtcatgtcttagccttatgggtgtgtcacatgtcactttcatgtggtaccacgtagcacaatgtttttactatcatttttagtcctttcaaaattttgaaattcgaatttta

SEQ ID NO: 102466 - DNA, 223 bp, Glycine max
agtagtatcaaatatttgttcctcttgtaaaggaggtaagataatttgatacttctcttattgtgagtgatggagtaattttttaaaattatatgtaaaaatatataaacaaatttatatacccagttataaaaaaattgagtaattaatattagtaaatataaatttaattatttaattccaaaaagattactcatttggtctttgcacattctttatcttt

SEQ ID NO: 102467 - DNA, 260 bp, Glycine max
cttaatcttccaaactaccttatatatactgctaaagccgtgtgtatctctacctctgtctcccttgatcagagtaaaaaaacaaaaatggcggattttagctgaagacttcttcaaggggagaaaataccctttcattgtcactctcttaatcttgctcatttgcgtcacgctcttcctcttcagcttcaaccacaccacctcaaacactgttgctttctattctgttatccaagagaaaccaccccttaacccttctc

SEQ ID NO: 102468 - DNA, 236 bp, Glycine max
atccatgttgctcgattatatttcttatttatatttttaccccttccatttctttcttttcattccttattcatgtcacaacaatttccaaatatcaaagacaaccttaaattgaggacatagaattactactactactactaatttgactccaaaagtttctatttctttaaattaatttcttactttaaaatatcagataattaacaacatactgactaaaaagttggctattg

SEQ ID NO: 102469 - DNA, 237 bp, Glycine max
  unsure (1)..(237): unsure at all n locations
ngggtcaacacaactcactagagtatgatccatttttcccctttaattgattatttgttagattaatagcaatggctgggactatagcaaccactagtgtcaggtggattcagcaaggaaacaaatgatctccattatttgtcttcctcatatttgtcatttgcagaggtttcaacatgtctcacatgcatattacttgaccgtgtcccatacatattccttagagaaagcagaatg

SEQ ID NO: 102470 - DNA, 237 bp, Glycine max
gatcaattcaaaatatatcatcaattataagcatgggtttgtggaacacaacgaatgcagtgtcttgccgctttcacaagtttggtgatgaccaaaagaatctggtcttccaaggtgatgccacgtcttcttccaggggcatagaactcacaaagttagacggtggaggaaaaccagtgggtggcagtgtggggagagtgttatactcttctccagtgcacctttgggaaagctcta

SEQ ID NO: 102471 - DNA, 238 bp, Glycine max
cctccctgcattgaaaaataacattccaaataaggtaaggtatttgtattctcagagttatacaccaattcaatcagattaaataggaacatatcttttgcatgtaagttcattaacttttataataattacattacctaaagagtaattccaactatgatttctgattggtagatggtgtttacagtgataatgcatgacaattaaactcaacattataagtactaatccattgtca

SEQ ID NO: 102472 - DNA, 261 bp, Glycine max
aaaatgaaagaaaatatataaatataagcttgtatcttaaaaaatgttatttcaaatagcatttcaaaaatattagaaactattaaggttatgtttcacaacattaaccaaaagttggctggttataatgagaaacaacaaagattcgaaatcatttagaaaatgaaggttgtacttacttggtataacacttcatctgccacccaatttccaatacttgaaatatagctctacaaagattgaaatttcagatcttttata

SEQ ID NO: 102473 - DNA, 232 bp, Glycine max
aattgattagaagctaagcctaatcgattagtctgttcagtcgagacaatgactggtttttcaggagtctccgctttaatcggttaccggataatcataatcgattactttgttcataatcaattacattgttcttgaaagttttccagattttggaaagaacactttaatcgattgaaatgataatataattgttacttctttgaaataattgattgcattgactatttaa

SEQ ID NO: 102474 - DNA, 263 bp, Glycine max
acggctgcgagacgacagaagggggctagggttccataacattagcgatagtaaaattgtatgatagtaaaatcttgataatggtcgttactgctgcggtgctgtcctattttatttcaataagaatccttgagccaaacaaggaacacacaacacatttgtcctgaaatagctttcaataatatgcggctcattcagtttctgacttcctgcctccagcatcacagaataattatctcaagttgatttggtgttccttccaa

SEQ ID NO: 102475 - DNA, 243 bp, Glycine max
  unsure (1)..(243): unsure at all n locations
acatactgcaaattgtacaaaatttaagtatagcagatctgtaaaatttatgaaaatcagacattattgtttcaaaaatagaaagtgcaagagcaggaaaaatgcagttcaaaccagaaggcaaaaataaactacccagaatttttcagcaggaaagaaagaatattatagtattaccatatagatggcctaaacttttttaaatatatttttcctanaagcgataaaaaagcagtgagctta

SEQ ID NO: 102476 - DNA, 229 bp, Glycine max
gatacccatcacctcttgaaaaccccccccgattgccattcctataaccatattctcccctgccattaaagtcaccacggccatagcttcggccatttccgtaatttccacgccctcttgcaccttcacccctgaagctaggagccctgccagatgagaaacgtcctctacctgaaaagagatagcaaaacagcttacttctaaatgcaacataactaaaacaagtgac

SEQ ID NO: 102477 - DNA, 261 bp, Glycine max
tacagacgacagaaggggggggacacaatcaaattttcacaactaaaaataataataaacactaaaactttctttttttagtgactataaagagtcccataatacttaacaacatatcatctccgcaagacaaaatgaaactcgaattcactatctatttctccacaacaacaaaatgaattcttctacacttttccttttgtcattcaccctttccttgatcctcatttctcctttgccaaccttaggcacaagcttgta

SEQ ID NO: 102478 - DNA, 260 bp, Glycine max
gaagacgacagaagggggttcatccaaactctcacactgcctcttcctctcagattcagcaattttctattttctcctctcatggcttcagattccaaaaaggatttccctgctgatgacaaagctggaacagaagagagtaaaacatccaaagatgagacttcatctaaagattctccagcagaacaaagagcgacagtacttttggacctagacctggacctgctgggcatccaggcaacccttttgatctctcagca

SEQ ID NO: 102479 - DNA, 233 bp, Glycine max
cgaagtggcctgtacccaaagatcttattgagctacaaccttcatataagcaggataattgggatcctgattggcaatctacatctagtagtaaagtctcgtatctcgtcctgaggttgaaagctttgcgaggaaccaaatcagggacaaacttcaatacagaaaatatcattgatgagatgcatattgagaatagtctgcatagaagtgatgacaaatcatcaattcagaca

SEQ ID NO: 102480 - DNA, 240 bp, Glycine max
atactcaaataatatttcctagactaaaaaagtaacaaacgtccccttagtggattttaccatgatgttctgtgtggatatataaggctttagcttaagccgatgttgtgttatgtttaactccttgcattatcaaaacataatgagtgttgttacgtgcacaactttattacctgtttagcattttttgttaattttaaaattctcctatgttaaaggtatacgagtttgtggttgatc

SEQ ID NO: 102481 - DNA, 170 bp, Glycine max
aaccgaattggcgaagagatcagcgaaatgtttcgttggctttcaggggtatgattggtaaataaagatgaacagttaattaggatatatttttaattttgattaattgttttaaaatcattccaaatattccttgctcatttggcttccacatgaatatttccctcttt

SEQ ID NO: 102482 - DNA, 274 bp, Glycine max
attgtatttttttaaatctttggcaaacctttgttaaaaaacggatatgattttatgaaaatgagtttaatagcaatggatataaacataacaaatgatataataacattctttattttattgaaacttttttgaaaatacaacataagaaagaatcactattcaaggttagataaacaaataagtgtaaagagaaaaatacaaaaatttcatactgatttgtttccactgctaacaatatgtctaattttttaccaatccatcaagttctact

SEQ ID NO: 102483 - DNA, 245 bp, Glycine max
aggagcttcaggaattagacaagacgtgagaaggagaagaggatgaaggcgggaacagagcaacaccgtgtttgggtgccatcattcgaatgggaggatttcacagaccaggttcaattcagaggacaacaatatatgcaattcccaacttcatctacatctccttcgccgcttgccggtggcacagacaacaaacaacgtaagcacgacgaccaacactctcactctctggatctcaacctcac

SEQ ID NO: 102484 - DNA, 240 bp, Glycine max
gtccagctcagggacgatgagtatgccgatttccaggaggagatagttcgccggcggtgggcatcactggttacccccatggccaagttcgacccagacatagtcctcgaattttatgccaatgcttggcctacggaggagggcgtgcgagatatgagatcctgggtgaggggtcagtggatcccgttcgatgcggatgctattagccagttcctaggatatcctttagtgctaaaagag

SEQ ID NO: 102485 - DNA, 223 bp, Glycine max
tcagtattttgtttgatatttcattgtgatggaacttgtctttattttatctcttccagtatgttgtcatgttatttcattgtgatggtttgtttgaaacaagaaaaaactaaacaaaaaggaattgtgtatagtttcttttctttcatgcacctttttttgtccctttgatatgtggaatctcgggttataactttgcctaggattcaaacttttttttttt

SEQ ID NO: 102486 - DNA, 240 bp, Glycine max
acctacaaatagtgaaactttctttcaaaaatccattgcaataataaagaaataatttaactacttaagataagcaaagtttccgttatgtaaagaatcacaagccaatgtagtgaatagttatcaatctttttttgtgttggctatatacatcaaataagttgttcttatactcatccacttgacttctcttccatttcacctccacttcattttccatcttatctctcttttcatttc

SEQ ID NO: 102487 - DNA, 213 bp, Glycine max
tctccgacgagacgagagcaggggggttgcgtcaggaatatagaaggggatctcctctgatcgcgcggtcactgagatctaagcactcacctcttccatacacgtgtgctcgctagttgaggcgccatgggcgatgacttcgggggcccaagtgcggacaacatggatatgcccaacaatgatgattcagacagtccgatccaaagggttggg

SEQ ID NO: 102488 - DNA, 252 bp, Glycine max
atgttctcaaacagcctgttgatgttattacttgcctgcatcagtgcactcccaagccctgaaggaaacaactctaacaaacaaacacaacaatgtaagcttctctttcacaagtactgattgaaggaaacaactctaacaacttacacaaaacaagcacatcattccctcttcatgacaaaaaatttacaacttggacaatcactaccattttatgatcaattcaccacttcttatctttgaatgtaattt

SEQ ID NO: 102489 - DNA, 248 bp, Glycine max
cacccttttagaatctgattgttccttatctctgttatttttatatttccagttaagttcaatgcattattaattgcactgcgatctcaaattccttatcatgttcatttacttctgtagaaataggctttttttttccttgagattttgttaagtgaacaaggttcacgctagatagagagtatcaagtgatattgttataaattcaactgatccgttgggcattgtaaatttatataatgccaata

SEQ ID NO: 102490 - DNA, 200 bp, Glycine max
aggtatgttttcattagtcatgtttttttttttttttatgtattatccattagccacgccatgtgtccccggttggccaaataaagaaggagcttttgggttactgttccgtaacctattcagataggcgtaatgttcactggtcttaccatataggggtaccagaatgggatttggcaaaaagcggccgaaaacagggg

SEQ ID NO: 102491 - DNA, 221 bp, Glycine max
ggaggacggccagctgtgcaagcacaaccagagagggaggctatcacacagctactatgcatactggggcaagatttcacccgtgccgctgcaaagagaagagtgcggaccatgcgcaccaacatgaccactcttacacagatatagatgatattgctacttagcaacattctgcccagcgaccgcaacgccaatctccccctgcaaaagtatcagttggt

SEQ ID NO: 102492 - DNA, 270 bp, Glycine max
ctctcgagcgggatcggctcagtgaagacgtcacgtggtacgctgggtgctgacgtcatataccagtcgatcgacgtggacgtgacggacgataagcccgaaatcgtagtctctggcggatagacggctctcgatgtccagactagatcttggacgtggagctgccagctacgagcagggcaattgaggtgctagtggagccgctggaaccctgagtagaggtatctctgaatgtgttgtcatggctggtgatactgaaccccgtgaaat

SEQ ID NO: 102493 - DNA, 253 bp, Glycine max
aggggcacacacttcctcttaaggatatcttgatccaattggaattgaaataacaattcaaccagcgatggcttctcacagtttcatcattttggcccttttcatttctatttccttctctagcatggacatgacattagcagtacgccatctccagcagacatcaaggtcatctttgcaactattcccatttctgccaagcatcacccttccaactccacgactgccaaacatcaccctcacaaacgtcacc

SEQ ID NO: 102494 - DNA, 233 bp, Glycine max
tcagatagtggagataggttacttgcagttgaaagtgatatgcgtaaattaggtggctgggagatgaatgaatgtgagctaagccgtttcgattcatgttcatcttctttagttatggaacttgatcaattcaagaatgaaaagggtaacggaaaaaatctgggtccttcaactgagatcatctcatggagatccctgaatggaaaggctgtgcttgccgtgggaaagtggag

SEQ ID NO: 102495 - DNA, 240 bp, Glycine max
caattcatgatgcaatcaataatcatagtaaagatggggctacgatatctggtaatcaggacacttctcaaataaaggaatccaatgactttgggaatttgccactacctgacttaagttcaatagaagaatttggtggtacgcaagatcttagttcttggttgaactttgaagaagatggtttgcaagaccatgattctattggccttgatattccaacggatgacctatcagatttaa

SEQ ID NO: 102496 - DNA, 223 bp, Glycine max
gatggacagtgtgagagtatcaaatgaacttggagctggtgatttcaaggctgcaaagttttcagtgtgggtggtttccatcacatcagtgtccataggtgttgttgtcatgatcggagtgctattaacaaaggattactttccctacttgtttaccaccagtgttccagttgccaatgaaacaactaggctttctgctttgctagctgtcacagtgcttcta

SEQ ID NO: 102497 - DNA, 209 bp, Glycine max
gtaatatgcattgtactgtgggactgcgttaaacttaaaccatgcaagacagttaagtactccatcatccctgttatcggtgaataataaagtaatatgcactgtggcacttcagattttcaatcaattttttaaacaattagttaaataattaagtatcatcgtagaattataatgattagacaatttttttatagttggaataatta

SEQ ID NO: 102498 - DNA, 265 bp, Glycine max
tacgggacgacagaagggggagtatgtaaacacttataagggttgaaataaagtaaatgttgagttttgtactacaaaatctatttgaacataaacagaatatttaaagctataaaaagtgataactatcaagttaaaagggttggggagtgtcctactgaatttctcttgctgtatcaaatgtatttttctctaatattatcatagtattcttataccgagaaactactcaaaccatgattcctcacatgaatgagcctaactc

SEQ ID NO: 102499 - DNA, 166 bp, Glycine max
agctggtccaatgtagtgttgcgtaggtgacagtgactggcaatgttggttgttgggttgggatcccaacaacgttatactgaagagaagagtgaggaacagacatcacatgacagaggaattatgggagcaaggagaagaaggtcgatcttggccactctcgctt

SEQ ID NO: 102500 - DNA, 165 bp, Glycine max
atatacattctgttttgcagtcacatgtctggcgatccttaagcactcctcgatcacaatgtatgcttctgtttcctcagtgactaccctcaggttgatcaagcattccaacctttctgttattgcttggcaagcctcctacgacattgacaaggaaaaaagtaa

SEQ ID NO: 102501 - DNA, 187 bp, Glycine max
agtgttaaaaatagttagttttactttgtttatatttgagtccaaaagtgagaataatttacaatgatgacactcaaattagaacttataatttaatgcattatgatatatcctttttcactaagtcaaacaaacttagttggttatatgatgttttttatcaatatttttatacgaagtaaattcc

SEQ ID NO: 102502 - DNA, 189 bp, Glycine max
ggtgacaacaagttcataactctcttggacttgaagcgtccatttaaaccagatgacggatttggacatggacaacgtcatctcggacatccttggagctatatcagatcctaaccgagtgcacctggtgttctccggtcgccagatggctcgacttacagtgtagctagatatattttgttcacatgg

SEQ ID NO: 102503 - DNA, 194 bp, Glycine max
gaatcatacaataatttcttcatgatgttgtagttgcagaccgtttttcgaagccttgatcgtcatacataaattttggaaaggtttatatgaaaatagagataggaaaattacttgagagaattcaataaagcaatgcatttatggtggtcaaatggtgtgagtgagtttgaagtaaggaaaggttgattgag

SEQ ID NO: 102504 - DNA, 190 bp, Glycine max
tgcttacaaatttgtagttacgtttactttaaatattttagataagatgtagatatgtgatgctgaaccaaacaccagctaaaatattacttttctaccacaaagtataaagatccatttaaacttgttaaataattgtatcattagagtataggacactgaaaatgactcgagaacaaaaagaaaaatg

SEQ ID NO: 102505 - DNA, 204 bp, Glycine max
acgacagaagggctctcaagtataacattaactggttctgaactaagttctgcaaccaaatacaattcaagcaaattagctcagtatcaaacaaagatcattatcaaaatttaagcgaaaacctcatattaaaacaatcgtatttctaacaaagttggatcctaaagtaatgtccgggagtcagattttggaagggaaaaaaga

SEQ ID NO: 102506 - DNA, 189 bp, Glycine max
aagtttgtgctataactatgttgttgaccttaaagacaagaaagaaagaataagtgtgtttgtttttagctttgtttggattttggatgaagaggaaagtagtggtatttatacgtggtgatggtcggaaagatagaaggaggaagaatcgttcttggctccagaattttctcggcattaattaattac

SEQ ID NO: 102507 - DNA, 185 bp, Glycine max
gacattaaacttttatttttaaatgataaaacttaaatataatatttaagatattttgacagtgttctttagtcaaaattagaatttaatcttggtaatctttataataagtattttcattaaatatcaagatattttattgaagtctaactccaatctactactgatgagaaaacaaaactata

SEQ ID NO: 102508 - DNA, 216 bp, Glycine max
gaagacgacagaaggggggaagaagcctatcaacgtgaacttgagcagcgaagagtagatgaaatgttcatgaaggaagcacttttggaagccaagaaggctgctgatacatgggaggtacctgttggagctgttcttgtgcagcatgggaaaattattgctcgaggctgcaacttagtagaagagttacgggactccactgcccatgcagagatg

SEQ ID NO: 102509 - DNA, 137 bp, Glycine max
gaggatagagatcacgcaacaaaatatttgctttttggtggatttcattgcaagcatgtttggctatgcagcagccatcgttgcagcaatcctcttctacgactactacttccataggagacgttgttgctaacacc

SEQ ID NO: 102510 - DNA, 106 bp, Glycine max
gaccatcttgctactgcgtgcgattcaaggagagtaatttgaaatttcaatgttttgctattgtggagaaagacttatggtgctgtatgatgccgtagtggattcc

SEQ ID NO: 102511 - DNA, 213 bp, Glycine max
acttttcttcgaaaccccatatcagcatcgaactaattattaactaaaaatgcaataaattgaataaaatgatggaaaaaaaaacatcatatcctctttcttctaagaggattccaagaaaacacagtggttaggttatccaaagtctgtagtatgattattcaaagctggaaatatgggcttaataatctttgacacctcccttactaagtt

SEQ ID NO: 102512 - DNA, 185 bp, Glycine max
tgggtacccttgtacccgttatttatatagttatgatcttattggctaataaaaaaaaaattggtaattgatgtgtttggaaaagcttatttataggacttatcttatgacataagtaattatgtaagtgtttggagtaacttatgaaaataatttatgatctgctcatactgttttcaacttat

SEQ ID NO: 102513 - DNA, 214 bp, Glycine max
cattgtcatatttgataatggagagtatgctttaaaagggtatgcttaaagggtctcaatagatgtattcgtagaccaactgaagcagctgggctgcaccttgtgtataagcattctggtgactcctaaagctccagcaacgtgacaatcagtctactgaaccaggaaaaggcggaattgggcagctgcgctgtaggacaatctcaattggaag

SEQ ID NO: 102514 - DNA, 227 bp, Glycine max
cgcctaatgattagtagattgatttccatagctttcaggtaactttctgcctcccataccagctaactaacactggattcaatgattttagctgtctagatcaaaactgccctatgtaatgttgttacaatacatgaattttgaatctagtttagtagaggaatttcatggtgtaacgttttcgtgtgagccgcagattctgggatggaaagtaaggaactgtcatg

SEQ ID NO: 102515 - DNA, 207 bp, Glycine max
tttgggaagatactgatgctgcatgtatcgaattatcggttaatcatgagcatctctattgttggcgctccaaatttcccgtgagtgtgtctggagtcaatatattcgctacctatactcacactaagttgcttgttctcttgggataacttagttgagatactgtgaactctgtacatattcttgatatgatataccctggtattg

SEQ ID NO: 102516 - DNA, 99 bp, Glycine max
acggctccaatacggccgcagaatggcgaaacaggcggctcttatatccgtggtctaaagctaagtggattagacttagattctgcttctgggattcga

SEQ ID NO: 102517 - DNA, 204 bp, Glycine max
ggaagcaaaaaatgaaaacccacagtgcttctctcctctgtcttattctctctcttgctatccttttggctattggcactgctgcaagtcgaactccaagaagctcagtgctcatccaccatgtttcatcatttaacggaagcctttttccttctcccatgctcgttggagttggttctgctgcctaccatgcagaatgagcat

SEQ ID NO: 102518 - DNA, 253 bp, Glycine max
taagacgacacaaggggatgctggaaatatgtatgagatacttagctacgctgggaaagagaaaaaggtctctaagagagagccagtgtgcggttagagaagataggaaacagagaacacgacatcggtgcgcatcttaggatggacacctctacgtgatgttatctgtaatgtctcgcttagtaactacggcaccatcgtgatctatccaattgagacaagcatcgattacaactctcaatctcactctgga

SEQ ID NO: 102519 - DNA, 233 bp, Glycine max
ggggaaatctagaaaatactccaaaggttatgctactggcttcgttcctgattttcggcatgctgttgagactattgatgaatcagaagggctgggtagcttgggaagggttgatatggaactgacggctttggcagattcttgtgcaccaaaaaggaaacgccctggcttgaatacctgtggtggtgattatgctggtagtttcaatgtaccatttcgacatttctcattat

SEQ ID NO: 102520 - DNA, 164 bp, Glycine max
aatcatagtaatgatcatcaacaaaaactaatagtaatgatcatcaagatggacataatatgtcaaaatgctttttgaacaaaagtatactccattattgccttaattctaagctaaggcaactccttaactacacagggcatgcaacaagacttaacagtagc

SEQ ID NO: 102521 - DNA, 219 bp, Glycine max
caaagacattgccttcctccatcttctgtaattaatgcttctccgtcctcaaccttaaccgtaaagtaaagctttgacaggagtcgaagtccaaactccgaaatatatataggctgttagaatcatgtaaccaaccaaagaggggtagagaagcaactttttcatctgccctgtctttctgttctgttgtatgtatacctttagttgtgaggcaatggc

SEQ ID NO: 102522 - DNA, 223 bp, Glycine max
tactatattgtcatccgtacctctcatctaccatgggcaaacgagcccgttgacgcgcaaagactaacatcgtcttctgcaccttctgtcatcctgatccatgaagtcaggtgacatgcgggggtaccgtatagtcatccgaacctttcgtcaaccgaggcgaacgaattcgatggtatcaggatgatgttggtcgttcgattctgattattctcaaaatttc

SEQ ID NO: 102523 - DNA, 259 bp, Glycine max
agacgacagaagggggaatttagtttagatatggaagaggaggaagaaggtggacctagcacacgccttaggaagagagccacaaaagctcaggaatctgagggaaaattgaaagacaagcaaacaaaaaggatgaaggtgaagaatgctgcagctgcaaaggtttcggttggcgatgccagaatgcaggatggggaagcagaatatcagtgtgatattgatgggtgcactatgagttttgggtcaaaacaggagctga

SEQ ID NO: 102524 - DNA, 229 bp, Glycine max
gaagagactcgaggtaatattcataatccactctaaacgacttgttcttctaagccacaatattggtttaagaaatttcagttcatatgatgattttagttaacatctgtcttaatttagtcaaataattagttaggtttgattacttttttatcttttaatacattttttaggtttagtttaatttttcattatttcaaggtttaattaggtctttattttaatagtt

SEQ ID NO: 102525 - DNA, 255 bp, Glycine max
gttcactaattataaaagtcatcctagctaattagggaatcaaaccatgataagataaagtaatatggtaattaattctaggagataatctaaagatattctaagatatggtaagatattttcatatattctaacaatcctaaataccccttccccccgttcctaacaggttcaatgtttttctttcttgctcaaggattatcatttcagtagtagtatatttgggttgcctggtattaagtttccttcgctgtg

SEQ ID NO: 102526 - DNA, 235 bp, Glycine max
catccaggttttatgaccagcttgttattgtgtaatgaatgataaataaggcaaactacaaacggcatctatactcggcttagaatgtaatttacaaataaagaataaagtaaaaaatcaaagcatgtctgtaaactgtaaagagcaattgtgggaggaaaataaaaatgaaaaacaaaggggggagggggaggccacagttttcttaacagcatcatatacgagcgacgtagga

SEQ ID NO: 102527 - DNA, 227 bp, Glycine max
accccttttaatgttcagaatttttagtgcactattaataaccaagttaaaaacattttgatgcaatccaaatatggcccattcatcagtctaactatggaacttagcgattaaaaagttggaactaagtattgtatttgactccttttcatcaataaaaatataagccaaagaaaatgttgaagttacatagcctgaggatagaatgcaggatttctaacaaactc

SEQ ID NO: 102528 - DNA, 228 bp, Glycine max
cctagctcattcattatatttagaaaattagatagtattactattggaatctcattacttttcaaagtgttccgatacgtactgcacttatagctctcagctgaaataatgacaaaactgaacaaatctcaatttttaatctgttcacatactgatatgtgtcaagggtgatgtgtagccgtttggtgattaagtgaataaattaaaatgtgtactttccccggtaat

SEQ ID NO: 102529 - DNA, 229 bp, Glycine max
atcctttggatggcttgtcatgagagaatggcaactaaagatagattaatgcgatttggaatgctcaatgatgatacttgttactgtaaagaaaaagagatcattcaacatattttcttccaatgtaatgtgttgagtcatctttggaaacacatccttaaatggctagaggttccacattctccgggtggttggaatgaggagttggattggattattaagaagtgca

SEQ ID NO: 102530 - DNA, 225 bp, Glycine max
ggggtctatgatcaagatagggagtgtgggtgtggccgttaccaggaagaaacaaacaatgtttctcaaagtccagctgcactggaatgtcatcatcgctgctgaaaatctgcaaccggaaggtctgatgcttcatagggcaatcattgtccgccttctgagtgactttgctgtgaagaaggccaccaaagatctgggatactttcttgcagtgaccacactgga

SEQ ID NO: 102531 - DNA, 225 bp, Glycine max
cattgtatttccttcaaacaatgtaagccatactacaatgatggcccaacaaacttgtttagtacccatgaaatgatgcacataatttaaatttacacactgcaagttaggggatagagatggagctagctagagagaggtgtttgtaagaggtggcttgggatgagagtttttacagagataaatatgcaaatgtagggttaagttgatggttggaaagttgtt

SEQ ID NO: 102532 - DNA, 182 bp, Glycine max
ggaccatatatagtgtattttttttcatgcccctaatggagaatcttcattcatatttttgtgatcaagcctactcttgcacgatatctaacgcgatatattccgtcttatcttataggtgcagaatttcgggtcatcattgatcttgctgtagtgaggtagtttaatctgaaatttgtatg

SEQ ID NO: 102533 - DNA, 235 bp, Glycine max
cagatatacacacaccactgttgactgaatgcatcattcagcaacactccaacgtgtttgtttgatgcagaaaacaaaatgacaagataacatgccataatctttataattaggcatagctcaagagtgttgttccttacagctaaaccatagtgttcacagaaagggtccctctcattagtcattagtcgttttctttttttcagaaaatactcaaatgaaaaaggggcatgag

SEQ ID NO: 102534 - DNA, 214 bp, Glycine max
gtagaaatagtgtataatgtgtaatacgcctttaatttgtacgtgcatgtgtgatcagtttaagagcaaattaacgtgatgaacatcatctattgtgcaaaaaaaaaaaaaaaaaaaaaaaaaaatatcgggccgccaaaaattggccccttcccccggggattaatttccggccggggccctgagggggtacaatgttccccaatagggagcc

SEQ ID NO: 102535 - DNA, 250 bp, Glycine max
tacgaagacgacagaagggtggggcataacaatatcatgttcaatgtaatagagaactgaaactgaatgccgtcactaattaatataaaaagaaatgaaaaatcacagtgtagtatgaatgctatattcagagaaaatgtggaaatgtaatctaaataaataactcatcatgccacatcagaaatagaagcatttatcctaacaaattaagcttctgttgtcagagctatgcacattttaacccaaatca

SEQ ID NO: 102536 - DNA, 255 bp, Glycine max
gacgagaaaatagattgaaaatggcaatagctcacatgacataatagtcccgggttatttggaatgaggtagcgcttagtatatatataaatgaatgaatgaatgaaaacataattaagatggcaacgttcacataccacgtagaaacagttcaatcattctcagccctaagcggacttcacatactcatccacttagtggcagtgttgtctctctgttactaccgcatcacccacttcttcctccaacctccaa

SEQ ID NO: 102537 - DNA, 250 bp, Glycine max
caccaagagtaattataaacattaacatattataaacaaaaatttacaaattgataaaatattagagtagtaatgtactttaattgcaaacaaagtcagaataaaacaaagttagaagttgcatctaatttgatttccaagaagcaaattctgtgtttgtgcaaaagtccttcatccatttctaatttttgcagtcttcctatgatgattataaactattctacacttcatccttccaagttcagatgga

SEQ ID NO: 102538 - DNA, 245 bp, Glycine max
catcaaaagatcgattcagaaacgcacctgagtcgggcatttccttttattattcgatcaaattttaaatatttgtagtcatgcaactgcgcaacacaagatttaacccaaaaacaaaacatatcagtaaagagctgagaaaacgagtacaatatttgcttgtgaattgttataaaggtaagtggaaatttaaatagtcaaacatcagctctgcttcttaatattgcccttaaaaagaaggtaca

SEQ ID NO: 102539 - DNA, 234 bp, Glycine max
gacacaaagacaaagacaaagactccaacactccatcttcccggacttcacttcactgcggctcctcaaaaaggtaaaaccaactctgctattcgcgcttagttagttacattcgaggtgtgctgcacattcatgacttggtggtgctcatagtcatagatggggaagggaaaacctaggtctgttgaaaaaggtgtggtaggacctagtttgcgtgttacatcctcgactata

SEQ ID NO: 102540 - DNA, 222 bp, Glycine max
cgggacactaatttaattgaccattttatccgcttactatctctcagtttatcaaaactcagcacaaagttagtttgaaaagaaatcctaccaacaccccccatttaccttagcctatcgaacttacttctactttggtccattctcatacctcaagaaaagcaaaaacagagtcctctgtttactctgtttttcccactctacatattcctacacctattt

SEQ ID NO: 102541 - DNA, 145 bp, Glycine max
cggcaaaaacaataatcaatatccgtttttctagtaccctagttctgcaagctctctcctacttttgacacgtgagagaggaggaaagaaagatgttttttaacggatatgggtatcaagggacatcatcatttgagcagacatt

SEQ ID NO: 102542 - DNA, 264 bp, Glycine max
cgacagaagggggtagattaaaataataatggtaatatttatgaagagggtctgaggtccctaaagggaggagaaaagaaaagattgggaagggagaagcatgaaaatcggagacaggaagaagaagaagagcatccccagcgacgaatgaatgggcaattgcggaagcagagaggaatctgccgtagtttccaaggctcaagttgttcagcagcttcaccatgcgacgtcgttgggcgccagtgccaggaccgacaagaagca

SEQ ID NO: 102543 - DNA, 237 bp, Glycine max
ctattagagtattgaacatacttctttaaagatatttatgtttttttaattatttaaatgctttaattttaaacacttatccatgattgttatcaaattctagagtcaacttataaactcttactaatttatacgaattcatcccgtcaaaaacaaatttgctaccaagtcaacttagaaataaattcttaaactagtatactctaaagtttgacaatcactcttgatttttttttt

SEQ ID NO: 102544 - DNA, 221 bp, Glycine max
  unsure (1)..(221): unsure at all n locations
gggtggcatatatgctagtatgcagcagagccagaatatctccatcaatcaagtgatccgattccatgtttgaattttgattttgagtataaaatcaattatattttttaaaaaaatatttgttttataggtgtttaggatatttgataaaaataagtcagtgtttttaatattaaatactttgtaccaatgttgataaagattanaaaaaaatacaatca

SEQ ID NO: 102545 - DNA, 236 bp, Glycine max
taatatattttttacagtcaattttctttttgatacatgtaccgaaagaaacatgttttaaaataaacaagttttacccttatactaaattactaatgcattattatattatttaatgaatttaattttttaacataattaaagtcattaagtaattatccataaaagtatttatagtaacaatgcatcaaaattagttaaaaaaaggtttaggaagtcagattgagtcattgacc

SEQ ID NO: 102546 - DNA, 246 bp, Glycine max
atagctctaatggtgcagcggacttgacatcatcagaacaaaaacctcgaaaaaaaaaagtgattatttctcatgaaaacatttccaataactcatttagtaatgtctaataataataataacgatgataagtcattaccacaataataacggtggggcagtatgagtcaaatttaaggttttgtatcgcttgtccctgcgcattatgttatttgaaacacaaacttatcatatggccctccaagt

SEQ ID NO: 102547 - DNA, 244 bp, Glycine max
gattgtaaagaagaaatgtgaaagagttatttctcttgaatagtagtatacagcagagaactctgaagtttggggggctcctcgggatacggatcaccctgaactcagacaaccactagccatggaagtttgggactctgtattgcaaagaactaaaccaaggtctaagattacagtattgactaatggacccttgactaacctggcaaaggttgtatcggtgaaaaacataagctcaagaatt

SEQ ID NO: 102548 - DNA, 242 bp, Glycine max
gtccatttatgtatgcatcaacatcgttcgcctggaccaataatgaagaaactaactggtcagaaattgtaaatttttcatgcaacgatttcaaccattacaagggaattagagttttaacatggtctcagctaatttacttatgaaacctggttaacttacctagttagaccatgtaatatgtatcatctttaacaaatactgaagggggcatttggtaattatattataagatatcttgg

SEQ ID NO: 102549 - DNA, 254 bp, Glycine max
acgcttgttcttgttcactcctttccttggtagtgttgttagtagtcattgttgaaaggaaattatgcttttctatcatggctcccttgtataacttagtaaatgaatgatgttgaaactatttaaaaaaaaacaaaataattacaaattaaaacagagataagcataaatcaatgccataagaaagtaaaaatgtaataaaaccatttctccagtattcctaaaccaaatgtacacagaatttctaaaatttt

SEQ ID NO: 102550 - DNA, 242 bp, Glycine max
acatggctccctgcatggacatgtagaagatacattcattcccgggatttttttctttaatttgtttttatcttctttcctaagtattgttcaatgaatatgaatttgatcgacaacgtttacctatactataactataagccgcccctaaaattcttttcttggacaatgcaaagttaaagtcatcatttctaaccattagtatacataacatttttttataagaggttatattgactact

SEQ ID NO: 102551 - DNA, 241 bp, Glycine max
gggcaattaaaagttgcattgaaatagtgagatgtattgcagaagaatttacaaaaaagaatatagaaagaattacttcttcctgctacaaaacatggaatagaagtaataatatcaggcaaatgaaccctaataataagggggaaaacctaaaaatatgatgttcaataagcaacaacttatttctactacaaaggattacttttcacacaaagcaagcagaagatgaaatagcaatgaa

SEQ ID NO: 102552 - DNA, 255 bp, Glycine max
gaatatattgagaaaccatgtgggggaaaaccggatggacccatttgcataacttgagctctaagattgtctaaaacaattatggtgatagttgaatcatgatagttgggtgcttcctcacttgtctctttttcattttattttatttttctaaaatacggtgtttattttttccccctaaagggaggtgacgtagagtaatgtatcagatgaatatgtttctaccaatagttgaactccacttaatgaataata

SEQ ID NO: 102553 - DNA, 246 bp, Glycine max
gtgtccaccaattccacatttgggaggttgtctgtttcttgtcagcagtcgacatactcgttcgtattcttgtggttgaagttgttcatcaggaacaagttgctattcttggacaaagtcattagtgaaagaactcccaataatactttgatgaaaggatgcaaagaaaggtataaatatacattgcatgtacacataagcatactctagtgtttgaagatttgtacctatgaggttgctcataaa

SEQ ID NO: 102554 - DNA, 241 bp, Glycine max
ctgctgtgcctgtgaatgtcatatgattgggttgggttgctttttttcaaaactcattcattatttctgttccaagaatcggaaggaccaatgttttttgcattggatgcttttcaccattcaaccaaatttgtactgtaattctgtgtcattaatactttaactaatacggaacttttgctgtagtcctaatctattctttattttggacaatgttgtcttcatcctttaatattcttct

SEQ ID NO: 102555 - DNA, 269 bp, Glycine max
tacgggacgacagaagggactgattgcatcattacaaaaataaaagttcagaagatttaaatgttctaaatgctctgaactcaactttattcacatgctctttataaattacaagatgtgcaatgtgaaatgtaatagtaatagaaaggagttttgtagcattattttcaatacacccaagaaaactatcaaaatattgaaataagagctctaagcttttataacaaagaaaataaaaagtcaatttaaacatgaaagtagatcaggaa

SEQ ID NO: 102556 - DNA, 246 bp, Glycine max
gactactgattagtttctcactgcttaactatactaacttcaggcataatcaattgaattgtgatgtaagaaaattcaattccttccttctaggacatccaatgatataagaaagcaacattaattacaccgcatgaaaatcaaccttcttataagaagaagcgtatactacatacaattacgtcattgtgaggtatttcagcacttatagtaaccttcttctttaatttgtttatttaattactt

SEQ ID NO: 102557 - DNA, 222 bp, Glycine max
ggcatcaattcaaaatatactcatcaattataagcatgggtttgtggaacacaacgaatgcagtgtcttgccgctttcacaagtttggtgatgaccaaaagaatctggtcttccaaggtgatgccacgtcttcttccaggggcatagaactcacaaagttagacggtggaggaaaaccagtgggtggcagtgtggggagagtgttatactcttctccagtgc

SEQ ID NO: 102558 - DNA, 254 bp, Glycine max
tacctccctggtgataaagtatgatcagaataatatcaatgctatgcattaacatctattccttttctatgtataaaatgtaatttattaaaatataaattactaataaacaaattaatgaaatataaagcatagaaaaatagtaattgatattactataagatgttactgtacactattgcacttcataattttccccctacaatattcattattttgtttaaatgtcgtttaacatattgtaagtaaagaaa

SEQ ID NO: 102559 - DNA, 245 bp, Glycine max
cctcttgtgcattttatgctcaaagttgctctctcctttaccatccttgtctgagctctagcttttttctcgaaagcttccttttgggctatatgttcacaaaaaccatttcccctgaacaccccattcctgtctaaaacacacttctctcaatatctatctctagaactagaatggtaagccactaagcctagtgactagtgactagtagtgactcattcattcattcggttcaagtgttcagc

SEQ ID NO: 102560 - DNA, 238 bp, Glycine max
gtctcacacgcacttccatagaagtttaattatcagcttctgagttctaagctaagtctgcttttattcttttctctcccgatatatatacagtatttgcttatatatatatatatactacttattaggtactgtgattgcagttcctaatgcatgattttacgcggagccaatgagcatttcagtgctcctggttgtatgtgcttcatctggtagtatactcttgctatggtgtcca

SEQ ID NO: 102561 - DNA, 258 bp, Glycine max
agggtatagggtacaacaggtggagacgcgtgttaggcatgcagagaatcataggttgtaatcaaataaatcagatgtgtgtgtatgcaaatactatactgtgtgtatatattatttctaaaggctttggggaaaatcagaaaaatcaatgatgtttgccaacgcggtcttagctggaccctaacactgtacactctcttaccaatctacctcaccatacacaacatacatacaactacgtcgttttgaaggttcaac

SEQ ID NO: 102562 - DNA, 233 bp, Glycine max
  unsure (1)..(233): unsure at all n locations
cgnggatacctatatacaacttgagaaaaccatagttattaacattatatcatcgtagttttgatggagagtattcattaattttattaataactaatttctaataaaaaatttaattatatttagtgatatttttttaattatattttttttcatccaaaaactgaaatcaacaacttactagatcaccacatttgttaaaagttaagaataaagagacaaagatatgatta

SEQ ID NO: 102563 - DNA, 198 bp, Glycine max
aggccccatatatttactccgaaaaaaaagaaaaaaaaaaaaaaaaaaaagggggcccccgattaggacccccgtcgccccggaatttattccgggccgggcacttgagggggaaccagtttccccaagagggggccttataaaactttggggaaatccggggaaaagcgtttcccgggggaaattttttacccgccc

SEQ ID NO: 102564 - DNA, 273 bp, Glycine max
gggtggagagatgacccaacttgaatattacaatttcctaaaggcagaggagacattctagtctagtatggatgcatcatgtatagatcttcagtggcagttgctgtgaatactatttgaattttctgtttacctcgtatttataacgcgtaaactgtaaatatgagtattgctaaatccaccaatattatcctgttcactctgttggcttgtatagattaacaccttattgtaaattagaatgaactgtcagcagcattcgctccaaattca

SEQ ID NO: 102565 - DNA, 249 bp, Glycine max
gcacaacctccattgcatttagcagatgcacttcctgtcgtcattgccaatgaccctactactgcacaaccgcaaccacaactctcagcaaacaccatgggcatgcctgcccagaattccttgttacaggcctcctccgcaaccgtatcacaactcttgggaagatcagcagcatctccttctgctgcaaccaccaccaccacttcttttgacaatataacagcttccccaatcccatatgccaattca

SEQ ID NO: 102566 - DNA, 184 bp, Glycine max
ggaaggagaaaaaaaaaaaaaaaaaaaaaaaaaaaaggggcccccccctagtgaccccctcaccccgggaattatttccggccggggacctccaggggtacaagtttcccccaaagggggcctatttaaagcttggggaaaacaggggaatacgttttccccggggaaaattttttcccccccc

SEQ ID NO: 102567 - DNA, 236 bp, Glycine max
atacttatttctaatatttagttgccatcgtattttttatttaaaataaataattaaaactatgcgaatatttcgttgttttaccagcaatattttttcccctaaggaaacaaacttatgtcatgttattaataatcaaggaaggaatacaatgaggcatatagtgacaaagatggagataagataagatggtatttctctaaccaggacatgtacaatgaggcatatagtgacaa

SEQ ID NO: 102568 - DNA, 234 bp, Glycine max
acgacctggtggaggactcacttcacactgttctataagcttcactgtcactgtgtcagccatggattatgtatggagttcaacttgggtatgattccagagctagacaagaacaaacaccacacggcaattattgtatattgatcataagaagacaaataggggctcagataagaggcagcgtctattaataaaatgtacatatgcataaacttcaacgatgcagttgagtaa

SEQ ID NO: 102569 - DNA, 280 bp, Glycine max
gatacggattcgggtcgagtcatgaagggcattttctttgagaattagggatttaacagttttatgtaggtgttattataaatgttttgattatgtagaaatcactcaatcatgtttttgtcattttgagaacatccatttttctctaatttttattttttcttttatttcttccttctagattgtaattagatgcaatttagttatttggatgtcactactaatgataatccgattagaactagtgagaatccaagtacaatagaaaagttcattggag

SEQ ID NO: 102570 - DNA, 242 bp, Glycine max
gtaatatcacaggttaaaagagatttgttctaacatttggtatcagagcaagaattgcctctgccttgtccattttcgtttttcggtattttccgatttgattttgtttatggtatgaagggccttgtttcttaaaaaataaaattagaaatatgtatttcgtttgatttccttaattttggcttttgaatcgtgaaaaatggtgtccggatcagtgataaacgaacgggtctgcgtatggg

SEQ ID NO: 102571 - DNA, 249 bp, Glycine max
caccaacaagtgacaagaacgttaaagaaaaataatgtagaactgttggaagcatgtaggaattgtttgttgctcagatgactcggatttagatcttgattctccgtttaccttagacattgaagagcaatattcctgaagaaaccatcacattttttttctgcagatccgtatttaacacgagacagtcctcacatgcttaaccatctttttcctctttactaacacaataagaacatgacagaacga

SEQ ID NO: 102572 - DNA, 276 bp, Glycine max
accaccacctatgtcgcttccaccaccaaacacaatcacccaaatcatcatattgatgatgatgaccacaaacccaacacacaacagcttaagcactaccaactcaaggcacataagcttctgaatgacgtatgtggagattccacagagatagtgagaaaacctgtccctgtcgtggatgaggatcccgagagccatgaatgctgcattcgcttgtttaaacatgctcagccaggaatagtgtttgatcacgtagatgaactccaaccaccaagg

SEQ ID NO: 102573 - DNA, 277 bp, Glycine max
agacaagacgacagaagggatatcatcatatataatagataattaaaaaatcatttaatatgaatttataatattaacacattagaaaaccgatacataaaactaattaaaaaagtaatatttttgaatcacatatcacattttaatataaataaaaaataatacataaaataaaataaaatgataagttcaattatttataaaaacaatatggagtatcacaaaattataaaatgaaccccttttaattcagagtcattgcacttccagatggatt

SEQ ID NO: 102574 - DNA, 263 bp, Glycine max
gctaacccttgacgtttcagattctgaaggcttgcttagcgtcatttttttgctaaacgtgagttagtgaattttcgcttagcgagctaggcgcactgagtgcgagaagggacaaacaactcgttgggcgagcttgcggcgcgttgaacacgggcatctgtgactgatcctcttctagggttttctcacgcactaagcgggctgagtgcctcgcttagcggatgtaactcgctaagcgcatgtgtctcgcttagtgagacatc

SEQ ID NO: 102575 - DNA, 201 bp, Glycine max
aattgtaacatctcaccccaaaaaaaaaaaaaaaaaaaaaaaaaaaaacccggcccccaaaactgagcccccccgccccggaatttattccgggcccgtaacaggaagggttcccaccttccccaaagtggttttaaattggggcttggccaaatcaaggtcaaaccctttcccgaattaaattttttccccggtcacaat

SEQ ID NO: 102576 - DNA, 246 bp, Glycine max
tgacctaaaataagaatcagtcagatagaattaatatatcagccattaaatgatggatgtcagagtaagtgttctcacttggaatgatcatttgagcttttatccctaagctctgccttcaaggacagtgactcatctcttccatttgaagcctccataactttgaatcaaacaagtgaattttgttaaggctaaactaaagagacattttgaattagaaaccattaaccagcaacaaaaccgaaa

SEQ ID NO: 102577 - DNA, 240 bp, Glycine max
tacatcatcaatacataagcattaatctctctctctctctctcttcgagattggttgaaattatcttattcgcttaacatattaaaatgcgtcatttttaatgatattattggtctatagtttttatgaattatatttaatgtttttatatatttgtatataaataactttaatctattatttcgccctagcctatgaagtgtaagcacagatttgtcaatgagtagcacatgtatagtt

SEQ ID NO: 102578 - DNA, 278 bp, Glycine max
agactcttcaagattgtaaagatgctgtatcaccattacttcaaggggaaactgagaagaatgaaaaggtacctcaaattaatgaggctgccaaggaatgtattaagaagttgaatgttgagtttcaaacaaaaatgtcagatgacttgcagacaccagtgatactaactggtgctctccaagaggccttgaaatttgtgaacacttctttgaagatgttgaagaagaaaatgcagaaacgagcacagttgcaattgattcaatccttattggaggtt

SEQ ID NO: 102579 - DNA, 247 bp, Glycine max
gctcaccaaatatcatgaaaaaatttagcagtaaaagaggctggctggtccatgcatctctctaggtaaatgtggagtggccaagaaattatgttaagatgattgtaagtttttattagtgccgaagaatctgattccaccaaaggctatcccaactcttctcctttgttgcttccaacactaaaaggactgtaagagcttattataatttaaaaataaatacaatcatatttaccctcttcagaat

SEQ ID NO: 102580 - DNA, 238 bp, Glycine max
ggattccattctttcattgataatgcttttcttgctgtgaagttctggattgttattgattgattgagtgctttgtccttttggttttaggtgcctgtgtcagtattttttcctttaatccttttacacttaaagtgtgttatttggcgcttaactttcatatttatttagctttttcaggcttaggtttttaataaggtgtgtagaatgtgttacgacgtgagtttgctcagtgata

SEQ ID NO: 102581 - DNA, 247 bp, Glycine max
cttgcagtgcgtacaataatcaaaatcaagccaagcacaaaacatgcaaaaagtgcacaaacatatacaatgaaaaacaaaaacattaaaaaacccaaaaacagcctgtaccgtgaacaggtgttctcgcactccaaacctccaaacagcgattcaagccagcaattgattggaagtggcggatgaacctgattgggccaagaatggctatacggtacatgttgagtgaaatttggttggacttgca

SEQ ID NO: 102582 - DNA, 243 bp, Glycine max
ctctcactttctagcaacaatttctttttccatatactaattttaaattttgaccatgtaagtaattagcataaattgccaacataagaataattgctgtgtgtcagcaagcagtgtcattgtctgcttaataagatttgaaacagaagatttttaagtatgatatattaattacacaaaaaaatggaagtaagatgaggtgtttgacaggcaaatcctaatgtataacagaagatttttaaa

SEQ ID NO: 102583 - DNA, 242 bp, Glycine max
gtacatatatacatatatttctaagaaacatgccagagggattggaaacaggtttgtgattttaatgacaagaaaagccataacttcacagaacttcctgaaaattttgccagataaagtaactatgtcaaagcaaatttggtgttactcggttcctgtgaaataatcagtgtacagtccatagaaaccttcagacttcgggtatcttaatttaactaacttttagccttgtactaattctt

SEQ ID NO: 102584 - DNA, 249 bp, Glycine max
cttgtagttacttaaccacaagattcatggcctttgctattgagattgccattagaatctttcaagtgttgctcaagtagttttggggtttgaggagtatcagctggagaaagagaaaaaaagaaaataatcaataaattttgtggtgcaatgatgataatgaaactttttaatattttaggcttaaataattttttggtacttataagatcggggtgtttggattttggtatctaacttttatttttg

SEQ ID NO: 102585 - DNA, 230 bp, Glycine max
ggacgcacattcaatttgtctgattcaagggcccaagagagagagagagagagaatggaaacaagcttcctcactcattcagctgatacactacactccacttaacacctcctttatcaacggtcattccacagggacgtttcggtagattcctctcgctccttcgttccacggtcgctttcaactgtttcacactgaactctcttgttcgttttcacaccattttgctt

SEQ ID NO: 102586 - DNA, 243 bp, Glycine max
attgcagttaatagattgaccaaaaggtattttgtagacttgtaaactatttcaatcaaatgaacaactgatgatgacagcagacacaaacagttaaacacacatgcgtacacaattggtgacaaatgacaattcatctttgcctctctgctgattccaaaataggtagaataaaaacacaagtggacatctggatgtttagcccaaataaaatgataaaacacttaactacctgtgagtgcc

SEQ ID NO: 102587 - DNA, 265 bp, Glycine max
tgggaattgttttttgaaaattaataattgattcctaagaggcaactttcgtaggatgaacaggagcatttgattcccaacaggaagccagagaagagagagagagagtgagggtaatgcgtacatcgatcataagaggtggtccttgttggtttccccctaggactaggctggcatatgttctggcatgaagtgtgagaggtatttgatttatgacacgtttatcattgttatctactcttattaactcagcctatggaatctt

SEQ ID NO: 102588 - DNA, 245 bp, Glycine max
ctatctaaacgctattagacaatattttcaaatcaaaagtgacgcattttattaaaatcaaatttaaaaaaaaaattggagagaataattttttaaaaaaggaaacagataccttcaacaaagaactccagacatgaaagatccctcttatctcttccataacataattccagactcgtgaacaggatttgaggctaactctaatattgttacataattttcaatcagcttgagaaccttagaat

SEQ ID NO: 102589 - DNA, 240 bp, Glycine max
atcattatctactacacttactttggacttgcacaattgcacaacccgccgcgatttgtgcatacaattcttcgggcacaatgtcaacgagaggcctactagatttaccttctgtcaggacacgaccgttgaagtttatgaggatgtgggagatttttagtgatgataaggatctcacgtcatccgagattgcctattactgggatgttattagtgaagagatacttgagggagagatgc

SEQ ID NO: 102590 - DNA, 231 bp, Glycine max
aggtaagagaattctatataaaaaagaatgtgatggagtcatgtgtatgttatttttaatatatcagctaatgttaatttattagtttgtttagaaatgttaattgaaaaattcgaacgtgtgatttttttttcttttctcctttaccatttttcatccacaagaccaacctcatgtcttctgaataaaaatgaaggcaagataaattcacaaagaaaatgttgatgagag

SEQ ID NO: 102591 - DNA, 242 bp, Glycine max
tctagcgtgttgtcgtactattgcattgtgatggtttgtctgaaaaaaaaaatagggtcttgtgtatggtttcttttcattcacacgccttttgttcctttgataaagtgtcatctcgggtaataactttgcctaggttacaaactttttcttaaaaaaactgaaaagaaaaactaaaaaccaacatgcttttgaaaaagatgaccgccaatattatttggaaaattcataaatcagaacgc

SEQ ID NO: 102592 - DNA, 240 bp, Glycine max
ggaatgaagcaagaatgaagcaagaatgaagcaagatttccgttggtactgtgttcctccctttggactgacttcaaagactcgctgaattgatttccgcctatggcacgagtgatgaatgaataagaaaaattataaagcgctgtttgttgattgtcatttcttacatggagggaacgggatttggtgcagcggcaccgacgccattggttaggttgtggagaactgcgtttttgacgc

SEQ ID NO: 102593 - DNA, 239 bp, Glycine max
gacaacaacacattccaatcacaaagccagccattgcaacatttgataattcttttgaagtcccagaaaatgcaagcaacctttctatgctcccatatgtttctatcataccctcttccagtcaaattgttgcagcgtagttcaccacacaagttgttcagtgatggcaccaccactcgtaggagtttaatctatgcatcaaaaagagacccttttgggcaccattatgatggaaattt

SEQ ID NO: 102594 - DNA, 250 bp, Glycine max
cgccgcgccggagggtattcttggccgcagagaacctcggagaggaggaaagagaagagagaaaaagggaagagagaaaagagaagagagagaaaagcttttaaaaaatgggaaaaaaccggccccgagcccttatatagaggtcggaccggttcggttattgttccttgaaccaaaccggtccggttctcccttttttggcccgctggactcacctctggcccatttctgctcttctctctttttcttc

SEQ ID NO: 102595 - DNA, 259 bp, Glycine max
ctccaccctctgctataattacatgactagattatttgacccgctgctattgcctattctttggattctttcgattgctgctctttctctctttacgtggattctttaaaaaaacgttgtacttcagtcacaaagtcttattagcatttttaccaaaagaaaaaaatatcttatttgcatagtttttttttttatatataaatagtatagtattgatatatatttctgggttcgactgacggtataatttgtgacgcgt

SEQ ID NO: 102596 - DNA, 254 bp, Glycine max
cctccatcaggatcttcacaatatctgcaacaagaaaaactgttattatgacaagtacaaaaataataaaaaaagaaaaggccaatgtgacctctacatccacggacagtcagagagattcaatttcttttaagagaacaaatacaaagagtctctatcaatgatacaatcaacaacccatcccctattttaccctaattgcaacccaataaactgattcacattccaaggaagtacaaaaaaacaaatcttta

SEQ ID NO: 102597 - DNA, 255 bp, Glycine max
agtgtgttaagtactactactacgcattgttataaattaatctatatcttcttgatatgtattatgtaattatatatgagaatttgtgaatttgttatctgtcagagactgcattattgagatgagcagtccgttgaagaatcatttgcaaagagtgatgaagatggctacgtttgcaatgaaaacctcaatttttcttagcactaataataaatggaaagctatgatatatggccaacaaaagaaagagactat

SEQ ID NO: 102598 - DNA, 243 bp, Glycine max
cagtatgtactgaatcagtagtattcattagaagtttaagccattttgattcttttatcatggaagtaacttccatctggtattcaaaaccaatttgaggatttgaccttggggctccaactatgttgcttttatcaagagaacttggaggaattagctgcctattagattcatgctccataatattgtgattacaatactctggctaatgaaagctaggatattggaatatggaatgaaaat

SEQ ID NO: 102599 - DNA, 247 bp, Glycine max
cacttattaacttaattgattgagtaatttatagtctaacctccaaaagaattcttcaacttattgaccgaacaatttataatccacgacgaaactctttaacttattaactgcatcatattccattaataatattttattgattgttttgaacaatttttagtcaatgctttatgcctttatcttcatcattttaaaataaatattgattttgcaataataataaccaagtaaaaacaaatgcaag

SEQ ID NO: 102600 - DNA, 106 bp, Glycine max
tggcgcattgaacgaaacttcgggactgtacgtgtagcaggaacaagcaccaatggcgccgaaggtaacacgcatggttagcggaaaccccgatttgataagggga

SEQ ID NO: 102601 - DNA, 246 bp, Glycine max
cacacacaaaaggctattatttatccaaattaaaataagttgaaccaaaacgaaaaattaatctcataaagatacctacttatgaaattacaaatcctaaataatgtaatagaacccccatcaaaactaaactactacaaaagccttaacccactaggtgaggttggctataaggaacacatgacatcattcagctctttgtcgtgagtgatcaatgtttggtatattagagagttttacattgat

SEQ ID NO: 102602 - DNA, 119 bp, Glycine max
  unsure (1)..(119): unsure at all n locations
atanaacantnnagacagatnttggtagagagttacacgtttgtaaattaaatcatcagtggctcggctaccatagcaatatgattctctgtatgtataattattgctcatatgcaaaa

SEQ ID NO: 102603 - DNA, 154 bp, Glycine max
ctagtatacctatataactcctaaaaagagagagataaaaaaaggtgaagcgagaagcgatgtcgcacagaacagatattggaacaactccacagaacgtagcaaccaaatcaaggcacccagggctcctggtagatttggaagatttaacaat

SEQ ID NO: 102604 - DNA, 250 bp, Glycine max
gaggatgatagagttgaaaatgaacaagaacatagcaggggacatggtggagatgttgatagagatcacaacatagatttgaatgtagacaggaaaatggataggaccagtgatcctgatagaagttttggtgaggatagaaaagatcagtcaaggagaaacaatgacttgaatgttacaaatcaacatatcatggatctttcatcagattcagctggtactcacaatgagcagttagaagctcaattag

SEQ ID NO: 102605 - DNA, 231 bp, Glycine max
gtcctccatgctcttttgttattctgcttcctttttattaataatactctagttgtgctgcttttggttgatggttccgatgtgtcaacttagttcagatcgttgtaacattcacatgcagtatcaattcgtttttatcacacaaaaaaagtttatgattttatgcattttctttaaaggtttttttaattaagtataatttatatattcctttaaagtgtacattttttt

SEQ ID NO: 102606 - DNA, 203 bp, Glycine max
aattgtactaagcagctcctaacttaaacacctgccttatgggtgggtatttttaatcaactggtttttgtagcttgttggtaacacctaacatatatgtccaaggggaataaactgaaatgaattttttaatatccacagatctctatgttgaaaagatgcgctataaggctgtgaactgcatgtgccggtcatatcgtcca

SEQ ID NO: 102607 - DNA, 235 bp, Glycine max
ttcctctttctgttagttatatattttgttgtataattataatttctctaataaaaatttgaatcttaatgtcgctattttagagaaaactaattacttacccgtcatctctaatcttctagtgtttacatgcatggacttcctattaaaaaaagattgtgaagacggccactaataaaaaattaaaaagataaattgataattgttatacatatctaatttaaatatttatatc

SEQ ID NO: 102608 - DNA, 233 bp, Glycine max
caagaagagcaaaacaatacacttatgagaccagcacttgcaagtagaccactaggaagtctcaagaatttcaatgatccagtgagtggtggtggatggtgcaaagaccaacaaataaattcagctaaaccactcgctgagaacaacatcttgaaaccttgtatacccttttctacaatggagagctccatcaagtgcattgatcatgctgagaaagaaaacaatcctgacat

SEQ ID NO: 102609 - DNA, 229 bp, Glycine max
caatgaagggaggctcaatatttgtccataccatgattatcttaaatcttctcatggatgcaatctttgtccaccaaacatgtgcaagggattggtgatagaaaggatccaaaattcccttgcagcagcaggaaagaagaaaataatctatcttggagatggaaatggagatttttgcccaagtttgaggctcaaagatagtgactatttgatgcctagaaaggacttt

SEQ ID NO: 102610 - DNA, 251 bp, Glycine max
tatttcgtcttttgcaagtatcaattcaaaatttcattcaaaaactaaattaaattaaagataatatttgctgattttgggttccctcatacgactcttcaccaacaagggttgcaatgatttcttccccattattgtaaccaaaaagcttcatctttgatttgaactgatgaaaccaaaagcaataaaacatagctagctccaattaaaggatctaaaatcgacaataatcagaagatatgttcagcaat

SEQ ID NO: 102611 - DNA, 237 bp, Glycine max
gcagttgtttttttagggtagttgtgttatttcttttctttacttatgattttatgcattttaatttcagtagtttaaattcagttattgaataaaaattgcatgatatttgtgaagtcactatttaggctttttctgaagaattcaacacttgaaatgctacatgacaattgtgaaaatactggtttcctggaagcaagagtcagtcaaacagtgagacatgaatcacaaagagag

SEQ ID NO: 102612 - DNA, 259 bp, Glycine max
agacgacagaaggggattgttggatgcattttgatggattcgatcccatgccttcagggcctcaattcccaatcccaggttcccagttcgtggtcctcgctttcgtgcccttctgagcctccggatattgggaattggttctcaagctatgaatatcgatcacccggtccggattcgaattttagtgtcgaagattctgctttcagcgaagaggaaacccagagagacggtgaagacgaagaagaagaaaatgttaggg

SEQ ID NO: 102613 - DNA, 229 bp, Glycine max
gggagaacgcgatgctttgttcctcttttgttcttccccttcccaatcttcaactttagggttcctttaatctcgttattcctcttcactcccaagctccgttcactccaacaacacttcggttgaaattggagcttgagaccctcactagctgggtgttggacatgaagctcctatttaaaattggcactctgctcctttaatatcctggttttcaagagtggactta

SEQ ID NO: 102614 - DNA, 229 bp, Glycine max
gcccattgcctccgggctatctcctcttggaactccacattctcctcgtccctcagttggactcgcctctctctaaggaatgaccagcctttgatggcctcaaactgttgctggtgttccgcactctggaaccggtgtctatcaaagtccatctctgcctgcagggacacactagaaccctctcaagtggcatccttcctagacctcttggccgggagtttctttggag

SEQ ID NO: 102615 - DNA, 249 bp, Glycine max
atccactgagattattatctcattaaaaatgttatcataattgaagaaagaagcttttgagatgaaaaaattgaagactttgttcattattagttaaactttgtagatgctcatatttgagaataaaattatttatactcttatttataatatttaaagtattttaaaccattacaatttttaaatttttattttatgaatgttttaaagtatatttttattatagattgttattgtaacaaagtgcca

SEQ ID NO: 102616 - DNA, 198 bp, Glycine max
acagggcgattaaatgggtgaaaaatttaatacgaactgaaaaatctttcaaaaatatcgcatattataaacactaaaatgagaaatcaagcatccttattatactatatggatatactcttcactgtttctttatctcttgaatctgttatactttccaactgagacttaggcctgattcctgataagtgcacgagt

SEQ ID NO: 102617 - DNA, 227 bp, Glycine max
tatgtttgtttgttttccctttattcattcaacatagacttcaaagtctgataaatctaaaagttcaagaatttcatccgacacaagtctctaaattctctgtttagagatatgacctaagtgtttgcgccataaagtggttgaattctcttttaatttcctttttgtaccacgtgaatttgtttgcagtatttcattataggaacaattaacatccaacatatata

SEQ ID NO: 102618 - DNA, 257 bp, Glycine max
tctcgagcgaatcggctcagaggggggttgttgcaacaagattgggtcttgttgagaggatgcaaagggaggggaagattttggtggggattatccgatggattactatgctcaagatggcggggagtggaattcatcttatgtgaaaaagtctactcgtcctgccagaagagtttccgtgtcgtctgttgctgatactgccatttcccaacagccttagatttgctgcttagttacaagtccaaggttttaaaaga

SEQ ID NO: 102619 - DNA, 235 bp, Glycine max
atcaatccctacgtcgtttcttgctccgtgttcttcgtgcgacagtcaattagttttgcttatttttttttgaaagatttatatgtgatctatgtacccttaggggtccccctttgttattttgtgcatattcatctcctccatctatcatcggtaatctcatttttttgtgaagtttaatcttaaccaatcattagcgccgtaaagttgtcttttaaagagattaaaagttaat

SEQ ID NO: 102620 - DNA, 230 bp, Glycine max
gatgctaagcttgtaaggtttgttgcctgcagcattgaaggattcaatgaattcaacattgttttcgaatatcaggaaacgtttttgcatatttttccatccactgctcatgtctttcgtacatggatgcatcatggagtttgcgggactttacttgggaagtgcaaattgagagaaggagaagtagagctaaaactttcaggtttttgccaatggaaatcatctctttg

SEQ ID NO: 102621 - DNA, 259 bp, Glycine max
tacgggataagacgacagaagggctggtccatatggattctgtggtcatgtttaaattgaatagtgcaataaaataaaataactcagagtgatctaattaatggagtcttcataagttcaaaaaaaaaaaagaatgaaaaaaattaaacttttccctcctagatatgggtttatttgggtctttggtttatcaatagaagtgtggatatagaactcaaaagctgtcatagaactcttagtgcaaagccagaatgagatg

SEQ ID NO: 102622 - DNA, 236 bp, Glycine max
tagaccccaagtgggagaattattagagttttgcggttttagttcctttgtctcacatcgcttggtttgtaaaaacttgtgtctcattagtgttatatatagagacaccttataaaagttctcttagtgtagtcgtggacgtaagtacatacattgtgtgctgaaccacgttaaaactttgtgtcttttctcttttctccttattcatttctcttcttcttattgctctatactaa

SEQ ID NO: 102623 - DNA, 231 bp, Glycine max
aggcaacattataacatcaaaggaccaaagcaacaaacgacaaaaatgacatgtattcataacaattggaatcctattttatagctacaccatttttttctaagttatcagtagtagttaatgataccccactcactttgacactattactgtgtactctatcctctatattcggaaatcagaatccaactttgtgcagtctcacttcccccatttttttctcttatttct

SEQ ID NO: 102624 - DNA, 242 bp, Glycine max
tcatactatgattcatagagactaggtgactttgtttaaaatttgatagagttgatttcgaatcattgaacatgattgaaatgtgtgtccaaattaattacagtcacaagttttgttacatcaagcgttaaggcaggaaaaattgatttttccctaaatgaattatgtgctaaaacatatagcaaaacttaggacatgaaattattagatcagtcaagggcttacggccattgaattctcct

SEQ ID NO: 102625 - DNA, 236 bp, Glycine max
gggtatgcaactctttcgctcttttctctattcttaaatttcacttataataatatgccgtcttcgctggaacttgtaacttgtagctgtcgtgccttttattttattcaagagtttagagcttccttttcccctctaaatgatgactttatcttacgatcctcgctcagtctggatgttagggttgctaattcatgaaatatgtgttattgattaagtttggactttgtttaatc

SEQ ID NO: 102626 - DNA, 263 bp, Glycine max
ttgagtgcaatgatgtcaatctatcatacaataaatggttatagagaatgtttcaatatagcttatttttaaaattaaatgctttttagtcaacatcttgagaaagcttttgaaaaatataatacaatttacccaaattgatctccaggtaaatatgcactcagagcacaccagagcaatatttgtaaattcaatgttacactgccatcttgcaactaaatggttaacaacaacaccaaattctcgtcattcgccaagacagc

SEQ ID NO: 102627 - DNA, 245 bp, Glycine max
gcccatacactagataacctgattttgctgcttcgagattgaggaaagagtaggatatttctacttaaatggtactccatcctccttccatccattctcctagaaaatgattaccccatttagttcatgaaaaacaaaatgagtaaatacccataatttgatcctaaaaaagtaccccatttagttcatgaaaaaacaacaaataattctaaaaaatataaatgagacattttaacctttcttgt

SEQ ID NO: 102628 - DNA, 238 bp, Glycine max
gattgcaaattggcacgaaatccatcatatattaaaccaaactcgataaatctctatctctcccgtttcttccttatgaatattttaaccgtaagagcaatcgaggaaactcctaagctcctccatggaacaattgaagctaccatcttcaatgccacaccttactcacctttgtttcccttcaatcgtttttcttgttttcagtgcatatgtgcaaatggaaatcctgcttacgtga

SEQ ID NO: 102629 - DNA, 241 bp, Glycine max
catgtgacatgcatgacagacaaatatccaaaagttagtggagtgattttttttcctgggaaacactgtgattacaaagttgtgcatccttcccaaatagttatcattggcttggcttcactggaaggaagtgccaaatagtagccttaagacttgaaaggatggagctggatagacacattccataataatctaaaacacaagaatcaagtagtgagattctaccttccccattgtcatc

SEQ ID NO: 102630 - DNA, 243 bp, Glycine max
gtagcccagtaacgtggctactttgatccattgggtaataagaggtcacaatctataaatgtgtgtgtgtttgtttgtagttgttgtaaccttaaacggatgtatgttcaaacgtaccaagaaatatattttgttgatgcagtctcaaacgattaaccaaagtgtcaaaaggcatgattctgggcttgaatgtataggaatatgtgcaaaccaagaaccagacacagctctaatataatccat

SEQ ID NO: 102631 - DNA, 234 bp, Glycine max
ggactcaacgtcctttgctttatgttttcataggactcaacatcctcacctttaagtttcacaggacttaacgttctttgctttttagtttcataggattcaacgtcttctgtctttatgtttcataggactcaacgtcctttgtatttatgttgtcataggattcaacgtccttgcttttatgtttcccaggattcaatgtcctttgctttatgttttcataggactcaacat

SEQ ID NO: 102632 - DNA, 273 bp, Glycine max
tatcgagccgaatcggctcgagacgggacgacagaagggtagtatactatataagagtgtcagtgtaatgttttcaaacatttagagagtgttagtgcagcatataactataaggggttgtcattgtaatgttttcaaacataaaggggagttagtgtaggaatagtcaaaaagagtggagttatgtctaatttgaaaaaagcttatggagtgcaagtctaacttgtctctagtatctaataataagtggaccaacctgccaaagtttgtcat

SEQ ID NO: 102633 - DNA, 262 bp, Glycine max
gtagtttgattatgaaagagttaagttagaacatcaaacaatgtttcactggagaagtttgaattgtgaaatctagtttgattacgaaagtgttaagttagaacaccaaacaaggtctcattggagaagtttggaattggaaactagagtcatgagattgggattgaaaatctgggattggagaaggagcgaacatgattgaattcagaaaatatgtttgtagaattttttttgtaggtttaaggaaatggtttatttgtta

SEQ ID NO: 102634 - DNA, 237 bp, Glycine max
gggttaatgcagatgatgtgatacggaggataaggtctgataaaatagtgaagcaaggttttttgttggtctatctgtgttttcgaaatgagtttgtcatgactttccacgtatgcactgttattatgttgttaataaatgctttgcttgataatgataacagggaatggagacaggcaggtggccatcagcctggtgtacttagtactggtcaaggtcttcatgattcaattccca

SEQ ID NO: 102635 - DNA, 226 bp, Glycine max
gaccattaataagaaatcattccgttactatataggcatggcctatccaaattttattcttctattcggagatcgaactctggaagaattagattgatggctgttaactgtacttcctcaattcaaatcccaattcagaaatatggatcatttctcaagtaccccaacaaaaaattgatgcccagacgcagctatgtcccactgaaaaaggcatcggtactgagga

SEQ ID NO: 102636 - DNA, 232 bp, Glycine max
gggagaaaaaggaattgttgaggcagcgattagtattggaaggaaagttagagattttcagtttgatgctatgaaagactttgaaaattttatgtctctttgtagaggtggaaaaaaactgaaccatgcgtctacaattgcagggtcgccaaagcttggaacatatgagactgattttgggtggggaaagcccaagaagtgtgaaatacttcacatagaatattcaagaact

SEQ ID NO: 102637 - DNA, 238 bp, Glycine max
ctacatcatcggctactatgacacgtcaaaactgatgtaaaaagtcttgtagaaccgatgtagaaagcctactttgtaatagtgttatcaatattttggttgtataattatgtttcttgtcagaacttcggtttgttgtataatactttggttgcttccaaactttctggttgttgtttaaattctttttgttggctgaattgttgttattattcatgtatgaagttatacttttaaa

SEQ ID NO: 102638 - DNA, 202 bp, Glycine max
ctataactaatttgattgagaaaaaaatttccacactattctctcataacctgatccctatcagtgttatgtgataaagccatcacaactagagtcatttaagattccgtaagtgttttttagatgtttcaatctattaaagaaagtagatctcaatacgacactaagatatcaattggctacaatatttcgagacatactg

SEQ ID NO: 102639 - DNA, 230 bp, Glycine max
caacactttgccatctacatacaacccaccaccattgagctcttgttattgtccatcattatctacttagatgcatgacatggatgatgaggatgaggaggaagatgataataacaataataacaacaacaatgatgatgatgatggtcatggtggtggtgatgttcaacaacaaacagttacatatgattatcctagaataatagaagaaagaagtcgcataacaaaaa

SEQ ID NO: 102640 - DNA, 175 bp, Glycine max
ggaggtgggtcaactgcaaccttaaaattcctttagcatgtttctccctctgtaactgctacactttctggtcttcaaagagcaacataaatttgtgtaaggttgttcttaatttttattttatcttattcctctttcacttcccctaggtgccactcttttttttttttggccc

SEQ ID NO: 102641 - DNA, 229 bp, Glycine max
cttgatacaagcatgttcatttttttaaaatagaaagaaaataatgataaacaaaatgcaaactcacaaatcacagaggggttcatggatggtcagacgcacaacaaataacagaggacgaaggttttccttcttgccgttgacgggacatggtatcgccggcggcggccaatattgaatgatgacagcataggaataagaatgtgtgttgctttcattagggtttaga

SEQ ID NO: 102642 - DNA, 258 bp, Glycine max
gaagacgacagaaggggaccaacacaactaccacttgtcgacgaaccaccttaacacttgcaccctcgaccaaagctgacacaacaacaaaggacctctcctcttacaagaatgaatcaatgaatgaaaagaaagcaacataatgaatgactgaagaaggcaaaaggaagaagaagaaataactagggatattttcagaatttcaaaatacgctgggtgcacaaacagaattctaggtgcacaaagcgaaaagcctaa

SEQ ID NO: 102643 - DNA, 237 bp, Glycine max
agaagggcctctacctattctctgcctctctcttctctccatcccctggcttattggcatacaagtcaaatttccctcttgatagcctttcatgtgattaggtacattaagcatttgattctctttgttcttccctaatataaataaactttagtaatatgtgattgcttaataaagacccactaattaaaagggtctaacttaggaaataagaggaatactaggggatttggaccc

SEQ ID NO: 102644 - DNA, 229 bp, Glycine max
gggttagcagttgaatctcctgtttctggttttgtgatctcttctgaggttgttgtggcatggcttacaggagaaggcaaggtatatccaggtcttccaccttcaaggaagaatttcatgatccatcattggaagatgtacatgttaaggattctaatcatgacaatgcttctccttcaatcttctcatcttcttcttcaacaccagcttcatctcttgctgctcaagc

SEQ ID NO: 102645 - DNA, 230 bp, Glycine max
gatcccataaaacgaagaacaaatggcatctatgtgacgtgccttgcagataacaagtgataaaacaagtgacaacgtggcaccttagctacccgatttcttgttcacaatattcaaaattggaaaaaaaaaaaaaaaactcccccatttaaacttgcctccttggcaaataacacctatgctatgaaaatgcatccatccagagccctaaaaccaattcccattttctg

SEQ ID NO: 102646 - DNA, 214 bp, Glycine max
aatcgttgttgaggtcctattcgtcttggatattcacgagtgaggaagtcatagtaatagatccacaagaaagatatagaagaaactatagtgggttgtgtgaaaatgcggagagatgtcgaacaatgattctgtgatgctaaagggacctagaaaaacagagaaacaaaaatattgaaaccacacgcagtagcgacgtcgttttttacttttt

SEQ ID NO: 102647 - DNA, 234 bp, Glycine max
gtggtggtaggtaccgagcaaatctttgctgagagatgactgagagattttattatttttgacggtgacaattataatgatgtgaattttgaaaacatcatatattgggcacgtactggcattaaaaatatatccaggatataattatttgggagcaatgaaactcagtagaaaaaataatgacgccaattttttttatggccaattataaagtgttacttgccatttgtcaag

SEQ ID NO: 102648 - DNA, 230 bp, Glycine max
gaccacttaatcatatgccacagacagttgtagtgcaccctattggcaactcgatccttttgtaccatagagccctcttaatacatccaatttcaaatattaatactactactcaaaaacaaggaacaacaacaatagattattggccatgaagaagatgggtttttggattattgaccctgactttggattgatgaaatagaagactcccaatgttgaatttaacaaca

SEQ ID NO: 102649 - DNA, 228 bp, Glycine max
tccacaactgctacacagtcagacttgcattccacagatttatagactcggtcccaagtataattgagaccatgctcaattgcaaggagtttagccagcaaggggtcgccctcattcctgtggcaatagaaaccacctagccaacatctcacttggttacatatcacaccaccaaaacccataaccatggcattcatcttatagctaccatccacgttgactttgaca

SEQ ID NO: 102650 - DNA, 227 bp, Glycine max
agttacatatattagatagagaattaatgtatataatctttgttttacaaaaattaaaattaaggtgaatgcatattaatcataagttatacactaatactggattgaggaagcatcttaccatgtgaacctcattcacttctcaaatgcaattgacaagaatatgtaatatttaatgaaatccaatatctattatataaaaaaaatataaaacagttttatactgt

SEQ ID NO: 102651 - DNA, 225 bp, Glycine max
aggatagggtttttgaggagcagtggcaattaaaggtaccaaccaaaggtgcagtatttgcttggaggttactaagagataggttgcctactaaagcaaacttgcataggagacaaatagaggtcgcgaataggagttgtccattctgcggtaatatggaagaggaagtagggcacttgttttttcactgcagcaaaattctccctatttggtgggaatcatcat

SEQ ID NO: 102652 - DNA, 249 bp, Glycine max
acggctgcggagacgacagaagggttaccccatatttttgttagaattaataaaagaaccaaataaatgtgtatgatgaactttattgaaaataagttttgaaaagattgaggacactgacatttctaatttagacatatagttaaattcacataattcctctggtagcatgaagtgaactgtgaacgtttttcttacaaaaattaactggcaccagcgcagacctacttgacacctcaggagagataa

SEQ ID NO: 102653 - DNA, 226 bp, Glycine max
gagaaatggaaaagtataagaaattaagaaacagctgtcactacacaacacaatccctaaaaacatgttcaaaatttgaaattctgaattgaaacccttaacacactcattcagacattgcttctttctctttctctctctctctcttcctgctgccaattgctacacacaattgcacaatacagctctacaatgggaaggagtctgagtccaatgctacggagag

SEQ ID NO: 102654 - DNA, 227 bp, Glycine max
tacccatttgatctataggttgttggacaaaagctaccgtctacattaactttaatcaccgaaattggaggagggcaccattgtgagtgacttgcgtcctgcggttcaaaagcttatggttttcaacaaccatcacattaaccatatgacaaatattggttggtgtccatttattatcctcaaatatatggttatttcgaaacctccatatccaccaaagcacgatc

SEQ ID NO: 102655 - DNA, 235 bp, Glycine max
gggactcggatgaatcatgtttggttaggacaaaattgccctccatcactttccttgttagagttggtttctgcaacctaccatgcaattcctcacctgaatccgttttctattgccacgttggatcgaaaagtctagtttaaccacacgtttgtggttgtagtggaagcgtaacgaagatgaatggcattgggaaactcaaatcgtcgagttctgaattggaccttcacattga

SEQ ID NO: 102656 - DNA, 187 bp, Glycine max
  unsure (1)..(187): unsure at all n locations
gaatatactatcctcttgaactagggttcaacatcaaagaacaaagttccaacgaggagacgacctaaaaacacacaaaaaatggcaaggaacgtgtcattaaatatgataggatactccaccattgcataagnnntcataattggtgtaactaaagcaacagaatatatggttggtgacaacttcg

SEQ ID NO: 102657 - DNA, 262 bp, Glycine max
gaagacgacagaagggccatcatatatatgataatcattttaaaagtaattcaagaataacctgtgattgaacgatagcgtaaaattattttacccaacaactgcataaacattcaattcaaatatttattacacattgttacacacataaggaacatgtaagaaatatttattttactttgaagtgtgacaagacaatgcatgcatgcaagactctagatagagtttttgtcatgtgatatattaacttctctctcccttc

SEQ ID NO: 102658 - DNA, 248 bp, Glycine max
tacggctgcgagaagacgacagaagggggactccaaactgaacaataggagccagagattggaaaaggatgcacactgatagatatatcagagttacccattagagaccaaccaaacatcattcattttcatttcccttctcttttagctgccattaacgtattaaggaatcaggaatcattctagtatccatttctggactctaatacaagcaagaggaagaatatgacgagaaagaagatcccaat

SEQ ID NO: 102659 - DNA, 236 bp, Glycine max
tccttcttcgttccttcatcgttccttcttcattcttcaaccaataagtgttcgaatgtgagactttcaattcatttcatgttttgtttgctttcatcttcatcttgttcactttcaatttttttcctctatttttaatgtgttttaactgtttatctaagccgtcatctcacctaataaatgataaaatgaatttcaaccgatcatttatattgtaatctcgtttaatcactgtt

SEQ ID NO: 102660 - DNA, 196 bp, Glycine max
gatacaatctcaaagcaaattccctctagctctaaaaaacacactagcttccaaagtcttctaatctcttgcaagttggaacttcatcaagcatggcctcatgcaaatccttcatctcagcgttcattcttcgtgcaaccttctcatcaagcatgagtttgagcctagcatgcatctcgacacctcttgcaaataa

SEQ ID NO: 102661 - DNA, 260 bp, Glycine max
tacgggagcgacagaagggatagaagagatgaacaaactaaaagttctgatagtcacaagttacagtttccatccttctgaaatgagcaactttgagctatttggctcttttccaacctgaaaagaatacgactagagtggatttttgttccttcctttgttgcaatgaagaatcttaaaaagttatccctctacacgtgtaatatgaagcaggcatttgaaaacaatcacatgctaattccaaacgcttttccgaatct

SEQ ID NO: 102662 - DNA, 162 bp, Glycine max
gtcctgcagatgcaatatgtggtgctgttaagtagaagaggaaaggggggagaatgagagagagagagaataacatacctgcaattcaaaattgaacatggattgcctgctccgcatatctaatagcatctccaaggccaaacctataaactataattatag

SEQ ID NO: 102663 - DNA, 245 bp, Glycine max
ggttcttcttaataattgctctcttttcattcatagtaaatccttttttaaggttctggtttgtctcaactcaagttttcattttattttatttttcagtttgtaactatgactgctgaggttatggctcaagaggagacacaagcagctgaggttgttgttgttgctgttgctgagccccagaaagagaaggatgctgaagaaaatgtggaaccaagagagccatcatcagtggatgaaaccaa

SEQ ID NO: 102664 - DNA, 232 bp, Glycine max
gggagaagaaggagaaggtgaagaagggaaggaagagtattagcatgacggagaggtttaattgcagagctaaagatttgtttgagattttgatggatgagaataggtggaagggttttacacagagcaatgcgaggattagtaaggaggttgggggtgaatttagcattttcgatgggtcggttactggaactaatttggagttgcaggagggtaagttgattgttcagag

SEQ ID NO: 102665 - DNA, 237 bp, Glycine max
cgtgtcccttgtgtcgctaccctatgccctctgtccacgactagttcatcttttattatgtttataaatcttatcattatcttatgttgaatattgtgtggttgatgactgtgttagaattcgatatctttcgaagacatgtgataacattgttctaactttgtttaatttctttagtttatctctcttttagaacaagaatcacaatgaattaatgcctgcttaattggatcaatt

SEQ ID NO: 102666 - DNA, 240 bp, Glycine max
ggtcggatagaatgattcttaactttgtttaaggccttgtttgtttacttatttcaataatagcttttgtttttttaaatttgtttgtcccagcccctaatcacattgggaagtgtttgtcccatggacatattttttgttttttaaaagtttgattttatagtacatggatagagagtacttgaagaaaacaaaaaagatggggaaacatttcctagtttttgccttttgattctgaaa

SEQ ID NO: 102667 - DNA, 239 bp, Glycine max
atttcagatataggtgcttttccctacttcatgctaaaattatgttgtaacttgtaagtaacttgaaacagataatttacgcgaatgttttcaggtcatcaatacatggcacacctgcttgactgaaaaagttataatcatttcattgaatatatactaaggtttgtaattttgaataataaagatcaattactatattaagattgatagaagtattcaaatcatacaagatattgttt

SEQ ID NO: 102668 - DNA, 270 bp, Glycine max
agacgacagaagggacaggtgatcatgcccccttagatgatgtttttgatgtctgctgcaaagctcctgtagcctaatgtactttataaaatttaaatggcataaccttagggatgttcaatttaagaatatttgtgttagtagattagatttctgtgaatcatattagtgacaacatctatcatgaagtccaatctacaaatatgtagtctatagtatatagagtgcacttgtgaattcaatttcacaaatctatagtaacaatacttc

SEQ ID NO: 102669 - DNA, 242 bp, Glycine max
aaccaaagtgagactaaggctaaaatcaattcataagtcaagcttttgtcatcacctaaaaaagccattttttaaggtccaacgcctttaaatggtcttttccgcttttattggttaaatgtagatttctagaggcctaaaatcaacatgtaattttattacctctttcaaaaatatagagatcattaatggtccaatgccttaatgttttatctcttttcaaaaaaatcgaaagattgttt

SEQ ID NO: 102670 - DNA, 231 bp, Glycine max
tctcctcattgtcgtgtcgtgttgttaggcgaaacaacagaagccaaaataaattccttcaaacttgcagagaccttgtgagatacactaataaagtatagagcgcaaaatagaaattaaaaacaaaatagagacataatttatttaacatgaaaaaccccttaatacaaaggtaaaaaccatatgtcatttagaccacataaattaactccactataatacataagaata

SEQ ID NO: 102671 - DNA, 236 bp, Glycine max
gaggtacatgtttattcactttaatgatactgatgccctttccattcatcttgtacttcattgtatgaaacatgtcctaatgcttgtgataagtttcgtttgtgaggagtgtggctaagttggccacacttcacttgtcttgagcaccatgatttgcatacagttatgatactgatgctttgtctttctgaaatttctagtttcgtaaaacaatattaagatcttctttaccataa

SEQ ID NO: 102672 - DNA, 239 bp, Glycine max
gacttaatgcagatctttagcttaggtgattttgttactgactatgaacaaatgtcaaaggtcctacttattcttgaagagttgcagaagaatgagaagtttctttctcttgaacagcaagcattcataaaggccttcagactcttcttcaacaatgctgttactcaccgcaaacagtgtgatatggctggaataaagaaagtcgagttgagccgagctaaagaagatatccttctgaa

SEQ ID NO: 102673 - DNA, 228 bp, Glycine max
  unsure (1)..(228): unsure at all n locations
gttcttctaccagtacccagacaacgagtatacaaaattgacttaataatatgaaacttttttataaggataaaagatgaaaatagaatcatttaaaaattaaatcttaaagaattaaaatagtgacnattaaaccaaagtgattttaattaacatgtcattttattactttaatcagcgttaatgaatatattacatctttatattgatatatttaatgttcttgtt

SEQ ID NO: 102674 - DNA, 222 bp, Glycine max
gacaccataagaacagcatgagcattgttagatagagaatatctttttagcatcaggcacctattaggaagaccaacatgtcctctacttgtttatacacatcatttctcttgcgtgattttctttctttttgcatagatagtctatatacctgttcatattcacacttacatttacacacaccagacaccttgttgctgaaatagcttaccaaataacaca

SEQ ID NO: 102675 - DNA, 250 bp, Glycine max
tatttgaaatatttaatcttaaaatattctttttaattggagtaacaaaaataacaaattaaaggattaatggaacaattttcataatatctgtgatctttgtacataattaacattagtttgtttggccgagcattagtaaagttgattttggttaaagtaaattttaaagacgtgattcacgttaaaatgtttttattagaaattaaaaagaaaaatagttatatactgaccatgtaaaaagttttat

SEQ ID NO: 102676 - DNA, 253 bp, Glycine max
tcaccccttgaactagcttttggattgagttaggctcaaactctaagacaaaggaatctcttataagacctccacaagcagcttggcacattagcggcggtgatatatattttgtacttgatctaaaataagatcatgaagctcaaggctgaatgcagagacttgtgctaaaatttagctcatcattttttttgacatttctttctagaaaagaatgatctaaatttgcaaaggttgactttctgacttgaaa

SEQ ID NO: 102677 - DNA, 276 bp, Glycine max
cgagaagacgacggaagggtggtataggtctttaaagtaacaacaataataacaaacgagaaggtaattgaaatgaaaattatctttttgaaacttgaagtgcaatgtaacgtgaactaaacgggatgatatctcaagtagaattcatttatttaattagttcaattttttcaagtccatctaatttgatttatgaatcaaattaatgaatcaatttccaaattaagtctcaaattaatttcaaatcaatttgcttcaatatctaatcttgtaggc

SEQ ID NO: 102678 - DNA, 249 bp, Glycine max
  unsure (1)..(249): unsure at all n locations
ggagctaactgagtggccaatcaactggctcattgtacagtaaatattacataacctaagcgaccttagttcaagaaaaaaatctcgctgctttgctgaaccatctttgtatattacataaccctagtcttggctttctagcgtnattagctcgatctcttatgtttaccaagcaataaaaaacacttcggaatgctcccaggcaatgttatcacctgtaactgttcgtccatttcaataagcttgcaa

SEQ ID NO: 102679 - DNA, 250 bp, Glycine max
gcatattctgaagtaagttattgtgatgtggccctcctcaaatgtacgcttggagtgacataacatggcggaaggcaagatgttatcagttgcttcatttaagtgttaacccaatattgcatagttgcttggattccaagagaagttttcagacaggaaggaggcattacagtccaataggaatctccaaaggatgaacaagagaaagctagctcatcaatttttatttccaatgtacaacatacaaaag

SEQ ID NO: 102680 - DNA, 249 bp, Glycine max
gactcaccattctttgtctcactacaacacaggtgtcaatttcaccctcagaaaatgaagaatttcttggtttctttgtactacttgtttcctgcaattattgcaatcattcttgtgctgctcactccaattccaagtgcacagctaacgacaagtgagaacagaatccttctccaagttcagaagcttcttgaataccctcaagctcttcatggatggaccaacttgaccaatttctgctccctccct

SEQ ID NO: 102681 - DNA, 172 bp, Glycine max
gaggacatgatacggaggggtatagttcctcagtatctgactttccagagaatgaaagctgatttaaagaaacaaggtatgactgaaatggctcaaaaactttgcaagttgatgtcttctgttccttattctccgaatttgccaaatacttatggtgaagtcagagaagatg

SEQ ID NO: 102682 - DNA, 142 bp, Glycine max
catctaacatagattctcgaagatcaaaattaaagagactatgcaatttcaaaaggatgtcgagatcactcgtcaaacttaaaggatgtctcaaataggaataagaaggatcgatgatggttctatgtcagtgttaacaatg

SEQ ID NO: 102683 - DNA, 246 bp, Glycine max
gtctttgcaaagattcaatagataaaatgcatgaaaccttgattctagatgtgtgctttaatgcatgggcataacattatcatcctatgtctagcaatggtttcattataatatcttttccttttagttctattagaagttatcctctgtcaagcgcctaacctctaaaactaatgcatgcatatcttctttatatttttattaaaagtaattctctgtcgagtatctaacccctaacataatgta

SEQ ID NO: 102684 - DNA, 193 bp, Glycine max
gcaaaatcagatagcatacaattgggtggagaagaacgtccattggttgccccaaaatcctcaccagagatggctgtaaatggatcttaagctttcagaatcatatgcaggaagacagattatttgttttatttgacgtatagatttgctggtgtgttagtggttctgactacataaatagagctttgagacg

SEQ ID NO: 102685 - DNA, 269 bp, Glycine max
tagaagacgacagaagggggagttgaaggggttagggtttaggaagggatggaagcggcagtggtggacgtcggctctaagctcctcaaagcgggctttgcaattcctgaccagactcctgccatgataattcccactcagatgaagcaattactcgatgatggatccgtcgcagataattcactggctgacaatgtcaccgttgatcccgttgtgcgaggatttattagagattgggatgcaattgaggatttgttgcaccatgtttt

SEQ ID NO: 102686 - DNA, 255 bp, Glycine max
cactattatatattaatgtattttatgaagggagtatataaatttcataggcttgcttgattgaataaaatttcatagggttgcttgattgaataaaatgtatggatgttataaattttttgggtatcgtgttcaatttttatagataaaaaatattaatgtagttttatcatgaattttaataatctttatctgcggtttttaatatacaaggggtctaaacgtgttgcatctgttgaaagtttgaaactgtgt

SEQ ID NO: 102687 - DNA, 244 bp, Glycine max
gggaggtgattgaacataatgaacgaaaatcgagagtaaaaggcgaaggagcggtgggagcgatgcgcatggttgttaacgacgcattcctcccattaactaaatggctatgtctttacctcttcgttttcattcctcatctttctctctcactgtaagttccgcctctctctgatggtacatcaataattgtcttcccgcatctataagtcaaagatccaaagagtaacaatttgaaggacat

SEQ ID NO: 102688 - DNA, 277 bp, Glycine max
cgatggtggtttccacaccaacagtggtgcaaacaaacgagaacgagacccaaaaactcacacaaacccattgctggcattcatctcaacaaaacccaccgttttctgcgaaaatcaaacccacactcaccactctccaatctcccattctcccctcttttctccaactcaacgcaaccgttacaattgcgccgaatttctcgaccttcacttcgaggcgtgttttgtgagcacgaaatacgaatatggatcaccacgaggatgaaagtaacagcaa

SEQ ID NO: 102689 - DNA, 255 bp, Glycine max
aggagatgatcacaataataatagacacattaccagtgttttactaggaaaaatggtggggtacgcgccttcaagctttgcaaatttggtcttcgccagagaaaggatcgaagtgggtctgaaaagaggcaaacttaatcatcctgcttgagcgaatgagaaaactggggcaaatgaagaaggtgaggatgagggagaaacccatgctgtgactgtcattcctatacggccaagtttcccaccaaaccaacaatg

SEQ ID NO: 102690 - DNA, 113 bp, Glycine max
agtaagattcaattgtgagattcaagaatacgaaagtaaggggccggaaatctcgggatcaaaaggttgctctaaaggactgtaaatccttgctcctaggatccaagatgggc

SEQ ID NO: 102691 - DNA, 159 bp, Glycine max
gccacttggtattaaaactttttggatttagttcggcataggaagttagtccaggcttgagatttggagagtgattttccaaccttttaccaagcaaagtgaatgccacaatttttttcaccttaacacatggttgattcggctcaaatatagagaaat

SEQ ID NO: 102692 - DNA, 269 bp, Glycine max
acgacagaagggggttgcaatcagacgcttggtgggggcaaaatgaagtttgcaaaagcatccccactctttctttttgcattcagtttgcggtcgactattagatttgatcttgtaattcgtgtactgcgagtcggacggaaaatcaaacatgctcttagttactttttattcttttctaatttaattttgatgtgattgtaatgtctttggtgaaatgcttagatggttattcatttttattccttgctaatgccaaccttttcttt

SEQ ID NO: 102693 - DNA, 127 bp, Glycine max
ggaaaaagggagtgcctactaacccataaccgaccgcaccaccgttttcctttgctttgcgttctacaatgtcgaaagcctcagagattattacatgcaaagctgctatttgctggggaatagggga

SEQ ID NO: 102694 - DNA, 164 bp, Glycine max
tacggctgctagaaactacagatgggctcttcattcatctcattcttcctcctagctcttattgatggcctcctatagtggtgagctatcttctagactcatcttctccttgaagtggcatgtacactctatcgtccgatctccagacttgtgttaatcatctt

SEQ ID NO: 102695 - DNA, 116 bp, Glycine max
gactatgtcagtagtcttcaagctcaggaactcttcaacacatgggtagtacctcacatatgctacttgtttgttcgtcttacactaaattgcatcatttggtgtcttgtctagat

SEQ ID NO: 102696 - DNA, 273 bp, Glycine max
gaagacgacagaagggtatccttcaatatgatcagcctagatttagggatcaatggacctacccacaaccacaaagatgcatgtaacgaattcaaaagattctttatcatatcagtcaatactgaattcaagagttgaatagcaaaccttaaggcagtagttcattattagtgcttctaaaatctaaactaactacaagtgaagaaaaggttgataaaaagatctcttagaatttggtcttatggcctatctcatcttattaaggcaggctgc

SEQ ID NO: 102697 - DNA, 253 bp, Glycine max
gaggaggagtcagccagacaagcaagccaccctctgctaccgcttctcatccatcatgtcgaatgaactaaaaaactatgatgtttttctcaattttcatggcaaagattccggttacaccttcactggtactctctataatgctttgcgcacaagagaatcaagacctttttcacaaaacatgaatatggtcgtaaactacacactgatgacagccacattccaccctttactcttaaagcaattaaggaat

SEQ ID NO: 102698 - DNA, 239 bp, Glycine max
gctatttcttgttcccactaagaaactattttgatccgctacagcggatcaacattctagttaataagttaaagcaaaactttgtttaaatagatttgatttgtttttcaaaaaatggagatttttttataaaaaaaaagtttaacatgttattgaatgatataatgatgtgacatgagaaaaggaaagaagacattatcaaagtggttgtgctattagatttgtataattaagataag

SEQ ID NO: 102699 - DNA, 250 bp, Glycine max
aaggttaactaaattgttttaattttacaattctttaattttattattaattttatataatattaagattgatatattatgagcgtgtttgaaacacatcaatgtacaaaataaaaaatgaacatggtgggacataattcacggaaaacattatcccttgtaagcatggtatatattttgggagagataaatttcttggatctccgtatcttaagagattaatcattgactctcgataaaaaatactcgg

SEQ ID NO: 102700 - DNA, 230 bp, Glycine max
gctgccaaagcatcagctactctctctaaccaccgcactgtcaaagcacaccaaaactgtgtgcaatttaattatgcgacaatgactctcctccctttcctcactttcaatatttgtcatcaattttagaatttccttctgtttggccatgctgttgcgaaacggtggcaaaaaaactctcattcgcagcgttagaaaactctcctttgaggttctcacctaaaggccct

SEQ ID NO: 102701 - DNA, 245 bp, Glycine max
gtgtcttccgctctttatcttttctaagactatcttagtctttcatcgagacttcaaatgtctcccttactttgcaagacttcaaggtcttgtgctgatataccatatgcctcttatgctctttcttttgacaggtttcgctgattaggctttcgctagtggtcgctcgggtggtgagatcgctcgaacgaaattaatgtctttatatttacttcccgtttatctccaataaaagataagtgaag

SEQ ID NO: 102702 - DNA, 180 bp, Glycine max
gtattgctcatgactcatgtttgaatcttccttggtttaaccgcaattatacaactaacgagataataaaactttgttggaagttgaaggttctgattagaagatagtgatttgttgcgttgtgatttattcagaaagaaagtgacaaattagttcaatgaggaagagagaaagtgaaag

SEQ ID NO: 102703 - DNA, 262 bp, Glycine max
tggacttatgaaggtaatacattataaaaactgacaaccagtatgatatatgtcacatcttaatttgaacaaaaagaaagatataaaataaaataataacttcaatttagttattaaaataatatcaaataatattaaaaaactcattatacaaccatttattttttaatttttaaggccctttttagtcatggaccttgtgtggttacacctccaaataggacctaaaatcgacactagatccaatttgatgtaaatggtg

SEQ ID NO: 102704 - DNA, 241 bp, Glycine max
tagggagagtgagagaaactagtgactgacttttcgacaaaggaaaaaaaaagagtttccggcattattccatcatgaacgctcttcccattcttctcttcttcctcttcgtttcggcattaggtattgttgttcccttcctcttcttcccaatctgcaaaaatttccaacacctctttctttttattgctcttcattcttcgccgcattttcaatccgcagttacttcagatctcgttaa

SEQ ID NO: 102705 - DNA, 189 bp, Glycine max
ggaagcaattcattcaataatataatgatgattcttcatgttaaatctttgcccttctgattaaccttgcaacttggttctaccacctctctctcccaaactctctttgttgtgctgcttcagcgtctgcaggtagcaaagatggcgacattgactgcttcaagtaacttagtctctagaaattcccat

SEQ ID NO: 102706 - DNA, 253 bp, Glycine max
gctgtttgaattgctgtagcctactgtccaagtgaataataatatttacattggtttgtcaacaaagttcttcaccttttcttttgattagagaggacgtacacatacccatatgtctctgtgtttgtgtaattgtgtttctctcgtagaatggggaaacacagaagatagttatgtggggcttttggttttgttggagcggtgcagggagtagggattaggaagctaaatgtattaaccatgcatgtgatta

SEQ ID NO: 102707 - DNA, 162 bp, Glycine max
gggtctgaaaggtgtttttttgtgtgtgtgtgtctggaaatgaggtgcttttgctgaagggtgttggtggtggtttttggttttgaagattgtggctgtggaaagggaaggtgcatgtgggatcccaattgggttctatgtttggtcgaaaagggtttggga

SEQ ID NO: 102708 - DNA, 115 bp, Glycine max
ctctgccagtcgttcggagtccccgtcgcacctaccaaggtgattcggccgcctatcacccgggcttttattgagaagtactgtacccagagacagggtcagggtgatgctccac

SEQ ID NO: 102709 - DNA, 254 bp, Glycine max
gcctctttaagaaaattagtgtaattattaggttcacttttacaattacctcacacaggttttacccctagtgtcccgataaagtacatttacagctaagtcatgcattaagaataaaaaaaacattacaattgaaactaacaattagagaaatcacgaaacgcccagaatcagtcatggtgcatacaatctcttcaaaaccttaattgtcttacaatctcttcacataaagcttccttttaataaagaaagcc

SEQ ID NO: 102710 - DNA, 215 bp, Glycine max
accaccacccaactaattctataactactaggtaaataactctataacttcccaacttcatgaattcatcacccgaaacttaacccccttctgaatggggaaaagtagcaaaaatgccagataacatgaaaactcatcttaagataagtttgacttttaggtataataatggaatatgcgaattgttttgaagagcttttattaaaaaattaata

SEQ ID NO: 102711 - DNA, 259 bp, Glycine max
tacactaacattttaatttaaaagtatataaaatttgaaatcatctaatcgtttttatttatttattatttatttagtgtagttcttgatggatgaaccaaataagaggcttgaaacagtagctttgaattgagagatacatagtgaatgagaaatcaaaccccccaaccccattaggaatttatagtagatgtgtgataagttcttgaaagcatatgctaagggaaggaaggtactatccacatttgcaaggtacgat

SEQ ID NO: 102712 - DNA, 245 bp, Glycine max
  unsure (1)..(245): unsure at all n locations
cttatacacaatatatgttcttaccaatttcttaccttagttctggatgtctatttaacacaattgaaattgcttggagaataggcatgtcatcaggatgctcatccctcacttttgctgtctagatatctcaccagaaagccattagattcttgtttaagataaccacaaccggattcatgattanaagaagcaacagaagccatatgcagcaaagatcttacctcatgcagaattctcttgta

SEQ ID NO: 102713 - DNA, 238 bp, Glycine max
gatatggattttgttatattgtaagtaacaacgagggaggaagaaggaaaagaggagtgataaacacaaaagaatgatgctcttctttctctggatcatcaattttggcgatgtggcaacataagaataaggaattcagcttttatatattatagataaataaactagctatttgatgtataaattgagaataattaatacatatttgccatgtatctattaaactttgcatttattt

SEQ ID NO: 102714 - DNA, 248 bp, Glycine max
ttcaccaaattataagatgaccacaagtttatattgttggttgaggaattagaaattaaaaccacagtctgttgtcaacagagaatgcatgcacgacttcaagttccaagatgtcttatccaagtatcatatatttttgtgatggcaacagctgaagtccctcgtgacccttccctatcataactttcaaaagcttataccaaaggggttgagtttatcaaaagggttaatatctcttaacatatcaa

SEQ ID NO: 102715 - DNA, 140 bp, Glycine max
aaccgctacttacacctcctttttcaaaacatgcacattcttttgttttcggcctaccccatttttttatttttttatattaagtccaaaataaaatgaaactggcggttacacctctctcctttatatatgtacccctg

SEQ ID NO: 102716 - DNA, 240 bp, Glycine max
ccaccttctaccattcaacaacaatgccatctagtggcatagattcatcaaccaaatctacaccaagatgtttctttaaacatttgatgcattataaaatgttggtttaaccctgtaatctaccttgcaactgcctttcttgtttgatgcactacaaagtcagttgttacaatctaattgtgcttatgttttatgcttgctttttaagtttccaatactgaaaaagcagcaaaataaatc

SEQ ID NO: 102717 - DNA, 247 bp, Glycine max
gacaacaacatagaataacgaattaaataaacctaccactagctactttgctctattgcattgcgtggaacttcattttcccacacattctcatggcctccaagttctcttttctaacccttcttatggagagaagaaaaccttctaaagataacaacaacaacaataatgacttagcatttgtgaaggcagctgcatgggcatggtaccaacacaactcaggctctaaggggaaagctattagcga

SEQ ID NO: 102718 - DNA, 265 bp, Glycine max
  unsure (1)..(265): unsure at all n locations
acataaatcacaataaaaggacaacccaatgcatgaaactcccagcattgagggggccgtgataggtaagatgcagccacaactgtcagcacagaggtcatttccacaactagaacttgtgaccaccaggttataaggcagcaaccttactattgtgtcaaggcacaccctccaaacaataatcacaatacaccatgagctgattttgtgaccaacacgtgaaagcaccanatcataaaatgataataggaggtttgaaaatatg

SEQ ID NO: 102719 - DNA, 293 bp, Glycine max
cagaatccggatccagatcgatccgagctaaccaaatttatttaaatttgactgtttcatatttaattttatcctaaacttaaaccaatccaacttgtgaatacaagtataccggggggacggggagcacatcctgtttttgtatacatgatactaattaataataattaaaaagaaatttattaaaatattttgtatatttattttccactcgtgtatagtcagaaatcaaaagaaaacgctgtttacaagcgatactgaattttaggaacttaaaaaaacatatcttttac

SEQ ID NO: 102720 - DNA, 216 bp, Glycine max
tccacatgcattctcataaagcaattattgatgtatcatttgaaatgactccacacgatttctaacaggacatgtggtaacgctactagtgaagaaacattggccatgtccgcaaaatctacacgtgacgtgattatcaaacgaagcttcattaattcatagcttacgtagcatgggttcagcctggaaggaagacaagcccaacttggcatttta

SEQ ID NO: 102721 - DNA, 209 bp, Glycine max
aggaccagggtttagctcaagttgtttcctcttcaagaaattctgatgttatatactttaatcttaaaattgccaacgtctgcatataataacataaatattattatggtatgcccttttcctaatattaataccaatcttggtatattttaaaatttattattactttaattaattagtagagtgtaacatcaccttcatcagtagct

SEQ ID NO: 102722 - DNA, 230 bp, Glycine max
gtgtcatattaataatgccaaagtcataagtttaatttctacatgtattattaattttaaattaatttataaaatatatttttatataccaatccatatttagctttagggaaaaatggaatttactattttactttaccggatgtactaacaattatgctgatgcccgtaacaacacagcctccttttatttgctatgccaacacattttctagcaaagcccaatacac

SEQ ID NO: 102723 - DNA, 226 bp, Glycine max
ggattttaattattacagataaaactgtatacttttctgcattttgtgtggtgggtgtgtgagattttgaaattttggttcagctggaaatggatctgattgaatctcaaggaaggttttttttatttggtttattgtttctgttgggctaagaattagagaatcatggttttcactgtttggttgattgagactatttttctaataatccgagcatctcctgggc

SEQ ID NO: 102724 - DNA, 233 bp, Glycine max
tatatactattaaatataatgttaattatttactgttcaaaataatgaagcagtttaagaaatcgaacaactaaactttggcaactagcacatttactgtgggattcaaatgacaaactttatctacaatactaatatttagacatttagacgtacattacatatgtacgtaaattaatctaattaatttgagttgaatgggattgtggtaacatgattacatttttaactta

SEQ ID NO: 102725 - DNA, 293 bp, Glycine max
cacgagggtcgagacgatagaagggggagaaagaggggatgcagattcgagttcgatgcaactgtggagaaggaagctgcgaggaatggggggttatagaacttcaaggagtggtggagccacagcctggattccacgattccctccaaaatcttcacatcggcactttgtgtcgtccttcttctcaggtagtctacaccttcactgttggataccatgaactgacggggtcaaaggttcccttaaagaagccaatggtggtgctcaagaaagtaaagcatcctgatggagaa

SEQ ID NO: 102726 - DNA, 260 bp, Glycine max
gggttggtgggatttcaatatcactcattgtaaactgtaaagttggcatattgctcattgttttcctttcttttttgccggaccgatcctaatgctatgtagtacttccctttgccaagttaggtcctatatactccacctgattgcaactgagctgacccatgcttggttagaaattgtatatgctctgaatccgattatggtacaaaagaacgctacatttagttgtttagccgtatcttaacaaagacagcgtatct

SEQ ID NO: 102727 - DNA, 263 bp, Glycine max
atagttaaaagaaagaaactttatcgatagtagtcaatcagattttttttaataaaaattaatcattaataaaattaaaatttgtaacttcatgatcagcaagagggtacttcaataaaatgcaagaatttctttgcatttcttcacaattttgagcaaagggttttttactaggtcctacaccgtttttttaaatttctttgctatttgaacccaatcaatcgaaggaagtttcataccttcctcctactttcttcctttct

SEQ ID NO: 102728 - DNA, 281 bp, Glycine max
gagaagacgacagacgggaagctcatgttgatcacatgtgttggagtatccttgcaaggctaaaacaccctaatgcgccaccgacaatatcatctcggtaagagcgatagtgtcaggttgcccattgtgtgacaattcattgactacatggactcacataggctacattcacaatgttttccaaaatggtaccacatgtatacgagtctatgagtccaatgtgcatcacatttcgtgtgtgactttatgtatggaatgtttgatttggataagacatgctt

SEQ ID NO: 102729 - DNA, 228 bp, Glycine max
cttataattatttttctttgatctgcagataaggttttggatgctgcagaagtagctggaaggaatgtcatgtccacttcatcagttgtgaccaccggcctagtttcagataagtaagttcgttctctatttaagtattcttctcatcactaacataattgcctggcctcaaatgatacaagacctttgcttgattttttatttgttttttatcaaaccaatgttttg

SEQ ID NO: 102730 - DNA, 256 bp, Glycine max
tccataccacttttctttctccgttagttccatatagttcatagttttcctttgcaatttttattaatacaacaacgaagaaactataaaagcggaaaataccgaggtgatgtttaaataaatttctccatatatatttataggaaaaggaaataaaaaagtgaaatgaattgaatttctgtcagaaaataaaatcaacttatgtatgtagttgagcttatagaaagattaaataagaattttctttttaaattaa

SEQ ID NO: 102731 - DNA, 254 bp, Glycine max
aagggtaataataaaaaaggcacttggacgattttcttctggtatttatgtttgagttcagttcgttttacaatttacatatccataattatattcaattatataaataatatcatttatataaataattattgtgattcacataatttaacatttataaaaaaattagaacaaaatatgtttgagatctttttgtaaaatttaaaaaatattaatttggttctcataaaaaatttcgtattaatttgttctct

SEQ ID NO: 102732 - DNA, 190 bp, Glycine max
gtagtgtggatccgtatcctcaattttaaaaacgtcttgaacctctcacttgacttttaggagccatattattttagtcagccaaaagtctgattttcttaaaaaaatgcacttaagatgctgcttcgtacaatatgatttctaaaatcacattgttaatgtgtttctatgtatttctatggaaaatatt

SEQ ID NO: 102733 - DNA, 207 bp, Glycine max
  unsure (1)..(207): unsure at all n locations
gatagtagtcagcggagcactatcagtgccagtacatgaaggaaacgcaacaatcatcgatgtgaacataaataagagtggtctgcatctgctgtcagcagctactaccttggtccattggaaacagcccattactcaaatcttaggatggatcaangatggaagagttcagatgcaaatcgtacggtgacggaaggatgcagattg

SEQ ID NO: 102734 - DNA, 256 bp, Glycine max
ggcgtgtttagagaaaagtaactaaccagagaagaagattccgattccgattccggctgtggcagcctgagccacttctcttttgaatcgaatcaaatcgacgcagtcactcgacatggcactgtcgcgtcttcgtcaccctctcttctctcgctcccttctcatcctctcttctcccgccagatccctctccagaacttcttattcatctatttttaccctcggaggcgatcatcacaatataacaaggcctgca

SEQ ID NO: 102735 - DNA, 255 bp, Glycine max
tactctgatgggtatttggtagcttcatagatatatttgttagatccaatttagattacaaatgaactataccatgatcacctggaaaaaaaatatatatgtccatcttatcaaaaggaacgttagtaataaattctctaacacattaatataatgtagggagatataatgtcttttaaactaagtttctaaagatgatgactagatggaaaaacatctaaaggagaaaatgaaaaactacaatgtaaactagtt

SEQ ID NO: 102736 - DNA, 251 bp, Glycine max
atatggatgaatttgatgttgttgtctctcaatctctcataattacatctttgcttatttaactttcattggaatgtggatgtacgttattagtttgtttgctcaagtgacttgtactcttgagttgatctccaagtccgcccaatcagaaattgcatgttctacacgtttggtggggttgccgtaagcgacgagtaaaattgaataaacatttgattaactatgtttccaaataaaaaaaaataagaagt

SEQ ID NO: 102737 - DNA, 250 bp, Glycine max
catattatttgataatatagtttattatcagcagactgagttttgaggtgcggaaactatgatccaagcatttcattaataattaataatccaaatgagtactgctatttatcccacttatccttcaatacacgttctaatttaactttattactgaacttaaaagcctggtgggatatgaggctaatgttttgattccacatatccctttgaaattgccactgtttttgtgtatgtaaaccattcatta

SEQ ID NO: 102738 - DNA, 229 bp, Glycine max
acctacaaggtaaagtttgcattcacacgattttttcaaatgctaatacaactcccaagaaaaagaataaataatggagaaaatatgattgtgtttgccattcacactggagtttatggcgaaaatatggttataatggtgttgctacactgctctcgttgttattgtattgtattaatttcccactattgccagtactgcatagtccatacatcataatatgatgaga

SEQ ID NO: 102739 - DNA, 248 bp, Glycine max
agacgacagaagggatagttttcattaccataggctatatgtttaaaaatgtgataagtgataacttctaagcttgtagttagactgagatgtaattcaaagtccatttatatatataacctatagtttgttcattgctcattatttgttaagtttacctggtgaagctcaggttaccaaactgagtgttagaagtcttcatatttgtcccaggtgattctgtttgttcttatgaataaatgcttcag

SEQ ID NO: 102740 - DNA, 223 bp, Glycine max
gagagggggaggggggctgagaaatgtggtaaatgccaatagatggtccacttgatgttgcttgggctggcgggcaatggccatgtctgcatacgacattagggcacatgggttgtatctgatgaggcagggcacaaggaaataggaacattatcacacgtcctcagcattccaaaggccgtttcttctttgtgacttcctttgacagtgatatcattctcag

SEQ ID NO: 102741 - DNA, 243 bp, Glycine max
acgacagaagggggttgaagaggtgaaggaatggaggttggaggttgcaacgtgcaaccgcctcttagcacttctttttaaatggccgaagaggagaggcattgtaagtcgaagagaggcttaacaaagcacaaaatgtcctctaatccagtaatactgcagagtgtgaacttgaccaagtatatactggagaccagcgtttatccacgagaagaagagactctcaaagagctaaggaaagcc

SEQ ID NO: 102742 - DNA, 246 bp, Glycine max
gagtgtagtgttgtgaattagagttggaccttaggtcaggggttttaattttgctaaaatacccccattttttgctaaaccacataccttattttatattttaatctttaatagagattaaaatattggtgggactcttgggtaaggctaaaaagttcacttttaaaaggattcaaaaaatgagactcatatatatatgtaagtttcgtgggtagcctgtgcacctgaagccatttgtccatgtat

SEQ ID NO: 102743 - DNA, 215 bp, Glycine max
gatgtccatatattacaaataaaaaagtcattctattttataaaattcattgatgatgaaaatggtctagacaacagtcaaaattttgaaaataataaacaatttttaaaattaattttaaaaaaactactcttacaagcaaacgacaaaagccttattccactaggtgtaggtcaattacatgaattgcacaatgtcatttgacgttctgttca

SEQ ID NO: 102744 - DNA, 216 bp, Glycine max
ggaaacaaacatggattggcatcatggcacaaaaccatttgttcctcggccagagaccttaagcttcttctacaactatgacaacaacaactcatatccatgagtggaagtgaaacaagcggcattgatggagacaggagaaaggtcggttccggcaatggaccgtggaaacaaagagaagaagaagcggttaacaaataaccagatagagttatt

SEQ ID NO: 102745 - DNA, 200 bp, Glycine max
cagggggaggagagagaagtgtatctggggaaaaaaaacctcgcgagtcgctgtaaaagaaggcacgcttatccgttttatggtgaaagcaaatttgttatcccaaagaattaaaaataagaaagttcacacattgttctacgattgaaagcacgttgaataaacgctgttaggatttaaagggggaaacttgaagtgcc

SEQ ID NO: 102746 - DNA, 224 bp, Glycine max
cactttgcatttaaaccacctaaatcttagtgataaaaatttaattctcaatatgcatgcatcttatcttttggtttagaactctacaattctctccctcaagccaaaagagaaatatccttcaatcaattcaaaagtgaacaaactctctctccaacgaaagtatctccacacttttacaacattagaaaacttcactttcttattcagtttgctatcatggt

SEQ ID NO: 102747 - DNA, 229 bp, Glycine max
ggctcgagaggattgggtgtagaagaggaagagggaaaacaatgcaccgacgcacaccagataaagacacggtgggtcgccggttaatggaggacacttgcttgtgctgcctcattgctgtttccgtcacagacagaaagagagaaaaaaaaaaaaaaaaaaaaaaaaaaaaaaggggcccccgattagggaccccttcccccggggattttattcgggccgggaactt

SEQ ID NO: 102748 - DNA, 215 bp, Glycine max
agtggagagttgtttaaaccagcatcttttaatttctcaagcccccagtcatcttcaccaacccagacaacaatttcaggtgcattctctggtggcttcaatgctgtggcagctgttcccgcacaagctccaggtgggtttgggcagccagcacaaattggatcagggcaacaggttcttgggtcagttctcggtggttttggacaatcaagaca

SEQ ID NO: 102749 - DNA, 239 bp, Glycine max
tacggccgaagacgacagaagggatactttcatagacagagcactaactcgacacgttaccagaaacttgctaagtatttattagagtcttccttaccaaatttctttaggagaaaatgatttagtataaaaatcatacgaaaataatagaaaaattataaatggtgtaattttccttatttgaataaatacatttctaataaaaatttaactaatgtcctaacaataaatacatttct

SEQ ID NO: 102750 - DNA, 251 bp, Glycine max
ggtgcatttggagatgccgcaaccacaaaatataatactccacctcaaatatcattatcacatgcgattcactttctgtttgaaggaccaaagtgagagatagagttctctagcaactcactctacattgccccgaatgaatctgctcaagatctcgagtggtgcaagcttgtggcgggattccttaaagtatatattgatgcaggaatcttcgaagaaccaaatctctttggtgctggtattgtacgtgg

SEQ ID NO: 102751 - DNA, 209 bp, Glycine max
taccgttcgctagtactgattatactgatcgcaccctgacagaactcgtcacttaggttccacaataagattgccatctgaagttcaccatctcgaatcccaccactgcgatgctcgaacgtacgctcgagatcgacgacgatctgcaactgcgaccattttgggacaagaagatctcacactatgccctctgagattcacttggtgag

SEQ ID NO: 102752 - DNA, 256 bp, Glycine max
atcggtagaggaattgagggaaagttgagaaaactccagaaaccagaagaaaaataagaaaaaggagataaatcactctttgtattggagtgaaatgaatgtgctcaatctataaaccgataataacagtatgctatatctaaaaagtaagttacagttaaagatactaaaaaaataactgaatctaactaatccaaactaacccgtaactggcggacaaagtctaattttgaatacacaggatgataaaatatca

SEQ ID NO: 102753 - DNA, 250 bp, Glycine max
cccatgtttgcttgttgctgcttcacataatttattttgtacttcttggacacaaccactcaaatcacacgggatcttcacactaagtcattcaataagagggaaactgaggacatggaagcagcataactaatactactatcttttaacttgtaaagaagttcaattgtagatttcctataatcatctcatctccataatgatattgttattggtgcattattctataatatttattggaaagtatgta

SEQ ID NO: 102754 - DNA, 227 bp, Glycine max
atggctaaaataaactatacttgtttgttgtccatgataggattctttctgattcccttttaaccttgttgagacttctaatatcctcaggtttttttggggggagaattggggggaaaaatggttatatgaatccgtgtttgtgccttgatcttatttttattatctttgtttaatggttctgagtttctgttcttaccgtgatttttacacttttccaattatat

SEQ ID NO: 102755 - DNA, 247 bp, Glycine max
gctgctgaattgctccatgtcccatcaatcaaaataaaatgctaggttgcacctacttttaactgattcataataaaaagaaaattattaccttatgaattgactgtagattctgtattaagttttcctagtcaatgatcaagtggtaaattcaaaaaaaaatttaaaatcatatgactttgtatcttctcaaaagaagttaacattgttatacaacctgctgcaagcaaaacacaagatgtaacta

SEQ ID NO: 102756 - DNA, 114 bp, Glycine max
gacgatgcgtaatatacctggccatcagcatggccatgacaccagctgcagcagtgacagtgccgaaactgctgcatcacctatacccggaaaagtgtctatgggcccatatta

SEQ ID NO: 102757 - DNA, 242 bp, Glycine max
ggattcaagttgttaattatggtggctttgagcatttctcagtggttgtgtgagggagagacagttgaggaaactgattgtacagtatggaacatagtagtagtttggttttctggctactggggttgcttcttttgttgtttatggagatttcttctgctgctctttctccttctggcataaactatgaagttgtagctctgatggccataaagaatgacttgattgatcctcacaatgtt

SEQ ID NO: 102758 - DNA, 244 bp, Glycine max
agatagagtaatccttgagaaattccttctattatgttgaaacgcttcttccaatctagtaacttgcttcgagtgcaatcttcttagtgttaatgaagcaatatgcatgttgttagaaataaagcaatcttttagtgtgtgtgtgtgacatttatgtagttatgttcagataggaaagcataaggcaatgaatcatatatacatctataacaattactgaaaacttcgttgagccaacttaatg

SEQ ID NO: 102759 - DNA, 246 bp, Glycine max
atccttactgcgtgttatatcacatgtacaaattcagaacaatacggaatataatgtgttaactatagttaattcagataaatcttgattttatttaagaagcacaagccacacgaacggaaactcttgttagctagtgaattttatacaaagtcaatgtatgtgacaatctgtttaatgactaataagctacgctatatgtacagtagtagaaagtgcttttgtgaatggcttctattctattta

SEQ ID NO: 102760 - DNA, 241 bp, Glycine max
gcctacacacataaatgtaaaagtaaaaaaaatacgtatacccaccgtttgtttgtcataggtaaaattcaaaaatatgtacttattattatttggtataggtaaaagttaaaataacttctacttacaaatctttaatgttggtaaaatttcaaaaaacttatacttacaattatttgatgttagtaaaatcctataaaattcattggtgtacatatagtttaaagtagtaaaatcgaat

SEQ ID NO: 102761 - DNA, 268 bp, Glycine max
acgctattaacataaagtagtaaatgctattatgttttttacacttatattctgttgaaaataatttgcaacacctgtgttgcttcacatcacatacatgatacactgaatgttttagccacatttttgctctagctttgacaataatgtagaatgagacagccaaaaaaaggaaaaaggaatcctcaggtttccaataagaacaatgaatacttcaaattgaaaaacacccgataatattttttaatttaatcacgataaaagtgat

SEQ ID NO: 102762 - DNA, 240 bp, Glycine max
atgtcttagacttctgaaaagaaaagtctatgttaaaattagaaatggaaggagtaagaatcaagtgttgtacttttaatataatagatacttttttcgaacttaaatacaggtaaaattaattaacttttatgataattaagaaattacttaatattatttaattattcttatttcattttttttctaaagtatctttcataacttgattccaagaataagaaaagtaatcgaaaataa

SEQ ID NO: 102763 - DNA, 249 bp, Glycine max
caacatgcatgatgcctttcaactaagtgcctgtttggtttaagtttattttgaagtaatatattttcaaacattaatgttcttaagtctgggtttagtctaactcaaccgaaaaagttggcttgtgaggtgaggattgttcaagccttaagtagctctactagcaatatctataatgatgtgccataattgtttgattcctctcgagaagagtgttaatattatttaacacactctttttaacatact

SEQ ID NO: 102764 - DNA, 240 bp, Glycine max
caccctcagaaagatcgaacctttttggttacacaaagacataaacaaaagcaaaccaacataccgaaatagtctaccccaaacgttaaagttttgaaaaaaataacaaaatgttggaactgggagtaaatgcaaaataatcgaacacagggacaaccacaaaaagatcgaacctttttggttgaacaaagtcataaattgcacagagaagggaaaccatgccgacaaaggtcaagagca

SEQ ID NO: 102765 - DNA, 239 bp, Glycine max
ctctgtctcattaagcatatcttagcctttaggagtatgaatagagatctaaaacatatgtacattgatacttcatagtttagaatattcatgaacattgtatttaaatttcctgatgtcagcatgagttgtattaagggtggtttccaatttctacactttttttcacgtttggagtatacttatttaaagagaggacacaattttacagcatcctttgttttttttccttgagaatc

SEQ ID NO: 102766 - DNA, 248 bp, Glycine max
gtggagggcccaacaaaaaggctgaagtaaaggtactaaactactaaaaaaaattcatttgaaattaaagtaaggtttttttttcctccagctaacagccatttagggtgtgattaagcatttacaggtgtgctagcaagtgtaaggggaaggtaatttggattgaagcctgatttataactaagtttgattccgttcacaccaaagagataagtataaatttaattaattttggaggaaccaatatg

SEQ ID NO: 102767 - DNA, 241 bp, Glycine max
gaagaagaagaaggagcatggccatgagcatggccatgacagcagcagcagcagtgacagtgattaaactgctgcatcacctatatatttaaaaggtttatgggaccatagtagcgagggctgtgccttaatttctctctctctctctctactattttctctctctctctctttcgcctttctccctatcgtgtgatctatatatgagtgagagacacaaaagtgagatattgtgtgtgta

SEQ ID NO: 102768 - DNA, 243 bp, Glycine max
ctgtacattaaatgaaacaaattatgataaaatatgaaattgagggcaaactgtggcacaacagtaaagttgcgccttggtgacgggttggttatggattcgaatcaagaaacagctttctttgcatatgcaaagttaagggtgcatacactgactctctcccaaacctttgcaaggcgagaagtcttctagcaccagatacattagtttatggtaaaatatgaaataagttggtaaaaagag

SEQ ID NO: 102769 - DNA, 235 bp, Glycine max
tactcgcttagcgagctgacttcctcgctaagtggataagcctcgcttagccaatctagctcgctgagcgagcccttcagcagcatttcaaaatcttctcttctttagcctaaaaatccaaataagttcaacattagtcatccaaatgaagtttccactgtatgaattcacacaaaaataaattatttacaaatctcacaaaagaaaccataaattagaggaacattgctacttt

SEQ ID NO: 102770 - DNA, 235 bp, Glycine max
tgatacagtaactaacataagtaagattgaatggtaggtaccaagggagtctaactggtttaagagggtatatgactgtagtgatactgttttgatttctattgaccaaaataaagattcaacggtaggttggcagcattcccatgtaataacggctaggaacctcacagtcgagtgtaaaatgttctctatttttggttggtaattattaatatttgcactgatttttttagca

SEQ ID NO: 102771 - DNA, 252 bp, Glycine max
gatatttctgttcattatgtttagtttatcttagctttatctttaaaaggaaaaaaaagttgtgttctgtatgaaatcttatttgtaactccgtggtatggtctactttgattatgcataacagtattgtgttccagggtcatacttttaacttccaccgtgctctagatttgataaaagttagatcatggacatggtttaaggccaagatgaataatgttgaatgttcctttttcaattggtgcaataagc

SEQ ID NO: 102772 - DNA, 252 bp, Glycine max
gaggttacattggaaacatattatgtggctgagcgatcggaaaaatttatcttacttatagcatgtaagatttgtatgactgtctactcatgtgacacaccgctgaacccacagtcaaaaagacttttgatataaaagattcttaagttaaggatctattatcatcattttatttgtttgagttagtcaccaaattaaactattgattctaatatcaattgttggaaaattgagaaggtaaaataagagaga

SEQ ID NO: 102773 - DNA, 240 bp, Glycine max
gggtgcagtgaagttatgactcatgaagctcttaacaattttactctattaaattattagtagccagccccagaagtctcaaacaagatatggccgatttgaatctaaatatctaacagttaatttgctattaaattcaacaaagttcgtttccaatttcatgtcaactactgcatgaaatggcgctacattcactaatatcttgaactgaatccgttaatttgcctccatctcctccaa

SEQ ID NO: 102774 - DNA, 241 bp, Glycine max
agacgacagaaggggatcgctattgtgattatagcagagaaggcaaagaaagaaaataatgagtaggtgtgtatcttgtgcgctgattcccaataagaatttcttggtatcaccaattcaaatcccaattcataatgcagtaaaggttaggggcaacaatagaacttgtgggctgcgcgttcagttttctaggggggcctctcccgcggttttttaaacaaggcgaatcgagggttttttt

SEQ ID NO: 102775 - DNA, 271 bp, Glycine max
taagctactcgacgacggcggttggcggatcacaagatcagtatgctgaatatctcgatagatctcccccagttctggggatggctaaggctacttttaagggacgcacggctgctggttctccggcggattcatccgctgacgctgatatcaagatttcgaatggcagcggtgtctactcgtaatgctttatttcgagaaagatcttggcgacctagcagatcctgatcttctcagggctgactcatgtaacccctgacttccgtctttc

SEQ ID NO: 102776 - DNA, 253 bp, Glycine max
taccttcactttatttgtctttcccgcagacaaatattggattaattatattggggaatacgtacccaagaccatcttgagagaagaaagcaagttatcgatgccataatacctgtcaaatgccccacaggtatattttgttcatgcacatgcatcatgtcccccaaagtttaatttgaaggggcttatatatagttttgtatttgagaaagggggaaaaaggagaggctttttcttcatcttgaccactttt

SEQ ID NO: 102777 - DNA, 246 bp, Glycine max
cttatatataacaacttaaaatttcaggtcaaccaaatctttaaacagctattttcacttctttgacctcaaagcatcaatattaccagtaatattatgaccgagtaaaaatatttgcgggtttcaaaatgtactgtcctttccaaaccaacagtaacaaattaatttaaacttaaaatcatttatccctgtttcctgaatacagtatgatttactctaatattctaatattgattttcagtgggc

SEQ ID NO: 102778 - DNA, 105 bp, Glycine max
ccgggatagtagtaaacaacgtaataatttcttgcggtcacattatatgtagcacagttagaacacaaccttggactgaggagcacatagtcaagtactctgtgt

SEQ ID NO: 102779 - DNA, 248 bp, Glycine max
tccccctcttctttttctggccattttaaaatgaaatttgatatttgacgtttcttttttcagttggataagaaaagattgtaggttgaattagagtcgtaaataattcaatatatccacacaaaagtggaaaactgactttatatatataaagatattgggcatcagaggtgaccaccaatgccgcacaaaagcctgtttctctgtgtgacaccaacaaggttactttaaggctttttttttttaaa

SEQ ID NO: 102780 - DNA, 280 bp, Glycine max
tctcgagccgaatcggctcgagcggctcgagcgagaagacgacagacgggggatcttctagtacacaaaacaaaagcataaaacttctcactacctaattcctctaagttctatatctgataagcttgtgtactaggccacaaatctcccatggagaaaacggttcacatagcagtagttcctggtcctggctccagccacttagtcccaattcttcaattctcaaagagacttgttcatctccatcaaaactttcatgtcacatgcataattccctcag

SEQ ID NO: 102781 - DNA, 250 bp, Glycine max
ctagacatgacttctatgacaaaactacaataggtgaacaagtcactctagatttttgagtttttcttctacttcaatatttttgtaagaattttatggtttaggtttcagccacaaaaaataacaagacaaaactcaaaggaacctaaactcaacaaaattcatgattcaagacaagaacaagaaatttgaaccatagaaaatcaaatctagcttctatagcaagtttaatcagtggaaactctaaaga

SEQ ID NO: 102782 - DNA, 198 bp, Glycine max
ctatagatgcttcatacctctccggcaccgttaccagaattttctctacaattcttgaatcagcaaaatcacttcccaacaactttatcttgttggcaatacccaacaatttgtttgagtattctttgattgtctctgactcttgcatcctttgaagctcatgttccctccttaaattgagcacttgaagtgttcgta

SEQ ID NO: 102783 - DNA, 253 bp, Glycine max
gatagagaagtaggaacttgatacttggttgcatcacattttgagttaatcgattgcatgagtaagactaattgcatactaatgagtattttcgtgaattgttgattctcgtgcaagcagacgtcagtgtaagtgatggagtgtgaactaatagcacaagaatgaaaaagttagtatttttgacaaaaaagcttggaataagaacctgaatacttcaatgaaaaccggtaagttgtgtgatctttaaattgtg

SEQ ID NO: 102784 - DNA, 240 bp, Glycine max
atgcacaaccgttatcagactccctcaaacttaaagctttgcttgtccacaaaaaaaaaaaaaaaaaaaaaaaaaaaaagggggcccccgactattgcccccttccccccgggatttattcccggaccggaccctgggggggtaccattttcccctatagggggccgttttaacccttggggaaaccagggcaaaaccggttcccggggtaaaattttttcccgcccaaatttccaaaaa

SEQ ID NO: 102785 - DNA, 249 bp, Glycine max
ggctgttaaaaaaaatgtgccaactatgctcatgtgaagtcccatcctttctcccattcattattacctcaacaagtccatatcataattaatgctccgtgagtgaatgagtcagtgtcttcatattatcactgcttgccagtgtcatggacttaagttgtgaaaatcaatgaatggttggtttgtgtaggatgctttgcttgaaaggatggggtgcacttactctgtgtataggaagaaaaaatcaag

SEQ ID NO: 102786 - DNA, 247 bp, Glycine max
ggacttaacagagtagctcattccacaagaagatttcacgtgcaacaaaacgcagacctgccgtgagcgacaacactatgcaagcacagtgtccgtcactcccagattgcactcttcaagtgcccagattctcaatcagtgccactcctccaaattttgcatcttttctgagcccctccaaggttgcaatcaaattgagttgtgggattcacaaaccaatttgtaggagtaggtgtgatggtttaag

SEQ ID NO: 102787 - DNA, 223 bp, Glycine max
gatcactgattagacaactctcttccaaccaccatggccaatttcaaaactttcttcatttcccaaaccctaaccctaaccctccttttctcaccctagtggtgccacttacaccacaaatccgccagtctgtagttcggggagagtgccctcttgcttctagtggattttgtgaaaggccacgtgtagtccaccgggaggggggttccttttgggggggggg

SEQ ID NO: 102788 - DNA, 257 bp, Glycine max
ggagacgacagaagggtccattgcttcaatatgacgattcaattagaaaccaagagttgtgagttttcattattatctcattaacaaactcatgtacagagtgagaaaaaagtacctgtagatcctcctccaagtacttgacacatatgatctagtgctgcctgttctcgttgattcttttctgctgtagaaactccagccaatggagttatgtccccaacaattgtcattacagaaagcgccaaagtgcacaaatg

SEQ ID NO: 102789 - DNA, 246 bp, Glycine max
gagcaattccatgataatggtcttttggcaaattcctctgtgaagttgtaagctgacaaatctccatacttgatgaattgaagttgaaatgcagagtcactgagaattatatagcaaatgccaagtgaaatggagtccaataatgctgaatatgtgacactgggaggagaaggttcaactccaaagttagagaagatgagcaaggtttcaattatgcctctgatgttcttgatcttttatgaggtc

SEQ ID NO: 102790 - DNA, 255 bp, Glycine max
ccatttaatagatgcaaacaacatgctcaaaggttttacatttgattcctcctagtaatttttttgttgataatataataataaaaaaaattgtcatatactcacaattatttgacgttaaccaagagcaccaactcaataacaaagatctagcacaccatccaaaatgtgtcaatttggcaggaaagctgtttaacaaaagaaatgacagaccctatacaacttttttaaccgagtatccagaagtttggatac

SEQ ID NO: 102791 - DNA, 178 bp, Glycine max
tccccccacacacatacacaccctatctcacacactctgagtttgagtctgaggcacacacaaatactactacaacatcaacaaccactgtagtattctaattctaattctctttggtgcagttatgaccgaaaattcataaatgagatttcctacagtagagttgatgggtgcagtt

SEQ ID NO: 102792 - DNA, 242 bp, Glycine max
cagatctggttagtcctactggaattgaacgggtcctaaccgaaaaggaccttctggctgactcatattcagacctagaggcttctatccttgatgaaaaagaatttctcctattgaaggttatctctacctttccggagttatcttgcttaatatgctctatggttggagcgggtcggggaatagacggtgtctcgttatccataacccatctttcgggaagagttacttcatcccatttt

SEQ ID NO: 102793 - DNA, 238 bp, Glycine max
tctatgcttttggattaggtccaatcattgtcatgtttaattggatctaacacatgtgaagacctgattaaataagattcacacaaccccgatctaaacattaagtatgtgcatgttgtacagtataacattttccttaatttcttagaagacacaagttcattttggacctgtttttcatgaagaggcccgaacgggagaccatgggccgaggaagtagcctaggtcagaagagagt

SEQ ID NO: 102794 - DNA, 241 bp, Glycine max
ggcatcaattcaaaatatatcatcaattataagcatgggtttgtggaacacaacgaatgcagtgtcttgccgctttcacaagtttggtgatgaccaaaagaatctggtcttccaaggtgatgccacgtcttcttccaggggcatagaactcacaaagttagacggtggaggaaaaccagtgggtggcagtgtggggagagtgttatactcttctccagtgcacctttgggaaagctctaca

SEQ ID NO: 102795 - DNA, 240 bp, Glycine max
gacattccaaaacacaaacacatacattgtagtatcacttttgtctcggaatttgttcttttgagttatggcaagcttaaaggttgcatgtgtggttttgatgtgcatggctgtgatgagtgcaccaatgatggtgcaagccgtgtcgtgcaatgatgtttctgtgaacctagcaccgtgcctatcttacctgatgcagggtggagatgttccagaatcgtgctgtagcggagtgaggaa

SEQ ID NO: 102796 - DNA, 233 bp, Glycine max
ggaaggtaactcaactgttacgtctttcagctcttttatttctctctctggcgaatgaacccttctcttcctctccgatccgaaacccatcgcttctaacacccgcagatctccctttctcaacctcactccacaccttacaccaaagtcccccaaactttccatcgcttattatcccctttttaccctttctctcttctcacctttctgcaatggcttctctagggtttctc

SEQ ID NO: 102797 - DNA, 233 bp, Glycine max
tctcctctccccctccctccaatccttccagcccgtcgaagccatccactcctccgtcgtgcctcttcttccgctccaccgtgttgcttcttcattgtgagatcgggaagcctcaagcccgcggaggccctcttgccactgaaagaaggacccgttggaaccgacggcggcaaccatgactccacgtgcggagatggtaggtggggtcagtggatgaaaggaccactcgtgag

SEQ ID NO: 102798 - DNA, 181 bp, Glycine max
acggatgacggcagaaacaggaaggagacatggtgtccaagtattatgctctctagtatgtgcacgtgttcatgactgtgacgaacccaccatcgtatgccaatcttcatcgcagggtcaagacgctcgacgcatccgacgggagccgctcatcacgactcgatagaggacggggacatct

SEQ ID NO: 102799 - DNA, 237 bp, Glycine max
ggaaaataggagttcccttgcagcccaaaacaccctgcatgaacttcatgttgttttggaccgaaggagccccttcttcttcactttcaccatcttcagtctgcaactgcgattttcatattttcaaatatggaatcataatactttataatttccccatctcctttttcatgtagcaaattccatcacaaagggatgttttaacgaccataatattcacttcagaacattttcgaa

SEQ ID NO: 102800 - DNA, 218 bp, Glycine max
cacggggagtgccctcatctcacctcactctttattatctcatcctttctcactctcacatcacccaacaacctcttacattacttctctctctctctctcgggttgaatttgacttggcaaaccctagcctgggaattcagagaactggttgctctgctattccgaatcggtttcgagtttgcagcattaggagcaaagtttgaagagggaagtgga

SEQ ID NO: 102801 - DNA, 240 bp, Glycine max
cacacacacatatatatatagacacactcatttaattttctctagcattattttgttccatttttagcggagaatgttctgtgaaatccgaacgcttttcttcaccaaggtaagtaatgaatagttatctgattccatatcacacatgcaatgaagacaagtaataagaaaaacagctgttatatattattctagtgtcagacaaattctgaatttgaatttatgctgccttttgtacta

SEQ ID NO: 102802 - DNA, 267 bp, Glycine max
aagataaccttatcagatttagcagctgcagaccttgataatgatggatcaatcaggtatgcctgaatgtttgtagtctcatataatatctttccttgttgttttgtcgcttgtataataaatggattaaagcagaatcagtgcattggttacaaagagagttataagaagtcaaggcctaattaaaagcaagagtaaacagaatattactagaagttcgtggctaaagcctgttttagtcactttgaaaataagaaattgtaggat

SEQ ID NO: 102803 - DNA, 190 bp, Glycine max
gaaatttcaatagaatgaaaatggggaaaatccaatgataaaatgaattaagaaaccgggcctccgtctgtgtgccccagcaaccgggggtattatccgggccctgtcccggccggtcaatcagttttccctaatctggctcgtttgaggccttgccgataaacggctaacagctttcccctccggtaat

SEQ ID NO: 102804 - DNA, 237 bp, Glycine max
ggggggaggagagtcaacaagtgaatcatacaataattttcaatgattgatattcaaaattatgaaaaatctagagtaaaccactcatatttgtaattgtacctttgaaggatcaaatccagatccacccatttgcatcatacgttgtgtatcatctacagctgcataaaaaacagcacacatcacaacaaattccagcttacatggaaaaacgacaacatactgaaaagtagtaaa

SEQ ID NO: 102805 - DNA, 194 bp, Glycine max
atctgtaaaaaaaaaaaaaaaaaaaaaaaaaaaaaacgggccgccgctaagacaactcgttcacccgggaatttttccgggcccgttaccggggggggaaccgatttccccaatagggatctgtttaaaggcttggggtaaccagggctaaacagtttccccgaggaaaatgtataaccccccagatttccccc

SEQ ID NO: 102806 - DNA, 234 bp, Glycine max
gggattatattcttcaacacctaagtccttcgaggttagagatctgttttgtgcttttgaaaattttaatgttagattctgcttctaattttataacttgtcttaagcttctttgatttctttgaattaggacttgagcatggtttagggtttgtaacatgattaaatcgattttcatttccattatctttctttttagtttctgttgatttccaaatcgggtataaaatatga

SEQ ID NO: 102807 - DNA, 236 bp, Glycine max
tccttacttagaaacatgactataaactagtaagacataataaaaagtttttacaaaaatgcatcaacaagtaacaatacctaccagtaacaagctcccctgaaggcagctttataactgcttgaactggtgccttatgagcctcccaccactctacagattgcccattcctccaccgttttaaggtactacacaacagtaaagagtgcaagaatcacatcaaaattgaaacaaaa

SEQ ID NO: 102808 - DNA, 239 bp, Glycine max
aatcaggcacatgtcgaccacactccacacaagctaaggtaggattttgtgctacgtgtcagtgtcgtgtgtcagttgataatggcagtgaccgagccattaaccactagattcaattcaagtatccactacggagagctacctagtgtggtcatcacaaatgaataatactttctcaacattagatgctcactctacagctatagccagccacaaattgataatatgcattgatgcca

SEQ ID NO: 102809 - DNA, 260 bp, Glycine max
ggaagatgatgctcctgacggcggtgacgacgacgacgacgaagatgatgaagaagaaggtgatgtccagcgtggtggtgagcctgacgatgacgataacgactcagacgacgactcagacgacgacgaagatgaagacgaggaggacgatgaggagcaatgggaagacgaggatttcggaacagagtaccttatccgacctttagaaactgctgacgaggaggaagcatcaagtgattttgaaccagaggagaatggtg

SEQ ID NO: 102810 - DNA, 146 bp, Glycine max
gcaggaaaaaaaaaaaaaaaaaaaaaaaaaaaacggcccccgagcaggacgactccgaaccccgggatttatctcggcagggtcaccggaagggtgaatccgttccccaaaagtcttcctcttaaggggtcggtctaatcagggga

SEQ ID NO: 102811 - DNA, 235 bp, Glycine max
agaagggatttactactcgtaaagactcctagaaagaatatgtgccgcaaaaaaaagagcttacgatacacgcaatatccgccagcccactaggtcccccatggaccggggatttaattcgggcccgggaccttcgggatcgcaagcttgccaaaaggcgggcccatttcaacttccgggaaaccggggactgacgatttcccggcgaggacttataccccggtcacattcccaa

SEQ ID NO: 102812 - DNA, 234 bp, Glycine max
cacagtaagaacctaagagattcttgttccactaaattgagacataatatacaaaagggagctgagttcagtttgcaaggctgaaaagggagttcagtttcccaagatccctcaacttcattcacttttgaatcacgaagtttcattttacaatagtataactactcaaaacattataagtactgggggaaatcatcattggacagagtgtcctgttcctgatatgaaaaaata

SEQ ID NO: 102813 - DNA, 214 bp, Glycine max
aggcaataaaaggacatgcttgtatggggttagtactgcttatgtaattaccacaacaacctgtttgaggtactattcccacataaaatgagaagattattatttatatgcaattatgaatttgtgttgtagtttgttacttgtatcatttattacttttttatctcgtaatattacaggtattagcctaccttaatgatatatgtcatgatct

SEQ ID NO: 102814 - DNA, 182 bp, Glycine max
acctacaggacagaagcttttgaaaatcaacatcattctcaagtgaggtcctgaacctaccagcagaagctgaaccaaatgaatcatgcaatgcactgtctaccttatcaaaatgaaaaaaaaaagaaaaaaaaaaaaaaaaatggggccgccgaataggttactctcatgcccgggaatta

SEQ ID NO: 102815 - DNA, 240 bp, Glycine max
gatttgggaaatgtacagctcatttctatatcgagtgatgccaaaaatttagttacatcagattttgagggtaaacatcttcaagtttggaagtgtgatttaaattcaggaaatgtgggtagaggtcctacacttcccataaggcatcctccattaattttagactgccacagtggttgcaataaagaagatgtagttgttttggcagttactggtagaggttctgcctatatatggaat

SEQ ID NO: 102816 - DNA, 237 bp, Glycine max
  unsure (1)..(237): unsure at all n locations
catatatgataatattgttaacttttataataataattttaaaatcacattaatgataatttataattagataaatgtgtaaaacaattttacactatatgaccattaaactctattaaataagttatcctttctgttgtattgtattttgaatattgcttatagattaattgttacaagtgataactaaaagatttaagtttttgtgattatgatatntactttaatatattttat

SEQ ID NO: 102817 - DNA, 240 bp, Glycine max
agcactcggctcgggtagagctgctcgaagacgatgcgaggagacgatagcacggggggtatatcatcactacatatattagatcctgtggtaattgcatcgtcaccactactggcagtagctttcatgccaacgaccaagtgtacctggagctagactttggtgcagtagtctactcattcgatcaccagaggcgtgtatggcgttcgatcctgtccgtgcttacaagggcacatgctc

SEQ ID NO: 102818 - DNA, 229 bp, Glycine max
gtttttcagttttttctaactgtttaatttagcatgtggatgcctacattttttgaaattggttgtaaacaattctgactgcctaatgtttctgaattctttgtatgcatactctgtgttcttcgtttttgatgttatacagatataaaaaaataaataacttttggaattaatagctactacaatagtttgtctttggttactattatggatattaaaggtatataat

SEQ ID NO: 102819 - DNA, 223 bp, Glycine max
ggcatcaattcaaaatatatcatcgattataagcatgggtttgtggagcactacgaatgcagtgtcccgccgctttcacaagttcggagatgaccaaaagaatctggtcttccaagatgatgccacgtcttcttccaggggcatagaactcacaaagttagacggaggaggacaaccagtgggtggcagtgtggggacagtggtatactctcgtccagtgcac

SEQ ID NO: 102820 - DNA, 238 bp, Glycine max
taccactaaatgaaaggctgcgtgttactgttgacatcacaaaattcaatatgttcgtcattaatttataatattcttccttaacccctgttctgaaagtaaagcatgattagtgaacctgagtaaatcagctttctgcgtcaaaatagtgctcctgatgctaattaacaaactttaaagaaacatgcaagtctctctcccattgatggtggaaaaggaaagctgaaaatttcgagaa

SEQ ID NO: 102821 - DNA, 221 bp, Glycine max
tatgacaacaatgtagcaattcccgattcttacatcattgatatttgataccactccaataacaaaacaaatcagcttgaaaatgtctacatacacagttaaacaaggatttaatgctttgtaacatgtattatcttctatatcaatatttctaaaggaagaagttccaccataaataactacttgtcattagcagatcaggcacaaccacacatttagta

SEQ ID NO: 102822 - DNA, 221 bp, Glycine max
gtgaggcgatatgcccatgggttgaggaagctcataagaattggccaaggcccagagaaactgttacgacaatcatcaaagttggctattaggcctgatgggtttgaaggggacagtggagatgcagttgaagcacatcaatggaaatgcgttctaatcgtggctggtattagaatttttgaagatgtttctgatcacaagaatggtaaggctgttcttgc

SEQ ID NO: 102823 - DNA, 223 bp, Glycine max
gaagggtgaatgctgtgaagattttcccagacgcccgaaatggactcggatgaatgcacaaattgataaaagaacatattttggaaacattgggttgatttaaaatagaggaaatgaatcctgagccctagcatcacatgaccataaaaatttgacacttgagtgtccgcataggtgcatgcacgaccagttttgcataaagtttccaaatcatcatttttgc

SEQ ID NO: 102824 - DNA, 192 bp, Glycine max
aggtcccaattgtatataaaattaggttatgtgtagtatgatcaatgacatagtgttacaaagcttggtcatgaaataaatgacattatctctcatctatactctctctatataactaactttcccttgctaccttcatgtttctaggctctagttgtcttaggtctacaaggacaaacttgtaaggtcttc

SEQ ID NO: 102825 - DNA, 219 bp, Glycine max
ggggaccctttattgctttgtgcatcttcatctccttcttcgatcatcggtgatctttttctttgtttaaagcgagtttcgaccgattgttcataccgtaatctcgtttaatcaccattaaaataaaattcaacagattgtttctattgtaatctcacttaatcactgtttaaatgaatttcaaccgatcgtttgtgctgtaatctcatttaatcactg

SEQ ID NO: 102826 - DNA, 219 bp, Glycine max
gggtgtcttattttgatcactgatttttggagttggtcaatcaatcactgaagtttcagtgtctatccattttcactgtaaattacattttgttagttaaatgacagaatttgctaatatgtaagcaataggcatttgcacacttcaatctgtaattaagagctatatagcctgctatatgcatttgtgggagcagggagttcatgcaattaatttatc

SEQ ID NO: 102827 - DNA, 225 bp, Glycine max
ggttcgtgcatttatatttggaaattagtaatgcaattggtttagaaaagtttgaggctcttcatgagattgtaacatggccgtccatggtcgtccttaatgtaaggtatacggacagaatgtttatggattctctggccgtcgaaccaagtatctaaacgtgtttctatactcaatgcttcaatatctcgctagcttgattttgtttctgaagtcaaatggttg

SEQ ID NO: 102828 - DNA, 250 bp, Glycine max
gtgggacaggcggaaaaggctcatacttgaagagattaataactataatgccagcatactgtgcttccaggaggttgatcattttaatgatctggatgatcttttccagaacagtggctttaaaggtgttaacaaggctcgcacaggagaagcacaagatggatgtgctgtattttggaaagacaagttattcaaacttttgcatcaagaagatatagagtttcaaagatttggtatgcgtaacaatgtt

SEQ ID NO: 102829 - DNA, 254 bp, Glycine max
tggtccttcttattttaatgcatgtgactgcaacaacaaagtaaattccacgatggagaggtaaagattgaatataattataccgtagcagttatctggactaggtaattgacacgtacgaattaacacggcaaaggaatttatatttttttacttctacatacattcacccacatgtaaaacgaaatttcagtgccattccttacctaatacgcacacatgtaaaacgaatcaaattaaaccatataccattg

SEQ ID NO: 102830 - DNA, 245 bp, Glycine max
gagattcaaagcttcgagatggcgatcgtggcgtttcaggcgagcctagccgccgtctccttgctctgcctctcccacagccttcgcaagtacggtctccgccggttcctcttcgttgaccgctactccgggaagttgcattgctttcaccgcgactacgtcgctcagatttcgggatctatgcgcatgctttttctgtgggtgttgccgtgtttcattctgaagacagtgcgagaaatcattcg

SEQ ID NO: 102831 - DNA, 105 bp, Glycine max
tgaacatgaaggacatcatacaatgtcaggaacaatgatagaagaacagctcttcatgttgctgtgattcataatatccaatgtgatgtagtggaattactgatg

SEQ ID NO: 102832 - DNA, 250 bp, Glycine max
ggaagaaaatgttggcaccaaaaactcacacgtgcgaggctctttctctttctctgccacaaccgtcatctcccctccggagcccgtgaacatccaactccgccgccgccaactcctcagcgccaccgcatccaccatttccttcaatttcactgtccctttcacaacctctctgtccatgtcagagccggtagccagtgccggcggcctcttccaaatgcccccacctcgcctcatcaaccggtatttt

SEQ ID NO: 102833 - DNA, 251 bp, Glycine max
gttggcaattggactgagtcagttaaaccctagttgttgtcctcacactctcccaagcaatggaagttccttcggaagcgccgtctaccggcatcgccgccgaaaccataagcaaaaatgcgcctgaagcgcgaactcaagaacaaacagataaaagaagacaggcaacgcaaggaggaggacaaggccagaaaggcagctgaaatgcagaaggctaaggataacaaatctgcacctgctgatgaagatga

SEQ ID NO: 102834 - DNA, 256 bp, Glycine max
gaacccaaagaaaaaaataaacctactttgtaacttatcgaactgagctaaattgtccgtattagagctaaacccgacccatgctcaatcctaatataacctattgcgagggtgttggtggagtgttgtagtgtgaagaagaggaagaatgagtcaaccgacacagcagcgactctatgatttcgccatgagcgaaatcagcaacatcttcgttcacccctacgccacggtgtgcgacttgtactgtggagatgcc

SEQ ID NO: 102835 - DNA, 262 bp, Glycine max
tatccatagccatctttcccaactaaatttgtcttaattgtgttaacaggtttatggagtcaatttccagaatctagtggcctgtttgattctttttatttttttaaacaaaaaattatttcatagaactatttcacagactagaaatatccaaaaaaaacctgttttatgaatattgttttgacaattaaattctgaaagcttacaaatgttctctgattgcagctgaggtccgggtggtgatggtggtttgaagtgagat

SEQ ID NO: 102836 - DNA, 232 bp, Glycine max
agcggtaggagtcataacaccttttctttatcatcctaaccttcttcgtccccccatagttgcacctgacgcatttctttaacaagttgccctatattctcccgcaagaggcaccatggaggaaagagtggggattttgtcactgattttgttgggtgctgcttgggcttgtgatacgagagagctagcaataatctctgaattagacagtaaatcagatgtctgtggactt

SEQ ID NO: 102837 - DNA, 243 bp, Glycine max
gaagacgacagaagggagataaatagttctttaaaacatccatactagtaaaaagttttgcaaaattactcattttgataaaaaaatatgaattaagagaaaaaaatgttaattagtcctcttaagaaactacaagagaacaaatatgcgtaaacttacattactaatgaatttttttacattctcctactatgtttacatcaaatatttgatatattgtaatttctgaataatactggttat

SEQ ID NO: 102838 - DNA, 259 bp, Glycine max
agaaaaataaaaggggggtgtatttagtgaaaaggggggtgcaaatagaaaccaggcccacttgggccttcctgagggttccaaaaaggaagagcaaaaaggttcagcccttctggtattgagaaatctctcgaaatttgtgagaaaaattatttccgtgaaaaaaatccaagccgaggtgcgtccgtaacgttttcgagacgtttccataagcgatttcgtggagatccttcaccgttcttcatcgttcttcgtcgtt

SEQ ID NO: 102839 - DNA, 179 bp, Glycine max
gcaccctatgtagaaaaaacgaaattcccaaaaaatagacagttacataacctaaagcagcatataaatatcacacatcaggtcagataatacacggccgatagcataacagagcacaccaacacgaacatcagcattctcattctctctctgctctctttcagcattggcttcgatct

SEQ ID NO: 102840 - DNA, 234 bp, Glycine max
gaagagagagaggagagagagctaaactagaaccttggtgctgttatatagtttttcagccccaaagcttacaaatctgttttaaatccaagcccaattctggattcaagcccaagcccaattatagattgaagcccaatgcttcattaattcctgaaattagattaaaaacatcaaggtagctgaatggacccaaattataaaactgcctaataaatttgacaattaagacga

SEQ ID NO: 102841 - DNA, 266 bp, Glycine max
agacgacagaaggggactttttctttttgctttactatttatatactcgtgggggagggcttcataacatgtgcatcacaaataaatgattttatatacaaacacatacatacacactcacaaggtaattaattttgaacttatttacttgttgataattatcagtttatcacaagtatactgcatataaagtgattattaccttatgatatgaagacatttcaaacaaaataaaagtcatatacactcatgggacatgcattagg

SEQ ID NO: 102842 - DNA, 260 bp, Glycine max
acgacagaagggggaagatgatgaggaaacattggtagaagaaattgaagagagagagagagagagagagagagagggttggattggttttcttcttccttgtctctagagagaatctaatctcaatcctcattagagatttcttcatgcctctctcagtcttttctgttttccccctttgacatcctcgttttcggcgaaacacaaacaactaagattttatgtatgttctgtctttatgctcgctgttgttatttgac

SEQ ID NO: 102843 - DNA, 232 bp, Glycine max
tgtcccaattattggccccctttcctcccactttactcgtgtcccaccagtcttttttttttttttccttccattcaaatgtttattattagtgaaatgttagggacattcactctcacattcttatatgcctgaaaaattttcctctgaacattacggggaatccattaaaatttattagaaattataaatttggtaaccacttttaatttaaggatttcccctttaaatt

SEQ ID NO: 102844 - DNA, 238 bp, Glycine max
gcgtacgcaagtcggaatcggccgatcgcgaaaaacgacaaagggggaagaacacgcggtaaagggactggaggatatggcgaccacaggcgctttatgtggcactatgttgtagacctccatcctgaagaagtaagcatcactgaatatgacaagcttccaagctcaacggtcgctgtcttatgtgcaaccatgttgacttggttgtcgtgtccaggctcaggtaacttacaaggtg

SEQ ID NO: 102845 - DNA, 241 bp, Glycine max
gaggaagaaaaatggtgaatgcactcactcacagtcagagtcagtttgtgttggtgctattgaactccaattgcagagggagcaagagtagtagcaacaccgtcttccgaaaaccctttgcgaaattttcatccctcaccactaaaatttgccacgcctcttaccaccgtttcgctgacacaaagcacacaacccttctggttgagacttaccatctccatcacagcctcagagccttact

SEQ ID NO: 102846 - DNA, 234 bp, Glycine max
aactcctttagaactgctcattaaattaaactatacatcaaatatttgaattatgtttagattgagcataatggactattcaatgctatgactggagcattttccacactctaaatcttatacagataagctagatcactactagtttaaggtatacgggacagctctcgaaagttttgtgctagcggcatcattagaaccaagtaaaacactaaacacatgctttggaaaaga

SEQ ID NO: 102847 - DNA, 214 bp, Glycine max
gggagaggagacgaacactgataagtagtagtaatgggcagtggtggctggtaacggccaccaagaatcaactgaaaattgttgtgatgacatcgtggcaagcagcaagacccgtaagcacccatctatgctcacttatcaaccaaactcaacaaatcaaaatcctaacgcacctgccctatctcactttgttcggtgtacttttgatctagta

SEQ ID NO: 102848 - DNA, 229 bp, Glycine max
ccataaattatttaaaaataaaaaataaaacttcacgagtgtttaaaaaatcacatgcactgaccactgcaaattatatacgcaaagaggcaaccccaaaaagcattggcatatacattttaacacatcaaccccaaaagatcattgtcatataaaatcagtttgcaggtgatcagtaaacaataaaccattagatccagatatcaaagggtagtatctattgcttaaa

SEQ ID NO: 102849 - DNA, 243 bp, Glycine max
ggaagggaaattttgataaagaagaagaaaagggttttaggttaggggtttggggaaaatggaaagtgggagaattagtagtgagaaaaatgcgattcgaattgagaatccatttagtttgaaagtgggtcaggtgtttacaggttttggtatcggctgcggagtcggcatcggcgttggccgcactttatatttgggtgcaatacctatgttgaatcaagtaatgagtgccaccagaggtgc

SEQ ID NO: 102850 - DNA, 254 bp, Glycine max
tgccccacctaccactaccattatttgattactccatccaaacgtggctcctaatcaatgctgcatatgcaacccacctcagctcaataccttagcactgatgataagtgttactaactagttcttcctacatatatatcccaacactgatattttaatcttatactctcttttttactatttttagtgccaaggacattcttgatcgatcaaagactaattttttgaaatataaatattattatacacacatg

SEQ ID NO: 102851 - DNA, 254 bp, Glycine max
tctcggctgcgatcagatcacatacgggggcacacgtttgttgagactaacttggagcaatactttggagatggtagtggctgttttgattgttggctacacttctggttgcacatgactgccgtggctcttacgaccagatgttccctctgctagtggcaacttggattattaagcaatacatccgtgaggcgtcatgtgccatttggaggcttagcgtggaagcctactacgtagtctggtgtgcacactgt

SEQ ID NO: 102852 - DNA, 137 bp, Glycine max
  unsure (1)..(137): unsure at all n locations
ctngaagtacttgttaacgtgtgtggagtgcgtcctacatagtaacaatgtaactaattgaatatgataaaacgtcactatgcgtaacaggaacgagactacgtacatacatgctaaaaagggcatccacccccctt

SEQ ID NO: 102853 - DNA, 238 bp, Glycine max
tttgttaaaaaatatagacaataaaagtatgtgaattcttttaacaaatgtcttgaattataaaataagctgcctattaagagtttgcattgtctgaagtttatcatcatccctgtggggttttcatacccatttggcccattgatacacacaagaggacagtggtgtgatacacttagagctagcttaaccctttcttgatttcattttcaaaactcaattagtttatatatgtgtt

SEQ ID NO: 102854 - DNA, 221 bp, Glycine max
gttttggcttctaattggctttctgcgtttggttgtttgaaggaaatttctttgactgataaaggaaaaatagggaaaaaattgtattatggtatgaacaactatcatggggaacttggagcatactaggtattatgaacaactatcatggggtacttggagcatactacgtgcattgagggaacatgtcaaattaatgattagttatctggtctttggtg

SEQ ID NO: 102855 - DNA, 227 bp, Glycine max
ggtggcagttgtgtgacacagaaattaagctatagcttcatagtttgctcttctcctctcatcttccttctctcccttcagacatagggacaataaatcagtgagtgtgatacagattgaagaattccagaaccatgtcccacacttagctaggtttctcactcgggattctacgtaatatagattactacgcatgctgtgtggcatgactagcaacatgttatata

SEQ ID NO: 102856 - DNA, 242 bp, Glycine max
tattgtctctttccctggtttgccacatataaatacaaaattcaatactgatgttggatttactttacttgaaaagagattttagtatttatctatttcacttcactcaaataataaatattgggtgcttctattagtgcccacattattccgactaggtattgaaataatgttttatgttaacgctacaatatttgaaaattgaagatttagagcatcaagataagaaagtcatcaatggt

SEQ ID NO: 102857 - DNA, 198 bp, Glycine max
ggaatagaaagaagggaaaaaatggcgggcaatctggcagtaatagaacactccaacaagaactcggcgaggctgagagagcagtgggagatctgcttcgctcgcttcatcccctatcccactctccctccctcttctgatctccttcccctcgctcctcgcctccggcaactctctccccgcgggcaactggatctc

SEQ ID NO: 102858 - DNA, 217 bp, Glycine max
aaccattcttccctcctcctttatccatctttcttcttttatccatatcgacccctaaattgtaggcaaaacccatgtgatgggagcctagcagccaatacatttgtaatgtaatattttcttactatctattgaatgtaatgccaatttatattttttgctttccatgttttattttcattgctatgcatttgattatggattagacattgaaaat

SEQ ID NO: 102859 - DNA, 212 bp, Glycine max
acccaatacacaccgttacaacctgaatccaatccaacccaacccaaggttcaaacggaggactgtgaactttaattttcagcgtaatttattgtagattaaacttttgagacttgaatctaaatgaacatatccaacacccacccctaagactctaattctactagtcttttgagagtcaaacttgaatcacgtatgcaaattaagtgttt

SEQ ID NO: 102860 - DNA, 257 bp, Glycine max
ggttaaaaaagatatccctacggtaaagaagcccttctttttcttctcttacaaccaagagctactcttataactctggactcgtttacactcgtacctaagggttgaatcaccggtggcactttccactttcttcccttccttgccacgaagcctctattccggatttcaccttcgaaacgcttgaaagcgtttgaaagcgcgtgggagaaaatgtcatccttgtcggaaattagagaggacgcgaggtgaagagg

SEQ ID NO: 102861 - DNA, 279 bp, Glycine max
gaagattcaaatgtgcaaaatgtcctagatatgtaattttcaatttgagatttaggtttgtcattttcaatttagagatttgggtttgttcattttgtggtggctcactatttgcataccattttaaataatttaaaaaataaagaattgaaatatattttttaaaagataaataaccaagggatttgacggtaagaaatcaaatttttatcagagtgttttttttttttcctgtttgaggcgtttgagacgtggcagttacgttacttacgtaatttt

SEQ ID NO: 102862 - DNA, 237 bp, Glycine max
ggggggagcaaaaccaaaaacaagaacaagaacaacatcaacatcaagtttggttggtgttgtttcattttcaaataatctctctcaccatgatgaataacatggcctatcccaacaaggccttcttcctctttgtcatgttcttttctgcatctcttcaccttggcatgtttgatacttctcttgatcagcttttgcctggcctaggacaaggtgcgtttctacaagatgcaaaat

SEQ ID NO: 102863 - DNA, 264 bp, Glycine max
  unsure (1)..(264): unsure at all n locations
gttcattgtttgaaactttgaagtttttgtactagttgtagagtggaagtgcgactcatttttgttttatgttacttttttttggcacggtttgaactttgaattcctgctaggagacccaccttcattcttcattttatnctttagcatgtaactatcgcctcatatgaaaaggcaggtgagaaaaaaaaatgtttttttgatttaaaaatacttttattctttatttttattagtagctacaaaagaccattttaattttac

SEQ ID NO: 102864 - DNA, 245 bp, Glycine max
gacccattacgtacattcctagtgagcaaatactatgttagatattatcgataagttcagtctcttccatttattcccagaaaaagttatgccatgattgccatcccataaaggaagctaaatggataacaacagtatacagaatattatcaaagctaacgcactagatatcaagcaaaacaaaataaacttgttataattgaaaagaatattcaggcgactttaatttgtagaacaagctcaca

SEQ ID NO: 102865 - DNA, 139 bp, Glycine max
cgacgacgatggggggagaaaagaagcagataagctaacagaggcaacaatgggaaatccttctaggctaatcccattattacttgactaacttgtgatactaatgcccttaaattacttatcacaacatgacttcact

SEQ ID NO: 102866 - DNA, 237 bp, Glycine max
ctctgtctactgtctatgcaattaataacttcacacactgcaccaccctcttctctcctctcctctctttttttaactttgtatcacttcttctctcatccatccaacccttcttctccattctaagaaaggtgatcaatgtacttccaccatttccatcttcccttcattttcccacttttttaaccattcaattgttcttttccttcctaattgtcttcatctaacacttactgt

SEQ ID NO: 102867 - DNA, 204 bp, Glycine max
acggacgacagaaggggggtttggccaaggggcaaaagagaagagatttgttgaagttggtacataaatggaaacggaggtttttggtggtattacgctatcatacgtgttcaatgctagtaccaaaatgatgctcctccaatatccatgcatgggtgaagtgggcaaaagcgaaagaaacatgaggaggaatttactttgatg

SEQ ID NO: 102868 - DNA, 183 bp, Glycine max
taatactatagttaagacaataattatgagttaggggtaatgaattagtcaagtgcgcataaataattatattagaaacttcttacttctaacagttagattaatgcggatatgaactttctgtttagaataaatatttcccttataaatatgagaagcaattatatattggggaacttcttg

SEQ ID NO: 102869 - DNA, 191 bp, Glycine max
agggatgttttatccaaaaaaaaaaaaaaaaaaaaaaaaaaaaagggggcccccgataagggacccggtcaccccggaaataattccgggaccggaacctgagggggaacaactttccccaaaagagagccgattaaggcttggggtaaaccagggccaaagggtttccctgtgggaaatttttacccgcc

SEQ ID NO: 102870 - DNA, 111 bp, Glycine max
aatttcgggccgggtacctggaggggaacaagttttcccaaaagggagccgaattagacttgggggaaaccagggcaaaagcgtttcccggtggaaaattgttacccgccc

SEQ ID NO: 102871 - DNA, 237 bp, Glycine max
acttccatagtttcatgattgaattctaagtattttaaattttcattactaatgaacacattattaagaacatcaatcaaaaatcaggaagcataatcagattgtatgcaagagtctagaaatgcaaaaatttgaaatatgctatttctagaaacataatttgtacacaaatgaagaaaattggttcaaatggcatgcatacactttatgcaataccaaaagctgcacttgaacaga

SEQ ID NO: 102872 - DNA, 141 bp, Glycine max
ggagattgggaagcattggtggctagctaagcgaactaagagccagactcttcagcagtttgtattagcttagcttcttcttctgcctatgctttctccacctccagaaccaccatgtatgctgccactgcctccaacact

SEQ ID NO: 102873 - DNA, 209 bp, Glycine max
ggcaatcagattaggatcgataaacaatttctgcagatagatagaagctcagcatgtgatggaggatgaagctgtttaagaacaactttaggcaaccgagtatgatccatgcactaagccaaatggattggcacataatctaattataaaatattagctatttgacttttatagtcactgtcgctggtcatcaatgagatgattgatta

SEQ ID NO: 102874 - DNA, 229 bp, Glycine max
gaggtattttccaactgtccatagatgtctaatatcacatcacatgtgacggttattattgttgtatctgagtgatgatgtattgatgtgaatagttgtatctgagttattattgtctaatatcatagtatgaatgattattagtgtatatctatatagatttgtcattgaatctgaatttgatagaaaagaaaaacaaaacccagatgggtaatgagtgattattatt

SEQ ID NO: 102875 - DNA, 120 bp, Glycine max
gtaaggtgatggctgtaatgtgaagagaagagaagctgaggtgctgttcgtgggcgttggatacgatcgacgtgaattcgatggacgagaggtgatcgggccttcgaatctgatgtagcg

SEQ ID NO: 102876 - DNA, 287 bp, Glycine max
agacgacagaagggttcagctatgttatacactagacaattttttttcctttaataatttctcatgtgaatcttcaacatggtcaccattgattttggagcctgaacaagtaaattagatcctttaaaaaagcaaagcaaaccaaagcgtcattgctgataaacttagtttttttcacaagtagcatagcacatggttttctcctgaaatttcacataacttaaggataattcttacaaattacaataccattattttcagagatataaggttggttgactagtaaa

SEQ ID NO: 102877 - DNA, 261 bp, Glycine max
gtatgcttaaaacatgatagctataagatgcatttcatctgtcttctttaaggatttcagatgtttgctatttgttgggtactccatcttcattatcccaaaagaaccatccctatttattgacttcatatttggcgttttgcctaaagaaaaaatagcaagtagaaggattaggtaggtagagaaaagccactagcaagagagttaggaaaattgggttcataacgttaaatctgatattgtaaaattgggcacacatgt

SEQ ID NO: 102878 - DNA, 265 bp, Glycine max
atatcaactaatcttatgtcatagagagagataatataacataaaagcaaccagaaatcatactattatcgtgaaaatgatttattttattttattcttaattaatgtatatatagttacataattaaaattaattctcacttgagaacaattctgatcacttgacatatgctgtataaatataaaaatatatatatcagacttgactagctcaggtagtcaggttaatttcatatttttatcattgtgtcaaacaattaatttt

SEQ ID NO: 102879 - DNA, 224 bp, Glycine max
caccgataagacgagagaagaggacgagattccagtacactaacatatacattgtcgtatcgcttatgactcagagtctggtcttgtgagttatggcaatcttagtagcataatgtgtggctggcacatgcaacgctgtgatccgtgtacaaatgatgactcaagccgggtcatgctatggcgattctgtggccctagcaacgtgcctatcttacgtggtacag

SEQ ID NO: 102880 - DNA, 258 bp, Glycine max
  unsure (1)..(258): unsure at all n locations
gtagaataaatgctcagcaactataatatcaattccaagtatcatgcatcatgcatatgnnaaatttgccttaagtaatttgaatttaaatacaaaatatcgaaatatactactttatgtaattctttgactttaattgctatgttgtgaactaataatcgtacatactaaatctctggctattatctcttatcgttgttctcattctgacgatgatactaataaagttaaaagatagtgtacccgcttgatgtgtcg

SEQ ID NO: 102881 - DNA, 266 bp, Glycine max
tctgagaggagacgacaggaggcggggttctcaaggaaccagctgggttaaggtcttagtgcgacgcatcagatcaaagtgcagggacaccatcaccataaccttgtacaccacgtgtcatctgcatcaccttggagtatcagactcaggaacacgtaacaagcaaccgcagcagtctctgtcgtcatgtccgggtgctactcgatgtatctctacgattcctcactctagcaggagaagtatgggtgctgcgagagaccttggga

SEQ ID NO: 102882 - DNA, 245 bp, Glycine max
acacaacaagagatacagccatggaggaggagctagagaacttgataaaggtgcgagcagacgttgagagagataggacacataaggagaaggagaagatggctaagcatcagcagcacatctccatgccaggtttaaggaagggttcttccacattctagaggccaaagaagtttggtttgtaaattatgttgataatacagagagatatcagcagactgtgaaagagaaggctgcattctgat

SEQ ID NO: 102883 - DNA, 262 bp, Glycine max
  unsure (1)..(262): unsure at all n locations
agggtcatgacttctagtaatgaaggattttcacaaacaaagtgtagtcactcagactcgtctattnttccatcttgattaaggtcggcatccaagaaagtctacacatacatacacaatatcaagcttaagcttttttatctgtgatataattataagagcttataatgtatgattttaacaaacataaatcaccttgttaataattgtttctatcatttcatatgacaacttaatttcagcttcacaaagaagtgcattt

SEQ ID NO: 102884 - DNA, 255 bp, Glycine max
ctgaccctttccctttcaataaaacactgttatttagtagccctgacgaatggattgacagcaagaaattgtttaatttttccctcctctttctttgcacattctctctctcgcttccacgcactgccattcatctccaccactttctttctttgttgataatcagatcacaagaatctagtttttcattttttttcagtaaaaagcttttttttatatatatatatttaaaccatgtaactaactcatagttct

SEQ ID NO: 102885 - DNA, 277 bp, Glycine max
aattcgagcagccgcatttataattactatttttttgtcattgtaaaagatactaagcttattcaatttcgactaagaaacataaactgtcgggtctaagggccataccccacggtcacgatggtgccgggaacgactcaattggcaaaaaaacccgttataggttggggcaaaaataaaaaaggggtcttcttggaaaaaaaagggacccaaacttcctttttcgggttgcagagatttggggggttgcttcaccaagtataggaaaaatggggaa

SEQ ID NO: 102886 - DNA, 286 bp, Glycine max
actcgagccgaatcggctcgagttagaagataaaaatagaacataaatactttgaattaaaatgttagaaaaatatcaagttgcacgatcactaaaaataaaactaaattagaatataaaaatgagggataattctcaccctttgagttaatttttgggattgaattaggtctaaactcatattctaagatagtaccaggacatagggtcctaaactcatattctgagataaaatacaaaatttttcatctatattatttttcttctctctatcaaacatattgta

SEQ ID NO: 102887 - DNA, 248 bp, Glycine max
tctatccccacaaatatagtaatctcctaattcaaactaaaatgttaaatgaattcccttagtacattcaaaaggaacaataacttttctatcttctttaaccattaaccaactgattgaaatatcaatttttcatcaagatagcaaaagcaaatacaagtttgtatagaattccgaatcatacaactcaattgtaagaatagaaaaaggcacgattttaatacgttaaattccaatctcagatcttt

SEQ ID NO: 102888 - DNA, 269 bp, Glycine max
ggtctccttcttccttgtcacctttctttgcaaagtcgtccctgatgccaatatggctttgcctgaatccctgtgctcctcattacgtgcatccctatgttcatgcatatccttgtactcttgtgttacgtgttggtaagactatgatgacgactggtgtgacgttgccgagtgaatcttactccctttgttgcagctatcatgggggaccatggcgattgccactatatccctttggattccctctaagttcttctcttcgatgttga

SEQ ID NO: 102889 - DNA, 230 bp, Glycine max
caggtgggtgtcaaattatagcatcacaaaagaaggactaattttatttaaagaagacaaaacagcctcggcttcaccttttttgactatgacaacaaaatctattctagcatgtttggggtggtggtcacgtgaaccaaattcaactttgaaaccacagtgagtgtgaagcaacacattgttgcttaggaaaaatcatggtgacaccgtggttttgaggtagccaccat

SEQ ID NO: 102890 - DNA, 245 bp, Glycine max
taaagaacataaaatctcagggaaccagtgggaaaaaggtgaaaaggaataagtctgtgccagctgaaacaaaaaagactggaaatgatttgacatcttaaatatggtcagagaaattaatgtggataacttggggacccccactaattttgaaccaagtagcggtcatgaccattctctgattaaaaaggaactgaaggatccagaatatgcaacaggtaaaaagagaaaagctagcaaaacaa

SEQ ID NO: 102891 - DNA, 244 bp, Glycine max
gcccttgttattttctccactgttttgggtgcctattgtaaagtatccattatccagcaaagttttgggtaaaagacatctcatttcagcttctgtaaacataaaacaccgaaacaaaaagtgtaattacagaaggatctaaatccagtgaacataatcagtcttcctttagtgtatgcttcagggtgactgtatttcctgggaatctcacttgtggtatcgtaatcatagcaaagctcaaggc

SEQ ID NO: 102892 - DNA, 244 bp, Glycine max
ggaatccaaactctcactcttctgagctctcatttgccaaaaatcatgaggcaaaagaccaacaacgcagattctagtggttttttgggagcatttcttccaattttctcagatcagtctcttcttcaaatcgcaaacccacttcttcaaaccctaaacccccaaagtctgacactgaaaacactcctccgactacccatccaaacattcccatcaatcttcaccaccaatcaaagcccaacga

SEQ ID NO: 102893 - DNA, 126 bp, Glycine max
tacggctgcgagaagacgacagaagggtacccgttagatcatatgctataaaggatcccccactgattgagaaaatggatgggaagaatttaagtctgtgtatttggacaaacaaaatgtaaagct

SEQ ID NO: 102894 - DNA, 246 bp, Glycine max
agacacctgcttactactgcgctctgcagtggttatatttcccctttcaaaagagacaatgtcgtgtttgtactgatcactttgatcaccttgctgaaccatgagagtttaaatgaagcctgtctcgataataaagaaaataattaaaatcaatttgcttaagtaggagtaaatcagagtatatacattgcaattttagcaatagaaaagaggaatatgtctttgaagtaaaaatggtagaagatg

SEQ ID NO: 102895 - DNA, 248 bp, Glycine max
cacctaattttctaaaaacaagtcagcaatcatcttttccaaagatagggtcatctttaattaatacataattacagtaatgagcgacttttatacataaccagcaaggtaaagggattagaaagagtaaagtgtgaagaagaaaaatactgttaaaatattatgtaaatctaaataaatgacatcctaaataatctgataccttctgcttaaatagtttaattccattgagcacaatgaacatagtg

SEQ ID NO: 102896 - DNA, 241 bp, Glycine max
gaacctggttgtaccagttcagctgctggtcacattattgttggccatagagcagacaaaggtagttcaaagtggcagtcaaaaggaagaggaattcaagacatacgagtaaaaatataaaacatgcctcaagaaaatatgtggacacagacccccaatccagtgcttatttgtcaggaatagggatctcggatgggatctatcagggtgcttgtcagaaagttgattggaatggcatggg

SEQ ID NO: 102897 - DNA, 234 bp, Glycine max
ccatcatcgataagtgcaaagagaagctaaatctagcggcgactcacgagcaaaggctagaggatgagtacgccaagatatcaacaaaagggaagcaagggaaagggtaattgattcattgcaccaagaggcaacaatgtggacggaacgatttgctcttactttgaacaggagtcaagaacttccccgattgctagccaaggccaaagcaatggcggacacctactccgcccc

SEQ ID NO: 102898 - DNA, 244 bp, Glycine max
ggtcgttgaaaataaaactctcactttgccacggttacgacctttagcccctgcagccatgtcaacgagcatcgaagaccaagctctgcgtcaactggcagcgatctgaagtgcgacgggtacggcatctcccttgtcgtttcgtcggttttgttcgttctgtatcttgcggtgcacgccaagaagaacctcaacagcctctgtcgtcgaggctcctatgttgtcgtttcctattttgccctcc

SEQ ID NO: 102899 - DNA, 188 bp, Glycine max
tcccttgagtcaaggttacgttcttagaaagacacaatgaacaattccaagaaattggccccttaatccagaatgaactaccaaaatcaagaaatgcaaagacaacggacacattttcagaattcctcacaacttacacagagacttcatcagcctgacaaatgaaactatacccaaaatggatgaaa

SEQ ID NO: 102900 - DNA, 259 bp, Glycine max
taccattaatgttgtcataactatcaccattgtcacaaccaacatccatcaccactattattattaccaacaataccatttttgtcacggttaccaaaactgtcagtactaccaacattgtcatcaccaatattgcttaccaataatacattgttgccacaaccattaatattgtcagtgtcatcacgatcactgttggattttaaatgttacaagataagtgaccgaacgaaattttgaatgagacgatgtattacgc

SEQ ID NO: 102901 - DNA, 253 bp, Glycine max
gggttcccattcagagcatgagagcaattgtgtcaagtgcaaatcaatattgtttaatgaaaaaagcaaaacctgcatgtattgttattttttttcatagctagcggagcttaagcaacatacgttgctcaatttgatttaggcaatcacatatgttccctttgataatgtgcttcttctctacagactcaataatatatatacgacatcaattttcattttagaatcaatctgattcagtaagtcatacaca

SEQ ID NO: 102902 - DNA, 249 bp, Glycine max
atcctttgtgacgggcgcgcggggtgctaataccttccctatgtgtaaacaactctcgaatcattctttaaaaattcgcagacctctttttggtttttctaacgttttcccttaaatgaacattgatggtgactctgctcgttttctccctaggagacgaatgcactttggcttatttatcttgcttttgtcgtcccgtcgtgaggtaggttgcgacagatgtcgactccattggggacttgttggaga

SEQ ID NO: 102903 - DNA, 251 bp, Glycine max
ggcagcacacacaaacaaatactctctctctctctctgcatgagaagataacaaacaaaacacctcattcttcatggctcaccaatcctcttcttctgaatctgatgaccatattccttctcatcatcacccattggacctaaacagtccccatccttctaaagatatcatcttcgacgacaacatggagctacaacagcacgaacaagaagatgtttgcaacattaacaaccatgaatatgatggagata

SEQ ID NO: 102904 - DNA, 234 bp, Glycine max
cgggatgcccaagtcaatgtccacaggaacactttgacttgcccgtcccagtaaaacccgcatgatgaattgagtcatcattaaagcattatccaatatcttagattcaatttaattattgaaagaaaaattatcccagtgcagcactcttttgaaagctcatttatgtttatccaactactacttcctttagagttttctgtcatcacaaaactcactcaataatttacaagg

SEQ ID NO: 102905 - DNA, 198 bp, Glycine max
ggcacaaaaatacaatacgaaacaaaactgagcaaagagagagtttgtgaaaagttgaaccaaaaatcagaacaacaatggcgacacttaaggttctcagcttcttccccccggtgccagatgattttagcaactccgaaaaggccctctcaagttggggaactcacgaggagctgattgtatcgaatcttggctcat

SEQ ID NO: 102906 - DNA, 248 bp, Glycine max
cctaccatcttcataactgagtataaagactgcaatgatgcctgaatatttcttgcccttcctcttccccccaccctaagttttcttataacttcatattggcttgcaaaattaatattcactcctttcctttgggagcaacatctattccacaatacttcccaaaatctaatagtctactgccactttaatttgccactgtttctttgcaaatttttagaaatcatgctcttaatttccaacttgta

SEQ ID NO: 102907 - DNA, 276 bp, Glycine max
tctcgagccggctcgagcggctcgagcatattaagcaggctgcagcgctggttgtcaagcttgaaggaaattccctgttctcatctggaaatattgctggagctgcatcaaaatactctgaagcattggcattgtgtcctatgagatccaggaaggagagagttgttctatatagtaatcgtgctcaatgccatcttttgctgcaacaacctttggctgccataagtgatgctacccgtgcactatgtctccatagacctgtcaatcgtcatgcca

SEQ ID NO: 102908 - DNA, 248 bp, Glycine max
tattctgagtgttttgatgtagaggagtctgtggaatctgaagttgatgatcctgagcaagaagaggaaggggttaccaaatttgataactgtatagaagaggaggaagttaagattgtggctgcaaatgatgaagtgatggggctgaggaaagaattcaacagacttggtgaagagaacaaggatcataaagatcaaattaaggagaaatataacgtttatgatgaagttatggtgttgagggaaga

SEQ ID NO: 102909 - DNA, 224 bp, Glycine max
acggcagtggcaaactacgggtgcaagttatgcataccagaaaaaccattgactaattaatctccctcccaacaaatgcaagttgaactttctgaccacttacagtaacatgccaccaacagatagatacattgatccaaatccagatgcaaaagaccttgcagcaatgacttgtagacccatgataaccccaaagcaagaaaataggaaaagctcagatgata

SEQ ID NO: 102910 - DNA, 276 bp, Glycine max
tgagaagacgacagaaggttgggaaatgaaataactgcgtaacacacgcttctcagagcgatagattatttttcatttccccttttttcttcttttattttctttctgcttttccttttccttttctcttttattattatgctgctatttttcattcatgtgaacatgattgatgctgatagaagcacataacatagggaatcccagatcttcatagccattgttacctcttgcttcttatgattggatctagatggcaaaaccaagttcagctgt

SEQ ID NO: 102911 - DNA, 179 bp, Glycine max
ggaacgcccacttttagcattttgttctctgccactggagttatcttcttgtcttggatgagctttcagaaatcatagagttcctcaatttcttatatgctgtaggaatgcttcttgagtttgcagcttttatcactttgaggctgaagaagccaaatctttatacaccttacagagtt

SEQ ID NO: 102912 - DNA, 228 bp, Glycine max
aagacgacagaaggggattgaaataaatgaaagagtgtgaaaagttggtgggtcagcagtagttgaagataaggagttaaaggtgccacggagaaacaaatactactcatttagtgtgtgtgtgtgtgtgaactgaagagtactctttggaaaccaaagtataaagcaacagcagcagcagggaagcaatgaaaggtggtatctcgaatacaccgctacgggaacgac

SEQ ID NO: 102913 - DNA, 232 bp, Glycine max
tgcccaacttctaagaagtttctttctcttctgttcatctatcaaccaaaaagcaatattagtccaggtttcaagtcacaccaatctagagaaaaattgatggcacatgtgagttaaaacaccatgcaaaggaaagacttgcttaacaatttccactgattccaattttagaagcagattctccccaatttcccaatggactttctcaatcacaaatttaagggtttttact

SEQ ID NO: 102914 - DNA, 214 bp, Glycine max
tagactaaagtacctctctatcggttactcgaggatcactttgtccccaaaatgtatgacctacaaataatacaaaatatcaaccaaggaaaaaaatatacaagaaacaaattgaaaaaaaatggaaagcacagctactaactctgccgtttattttacagaacaaaacaatatagtatagacacacggaaaatagtctgcatggatagattta

SEQ ID NO: 102915 - DNA, 246 bp, Glycine max
acgacagaaggggggagcatcacaagcaaagcaaacccaaatccaaatggttccttccgacaaagctcgatccgagtgtgatctcatgtttcggctctaactatgtttgatttcgatacccaacaagagtgtcgtgttattaataggactaagagtagcgcaagtagacaacagtggaaaacatgaacatcagtggcggaggaggaactgtgatgggtttcagtagtaatgggaggtccccattca

SEQ ID NO: 102916 - DNA, 237 bp, Glycine max
tatatgtatagggacaacatgaaggatttaaaatgagtgcccgaatgcgattctaggcctaggacccaagcttttgatttcaattcaagaaagcatgaaaatgagggcattatgataagggtttccctttaggctagtggctgatttttggggctgcaccatgatgtttgcttagtttgtgtaaagatgttattcaccatgtacgtatatgtataggataggtagctagagaaagga

SEQ ID NO: 102917 - DNA, 238 bp, Glycine max
gggacatgatcataggatcatcatctgaatctgatagcaacacaaagcttcctttttctgttgggccttcttgagcactattctgtttggaaatattgtgatattttatgccgacagtattgcagaggagagattacacatggttttctcctcaccaaggcacttagcagcagctggtgcgtgcatcatcataatggagaaagtgtacaagatggatttttctctcacaggattcacg

SEQ ID NO: 102918 - DNA, 219 bp, Glycine max
acattcacacttatgtgattagtgtcaatgttgatgcttacagtccaaattaatgaacaatcataacaatgcttcttgagagagtaaaaaaagaatgtaaatgcaaggactatattgtattaatgagtttaatattttatattattaatcaattacaaatagttataatttttaagatgctggatgtacaaatcagttatcgtatcgacacatggtaag

SEQ ID NO: 102919 - DNA, 212 bp, Glycine max
accaaggaaaggagtgaccaagacttctgctcctcaatagaagttcctggaaatttgactgaagaaacaacgtctgcatctgcccaaacatcatgcacagggtccataaattttgatgaaagagcaagtgaacaaagttatgcagtcaaagagaatccaactgggcatccaggcagtgaaattggtgtagtaatgaaggaaatgaatgtggg

SEQ ID NO: 102920 - DNA, 233 bp, Glycine max
gaaagtgcgactatgctagatagctatatgaaattttttatatttacatttgtctacaaatgagctgtgcatgggtaaccattttttgagatcgatgattttgaacactgttactcattggcaagtacacccgtttgtccgagtaataaagtaaaacggaagtctgagtgtcgagtccacagagactttgtttgtattcggagttgtgtctatccaattttcaagcaattaat

SEQ ID NO: 102921 - DNA, 234 bp, Glycine max
tgcgccatcttaataccaacattgtggtgtcttacatctcttatcatgtagagcccaaatggtgtcatcccaatgcttgcatgaaagctattgttgtaggtgaattctacctatcataccctaatttcgtccggggacttttgcttgaaggcatacaacctttgattgaccgcttcaaggtacttggcaccttttgttgcataatatgtgaagtcccgagacgtgcggaaaatc

SEQ ID NO: 102922 - DNA, 251 bp, Glycine max
ataatgggaataaccaaataatacacataattcacaaataaaaacaaggaaaacaaaaataaaatgcaaaagccaaattgcatttatcgatacgcaacaagggttttcttatgttaaaataatcatcatatgcgcgttcatgttttgcgtttggattccatgagaaaaactttttttttctcctagaatagtcatccattctttgtttctcgttcacgtgtttattttttttatggctgttggttttgttt

SEQ ID NO: 102923 - DNA, 235 bp, Glycine max
ctccagggttatttttaaattgaattgtcaacaacttttctcaacttggagcatgaggccttctaaaggtcttagctatgagttagttagaattgaggatgttcctcctagatttggttcttatgaatgatgatgtaaggccgttggccaaaccattttcttgctaatattgcatcctttacctaagaaaaaaaaaaccgacaaaatttataattctaacagcgatgtctcaatt

SEQ ID NO: 102924 - DNA, 240 bp, Glycine max
ttccctaattctttttaattttttaaagtgttgataaaagatgattctttgttaattgctcgagaagtgcatctgcttaatttgctcaatggttcatcaacatttataaacgtagtaattgccaagaacaaacaactaaaatttatatgttttccaccattcgagttttctatctgtgactgatacatggaaattcttgattattgaattcaatgagattcaaggctacatccaaagcaa

SEQ ID NO: 102925 - DNA, 239 bp, Glycine max
ggcatcaattcaaaatatatcatcaattataagcatgggtttgtggaacacaacgaatgcagtgtcttgccgctttcacaagtttggtgatgaccaaaagaatctggtcttccaaggtgatgccacgtcttcttccaggggcatagaactcacaaagttagacggtggaggaaaaccagtgggtggcagtgtggggagagtgttatactcttctccagtgcacctttgggaaagctcta

SEQ ID NO: 102926 - DNA, 246 bp, Glycine max
cagcatggaggaaatgccttgcattggttccagtattggaagtaaaaggcaaagcggaagagttggtctgttttcaaggcagcgctgattaagtgctacggcgataccggaaggggagatgtttacgaatgtttgatagcgttgcgccaaatgggggactttgactgaattcattcaggaattcgaggtgccgatggctcaagtcttgggtacaaaggaagcgcaattgagaggatattttttggt

SEQ ID NO: 102927 - DNA, 256 bp, Glycine max
gcacagggtgcagcacactaaattgtgtgttattgctgcttcatttttatttctgtggataggtttggttggcaacttggcatgtagtagcatggaaagcttcatctagataattttattacctttatctaccttaaataaatgagctatctaggagttagggaagtgttatgaatatttggtttgtacgaaagcattacttactactgtgctagtgtagaaccactgaaccacctatttgtttttttcttggccg

SEQ ID NO: 102928 - DNA, 225 bp, Glycine max
cccctttttgtctacagttgaaataggtcgtgcctttatcagcacaatttgagatgtgccctggcttaccacacttgtaacaagtgatctaagttaagaaagtagtgggtttgctaccattaccaccagcaaactccatagcaatagtcctttgattgttggggtgattaccatattgcttacgaggggttgagtacggtttcccccgatgttgaggtctattat

SEQ ID NO: 102929 - DNA, 237 bp, Glycine max
ggcgagagacacgaagagaggtccttggatagtagtacgtggagtacgttttcaggttcagccctttgttttactgttaacgtctccaaaatttggtttacaaaagcaaaacgccataagaatcagaaaaggaaacaaagaccactggttttgagtctgttatctgctgctttacctgatttagcttacaaacacacacctcgagctctgtgttgatcgtttgcagatcacagtgac

SEQ ID NO: 102930 - DNA, 275 bp, Glycine max
tagagaaatttgagtttgctatagcgagaacataaaagtgtatggtttttgaaagaacatttttggagcaaaaatggaaatcaagaaagagaaggcattgatggtttaaattccatagcatttgacatatgtgattcattttctaatcattttctcaattcaatgcaaccaagtttcaactcaattgattaatcctaattccttaggtgattagtccttgattttgaagttaatttcataattccttaggtaactggacctagaactcaaaatat

SEQ ID NO: 102931 - DNA, 250 bp, Glycine max
ggtggcaatgactatggaaggtgaatggaaggtgtcgtatggaatttagagcatgattttagagaagtattaaagtgtatagtattcactttgacttgatctcactccccaaaatgggatacagacatagtaatagtatattatacactatgcatcttgcgtaggccaatttgctttgtaactttagtttctcccttgaacccatttaagtcctgcatatgtatgcgtatttttttatagttttagtgag

SEQ ID NO: 102932 - DNA, 193 bp, Glycine max
gctcatcgccctggggggcgtttcacacaagcctcgaggtgatcatggtcagcctttagctttcagagctcctcctcatgccgttgctccatctacgcaatgcggttttggagttgctggagagtattagtatttgtcatggttgctagaggaggattggagccttagaaaggggtctcatgtctgaggccat

SEQ ID NO: 102933 - DNA, 275 bp, Glycine max
acggacgacagaagggccatggtaacaagcaagccagctgtatcaatttaggaaagcactcaacatgcatccattcaaatgcatcccattcaacatgtcccctagcaaaagtggaaaccactcaagatcagtcacaattttggtactgcagtcaagcatagtttgtgtttctacatatgcatgccttcaatacaatgagtcaagcatagaaatctagtgggttctggacaccaaacctgacctgctacctattcatccattcactttcacctatt

SEQ ID NO: 102934 - DNA, 243 bp, Glycine max
gtatagggccccttttcaactcagcgtgtgtgcaaatagtgttggtgtttgtgtgcatcaaatggataaatatctatctcatgcataccttaaaaacacactacaagcatcatagagttatatacaagaaagtaagaggaataaaaggaaaaaggacaaaggagaagtcatggtaaggaatgcacactgattgattggcactaactctctaaaaacagtccccagtggagtcgccaattgtcg

SEQ ID NO: 102935 - DNA, 248 bp, Glycine max
ggacgcaccattgacaattcgcagtttgttacctcactttgttttttttctctgcagtaatagaaaaaaaagaaagaaagaagaagaagaagaagaagaagaagaagatgttgagggttgcagctagaaggctctcttctctctcctcctctccgtggcggcccaaccacgccgcttccgcttatgtctctcgaaacgcagtcgttgatgaccgcagatccgatccttcctcccatcccctttttccc

SEQ ID NO: 102936 - DNA, 246 bp, Glycine max
ggtgggaaaatgagtttgtgagaaagaaagggaaggaactttagaagggaaatttaattcccttcttgttgttcccctaccacggccaattgatctcgcggtgagggacaataataattaaaaatcacacgaagaagcaaaaatcttaagtcaatacaacgcatgcaacacatgcacgtgggtttttgccaacaacaaaggtgatcattgcagcaacaacaacaacagagactcaatattatcgta

SEQ ID NO: 102937 - DNA, 271 bp, Glycine max
gcataattaaattgcttgaaaggagaatagagaagaatctaatcttaaccactgttagtcattgttgttatttcaattatgatctaagtaatttattgtgttttgcgttctgtttgtgaattcttattatgctttttttttttaaaatcattcaatataatatgtctcttccacctaattatcagttcaaatagtgataatttggtattacttaatgatttagtacttggacccaatcctcgtccgcacaacacttaatgtatttctacta

SEQ ID NO: 102938 - DNA, 243 bp, Glycine max
gtagatacaaacataccttgatgtaactaaatgagaaataagtaactaaaattaaacaaacaggaatacctcaaaaacaaacacatatgtccccacatccacattcttcggcaaagcatccaagacatgaaatccactttcttggtcataccggagctcctatcatagaggtcaccagagataagaaagaatcccaggaaactaaatgattgcatctgagggggaaaatattctcaagcctca

SEQ ID NO: 102939 - DNA, 245 bp, Glycine max
tgctgtcacaatacaccttaactgttggggctatgttgtataatttcaaaaggttttttgcggaggatgcagttccttgtgtaacttgcaactaaaacaactctattgatgatattcagaatgaaatagttcattattttaaaaaaggagttatgcaactcccattagtgtttctctaacataccctagatctcacatatgattaacatgaagaggcaaaaagccatcaatggtagcatgcaata

SEQ ID NO: 102940 - DNA, 164 bp, Glycine max
tgttacaaacaccctaattgcggtataatactctagtaatgacggtgcagtctcagtatgattacagctttagattatcacgagacgagcgcggtgtacgattagctgttcacattcgtgctcaactacctgacgaccatcgtgaatcaaacttcgcaacaagg

SEQ ID NO: 102941 - DNA, 266 bp, Glycine max
cagcgctgagaggacgcgacaaaaggggaccacatgccaaatcacgaagacatacagggtactatcacaagagactcggtatacgatccaatgcgtcatcgcacgcttaacggttgcctgtgtcgctctcatgtgcactgagctgtgcacggagtgcacacaaggatggggcaagccgtgtcatgctatgatgtcactgagaacctagcaccgtgcctagctgacctgatgcagggtggagatggtccagatcgtgctgtagcgga

SEQ ID NO: 102942 - DNA, 253 bp, Glycine max
gggtttcctaggaaaaatcatgcccaggctcgtcaaatccatctctggtgacaggacacacgtgcttcgcttcgagaccccagagactatgagcagtcagatttcaattctcaattcattttattcatttatttatttactatatgtatatttaaattcgatgaaagatactcgtggtttagataatttttttaatctgattattaaatggatgatcaaaattaaactcttatattgcatacatatttgtgtg

SEQ ID NO: 102943 - DNA, 240 bp, Glycine max
cagatgctttaaaaggagttaaaacttcaaagttttacaaaatcatattttattaataaaaggtttggcatacaaaagtaagcatagatgggaagaccgaagcagaagatgtaaccaagctggggaaatactagataaattgtgacctgattcaattaagacagaaaacaagagcatcaattaattttaaatttttaatcaaacaagtttaaaagaacatgatgttcaggctagagatgg

SEQ ID NO: 102944 - DNA, 236 bp, Glycine max
gatacgctattgtactatcaattgcgaacttgtgaccatggctttcttcatcactacatcatagttagcactatagtaaaccttgggctttcattcatctatggctacccttattgctcccggccacgactctgcccaggaagttgctggagctctctgataggcggttgtaggatggggaactgatcagtgcactgccatagtagtttggggccagagagctgtgtatccgaggc

SEQ ID NO: 102945 - DNA, 201 bp, Glycine max
ggaagtgggaatgtctagagagaattcgctttctgctatgaaagatttctgtgaatgctcttcttactagtgagagcagaagatcgaggcatatttatgtaactgctgattgtgacatttgtgttgaggtggaggatattgatcatgtgtgtctttgcactttggccagagttgtctggtacatgctgcttccagctgatc

SEQ ID NO: 102946 - DNA, 250 bp, Glycine max
gtttcctcagtggaacaaacctcagaaaaaggattactagtgaaagtcattacatggaaggtgagaccagcatcattttgtgagcccaataaatttccattgatagtaaaaaatgtgtcaaaggatgggttgctatcatttccctcatcaaatttgttctagtgtttcataatttgatccaaagatatgacactgtagcaacagcttctctgttcatgattttacaaattaaatattgtttaaaagaaag

SEQ ID NO: 102947 - DNA, 233 bp, Glycine max
gaatacaacaagaggtcacatacacataccttcctctctctctttctgtctctctctgcattgcaccttcccttcttcttctccttcttgtctctgtcattcgtgagattctccacgtgtttttttctcttccattggattgtacagattcctagctacaacagccagatatcaatctctgtaaatctagttgatttgtggggtgttctgtgaatttttttaaaggactgtaa

SEQ ID NO: 102948 - DNA, 245 bp, Glycine max
ggggttctgagggaaccaactaggttaaggttttagtgagaagaagaagaagatagagcaggaacaccaaaaccaaaaccttgaaagctacttatcatgggcagcaccttggaatatcagactcaagaacaggcaccaaccaacctcaacactctctttcctcatgtttgggttcttctctatgtgtctctcgttttcctcactctggcaggagaggtttgggtgctgcgagagaccttgggagg

SEQ ID NO: 102949 - DNA, 240 bp, Glycine max
gtagcttgcacctatgtaataatagagttaggcgtagaaattaatagttgttaggacaaaggatgataaaagaccttgagtttttattcagacaaatcttttagcacacacatcatgtaaaatttcttgaacttattactcctccgaataacgagttcatgaaaatttggcaccttacagatatattttcattgaactttgtattcttagtagtgaattcatgaaaaaattgtttgtctc

SEQ ID NO: 102950 - DNA, 261 bp, Glycine max
ttattgaattattatttgtgaactcgtgttatcaactttaatacctcaattgttattttgaattttggagtataaatgaatattttttaatcacataatatttgttatatacttatatatatataattttgaattttttaatatatattaagtcaaacgaaatcaattattcatctacccgttaaattacttaaccccaatttactatctcaactagatcactgcccggagaccatgcttcataactttggacaatagtat

SEQ ID NO: 102951 - DNA, 232 bp, Glycine max
cggtgttatctcctttaacacattgcattgcacttgatcttgggagcaagagctaatcaaattgtgctcacagtcttcctttgtatttgaacccattccctttcacctataacagtcatttttcatcttctaaagctagatcacgaccttgctacactaaaagtctaaaccaacaacaatataatacaaaataacacaataccacttgagtcagttaggattatgaattgaa

SEQ ID NO: 102952 - DNA, 232 bp, Glycine max
gatcaattcataatatatcatcaattataagcatgggtttgtggaacacaacgaatgcagtgtcttgccgctttcacaagtttggtgatgaccaaaagaatctggtcttccaaggtgatgccacgtcttcttccaggggcatagaactcacaaagttagacggtggaggaaaaccagtgggtggcagtgtggggagagtgttatactcttctccagtgcacctttgggaaag

SEQ ID NO: 102953 - DNA, 239 bp, Glycine max
gaagggagttggcacaaggaggataagattcttgatgacaaatgtgttcaacaaagatggaaaaaaggtcaggaaagagggtcaccgactgatacttcacatttggttggattgaattgggaaattttggtggtaaatgagccagttcttaatgccttctgcttacctgatgggaagatagttgtgttcactggtttgtttgatcattttaaaagagatgcagaaatagcaactattat

SEQ ID NO: 102954 - DNA, 234 bp, Glycine max
tgacatgatacttaattggaatatttatatttgtacgtacaaaacaaggtgccatggactgtagttacatcatcattttctgtccgttgtttaactagttggaggatacacttgactgtttaagagactgctcattctagagacttggttcgtgctattaaccccatttctttgatggtgggttgcagctgtagcaaaggggtacttagcttgattgtccaaatggtcatcctc

SEQ ID NO: 102955 - DNA, 230 bp, Glycine max
gttgtaaggaaagattttacagagatcatttcaatctcctgtctgagctttgatgttcctggctgacgaaccacttcaattatttaattattttgaaggtggaggctatacaggcttgtggaggccagatgactgttgatggtaggcgatttcgaacagggggtggtgtattgtggagtatcattaaggttcgcgaaccaaatgcttacaaagagataataaagaaagca

SEQ ID NO: 102956 - DNA, 231 bp, Glycine max
atgactaatggtagagaggtcgtctagctctacgggacactgaaagttcagtatcaattttgaccctgaatagtcccagaagaatcaacttcaaaagttaaaaataattgtaataatcatatcaataatgcaaagaaaaaatgcaagagataaggagacatacagatagctaatcactagcaaccaccattaaacatcattgactactagaaaacaagaagagagatgccc

SEQ ID NO: 102957 - DNA, 229 bp, Glycine max
atatatctaaatagattaatatattctttattttttgcatagtatccaaagcagttttatcattaagatgaaaggtggaaacctcatccattttttgtggagacaccaataaataaagcaagccaaaagagaaaaaaacaacacagcttgtgataataacagtttttaccatcacatgctatagtagatttataaatcaagcataccaatcatccactgaaagaaagcc

SEQ ID NO: 102958 - DNA, 165 bp, Glycine max
atggcaatcactgcacctcacacaaataaaaaaaaaaggtcattcacttaccacaattcttgtgtggttgctctccagtcaataaaatcttgaccaagtcctcccttcggttcttcccaattgttgtaaaattaataaaaattactaatctaccagaaaaattaa

SEQ ID NO: 102959 - DNA, 272 bp, Glycine max
aggggagaaagagaagcaagaacttgaggaggagttggaagagtataggcagaaggtaatggaatatgaagcaaaagagaaactaagggtgctgagaagaatgaaagatggaagtgtgagaagtagagactcctcctcttcttgcagcaatatgaactacactgatgagctatccattgatcttaaccgcgaggcacaggacgaagataatgtcttattcaaccatgaggagagcagccacattaatgcaactgatgacacagtttctaata

SEQ ID NO: 102960 - DNA, 268 bp, Glycine max
tcatgatgtgttggaattaaattttgatatagaaagcttagacaccaacaccaacttggtggttgaaaaggtttcaatttcaagtaacaaggatgttgctattgctaaggagggtagcgaaagttcaaccaataacaaactggcttcagttgggcatgcaatgcaagagaggcattgctcattgaggttctcttcacataacacaaaattcttattttccaagcgtagcaggagccagagtttaactcttccattgtgaactagaagc

SEQ ID NO: 102961 - DNA, 257 bp, Glycine max
ggtgggaaaatgagtttgtgagaaagaaagggaaggatatttagaagggacatttaattcccttcttgttgtatccctaccacggccaattgatctcgcggtgagggacaataataattaaaaatcacacgaagaagcaaaaatcttaagtacattcaacgcataatacacatgcacgtgggttttagccaccaccaaggtgatcattgcagaacaacaacacagagactcaatattatcgtatgccatatgttcac

SEQ ID NO: 102962 - DNA, 261 bp, Glycine max
ctatacaatacagcagcaactatatgtctggtaacacagactgaagtacatataggactcaaaacaacttatcgaggactaactcttaaaatcttaagcttttacataatgacatttgaatggcttcattacatctctaacatgccctttcaaacataaccaccctctaatttgagcttgactcgtatttaccatgtaaagtacaacgttttatttagaaaaatgaacaaggatcaaactctacattacttgatcaagatt

SEQ ID NO: 102963 - DNA, 250 bp, Glycine max
gagtgtgaaataaccaaacaaaccataaaatggaaaaggtgaacagaaataatttgaagtaaacattgtattgttcttatttgtctcaccccatgctcaccatgctggccttgtcgcagaatgcagataatgcagctaccgtgtctaattagatttgaggcacgtaaactacgcttttcatgccaaatgctgttgcctaatgaagaatgagttgatgtttaacacttggcacatgtgaaactagtatcaa

SEQ ID NO: 102964 - DNA, 263 bp, Glycine max
gggtgattttctatgttcacatggtgatggcatctgtatacctgcatcttatgatctatcaaggaacagcaggacactttgcagaacctgtaggagtttactggggaaaagggcaattatagacactgttagaggtcctgaaattgggccaaggaatatgacatgtcaccaacgatgtgagtttagtcctaccaggactgagcgtgaggattatcttaattacaatttccaggtaagagcaacacaggatgagcgtttgtatc

SEQ ID NO: 102965 - DNA, 261 bp, Glycine max
tcccaattgaaatgtgtattaattagtaaaattttcagatccacggtggtctaattaataactttatacaaagaagctcatgttaggacatgagtacaatatccatttaattactggttcaatattgagtgagagtgaaaactaatgtaagtaatgcaatctgatttgatgatgcatttgccagcagttatttgatatttaaagaaacaaaagtaaaacatttaaagaaaagtatttatttcatcaaatatataaaactat

SEQ ID NO: 102966 - DNA, 254 bp, Glycine max
tatacagatattggttacttgcttgatgcaaaaacttgtgttgacaaagcccggttgatagagtatttctcttcaagatgttggcatattacaggtaaggaaaatgtctgtttaagtttttatggttgaactcgtgtctgcattgagtgttcatgctcatggtaaactaatatgcaattccctgtgcacaattgcagggatgttgcttgaagctccatcattatacaaagaggcatttgtttccttttcagtat

SEQ ID NO: 102967 - DNA, 256 bp, Glycine max
atgtattgaagatcttatacccgtggatattggaaggtatctaaaggccctgattgcctgaaatatgcagcttgcctgaaattgaaggctcagatatatcagagagtatcatatatgggtaataaggtttaaacaaatatgatatttttgaacaaattgtgttcactgaacttcttttgtttggatggatcgtaacttgtcagatggcatgacttttggttattgctggttcttgattgagatattggttaaatac

SEQ ID NO: 102968 - DNA, 235 bp, Glycine max
caccccttatgagtatgtgacttgatgctaattgtatctgcttgcagcttgctctaacatatattgaggcattgatgactggaaaattatccgctccaaaaggaggaattgtgcaatcatcatttgttggttcacttcggaagcaggtagaggagctcctaaattgttcccaggaattgaaggatgattttcataactatttgaaattgggaaaatggcctgatggagaatccca

SEQ ID NO: 102969 - DNA, 262 bp, Glycine max
aattcgagcggccgctttttttttcttgaattgctggaatcggtatctcacaatcccaattactattacgtaaaacatgcaaatacttggggatatggggtagagacggttaaccaactgaaatatcctctacaaggctctaaaaattattatcagttttaacttttaattcaaaaaatttgattttttttataacttgtactccttttatataattatttttctctattattttcatctcattattttttgttctttcctt

SEQ ID NO: 102970 - DNA, 232 bp, Glycine max
atatatattaattatattaattctattttataaaataaaatatttattttagattttcttaagattttgttttaatgagtcaactagtttgttacatttattgtgacaaccgtatgttgatttccaacggtcgtattttatttttgcataaatacaatctagtttgattctcctaaaaaaaattctcttcattttcctataaaaaacttattttttgagagcaagagagttg

SEQ ID NO: 102971 - DNA, 259 bp, Glycine max
gtcaacggaggcccaacaagtgggatatggttcgattgtttagcaactcggagaaccatttccaatggaactgcagcaattcgagtctcataaattaatcctggcctcagaattactcctccaaatggaaatctggtcagaagctctgtttccgcagctctctttcctatattacagccctgcagtaagtaattaactacaccatagtcagcagtagagatatagacaaatcttttaacaccttgatctgaagctgctc

SEQ ID NO: 102972 - DNA, 114 bp, Glycine max
acatgggtattatgctattactgattcgttgatcattgtattacgtattagggttgggggataattcataaagtaatcttacgtataaataatgtatacttgattaggactcaa

SEQ ID NO: 102973 - DNA, 178 bp, Glycine max
gctctgaataccataatggagttgagagaaaaggagagagaagagaaaactgagattgagaaatcttgtattatttagcccaactgagaaagttgttaaaagactttatatagacagttatgttaactgtcaactaactctaaacaacctgagttagttaacatacaaatagaaagag

SEQ ID NO: 102974 - DNA, 229 bp, Glycine max
aatctctccataccatccttgtcttgtttctataatataaaccacattgaaccatagtgtttctccaacttttctgattgttgttgtcacttcatggcctacttaatgctaagtggtgctgaaagtacaaagctcattagtggtagtggcatagctccacctgggtttggctcggttggtcttaactttcataagaggtgacttcttgaaagaggaatgtcgtgtcata

SEQ ID NO: 102975 - DNA, 206 bp, Glycine max
cacgggccactatgggaaccaagtgatcaaacactccatttcttcactcagttctttcagtttgaggctagttatgatagcttcactacttttcagtatgtgaccttctaaactctatttttctatatacgcttttcaaaacatgagtgttatgttagaagtcttaaatcagttttttgagttgaaaatattagtgcggtagaatg

SEQ ID NO: 102976 - DNA, 228 bp, Glycine max
cctctgtgcattcttgaactatgtcactagttgtgtgctcatgatcatggttcatctgtaatgaactttgtgcctttctcaatgcttccaattctgttgaaacctctttcattgttggtcttttcttcccattcagcctcaagcatctcattgcaagatttgcaatggcaagaatgtcatctttccttgcttccttaagcaaactggcatctaaaatttcaaaaactt

SEQ ID NO: 102977 - DNA, 231 bp, Glycine max
tgtctctttaaggtgggtagggaaaagaaaagtgtccatgtccaccctcattttcattttagaccacttcttacctcaattgctagctttagaaatttatttgtaacttaaccagggccactttgaacttgaaggaaaacaaagagggtcaggggatgaaaattattgtttatagtcaacgtttgtatcaccttaagtggtctcaacctaacacaattttagtctcatttt

SEQ ID NO: 102978 - DNA, 251 bp, Glycine max
cagaagacgacagaaggggtataagtgtaacaagctcaattttgcacaattcacataattttataactcattgcgtaacatcacttatctcaagaatttaatcataaaatcatatttcacacattcacattaatcacttgttcggaacaataaatttcaagtacaacatcttacactcacacaattcattactcaacattacatagcaagtcacaatgatcattacacaagcgttatgcaacatatacatt

SEQ ID NO: 102979 - DNA, 252 bp, Glycine max
ggagagcacttgtccatgaatagtaacgccataatttgtttcagaatccatctggtttgcgagtttgacagatatttacaacttatacattcataataattatctgcagatataatttattaaaaattacaaaacaaataaaaaagaattaattaattaaaagaagttttctaaataaatatgtttattcgatgcagtcaaaacaaatatatgttcatttgattaaatttttatttgaacaattaatagagt

SEQ ID NO: 102980 - DNA, 123 bp, Glycine max
gacacatcaaacacataagtttgattgtcctagctttgagcaacattcatggaagatctccattctgctttatcacaatctgtttcttgatggttttccttggaaatggttgtactcaaatgc

SEQ ID NO: 102981 - DNA, 103 bp, Glycine max
tgagggagaattaggtttttaaggtttacaccgagcagcgacacctccctcccgcagtagccatggttctcaaaactgaactatgccgattcaatagtgccaa

SEQ ID NO: 102982 - DNA, 132 bp, Glycine max
gaagacgacagaagggggcaaaaatccgatcagaagacaggttcaaaccggagcaaaaaaacttgttacgatggtttcttccgacaaggatccacgagaggaagtccttcaagcaaggtacatggatgatag

SEQ ID NO: 102983 - DNA, 110 bp, Glycine max
gatctctgtcatcatagtcatatgagaacactgaactactttaggagaacctggcaacagtgtaataacaccatgcgatgacttacggcattgaacccatgtctgctgca

SEQ ID NO: 102984 - DNA, 131 bp, Glycine max
acggaagacgacagaaggggggagcagaggacaagatgggtagtgtgagttatagcaatctgaagaacgccatgatagcattcttggtccctctaccctccatcctattctacctctcattccaatcggcc

SEQ ID NO: 102985 - DNA, 106 bp, Glycine max
atcgttaataaaatagtctacgtgtcacggatggatgaatttgttaatgaaatgattgtcaatgtgaccatctctaattgccaacataaggacatatttgtcatat

SEQ ID NO: 102986 - DNA, 104 bp, Glycine max
gagcccaattgaatcaacgaatcaatcatcatcacatcacgacgacgcatgattctggtcttgctctgttccaaaactgaatcccaatcacgaagaaaagaatc

SEQ ID NO: 102987 - DNA, 157 bp, Glycine max
ctcggaatctgctcgatctcgagcgctcgagccgctcgagtacggcgagaagacgacagcaaggggaacagaccatactctgaaaaatctttgctctgaaggttgcaaggagcttaaagttcccattatcaaagtatttgtataggagttagtaatc

SEQ ID NO: 102988 - DNA, 109 bp, Glycine max
caccaatattaagtgaaatatgccatcccaagattttgcgaacattttacggaagccccggatgccctcaattccattttttaacaaaatggaggtggttgcttcttga

SEQ ID NO: 102989 - DNA, 99 bp, Glycine max
tatctgtcgtgttcgatataacttaatttctgccaattttcttgacagactgtaataatttgtctgtgttagtccttgaagggaatgggactgctgatt

SEQ ID NO: 102990 - DNA, 102 bp, Glycine max
gatcatcacaaacctgtggaaggcaggcaaaggttgaagactgaagagactgctaagaggttgatgactgaagagactgccaagaggttgatgactgaagag

SEQ ID NO: 102991 - DNA, 100 bp, Glycine max
aatgaaggaaaatctgaacaccgtgaagccgaaaatgaaccagatgttcaattttggtcacaatctggagggctactacagcccaatagatcaggtggaa

SEQ ID NO: 102992 - DNA, 129 bp, Glycine max
gaagacgacagaaggggtgcgaggtttgtacagaggaattctgccggaatactacaaggttgttcccggcgtgggcattgtctttatgacttatgaaacattgaagatgcttctatcagccatttcaag

SEQ ID NO: 102993 - DNA, 238 bp, Glycine max
atatcttgacctttttcctctccaaacatttcatcagatcctttgctgcttcttctgtcctccttttcatgtgtgtctccttgtgtttcttcactttaccttttttctctcctttttgttgatacacaggtcctcctcttcctcttcttcatcttcatcatcttttttcttcacccctttcattattttctgtgtaccttctatggcggttttaccaagtagctcctcaaacttggaa

SEQ ID NO: 102994 - DNA, 237 bp, Glycine max
ttgtgacgcttttagtcattaatatctttatttactaacaatgttaagtgtgtattaacaaaatgatcattttgatcttcttttttaaacataaaagattaaaatggattttctaaaaaataaataatcaaattaagcttaatataagataagtgatcaaatagattatttggtctatatagattatagaatatacgtatatgtatcgacttctaaaataaatatgttaaaagtcat

SEQ ID NO: 102995 - DNA, 184 bp, Glycine max
ccgaaggcacactaaaaccaaaaaaaaaaaaaaaaaagggggccaccgactagggccctcgctccccggggatttattccgggcggggaccttgagggggaacaagtttcccctaaggggatccttttaaggctttggggaaatcagggcaaaagctttccccggggggaatttttttcccgcc

SEQ ID NO: 102996 - DNA, 243 bp, Glycine max
gctttgatttggacaattgataaactttcagacatatgaagttctttttagttccaatacacctcaacaccgaggtattacatatcttctcttctaggagttacaacaaacattggcataggcaaatatcaagggcgaacatctagtattgggataatgaaaaaaaatctatttacagtttcctcaaagatagggtttggaatgggattcaccatcagtcaacaaagttcatctccaaagtgg

SEQ ID NO: 102997 - DNA, 233 bp, Glycine max
tactgattatctaataggtgtttttccctatataaattgaattagatgatatgtgtcatagaatcccttactgatacttggtatttgatgggttcttttaaactgtgaatttcatttggaactgcttgtgagctccaccctgtatataactcttcaaaataatattccttttacgtgtggcaccctcacggaaccattgtgaattggtggttttaatttcaaaactccatgtt

SEQ ID NO: 102998 - DNA, 244 bp, Glycine max
gatggatgtgtaattgtgtaggtggcagaaaaaatgaacttcatagaacaactcaagttggaaaaggaaagacaacaaaaggtgcactatctttacctttctaaaacatatttccatgacaaatgacatgctctgagttaaacattaatgtcttgtacttctctcccttgtgtagttagaagaagaagaagaaatcaggaggttgaggaaggaactcattccaaaagctcaaccaatgccttat

SEQ ID NO: 102999 - DNA, 233 bp, Glycine max
ggatgtagaaaagtgaacggcagctgggaagctaaacgacggcgtggagtgatgatattggaggagatgttcttctgcagcagcagtagcagtagccagcagcttcaaccatttgaaaatccttcttccaatcagctccttctctctggccctccttcttctgggaagacttctcttcttttccaatttgcattcaatgtagcactgcagtccgactcaaataacaaagtcat

SEQ ID NO: 103000 - DNA, 221 bp, Glycine max
gggggctttgtacagttcagcctatcactctctcgaagcttcctaacgcctcctcttttcttcctaaacctaaaccctctcttcctcagtcttacactccctccgccgcacacttatctcgtactttctctattccttttaatttccccattcaatcctaaccataacctaggattcgttctatttggtgtttttttttaattgttctcttcttaattttg

SEQ ID NO: 103001 - DNA, 232 bp, Glycine max
ggaatatcgcttgactatttttgttcttgcgcactctcctttgttgactccttttctctctgtgtctacaaacctagcttctcttgctctcactctttgttaaagctccctccagtgccgcgtagttgaaactacctctcgccctcactctctgcaaagttaagatccctctctcccccttgaaccctctcgttgtgtttctctcaccatcgaaccttctctcgctctctgc

SEQ ID NO: 103002 - DNA, 254 bp, Glycine max
atagctagtaattataaatttggaaattaataattaggggtaatacttaaaaaatatagttacaaatatagatatactttttgctgaattaatatatatacttatttcgattgatatcatttattcagtttttttataaagggatttattcagttattcttaccaagacgtctcttactatttaaagaattttgtctttggtaagcgtacgatagtgcttcttcatatcaattatgttcttttgatgaaatttg

SEQ ID NO: 103003 - DNA, 273 bp, Glycine max
tactcgagccgaatcggctcgagagacgacagaagggggtgtcccatacttgaacttggtcagactaatggaatgattcatggaggcataactctttcatttgccaaactctacatcaatatcgtacagtgtagtttatatatgacaaactcataaacaagcaaaataatgaatgagtttattgtcaatattgatgaattcattgttacttttgtgtgtttattgagtgaaatgtgaccataagagattcagatgtacttggtcaaaattatc

SEQ ID NO: 103004 - DNA, 212 bp, Glycine max
gattggaattagaattgtaaaaaggaaaggggaaggaagcaaggcaaggaaggagagtggatcgattcctcagcagcaccagacatttataaaagctctttcccttccctcaaatcgctcatactcttccaatctttttttttgttttttttaactctttctccctggctcaatagtacaaaccaaaaaaggggatgaaaaaggttttcgcg

SEQ ID NO: 103005 - DNA, 242 bp, Glycine max
tactaatatataatcatttaactaattaatatatacatacttatcggtataatatcatattattctttgatagatatatagatccaattattttgtatatacagttaaatatgtcattttataacctttgacacttaatatcaactaatcttatgtcatagagagagataatataacataaaagcaaccaaaaatcatactattatcgtgaaaatgatttattttattttattcttaattaa

SEQ ID NO: 103006 - DNA, 231 bp, Glycine max
ggcatcaattcaaaatatatcatcaattataagcatgggtttgtggaacacaacgaatgcagtgtcttgccgctttcacaagtttggtgatgaccaaaagaatctggtcttccaaggtgatgccacgtcttcttccaggggcaaagaactcacaaagttagacggtggaggaaaaccagtgggtggcaatgtggggagagtgttatactcttctccagtgcacctttgggg

SEQ ID NO: 103007 - DNA, 183 bp, Glycine max
aacaaacactaaaaaaaaaaaaaaaacaggggccgcacattattaaactcgtgacccggggatttatttccggacgggaacctcgaggggtacactttttccctaaagggggtctttttaaaccttggtagaacaagggcaaaaccgtttcccggtggaaaatttttacccgccaaaatttcc

SEQ ID NO: 103008 - DNA, 240 bp, Glycine max
aggaaccatgctgacggttaattcctatccaagattcttcatctggatcatcaaatgaagaaagatcaacattcctagaccaacctgataatggaatcccatctttgtcaacaagccctaccccatctaacttttttatgccacaagaagtgtgggctagatgaggaacagccatgattctagattttgattttaagtaggtcaacagggtagaagtagtcttgactcttctccatagaa

SEQ ID NO: 103009 - DNA, 242 bp, Glycine max
  unsure (1)..(242): unsure at all n locations
gatcgatccaagcaatgaatacccaaagtgcttctctcctctgtctgtatctctctctcgctagccatccggctagttgcactgctggcagtgcaagtccatgaagcgcactgccaagccagcatgtatcaacattcatcagaagcctgcctccttcctttcanctctctggaattggttcgtccgcttaccaggcaggcagaacaaccagtgtatataggtgaggaccaagcatatgggtc

SEQ ID NO: 103010 - DNA, 219 bp, Glycine max
ggggtcccaaaaaaaaaagtgatcccaaccaaaaaagccgttcaaaacaacatcggaacctaagatccacagaaccttgttaagctcgagtccgaagttgtccaaaacctaatccccgtaataatcctcgtataatccgaaattctcggtctattttttttgtttggtttccggagattttgtggaagagggttctttgggtgtaggattgtgggtata

SEQ ID NO: 103011 - DNA, 229 bp, Glycine max
gggcctagggtatcacttatcattcattagtgtaactaaaaagccagaaagatagagaaaattaataaaatcgaagtgaactgctaatcattgagatctcatatcacttgtaattaattaagaaaaggaaaaaggaaaaaggaacgcaaacgaaaagacataaactaaactgaactatgagcattcgaattgtccaaacctttaccctttccagtttgataaatgatgt

SEQ ID NO: 103012 - DNA, 145 bp, Glycine max
gacctccaagagaatcaattgcggataacaatgataacaaaaggtctggtcagcaaacaatagtatagcagttgcagattagatttctcagcagtgtaagcaaattgagctttcaacaatgacaataccaaatctcacccatttc

SEQ ID NO: 103013 - DNA, 146 bp, Glycine max
tgccaatctggcagccacaaataaaggataacattatgcctccttcccacttgagatactttttagtgccattatagcttttacttaattttaatgtcttgcttctaattattataattaagtcttttcacggttttcttttactt

SEQ ID NO: 103014 - DNA, 258 bp, Glycine max
gcgcaacgcaacacaaaaaaccacactttcaattgcatttctctctctttctcacaatttccactttccggtaagatttttctctcgttttctcgggaaaaccgcgggatctgtgttctgcgtgacgcgattccacgatttccactaatttttcggtctgaaattgcgattttttgttcttcgtttttgttttgttagggttttcgattcgatattcgttgttccaatgagcgatcacttggtggtgttcgttgaccg

SEQ ID NO: 103015 - DNA, 265 bp, Glycine max
ctccacctccaccatcaccttctcctcctcctctacccccgccaatgtctcctccctcacccaatgaatctgttgcaggtttatgaacgcaatttgtataccttggtttaatttgtacgcaaatccagaaagaattgaagtagttattcatgtccctttactccacacgaaaaggaaggaatggcttatttatggctcctactcttgtaacttatgcggtcacaccatgtggaacatgagatgatcttgtctgtacaaagaggca

SEQ ID NO: 103016 - DNA, 264 bp, Glycine max
cggctcgagcttttcccttttttttttaatttcctttctactgaattcgtaaaaaaggaaaaaacaatgtagattttttcatgtttttggtttggtatgcttgttctgagttttgccgggttttcagtcagattcattttgattggtgaaattgttgctaataataagtgaaatttgttttttattttttttactataaatagaaaggttcattttttgaaaaaatatatgtagtaagtcgttttctttaatgtttgtgtatgg

SEQ ID NO: 103017 - DNA, 261 bp, Glycine max
ctcttctctagttttctccatcattactcacaatgcgctacctcacttgcaacgccgagtccgcaatagccacatgcgaccctcactccctcaagaagaagaaaaagcccaaaagcccagctcaggcccagcccgtgcgacacttcgcctactccgacatcctcgacgccaccaacaacttctctgccgacaccttcctaggtaaaggcagccacggcaccgtctacaaggccgccttccacggcggcgccctcgtcgccg

SEQ ID NO: 103018 - DNA, 113 bp, Glycine max
ctcgagccgattccttcttataataaaggagagactatgtatgatctggatcttgttcagacgcctgttagagcattttattgttcaggaacagactgaaagttcaagtccaa

SEQ ID NO: 103019 - DNA, 264 bp, Glycine max
aagcgatggtcattagctctgatgatgaacctgaagcagttaagggataaaacgtaagggaaaagtctgctgggaaaaatgcaaaggcattcagttcagtcctctctgctcgaagcaagctgggaaaaagatcatttctataacacaatctccacaggtcatgccattggggcaaatcctgcaattcctagaatgtttccaaatatgtttccactggttacaagtcagagaaagttggcaaacagaaggctgattgcagtcatg

SEQ ID NO: 103020 - DNA, 103 bp, Glycine max
tgcaggccggtcgcgtcctggcggtgtcactatggagacaaatagttctgaaactcaagcctccccagttactatgccaagggggacattcatctcctattgt

SEQ ID NO: 103021 - DNA, 268 bp, Glycine max
aaaaactcttgtacttggtttcatgccagattagggaactcttttagttgtcaattagatcacagagacatggaggttgctatggaactggaagatgatcttttttttgctgatttgagcaaggaaattgctctactaattatggatgaagatgaagatcctcttgcttcttgtcctcctgactctcttcaggtactttactactttaatctcttcaaagttcaaacacatgcacacacatactttttttttccttcttcttcttctt

SEQ ID NO: 103022 - DNA, 261 bp, Glycine max
agcaaaggtacctgcattccgagtaggtttgtagaaaatgaaattgagtcatctgtaagtgattttagtcaaatgaaagtcaatgtagatagcagtggcaacacacggaatcaggagccaaattttataaatattccaaaagtgagccaccctatcatagaaagatatccatctcgtgatcattcacgtgtgttcactgaataggttcaaatatttgttgagaaggcctttctatacaggtacagagtcagtagtagtagt

SEQ ID NO: 103023 - DNA, 271 bp, Glycine max
acaagcggcatagttatgctacgaaatccaacaagcaccgggatgttaagacccctggtggaatgttagtgcagtagactatgacagggattatcaactggcgaatctgtaactctactgggagaggaagatagaaattgaggtaccagtttacaaagaacctgcaggagaagattccaagatggcaactgatgaagctcctgctgatgctgctgctgctgctgcaactcctagcaccaatgacaatgatgttagcatgcgagatgctagt

SEQ ID NO: 103024 - DNA, 99 bp, Glycine max
tcgggtttaacattcttgttcgtgcctttgaaatggattggcatgaatgccatgcttgtttatgtcatggcagctgagggaatcttcgcaggattcatt

SEQ ID NO: 103025 - DNA, 182 bp, Glycine max
ccttgggatttcaatccctctcctacagtgtacgactagttggcgcatcagccccacatgtcatcactgttgttagattcaggttatgatctgtagatcaagacatcagtcacactcactcattttgtttcgcagcttatcgagctttctttctctggctcttagaaatgggcagaccaaac

SEQ ID NO: 103026 - DNA, 261 bp, Glycine max
tcacatgtctacgaatatacttatcatgagatacattattgccattgcgatatattatggatagcatgaatgttacattgcgggttgtgatcatgttcatggccgtggtgggtgtaccgatgatggtgcaagcattggcatgcaatgatgttacggtgaacatggtacagtgcctatcctacctgatgcaaggatgaacaccttcaacactttgctgtagtggagtcatgatgcttcttggctctgctgttaccgccgttg

SEQ ID NO: 103027 - DNA, 251 bp, Glycine max
ctctcgtatactacaatcaacttctgtacttaacttctatagaagttctatcatctaacttctccaaaagttgaggtggataaaattgagtgtagctaataagagaagctcaattcactttaccctattttttcacttataagtgtttatgaagaagtttatccaaacaggatattatctataatattttttggtaattcatacattgacatagttgttatgtgcttcatgtgaatacaatattgaaatac

SEQ ID NO: 103028 - DNA, 244 bp, Glycine max
ctgaggtgtctttcaatgtacaaggattgtggtgtgcccttattcgcaatgttggttttgtgttgaggaacatctactctaaaacccgtctacagaatttcaaggaagttcaagccatcaacttccttgaaattctgtagacttcttttagagtagatggcttgaacttgtatggatggattaccatactttcattgctttatctgtttccagtggctatctttgtagaagggtctcagtggat

SEQ ID NO: 103029 - DNA, 147 bp, Glycine max
cgaagaaagatcaaaagggcttaaagcttggaaggattctcagggactagcatcaaagctagctgatatgcaagtgattggcaatttatctcgtacagaatctggttccactaatgcagatgaaattctgattagtctgactggaga

SEQ ID NO: 103030 - DNA, 260 bp, Glycine max
cggatttattcctttggtcctttgtgatcagagtacatcaacattttctctcgtagatatgaggatcatacttttgcaaacgctgtcagattcaccttaaatcaagacccaagagtgtgtcattttgtggctacagcattcctcatccttcagataaccgtgttaataacatcaggcccaatcctcgctcgcaacgcccacgtcatcaatttccggtcaccgaacctctacccggaatccctaacgtgggacccacgcgc

SEQ ID NO: 103031 - DNA, 169 bp, Glycine max
cccaccaattcaagcgttttgggagtgggagatgggggattggagcacgagtagagcttttcgaattctagccattgatagaggccatgtttcatatgttgatactgatttcaaatctgggatcaaacgtgcaattatattgcccaattttccattagactctcgcttc

SEQ ID NO: 103032 - DNA, 257 bp, Glycine max
cttcttcagttttcaattcattttatcttatcttttatttcttcccacctactttccgtacacactttttctccattaaaaaaatgcagaaatgtacataggaaaccagacaattgttgcatatatgatatactcttctatcaatttcgattgtctttgtccaattgatgaatgacagctatggaattctattttatacattatgtttagcaaagaaacaagtcagggtagacttttatgaaataacaagcattaga

SEQ ID NO: 103033 - DNA, 204 bp, Glycine max
gctctcaagcagcatgggagtggtggaaatcagttgactaagtctggaggggggcttagtttgccgccggtgcctcctcagtgtggaaggccagcagtggatgtgaggaaagggaagaaagggtctagtcaacaggaagatgtgcattctcttaacctgttgtataatcgatatttgttctggagatttgcgaatgcaaaagcg

SEQ ID NO: 103034 - DNA, 273 bp, Glycine max
aaagtaattatcaacaaaattcttcattgtcattatttaaatattattttgttatgcctttgttttctttcataaatgaatatttttcttattaaatatgttaacgaaaataaggttaaaaacgagtgtaataaaaacaacaaatgggctggtgttgattgtaattaagtgtcatatagttttagtatgtggagaacaagaagcgtacagcaaaagcaatggagctgtcttgctgcagtgcatttgtggtgatattgttggcactcacagtca

SEQ ID NO: 103035 - DNA, 255 bp, Glycine max
gcaagcaacattagcagctgaagcaaaagctcactcccttgcgttaatggtggattgtcagatttaattcgattttggaaacaacttatcgatcccccaatccgctgtgaacagatcgagggcgtggcctgtttgatttgaactgaatttcggattgaaggatctcattttcttggagcattaactcagaaatttctagtgtagaataattgaatatgatattaagagtgagtcagtctacagcgctatggggtt

SEQ ID NO: 103036 - DNA, 275 bp, Glycine max
ggaaatgtcaacagtgcctgagcttcgaatcatatttcgtgggggtgctggcctagaacttaaggttcataactcccttgtggaaattgagaagggtactacttgtttggccattgctgctagctccaaccccatttccattattgggaattatcaacagcagacattcacagtggcttatgatgttgccaataccaagattggatttgcacctggcggctgccagtgatcacaaagctagccagccaaggattcaatttgttaaatattacttg

SEQ ID NO: 103037 - DNA, 119 bp, Glycine max
gttggcagtcgcagctacagcagtactctcaaatgggctggatctatctttcgtgcccagcgatttcctctttggcattgcttgtacctcttaccagtatgaaggatgttacaagagtg

SEQ ID NO: 103038 - DNA, 257 bp, Glycine max
gttcttgcctgtggtggattgatccctagctttggaaatgtagtaaagagagctctaagtttggacaagaggaaaagcacctgtggcctcatcatgggtattggatttgctactttatgtctaacattcactaggttggtttgtttacatacaccttactgcaattctgcaccagaagctgtcagataagagtctagtgctacctttgccacatgctctattgttactcttgtaacagtagtatacatttctgtaat

SEQ ID NO: 103039 - DNA, 261 bp, Glycine max
cttcttcttctttccaaatcctcaaatgggccgcaagaaaaacgaaccaaaacgcaccgtttgcagcatccctctgatcttcctctctgcgtttctcgtttcctgtggtttgatctacgccttggtagtgctaagagctccgctttcagagtcagagttgttgccactggtcgaagacagtaaagcgtgttgcagccgagtagaaaatttggagctttggggtgacgttgtgaagtggggttctgacttcaaactcaacac

SEQ ID NO: 103040 - DNA, 263 bp, Glycine max
ctgagatttgaattggttggtgcttcactcatgcattatgcaactaagtggctaccgggattgattagtgacacagcaacccctggtgatgaagcaagcaactgcagcatgagtaacagtagtagtagtggcggcggtagctggaaacgtggacttcatatggttgtgactggaacaacagatgacaacacttccagtcttcaagctaaagagcaaaggatgatcatagagagccttgtcagcattattccacctcagaagga

SEQ ID NO: 103041 - DNA, 255 bp, Glycine max
  unsure (1)..(255): unsure at all n locations
tttttctatggtcatattattanaacttaatgaggatttcctcaagtagaatccaaaatgaagatagtacaagcaatgacagcagcatgttgaaggattcagcagacatatcagtttcacacccacacaatttttcaaacacanttaatantanaaaaggcaacgtggataatgcatataccatactgctacctgaaacaaattcggaggaaaaagtttcattcccaagtaaaattaagcactacgttaggatga

SEQ ID NO: 103042 - DNA, 248 bp, Glycine max
cggctcgagtttgtaattttcatgcataaaagcaataggattgtgatgcagactaaaataaaagcaagccggatgtgcttgaagtacaaagagactacggaaaagaccaagaaagcttatccaattggttgatctagatcattgttggaggcaatgtggcttagtaatgctaggatcttgtcacaacctatatatttggcatttctttttgctgtttgtttctgtatacatagtgcaactgctgcaag

SEQ ID NO: 103043 - DNA, 254 bp, Glycine max
ttatggcagtagacattctaatgataggcatgccaattttaagtcagaagtgagatcctatgagctaagctttcacaagacacacaaggcgaagatactcaattcatatttgccatatgtgttggagagagccaaggatatcaagcaggagaacatggaagtgaagctccacacaattgaatatacctgctattggaatggaaatagtgtcaaatttagccaacccatgactttcaaaactctggcaattgatg

SEQ ID NO: 103044 - DNA, 170 bp, Glycine max
gtttagcagtttagcaaacttttgtttaatgcaaatcactagccactgactccatcatctacaactcatttcatgaaatgagttgtagatgatggattcagttgctagtgatttacattattgacattgtggaacttcgtttagcagtttagcaaacttttgtttaatgc

SEQ ID NO: 103045 - DNA, 231 bp, Glycine max
ctcagaattcaatgacaatagatgcacacgcctccaatataaattcagaacacatgaagggccgaaaaagttggaaaagtggaaaactcatggagcctattggcaactcttgtgagtcttctttttacaacgatgaacaagtggaagctgccgatcttcttctcgaggagtgctggttctttgataacttgttaaagataggctccaggatgacaaggtgtcactctgatc

SEQ ID NO: 103046 - DNA, 235 bp, Glycine max
ggcgtttcactgttgagattcaaaatggagtgagcaatggttgtggtgaagtgggtttgtggaatgatggtggtggtgccattgaggatgctgtgaaggctctgttggagggtctaggggaagatgtgaacagggcaggccttagaaagacaccacttcgtgtagccaaggcccttcatgaaggaaccagaggttacagacaaaaggtgaacgacattgttcaaggtgctttatt

SEQ ID NO: 103047 - DNA, 246 bp, Glycine max
cacaaaccatgaggtggttcattcacttcacattcgagaaccacacccttataatccctctctcttaaagtgtgtctaattgaatccttgttttcttcacctagctagttctctccacaaaaacataaaaacaggctttttcttagtggaagtcctcaaacaccatatagtagagcaatgaagggcagactgaaaggactcaatttattacccaaactcgatcgtcttcacagccacaagtagtaa

SEQ ID NO: 103048 - DNA, 150 bp, Glycine max
tggcagtgctagagagagaacgagaaggatcatcagtgaaagattctacttctcctctattctaaattctaatctaagctaacgatgatgatgaagaattagaattcattttgacacttgtaccctcccaatttcaatggccgatcactc

SEQ ID NO: 103049 - DNA, 194 bp, Glycine max
aggatagagttttatttttgggtgagtacgttatgatgttttaaattgtacaaaaaaaaaaaaaaaaaaaggggggtggaggaatagtgagttggtggaaaggggaattaattggggaggggaatttgaaggggtaaaagttttaggaaaagtgagtggaattagagtttggggaaataagggtaaaagttgtt

SEQ ID NO: 103050 - DNA, 277 bp, Glycine max
  unsure (1)..(277): unsure at all n locations
gaacaatcagcaccacccattccacacgacttgcgactcctgattgnagagaacnatnaggagntnngtgttttgnaatagacctantgtgnacctgnatggnaggagnactagtgtttgcaggacgtggttgtggttgcgggtttacgacgggaggaacatttcctgatggaggtggataagatgtcacagggttggttactggcggtggtgtcgctataggagtcgtagctggattgctcacaggtactggtgaattggctggatttgtgggggt

SEQ ID NO: 103051 - DNA, 283 bp, Glycine max
tgctaaccctagagatcagctagtcgaattgccttctaatgtacaagggttgccgacacttgaagcattaagcactgtcttgcatcgtgcagaacagttacttggtggtcaagctgttgctgcactatctcatattgcagggcgcttggaaagagaaggtacttctgctgatctgcacataaggggtcaaatacaatcagaatcagtgcaaataggacttgctatgcagcatttgggcgcacttctacttgaacttggccgaacaatgttgacactgcgtatg

SEQ ID NO: 103052 - DNA, 218 bp, Glycine max
  unsure (1)..(218): unsure at all n locations
ctcgagctcgagccgaatcggctcgaggtacatatgcaatacgtacgatttctggacnaacaatannacgaaggaaactgntaagatgtgtattgtactaattcttttcggttcataaatttgagtgtagaggttacttcccgtagatgaaaatcagatatcagtgtaatcaataagggttgacactagatatccatgtcatatcataagtttttgga

SEQ ID NO: 103053 - DNA, 278 bp, Glycine max
  unsure (1)..(278): unsure at all n locations
tttttgttcagttcaaataatgtggattccactatgcacactttcccntacttataggagccttagtttcaggcgtagtgcaatcagtgcctttttcaccagagggatattgaggaagttgaagattattgtggcaattgggctaattgtttgcatgattgtgggtttcttgagtcgggtgattctcttctcttataagattggtgttgaagggaaagatgcggtgatatcattgaaattgcatgtggaggcgaacaattatgctgagaggattggtg

SEQ ID NO: 103054 - DNA, 279 bp, Glycine max
gttagtgttcccaaaaacaaacatcccaggttcgttacacaacaacaaaaaaacatctcccgatggttttctttcattagttttcgcgatggagcggttgaagtgggcttcactgggggagaggctgaagatgggtggggcccagatggggtgaatggtgcccggaaaagtgaaggagatgcttcaggcgccgacgccggagtcgaagatggtggacgaggccacgctggagacaatggaagaacctaattggggcatgaatctcagaatctgcagcat

SEQ ID NO: 103055 - DNA, 287 bp, Glycine max
cttcctttatcatcaagtttagagaagttccaaatctttccatcctatatcatcaagtttagagaagtaacgatttggaacttcctaaaaggtttaataatctgcctacatatgctatttcaaagctgtaaagcatcatcattctcatattttcaagcccaaagtatggaacccacgtattgctccattcaattgattcttggatgtttcaatgtatggcagtttatgaattgctaccgttacaattgataagattttaaaactagtgaagtctaccgttgagaatc

SEQ ID NO: 103056 - DNA, 287 bp, Glycine max
atttgagttgcacagctctaccagtaccaacagttcaacaccatcaggctcctccaacctggctgttttgtcaaggttttaaattgcggtctgcaaacgcagtataatggttttggggatctctgctgctgcatcacaactgcaattgtggctgcatcaatcgcaatttaggtttttatcaaagttggaattctagttgattacttttcctgactctaatcagaaagatgggaagcacatttaatccacagattttggtggaaaaactagccaagctgaatgtttca

SEQ ID NO: 103057 - DNA, 246 bp, Glycine max
gagaaatgtgccttgcagcaatagagattgtttatatctacatgatcatggttctcacgaggatagctttaccaaagatgaactagttttagcatttgctaggagtaagtccaacaaatcattggtgctacaaataatttgcatcggcgttcagggaatgttttacctccaccagtagataatcctaaacatatgtcatcagccaccaaactagtgtcccaaagtcctttagataaatgtgagaac

SEQ ID NO: 103058 - DNA, 244 bp, Glycine max
cctcgagccgaatcggctcgaggggagacgcaaccccttccgtgaacaccgcgtcatcgtcgctggtgaattgattcacgggcagtgaagaatctgggtgaaaaagagcaagtatggcttgaaccttaggccgcctaagccaaagaagcagccgccaaggccttccctcgccaacccttttggctttaatgaagatgatgagaatgatgttgagagagaaattgctctccaggctagcaagaat

SEQ ID NO: 103059 - DNA, 243 bp, Glycine max
cggcacatttgtcaaagaagactttgcttttacatgtgccactcattttcaagcaacaaaagtgaaaacctgagttgattgtggggagggctctttggtgctgaaagttgatcgacaaaatatcatctttgtttgtgttacatcgtgataatttaaatctaggcaaagtcatttgagtatattctgtggaacaacataggtaaatgcataatatcaaatcaaggaggtttcttagtgttaatt

SEQ ID NO: 103060 - DNA, 280 bp, Glycine max
atcccattttgagctagcaattgcacccacccaccgagtactgaaattgctcaacaatttccaagtcaattccatagacgtagacaatgatgatgattccgccgacatactcttctctaccccactacttccaccaccacacgctgcccccaaatacgtctacattgcgggttcttgcagaggatttatactcttggaactcgtttcggacttaaattccattcatctcgtcgtatggaatccgtcgacgggtctcgtgaacgaattcaccatgttaatc

SEQ ID NO: 103061 - DNA, 283 bp, Glycine max
taccaattatcataagttgcaggatctgcagaatatagttacaaattgattttacaaatttgagaagtttcaacctaactatgcaggttttttttcacacatttaacaaatgcactgaaaattttacgccaatcttgcctggccccttaattcgagtcaacccgtatttccgaatctgtttatttgatcaataaggccttttttttttcatttacacctgaagtcctgagcccgacgataggtcttccttgtcttcacctccttgtttgccaagaagaaatag

SEQ ID NO: 103062 - DNA, 194 bp, Glycine max
agaaaatcggtagcaactcataactctgaacattgagcaatagatctctcttctctttctttcccgtttctctcttcaaaacactttcgcagtgttttcgatccatcgatctttgtcccattcttttcaacctccactcgtttcccttccctccctcgtgtagcggttctcttcaatttcagtcaccgccatat

SEQ ID NO: 103063 - DNA, 263 bp, Glycine max
  unsure (1)..(263): unsure at all n locations
cagtaatcaaacccttaccgcgttccccactctgccatcgctaanccttcccctcacagagttcgttaattctttcggtgccttatttgttctttgttgctgttattgtgttgtacaagtacaagttcaatttcaatgttgaagtttattagttgaataatagaacagtccatggctgaagaaatgacaatggtagaacctggaagaggtaagaggaaattttttaaaacgcaaggccataaaaagtcaagtactaaagcaaa

SEQ ID NO: 103064 - DNA, 196 bp, Glycine max
accggtcggagttgaggaatgtggtgcctcgggggtactatgagtcaccacagactataatggagcttagagcaattgcttgtgtggaggctcagttgggggagcctttgagggcagatggacctattcttggagtggagtttgatccgttgccgccggatgcatttggggcaccttagcagttacggaacagcag

SEQ ID NO: 103065 - DNA, 234 bp, Glycine max
attatgggacaagacaccacaagttgatgaagatcaaccaaattctgaaatagcagctctcacatcttggaatggtcgctgctgaagcaaggttgccagcagcaaagggacaagaaaaatctgctttagagaaagtagctattgtgcagaagcatacaaacaagaagacacaattgagtgagacagctgcaaaaattgagcataatgagaagtgtttaaagtttctgacaaaga

SEQ ID NO: 103066 - DNA, 240 bp, Glycine max
tgttaacatagcatgcagatgaactaaagacatgattacctgggaggaagcaagacgcggatgtgaaagattgaatgctgttctgcgagactcgtgtatcagctgtgatcttcaattggcaggtccagaatatgagtataatcagggtatctcttctctgtctcctgcattagctgaggagctatttcgatgtgagttatcagataacgaattcgtgctcaagctcttagccctgatatg

SEQ ID NO: 103067 - DNA, 205 bp, Glycine max
ctcgatgtgatcacgggcaatttaccgtactgaaaattttaagccttgtattatatattgaattttgaaagtatgtgttacggtattattatttatctccatagctttcattcattcaccatagaatcttgtagcctttcggctctaatctccaatgaatcacgttgaaagcaaccaatcattgcaaagctttctttcatttttt

SEQ ID NO: 103068 - DNA, 229 bp, Glycine max
cggctcgagcggctcgagctcgagccgaatcggctcgagatttacatttccttgagggcgttaaaagagaaagaccagagaaaggtgttgttctcagatccatccatcagtggtgggcgatgttgttgttctcagatccagactgagggggtgaaggatcatgaagtcgtcgaggcgtctgttgaggatcgggcttgtgtcggcgtggtactcgtcgaacattggggtg

SEQ ID NO: 103069 - DNA, 280 bp, Glycine max
tatttgccataatttggatcacgaaagaagggtatctgcacttcagaatttggcaagtttgtttgctccctggcccaagatttttctttgtgatacttggtcatctctgtagcttacctggatattgaaggagatcatgacaaagcaaatctcaagtaaaaaatttgatcgagcaccaagttttcggcagctatttccgcccaaaaatattgatgaaagcaacggatgtgacacatgttctgctcagttcatcaaccatcaatgtgatacaccagaaagc

SEQ ID NO: 103070 - DNA, 123 bp, Glycine max
gtggcattatgtatactagctgataagttaaacaaaagtggcaccattatttttgtctaaataccatgttctgtgatgctggatggctgcagttgatccgtcagtatatgtattaccttttga

SEQ ID NO: 103071 - DNA, 292 bp, Glycine max
cgccatggcaataaacagcaatgttcttgcagaaatagatatcccagaaacatatatagataatcttcccaagctgaaattctattgccaagtgattgaggattcctttaaatgtgaccccataaagcaaatgtcttggaatttttcatcaaatttcataagccttttatggaagccaattttagcagctgagtcttgtagaaaacgagatgatatagtttcaattaagagtggaagatcaagtgtaggggactcaatttaccactacatgcataccgcagacaagttctca

SEQ ID NO: 103072 - DNA, 294 bp, Glycine max
cgggcataatgtatactagctgataagctcaacaaaagtggcaccattatttttgtctaaataccatgctctgtgatgctggatggctgcagttgatccgtcagtatatgtattaccttttgattctcttttgccaactggtggatccttatttccccaggtaaatatagccttgtttattgtaaacgtctacaatgtcatatagtaagtatatttgacttgaaatggtcagatcagaactcagaatgcttctgtaatggggaaaactaaagccttggctggaaggaggggagg

SEQ ID NO: 103073 - DNA, 270 bp, Glycine max
cggctcgagcatttgcaagacagggttccctttcttgcaaatggctttccattcacctcaatctaccaatgaggaacaagaaaataccatggtggatgaggaggacagccaacgcttttccccatctacaacaattccagtgtcctcttgtcacggtttgtaggggaagaagcactagcacttgagtcactcaaagatgaagagatcataaacggtgtttcatccacagtctcattctttctacagcatcactctcagtggcaaaagggt

SEQ ID NO: 103074 - DNA, 236 bp, Glycine max
aaggtgaagaatcacgaggccagccgccggtgaagaatcgcgcgattcgtctggaaatcgcgattcaagctcgattcatctccgttatagagacccaaccacgattcaggaacaaaaacaagacaacttccgattcgtttcagtagcagctagaatcgtatcgaatcgtgcgacacgtatcgtgaaccggcaatttttgctgctgaaatttctgttgttttgattcatttccacac

SEQ ID NO: 103075 - DNA, 267 bp, Glycine max
atcaggatgtatttatttcgtatatttgctcatatttctccattggagaaacttccattaccatttctttttggagcccgaagttttattttgtaaaccaaaatcatctttgaatcctttgccatatcgagatatttgctgttaattacagatcatgggaacacattatttgtttcgtgttaggtgaactatgttttgggatttgagtgaaatcagttatataggaccatgttagtgattcagttctaaagtttgaatattgtaaaa

SEQ ID NO: 103076 - DNA, 247 bp, Glycine max
tgcacaaaatggtctggtgccattgacaaaaaccagaaagctggtcatgcttgtgtttacactgtggcacaatacaatgacccttttgaatatcagaatagggtgaatgacatattgttcttgtttgaaatggaaagtgaaaggcatctagtttgaaatttatgagaaaactatttacatcactttacatagcttgtaaagtttctgcaagaaaactgagcagatcatggtttgaagtattagagca

SEQ ID NO: 103077 - DNA, 268 bp, Glycine max
caagatgacaatagagtcatgataactgatggagtggtgcatatgatatcataaaatgtaagattgttttcacaatctctttacgaagattcagacaggtatgcaattttataaacggattattttattatcgttaatggatcagatgcttgtcttcataattcacttttaaacaagacttagttacatctcttaacataacttatgctttcaaaaaaaagttacacctcttaacaattgattcttgtagacatcaaatctgaaaaca

SEQ ID NO: 103078 - DNA, 219 bp, Glycine max
gtgacataaagactccttttttaatggaaaatcttataaatcaaaattaaaactaaactacatgaaaaatattctattataaatgaagcacaatctactaaagtattatactacaaagcagaattagacgaattctatcaatatccgaactttattctattgtatagaaaaaacaagaaaagaagtaggttcttttcttgatttgttccacaacgatcg

SEQ ID NO: 103079 - DNA, 259 bp, Glycine max
aattttgttcataacctgatttgcatatttttctctcctttttcttgtccttcaccatctccttttcctcctctactttttcttctctctctgctctgtgtttgtgtttatttggaagttgcaagaaggttgtgaatgacactagtgataaaggctgtagatggttttgtattgatctgagatcttagggcattggtttcttttttgtctattttgattctaacagctagcttaaaatcaaattttaaatgttaaaaat

SEQ ID NO: 103080 - DNA, 277 bp, Glycine max
tggattacaggatgatggtgctggcaaggatgaagatactgactccagaaacaaaaattctgtgcaggagttgaatggtctacctgaaggatctgatgttggtgaacttgaagataccaccaataaggagccagatccagcaatgaagtgcaatggaaagagaaagaaaggtgattatggaaatcaatcgcctgatgataaaatggaaaaaagaggtaaaaattacaaaacaacagaggaagaattgcatgaagaaaatgattcttcatcaagtcct

SEQ ID NO: 103081 - DNA, 224 bp, Glycine max
ttttggttgggggaggcccaagaaggtggatgtgacttctataggcccaaccggaggatttttcatttctgcaagtaggaatgaaagtggaggaattgagattactttggtgttatacaaacaagaaatggaatcattcatgactcattttgctgaaggacttgaatctctttgatcaatgttgttaaactttagtgtttcaaagggatggtaaaatttgaggg

SEQ ID NO: 103082 - DNA, 278 bp, Glycine max
ccctaatgggaggcttgatcagaaaaccatgtcagctcttaaattgaacaatggccacctgggtggtgaaggcctcaacctcggtgaagccaaaagagccaatgacattggtgccatgatgaatttggctggttttaatggtaataatggtgctaatgttggaagtgccactgttttggggggtaataataattccaatggtttgggaggttttcctgttcagtccaataataacatgattccagggtcttctgcatctttttcaaatggtggtggtc

SEQ ID NO: 103083 - DNA, 273 bp, Glycine max
ccgcaatccaaacggcgactcccacccatcccaattaccacgtacacccaaccttcgctttattttcttttctttgtcttttttattttatttttctttttattattataaataaacaaacaaatctcacccttgcatcgagtgttctattgacacaacacgatacacacacatgacacagcaacaacagcatagccattacacaaccaaatgacacccacaaaggaggagagaaagagagacgctactactactactactactactacttcc

SEQ ID NO: 103084 - DNA, 248 bp, Glycine max
cgtcggtacagtaaatttcgaaaaagacggggtagaactaaaaaattagagaggcactttatatgtagcttacttactggcctcctcacctctaaacataaagttgaaagcgagtgactgacaaccggcgctcatgaggacttcgtctctgccgacggagactgacgaggagtggcggaggcggaaagacatgcagacgctgcgtcggatggaagcgaaaagacgccggtcggagaagcagaggggat

SEQ ID NO: 103085 - DNA, 306 bp, Glycine max
  unsure (1)..(306): unsure at all n locations
ccaaaacaccttgttttgtgttgtgtctttctttcgttcttctctcaacaatggatttccacacaatataaaacatcaaacannaggccctctgnaagaagaacaagattcccgctaacatcaccaacgttgccatggctgacgctctcgctgctctcaaccaagttgaaggattggatgatttttttaatccaagtgagggtgatgttggaaccccaagtgttaatcaccgtacggttgtcagaacctcaactcaaaggaaagcagcgatagaagaagcagaaggtttgaaggtgaagacctcga

SEQ ID NO: 103086 - DNA, 313 bp, Glycine max
attacaccttggcttgtgttgttcaggtgtatttattgcactctcaaaccaaggaaaagtacgagagcttcttctcctttgattgtgtggacgttttgttttctctccattttctgggtttgaatgatacttgtaaaaaaagagggacctgagtgaaacaagtggtggggttctctcacaaacatggaagaggaaaatgttaagcagccattgttggagaggaagtaccacgagaactgccctggttgcaaagtggatcaagccaaagagttgagtgagggaaagggtgtacccgttacaaatcttttcatca

SEQ ID NO: 103087 - DNA, 302 bp, Glycine max
ctctcactctcctccctccctcccactctcaatgcggcgccttcaccgttagagttagtgttgctctcatcgaaaggctctcccagcaccacaagaccaattccattattccttcaactcgcgctgccgcgaatggtggcggtttcgagacagaaactgcggtggtggaaaagcctcaattgaagactctcttccaagcttccagaggctacccttccccctttggtgccactgttcgagacggtggggtcaatttcgccatttcctctctcaacgcactttccgccactctctgtttcttt

SEQ ID NO: 103088 - DNA, 298 bp, Glycine max
agacaatgaaggttctgagcaaagtttacaatgagaaaatggatactgggactaacctgtttgctcagtactacaagcaatggcttaaagttggagctagtgagcctccccttcctaatgtctctttgccatcaaggccaagttacagatcatcaagaaggtcttcagattcctttgtttcaaattcctcaatcaacccaaacttatacaagacagtgtttggctccaaactagagcagcaacctactggtcttggtgaccaaaatggagtgttggcaattactacaggcttagagat

SEQ ID NO: 103089 - DNA, 142 bp, Glycine max
atccctctgtctctgactcgctctctctctctctctagatcgcagcgcaccgcaccgatgggggaagaatgatccaggggtaagccaagcgcctcttacctccaaggtcttccattttcttcttaatgcctcttccatatcc

SEQ ID NO: 103090 - DNA, 141 bp, Glycine max
cctgagtgacgatggagaagaacaagagcgatgacatattgttggacgattgggaagacgcgttactggagcagttaatccaaaccgaagagcagtttgtcctcacttccaccgcaccaaaaacacataacaaccctactt

SEQ ID NO: 103091 - DNA, 122 bp, Glycine max
cgtcagattgcatttcttcttgttcaatcacttatttaattgcgcctcttcttgttgggaattctcatttgtctgaacactccttcgattctcctgctcaagctgcttcaatggttgctgac

SEQ ID NO: 103092 - DNA, 303 bp, Glycine max
ctgcccgatctcggctaagtacgtggcttgccatatgggatggtgcatgcatgattggacacaattcattatgcgacaataattgttttttttaagctctattagtaaattgtcaaaaaagaatattattttcccaaaaaaactattccattcagacatgttgatatgttgtatattcaattattatgagaacgataattttcacaagttgtgtggagttgattaagtattgtacttaaggtgtttttttgctggatagcatagaatcccagcctttggggaataaattttccttgtccttat

SEQ ID NO: 103093 - DNA, 295 bp, Glycine max
catacacttgagattcttgactctaaccatgatcttcagcaaaaatactttaagaggccagattctttgactaaaaggcatctagatgatctgcaagctgccccttcccaatcacattttggtcacgttgaaggtacaaaattatcaaacatagtgaactgtgaacacaatgacttcagccggaagccagataaggagatgaaatggttgaattacaatagatctaaccagaagcatgatgatggttattcttgtcattttgtcagaagacatgctattcacagttctccgaaat

SEQ ID NO: 103094 - DNA, 286 bp, Glycine max
ttccttgtttcctgctgggagtacaccaccactttcaccgcgcagttcatctggttccccacgtaccacaaaatagagaaattatacttcattaggatctccactaaaattagccagtgagcctgtaagggagagggaggtcattccacagttctacttcaataatggtcgtctacctccaagtgaaatgaaagagcatttcctatatcaaattgatagtcgattttatggtcatttggatggtctacaattacatgaatttaagtcttttacaaaagagctctga

SEQ ID NO: 103095 - DNA, 175 bp, Glycine max
ctttctgatacgagttaccttgtccttctaacatgcacactctggcaccacaaattcctgcaaacgttctgcgcagcacctggtgaaaatttggcatatcttgtttcattagatttattgttattatttttactaaagtgtttaaaagaatttccctaaacgttgtttttatttt

SEQ ID NO: 103096 - DNA, 172 bp, Glycine max
caaatatacgaatagggtgttccagtaacatttgaatgaggtctcaataatctcatccactgcctcgctcttgtgatcatacactgtaagaagctctccatcaggatgaaattggaaagagtctgctacaagtttgaaggcagaaacctcattggcaatgaaaacaagggtg

SEQ ID NO: 103097 - DNA, 100 bp, Glycine max
tcgatagatgtgatgatcctcaaaagacataacattccctcccctgtctccaatattgattagccttagccacaaaacaatgttttccccaagagacatg

SEQ ID NO: 103098 - DNA, 154 bp, Glycine max
cggctcgagggtccatgtcgttatcaggcatagagaacaagtgcaatgaagtacatggagatgatcagttatccgatgatggggtcttccagagtggggagaagaagaagaggttgaatttggaacaggtgaaggcccttgagaagagttttga

SEQ ID NO: 103099 - DNA, 158 bp, Glycine max
tttctttgtttggtgggtcagtagtttttttcggtgttcttataaatatttcatttttagagtgatgtgcttgtagttcttaataagcacggagactaagtggagggactgacgcctctgctacttttggcactggctttgcttttattgtggttgtt

SEQ ID NO: 103100 - DNA, 145 bp, Glycine max
gtcatctcctctactcgagctgaagcagggatgaggaactgaagcagaagcactacattcccagcttaagcagcaaatccaagaccaagagaagcttccattcgtgggcgtcaacatcggcaccgacgtctccaaccttccatct

SEQ ID NO: 103101 - DNA, 150 bp, Glycine max
ctttggtcaccttcagatacattcgtcgcattcatccatttaacttccacaaattcctacaaattctaaccaaacccttcactactccaaatcccacaacttctctcttttttttccctccttcttttccctttttctgttgtccgatct

SEQ ID NO: 103102 - DNA, 154 bp, Glycine max
gcagttttctctcggagacacattcattatcacgtgtgagttcatcataaacaccttgattgatatcttgccatcatttatggcttccttttggccattcttggcaatgttcctggccttaatggcatgcaattgttcctcattggcctctgct

SEQ ID NO: 103103 - DNA, 111 bp, Glycine max
gaattcgagatcgacttcttgttatgttgtcttgctctttccgatttaatctcgtcttatgactttcagatttacagtgtccatgtccatccctatgaccttttcctcact

SEQ ID NO: 103104 - DNA, 149 bp, Glycine max
ccgaacctcacgggatgcagtaaagtcggagaagccagtcaggtgagaggctgacataacatcccacttggcattctccatttatttggatctgtagctgaagcagcagcagaagcagaagcaggggatgaggcagtgaagtctacgct

SEQ ID NO: 103105 - DNA, 294 bp, Glycine max
tgccgaggtgacaacacgttttacgtaagacgtagaaatggggtcgtcgcctgtaggaatgaagactccaatccgaacaagccaaaggataatggaactaatcaaccgaccaggaatggaaaacacctgaaaccgaacaagaatgtcttgagtattaccaagagaaaatagcccatggccaaaataaacgactccttcctttccaagaagacctcgctgattggttaaacaccaccctcaacttggaccacataacggggaccaatttattggatatacttgacaatggagtta

SEQ ID NO: 103106 - DNA, 301 bp, Glycine max
cttacaaaagctcatctccgttttcgtcatcttccctcaaccctcgccgcaaaggccaaataatcccaaaaccaaaatccttaaatttcaacacaccacacattattaacggcatcccttcttccgctttgatcccactcctatgcccaaaagggttagcgctaacaacagagaaggaaaataaaattcgccccaagattgagttgaataaatagtggtttgtgagggttttctctcgggagtgattggaagtgcatcagaaggaacctgtgctgttgtgtaataagaacatttaatggaa

SEQ ID NO: 103107 - DNA, 293 bp, Glycine max
gccctctctctttctctttctgtcttccgatttcgcttaaaaatccgttttttaattcccgtgcattgctttttcttaaaataaatcctaacccagatgattaagtgctttggaatttgtttctaagaaccccttgttttgtgggtagcttcctactttgtggtggaattggagtaatcgatctggtgtatctgctatgaatcccagctttgtgattgtgtgaagaaagttttaatgggtgtttggaaactctcgattcttcttttttcttgttttgggcttttaaaaggctt

SEQ ID NO: 103108 - DNA, 289 bp, Glycine max
catagagttctaaatagacagcgccatttgttgatgattttgattcggggttaacctcttttgatgctccttgtttaacagtgatgtattgttagataccactctatttgtgatattaaaatggttctttaatattattgcccttttactagaacttgcatggtcatatacttagaatggatcagcattgtgatttaaatgcataagatgaattcagttggtagttcaagtaaaattaagactactactaaaggtatgcctttagttagattaaatgagccaacccaat

SEQ ID NO: 103109 - DNA, 290 bp, Glycine max
  unsure (1)..(290): unsure at all n locations
ctgttcctgtcgctgtgtgtcatttcgttttttccccacttccatccatctacgtntttcttcttcttcttctcccttcgattttcatttttcttttctttttttttctctttatttattactattattattcatcttcgtttctttgccttagcttccttcgatttttttctctcccgttttcgctgtgtcccctcttagatccctctctggatcacagtgagaaacagtgttgttgagtttgaataaattaatgcaggagtgttaatggatggtggatgtatggggaa

SEQ ID NO: 103110 - DNA, 296 bp, Glycine max
tctcgagccgaatcggctcgaggtgcccttatcaggttgcagcaacattggaaggttaaacggcaacgtcaggcagctatagttccagggaatgaaggcttcacctttgatctctttgataactcatatgaccaagcagctattattcgctcattgtcatgtccactgttcgagttaatcatgatgcagctggaaatctggcaataaatgtgtctccggatttatgccattctctccaatttggtttcgttggtgcacaatcagatgatacaaggaggaaatccaatcaaaacaaa

SEQ ID NO: 103111 - DNA, 282 bp, Glycine max
cacaattctcttcactccaaattccacactacatatcatatactcaacctcactagtaaccccttaaggccttctttcttcaaccacctaaaacaccactctcctttgcataacttccaaaatgtccctcttctacacttccaatttatctcactgaaccataaaaaaagcctctccttaaccttctcttcagagtcttctcctcacttcattaacctatttccagttaagcctaagaaacctcaccaccccattaagttcaccgcagaaaggttcaaactt

SEQ ID NO: 103112 - DNA, 200 bp, Glycine max
ctattactagcatattgtacacctcacgactcacaagacagactactcttcttaagaggaggagtctttcttgtgcctcgtcactattactagcatattgtaaaagtcttttcttcttcggcttttggttgtaattagaacattttcacttagttggattagtagctattgtgaaaaacttgtaacgtgaaattggagag

SEQ ID NO: 103113 - DNA, 254 bp, Glycine max
cggctcgagcaataaagagaaagaaaaagaaaaaaagacggctagaaacgcggcatggcgtcgtcgaaggttgtctcgacgaatccgcatctgccacgaaactcttcttcgtcgtcgtcttcttcatcaacttctcctatatctcccctttcttctcttctctccgatctgcacccaatggacgacattctcaagtccatcagccccaagtcggtcgacgacgtctggaatgacatcgttatcggcgccaccgt

SEQ ID NO: 103114 - DNA, 261 bp, Glycine max
agaacatgatgtttgatgtatccaacggtgacgattacttgacccaccaacccgtgggccccgatttcaaccagcttatctagaaggtgctagtgtaggacagctgcggtggagcctctggtaattttaatttgtagcggagttattatatacccattagagagttctgcttcgtttctctctttctttcttttttcattctaattctgttagggaatggttttgctccccgactcataattttttagtttatgtagactg

SEQ ID NO: 103115 - DNA, 262 bp, Glycine max
caataaccatttcgttatgctgcatgatctccttagagagctagcaatccgtcaaagcgaagaaaaaccatttgaacagagagaaagactgattattgacttaagtggagataatcgtcctgaatggtgggtaggacagaatcagcaaggaatcattggccgtactttttcattcatcctcggaacgtcgtatagacagaaacaactaagggttgctgctcgcatattatctatttcaactgatgaaacgtttacttcagat

SEQ ID NO: 103116 - DNA, 278 bp, Glycine max
ctgaaatttgctcggaagagcaagggcgatgcaggttccactggctggtctagcccgtctgtttttttctgaagtagaggatgatgctgaggaatttaaaaattctaataaaaggaatgctgacaatctactgagaaaggccgcactcaatgtgaaaagctatggacaaccaaaaaattcagtacatgaaggatatgaaagaaatttaggcagagatgatggcaagggttctcacaagatgcaagacgggcgtgatttaggtgctggttcaaccacaa

SEQ ID NO: 103117 - DNA, 171 bp, Glycine max
caaggagctattgtgattagaattgtaaagcacacggagtgagcaaaattttgtcaagtctcttgttcatcttgtcattattgattttaggtagtgcggtggtttgttcatgttaattggcagtgattaatggcattgaatcttatgattgtagagctttgtaatgtaatt

SEQ ID NO: 103118 - DNA, 168 bp, Glycine max
acttcattcacctatcagagacaaagcgctctctctccaaaaaaaaaaaaaactggataatttacaaaaatctcttgagatcctttgagccgaaaccttaatcataaaaccctagatttaagtttatttgtttccctcaatcgaatcgattttccccttcggaaaacc

SEQ ID NO: 103119 - DNA, 205 bp, Glycine max
  unsure (1)..(205): unsure at all n locations
ccagaatctctggtgggccttgtcagcttgacccatttggatctctctgagaacaacctaacacgtggggttacaaaggctctactaccatcttctctcaagaacctggtttcattggatgtttcacaaaacaagctttccggganannannaagtggcatatgcaagggacaaggccttattattaacctcagtctccacacaa

SEQ ID NO: 103120 - DNA, 257 bp, Glycine max
tgcaggtgctgaattggctggcgaagaggcgaatttgagcggagtgtagtaagttgatggggggtaggaggttggagggccagcacaagcatattgtgggttcctttggggcatcaatggttgagccttggttggctgctcatggaaatccttcaagattgggtctgtagctcatcagctcagttcttataacaaaacacaaaggctttgagatataggagttaaagtgatgatggcatgaagaatattcttctggt

SEQ ID NO: 103121 - DNA, 266 bp, Glycine max
ctgtggtgaaatcttcaatagaggttggggagacacctcaggtatcggcagaagctctgcgcatagagcccgcagatgtttttgctcttccatacgtcattccgtactgattgattatttaattgtaacacgatacttgaatctcaattatgtgtgcacaaggcaccctcctttgacactgtgcgggaagaacggcatcatgggccagaaaatgattccaaatttcttgatgcattcttttgttacttgcacactgacagcgagta

SEQ ID NO: 103122 - DNA, 264 bp, Glycine max
tattattttcgctactgatccatttgctctgttagagggtttgaagagggtaaaatctttttgtgaaaggcatgcaagaacgtgtttaaagacaactgaataaaattcacaaattaaggcggctactatgttgtattgaggacctaataggttctcaaatatccaattttgcgaattggatcgttttacaaataattgtgattctctgtatttttttcagttttattgttagcaagctagtttatcactagcttttaaggaagg

SEQ ID NO: 103123 - DNA, 106 bp, Glycine max
  unsure (1)..(106): unsure at all n locations
gcataattgagcgatcgatggcggcgttgataatgtcaccggcggtgatactggcgatcctgacgatctcggcctgnatcgcgtgtacggcgtcatacgggggatt

SEQ ID NO: 103124 - DNA, 284 bp, Glycine max
tgagtattatacggaggttttaaacagatctcttcgctgtcaacattgcagtaggcacttcattgcatatgatgtgaatatgcaaggcacaacaccagcaactaattcaagtcagcaagcttttggtgcgcagaaccatagtcagaatcagggtgcttttgacgttgctgctggatctcaaggtaatttgcatactagccggtccaatacagaatcacataataaaaaaggtcctgctgctgatgtctctgtaaagccaaatggacagagaaggagaaagcgag

SEQ ID NO: 103125 - DNA, 292 bp, Glycine max
atcttgtatggatattgtgataagtaattatcaactaagcaatgaccagtctccatacatgcctgcaatagaatttgaaagtgaagaatgcatcatcaatccagatctccattacatctccccacaaggactctctctggttgaagatcataactctgatattcatgacaatcaacccgatggtgacactgacactgctgtctcattacctaatgtggttactcataaagaccttgattgccttggtgtagagtttaaagatgataatattatcctcgatgactgcagtagt

SEQ ID NO: 103126 - DNA, 159 bp, Glycine max
cgtttttgataccatgaaaaaaacgtacttttccccggagaaatttatgtggaaaaaactagtttcgcctatcatgctgaagaaacactcagtagtaccgaaccctctacacaatgtgacagaaatttctccggggaaaagtacgtttttgataccatg

SEQ ID NO: 103127 - DNA, 219 bp, Glycine max
ctgatacacgaagttgatgggttgagttggattggatttctaatctaatctatacctatcttttttcctatgcttttaaggtacaaacccttctttcttgcctcttgtttcttcttcatattgttattccttgcgtttaccctttagggaatgaagaaggaacaactatactactattatccttattattgttattattgtaattaatctttttattat

SEQ ID NO: 103128 - DNA, 279 bp, Glycine max
ccggtgcacgtgactggtcgttcggagcaccgttactctttaagcactcgccttgttcctttgtgtctcaacccaatttcccaaggtcggcacagcagtcttcaacaatccatcgccttcttcatttcatcaccgcgcgcgcaattgcaattacatttccacccctcaaatttgccgttcagaagaaaccatcatcgcaccactgatccgtgcacctcacgtgccccatggctcctcgtcctcctcctcgtgctggtggtgctacctccgagcgggtgg

SEQ ID NO: 103129 - DNA, 159 bp, Glycine max
caaaaaccctcctcactcactcttatccatcaatctggctccgtcaaccatggcatccttcgctgcccccaacaacattggcagcgccgtgctaccctctcgccagagaaaaccctctcgaccccctcccctcaaatgctcccttctcccttcttccaa

SEQ ID NO: 103130 - DNA, 293 bp, Glycine max
cggctcgaggttgaatgattagatttgttgcattgcaagttttcaacttagcatctgcttcttactatcctctttctcgaggagtatttatagtgtagcagtgaaggggcaaaaacagcaatagatagtactgccctttgccactgcaattgaagaaatatggggtttgggatttaaagttgatgaccaagattttttatcttttagcgtctggaggattaaagatcacagagagattgaatggatgggagatgatagtggattgctgtgctgtaaatgaggacacttttttt

SEQ ID NO: 103131 - DNA, 273 bp, Glycine max
  unsure (1)..(273): unsure at all n locations
catttggatacaagagncatccctttccactgttgatttgctccgtcttcacccagtgttcgaagagaagtctgtgacccagctagcgtcccatttgctctgtcgtacgtgtttggtggccatcgtcatcactgagctctgtcgaaggtgtgtgtcgctatctccattcgtctactcaggccctgttcaaggtgtgtcgcgccgctgtcgtgtcgtacgaactggtaagtacccattcttgtactagttttgagtgtttgaaaatttgtatgt

SEQ ID NO: 103132 - DNA, 286 bp, Glycine max
ctcaacacagagaaaacaacccagctgcaataatctcccatctgaaaggaattccatgctccacaaaacacacaaaccgcgaaaagagagacccactagcccactaagcgatagaaattgagggtcacctcatcacacctccttagctactacacacaaacacaacaacatacatagtcaaaaaatatactgaaaaagaaatctagtggcagtactactacttactacttccactatagctgctagccaccagataggagcgcaagagtaaggttttttctttttt

SEQ ID NO: 103133 - DNA, 158 bp, Glycine max
  unsure (1)..(158): unsure at all n locations
agtttttgatactatgaaaaaaaagtactttttacaggagaaatttatgtggaaaaaactagtttcgtctatgatgctgaagaaaaattagtaatatagaannntntananaatataanagaaatttctctggggaaaagtatgtttttgataccatg

SEQ ID NO: 103134 - DNA, 184 bp, Glycine max
cgtttttgataccatgaaaaaaacgtacttttccccggagaaatttatgtggaaaaaactagtttcgcctatcatgctgaagaaaaaccagtaataccgaaccctctacacaatataacagaaatttctccggggaaaagtacgtttttgataccatgaaaaaaaaaaaaaaaaagggggcccc

SEQ ID NO: 103135 - DNA, 275 bp, Glycine max
gtaaattaagaagaaaaaaagaaaagaaaagaaaagaatggatttatttatgacttttttttaactataaaagttttcttactttttcctttttgattccttcaagtgccaatatcctgattacatctcctgtaagtccgctgcattatattcatttacatttgtgcatagggatcactttgtcaagttgcaatttgtatcatctgctgcatttgatgaagtgatgtttacttagatgaaacaatgacagcttaatcttttttgtacacccttgt

SEQ ID NO: 103136 - DNA, 272 bp, Glycine max
attggtagcaacgggcaagtctaataatctaaatcaagttaataatccaaaccttgctgctttgcttctgacgtctaacaaggaatttgacatttcttgggaggtttaaggaactcagaaagttcaagtgccatgagaggaggacatcgcaacgggggtgttaggggaattgcctccccggacaggggtgcgcacgataagacacgggcccataacaacctccttaatgacaataacaagtccgcagcctcgtcggatactgcgcacgatag

SEQ ID NO: 103137 - DNA, 255 bp, Glycine max
gcaattgctacattattattccctacataggcaatgagattacttgtgtctgttgtgtgtcaaggaaggcaaaatatggtgtacgtttctctattcccttactataacagatcttggggtggggggaatagagaaacgtacaccaagatctgttatagtaagggaatatgaagggggcctacaacatgaatacttcaaattcaaagatgtctgtcagatattaggtgttatactaggcatggctattcattgatt

SEQ ID NO: 103138 - DNA, 142 bp, Glycine max
aggaagcaaagccgagaacgatgtcgtttcggtcggagaacgtgaagcctaaccctagtcccactcctccattgaagaagcggtggtcagacatatggacgaaatcgaaacccctaaaccagatggtaatggcgatgaagct

SEQ ID NO: 103139 - DNA, 256 bp, Glycine max
aagatcaaagggaagtcactgagatgtcttctgcacttctaagaaaagatgccctttagattggatgtgataattatgatctgaattgttcaatgggagcatatcaaaatatgaatgtgaaatagtcttggaaaggtgttaggggtgcttttgaacagtgtactgaaagaaaataagatgaagtgtactcagctttgttcacctaacatcacttgataatagcgtgctgtagctgttcagctacttttttctttaa

SEQ ID NO: 103140 - DNA, 155 bp, Glycine max
attgcacccaccattgacaatgaccttttcattaggctcatcttggaggtggtgactggtacacaaactgcaacaaagactgtgagggctatcttcatagcactcttccttggtgattccagagtccttgtttctctgatgaatgacaagtttcc

SEQ ID NO: 103141 - DNA, 166 bp, Glycine max
catgtgagtccgtcgacattcattgcaatttgtgatcagcgaggatagaaagcaggtaggttctgttgaaggtgggttagtaatagtatcggtcgtgttgtcgatagatcggcatggcatcttcttcagcttctcctcgaccgagcgtcgtcgcggaacattcgag

SEQ ID NO: 103142 - DNA, 258 bp, Glycine max
gtcatgtgcctctctccttttcccccaaaatctgcttcagttcacgttcacgcttccctacctgcgcctattcattgtctcttctcttcccctgctcaacgtttttcttctcccttcccccacccacctccactcttttcatttctattctcttcccaaacagaacgaccatcggaacaaacggcattttgtcaaacagttacgagattgcaattgcaccaaggggacaaaacaaaacaatgagcagcgttttgcaag

SEQ ID NO: 103143 - DNA, 196 bp, Glycine max
tgcactggaggcagttgagaagtcctttgtctctcaaatccaagattggtcctcacataattcaatttgttggaaaacgcgactgcaaagagaccaaaaagtggatgaatatgtatggcaggatgtcaccttgttgaaggcaacactgctggagacaagagcaaagttgctagcaagacgggggcgtctagacagt

SEQ ID NO: 103144 - DNA, 271 bp, Glycine max
gcgcccaacccttcatcaattgcttctttctcactcactgaaacccaatccctactttgctgcatttgcattcccagattcatttttctgacaacacaatcttaattttcccacatttcgctaactcaattaccctttcattcctttcattcctctttccagattctatttaagttggaatagagaattagagctgggtggatggaggatgacaagaggaagaggaagaacaagaagaagaagaacaagcagaacaagaatgtggaaaatg

SEQ ID NO: 103145 - DNA, 134 bp, Glycine max
ctcgagccgctcgagccgcttaacacttcatcagcaaattcagaaacactgcagtgtatagcaggcataagccattgcagagagacatacatccccctctcagaccagttagttaagtaacggttttctccttt

SEQ ID NO: 103146 - DNA, 255 bp, Glycine max
tcggacaacctggcagtcaaacagccggtgtacagatttggggccatcctggttatcccatgtggcatcctacagaaagttggcactggaagccttatccgggggtgcatgtcgatgcttggggatgcccgttggtgtcacctcctcaagctccttgttttccctacaatcaaaatacacctggattgcacaatcctaaagcagttgactatagattcagcatgccacgaagttcctttgagcatcatccggcag

SEQ ID NO: 103147 - DNA, 261 bp, Glycine max
cgcacactcaccaacacatcatcgtgtcaaataccaacgaaagcaactactcacgcagtttcttcttcttcttcttctcctgcgcttcgtctcaatctcaagcgtcaattctccatcgccaatcctctctttctgctgatttcggactcgtcacttacctgtatcctctccttttccttgcttttcagctcaactattcgatactgtgtcgtttttaatttttattttctgtatctaatttatcgcgtcttccccttcttg

SEQ ID NO: 103148 - DNA, 253 bp, Glycine max
gttttcccaagtccccggcgccccctactcctccgcattcaacccccggtcacgtctccttcacgcgctctttcggtccatacttctcacgctcctcctctcaggttcaaccccgtccctccgaagtcctcgacctcctccgtctcgtcgaggacctccgcgagagagagtctcgcctcacaacagagcttctcgaacacaaactcctcaaggaaacactcgccattgttcccgttctcgagaacgagatttc

SEQ ID NO: 103149 - DNA, 257 bp, Glycine max
caatcttacaacttgtagaaccttaaagaaagtctgaaaacccgtgattgcaaaagcaacagccaaccactctactcatgcgtagattctgaaggcacgaaaaatgacaaaaacaagagacataaaaataaaactatgcaaatgaaaaagaagggagtggggggtggtgtggtgtggcaaagtgaggtggagggtcggtgaaagctaaaaccaaaccaaaccctttttttttcttctctttttttccattttaaaaa

SEQ ID NO: 103150 - DNA, 274 bp, Glycine max
gccggtttgatttaccctatgatgctgggaaagtgctagatgcatctatccttcattctgcagatgattatgaagaaggtgcatgggttgtattaacagagaaagcaggaatatgggcaataccagagaaagctgttatacttggaggagtggaacctcctgagagaagcttatctcgtaaaggcagtacaaatgaaagatctgcacaagaagagataagaaatcttacatttgcaggtaattttgctcctagaagggctagctctgaagcatg

SEQ ID NO: 103151 - DNA, 290 bp, Glycine max
aaaaaaaagtaggaggagacacaagacacagtggaacagcgaattttttattttttggtcaaagcggggtctttagcatgtttcgagggatgatgagcgtgaaggctcccatgggttggtgtctgtgtttcaaaccaaacaatattacaaataaggtgcgaacgccacaacaccctcgtagccgccaaggtatgcaccaacataacaactttccttcgcattagccctaccctagtagttacctttactccttcattcgccgcatctctctctccgtacctgatatacta

SEQ ID NO: 103152 - DNA, 293 bp, Glycine max
aacaaaacggaaacaacgcgcgcggacgttattctcggggtcttgtttgtttgggagagaagaagagaaggtgcatgaatgcgcgcgcgcgcaacgcaaatggctatgtcgcgaaagcaagcgacacgcgaggtgcgttgcggtgacccctagcatgagcaagtggtggcacatttacactcccaatcacgttcacatgtgatgataacgatgacgtggcatttctttgtccctctgatccacatttcaccggttgcggccccacgctaaccgccttctggctccgacagctc

SEQ ID NO: 103153 - DNA, 292 bp, Glycine max
tggaaccctggaaccttgaggttgatgctgtggtaaattcgacgaatgaggttttggatgaagcactcagcagcactggattgcatgctgcagctggacctggtcttgcagaagaatgtgcaactttgggtggatgtcgaacaggtatggctaaagtcaccaatgcctacgaccttcctgcaaggaaagttatccatactgttggcccaaagtatgcttcgaagtaccaaactgctgcagagaatgctttaagccattgctatcgttcttgcctagaacttttaattgatca

SEQ ID NO: 103154 - DNA, 288 bp, Glycine max
acataagattcaaagaccatgccgcttcattctggatttcattcctccttcccttgtttgctttgactttctccatcaaagtttgcaactttgcaagccactgaagacattgcaagagcttaagaagtttaaggatgccagggacccctttactgaagagttttatttgttgtctcaatcagtttacgcgcagaggcatcaatgttgcagaaattgcaaatcaggaagagaaagctcgataagaaattgaaatccctcaagacatggaagagagtgtcaaatgtcatt

SEQ ID NO: 103155 - DNA, 136 bp, Glycine max
aaattgttgtgtgaagtgaattgtgtagcgaaattaaggtcgtaaccgtagttgttgtatcagtatcaggggtttgggaaatacatctttccctccgcactcccactggccactcactctcaatctcaacacaccc

SEQ ID NO: 103156 - DNA, 283 bp, Glycine max
gacagtgggtgcacatgaagttaggaaatatggttctggataccggtatgggcagaggtttgagtctgtaaaggaaggttataattctagtgtagagtcttatagtcatgatgcaaatgtcgcagttactggaggcacggagaaagggactccagttgttgagaagagtgaagaacataaatcaggtggaaaggttgagaaagtgggggataagggtttagcatctgttgaagagaagatagatgctataacaaatcatcaaagtgaaggcagcttgaagagt

SEQ ID NO: 103157 - DNA, 273 bp, Glycine max
tcgagctcgagccggctcgagcggctcgagctactcgaacatttcgaacaataatcaaaaccacaatctagcccgcaactccaacgtgccctagctgaaaccccctgtagttaacactctacctcgcgtcgtcaagcactctctccttgaaacctctccgtgaagcagtggagctcaaacccctctctccttgaaacctcgccgtgaagcagtggagctcgcgtcgtgaagactgtctccctcatactgacctcgcgtcgtttgcccgtggaa

SEQ ID NO: 103158 - DNA, 282 bp, Glycine max
cgctttctggtatctcctattattgggatgactatcaatcagattacaccagcagagacaaaactactaggaaatgtttgatttacaagaatatctttgacttgcaaagctcaggagtacttttcaacacactccaataatcactaagcttctcttcctctccctctccctcatcaacatcactatcctcttcatcatcattttctcaaatgtcaacagctttggccatagcttcatcgatctccgtcaactcaatttgttcagtcttttccttagccataa

SEQ ID NO: 103159 - DNA, 277 bp, Glycine max
agcatatatgcttcagggtttggaacaaacggcaacacactttccccaaataattcaaccactgatgcatatatgtttttgtagcactagttgcactgtaggtatttgtttttgcatgtgaaagtgcatgcaataaggtggcctgttcatgtgacttgctgcagaatataaattaccataggctaaaatagaaattaatctgtatttaaatttctctgatatttaaactcatgggaataccagtaacacttctgggattttgtctttagatgattta

SEQ ID NO: 103160 - DNA, 278 bp, Glycine max
ggttaactcagaattcttcaaagatatgttctcttgaggaagagctaaaccagacaaaactaaaactgctagtggcaaaggatgccgatttggataacccttcggatattacaagagagctccagcggctgagttctgaggccgaacattcaagaaaatgggagaagctgctaaatcagaagtcatgaaagcaatatctgagattgaacaaacaaaagctatgataaaaactgctgaaatcaggttggttgctgcccgaaaaatgaaggaagctgcca

SEQ ID NO: 103161 - DNA, 276 bp, Glycine max
tgctcacttagcaacctccataatgcagtggagagaaggtgattccaataaattactacaattctgcaatgaaacgattatgcccttccctgtcctcaatgcaaaatctgctaaagttgatattgacactgtccttaacgatctcagttcgtggcgataaactctaggacattcgggggaagctttggcagactctcaagcatcctacaattctttaatgacagagtgttcagtctcttgagatgcttgatggtagttggcagtgtcttcacacgg

SEQ ID NO: 103162 - DNA, 111 bp, Glycine max
ggaacagctctcttcctcggttaagggaatcgaaagcttggcaacaagcaatgaacgcatcggtttcctgagtggctcctttgcagagaattatctgacagaggagctcaa

SEQ ID NO: 103163 - DNA, 270 bp, Glycine max
atttgaagaaaaatatacatttatgattaaaaaaaaccttaggacatgcttctgtgccaatttgaacttggggcactgcaagctagagttagtgttactgctattttagcataatattttattcaacttttgcatgaactaatgtacctagataggaaactagagaaggctgtttatgcttttgaactgtctatgtattctaaaatgccatcacttcccagttaaggggtcgaacttttacctcaaaaaatgtatgagtagtattttact

SEQ ID NO: 103164 - DNA, 288 bp, Glycine max
tggaattgcaaaagaagaacaagtcaaagaaaggaaaaagtcataactgattatgccacttcataagtaagctccacacttggaaggactttggctgtttagagaacttgggccatttgtctggaaattgaattcgaagctatctttcatgtaggagtgagtgagtgattctccaaggagttgtgcgttgaccatttggggcttgtggcataaggaaaagacacattgtgattcttgcaataattgctggagttttcaactttgcaccaaagaatttgttgattgtgt

SEQ ID NO: 103165 - DNA, 200 bp, Glycine max
cttaaattaatggctcctggtatttttgagtttgtttgcttcaacttccctgcttctaacttccctctattttcctgggaaagctttggagtgggtggtagggggtaaaagaaattaagagaaggtagtttaggatagtaaagtgaagtaaggttataataatataatgtaagtcgggggtgttgcataatgtaagtgtt

SEQ ID NO: 103166 - DNA, 282 bp, Glycine max
gtcaggttcagatgtattgcacttgagttgggaaaggagtggaaactgggaaattgcacaagatgtccttgccaattcaaatgtcacagaaagcagaaactatgtgacttcaaaggaaatgcgccaatgaggggtgtggttttgtctcttacgatattttaatggcttcaaccatatatgatgtgggattatttggatactaaagatggaataggatatgggagctgaattggtttgaacttttggtataaaaacttagcctacttttttgtggtagcccta

SEQ ID NO: 103167 - DNA, 270 bp, Glycine max
cggctcgaggggaaaggcttcctgcactgagcaccaagttgaaacctcttgattctttgcttagacttccacagaatatggagaccgttcttttcaatgactccccacctttggagttcaaggtgcgtagaaatagagccaactgtatggttaatcatcactaccataatcttaataatgggaattgaaatgcaattactgtatctctctctctgcctgtttatgtaattttgtggagtatgtaccccttatttgatctgatatcatgtt

SEQ ID NO: 103168 - DNA, 265 bp, Glycine max
ctcctaagctcctcgcatattatctctctctctctaaaatcacaaattacaaaattccttccattttctctctaaaaccgtcatgacctccattgcgcctcttgtcctccctatctccaacccccaaaccaccgcgggaacctccagtgcaggcggcggtgccatcgaggttccaacgaacaacctggccttcggcgatcatcaccctccgcggttctctcttggatcctcttcggggccccaacaatgccgtcgccaagtgacg

SEQ ID NO: 103169 - DNA, 263 bp, Glycine max
tagtcctttaaccaaaaagtcccacagcagcacaagaagaagaaagaagggcaaaaaaaatgcaaaaggtagagcagtaaatagcagcaaatcaaagatttataagaaaggagactccctggcattaaagtggttccattctttgaaagaagcaatttatgatttatgccgtgcatttagacagccaatgatttggagacctatgtcttggtttttccttgcccacgttacgattccgaatctttcaaccgtcatcttctact

SEQ ID NO: 103170 - DNA, 232 bp, Glycine max
cacagtaagatgatgtttttcgtggtaagaccctgtggttcttcttctgcacgtattcaccatcatcatcctacaccgccgcgtagtagcagaaacgtcgtcgttagatgctcggtgagcagcagcgtgcaggagaaagaagacaagggcaccgaactggattgttcggtgtctttccctcccatcagggcggcgaagagggtggttctggttaggcacgggcagagcacgt

SEQ ID NO: 103171 - DNA, 246 bp, Glycine max
gtgtctccactcccttccctgctattcgcacgcgccataaaagtagcgccactcactgcttatacgttcgttcaactcgaatcttgatccacacttccttccttccttccttcggattctaaactcaactcgaacacactcaaatgccagacaccaaacagaaccaaattctctggtctcttctttctcaacatttcaatgctcaattaatccctcaaatctttcttccttttttctctgtctaac

SEQ ID NO: 103172 - DNA, 206 bp, Glycine max
gggttatacatgaaggtacaattgaaatgaatggttacattctcactggcattcatgctttgtgctataggccaaatgcccctttcaaagaactgaaatccagaccatttggtcccgattatactgtgccttcctcaactgattattctgcagttcttggtcatatcacagtcaagacttctaactacaagccagattttccagtt

SEQ ID NO: 103173 - DNA, 260 bp, Glycine max
tcgagcggctcgagagtgaatattactattactaacactattcttcagccacacgctctctatccatctattataaaatctaccctcatcttaccttctcttctacatttgcagcaacaacacatttaatcatcttcgttcttcataatagtaataatgcacaagagcgcttcaggttccacgttgggcccgggccgcctggacctaacccaggccttcttcaggcccataaccaacgcggctcttccctctccgaccaa

SEQ ID NO: 103174 - DNA, 270 bp, Glycine max
tctcgagccggtcataagtgcgtcctttcgagagcttctctttataagtataaagtttttttcagaagagaagctctccaaaacccttctaactttgtatccaaactggctcaaatagaagtcttggtttgttacttctttttgtgttatgtcttgttgttcaaatttgggttctactaggtagtattttcatccacactttttggcattgtttgggtttgaggagaattttactctgaccttaagcatgtttaggagttttggtttgaa

SEQ ID NO: 103175 - DNA, 118 bp, Glycine max
gagaggttcttccttcacctctgatggctattcaggtgttttgtggagtgtctggatactgattgagcttcagggattctattacttgtagtttgattccccttgaaacccatttctc

SEQ ID NO: 103176 - DNA, 271 bp, Glycine max
ctactgcctttgtaaatcagacaaattttttgttagtgattagacagaaagcaaaatgaaaatgaaaattcatttggagactctcttccctctttttgcattaaattctggtctgtgcaaatttcgaaacataggggaaaattcaatacatgaattcctcaagtaacgagaaatttgagtgtgcagtaacgtaacagattcaactcttgtttttgttaaatgttaaattgctaatgcttgagagcctttctgtaatgtgaatgtaattatg

SEQ ID NO: 103177 - DNA, 271 bp, Glycine max
tgggaacagaacaatcaaaggatacttgtctttatgtggaaaaggatgatatgttttctcttgatcttcaagcttctgagagcaagaaatatttgtttgttgcatcagagagtaaaaatacaaggttcaatttttatctggatgtttctaagcctgaagagggccttaaagttctgacaccacgtgttgatggtattgacacaactgtcagccatcgtggagatcatttctttattaagaggagaagtgatcagtttttcaattcagaggt

SEQ ID NO: 103178 - DNA, 279 bp, Glycine max
gagaatagcaacaaaacacctaaaaaactgcatctaagttttgtccttcttgaaatccaatttactgtccaacttggtgctctagatatatatatatatatatatacacacacagacacgcacttcgttatcgttctgtctgcaattattttccaggaccaatagctttttcaaaaagtagatcaagatacactaatatttaattcaaccttggcataaactttcgagattttctatcaatctgttgtagagatgcgttctttaatttaattccttttg

SEQ ID NO: 103179 - DNA, 266 bp, Glycine max
ctgcaatcctaggcgcaaaatgacgactggagatgaaattaagcctagtgaggtcgaggctcagactcaagtcgagaaggaggtacatcctcacgaagggaaggaggatgagcctactaaggccactatacgtacccagacatgggcgaactagaaaattctgatctcgtgctattcccgagaccttgcaagtatcgcatcccacgtttcaaaggtgaaaacgaggcagttgagaagttggctcaactagacatatttaaaaatgc

SEQ ID NO: 103180 - DNA, 264 bp, Glycine max
cgaagacattattcccattgatgctgtggcatacagcacgtcgcggtcatataattttcaatacgggcgggtttagatgagaatatgtataataatcaatcaagctattaacaccttcacactacggaattgtggcgttgctgagcattggaggattagttgctgtccagttattgtcctcgcaattatttcacctcatgctttgctctcttggccgttgtatattgtagtggggctgtgtctttgtaacaggaattatgtaga

SEQ ID NO: 103181 - DNA, 256 bp, Glycine max
cataatgttgaagacgaagaagaagattccttgagtgtcagtcaggatagtgacaagccccgtaaattcaagcgactggcaggccgtactaggagggaaactaaagtcaggtctgtgggtgagattcaatcaggtctaagacgtagtaagagggcaaaaactaaaagccgtataaataccgaagtacgagatatctgattcagagacagagttcattaaatctgacaagtccaatgcatcagacgatcagtcagat

SEQ ID NO: 103182 - DNA, 268 bp, Glycine max
gctattactaatggagcccttcatgtctcaccaaaacggtggaactgcagtgcttcttcttgttgcttccgtttcagggcatgcagatgcaggtggaaacgaattgtccgaagctgctccaccagtgagtttgttatttccaatgatgaaaactatagcaacaagcaagttgttagtctcactccccgcctttatgactatgtcctaaaaaatgttcgagaaccagtgattctaaggcaattgcgacaggagaccgcctctatgcgtg

SEQ ID NO: 103183 - DNA, 264 bp, Glycine max
ctgccgaaggatattcagcttgcgcggagaattagaggcgagagggcttgaggattttttacatgatttgtcactgctaggatacgttaaaactggatctggtttatgtagtttgtggttttggtgtatttattcgaccgtaagggttgtggttgttagtatgaagatgtagagttaacattatctggctaattagttggttaatgtttactctgaatttgctgtttgtgtgaatgaattaaaagggttgattgcactggattt

SEQ ID NO: 103184 - DNA, 266 bp, Glycine max
gtttggggtcctgtggctgcagatatggaaccttaagttcggccgtcgaatctttctggtgattggttgttttgaattctttcaaaaattgaaagagaaggaaaatctcttgggaaataaatgaaatgactgcttctcctaggaggagattttgggttcttctgacgcaattattgattttccgcaacttggtcttgttgaatttgtattggggttgtaaattccttgttcagtttgaaagttcattgcctttttccccttctgga

SEQ ID NO: 103185 - DNA, 269 bp, Glycine max
gcaatgaggagaacaattaacaagttaatcactcacttgtccggggatgtagtcattgaggattatgggaagccctctcactactagatcttcagttcataattaataccaaacaaaactcaaacagaacagagaaaagaaagttgtgtggctctctctgcatatctaattattatagtttttaggttgtctgataattcttatgctagattttgttaggtttttgaaagtgaaatgcagcagaatggagtgtttgatagaaggtcgcg

SEQ ID NO: 103186 - DNA, 267 bp, Glycine max
ttcggcaatggcgcctcttcagttcactccctgagagagagagagtgaagctataattactcatttctttcccataagaccacaactcaaccccccttctcttctccacctccgcactctctctctttcctcgtcatctttaccaatttcaaaccctagaaacttctaatccaatcgaagcagcaacaacagcactaacacctcttttagacatttagatggttgtccagtctctggacgacgttgttcaccagcaattgatggttt

SEQ ID NO: 103187 - DNA, 235 bp, Glycine max
cagatacatagaatcttttgtttttctttatactatcaagagtacaaatgatctaattaagataacggcacataggatattattgatccatgctaattcctcaaggatgttttatctagcttttactgccattgtgaattcgccattggtggtatatttggattaggaaggaaagtgcaaagaaaaccaatagacaatagatgataatgtaccttctttggtaaggaagaaactg

SEQ ID NO: 103188 - DNA, 259 bp, Glycine max
ggctcacaggatattttcaactaaagttctcgcagagctggaaaatgtggtatgcaaggtcccatatctacagctaatttctaatcccacatggaattctcgggctccgtcatggacactctacatggaggttcccgcatctattcttcgtggtagccaaaccaaaacatcagattattacgagaaaaatgctgccaagcgtcagttttggactaaggtggtggtaaatgatgattgcatcaacgttaaagctgaaggt

SEQ ID NO: 103189 - DNA, 220 bp, Glycine max
caagaaagcccaacaaagagaaggataaagacctcgatcagcttttgtttgatcggaacgacgatgatttggtcgatgaagaacaacaggagattgaaggtgtgaagtacgagagtgagagtagtagtgatggtgacgacgcaaatcggagagcacagcctgactctttctggctttgatgttcaattgcgttagaaaagaagacatcgattattctcca

SEQ ID NO: 103190 - DNA, 264 bp, Glycine max
cacattcactgtagaaatcataaagaaaagaaaagaaatgaagtgtgttcagcatcataggtcatcatcatcactattaaacattaactagattattgtccatgtctctctcagtcactgtcctctagatttacccaatggcggtaggcactttcatcaccaagcctcaaccaaggataattttcttgaagattattgttgttgttggtaatacttactctttgtttggcttgcctttttgcggagtaaacctctggcaaaatc

SEQ ID NO: 103191 - DNA, 273 bp, Glycine max
attctagtattctactaatctaccatgagaacaatggagagtttttcttttttgctagcatccctaatactcatgctgtctgttttgcaggcaaattcacaaaattatccccaagaaaccaaactattcatctcttgcttttcagattattctcgatactcaaacttttcagtctcagaaatcatatacaccccacaaaaccccaaatcattcaactccatcttgaacttacacattcacaacaaaaggttcaaaacacaagccacatcgaag

SEQ ID NO: 103192 - DNA, 193 bp, Glycine max
tcctcagttagaggccttccctccctctcaaggaactcctcttcattcagagtagtggccagtggtggcaagaactctgaatgaagaggagctccctctcaaggaactcctcttcattcagagttgtggccagtggtggcaagaagatcagactgacaagccttatggaattaatggtggcatggctttgagg

SEQ ID NO: 103193 - DNA, 253 bp, Glycine max
cgaggcgcctcttttatatggtcgttaataaaaatggcttcgatccttttcacgaagatttatgttcggccaaggattgatccatccttattcgtgcctcattcaccaggcatagattctctcttctctgttcagtaaacggctgttttgtatactagctgtcccagtctcagtctatacatcccgaaacatcgaatctactggttgggctccttgtatggcttcttcctcagttggtagaatggctacatat

SEQ ID NO: 103194 - DNA, 263 bp, Glycine max
attttccaacacgattacacgaccgaatcaaacccctctttctctccgaagctgcttttaatatcgtactggccttcgattgttctcctctttaatacatactgttctctcttcgatttgagaatcttttttttttcttatacagggaacagtacaagagtctgagcatcggttaacccaactgcacaggtagtcacgaaataatggagcctcatgatgagactggatgccaggctcctgaacgccccattctttgcattaat

SEQ ID NO: 103195 - DNA, 241 bp, Glycine max
tcatttttttagctctttgctttttctcagttgcccccctcttccctatttttaagttctatcaaagattctaacaccaatagtccaatacatagatatacatgtattttctttgctcttgagaactatcccaattattgagtgtgtcacctctccaatattttgatttagccttttctgttctcttttggttgtcatggtggttatttcacctcctcttagatctgaagagtttcataag

SEQ ID NO: 103196 - DNA, 261 bp, Glycine max
gatttgtccatgcttcaaagaaatttatcacccttcaacgcggactggcaaaacgcacccactaggacatcaccatccataatgatgtcccatcagttgccgacccatggttccacttacttgatgaaaaaaattgatccccggagatgaggtagtcttctactaccggtttgatgaccatgcatgggaactgctggtcaggaaagatattgaatgggagaacgacgacatcaactttgaagaaatgtaattttcattttt

SEQ ID NO: 103197 - DNA, 256 bp, Glycine max
tttctctttctctcttcagacagagactgtcagcttcgccccgccatgaacgctattgcaactgctgcagttctctctctccctttctccttctccaaatcatacaaacttgatctcgaatccgggggtttcaggaagcgtctcaagttgccgtatacggagaagagatagataagaagaatgcatggagtgccctctttgatgtggaggatccacgatctaaagtgccgcagtataaagggaagtttttggatgt

SEQ ID NO: 103198 - DNA, 256 bp, Glycine max
ggtcaaatggaaaacagtgtgtctaccaaaagataaaggtggccttggcataaatgacctcaagaccttcaacacagcattgctagcaaatggtgatgggatctttttcagcagcatggggaaccgtgggctaggatattacacttaagtatggtggatggaggacattggaagaaggaagaagaggtagctatgaatcctcatggtggaaggacctgctcataactcaccaatagcagctaaacaacacacttga

SEQ ID NO: 103199 - DNA, 247 bp, Glycine max
cccgctgaaaagttctaaactgaacaaaattgatatggtgaagcatgaaaagtttgcccaatttgaaagggaatcagctgagcataatgatgaaacagaagatgctgcaaggtgcgacaaaacttctgaattaacagagttaagccagaacaagactgtggtgttgctgaacctgaaactgaaaacgaggatgaaatcttaaaatctgagttagacggagacaattctcatgttagtatgatgcaag

SEQ ID NO: 103200 - DNA, 254 bp, Glycine max
gacgagcgcgatggctatgcagatgacgcggagttgcaccgcgtgttgagaaagtcagatacaaaaagaaacctagagactttgattcaagccgagcagtcgaaagaatctacaaccagtacgaaaagaattggagttgcaagcgtctgttttgggctgtccggaataaagaaaagtttgagcatttcgtcaacatcctcgaaacacatgtcagtggattgcacaagctagtgttcgaggagcagcggaaagag

SEQ ID NO: 103201 - DNA, 251 bp, Glycine max
agggtatcgtcttaaagaaataatccattgttctctctaacctgtgactaagtggattctattcaatccaatgcacttccaacactttagccaagaaaatacattgaacatgagattgtcagaaaagtggccagtgggggtagatttgaagttactaatgctaacgccccgatggatttgtcaatcatttaattggcattaggttcactaaagtctgttaaaatatgttgcctaaatattgattcttaagg

SEQ ID NO: 103202 - DNA, 250 bp, Glycine max
cagcaattgcatccatgtgtgtgcaaccagaagtcactcaacgtcctttcatgggtgaagttgttcaggcgttgaagctggtatgcagtgagtttgaggaaacaagttatgtaagaccaaaaagttttcgagttccagggggagagtgggcttttcagagtaaaacataacactgcctcagccttttcttataaacctggttaagaaccaaggtagcataatcttcgtaagagctgctcagtacacgggg

SEQ ID NO: 103203 - DNA, 248 bp, Glycine max
acggattacgtgctaagcccactacattattggagctaccctttggctggcaacctggtatccaagaaggagctgctgactgggatgaagattgggataagcttgaagataaagaatttgtttttgtcaaagaactcacctcgacgtgcaaaacattatagtgcctccaaagcaaaagttgccgtcagctgtgaacacgaaagctgtgaacgtggaagctgtgaacacggaagctgtgaacgtggaag

SEQ ID NO: 103204 - DNA, 130 bp, Glycine max
caaaatttggaaatgaaatgttgattcaatttcagaaaaattatccgcgtgtttctttatgtaacatgttgaatcatatttttatcgggaaccttaaaaatatgattcaacatgttacataaaaaaacac

SEQ ID NO: 103205 - DNA, 128 bp, Glycine max
attgttccttcctatgagttggtgcggaggttccttgaatccgataagaaaacgatggattgcattcgtggttgcggacatttctttggttccgatcgtgcgtcgcagaatgtgaagttgttgattga

SEQ ID NO: 103206 - DNA, 276 bp, Glycine max
cttcctagggagaaattcacttgctcgaaaccaaaaatatgcttactatcttttaatcgtaattgataaaatgcttcctcttttttcttttcttgtttccttttggataggaggtaattaaaatggaagctgttggacatgggaaaattatgtttgttatatcagttcatttagtcactgattcactactcttagttcactaggaaatcaaatgttgtgcacaattttgttgggtcttaaaacattttccaaacttcaccttgccttaaactgtaa

SEQ ID NO: 103207 - DNA, 283 bp, Glycine max
cctcgagccgattcggctcgagggccggtggagatgggagatgtcacgttggacatcgaacgacttgtgtttaaggatcttgatcggcgaaaccattcgagaactcgcttcgttttcacctcaatctcaatgtaacaacaagctactactaccctcgcttcgtaggaaacttgtcttttgaatttccaatcacaaacatcaaaaacaaaacgagaaaaagaaagagagtcgctcgcattgtttaaatcttcgcgcgcttgcctttttaatttttcttttcttt

SEQ ID NO: 103208 - DNA, 279 bp, Glycine max
gtgtaatttccgaaagctatttctattcttatgtgacaataatttgtcttccttggtagcaggctagctgcatttatatttgctgtcaattccagtagctaaatatgctttgaaactcagcatcagcttctcatcttttgacaataatgctttttgggtttaacttcctttcccccccagaaactgcccccaagtggatgggaaaaatttatattgcacttgaatttaaaataatttgatgcatcgaaccttgttttgtacgagttatttttagtagtt

SEQ ID NO: 103209 - DNA, 277 bp, Glycine max
ttagaagctgcttctgagataaaaatatcagcttttgtagttcacactctagttgcttctgcattaatggaacaatgaaacagtggcctgaagatttcagttccatgacgattatgagagatcatgtgacactcacaattggagagaatggcattggcaatggggttgttcagaatggtacagaaaatggagaaagaaagatagtgcttggaagaactattcacaccacgtgccttgaagtcactgagcctgatatagatgatgaggttactgggga

SEQ ID NO: 103210 - DNA, 176 bp, Glycine max
  unsure (1)..(176): unsure at all n locations
tcggctcgagattgacatatcaaatggatgtgtggaagacattgcaatgaacgcttgcaaggcgcaactagtttctggtttatctanattagactgtgatggtacatctgaagagctaaaggaggattgtgttgcatggtgggttgaagatctctcggttttgcgaatagattact

SEQ ID NO: 103211 - DNA, 145 bp, Glycine max
gagaacggaagcgccacaagacggtttacccgtttccgcggtttccggtggcccggcggcgcagacgacatggaccaatctaatgcctctggtcgtggcactcgtcgtcgttgcggagatcgcgtttctgggaaggttggacatg

SEQ ID NO: 103212 - DNA, 256 bp, Glycine max
gagccatccaaaagactgactttatgtatctattgggtgtgtataatttgtgtttctgttttgcgattctataacatctcgaagaacagtaagattgagagaattcttttgcggaaatactaccatctgatggctgtctcgatgtttttgcctgcccttatcttccagccaaaatttcttgatctagcttttggtgcggctttggcaattttcctgacattagaaattattcgagtatggagaatctggcctttgg

SEQ ID NO: 103213 - DNA, 124 bp, Glycine max
cacttccactttcgtttttctccctctcagagacagaatgcaaggacccgggggtagcagggatcgtttctttgattttggcgatccttttggtggttttggaggctctggttcctttggacct

SEQ ID NO: 103214 - DNA, 196 bp, Glycine max
cggaagctcgaagcagatctaaccgaagcccagacacataccaaggcgtcaaacatctctgcaaagattctcaaacaggtttctctcctcaactccgctgccattccgttcactgcgttggactgtgctaccgtcaagagcgctgtccactccctctctgtactcgccgcaaatgaggatcttgtggatactatac

SEQ ID NO: 103215 - DNA, 238 bp, Glycine max
agaaaaacatatatgcaattaaagctgtctggattagcaattgttacgattttccaaaattttttttcctccggatcatggttctcaatttctttcgccagtgtttcgggaatgtaaatatgttaagttttaacttattcgttcctccttttctatgttaagtaccttattcatagaaatagcttccttgtaaattgtgtcatttaaagatgagtgcagcttttgctccttttaattt

SEQ ID NO: 103216 - DNA, 122 bp, Glycine max
ttgacaagcaatgatgtcaagtgaccggatcacccttaaaattggtccgcctttactattttcttttcccggcgaagtccgcggtttctatttggtatctgcatttctccaccaggtatttt

SEQ ID NO: 103217 - DNA, 146 bp, Glycine max
tgcacagtcattcatagcatgacatcaatcaagttcttcacttcacattttcagagtagcgttcatattttttcccctttcccaacacttgcggtgccgccacgtgtcccatcgttttcggtgttagtttccttccttctcaggta

SEQ ID NO: 103218 - DNA, 262 bp, Glycine max
gacggaacctacataggattcatggtatttatgtccgttggggctgttctgtcgttgaccatcttgccggccagcaaggttgttcgcaacgatgggactcggtgtactaacatgttgtactccaatgtggcaactgaatctgttgagattctcaaacttttctacaactggaagatgcttcttattattcccgctgcttggtctagtaattttttttacacctaccagtttaaccatgtaaataagccgcagtttaatttgg

SEQ ID NO: 103219 - DNA, 222 bp, Glycine max
actcttcacccctctaaatttctttgctctcccaactgcacaataataccagttaaggacaccactcttttcaccaacaccatcaacaaaccacacaaaaatcccacaaagtttcgttcttttgccaaggttgttctttccactccccgtgcttccatagtttctaagaaagattcaatcttgggctatacccacttcacacttcgctccaggagtgatggt

SEQ ID NO: 103220 - DNA, 143 bp, Glycine max
gtttgaagtccccttgtcatccatttcaaaagatgaaaggtggattgtttggattttcaaagggatgtttacaaatgaaaaggtgcgatgagctgaatcattttttcgatgagacagtcgcccttgtgacatttggtttgaat

SEQ ID NO: 103221 - DNA, 248 bp, Glycine max
gcgacagttggcgactccactggggactgtttttagagagttaggccatttaatcttgcgcaatgttttaccatgacttactcctttgttggttttccttcattatgttcttgtatatataactctttgatgcttttagtggattttttgtatgcttgaggtaaatatttattcatttgatgcacacaaacactaaaactatttgcacacacggtgagttgcaaaagggccctatacccgggtttgtg

SEQ ID NO: 103222 - DNA, 253 bp, Glycine max
ttttcctagaacatttatgtttgtataatgagtgtaaataatgtgtcctgcatatgcaagaaacctttaatgataatcgtacatttagtggagaacagtgtaaagatcacaaatagatgtgcatctttttctttttttaactttaaacttgagttttgcaacaccatattagcaatttagcaaattccctccactaaaatagtttcttttcagctcactgctagggtctcgattctgcatctgcattggtttg

SEQ ID NO: 103223 - DNA, 113 bp, Glycine max
agctcgggaagctccagaatctcgacacgctgtttcttcaggtgaatgcgctctccggctcgctcacccccgagctgcggagcctcaagagcctcaagtccatggacctctcc

SEQ ID NO: 103224 - DNA, 191 bp, Glycine max
atttgtaatgcacatgtaattaattatatttttttagcaggttttccggtataaccttattgtgcctttggtcggcaaatgtttggccttaagtgggagaaagagctaggttacttagaagaaaagtgagaatcattgttgttttttaaatttgagccagttggttcactatattagaagatgaaaatttg

SEQ ID NO: 103225 - DNA, 275 bp, Glycine max
attacgagtcaactatccggggtattgagaccctaaatttcaatgccgacaggctacagtattagcagcttccattctcgactacctatcatagtaaattcttaaaagaattttataaactaccgagtggagtgtgttgtgttgtctgtgcattttgttggaggaaagctgcaacaagatggtaatggtcactataaagtgttaaagaaagatatgctcaaccctgacaaatctggccttgaaaaggcttttgttaacacagttgaccgtgttgg

SEQ ID NO: 103226 - DNA, 253 bp, Glycine max
gaaaatatctcgttcatggtaacgataacgaggactggactgtacggactgatgctgttctgtttctgacgattgtatccacattgagacgaaatctgacgatgaaacgtggagcattattgtcactagtttccttcgccttcgcggcggccatctgggcgccgaacggcaacgacaacctcgtcccgcctaggcgggaagtgtacggcaatggccgaatattcgacatcactcaccggtaccaacccgagat

SEQ ID NO: 103227 - DNA, 267 bp, Glycine max
gtgtttatgacggccaacttgatagaagcaatgatgttgaccatccaaatggacacagagaaactggaactggtagcttaaccaatggattactctaggaaaagccaccggcattgaatttggacagagttagcgaggttgaagacttttttttatccattagactcaatgagtttctctagtaccacagatggggaagagaatgcagggacagaattgtctatgaaactcagcagtcccagtacggagttttatgatgcctgggaa

SEQ ID NO: 103228 - DNA, 250 bp, Glycine max
ctgactccatctttgcgattctcaactttctctctctcaaaaccatcagagcatgagagcgaaacttccctgcccttccatttccctctcgattccttcgcctttgctttccatcctttgctagcagagaaccttattcctttctctctctctctctcccttcaaattcccttccttttcttccagtttcactctctccctacccgcccgatgcactttggttttgcaaactcaattcgttggctaaatt

SEQ ID NO: 103229 - DNA, 246 bp, Glycine max
caactaaacaatttgggattctcataactcaatattacagacagaacgtgatggtgatacagttctttatatcaaataattgcagttttagctagccttggccatggcattttgaggaagattccgatgattgctagttgcaactctggaaattctttccattttaacatttactgtacggttattctttactgttggcacagttgagttttgttttatttcaatttgaataggaaataggaaata

SEQ ID NO: 103230 - DNA, 182 bp, Glycine max
gttacattagctatatttcataatcattgatacaagtccaattcaattctgcatgtacattagctatatttcataatcattgatacaagtacaaattattatgaaatatagctaatgtaacatcagaattgaattgtagttaaaaaaaaaacgacaaaaaaaaaagaaaaacaaaagggggg

SEQ ID NO: 103231 - DNA, 281 bp, Glycine max
cggaggtggcagttatggaggcgagcctggtggtggtggacccggaggtgacggttatggaggcgggcctggaggtggtgcgggtcctgatggtggcggacctaaagatggtggttttggaggtgggccttatggtgggtacggtccaagatctcatgggtttggagtgaagccatattccaaagacttgaattagagatattttatcaatatataataattatgtttattatgtgatagtgtcacagtgtttgttcttctttcatatttgtgttgctatt

SEQ ID NO: 103232 - DNA, 272 bp, Glycine max
ggactacaatattactggaatgaccgaatcaatatctagttcaatatatggacacgtttattataagaatataattgtttaagataaaaagaataccaaatatcaatgttgttgttattatgagatggttatatcatactatttgtattatgcagatgttggcaattctaagattgaagaacagcagcagcatcagaatttccctgatgattcaacaatagaatctattgctagcactgggattggcaagaatctcataaatgaagatgatt

SEQ ID NO: 103233 - DNA, 250 bp, Glycine max
aaacacgtgaggtcattattaatgtccaagaccgtgttgggcccccagtgggcctcggtgtccggagtcatggcaactttcttggtgtctggtctaatgcacgagctgattttctactacgtcacacgtgttagtcccacgtgggaggtcacgtgcttctttttgctccatggggtgtgtgccgttgcggagtttggtgcggtgaagtggttgggcgctaaatggagactgcattgggccttgtgtgggc

SEQ ID NO: 103234 - DNA, 250 bp, Glycine max
gctgagtagtgtatgaatgttaaatgcccattctcggaaggtgccgaatccattgatgcagttgtgtgtttgctcttggaacagataaagcgaataaatttgtcagattctggattaatgtcagacaattataatgacagacaatggtataatcagggtgcagttcaatgtgccattagcaagaactgtgatgtgccctgtttgaaaaaatgcttgatttctgctactcaaccagatgcccttatgaatg

SEQ ID NO: 103235 - DNA, 251 bp, Glycine max
gtttgtgatagtacagatacacagtactgcactgcacaagtttcacacacactttgtcattttattaccgcatttggagtttcttctctctgcactatcatctctctgaaggttctagagcacatagagagaaaaaaacccagaggtgaaaacatcattttgcagtttgagttgccgcgaaatagagatcatgatggatgagcaagagaaatccaattcatcaccagaaaactctccaaagtgtggatttg

SEQ ID NO: 103236 - DNA, 214 bp, Glycine max
ctgaaatatgagatgtcgaatttgctttggtatagcgatagtagcagaagggacagaagggcaagagtgataaggacagctgaaattttggatgcggagaagtactcttctacaagtatagacgagtgtttttgaagaaaatcaaataaatcaatttgattttctagaattaattttcataataaaatatgagtctggtgtaaaaatttgtatt

SEQ ID NO: 103237 - DNA, 271 bp, Glycine max
cacccaattcatctccactcgaagaccaacaccttcaccatggttgctatcgcccgctccttcggtgctgcccgtgtggccagccgcagcctcaccaccgctgcccgcccccagaacagcctcgttgctgcccgctccgctttccgcaacaacgccgcccgcaacgtcatccagaagcgtggcatcgtcgctgagtccaccgctgccgccatggtcgccgccgccaagatccagggtgctggtctcgctaccatcggtcttccggtgctgg

SEQ ID NO: 103238 - DNA, 258 bp, Glycine max
gaagaagcctgatactaacttcgaattttacaagtgaatttgtacgcatgttgataagttttcttaaatattacacacaatttattaagcttatacgctatacccaataaggaggttaaggaggttgagttgtgttttacgaaattttttgcgattttttttcgtaaatgaagttttgtcttatcatatggacgatttaacacaaaaggtttaataaaacactgttttatctaaaaaaaaaaaaaaagggcggccgcc

SEQ ID NO: 103239 - DNA, 253 bp, Glycine max
gtttgagtgggtgtttgattctgtaaaatatatgttgtgcttgagtgattggcttataattctgtagctagctttaatggagctagtagattatgttgctattgttggatgcattggcgtgatgaggaatttatccatagggtaggaaggtttttatcaatccaatgataaaaaccttcctaccctatggataaattcctcatcactccaatgcatccatagggtaggaaggtttttatcattggattgataa

SEQ ID NO: 103240 - DNA, 268 bp, Glycine max
tagtttttgaactattttttcaaataaaacatatttaaatgaaattcaatttggttaatccaactggttttgtagaaataatttgattaaccaaattggttttataaaatagtgcattcattttttcttgaactaattcgaaaaaaaaatcaattcgatttatgttgagttataatcccaattcaatttgaaccggtagttgcaagctgaccgtgaagtcttggagggctgtatctgaactatgaatccataatccttggaagtccaa

SEQ ID NO: 103241 - DNA, 160 bp, Glycine max
gatgggtgcatattcctttgactatatgtgaggctttgagggagtttagttgttcttttccttgtaggtcttcttgcatgtcaactgaaacgcagtcgaaaggtggtggagtggaaggaggaggacctacgatgataatcagagacggttcatgtgggat

SEQ ID NO: 103242 - DNA, 249 bp, Glycine max
ttagaacctggttcttcatcaaggtgggctactgaatgggaagaacatgcaaagccgctgataactgaggcacattcattcttctattctatgcactatgtcattatcaggtcatctcctcttgtggtagttgactttttgtgtctcagtgatcagttcttgatttataggaatagacaaaatcttgcatagacagaatcttcagattcttttttttttctctgcacagctagcagtggatattcgttt

SEQ ID NO: 103243 - DNA, 188 bp, Glycine max
agagcttgacaagaagaaatctggataacgcgattcaggaacaccttctaacttcgattcatcctatgacgatgaatcattgaaatttaacccaacaaaacaaacctcaaaccaaatccttaaactttgcaaaatataataatggctttgagaagttgctctgcccttttacgcagcagtttcttcca

SEQ ID NO: 103244 - DNA, 268 bp, Glycine max
ggtgggggaaaaagggatcgagtaggagatctccttccctcactccctcccctatccaaccaacgctccccttcttcaattcgaccaatcttccccatcttttacccttcattcatcgatccataaccctatcgtcttttcacattgagccattgagtcaacatcccatcaacacaaatcttcattgtaacattaattaacaccaaatcattggaatcaagagttcattgtccattttcctatgacgtgcctcatcctctttgacttc

SEQ ID NO: 103245 - DNA, 243 bp, Glycine max
ttcggctcagtcgacgagaagagacagtgaatcgcacgtttcaattcaacccacttcatctcaggtgtttgaacttgagataaaaatgagtggaacagagaaagcaggatcaggaaccaccaaaacccccgccgatttcctcaaatccatctacttctcataaaattgctttgaatgtacaggttttcattgaatttattctgaaattcatcttcgcaaagttgcagatagttgaagatgctt

SEQ ID NO: 103246 - DNA, 226 bp, Glycine max
ggtggttctgctgtcttctagcttcttcttaactcttttttctttttactacttttaagctaccttgttttcaaaataacaaaaacaaacactttcttacttcataagatcaccttttcttcatcttctacttctccttcactaaaatgatgctcaaaatcaagagggttcccactgtcgtttccaacttccaaaaagacgacgctgcagactctcctcgtcccgt

SEQ ID NO: 103247 - DNA, 266 bp, Glycine max
ctcccccatcagacatggcttttgcatattcagatcctgttcgtagtccatattacaatattgatttgaacgagatccacgttgctgggaagcgactgcctctaaacgcaaatgtttttgatggaaaacatgggactgtcttggatagtggtacaacttatgcttaactactagaagcagcatttcttgcatttaaagatgctattgtgaaggaacttcaatctctcaagaaaatcagtggtacagatccacattataatgatata

SEQ ID NO: 103248 - DNA, 212 bp, Glycine max
gaagaggtgcatgacaacttggcctgccaatccatgttaactttgcaaatgtaaaatgagtataattttgttacattaggaacttgattcttaaggaaaatgtaaatgtcgtttgacattggactacatgtacatgttgaggaaacaagggagatgttttgcatgaaaaaaaaaaaaaaaaaaaaaaaaaaaaaaaaaaaaggggggccccc

SEQ ID NO: 103249 - DNA, 243 bp, Glycine max
ctcaatagtcaattgctaaagaaaactcattaattcatttttattaatgatcagcgctgcatttacacgcttcctcatgccgggactgaatttattggataacttgtcacctttgaaatcacgtttcacttctttaataaaatactactactaccaggtagtatttcttttctttttcacacgtcatcgtggacaatactctttatgaattatcttgggataataataagcaaagatttgtcc

SEQ ID NO: 103250 - DNA, 285 bp, Glycine max
tcaaaagcaaagtgaaagcactttttcagaaaacttgcacttcaatccaatctagtattctatactgctgctactgtataattagcagctagtatctatatataattaaataagtttatactaattcccttattattataaaatggagggtggtttgtggaagaaagagttggttctaaggtttgttgtgcttgctgtggctgttgtgaacacagtgcaatggaatggagaaggcacgcgtgtagggttctattcgagcacatgtccacgtgccgagtccattgt

SEQ ID NO: 103251 - DNA, 270 bp, Glycine max
attcattagtttgaagaagctggaaaaataaacagcacaatttaaaattgctgctacagcctgactaaagaagtttttgctgtatcacattgcttgtacactcgacagaacaaaacaagttggaaaatacagtgaaaaccagaaaagcaatcccccatgatacttaaaaatttattctgcctgcagtatggtgaaaacagtgctccgaacatccttgaggtgtttgcagtgagaatttttggtaaaacttcaagttattagttcttattt

SEQ ID NO: 103252 - DNA, 280 bp, Glycine max
tatttaaaagagacccttacttgttttcttttttgacatgcatcacttaatctctttcaaatttgagttttggtaacccgatcactaaatctttagaaattaatttatttaaatgatccatatttatgtgagcaattctcttatgccataaccatgaatcattatctttgcttaaaaagcattaaacatgatttgatgttttatctaaatttatcatgtatacattattagttctatatcctatgttttatattcttgtcatgtttattttcaataaaac

SEQ ID NO: 103253 - DNA, 217 bp, Glycine max
gaatattcctgctgctggattcagcatatgatgtctgcatggactcaatttactgtaaaatatttaggatgcattgatccttcctcttaccttgaggatgttgatgttccacttttatcctcatttacttcaagtttgtgtcattatttagacttaatttctcataatatacttgttacccacatctttgaagtagtctatcactcacttccacaca

SEQ ID NO: 103254 - DNA, 278 bp, Glycine max
ctaaagagagagagaaacccggccatcagggcaacaccattccttggtctctgaatctcaaaatctcaatcaaatcgcatcccatccatgtacaaatttcagatctaaccaacactcccaaatgtcccacattcccaccgccggctacggcaccctcgccggcgccactcccactggaaccaccaccaccaccaccaccaccactacctccttggtgactccccgtccatggcgcgagtttctagacctctcagccctctcctgcccctactcctacg

SEQ ID NO: 103255 - DNA, 167 bp, Glycine max
agagcgtgagaggttaaagaatgttgaagttgaagaagagcatgtagatgagcgttcagttgatgaccttttgtcttttattaatggaaatgatggagatccaaaggaagttaaaacttctaagaataaaaagaaaaatagaaggaaaaaagagcaacaacagaaga

SEQ ID NO: 103256 - DNA, 191 bp, Glycine max
ctttaaacatatttaggcctaggaaaaattcactagctgtgagtgcaaaccaacctgtctctaagaggtcaaggtcatcagatttctcatccagtgagtttctgtgctgcttcattcctaatcttgaaagagaagcttggcagctccatgtttcattgttgtccatagagaaggtgaaggttgatcacttg

SEQ ID NO: 103257 - DNA, 178 bp, Glycine max
gtcattttccagataaacagctttacgagattgcatgtgcgttggaacagagtgggaagtcattcatatggattgttccagagaagaaagggaaggaatacgagaatgagagcgaggaggagaaggaaaaatggcttccaaagggtttgaggagagaaacagggagaaggggatgatt

SEQ ID NO: 103258 - DNA, 267 bp, Glycine max
ctgcgaccgttaaagccacactcagaatctaaaattttgaatttctcaatgtcttctcctaagagctcatcatcacagcatgaagcggaatcaatgtcagtttttgaagctattaggaaggctaagcgattaagttgtttgagccgtctctgggtgttcttgggtttgttgttgtaactgtctttgtgatttgctgcttcttctattcggataacggataccttgcttcaagagttgcgttctttgagcaaccacagaggtttgctt

SEQ ID NO: 103259 - DNA, 188 bp, Glycine max
tcgactcgttcaagaactactccaacggcctaaacgccaacaacgacgcgttccggcggtacagcgccgcctcgacgcgccgcggcgaacagttcaataactacgccgacaacggcaacgtcgccaacacgaacttctcagctacggctccgcgcgaatcaaacctccggcgagttcagcaactacga

SEQ ID NO: 103260 - DNA, 269 bp, Glycine max
ctttggtgcttgggatgcaaatgcagcagatcagacaaaatctaatgaatggtcagactggggaaagaagaaagaagttacccaagaaggcaatgtccaagattcttggggctccggtaagaggaaagacaaagtacccaagaagacaattctgggtctggtggttggggtgccaacagatcagatctgagcaaatccaaatctagtgaatggtccagctggggaaagaacaagtctgaaataccagctggtggatctgaaaatgtgca

SEQ ID NO: 103261 - DNA, 262 bp, Glycine max
gaagaaacttcagaagcaacgagctccgacagtgaccgcgagagcaacaccgcagtgaacatcatggcagcacaaaacgggaaccttccgagacacggcactcttgtgaccgtggacggggagacaaatttggagcttgagactttgtcaaggcttcagcgtatattttgggaaacagccacttcagcattgtttacaaggcggtgctggaggacggaagatcctttgctgttagaaggatcggtgagtgtgggattgagag

SEQ ID NO: 103262 - DNA, 288 bp, Glycine max
  unsure (1)..(288): unsure at all n locations
gataacatggataggagatagccaagtttcatgtcccttctgtttcaattcccaagaaacttgatcctgaattcatgtcataatagttgctgctgaagtatcctcttcaaatttctgaagaatcatggcctactacagctctgcctattctgttctgatcattatggtgagtacaatttcaactcttatgctctcaattatgattatgctcaaattccatcctatatggcttatactagttatgagtacaatcanaatcaacatattatggatatgattcaagtttat

SEQ ID NO: 103263 - DNA, 280 bp, Glycine max
tgggatactctaccccccaaaattgcccgacatcatttcttcgccctgtatagtcatctaactatattacctgcaagctgcatctctgtacttattgttgaattactttgtataataattgtaatccaatttctgtctgtctgtcctttcttaatatagggacctatcttgcttttttcttttttcagcaagagattaacgatgtaaccattgaaacctgggaaaattataatgctactgtatagcttctgtctcaataaaagctcgattcagtcaaaaa

SEQ ID NO: 103264 - DNA, 271 bp, Glycine max
ttttaaccatgtagaatgattaaaacgtatgagagagtacaagtattggttcttctacgatgatgaggaaactagctagagagtgaaacagagggaatagtgaaaggttagagaatgagatacttgtgatctctcttacttgttaaccatgtagaatgattcacctaaggaaaaattagtagcttcttgttgtgctttttatagtgtgttgtattgtgtagagataaatccgtttggtattgtcttgtgttttatgaattatttgatgggt

SEQ ID NO: 103265 - DNA, 268 bp, Glycine max
taatgactatcttttataatcatcaattaattgtattgttgtgtcagggttgatggtatattctccatgattttcttgtagatcagtaatatgccaaatacatttgttattttcttattccgcttctactcaaactatatgcttgtaccctctgttatgttgtggacagaggcattttggctgcgattgatgtgttgggagacaatgcattggttggggtaagtttcaattgcgtatatattgccttatataataaacagttggatat

SEQ ID NO: 103266 - DNA, 271 bp, Glycine max
ggagcgaggatgagttggagataatgaagatgtttgggcttcccaccggatttgactccaccaaggggaaaccggttcccggtgctgacgtcagcggcgtcagagccgtcaccaagcgccagccgcgccagtacatgaaccgccgcggcgcatttaatcgcccattgcctgctgagaggaatcgctagggttttctttttttcagacgagtaatttcctttggtggtagacggtggtctcatcatgtggaatgttggatccagaaaccctt

SEQ ID NO: 103267 - DNA, 100 bp, Glycine max
aggaatgccaatcagtgatctctactcagtctgtcgagcaagatatcgttgggtttcagagtcccttaatccaggtccatcaatattgtgaataacaaca

SEQ ID NO: 103268 - DNA, 267 bp, Glycine max
ctttgatcttccaattttcacagaatatctctatcctttgaaaataaaatggttacacacgctcttccttttgtacactgtatctggatgtcttttgtttccgtgtatttctgacttgtaaatcaaaagcaaccccatattttgattattttcaacccataaatctctcttcccttgttttgattttctcgtttgaattctcttccttgctttttttctcctttctcacatcatcataccttgaagtccaccttggtttttgcttcc

SEQ ID NO: 103269 - DNA, 253 bp, Glycine max
  unsure (1)..(253): unsure at all n locations
ctctctcttctctctcagacacagtttgtcactcttttattttcattttattttatttttcttcattttttcttgtgttcttcacctagagccaagtaactctgttctggactctgctntctaattggagcttgggcacagaaacaacatgggttggttttgttgccaagggaaatcaagcaaaaaatcggttgccgaagaagactaccgcgacagcctcgaccagaaacccaccaatttcaccgcgacagat

SEQ ID NO: 103270 - DNA, 311 bp, Glycine max
tgaacaaaaggataaaataaatagttcccttttatctcaaaattctcatcatatatatactatttcaatgggcttcgcatacataaacctcattattttggtaaggtaatattatctttattatataataattattattattagaacaaggggaacatgagttactctcttatgttaagtttttaaattgttggttcatgacacctagatgaagaaccccacatcagggagtgatattttatctattttgtttttgaaatttatgatcaattaattgcaaggcacaacaacacaaaatgtgtggagggcaa

SEQ ID NO: 103271 - DNA, 265 bp, Glycine max
caaagaaggaaaaaaaatggatcctgttgagcaaatttctgaagagtggagttctcttagtggattctacacagctgaggaagctaactttatgagccagttgcttggtaactgctcactccctgagaacctgtgtggaaatttcaatttgggaattccatctgcaatatggcctggccatgaatccactatagtgagcgtgacaggaatcaatgaaagtccatattttcatgcaaatggtgataacaataataataattattta

SEQ ID NO: 103272 - DNA, 288 bp, Glycine max
attgcacttttcatccaattctgtgaaatcactgttgttgtctattattttttttcctaacatgggagaagctccagaggtgttctacattaatgggttctcaaagtttggccatgaaattgaaacccaacaaaaccatgtcaatgatcagaaccatgattcttcttggtacgaggaaatcatcgatgatgatctcaaatggtcttttaaactcaacagtgtgctccataaagccattagcgagtaccaggacatagctctcttagatacaaaacgttttggaaaggc

SEQ ID NO: 103273 - DNA, 288 bp, Glycine max
ggtcacaataggactgagatagttaaatttcttcttgattggcaaggggcagataaggttgagatggaggccaagaatatggtgggtacaacgtccattttttactgaagttattctttgaatataaatatgtataatctagacttccagttattgtcttgtaattctgaaaaggtttctttgtatactattgcagtatggagaaactccattgcacatggcagttaagaatgggtgcaataaagccgcacaattgcttcttgctcgtggtgctattgttgaagccag

SEQ ID NO: 103274 - DNA, 159 bp, Glycine max
gaggttgtggtggcgtttggagttcgggtgtgtatttatagtagttcttctgtttggccttgtaaaatctgggaaggccgaggtttacatagtcaccgttgagggagagcctatcataacctacaagggaggaatcgatggctttgaagccaccgcggt

SEQ ID NO: 103275 - DNA, 293 bp, Glycine max
  unsure (1)..(293): unsure at all n locations
aaatggacaatgaaagtgatgccagagtgcaatcactggctaattccttgaattaccaattgggttcagaaaaccgacgggacattctgtttaatcttaattacagtatgggttatgcttgcatggaatacctctgtatattagtggatgctgctcaagttggcgggtcaggatgattcaagaacatcttcgcgcaatctttatttttgtatttatgtgtttatgaagcggggaggatgctgatgatggaattagctttcttagtgaaaacccanagcagtgagtttttcatc

SEQ ID NO: 103276 - DNA, 262 bp, Glycine max
cgattacccaactccacctcagcatcaccaattcccctacctttatgatttggagtacatcctggtttgaatttcgcttgccagtcgcaacagcgaaccacccatttacaattacacccataccccaaacagttccctcctcaccactctcccctcgccaacggtcacaaggacgcaacggtaaattccccctcacatcaaaaccaccacctctaaccgtagcaaaaaaccaccaccggagacaaaaccaaatcccccttcc

SEQ ID NO: 103277 - DNA, 273 bp, Glycine max
gtaaatctgaaacctgtcagaagctaggagtggagcagtactcgaacaaaacattgttccttcctccccacctacctatcaaaattacaagagagagaaaataattggtgttagagaagtagttgagttgtaattggtgaagaggtcactgagctgaggtttgaagctaacgttccaattctgtggtcaattatgactacagtacagagtaagggggcagcaatgggaactgccacaactgagaaagtattcaaaagatggggcaggagaaac

SEQ ID NO: 103278 - DNA, 272 bp, Glycine max
ctgataatgattgttgccttttatttgacacttttgtttcagagaacttcctgatgggttatcgattggtgtttgatcgggagaatctaaggtttggctggtctagatggaattgtgagtctgtctctctttcacttaacttttaacctataatttttgcaaatcttagttaaaaagatctgctgcttgtttaatttggattcttttttactggtaatttgctttgctatatggagaagagtgggacttgcaaaacaagaatttgaattatt

SEQ ID NO: 103279 - DNA, 273 bp, Glycine max
catgagatagttcagatctcaggaagtgtagaagttgtcaggaaagctcttcaatctgtttctcaacaacttttggaaaatccgcctcgggatcatgattccctgtccgccaagtctactgggccgtcgtctcattcatttgggcaattcccaccacacaaccgttacttctctgctcaaggagaaccttttgctagtggtcctcatgatatttctgcttttcattctgccgctcctctgatgtccaagtttcatgaagctgccatccacggt

SEQ ID NO: 103280 - DNA, 99 bp, Glycine max
gattgataaatacgagtgctgtcctatcctgttgtgatgtagatcaagccatatttatcatccaaagtgatagattagaggcatatatactgtcgagtg

SEQ ID NO: 103281 - DNA, 273 bp, Glycine max
tccaaattgaaactctgcaaaagaatataggttcccgcatttactacacaagcttcctcgtttattgtataaactagttcacatgttacatagtcttggtcctgttcactgttcacatttctggtcatcatagagtcattcatggatttgtcacgggttgcacaaagccttgacactctctggttctacaccaacatcttgacctgtagagatcagcctgaacccgaagcctcattgattgatcaatttgcacctttagtccatttcaaagag

SEQ ID NO: 103282 - DNA, 220 bp, Glycine max
attggtctggctacctactttcttaaacttcaggtgctgtggacaagattgtacctagcttttctccaagttacttgataaaattatggcacatgttttcgggtgaatgtaatgcaatttctgtatttttattgatcctaaggagggcatattagagtaggagggccattatagcatgtattaggcatttcacatccttccgtataaatttgtaaaatga

SEQ ID NO: 103283 - DNA, 245 bp, Glycine max
  unsure (1)..(245): unsure at all n locations
caacaaaacacttcctgcttcgcaaacgtttgaatctgaatcatgccgcgcaagaagaaggctcacgatccattcttcaccaacgatccgccaaacgncaaaaacagaacaaaaaacttgacgaagatgaagaagaagacgcgagatagacagcgacttcgatgaagacggcttcttcgccggcggggcggcggtgaggagcaggaggaggaagagaccggcgcggatgtgcggaagagactcgc

SEQ ID NO: 103284 - DNA, 243 bp, Glycine max
gttttggtggcatagacgtgccggggtcaaatagcaggcaccatggggataatgcatcagatagcaagatgcttgttcttggtgttgaagagggaatggaacgattgtcagatggaggacttgccagcagtgaagaggcaaaggtgtagccttcaggccagtggctaggaggggtaggcctaaaggttccaagaataaggataaacagtttcacaccaccttgaacacacagagtgttggtga

SEQ ID NO: 103285 - DNA, 258 bp, Glycine max
atattattagagaacaaaagtttgatattattaaaagtgaaaattttgtatttgagaataacatactaaatgaaggtatgttgaatgctatacagagagaaaacaataaaaaatgacttatattttggtctaatttttttacttgctaactcgttatctcggtggtaaactcaagagtttactgagtttacttagagtttatagagtttgcccagagtctacttaaaaaaaagagtttactcaagagttaactcgtag

SEQ ID NO: 103286 - DNA, 256 bp, Glycine max
gattctagggtttctgcctttcaaaaactccgtttttgtgaacaactccaccaccgatctccaattccttcgtcccactcaaatttcgaaatgggtaagaagaaacaaaagaacccgcaacactcctccgaaaccgacgccgtttcaaccccttccagcattttcagcaaactcttcgccaacgcgccggaacagaccaccgcaaccgccgctgcctctctattttccgatgacaatccctttcgaagaaaatccg

SEQ ID NO: 103287 - DNA, 173 bp, Glycine max
ccaagtttcgtcaggcaattgtatatatttcatctgtcgtggctgacttgagaaatatagttactctagtcaccattattcaatccttttttaggcttttaatgaaccagatatagcaatttatatatctaacaggcaatttatctagggagcaaggagcctgtttatgcaac

SEQ ID NO: 103288 - DNA, 261 bp, Glycine max
ctactaggggggatcttggttttttaattttgtcgctgagcttattaagttattctcttatgcttgccgactgacagacattgaaaggtttcctcaagaaggaatcggctgttttgacttccacttcacataaccgggataatttacctgttgaatttgatttttctcctttatttatgatcggcctgtgagacgtttgcctagtttttggttcaaaaaaaaaaaaaaaaaaaaaaaaaagaaaaaaatcaaaaagggggg

SEQ ID NO: 103289 - DNA, 278 bp, Glycine max
gccgacaacactactatcacaccaggcagacagaatcgagcacccgaaacccctgcaccatccctctgcaacacacactaggcaaccaccaaactccacgacctgcataaaacactgtctcagcgacaacaggcccctctacaaagcaagcgagcaaacaagccgagcagccagccgataagactcagactcaggccaacagcgcggggacgatcacttccaccttgacaaggaacaaagcgcagaacatcacaagcctaagcaagcgatactcttag

SEQ ID NO: 103290 - DNA, 278 bp, Glycine max
tatgagttgcccttgagagttggtaagattttcagatgggtgaagtgggttggtctgtgaatgacaaaaggggttttgttggttgaatgaacattttcagtttattgaatgttatcaaccgcccaagataccgttctaagtctggattcacatcttcttgggctcaatcatgagtagtatatagttggtcatgttacagagatcatttgtgtaaattgaaaatccggaggggtctatttgtgttataatttattagattagcaatgtatttagttttg

SEQ ID NO: 103291 - DNA, 271 bp, Glycine max
ctttaatatttttcaattgatgacaaccatccaataatcctaacccatctattcgactcaagcattgatgtattaggataattggatggttttcatcaatttacatatttaatatttttaaatttccttgtgctgaatctgcatactatttgtattttattgcatttttggattgattcaccgttgattggatacaattgccacactaactctttaagtatagctccctaaggattcagcttctcagtaatcaatacagatcactcttgat

SEQ ID NO: 103292 - DNA, 267 bp, Glycine max
ctgcagtgtctctttcatctcacaacgaacgtctcaagtgacaaagtttctgagagtcttactcgttttgtctttgttctctctaatctcttggttcgcgttgcagattaaatgattttgtatctttggttctcttttaggatcaatggattttagagatttagctcacaagttctctcgttgtattgttactattggaaatctcgggcttcaactgctatggtactttctgcgaataattctcagcgcatggtatttcatatcagt

SEQ ID NO: 103293 - DNA, 277 bp, Glycine max
ccttttattattcctctcttctcttcattccttcgttcattccctcataaaaacctttcaagtttcaatccttcctctaacctaaggcaaaaaaaagcctttttctcttattccttcattctcaaccaaaaaaagctgaaacctttcacacgaggttccttttttccgacatggggttctcgcattcggacttggaatcggaatccaagaagtgggtaattgccggaatcggtgtttgctcgctcaaacccatcaaaacaaagcgcgttgctggcgg

SEQ ID NO: 103294 - DNA, 267 bp, Glycine max
accgaggtaaacacgttccggcgtagaagaagaagaacggcgacgacgcgcgatttcttcgaagacgagttcgatccggacgagatattcagggcgttcttcggacactccgacgtgttcggaagaaacaaccacgtttaccgaacccgcggcgggatggggaatccgaatcatcagcataggcatgaattcaatgctggaggatcgggagggaggcatcacaatgtgatgcttctgattcagctcttgccgtttttgattattgtg

SEQ ID NO: 103295 - DNA, 276 bp, Glycine max
atttgttttgacacacgttgctgatttttttctcacacgagttactcacactcaaggggaattgttgatgtggtggtcagaatgatgtatggggagtagaactacctggagggttgttggtgttgaagatgacaagggagctgaaagaggaatgccgagcttcaattctgagttacccaattccaattcatgatagttgctagtacctatcaattggtggttttgttgagacttatttgaggttgagagatctttgttgtaagcaaacttgcatgg

SEQ ID NO: 103296 - DNA, 281 bp, Glycine max
agacaagtgatatggcttctaattctatctcccaagcagcttcaatggccacagaaatctgcacccaaatagcttccatattctcaaagcccacccatccataccctcccccactggaccttttggtcaccgaactcgcctccgttgcctcccaaaacggccgcgtttttctttacggcgtgggccgcgagggcctcatgctcaaggccctgtgcatgcgcctcttccacttgggtctctcagcccacttcgtcttcgacatgaccactccccccatcgac

SEQ ID NO: 103297 - DNA, 247 bp, Glycine max
cgagttggaagtgaatttctcagactaagttttgggtatgaagccaattccatcagaaagttgccacctcctaggtcatccgagctagcgcctggaaatcaaacctccaccctcagctggcacgggaactcggagacatcatctgaccttttcttgcaaggttcggtgggtgggacaagcttcgccggcccgggacatcctccaggggaaagttacactggggtcaccacctcgagctgtgctctct

SEQ ID NO: 103298 - DNA, 269 bp, Glycine max
cgagcatagaagagagggtttgttggccattgatgactattgagttgagggtctgatagaaggaggtggcaagctgtggcgagtagatggagatgtgtgtcatttgtactaagtctttgttgttgcattaggaaaagggttgaagaaggaaactccaacagtagctgatcaatggagatggaagtagaactttcttcagctcaacccaaaatgggttctcagcttatttcccaaccccaaaggtgtggtaagggtggcctcgttaccat

SEQ ID NO: 103299 - DNA, 202 bp, Glycine max
cgagtttgtttgggaaaatccagaatcggagggagactgtcgctgaatctcacggcaaacgcgatcccggcgataatcggtggcgacgtgaacgcgaaaccgctggttcaggttctggacgtggcgctagtctccaatagcaacaactcgcagcagcagcagcagaggtaccgtcttctgctatccgacgccgttttctctc

SEQ ID NO: 103300 - DNA, 226 bp, Glycine max
  unsure (1)..(226): unsure at all n locations
ctggtgagttagccgaaagcaattaactaagaactaagtcgcaccgttttgttctgctttcctanattgccattgccattgccatggaagccaagctctgggagtctcctcttttgtctccctcactccctcttcttccttctctcaatctccactttccctcttcaacgcgcctcctagctcgcagtttcttctcagacaccgttcccattgataacaaggaaaa

SEQ ID NO: 103301 - DNA, 276 bp, Glycine max
cctgtctacactacggacagagcttttttcacaccacagctaaaattgctgcaatagagcccttcttctcccttcttcttctctacccacacccaaacccaaaccaagttctttctttctaattcccttgataatgtaaaatcacagaaaaacaaaaaaagctactcaaaacttggctccaattagcctttctttttttgttttgaggaaaaacagaaaagttccacacaatgtcttcttctagagctctcttcttcttctttctcatcaacgtct

SEQ ID NO: 103302 - DNA, 198 bp, Glycine max
cttcatcttttaagagcagtttaattttaggtacctcagaaaaagaggaggaattagcccaatcatgtgaagctgcgctcaaatcctctcccgattgtgctattacaaagaaagatgtttattccgtctccatatcagacagacaatgtgatgtggaacagaatgattctgctaagaaatctgtacaagtcaaaggga

SEQ ID NO: 103303 - DNA, 261 bp, Glycine max
tggcattgatgcagggtggcaatactttttcaatagtttggcatctgcaacatctgataccggcaagtccatccttcctaagcatttgtgtcttgttgccaatagtctgtcatgtagtggagagtttgtgggattacatgctagaggcatggcactacaaagaaaacatgcgtcagtttcatcaccattcgtgcaagcatgctttgcgaatccaggtagttgctttataaaagctgctaagtctggagtcactgataatct

SEQ ID NO: 103304 - DNA, 166 bp, Glycine max
atgtggtcttttggtgccccttttacactctttcacacttggttctcaactatcacatttccctgtaagctttcttctgttgtttgatcaccctcacactgatccaacttcttttgagaaagtctcatctcaattacaattagtctcacactatcactatattctt

SEQ ID NO: 103305 - DNA, 175 bp, Glycine max
ctcaatgctattattgctctcatttgtcgctcaatagttaaaaattactcctaaattgaagagtgatgttctgagacatggcacttaaagtttctgctggtaaggctgccgagattgcaattgggtccattggtcgtggctatgatatatctactgctataaggctcaagtattg

SEQ ID NO: 103306 - DNA, 276 bp, Glycine max
tgtccctttgttttacaatcttaatataatttctaaccctataaatatgatcatgaccttacaccctattttgactctcttccttgcccgaatagctcatgatcaacattttctttatcgttaagttttttcttctcctcattagtcttgttccctttgaatttcttctgtccgggtattagtagaaaaataaaggctttagaggtgaaggtagagatcaatagataagggtgatattatggctgatgcatttgatgaagagtgtgattatctctt

SEQ ID NO: 103307 - DNA, 179 bp, Glycine max
attttgctcaaggtgagttgcaaactgatgtgatccctgggaaagattttgtccattcagaactaaatgaggatgacagtgacactgtggttcctgtacattatgctgtttcgcctcatgaactaacactgtgcttgcatgaagttatccaatcaagacttgagggacgtgtacaggag

SEQ ID NO: 103308 - DNA, 200 bp, Glycine max
tgctagctatagctagggattcaaaacatgcagtttgatctctatgtgagtgcagttctgttcatcttattgtcatgaaattgaaccacacgcgtaccaatcatttaaaacatgaggatatgtgtacatgagcttctacttctagtcatcattatgttcatatatatgtatatatacggttgctacttttctgaatggtc

SEQ ID NO: 103309 - DNA, 302 bp, Glycine max
caatgatgtagactccgaattcaatgtctttgaattttgtttttaaaattcatcaatgctggttgatgacgggttcagtttattttaattaatatcctaacctttttttacccacattaccggccactataatggatctttgttttccacctaaattctcttcctttgttggatctaaccacattctcctgttaccttttcttatttctggagggctcgacgatcacgtgttactattttggcatgacctacttcttcaagattctttcataaaaaacataaaaataaagctcatgataact

SEQ ID NO: 103310 - DNA, 148 bp, Glycine max
acgattcttcgtattctcaacaatctcaatgacttctatctcccttcttcacgccctgttcgtgttcttcttcctaattgccacttctcttacggaaagtaggaaggaattaaggagcaagcaggaaactgaattacaaatgttagag

SEQ ID NO: 103311 - DNA, 296 bp, Glycine max
atgaaataattatggaacactatctcctagcttaaccaaggctgagaatctgaatggacccgccatcttccgtcgatcaagacgacgacgttttcctcgacgcgtttcaccaatgccctgccgagggctcaacggaaccttctgattccgcttccacgcttttggaccacctgccacactctccgccgaccacaatccggcgccggccactccgtcgaggtattccgggtacccaatcgtcagattcgagcatcgtgagcgatttgatcgatgtcgattcgagaaggagtttccgg

SEQ ID NO: 103312 - DNA, 291 bp, Glycine max
aattgatccacttcaaggtaatttgttcaatgattctggtcggaggggaccacgaccctgtttcatctacctccctgatagcatatttgttttgattgaagttataattcatcaatggtgaaatactgcttccttgtctggcgtctctaagtctaagtcttcttgggtgtaattgatatccttccagggggtggtttctacaaatgtttcttcaaatgtttattaatgtagcatgttttgttgatgtaaaatatctttttgtgctatcaatttcattattcattatccctg

SEQ ID NO: 103313 - DNA, 99 bp, Glycine max
tacttttcaggtaaccccggtctctgcggggagattgttcacaaagagtgcgaccctcgttcacacttcttcggccccgccacgtcatcctctaccaca

SEQ ID NO: 103314 - DNA, 287 bp, Glycine max
ctcttgttatatcgagatcatgggagttcataaatctagatttctaactactatattccttctatatatactagtactactgctccatctttcaagttgcaggcacatttcctgggggcttaaggaagagattatggaacaaagaacaagaagcaggttccccttttcttcattcccacatagttataattctgctgaaatcaaagacaacaaggtcagtggatttcatactgtttcacatacagctactccaggtggaccaaacccacttcataactgaatgaaag

SEQ ID NO: 103315 - DNA, 284 bp, Glycine max
caatattttagttatggccatatatttttcttgggacaatggtaattacatttttaaaaattatataattgaattaactattttagcaactactagacccaagttttgcattagtcatcagttaacaaatgttctaaaatataatttctctaaaattaatgtcttcattattcacaacattgtctttactaaaagcactaaattgaaaattgacataaaatttggcatagggggagtgaatcaattaaacttaaggtaaatagtcatttttacttttaaagtgt

SEQ ID NO: 103316 - DNA, 209 bp, Glycine max
ctcactccgacaataatttagctctggagactcagttggttctaacgtactatccgtccacgccggtatccaacagcaccatgctggattgtgtcacttcccatgacaaaatcaccacagcagcttctggcttcgtacttgaggatgttcctcatctatctgattacatccctctcctccaaacatatcctgacccgttacaagacaat

SEQ ID NO: 103317 - DNA, 247 bp, Glycine max
  unsure (1)..(247): unsure at all n locations
ggggagaaacaattgaaagggtttgatatgggtgggagcaagaagaggaagaggaagagaaacgaagagcataggggaggcacagtgtattcagaaagagaaaacccaccagactttgctcttttggcttctctctaccctgaatttcacccttttgttcaattcttacattctcactctcggcccaccatcgattggagcgacttcaatgccactcgncaactcacgcgcgtcttgctccatcatc

SEQ ID NO: 103318 - DNA, 223 bp, Glycine max
ctttagggtttttatgaaccccgtcgctcagtaattgtacccggataggcggctaaggtaggttcgctttggcactcttactatctttcaacgccatttgccattttgttataatcgtcgcttctgttttcagaataataatctgagacgaccaacctcagcctcttaccatgagtaagctacaaagtgatgcactgagagaggcaatttcccaggtggtgag

SEQ ID NO: 103319 - DNA, 207 bp, Glycine max
aggatgcagctccagccgatggtgacgatgcaaaacatttcatggaacaggataataatactgaagaagtcataaacgatgtggatgatgataaacatcatgattaaaggttatcatatacctaaatgaaatatatttagtgactagatcacaattttccttttgagtgtaaaagtaccatgtatgaaataataacagtaaaaatgg

SEQ ID NO: 103320 - DNA, 139 bp, Glycine max
cggctcgagcaattttttgcatagctttttcctcaacctctttatacaattcatcgatcgttcatctatttattacgaacgattggaagcataaacccaatattattttaagttgccaaattaagaaggaataatataa

SEQ ID NO: 103321 - DNA, 150 bp, Glycine max
ccccatcctagaatggattctgatcatcctcctcctcctcagttctctgttttcttatctaatcattaggtttgccgattactttggcgtgaagaggccttgcgcatggtgcaccagaatcgatcacatcctagagcctgggaagtacaa

SEQ ID NO: 103322 - DNA, 239 bp, Glycine max
tctgtgcttccgctccttggcttggcgctgggtgcttccatccgcctggacgctcgacagagtgattgctcgtccaactcgaactcgaccgcggggccatatggactgtcgaatgccgactgttcgaacgtgacgctctcagtacccatcaacatcacgctgaccaacttcactggtgtcgacaacacctactcgaaccagtcgtacattacgcagcaggtgatcgagttcactcaagc

SEQ ID NO: 103323 - DNA, 280 bp, Glycine max
attgtattttgaaattctcttatctcctttaactccggaaatagtgccagatgttttggtcttctcgtctttggaggagaagatgtcgttcacccttaagattgaaggaagcattaacaatgaaaatatagtttcttcgtctttggtttgggatgatggcacttttcaagtaaggagccccgtcgttgtttatgttcctccgtaagttctctgctgcgaacacttgtcaatgaagaaacaagcaacatgcatgaatggagatgattaatgtgtatttata

SEQ ID NO: 103324 - DNA, 284 bp, Glycine max
cttagacacactttgctttgcttccgtttcacgtgcattcctgtgctatcttgagctgtcacattatcattttgttcccacttctccctaactgccccatttcatcatccccttaatttaacacctctccatgcttccttcggggtagcaatctcctcttcattcttcttttggaaacttgttcctggccacgataacgcctcaagttcaaaatggagtttagcgtcggtagagtttatttcttagatcatttgacggctgaacacaaatatgctggccagttt

SEQ ID NO: 103325 - DNA, 254 bp, Glycine max
ttgatgctgagtgctcagttgaaggtagagtagattcttgtgcagtggaagagccaaagactagtgtcaacttggacaaaaaccttccctcacaacgtggtgacccaacgttcgaatatccgtcaaaagtgtccacatttaatgcccaacagtgtctcgaacaagattgtctagaaaaaaggataattgtggacgaaagccttcactcacaaccaaagttcgaatccccgttagaagaggtgcctatatttagt

SEQ ID NO: 103326 - DNA, 277 bp, Glycine max
cggagttgcttgaactgtgagatggagatggcggagttacttcttttccggtgaacgctttgttggcatgagttgcccttgttttctgttttctaggaattacaataggtaagatggattctttacctctattccttcacaacctctacttcttctagacaacaagagttgcctgagtatgacctttgcccttccttgggacgagaggagcttcatcttctgtttcattcaaatcccttagcacttggatggttgtcttattctcccatgtttcctt

SEQ ID NO: 103327 - DNA, 281 bp, Glycine max
ctgcaatccacatagccacatgcagggagaaagaagacagcaatacatttcctgatcataaagtgctatcatcacagattcaatcactgaaagctgcactttatgctattgagtctgttatgcctgaagatgccatggttggtgcttgcgaggaaatctgctcataagctatgggtaaaacggctcagacgcacctcaactttagtggagcttttgcaggttcttactgattttgttggtgccatcaataaggattgcttgtatcaatgccatttctggat

SEQ ID NO: 103328 - DNA, 260 bp, Glycine max
cttaatctaaccacacccttatttcattatttcctgactgacatgctttttctctctcagctgggttgggtgtcacagcttatacctcgagtggctctttatccgtagcggatctccttcctgggtaccgacacacagtgcatatactcaggatatcacataacctcatcctagagaatagaataacgatttccagtcctctcttacctctcttatctcactgactggaatgacaggagattggcttggcgcactggaaa

SEQ ID NO: 103329 - DNA, 284 bp, Glycine max
ggcattggttctagtcttagaattggcaatgtcacattgcaacactcaataaagagtagaattaagagaattcgacaaaggcttatggctttaaagtatgagtttcttgagccccttcttggtggtgaaagtgctagcctgggatatagagtagcagtgggtgctgctagggcaaaagttggccggtggcttcaagaacttcaaagacttaggcaagcaagaaaagaaggggccacaagtatcgggctaataatttccgaaatgatcaagtatttggagggaaa

SEQ ID NO: 103330 - DNA, 162 bp, Glycine max
ctcgagccttttcctctttctgaacattactgtcatttgttgtcatcatggagaagaatagctactaacgttgttcagactttggagcttcctttgtttgttgtctctttctgtgtttcagggaaatagaaaaaggaaaatgatcggaaacttcatcgacga

SEQ ID NO: 103331 - DNA, 275 bp, Glycine max
tcgagccttgagtctgatcactacacactactcttcagccttttcatatcaccctttgctagcaaaccaattcagtctctttgcttgttctacctgagtttgaaacgtaaccttagaaccatttcacacaacactttctgttccttaattcctgaaagaaaatggcatcttgttcaatctcagcctcaggctcatggagtgttaaggacaacaaggcctttgaaaaggctctagctgtttatgacaaggacacccctgaccgttggtacaatgtt

SEQ ID NO: 103332 - DNA, 170 bp, Glycine max
gaggaaaaaaaaaaaatatggaaaagaaacaagattaagaattggggtttgaagaagccggtggtgtctccttggttggtcccgaatggatctggtaatggtaaaatataataacttttttatatcgtgatcaagatgcgccgagggagagccaccgccgccgtcgtgga

SEQ ID NO: 103333 - DNA, 271 bp, Glycine max
caatctcacactcatgtctcaagttatcaccctcagaaagcccgtcttcgtcaaggtctctgatttaaagcctggccaaaatggtttcaatgtttaccttaaggtcgttgaagtcaaccacgaaaaggccactaagatcgacggaactaccctcgaaattgctgaagccctctgtggtgatagcactggtgttgttaaagtcagagctattggagaaaatgccgctaaaatccaacaaggaaaagtcatctctatcagaaacggtagaagt

SEQ ID NO: 103334 - DNA, 252 bp, Glycine max
tgcacgaaacccataacctcacgcaaccaaacacgcccttagctccaacacattcccctcgtcatcggaaaattcaaccgccacgccgtgaaatatggaggctccggcggtggttggcgatcttgttgggatccaattgacgttgtcgtgccgctacttgtttgggaactctaagcgtatctggtagtacaaatacaattacaaaccctaagcaaaagcgactttacttagcatagttttcaagttattcca

SEQ ID NO: 103335 - DNA, 211 bp, Glycine max
atcaaaatgatgctcgggtcaaaagaagagaattcatatggacaacctacctctccttaatgcagaatttctcatgagtgacaacgttttctttggataaaatgcttgtatgaaaaggacgaaagtcatctttatggactattaatagtatgggttttggtttggggaagtaaggtgatttttcttttttggtaaaagtattgaattcttt

SEQ ID NO: 103336 - DNA, 275 bp, Glycine max
cctcgagccgaatcggctcgaggtgaccagcctcgtgacctgatcacaaatttgtgtatacaaccctcaccccctacgcgctaccgtcactccagttcaccctgtcagtcagtcacaaaatcgcgcagcccgccgttcaaataccgtcgtcattgtcgaagtggattattcagctagctggcaagttgcgtcaccgtcaaggagcaagtcgtgaaccctagctggcaagttgcgccacgccgcgacgccgaagggttcagtcaagaggaggagga

SEQ ID NO: 103337 - DNA, 267 bp, Glycine max
agcgacttttcacacacattcatcacctaacaagcttctcagttgctaggtttgtggtttaactgagatggatttttgagtattcaggatattgcattttgctatgattgtctggttgttgttgatcccttagactggtttcaacttcttattctcccattttcttgcaagatgacaatgatgacatattgactatgagggaaaggcagagcagaactagtagctatttcgctaatctgtggcaggaaaaagaagctaggttctaag

SEQ ID NO: 103338 - DNA, 270 bp, Glycine max
aaagagggtatttttctctgcagcaacaacaagcgagtgtgctttctcctttctcctttgaacaacaacaagaaccactctctcttgtcgccacatatttaacgacaattactaaaactgtttttccgtgatggagctggctttgagtttaggagacacgtccaagtcctttacatttctcgacaaggcggtgactttaccccccaacaaggacccacctgggttctgcttggcgccgagtttcgccgagaaaagaagcgattctgagag

SEQ ID NO: 103339 - DNA, 256 bp, Glycine max
aaaattttcatttcactttcctctctcaaccagatccctgactctcgctgtgctcgaaaatcgtgaacatcatcaggtaattaggaatcggctactatgtggatggatggagcttagatttgaggaatggggtgtgtgattagcagggaagtgtcgaagggggtaatctctgatgtgaaggaggagagggatttgagtggtgacagtacgaggaaggttgatggagtgtcaaggagcaaagatgaggtggtagagg

SEQ ID NO: 103340 - DNA, 278 bp, Glycine max
aacggtaagcatgaataacaattgctggttcttgtaattattattgcaattccattttttgtgaattcactgtgcaaagttgtatgttaattagtgtgacccagatggtgttttgagtatttgattggagattcattgagtactttgagagatttgtatgatacctatggatactttgctcaaaacacctaacaagcttgagtttttgcacccccttcacggttactctgaaaaatttagcaattcatgttcctctagggtacaaaatcaggatttta

SEQ ID NO: 103341 - DNA, 269 bp, Glycine max
gtaagataagagggcagccaacaagaagcaaaacactgaaacaaaagcaaaaaagagctgtgagacagtgatggctcacggtgcttacagcaagccgcgcgtgagccaaaagcgtcgatccaactccaagcctctgggcatcgccaagaagcccaagcccaagcccaagccctccgtttccctcaaaaaccagattcgatcccttgagcgcatgctccgcaaggtaacactaaccctagccctaactctatccctattggcttattcgt

SEQ ID NO: 103342 - DNA, 280 bp, Glycine max
aattggggcacacacaaaccctaacatgcttctcacaccaaattaggttagctatgaagattgaagaggcattagtatagtgatgagtgttttcgacaagtgacaggtgattaaggaagtaggtgtctctgaactatgtttctaaaatgttttggccactcaagttcatcacagagacagtatccaacaataatagaagagctgtgccatcaattttctcttgccgatcttgggaaatcaaccaacaactttgatcaacacagagttattgggcgtggag

SEQ ID NO: 103343 - DNA, 273 bp, Glycine max
tgcccactgtattccatgattcaacatgtaggtattgtaagagcattttctaatagaagtgttcactagtgacattatttttaaagattttttttcattttttattttatgttaagattttacattattttttaagtccagtaaaaaatcaccttttaatatttattttaaaataattaattatattgtttttaattgcaaaaaaattaattaataattaaaatatttattcatggagataatttaaacttactataacaatatccttaattt

SEQ ID NO: 103344 - DNA, 124 bp, Glycine max
ctcttccccaaatgtaataatagacacctttgttggcatttgtatgtatttattgtattggagaaggaatgaattacttacagaatgatatatagttcaagacttggacgagagacaattgtac

SEQ ID NO: 103345 - DNA, 249 bp, Glycine max
attaactgagtgtgcagcatttcccagtcatggattctctgtctacttctcctctccccttatccactctccatcaaaaccccgaaattccccaccttcaaacccttctcccatttctcaaaccatagcaaaccacactctccaaaatcccaattaccctctttttctgcactccaaacaccttctcttaactcactccaaacccccttagcaaaacctttcttctcatttaccatgctcaacctcttc

SEQ ID NO: 103346 - DNA, 268 bp, Glycine max
cttcattcatcatcgagtaagcagatagatccctcccattccatcggaggatgtcattctatatattactactaatcaaactagtttcttcgaaaaggtgagggtactactactagtattactgccgcaatttgtaatatcattcaaattgctcaacctcaggaggagcattaaaaagtgagtgttaggtccaaatgcacatcacgtctatcttggttcttgtgcaggtctgctctgtctcctgatgtccagcatgctttctcctcag

SEQ ID NO: 103347 - DNA, 256 bp, Glycine max
cattgtgtaagagtgtttgatgtatctgttgagtaattatcagctccacatgaagcaagttgcatactcgtttgatgtggagctgataattgtgtaagagtgtttgatgtatctgttgagtaattattgtacccctttttttagttatatctgtagaatgattttttttatcctcatagctatgagctaagaaaatttgtccctgcttgcattgttcttctccagaaatgcgaattattattattattattgttaa

SEQ ID NO: 103348 - DNA, 275 bp, Glycine max
ctcaaggagagaatattccctgatcattgttcacattgttactatttgacaaatcaaattcagagttcgaatagtcaaaatagaggtgcttggtttatgtcttggtaaattgtggagtttatagcattattatgctaccaaaactcactttatagctgaaatttgattggtgcattttttcagcaggacaaacttcaggtgacataagaggttgagtggagttgcccaactgtgattgtccatctgcagaaagataccgagaaatgattggtttt

SEQ ID NO: 103349 - DNA, 267 bp, Glycine max
ccagatggtctatcatcaaatgttatatattggatcagttgatggtcttttactctttttatttgtaaactttcatgaactggcgcagactgcctatccctgcagatatattaatatagtgagtgtcgctcgggtttctaaatgcaagttaaagatattcctatatcactatttaagtcattccatgatgtaccaatttaataaatgtagacgaaaccctatagcatgtttaccatttctctgaaatcctgatgatattttgcagtg

SEQ ID NO: 103350 - DNA, 243 bp, Glycine max
ctctgccgtttcctggctccacttcactctcaacaagaagaagaacaagactcttaaccagagacggggacatgcaaaatttgcgttgtcatcgcaaggcactaatgttgggaaccgggtcattgatagggagattcttggttttacggaatttcacagggataacactcttactgagattgggaagttgcaggatcaccatggagaggactaccgtgtctttgaggaaaacgagatccacat

SEQ ID NO: 103351 - DNA, 272 bp, Glycine max
agataaagaagcatcaagcgcgcgcacacacacccctctcaaaaagaagaacaacatgtcaaactccacatgtacagaaatggaaaaggatcacacaatgacagcacaacgatcctcttacatcgccggctgcatgatctccccttcgtgcttgccaatccacaaggagtacgagtactcgcgaatctattacagccccagaaagagggtgagaaggtggaggaacatcctcagaaggttcatgagggagagcaagtctatgtgtagatcca

SEQ ID NO: 103352 - DNA, 171 bp, Glycine max
ccacccatcaccgtttccggcaatgtggatgttgtcgcaatccaaacccctccgcagccgcacctacctggtacacttcacgaggcggcgctgtcactggaactcccaaaacgacgccgcatcgggggtcacccaagtagtggaacttctccaacttccaccggaccattg

SEQ ID NO: 103353 - DNA, 273 bp, Glycine max
tgatggtgcaccatacctcataggaacaccaccacttgctgcaaacactggaggagggtggcactgaaaaagttgttgttgttgatgatggtggtgatcatggagggttggtagtggtacttgtagcactcctcctccagaagaagacccttcattcatcttcttccaagactcttgaagcctcaacctttctaactgagccacgcctaaacctctctggggtggcttctttggaccctttctgctcctggaacatgctgatttgccacctcc

SEQ ID NO: 103354 - DNA, 268 bp, Glycine max
gtctgataattggttccgttcactaattgcccaatatcattactctaacactcaaaagtttaataacactacgtaacgaagaaagaaacattacccttctaaaccagtagtactatatattgagtgtgtccacacacaatattgcatacacaagaatctcacccccacagtttctggcaccaacatggatcaagagaccgaaccacaacctctgacctcaaagatctcaacagttgtaccagcacacccgcgaggcgacgaggacggc

SEQ ID NO: 103355 - DNA, 274 bp, Glycine max
gtaaaaaaagcttgggttttgattctccatgccatggcttctcttgtacttcttctctctctatttgtgcgtcccaagattagaagccaaagttccaatggttgttgcttcctcctcagatattaaagaagatacttcaacttggcatgtgaaatgggaaaagcaaagagaaaacaatgatcgagataatgggttggaggatatcatgggagagaagattctgcaagagccaagagtttgtattcatttgatttagtcaaagagatatctattg

SEQ ID NO: 103356 - DNA, 104 bp, Glycine max
tgggtgtgaggtctgatacccttcagaatgtaggcgcaattccccccacatgcaagcgcatagagtgtcccagctatgatgtcattcacgtaggcaacggctac

SEQ ID NO: 103357 - DNA, 266 bp, Glycine max
tctgggaatgataagagagcaagagttgatggaaaacagcaacaacaacaacaacaacaacaacgctactactactacaccgacgaatagcagcaccagcaaaattaacgcggacaccatcaccaacacgaccgaggaagaggtgagcagggataacggagaggaccagaaccaaaacctcggcagccacgaagggtcggagcccggaagcagcggtcggaggccacgtggaaggccagcggggtccaagaccaagcccaagccgc

SEQ ID NO: 103358 - DNA, 264 bp, Glycine max
ctaccatctctaatattccaccaagcaattgaaaatgcaacatatcctctcattacagacacacagttgcaaatcctcccatagcacgaaagtaagctaaagacaactttccagactcaacccaaccatacatcaagagtgaaaatcaaggcatttctatctcacttcattttcacttccctcatttttctatcttctctaacaggctcaaccataattattcagcagatatggtaatataaccatccagaaaattcagctagg

SEQ ID NO: 103359 - DNA, 265 bp, Glycine max
attgagtcttggattggtggagaggcaattttccttctcttgccaaaggcaatgaaggaaacttcattggctcagtctctaacttgggtttggaatttcccaattggaattggctagtttttgggcctttaggttggcccaattgactttggttcccgaagggaattgatggaattagaaagcttgagaagtactcagctccaatattggttgctcttacttcttgtcttctcatttggtcttgtgtcaaagctggtggcattgg

SEQ ID NO: 103360 - DNA, 149 bp, Glycine max
  unsure (1)..(149): unsure at all n locations
aggagagttttcaagtgtgcaagatgccttgtataatgctactggtagactgcgagataatcttttntgtcagcacacagaatagtgctggaacaagggagcctttcttcttctacgagttgattaccagttccctaatgggatacagc

SEQ ID NO: 103361 - DNA, 301 bp, Glycine max
  unsure (1)..(301): unsure at all n locations
cgaagaacaagctgtccgggggcgccatagcggggattgttgtcggatcggtggtgtttcttctgcttgcatgtgttcctccttgattcgcctgtgcaggaacaagagtgcctagaatattantgcggtcgacattgccactgtcaaacatcctgagacggagtctgaggttcttgccgacaagtgtgtctccgatgtcgagaacggtggtcatgccaatgtcaaccctgcaatcgcttctgtggcggcggttgcggctgggaatggtggtagcaagtcggaagggaacgcgaagaagttg

SEQ ID NO: 103362 - DNA, 296 bp, Glycine max
cacacttgcaagaagcaccttgagcagactaaggacatttttatttacagaggagagaaagctttctgcagcaaagaatgtcgccaccaagagatggtgcaagatggagcaagaaattcagaatttgacagatactaatgagaatttttaactttcaccacggcctcaaaagtgttgcattctgatgaggatcaccagctagtcacaattttccattcttggttaggattttctatataatattttgtcgtgactagcatattatattttacccttttgaagttttgtttttttgg

SEQ ID NO: 103363 - DNA, 195 bp, Glycine max
gattattttaaattttctcgattcctgcgtattaaaaaaaattctcaagttttagattcatgggggatgtagtgatgagaacttttgttattacttttgtaaattcaacgtcattgtgattgtgttgtatttgtttctttacgttgctggttttctggtaaattcaaagtttctggttgattgcttttgttgttt

SEQ ID NO: 103364 - DNA, 267 bp, Glycine max
attcgttcgtatatgtatttgtgtttgcatgtgtgtgagttatcgaacatttcaatgatttatttatccgtttgcattttccttgccaatattctctggatctgtttgtctttttatgattgctcttacttggaaattatagatcttgatttccctgtgactatactcttgatttttcgaaattcgcttttgatgcaatgttgtatgtgtggatattagatgaattttgttgtttggtgtatcaattgtctagtttcggatcttgat

SEQ ID NO: 103365 - DNA, 216 bp, Glycine max
cccaaaaccaacccctttttatgtatgtgtcttctacaataacaataacctctgctacactctatcaccctacactccctctcttgttccatcacttctccgagagagtaaaacagttaactttatagtttttggatatatcagccaaaaggggtgtgaaagaacacaatgcaacacagttcagcttcagggtcattgatgaagcaactgagtgtg

SEQ ID NO: 103366 - DNA, 228 bp, Glycine max
gttaagcgctgcagcaatccgcggagttcaattcgggtgttaaggatggttgcgcgtgcttctcagtcatcttgcctacttttccaagtcatgcaaccctatgttgcatgaccagaagggagatcaataacagggcttgtcatgaaaatgaaatttgtcctcactatatcagtaatctccactgaatcagcaatgctataatctgcatctcccttagtcttttcactc

SEQ ID NO: 103367 - DNA, 133 bp, Glycine max
atcggctacatttgaggtagtatttttttagctacacccgttgattggtttgagaaatggcaacccaatgaacaataatttggcttcctcagttgatattcgcgagggaagagttcttccaaatttgtaacga

SEQ ID NO: 103368 - DNA, 248 bp, Glycine max
cacttatggacatcatcactgacctcgccatgttcatcactccgctttggattgcgcgttatcgtccgcgtcgtcgtgggctgggcctcgaagcccaaatgggcctttcaccccaaagacgctcttctcaagtttcgctcccctcgcccttccaatccccaaaacgacaccgctttcaccttctccagcaccaggcttgtctcttccgagttcccaattgcctaattatttcatttctaattgctaag

SEQ ID NO: 103369 - DNA, 100 bp, Glycine max
gcgtggggcgcgtcctggtaccctttcccagcgagtatcttgggtttaacccgaacactggatccggaaccataattcactcgcgcacggtgataacccg

SEQ ID NO: 103370 - DNA, 266 bp, Glycine max
atttaattcaaccttggcataaactttcgagattttctatcaatttgttgtagagatgcgttctttaatttaattccttttgcaatattatctggaatctctagttatctgccgttcaaaagctccaagagaagtctttttgtttcttcttttaagcttttgtgctttgtgatactaaacattgtgttgtcttctgtagcttgagaaatggcacaagagccctttctattcacatctgaatctgtacacgagggtcaccccgacaa

SEQ ID NO: 103371 - DNA, 258 bp, Glycine max
ctacaataggttctttaacttcagcaggtcgtgtttcatcaaatggacgcaattcagcacctgcatcaaggccaagctcaccaagcccgcgagttaggcctccacctcagccaattgttccacctgatttccccctagaaacaccaccaaaccttagaacaacattgcctgataggccagtttctgcaggccggtcgcgtcctggcggtgtcactatgaagacaaatagttctgaaactcaagcctcccagttactat

SEQ ID NO: 103372 - DNA, 259 bp, Glycine max
agacaatgtagaggaaggagcttccactatagtgaatggcttgaatgaattttcaatattttggggaggtcttgttagaattgatgtcttgaaggttttgattatatacttccaacttgtacatcttggaattggacaatttttttagaattcaacccctattccatgtctaaataatgccattagtcctgataatttcaggttctcccagaaacttgtttgacattttatggacccaagagaataccaattcatatgg

SEQ ID NO: 103373 - DNA, 290 bp, Glycine max
atcgcatacagaagattcgagaagacaccaaagccaccatcaaaatcgctgacgctattgccagacatgaagagcgtgttatcattattagttctaacgacaatgatgaaaaagttactgatgcagagaaagctcttgagcaaatagcccatttaattttaaaggaagatgatagcagtcttgatgcgtcaaaagttactgcaggacatgtggctgccaatacgataagacttttgattgcagggtcccaggcaggtggattaattgggacgtctggtcaaaacattgag

SEQ ID NO: 103374 - DNA, 285 bp, Glycine max
cgcaaggtcgtcccttccttcagcttgagtttgcagtggttagtgtgacccacatcacaggtagcgcatcctagcctccattgtttccagctgcctccgtcgtgcagatttacatattccatgaacaaacataaccaccataactcaaaggttagaagtcctcaaagaagacctcagtgacagagttacaagtcccgaaacaggcccaccaatcagtcacaacatttcctacacgaaggatgtggagaaaattaacttgttcccgactgcctctgatcgtatcaa

SEQ ID NO: 103375 - DNA, 288 bp, Glycine max
ggatgtgcatatcgacatgacttactgcaccccatgtgggttcaaaatgctggcttttaattaccttgggatcacagagcacccactttttgttgaagttgagacattgctgaagacgaccaatgtgactcctgcggaggtgggggagcagtttttgaagaatgaagacccggaaattgcattagaaagcttgatggagctccttatagagaagggacgaaaccatgaaaagaacaaagcagctctcaccattgaatgctttgagtccgcagagagttttgaaaatga

SEQ ID NO: 103376 - DNA, 219 bp, Glycine max
acagaacaagggaaggtgacggtttcagggaatgtggaccccaacgttctcatcaagaagcttgcgaaatcagggaaacatgctgaactctggggtgcccccaaaggaaacaacaacatccagaacaacatggcgaatcagtttaagaacatgcagattgacaataatggcaaaggtgggggaaacaacaagggtcaaaagggtggtggtgggaataac

SEQ ID NO: 103377 - DNA, 123 bp, Glycine max
cacgaacacaacacagctcagccctctccgcgcgcacaatcttttctaatccaatacttaatttctatacctcgtagggcataaaccaacttcaatttgaaatccattgcaatgttgactcat

SEQ ID NO: 103378 - DNA, 148 bp, Glycine max
gtcaaggtaaggtaagacaaaaaacaagacaacatgggagctcaacattttactacgtcagttttgttaggtgtttgaattctaagccaaggtttggcaaagggtgctcatggctttgcttgcaactggggaacgcgtttaacacatc

SEQ ID NO: 103379 - DNA, 294 bp, Glycine max
ctggattggtccatccatcaatgaaccttggaataagttaatatcttcaagatgacattgaagagcaactttacttctatttcatgaaatgagttgaagatgctggactaacgttcactaatgtcaataaagtaaatgactagcggcagacttagatggatcttgcatcaatgcataacccaggcgctcagcaatggtcataaaattaggattctgcataacctgttgcatggttgaaagtttttctaatccatcaaataaagaccagcttgacgaaagaatgacacgcatcaa

SEQ ID NO: 103380 - DNA, 177 bp, Glycine max
ctttttttaattctctggtgcaggaaggaaattatatggacttttggtatgaatgtcatttgaaaaaggaatggaatatactaaatctgagtttttccataacgtgctttccatgcaatcaacacttgaaagttgaaactgattttattaatgtcaaatgcaaagttgtttgatgtg

SEQ ID NO: 103381 - DNA, 166 bp, Glycine max
ttgttgtcttttttagcttctgttagagaccatttgggcatttagacctttattgtttctattaccatttgaacatcgaatggattaataaatcacttttttcgcacgcaaacaaagtgatttattaatccattcgatgttcaaatggattaataaatcactttgt

SEQ ID NO: 103382 - DNA, 206 bp, Glycine max
ctcacctgctccatcagtaaccagggtcttgtatactgacaaggatagttttaggtcgcaggtatatgtgtaactgtgggtcaagttcgtttttttttgtgaattttattgtgatggttgtgctgtatattttagttgtgcttctgtgtaaaagaacagtgtttgtgtaacactgcatagatggaaaggtagttttataatggtgc

SEQ ID NO: 103383 - DNA, 112 bp, Glycine max
aaccactttagaatcaacatcaagttgggttatttcatgcttctgattcccagacaacaacaataaagaagcagtgattgattagctatggaagataagtatagtctaggca

SEQ ID NO: 103384 - DNA, 256 bp, Glycine max
gcaatataataaacactcacacggagacaagaagaagatcatgcaagatatcaagaagcagcaggataagcagaagaagcaaatggtcaatgaagaatctaagaagaaggagcgtcacattgtgacgtggagtcaagaggtccttcttctctcactccaaaattattttccttccgtttgatgtcccgaatttctcctgctttggagtctaatgagtgttatgagggttgcaggaagatgacatactgagggagca

SEQ ID NO: 103385 - DNA, 230 bp, Glycine max
cgttaatgctctgaaagcaaagctcttgctgctgctcatcatcataaagacaccattcggactcttccctccatttttaacaaagttggccatgaattccataaccctcttggttcttttgcccctctttactcagtttttggaagttgagcctgaaagacccaagcttccagggaaaaccaggttccccatctcacaaatcagtggtgatgggttttgtgtattgtgat

SEQ ID NO: 103386 - DNA, 276 bp, Glycine max
acacaacactacactttggtcgtgtttcatctttttctccgagaaagagccaccccacgtttcactttcactttttatttcctgctttgggaaatgatgccattgtcgtccctcgcaaagcaaaaccccatcatcagactctagtccattctcgctttcctcttcccccccttttgagcacgtaagaatcctccgattctgaaccgaggcacgtgacgtgtgctcgagcgtgtgtgtgtttttggccatggagaaggaagaggacaagtacgcgaa

SEQ ID NO: 103387 - DNA, 275 bp, Glycine max
caatttccttcgtttggggaaacatgcatcactcaggataaagataagagtttgaagctccgcttgcagccatactcgaatcatggcacataaattctcaatttgaggaacatttgttttgtttagatcataaacagaagagcttgctcaagtgaaggaaaaaaaaggttctactaggagagagttaatgtagttatctttctgagctttgtcggctcttgtcatggacccccgcaaagagagaataaagaatgggtgcctgaagattttggaag

SEQ ID NO: 103388 - DNA, 269 bp, Glycine max
tgtaggactgtcgaaacctgcagataggccggatcatgatgtcgatgatccctatatctgatgacattgaccatcccacagctttttctaaagccgttgtaggttatgtgggatgctaccatgtttggggtctttaatgacaacttccccttgtacataaagcatgaagatctatctgaaatagcacacggtggtcaatgtctcagcatctctgttatacagttgtggattttctaagtcagtttacattattgtttactacctaactt

SEQ ID NO: 103389 - DNA, 270 bp, Glycine max
atcgagccgaatcggctcgagttatctttgtgtgtgtatcgtaaacatgtaaacttcgtggacaaggtatcgcaaactgaatacctcagactagacttgacccgtcaacttgcaactctctcttcaatcgcaattccttcacttcccactctcatacaaagacccaggacatcatagaattttttgtcagaagcatggtaaatgagcatttgggtgcaatctgcaatgcacatgtggtacatgccgattccagtgactacggtgccttgg

SEQ ID NO: 103390 - DNA, 271 bp, Glycine max
gagcgtttctcacttcgttgatgatcacggcgcttacaaggtgacaattgtggctatggagcattatgagccaccgttaccaaccttttttctaattggacaagctagtcaatatttggacaataaatccaccaagcagcaggagatacttcatgcaataggtgagattttggctagcactacagatctgcagttttcagaagacagagtggtctggaatccaaaaaaggcatcaggggaaagcaaggaaccatggcgtgcattatatggt

SEQ ID NO: 103391 - DNA, 247 bp, Glycine max
atttgtttgacttttaaatagataggtaaacagaaataaaaaatactcatacagaaaaaaggaaagaatattataatcgtaagatttccaaaactaaatttttctctcattctaatttttctctcctttccgttaccagagttaattaatagcacaaagcgtgaataaatacccccaactccactcttttgaataagcataagcattttccactgtgcctatgctcgggagcaatttagttttggaa

SEQ ID NO: 103392 - DNA, 261 bp, Glycine max
aaccagaacaactgggtgactgaagtgatgaaggtggccgttgcttatgctaagatcacatacgaagaggaaggtctctgggacattgatgtgaatattttcttgtcggaggaagccaatgtcacagccaactacacacctcgcactgcctgtggtgaccttgtcatcaaactcggcgagtggctcaatgcggccactgtggaaggtctgctcacttatacgagacagctttacatggagaactcaagctggaagaccaag

SEQ ID NO: 103393 - DNA, 265 bp, Glycine max
agtctccaaaacaagcacccccaagttctggagaaaaatctgttcatgtagaagttagtccagtaagtgaaccagatatagttagccagccaacacttggatgcaagccccctggtgatgacaaattcacagtgagggagcgactgtcaccggtggctgaaactgttcctgtggtcaccactactaaatcatcaagccagaaagtcttgcaagagaaaggaactttgttgcagaatccagcacaagaaaggcctgacactggcca

SEQ ID NO: 103394 - DNA, 131 bp, Glycine max
gctggagcttatttcggggctgagagcggttgatcagaatagggacaagcgcgaaatggcgcttgcggatttggttgtttcgcggatccagatggggcagttacatcaagtgctcgacccggttcttgact

SEQ ID NO: 103395 - DNA, 206 bp, Glycine max
cgattgcaaacgaagacacgatcatgtcgttttaagcggcatggagcgcactcatgatgtcgtttttcattcgtcgtactcaaccctccttactccgaacgatactacgaaaatacacgacactcttcccataccataaaaaatgcagtgtttatctgaacgcaacggtctaagattagaagcctcaatctcaaatcatttcgttc

SEQ ID NO: 103396 - DNA, 124 bp, Glycine max
gtgataaaatacaatgaatttgcacacctcaaagacggttaggatcagtttgtcccacttttatgttctctgttcctcaagtggactcaccttagagaacagagaacataaaagtgggacaaac

SEQ ID NO: 103397 - DNA, 169 bp, Glycine max
gaaaatgaaaatgaagttgagccagacacagatgaagttgatgatgatgacttgttccctgaaagtagtttgatgccgactgagaatgatcttctgtgctggttacttccatcctcacctgtcttgtctttgtagcttctcatgacagaatggagggctgatgatatct

SEQ ID NO: 103398 - DNA, 147 bp, Glycine max
ggcacactgtgctctttctctccttgtattgaacaagtacaacgaacatgtgaaacactccgaacccggttcacagacacaaggacatttgaggtactcttacgcacgtatgaagttcgggaagagaaaatgcaaagcttatgtggg

SEQ ID NO: 103399 - DNA, 187 bp, Glycine max
  unsure (1)..(187): unsure at all n locations
aanacatatattttaatggaaagagagatactgacgaagacggtgagacatagagatgcttctttctcatcctatctcagaccagataacaaggcaacaccaattactactgctgcacctattgaagatgccactactgagcttagcatattcgatgccgcaaatacttcaatgatgatgacagcag

SEQ ID NO: 103400 - DNA, 167 bp, Glycine max
gtgcgattcctctgcttcctgtttatggtggagtcatcgtggagattgtgagttccatgttggacctctgtgtgctcgcagtacggggcctcatgcgcgccctagctcgtgaagatgatcgtggcgctccacgacgccaagcagaagacctcatgcatctatgtgtg

SEQ ID NO: 103401 - DNA, 133 bp, Glycine max
ctcgagccggttcatttcaaaatcaaagcttctgctttgtgatggaactagagagctgagaggcctaaacctctgtttgctctctctccttttttggtgcagatcttgaacttgagctgcattgtcatagaaa

SEQ ID NO: 103402 - DNA, 176 bp, Glycine max
agtgtcttcattcataccatttctagactagactcggtactccttgctcagaagtaaaacagactcaacaaagcaataacagcacaaacaaacgctctttgcacagagaagatcccaacttcgcaacaatctcactctctttactggccatggaggatcctccgttgcagcagatc

SEQ ID NO: 103403 - DNA, 139 bp, Glycine max
tccttctagagtgtcacccttgccaagggttagggtttttccgtacactgtcgcatatatctcaaatcgtgcgagctagagagctgggttctgcgatctccttttccatcatcgtcatcatcttcatctcactggctat

SEQ ID NO: 103404 - DNA, 238 bp, Glycine max
cgaagtagtaatgttctttcctctcaggcattgcatcaaacagtttcaatacactctcagtcacaggcgcctttcaacttcaacttcaacttcaatttggatgacccaactctaccaaagttcctggaattgctcaaaaaggtgacccattcgtcacagcaagcattaggtctccatttgtcaggtttccaagcaaatagggatttgatatgttccgctatttgggtgttgagggaag

SEQ ID NO: 103405 - DNA, 197 bp, Glycine max
caaagagagattttagtttttaagatacccttcttgttgtttcggttagtgagtgagtgagaagaaaaagaaaaacgatgtcacattccaggaaacccgtgtcgtccgagttagggttcaccgagcggttccgcgactcactgagttgctccgacgacaacaccaacaagcccgatttccgagaactcgatttgggt

SEQ ID NO: 103406 - DNA, 238 bp, Glycine max
cggtgatagagtattgattgggactaggggagtgtttagaagacgatatgataaggtgcccaattttcagtggacaccaaccaccggcactgaaatatcttaacgtcccaacaaaaccaaactacccatcagttgaaaaacttgattacccatccctcccccttaaatcacataaccctcttctaatcccttctcacaaactcaaaaacaccctacagtactttataccaccctcatc

SEQ ID NO: 103407 - DNA, 184 bp, Glycine max
ctgctaatgacaataaagatgctagccagtcctatacttcatccgagccaaacaaagaaggatcctcaaactcagataacaatgctagcaaatcagatacttcatctgatcaaaacaacaaagagggatcctcaaactcagataacaatgctagccagtcacatacttcatctgatcaaaacaa

SEQ ID NO: 103408 - DNA, 202 bp, Glycine max
cggcaattgtatgtaggatcccagtccttggggtaccgtagagaccatatggaggtgctgtctccgtttaaagacgggattgttgctgactcggatattgttgacagcatatgggatcacgccttcagggaatgcctattgattgatcctaaagagcatcctatgcttcttgcagagacttcttctaactctcaacaacaga

SEQ ID NO: 103409 - DNA, 182 bp, Glycine max
aataaaaaaagccacgaggaatattatattatatataattatggtttttctgactttagaatcatgcgatttgtcaaagatatttggcgactagactatattaaggaaaagtatttggtcccgacttttcttattttactttttcttacccttttccccgtctttgaatgaacaacactagt

SEQ ID NO: 103410 - DNA, 182 bp, Glycine max
  unsure (1)..(182): unsure at all n locations
ggctcgagattcaatgataaataatatgtgtacgtacatacacatattatttatcattgaatccatactcccaagggtgagggcacaagggacttaagattttatcggatgccttcagaaggcgctgctattcgatgnattgnanaancaagatgacaccaatttagtgtcaacatagtaag

SEQ ID NO: 103411 - DNA, 226 bp, Glycine max
cttaaaccaataaacaaacccacccaatcactaaagcaaccttcttgcttatcctaaagccgcagcgcaagcaatcactctttttcttattcataataatgcaaattcttccccactctgcagcaacttattctcatttgcaaaccccataaaggcatatcatctttatactttaccgggatctgtgtctccttttatttttccccaagacaaagtagacattgtc

SEQ ID NO: 103412 - DNA, 170 bp, Glycine max
agaatgtgtttcttcacataaagttgatggagcaagcttcagagagtgaccagccagcgattttaattcaagaggaatgtgatggtgagattcaggggtctgctttgaggctcacgtttgcttgcacatctccgatttcgtggcctggcatgtcgggtgcgttggatagt

SEQ ID NO: 103413 - DNA, 155 bp, Glycine max
gaaacagtaagagccaaggagaaaagaaaaaaaaaaagaactggactccttcaattagtgcattgtttcttttcttcaaatggtagcaagaagacattgttaatttgagagatggcgagttacgaggctattaagaactttgatgatgatgatga

SEQ ID NO: 103414 - DNA, 239 bp, Glycine max
tgctcgccgacgtgagaagcctcttgattttaaaggaccctctcgcccgagtgaggaatcggagccccgactcggtcattctcttcacgaaaacggagaagcacgggaagagaactcagcgcgcggtcgtctcctccgttatcatgggcggactcgcggcgtacggcggctctccggcacggtggtggtggagatcgtccgcgccgccacgcagcacaggaagaagaaaaactcggtgt

SEQ ID NO: 103415 - DNA, 248 bp, Glycine max
aattaagaatgacacagttcataggatttccgcgattgttaagatatttggtttctgatatcggataaaatgaagtcaaatggcaaaagctacaatttagatgtggaaaattacgtccaccgcatgaccagacacgtaattcttctggttttcttttgttgattcctgatttgagtgagtgttgcatttaattgcatattaatggtttctcaaaagtgtactgcaactgaggtaatgttattgtttga

SEQ ID NO: 103416 - DNA, 99 bp, Glycine max
cgaggagcagcctcaggaggagaaccatgtctcacaggaagttcgagcacccaaggcacggttcactgggatttcttcgcaggaagcgtgctgctcgtc

SEQ ID NO: 103417 - DNA, 286 bp, Glycine max
cttagaactgcggtccaggcagaagtagctaatccaaaaagtcctcaaagggggacagcaaacaaaaccacacaattggataactctgccaccactgatcatctgagcaaagacacaagcaacaataaaggtcatggcaatgccaatcatgccacagaatccacacaaaagtcggcgccacagactagaatagatcataacacagaagaagctcatccaagttcagatgtcaagggtcaagaaacacgtccaagttcagatgtcatgactccacacaatgactcac

SEQ ID NO: 103418 - DNA, 199 bp, Glycine max
gcattagccgctgcaggacttctattgattactttattggtttcacttgcaatgatgctgcaatcttgtcaaagtagccatgctggaatcattgagcttaacatgcagagaataaaccttgcaataattgtactgatcatttatattctgaagctcactttcttcttatctggccttattttcttcctcaaacacaaat

SEQ ID NO: 103419 - DNA, 168 bp, Glycine max
gaagaacaacataccttggaggcaaatggcgaaagagattttagagtcagaagtttataggtgagtggacaacattcaaaaccagtctttagtgtaccctgattattatttgaatccattccatgcatatgatgagtgtgatcttacatggctggtatgtgataataa

SEQ ID NO: 103420 - DNA, 297 bp, Glycine max
cggttccttcgcactttggcaaggcttttgggtccttttgcatcacactttgccatgccatgtaactgttactcacttgcaagtagcaattgctgaatctccaagtcaaactccgtttctttagcagcaccagtctctgcattcttagcggctatttatttctagttcactctttagttttaccctcttcttctggagattaaaaatatcgaaacaaaaccccaaaatttcagatctgcccccttgttcctcatactcaattttcgacctagtattaacggtctcactctcatgctt

SEQ ID NO: 103421 - DNA, 279 bp, Glycine max
cacatacagtcagtcacaaacatctcatctccaactcaccggaccatgataattgatacatacaaacaattgcacttaactcattcattctcttctcttctcttctcttctcttctcttctcttcagattatagaagggatactgcttctccataaacctgcaatgcgatagattaccacgattacaggttagagaccaaaaatggtaaaatcaacatatgagaaattttcaaaggactttgtgatggggggagtagcagcaatcatatcaaagagtgc

SEQ ID NO: 103422 - DNA, 274 bp, Glycine max
tacagattcaagcgaatctggtttcagcttgaattgcaataagagaactaagtttctggtgacaaaagttgatgagaaatcaagatcaaaggaaaagggcgagtactctcaaagcagaaaaagtactgttggtgaatatagtagtagcacaagcatcagtgaggaaagcagtctaagtggttccagtcgcagtggccacaggcctcacatgtcaaaacacttgagatgggaagctgttcgtgctgttcagcagcaacatggtagtttaaatttg

SEQ ID NO: 103423 - DNA, 273 bp, Glycine max
ctcaagatagatgtcaatggctttgtagaccccatcatagcaatcccttgcagtgtctggcaagcattctggtactccaagaaatttagaggtccttaaggtgttggtaaggggatattcctccaaaataggggtcaattaatctaccagcccttttcactttctgtagtccatcagaaccattgatttcaacaaataatctaaccaatcttatcaccaaattaacatcataatagactcccatgtcatgtccagagactagaggatcatcca

SEQ ID NO: 103424 - DNA, 154 bp, Glycine max
caacgaagcagtgtcagggatctctctctctctctgggttttgggagacatccaactaccgtgtcggagatggagcgttgcgtcgccatcaccacctcgaacgaagacgaacaactcactccctcgttgaagattcttcattcgccattattcc

SEQ ID NO: 103425 - DNA, 244 bp, Glycine max
ggtatatgcaaggaaatccaagaacaaggctggaagcagtgctgcaaaaccatgggcccccccagcccataattctaatcctagggcatgggggaatgcagaaatggctcaaaagccaggcatccggggtcatggtggacttggaagatcttcgggaaatccctggcagacacaaaatgctaactttaggagacagctggcagaggacatggaaggctcagttagcaacaagtggatatgaaag

SEQ ID NO: 103426 - DNA, 227 bp, Glycine max
agcccgcgtcgaggatcgagaggtctgtggacagagggcaagcggaggagttggcgtgcgtttcggtgaagatgtcgagggcgatgtacgcacagctggtgcagcagaggtttcacgctcccaagtgttacccggggatgccggctcggagctagaaggaagggtttgcagaggcggagctggtggatgaagatagcgtgtgggtcggagatgatgtatcagcagcg

SEQ ID NO: 103427 - DNA, 284 bp, Glycine max
tgcagactcacgctttcttggcttcatttgcgtttggctttgtttgcgaattcgctgtctcactgtgacagaaaaagtgaaaggaactgatctactcaactggggaatgtttatgctcagatctttatactaaagttgatgcattggtggaggaggaggttggtggaaactctgtagctgatatattcaagcaacatggtgagactttctttcataataaggagaacagtgaagccatgatttcaattgacatgccggccggtccatctgaagttttggtcatt

SEQ ID NO: 103428 - DNA, 278 bp, Glycine max
aacttaatataaaattgatcacatcttaataacattatgctacacgaaacaaatatatatattaaagttagtgatgtatacttaacgataagaaattttttatgcaatttttatacttgtgaaattattttaaaaaaatatttttcaaaagttaattatgattgcacatttaattcatgtagaataaatatagaactatcaaaatagaccaacttgattcattgggcctgatccaccttgacttgcctacttggtggcgggaattgctaggggcaccc

SEQ ID NO: 103429 - DNA, 171 bp, Glycine max
ctagtttcattatgtcccttttttattattgtaattgtgatttaatttcgtattcctcaatatctaattggggcattagatagttaaagggaggatgaaacttccctttttgcataaaattacaacgaagaatatatatatatatataaatggtgggaagtactaagtgaa

SEQ ID NO: 103430 - DNA, 278 bp, Glycine max
gttagtacttagcagccacaacaccttctcttacttgtcttgctcaagggcaaagaagagtggaagcaatcttatttttattatggtgtttagttgatcgtggtggatgctttttgagatggatctcaggcattttagaagtgaattcttgcccacaacacttaatccatcttcaacctacctccaattttctccccttagacctttgcacaaaaccctaaacctaaaattccaatcacagaaacgctttgcagttgtttcattctcccaaaggccta

SEQ ID NO: 103431 - DNA, 278 bp, Glycine max
gaaaaattcattagcaaactaaatagtctacatgatttttttgtgttctagtggtcctcttatatgaatgtctttgtgttgctaaagtatattaatagaaacatggtatcttatcagaaaggataagagatttaaacttgtagaactttgagtgtttggacttcccaatacccaaaggccccagttctctcacaaatgacaagattaataggcaacatgccttatttgttaaaccaactaacctcactaatgggtatccatcatatatagacttaagt

SEQ ID NO: 103432 - DNA, 286 bp, Glycine max
cttaatttcatcgagccattgattggctgcgtcaaccatttctagggctatttttctcagccacttgggggtaccccatttcacaatggttaatatcctcagtctcattgatgaacccacataagagtctgtgaacctcagccatccattttagctttcagatttacgcttcccactgcaaggaagaattaatccaaatactcagaactctcccattggctaccttagttatcgtacattgtctctgccaccatttttttaacctcactcactcacttaaaatctt

SEQ ID NO: 103433 - DNA, 218 bp, Glycine max
cttctaacccaccgaagtgaatctgaacatagatagcagtgcttcaaagcatacgaacaacatacgcaaagtagaaggaaagagcagctgataacaggcattttctcacggccgtgcagtggtgtgatccccacattctcccagccacaccacaccaccccatatagttttggtaggcaccccaattttatataaagagatggatttgtaactctatc

SEQ ID NO: 103434 - DNA, 274 bp, Glycine max
cgagaggggagtgtcttgccattgttttctttctttcccttgtcgccggcacgaccgtgaacgaagcaagagtcgatggcggatccctattactcatacggtgctccggcagccgctgacggagctagcattgcaaggagcagctttgctggttatattccctctgagccttcaaattccaccactgaattgagccgcattgggtcagattacctgcagagagatataggcttgttttacagtgctgatgataccttcggctccagagttcatt

SEQ ID NO: 103435 - DNA, 145 bp, Glycine max
caatgaaagggaacatatgataataaatgcacaatggtggatggggttggaattagtaggaacaataagaatatatttatcttgaaactttgcaaggaggaaaacaggtgggaattgagtgcttgatggaggctgaaaaagttgt

SEQ ID NO: 103436 - DNA, 219 bp, Glycine max
cgtcagattacttgtcagggcatctgacacaacctaaaatataggaaagtgatcttcagtattctaagaagagggactcactggggagaattccaagtaatgtgaagaaaatgataagtgcctttgaaggtggattggatcaggataagagacctcagattaaaccacctccaacaaaacaacaagaaagttcaattgacagaagagattctgtccaag

SEQ ID NO: 103437 - DNA, 237 bp, Glycine max
ccccaaaccatcttcttcaccttttctctctgcacacgaatatggcatcaatttgcgacaaagatatccctcttcgactacacaacatcgacgccttcatcgcttcttacagaaactccctccactcgctcagagccaccgcactcgaagccgcgcgatctcaatgtcacgctttctacttcacactttccaatcagtaacttagggtttacactctccgacgctcttcttaatctt

SEQ ID NO: 103438 - DNA, 265 bp, Glycine max
cttcaccaattaagctttcaagagacaaactgttttgagaaatgggatccaaggttgttgcatccgttgcccttctcctctccatcatcatccttttcatttccatggttagctccagcagccactacgatccaccgttctcaccttgttacgtccctgctccttttacaccaccaccactatcattgtcaccatcaccaccgtcaggacctagttgtccggatctgagtgtttgcctcaatattttagacgggtctctcgcgga

SEQ ID NO: 103439 - DNA, 261 bp, Glycine max
ccaatggcttcttctctcagtctctccactcaccctctctgtcagcctagggtatgtaaacatttcaaattgtacaatgggttgcataagttctcattcaatggacatgggtcggattttgccgttgtccgacacaactctaaagtcgccaatgctgctggtagaattagagctacattgacctctggaggaggaggagacctaggatcttatctgaagagctctggttttgtgaccaatcatttcagaactggggcacag

SEQ ID NO: 103440 - DNA, 269 bp, Glycine max
cgagccgtcatgatatttctgcttttcattctgccgctcctctgattcccaagtttcaacaagctgccatccacggtcgcatgaggcctttacaagaaatgcttacttttcgtttattgtgtcctgcggagagggtaggaaatataattgggaaaggtggagcaatcataaagaccgtgcagcaagagacagcaagtgagatcaaggttttagaagcccctccagattcagaggactgtgttattgttatatctggccagcgcacccag

SEQ ID NO: 103441 - DNA, 119 bp, Glycine max
gagaaaccaaccctcatttttcaagatcatcacagcctgaatatatagatgatcgtgataccgaaccttatccacttgtgccacgccgaaaacgccgagaccaaccatccacacaacat

SEQ ID NO: 103442 - DNA, 171 bp, Glycine max
ctcgagccgtgccaaaccaatcacttcgctgcgagattcgatttgcttgccatatatacactactcgaatcgaatccggttccaatttccaactccgcctcttgttcagaagtcgcttctgtgtcgttacaggtcattcttaaggtgacaatttctctgcacgacatgtct

SEQ ID NO: 103443 - DNA, 282 bp, Glycine max
cactgcatcccttcaagacatggctggccaagagatttgcacttctcaattcattgaacagaaatattcacacaaacctagaaattcctcaaacggggactgccagcttgatttacttgacttgaccaatatttcctcactggactttgggcaggaatcatcacagatgcaaaatgattgcgtactcctagtgaaaatcacaacattgtgaatgttccgtttcagacttcgatggggttaggtgttgcaacgaccatgggacctacatctgttaaaccagaa

SEQ ID NO: 103444 - DNA, 283 bp, Glycine max
caacacaacgcctttctctctctctctctctctccaccaaaaagaaaagatcataaagtgagaatttcacacacacattagtcctcaagacaacctcaactgtaataatggaaacacatcatcaaccccaaaagaacaaagaaaacgatgtgcaaaagaaaactgaagaaggagtagtagcaaagccaccttcaccatcctcttccccttctcacgaattctccttcacaatctctctccactctacttctaacaccacaatccaagacaaatccaaaacccc

SEQ ID NO: 103445 - DNA, 275 bp, Glycine max
gccgagttttggatggttgaacctgagattgcttttgcagagttgaaggtatatgaaccttgaactcactcgagcgtgatcgtgcttatattcaaatgtgatatttgttgttggtagtggtatgcttatcagctgaatgttgatacaaatatttttcttggttaggccaatgaacttgttaaatttttagtgcaatgttgagctgcctactttccccctgcttataatgtttggtgcttttgctgtggtagaaatgaagttcatggttttgtatt

SEQ ID NO: 103446 - DNA, 278 bp, Glycine max
cacgaagccaagtgtgatgagttacagactagacgcagctcagagctgccagatagttctgcacaacccgaagcccagcaaggcgttcatgcaaatataatgcctgaacctggtattcttagtccagagccatctgctgataataatcaacctcacgaagaaccagaagttttcagatgtttagcatgcctcagcttctttattcctagtggaaaatgttttgataggttccgtttcgatggtgccaataagagtgaaagtgcacgaaatctaccaag

SEQ ID NO: 103447 - DNA, 279 bp, Glycine max
actccactgcctaccgttgtggatgtgtatttcacagacaccaaaagaactagattcagcatcaccacgccttgtaggcaaaaaaccaatagaaaattcttcatacactgcgctacttcaaattccactccagaagctcctccaacactaacttcagacaacaacaacaacaacaagaaaaacacttccttatccgaccaactcgcaccccttgccaacaaaaccctatcttccgccacaagagaccaatcctatgcgttatctaagccaaaatccaca

SEQ ID NO: 103448 - DNA, 278 bp, Glycine max
caaagggaaaaaagttgttgatgaggaactttgtaaaattgatgatgatgaggaggatgaacatcttgttaaagttcatctagatgaagatgaacgtcttgctaaaattcagcaagaagaagaagaacgtcttgctaaaattcaacaagaagatgagcatcttgctaaaattcaacaagaagaagaagaacgtcttgctaaaattcaacaagaagatgaatgtcttgctaaaattcaacaagaggatgaacgtcttgctaaagctcaacttgaggaag

SEQ ID NO: 103449 - DNA, 272 bp, Glycine max
attttcagtcagtggtagcctctcgaaacgaatattctttgcttaatttttcatactttttttattttatagaatcaccatctttttctttctccaacagccactgcatccgatactgtttccctcatcatcttgagagcaattttgcttgttcctgtctcgaacctatcaccaaaagtttaagaaaatggatcaacaagttgagaggcagaagcgtggcaaggagatgaagaggaagtgtagtaaagtgaacaagcgcaacaagttaatga

SEQ ID NO: 103450 - DNA, 272 bp, Glycine max
  unsure (1)..(272): unsure at all n locations
ctcttcctcaatttaaaaagaaacttgagtcagtgtctgatgagaaaaatggcacttctcagacagttcaaaaggggcaagttaaaaaaattactcggaaatctcctactgtgaaagctgacaatgtctcaaatttaggttctaacaaatctaaacagtctctgaaacaggattcaagccanccatcgccttcagctcaggaaaacccagcaaaagaaactgcgaaaagtagttttggaaagactcatgcgcataatgcttcaaatggatct

SEQ ID NO: 103451 - DNA, 183 bp, Glycine max
  unsure (1)..(183): unsure at all n locations
aagaagatcaaaaaggataagatacgcgacgttctgagtattctgcggagataattcctggtggcanagtaaggatccggccatgcttctcgatgatgccatacattgcttgaaaaacttgaaacacaaggctcaagcgctcagacttgatgccttgtaagttggagaattcttacccacaca

SEQ ID NO: 103452 - DNA, 265 bp, Glycine max
cacccctccacctttttcagaaaaacacttacacagttacagagtcttcttcattcattcttcaccaccaccacctctctctctctctctctctctctctctctatatatatatatatatatatttcaagcgcgttcatatatatctttcggtgagttagacacacacttagactcgtggcagttgggtgcatcattaatgcactatccattctcttcacaccccatttaatgtatagttgcacaaatctcacctcagttccaaa

SEQ ID NO: 103453 - DNA, 266 bp, Glycine max
accaccggcaaagcattccgatccaagcaggtcctacgacgacgatgaaccactcctctctcccacctccgacggccggattattcccattcccgaagccgacgaggacgaggatgaagaccccggcgagttccagggctttttcgtcaatccaaagaactcatcctcttccaaatcctactccgattcgtcgtccagcagcgacggagattccagaacagttcacgtgacactgatgccggagtgcgctgtcatctcagtttcac

SEQ ID NO: 103454 - DNA, 190 bp, Glycine max
caaaatcacacaaaaaaatactgagatgaagtgcaattggaacataaaataagcatattctttttttgtggctctaataaatttaccatcatcatggctgtgttacctttctcatactcaggatttcccactctatctctccccttatctcaacaaaaacggcttaaaacgaaaccaaattccacacaac

SEQ ID NO: 103455 - DNA, 124 bp, Glycine max
ccccatcaaagggttatcaagaaccgccttataagtgattcccaaacaccctctccctaatagctccgctgaacctttcatcagctgctccagcgtgtacacctgcgcctcacccccacacaat

SEQ ID NO: 103456 - DNA, 181 bp, Glycine max
tcttagagcggtaactcttactgctactactactactagatggtaggggcttcacattcgaagattgaattcttggtgtggttgtcgcaagtcatgggaggtctctgctcgcgctccgccgaggatgaccgagtgtttgtcaacgccgccgattctgctcatcagaataagcctggcagct

SEQ ID NO: 103457 - DNA, 240 bp, Glycine max
cctgaccaaagacgtccaaaaagctggagcaatctgaagaagttaatcctcttgaaaaggtttgtgaaagcattagagaaggtaagacacatcaacccccaaagaccaagacattttccttccgatgctaacttagaaatggaaaaagtttttctcaagcaccaaacagcagaagagaagaagaatgctgaggaatggatgcttgactatgcacttcaaaaggttgtttctaaacttgca

SEQ ID NO: 103458 - DNA, 247 bp, Glycine max
cgccactgtattttctacattacctatagttatattctttctttaaaataatatccctggtaaggggaactagtcaacaactggttaattggcctcaaatacatcagtttttctgcaactattgctggtggtgatgcatctctcgatgggagctttgtgatttaaaggtgagcacggctaattaggcatagtgcctgtctgccgtgccatttaagaatataccattagtccttttatttttgtagta

SEQ ID NO: 103459 - DNA, 256 bp, Glycine max
cttctattttctataatctgtatctttagaagctttgcttcttaatatctatgtcatgtttatttgtgtactctcaaccctccttcaaacagattccgttccagggtgacgctagaaaaggccagccacatttaaagtcaaaaactggaaaaatgactcaaggttctctgcttttaaaatggaaagcacttttctaatttgttatttcaggctccattggcattgctagcttgttttggatgtagcttaatttgaa

SEQ ID NO: 103460 - DNA, 257 bp, Glycine max
ctctttctcttgtccttatctttcatatacaacaatttctctttcattcatccatctcacagctattgaagatcatatatatatggctccgatgggagacaatgttgttgtatccaatatggaactggagaagttgcttagcatgaaaggaggtaaaggagaagccagctatgccaacaattcccaagcacaggccatacatgcgaggtccatgcttcatcttctgagagagacactagacagagttgaggttgttg

SEQ ID NO: 103461 - DNA, 255 bp, Glycine max
atttgaactcaggatgggtcaagagcgcatgggtccacattcagcgaaagacagaggaagaactcacggctgaggacaggatcatcatcggcgttaagatcggtcgtctggatcccggcgttggagagaagggacagcagggcgagaagtgggaaagtcggcctggaggaatttggattctgaggagcaaccgcagacatgacagtgattcagacaaggctgtgacgagtgtggatgtgctgtttggctccgatg

SEQ ID NO: 103462 - DNA, 249 bp, Glycine max
ttcttgttgccgtgttgataacttggtatatggttcctcgtctacttcgagtccatatatataacttgccaatattcttagactgtccgaaacatatatacttggtgttttttgttctaggaaagcctcgtataatattattgtgtcacactaataatgtctcactccattaattcagagttcaagtttgatcccaaggacccctccatgcccatatcgtatccaataaagaccctcaaggagttggag

SEQ ID NO: 103463 - DNA, 151 bp, Glycine max
actcaaaagcctgattctaccagcacagaacagatgggaaatgagcctaaggtggatgaagaagatagaatactcaatgaaatggaggaattgacttatgtaatggaccgcaagaagaaacgtgcaaagaagcttcttgcaaaaagaagag

SEQ ID NO: 103464 - DNA, 251 bp, Glycine max
cattaatgtgtgttctgcacaggagaggttagaatacttgttgagtattggtgttaaacaaagagatgtaagaagaatccttttgaggcaaccacaaattcttgagtatacagtggagaacaatttgaagtctcatgttgctttcttgaggggcctgggcatacctaattctagaatagggcaaatcattgctgctgcaccatccttgttttcttatagtgttgagaattcgttaaaacctacagttagtt

SEQ ID NO: 103465 - DNA, 279 bp, Glycine max
ctctttagaaatctgaagttcagatttttcatcaggttaaaaattgatagtactttgaaatttctgtattgaccatttaagtcttgacatgtttcagctattacaatatttcagaaagggtgacccttggatcgaaaattcggttccattggattctagtgttaaaaagccaagtgaattttctcccgaggaactcgaggaagaactttttagactattcctcaaaactcggtttcaaccaagttacgcaatgggcatgtcacaaaatagctggatggc

SEQ ID NO: 103466 - DNA, 219 bp, Glycine max
cttgaatatgctttgtctggatagaataaaactcataagaacagtacacaaccaaattctataatgtttaacaacctagaaccaattatctaacaatttgtggggcaataaatatttttaacattttttttaccctcctattcaatgatgaggctatagagttatgcctatatgcatacttgtatagttgtgtttgtaacaatggatgagtgcaggggg

SEQ ID NO: 103467 - DNA, 256 bp, Glycine max
catgtctaaaatgcaaaacagcggggccgacaaaggaagccaatactaatgaagttgaaaggaaaaaaggagattggacttgcccacaatgtgggttcatgaattatgctaggaacacgaaatgtttgcgttgtcctgaggacaggcctaagaaacatcctggtgactggaattgtcccgggtgtgggttcatgaattttggtagtaaaatgaagtgcttgcactgtcaagagccaaacccaagttccaagaaata

SEQ ID NO: 103468 - DNA, 275 bp, Glycine max
caaatttctggggttgaaagataatctatttttctgtgcgaatttggggtgtaggtgattatggttgttgatgagagggtgtagctgattcggcggaaaaagaggattttactgtggaatggacaggattagagaagccagaagaagcactatggctgcaaatggattaaccagacgaagacacaggactaacactcttagagactcaccagaggaagatggaggcatggagctgcaagaaccatccaggttgcgagatcgaggagggagtggga

SEQ ID NO: 103469 - DNA, 253 bp, Glycine max
gcctcaacaaatcttgggacggtgttagattagcattttcttatctttgacagcaaaaaagagatgcccttgagcaagagttctgattttttttttttgtgggaaaaatttgctaccaagtggcattcctctcaaagagtgtgtgtggtgtacgtgtttgataattgatggacaattttgcaatctgggtcttttgagggaattattataagttggtggtggaattgagaattgagagagtcataagttttga

SEQ ID NO: 103470 - DNA, 288 bp, Glycine max
gccgttttctggaggtatcatcactcaagataataatattgtggcggtatggaataccagcgacaacatattataaagagagaaagctctagacgaggtttcactattatcaagcaagtcggagacctaacatgatgatagattcacctccactccttaaattcccatgaacccgggtatagggccccttttttactcaaaccagtgggtgcttagtgtaaaaatgtgaaaaaaagacagtagttattacactttacacagttcaataaatgcacacacaaggtttca

SEQ ID NO: 103471 - DNA, 271 bp, Glycine max
ccattttgttctttaccactactttttctctgtgatgccattgttgtattgtactcttccttgtgctagatctgaagctgtgaggccagactctctcatttcatttccatcccgtgtttaaattggaagctggaacctagtttatgccctgcttgatttggttgctcttaacccttttcagaaatcaaaagcacttgcaagttccattctttcagttttatcatcaggtactatgctggtgttccctatagggaaagatgaaattgaagtc

SEQ ID NO: 103472 - DNA, 281 bp, Glycine max
gggatcccaattcacggaacctactctctactctctagggttccacttccctcctctgcaatttcttctccgccacgccctacgacgtcgttcgccgtaagctctcttcgtttctcttaagaagacaaaacggtttgtttgcatatggacggtgacgagctcatgaatccctctgcatgttggacttgaaaacacatctgctgtgtcattctggatggacaaccaaacaagaaaacataagaacaaagatttcattcctttagctgataattctgtgcctc

SEQ ID NO: 103473 - DNA, 259 bp, Glycine max
atacgacttctgctgttttagtaatccaacggggacccgacaagtttaatacgaccaaacaaaacaacgaaatgaacatcttacctgtacctacttgttcttggtactagatctcagactatgcaagatataatggagattagagagattgttagactcttgtaccaaaaaaaaaaataatcaagctatggtcccgtttagatgatataatctgggtgagttatagggtgcaattgtgtatgatacacaactcaatatg

SEQ ID NO: 103474 - DNA, 282 bp, Glycine max
gagctccagcaggtggaatcgaaggcgatattggaggtgagcctagcattagcgacacactgtgaagaggcatcaacgaatcaacgcttatcataaccgacaaaaccctatcaaacacgaaatccacaaagttaaacccaaaaacgcaatgcagatcgataagaatagttcaaagtagagaagctgaatcacactgtacctcgaagcacgagagatgcacgatgcggaagacgaagtgaacacaaacggcgtggatgagctcttgacgaagcttctagaacg

SEQ ID NO: 103475 - DNA, 278 bp, Glycine max
cttactaacctatttacagatcttatcacaaaacaagcctttaaacaggcttgctggtctggccagacctgacttttgtgtaggttaggctatgcctttaaataaggcttatgacagagaggtctagctcaggctttgtactttcaaccaagtctaggttcaagcctagcaaagcctggcttaacctgtttccatcccttggtgcgatgtccacctcaagtttgatctataagtgatttttggttatgagcttctgttacttattattcattcctttt

SEQ ID NO: 103476 - DNA, 282 bp, Glycine max
atagctttaaaaaatacgtaaatttgatttctcatagactttgtgacattcaaatactgccactaaatgctatgtttaaacttgaagagggactatataaattcagatatttcaaaagttacaagaccaaatttaatactttgaaaatacagagatcgaaacccttcaataagttaaacttagaatggaaactttcaataaatatttgatttggcacatcaccttgttgggttctatggatacagtggaatgatgtaatttccaaggaaaagttactgatgt

SEQ ID NO: 103477 - DNA, 261 bp, Glycine max
cagacttttcagttctataattcaccctaacatatttgttatccaaactgcgaacatgatgctgtttcattaatggagacacattttgcacactaaatgtggcttttttcatgtctgtgatctatagagaaagattcgataataatgatgaatctaaatttactaggtataaatacaactttaaacttctaacgagccaaattaaacgcgccttaagttataatataataggatcgtcatctgctggaaaaataattattt

SEQ ID NO: 103478 - DNA, 217 bp, Glycine max
tgcacagggagcaaaaggaagcagtcctaccttcagcatgacaagaattgaagaggggcattatgctgttgattttcatgcacaattatccactttacaagcattctccatctgtgttgccattttgcatggaacttctgccttcagcaatgcaagtcacgagaaaaaccaacagttatctcagtgcagttcactgaaatgctacttgaggaggatg

SEQ ID NO: 103479 - DNA, 110 bp, Glycine max
atgaaaatgctttggagctagactttggggctattgatttctccacccctcgcatggttctttcttcttctattgggaatggctaaactttacaacaagatcttgactca

SEQ ID NO: 103480 - DNA, 152 bp, Glycine max
gtcttattctcagaatctttcatagagtcgttggaggctataactaatgagatttctttaggatccaaagggtgacaagttggaaactttttccctgaaaaatgatggggttatcagaattagaggagctactgcttcttcagtggcaccag

SEQ ID NO: 103481 - DNA, 130 bp, Glycine max
ctcgagccgggaccctgtgttgctaaaagactggatgcgaatgcaaattaagagcgacttgatactactagaaaatcagcttcctttctttgttcttaaacaactttacaacctcgctggtatgaatcag

SEQ ID NO: 103482 - DNA, 107 bp, Glycine max
ccgagaaagagtggagtatagataaaactacagacattggagaatggaagtagcacaggtactgcacatgaacggtggcgttggagacgaagctatgcaaacaactc

SEQ ID NO: 103483 - DNA, 104 bp, Glycine max
gcatgaaatcatccttcgaagaaaaataattccaatcaatcctagaatccaatccctcccctttgaatttgatgcctcctcgcattcaattccacgctctggtg

SEQ ID NO: 103484 - DNA, 272 bp, Glycine max
ctcatggtctatagaacagattggaataaagaggcatcccttgcggaagatagaataaagcagtggggtgggcatgaagattcaaaaacgcatgctatagcgaagaatgatcaagaaacatgaaaatttgaaaattctagaagcagggtgtaccttcttttattgattttttttcaagccatgacttagttgtttgctgtttctctttcccatggatcaggtggacgatcctgcattcatttttttccttaaaaaataaatgagtaatgtta

SEQ ID NO: 103485 - DNA, 260 bp, Glycine max
aaagaaacccttgaatccatctactgtaaattcaaatgaccggggcttaggggaaaggggtaatgttgtaatgcgggcagctgctagaaaaaatactcctcaggaaggagatcactctgtgaatgtggatattgcttcaggcattggtgttgatcctgtagcaagaatgcctctcagaactggcaaatcaaagacaaaaattataatccagagattgatacgcacactgcgaatgctcactgtcattgcagcagtgaatg

SEQ ID NO: 103486 - DNA, 268 bp, Glycine max
gggagatcttccacacttcacaagacctgactctttgagctccattgacctatcagataactatctggttgaaggtatttcaaatttcttcacaaatatgtccagcttgcaaaaggtcaagctctcaaacaaccagttgaggtttgacatttctgaaatcaaattgccaacagaactgtcttccatagatttgcatgctaatctgctggtgggttcactatcaacaatcataaataacaggactagcagctctttggaggttatagac

SEQ ID NO: 103487 - DNA, 270 bp, Glycine max
ggataaaaagaactcctgtaaagttctagacatgttgcttctaaatcctcacaggagttctttttatcctctaattcaacttctaaggacgaaaagaactcctgtgaggatttagaagcaacatgtctagaactccaactccagctggaaagcattgcaaagaaggaatctccaacatatggcaaatacgaagtagaaaagatatatcaaactggctgggagatcacaacagcttcatcaaagttggcagagtgccaagaaaccatccta

SEQ ID NO: 103488 - DNA, 224 bp, Glycine max
ctcgagccgttagaattgtaaaaaggaaaggggaaggaagcaaggcaaggaaggagagtggatcgattcctcagcagcaccagacatttataaaagctctttcccttccctcaaatcgctcatactcttccaatctttttttttttttttttttaacctttccccctggcccaatattacaaaacaaaaaagaggaagaagaaggttttcgcgatggcatcgaa

SEQ ID NO: 103489 - DNA, 206 bp, Glycine max
acaattaagattgtcagatgcaggtctgttattgataccatggtcgtgttgttggaaaacatgtctaatattactgttatggcgagaaccttgattgctgcagtctatagaactgctcaaatagttgcttcaataccaaatttgtcatatcagaacaaggcattccctgaggcattatttcatcagttactcctggcaatggtcca

SEQ ID NO: 103490 - DNA, 210 bp, Glycine max
cagagaaagagcatgaagctgcatttgcactcgcctcactctccctctctctccccaccattttccccttcgtccaacccaagaatatcccatcaaccacccttcaaccaaccaagctcaaagtcccaacccaagcctcatccctcacacacctttctctctccaccaccactcctcctccttccaaaacctccttcaaatccaccgtct

SEQ ID NO: 103491 - DNA, 251 bp, Glycine max
aatcttttttctcaatctaaaaaagttatatttcccaactctcccaccagaatattttagtgagaattacataggtaaaaaaacattcccaaaaaataatatttcttaggaatgttattgttttagataataaagcaaacataatatttacaacctcaaagtccttttatatgtggaaaatgagggttattattttttacataattgaaaaataaggctcgttaggttgccttgtcttgcctcgttcaaaa

SEQ ID NO: 103492 - DNA, 219 bp, Glycine max
ctaattttcactcctaaacgacatcgtcgttcaaacaaacacttcttctgcaaacaaaaataatcccgcgttaaagctttccttctccggcgacaacagcgaacgcgcgaatccccgccacgaagcgaaagtcgtcgacgtcgatctctccctcctcgaagccattgagaaatcgcagagcgccgtcgaagccctcgacctccgagccctaaagaagca

SEQ ID NO: 103493 - DNA, 271 bp, Glycine max
ctcgagccgcgcgcgggttcaaaagggttcaacccagctttaattgttctcctgcttgtacgtgggttgctgttgacattcctcattggaaactatgtactctacacatatgcacagaagaccctccctcctagaaaaaagaagccagtctcacagaatataaagtgaggaaaaagttctactctccaggtgcagagacgccctgcttcagtctctcctttttcatcttcttcgatagatgctgcagcaatggaagtattggatccatatg

SEQ ID NO: 103494 - DNA, 268 bp, Glycine max
gaaagtagaggatggtttgggtttgggtttggagacaacaccttcggtttcaggttcggcctcgtcctctcggtcttcctccgctgggagaagctcgaagcggtgggttttcttgaaggactttctccgaagcaaaagcgaagggaggagtaacaacaagttctggtccaccatttcctcctccccaaccaaagacaagaaaaatcaaaacccaccaaacgccaaaagcgaaaccacgcagaaaacgaaaggtagtagtagttctagt

SEQ ID NO: 103495 - DNA, 259 bp, Glycine max
tgccaattggatatttccttggtttcaagcagcatttaggggttaagggtctgtggggaggcacaatgtgcggcagtgttcttcagattttaatcctcttactgataatccgtaagaccaactggaccaaggaggtggagcaaactgctcatcgcatgcgaatatggaacgttaacaatttccgctcagacttggcagaaaatgttacatgaatgagaaggaaaaaaaaaacaatgttaacaatgcactttttaatcag

SEQ ID NO: 103496 - DNA, 269 bp, Glycine max
ggtttatctcgaaccttcttgcatggaggctacttgttttactgaattgaagggagagtactcttttggaaacctacggaaacgaggctcgttgcagttctggttaggcaggtttgtggattgcccttgtgttacgactttgacaaaaaaacaaaggaacttaaaaagcgattccatctcaaaatttctttctgaatttgaatgattttaatcgcctgcggctggtgaaagttgtaattaacctaatatggaacaagcattgcacgtac

SEQ ID NO: 103497 - DNA, 172 bp, Glycine max
ctcgagccgtgctaaataggtaattcgagcaaggcgcaaccccaaagagggtgaccacaaccttgattcaatccattcccctttcttctccaacaaattatggtttcccttttcccaacattgccacgcattccctaattactctttctttcttttcttttccacttaaatt

SEQ ID NO: 103498 - DNA, 202 bp, Glycine max
gtttatagctcttggcttgttccgcttaatttgtctatcattcattggccataatagctctctcataagtcgtaaaagactacatatattcagacttgatgcatatttgttatatatacatacatatatatacggtgcctctcggagagggtataagagccggagataaaactcagaaaaatggagaagtgggtggctttgg

SEQ ID NO: 103499 - DNA, 227 bp, Glycine max
gcattgctaatggccactgatgttgagcatgtacaatcagctgtcaacttcgcctagaatgaagggtattgttatttgtgatagttctgtaggtaaattgtttctgggtgataagtattctcggttcaaatattttattgtactcttttaagatgtagctagttactcgagtccaaaatttatctttttctgttttctttttttttttttttttgccattttgggga

SEQ ID NO: 103500 - DNA, 156 bp, Glycine max
ttaaccctgcattttgagatgtaggatatttttttgtttaaatctttttgttcataattttctcctctctctcctctgccttgaattacttgtcaataatattctatgacagtgtatgaaaagttgttagtgaatttgtcttagctacaccttcct

SEQ ID NO: 103501 - DNA, 276 bp, Glycine max
cgactacatcgagttcgaggatgaggatattgataaaatctaatccctctctcgccctcaattatcattcatataatatcatcatcctcgaactcgatgtagtcgttggcggaggcgtcgtcctcctccaacgagtacatcgagttcgaggatgaggatattgatcaaatataatcactctctcgcactcaattatcattcatatagtatcgtcatcatatctgtctctagcaatatttcgttatctgcttgtcagcaactctccgtgttggattt

SEQ ID NO: 103502 - DNA, 250 bp, Glycine max
ctttgagtgtgtttgctatgatgaaggatgatgggtgtgaacccggggttataacttatgacttgttgatggggaaattgggtgcccacaatcgtattgataaggttaatgctctattcaatgaagcaaagagtagagggttgcctgtgatactcaaagagtatgctgttgacccgaggtatttgaagaagaagaagaaggttgtcaagggtgtgaagaagagggaaaccttgcctgagaaaatggctag

SEQ ID NO: 103503 - DNA, 218 bp, Glycine max
ccaattgatccttttcctgtcaattgtcattgtcttgtattcatgacaaactatatatcaacagctgcttcccattgattttggttgtacttccacacaatgtgctgtttagtggaagtgtaatagtcctagcctttcttcatatatataagtccatgcttccttaatgctcaatggagctaaaaatccaaagctcattagtgggcatagctccacta

SEQ ID NO: 103504 - DNA, 241 bp, Glycine max
gcacttagcatttgaagaaaaaaaaaatttcatcttaaaaacttttttttaacttcttccgaaactaaggtgtataagttgatcttaggttatggagaaattcaacgtattttactttcttgtttccttcttttgtaagcatttatgagaaaaaaattatctaaagtaggccaagactacttacaattagtttgccaagattctatttagggcataattttttccctccgtaagatattac

SEQ ID NO: 103505 - DNA, 202 bp, Glycine max
gaaaacagtgatgaccatggcagaaagacttgtatatggaaattttgaaggttctttccctttcaatgtgagattaggctattcttttaattgtttggattatgtatgtttttttgtacagtcattaggaatcttagccatttgtcaagtttgcttgtacagtgacttgattggtaatgttaataaaaaaagagttttgctt

SEQ ID NO: 103506 - DNA, 151 bp, Glycine max
aatggatgcggcattgtcgtccatctctccaaagagctcaagcgcatcatcactgccactgctttcatcctccaacaactatccccctgccgttattctcccagttaatatctctgtctctgtctatgtctctcgatacatttgcaattgc

SEQ ID NO: 103507 - DNA, 283 bp, Glycine max
cacagactcggcgattaaggtcattctctgatgttgataatagcccagaatctttgctggcttttagtggcaacaacaatgtacatgctttatatgactttttactaaattacaggtttctcttgacctcactgtctagtgtggacgtacctgtcttatgctctcctgtgccatttcacaattctgctttgtcttctcctgatattaaatgtgtggagactagaagagctgaagacattgctgcttcttacaatgggtctatatggaaagatggtgatcggca

SEQ ID NO: 103508 - DNA, 280 bp, Glycine max
cttcattcgcgaggagccgtatgaagcaattcaaatagatatccatctatatatatagataatctatttaatctaatcgataaaataatatgcactaatattcatatgtttaatgaataattgaatagcgggattttttgagatttcatagaatctattccaaatttttatattttgttttgatatagaatggaatatgtattcttataaataaaccattttttttttacagatgtcgaagcgtggtcgtggtggttcggcggggaacaagtcgcatgtc

SEQ ID NO: 103509 - DNA, 220 bp, Glycine max
ctctctctctcttttcaaatatcgtttgttcagatcatagaaaagtgtcactgttgttaagtgttggtaagtcaccatggctgaggaagttccaaagacaagcacaactcaagaggaggtagtggtctctgacgtggcacctgctgagaaaccagacaccaccaacgttgttgttgttcccctagagacagacgcacaaccacaacaacatgatgaagaa

SEQ ID NO: 103510 - DNA, 280 bp, Glycine max
gaaattgttgattttaatgaccgagccggagcaacgcaaaagatgcaaaggaaactgcagaaagtgtgcctcaaaacaggttcacctattgaatcccatgctgccactgtccttactcctgatgccttaagtaaactccaggaagagctagttttggcgccacaatatgcatcctttctggttgatgaaggtcgtttccaggtcagacaccactctcagtcagatggaggatgcaaagtattttgggttgcttgtcaagagcacatcagctgcagctgcc

SEQ ID NO: 103511 - DNA, 283 bp, Glycine max
ctcttctttgctacacctccacgcgcacctcaactccacgcgctggcgccaacaccccaaatcctccttcgacccaaatcgcttcatctccaaacctcaactgcaacaaaaacaacaaagagaacccctgtggggtcccaaaacaagaactaacttaaacagttcccgtgactcactgagttacggatcggtgctgagttttgacgccaccgaacttgacccggagaactcgctctcgggtttcctcgacaaagtcccactcactctccggcgatgggcgtgt

SEQ ID NO: 103512 - DNA, 278 bp, Glycine max
aaggactttagatagagcttatgatgaaattaaatatttaagttttggccttggagttaatgatgaacgtatggctgaacaagctttgaccttttataaaataacagtactttctacatgtagtcgtagaaagactacaacttatgaatggttgctaatttttttacatcagtgctggcgtaagccacgatgtagaaatcagatatttctacatcgttgctaaggagagacacgatgttgacagcataagttattacatcggtgctaacgagaaacga

SEQ ID NO: 103513 - DNA, 280 bp, Glycine max
gcataagaaggccatcttacaatataccaggagaatcaaatggtccaatgagatgggttacaaatatgtcagaatcaagtcttcaagcaatcagctatggcaccaatcatatctcttgttgataatgtcttatttaactaagtaaacttttagagaagatgaagagaccctttttcttgtcccgacatgtttcacttctttgtttgcttggcacactttaaaaacaagagttttgatgtagagaatacagcaatggattatatgtgtttacactaaggta

SEQ ID NO: 103514 - DNA, 273 bp, Glycine max
ctcgagccgtaaaaataagatcgaatcttttaaagccccttactatactttgcaagatttcgtgcattacatacatatacttatttaactatacatcaaagtattgtttctccctgacttgagatattaaatataaaggggttttatttctctgtaaattgttgctgtgctgcaatgttattgtaaacttgttttcttttccttttaaaaatcatagcaaagtatgagtagtatgacttacgtcgggtttcttctatgtctttctgcttcatt

SEQ ID NO: 103515 - DNA, 118 bp, Glycine max
tcactccactaagtggagttattagaaccttgacatgggttttaatgtctaaatcatgatgtttcttgatgatcttgtaatttcacatcaatgttgatgaatgtgtacttataaaagc

SEQ ID NO: 103516 - DNA, 264 bp, Glycine max
ttaaaacctagccgccgatgtcggcagaaacacagccagtaaccgcagcttcagcactttcatttctcattcgatgagggcccttctccggaatcacctcttgcatttgtcatgttctccagctcgcacgcttctggttcggcttcaagcgtgcgagctgtcatcgtcatcttcttctcctcctcgtgactcccgatacgttagggtttcggtgtggtgggatttgaggagctgcccggtgcctgatgacgtggaccctttgaa

SEQ ID NO: 103517 - DNA, 268 bp, Glycine max
cgctctgtgagattccaggcaacagtggggaccaaaatttagaatctcaaatagacaatggcctctaccagacattcaaacagaatttaactttggaagaagctaaatctgccaaggtctcatcagaagaccgacaacttcaagctgttgccgaaggtttagctgcttctgttctgcactcgagcacttcttcaaatcttgatttgcatccagggatgtgtcccatcatgaagacactggcaatgaagctgttcaaaataatcaaaca

SEQ ID NO: 103518 - DNA, 259 bp, Glycine max
ctttctttccctttgcaactctctgcaataatgtggacgcaccaagtgcttcctctaccaccccacaaaccgtttcttcgttgttcaccttcgaacccatcctttgtaaatggcaaaaatggttattgcagagtaaaggcattgactttggatgaacttcccccaaacgcgcttcggaagaagagagagccgcaatggagaggagcttcagcctcggactcgacttgggattggctcgcactggcctcgccctcagcaa

SEQ ID NO: 103519 - DNA, 256 bp, Glycine max
catccgccctctgaaaatcctcaccgacacctggtgttcctccggccagttcctccccgacggcaccctcctccagaccggcggcgaccttgacggcctaaaaaagatccgcaaattctccccttgtgatgtgtcgtcgtcgagctctttgcattctccttgcgattgggaagagctcgacgacatcgaattggctgagggccggtgtacgcgaccaaccagttcctcccggacggatcggttatcataatcggcg

SEQ ID NO: 103520 - DNA, 260 bp, Glycine max
cgtaaatctggctcgaattgttcctgatggacttcttgtattcttcccttcttattaccttttggaccaaatcatcgcatgctggaaaagtagtaatgaaaattcaacatcaatatgggacagaatttgcaaacacaagaaacctgttatagaacctagggattcctcatcatttcccttgtcaattaaggactacatgactacttgaatgacacctctgcctctggagcaattttctttgctgtttgtcgtgggaaggt

SEQ ID NO: 103521 - DNA, 257 bp, Glycine max
cttacatagtactacatcttcatagttgttgatgttttcctcctctccctagctttttcttttctctctcctattctgcaatttcggattttccggtattaaaatgtttccaactcctcactctctgtctttttcaacatagagagcattattcgatttcgtattgcactctctcatctcatctcccattctcattctagctacatccccttttctccttctcacttctctccaagttttttcttcacatttctctg

SEQ ID NO: 103522 - DNA, 258 bp, Glycine max
caaacacttgtatcatcttctagcttctaatttctaaccatgcaaatgcagctattcaccatcttcaaactccttatactaacactattatttcagctacaagtcactcccactctcacactctccccttgcaaaacctcatgtggcaacattcctataaattacccctttggcctagaagatggatgtggtgcaccccagtcagacacatgctaaactgcagcaccgacttgttctttcaaaccccttcaggttctt

SEQ ID NO: 103523 - DNA, 258 bp, Glycine max
ccatgtcaatgctagtgattccactccccaaaccacatctgccttagaagttaatgccagcccaaaatcttggaaatggttgaattcggccaggaaggttttggtcattcatttatggggtgctgtcatctccttactcccatttttcctatgtcaagtacccaataccacaccaacaatgaactttgtattgtggggtttctatcagcttttagcttgctaattttatacatgatattgggttcaccaatttttgaa

SEQ ID NO: 103524 - DNA, 257 bp, Glycine max
ccaaaaacacagagattagaattcaggcgagaaggggatcaaggcaaagaagaataatagaagtatcaaaatggcaagccaaaaatgtatggaaatggaaggagaaatcaagagcttaatgaaggtgtcactgccttcttcatcacttggctcaccaacttcaaactcctcctcttcacttttgatttgggccctctcacacaaactcaaactcccttcttcacttcctctcttttgcatgcctcccaattagacta

SEQ ID NO: 103525 - DNA, 254 bp, Glycine max
aacgggtcttgtttctgcgtttggcgttgcacacgatgaggaaattcaccaccatattctcccacatcaaatcaacaaagatgaacttctccgtttcgcttcttcatcggagctctccattttgccccaatcaaccaccacaccctaatttcaagaacctcacatggcagaatcgcgattcactactattatttccccttctctgttcgcgccactttgcctccactaccgcgcagaatccttccacattgaat

SEQ ID NO: 103526 - DNA, 186 bp, Glycine max
gtttcagtttacatttcttaagaaaaaaaaagcattactttgtaagcatatacaaaagtgaccatgaacttttatattatatgtttatatatagaaatacagatgaaagtaaaaaattgtatatttgttctgataggagttgtggaagttattataatgtgaatgctatcacgatcatcccccttg

SEQ ID NO: 103527 - DNA, 247 bp, Glycine max
cagaaaacaaatgagaggtgcaggaaataattttccttgagaaggtagtgatggcaattggcataaagtccaaagcgatgcttacggggaagttccccaaaatctgcaacattttctatctgtagacactgttttgatttcaagaaccaaacttcatccgctacgttggtggaaaaaacagtaacaacagtacatgatgttgaaggtgtggaagtggtaccagaattgccttgctgttcatccagtg

SEQ ID NO: 103528 - DNA, 247 bp, Glycine max
tgataccagaactcatgagaaagatgctgagggcaagatctctcataaattccatattcttcggaacccaagttttttttgtggttctggaaggtacatatgtggcaaacatgttgatcagaagcaaacagatggtgaatccagcaatcacacaattatggttcccaaagcttcaactctttggcctgacgtatttgacatggataagcctgttgtctttacatatgaagagattttctccactact

SEQ ID NO: 103529 - DNA, 145 bp, Glycine max
atcaaaggaacactaaattcagatcacttgacatgtctagcatttttcttgtttatttccctagatttcatcgtatatcacttgtgttggatgtaatcaagagatcattttatcaaataaataatgccaaatggcatgtcgaagt

SEQ ID NO: 103530 - DNA, 246 bp, Glycine max
cgacttcacctctcccgccatctcgtgtgcgttcagccagatctgccgacaggtcaactgccaaggatggtgcattaaatgaattgcgtgcaaaacggttaaagcagcaagattcagaagcaaaccgcaggccaagtgaggcatctagaagttcagggcctgggcatttttcaccaaagcacaaacctttcccaaatctcagtagctcaagtgatagtgaaactgaaagtacagtccctgagtgat

SEQ ID NO: 103531 - DNA, 242 bp, Glycine max
cgaaaataaaattcaggacctcaccacactctactcacgtgttactctctttgatggtagttcactcgtgtttgatgctctcaatataggcttttgtgtgatgttttcactcttgccttttaccactcactccctcttaagttcctggatggatcgaattagacacacaaggtaatataaaataaaataaaagacaatataattatcagagtaacagatttgatttgaggataacaacttgg

SEQ ID NO: 103532 - DNA, 247 bp, Glycine max
ctcgagcgctggagataggtagttgtcctttactagaagcacggtatcaaagtcggacagggaaacactggtctaagattgctcacattcctgctatcaagataaatggtaaagtgataatatgaccctgtggcatgagtaggaaccatccagaagatggttgctgaggtcccgggtgtgcaatatttgctgaccatttcagtcaagttgtcacttttgtttcttcaccagtggatggtttctattg

SEQ ID NO: 103533 - DNA, 247 bp, Glycine max
ggattatggatctaatgtcaaacagtttaatatttataatttcaaaaagaaaagcctctttttagcaacttcaaattataagaattgattacttaagtccttatttcattaaaatccaacaataatcatcgcttacccaaatactcctgattgtattcattagagtacttttaatggtgatacgttgcttatttgttctttctgctacattatatgaagaaaaaaaaaacagcatctcacttttttg

SEQ ID NO: 103534 - DNA, 192 bp, Glycine max
gctccctgtctgtggaggtgctggaagctcttaatagacttatgcgttatgcgcatcctcaggtctttctttgagatttgctgtctcattgtttggcactttggctttggattttttttttcatactaatgattatatttttaggtaaaactaattgatttttcgcctggtgagaagtatttggtaacatat

SEQ ID NO: 103535 - DNA, 248 bp, Glycine max
ggatcattaggagcctacttaatcaatgagagagtgttatgattttttatttattcaaagagagtgttaattaaattataattatgattattataagagtattgtacttcattctaggtgtgctgagagcctgggagagttcagtttttgaggctgtacctcccatatggcaggtagggcattttcataactagttgtttttctcttttttccaataaaaattcaagtgcttgtaccagctacatata

SEQ ID NO: 103536 - DNA, 104 bp, Glycine max
caggcaattctatacaatcgtaacgtttgcttaagatgagaaaaagcaaccacttgatcggtctcttaaacttcctaacattcctgctgtcgattccgatccta

SEQ ID NO: 103537 - DNA, 248 bp, Glycine max
acgctactactggcactgagcttggtaattttggttccttttcatatcatcatgatgggttatttacaaataacgagagggttccaagtcatctaagtaaaattggcaaaaatctaagacatgataacactccaactccaaggaatcataggatccgtttcatgaatggttcacccctgaagggatttaataggacatcaccaagcaattcccaggaaaataggccagacaaaatcttgcctgaagtt

SEQ ID NO: 103538 - DNA, 195 bp, Glycine max
ggtagctagaagcaataagatgagaatgagagtgcttgcattgtttgttgctacagttttggtagcatatgaatgccatggctcagactaccagaagttccctctgcaaatgaaaactcgcggtttggtgggcaatacagcaatgaggtggcatgtggcagttggacggcttggcgtggagcaaacaacgtagtc

SEQ ID NO: 103539 - DNA, 243 bp, Glycine max
tgttaaggtgttaccttaaccatgatttttcactaaaacatgattgaattatatttcaattacgcaaagatagaagcgatcatggttaaggtaacaccttaacaacaattaaacaaatctgcaggaaaagaaaaaaagatgaatcattatctcccataccgcactctaaacacgatgagtcaagaagagtcatcatcatcatcatccaaagtctcctccttactaagctcaagaactgcttaa

SEQ ID NO: 103540 - DNA, 220 bp, Glycine max
cggctcgaggcaggactatatagaagttgccacacagtgaattggtgacaagaaatggagcaacaacggcgttggcacgacgtgttctggttagggatatttgtgatccatttggttggtatgggtttggttcttggggttttaggcctcaacaggttcaagcaaaagaacaggcttgacattgataagtacacctaccggttcatggagaatgaggctg

SEQ ID NO: 103541 - DNA, 177 bp, Glycine max
ctaaatctatcctcatataataataataaaatgtatgtaatgtactataaatctggctttaaatgtcacacacgaagacatgagggattgttcctgatttttgaagactgtgtttgtcttgattgatctatgttgttgagtgtgtgtcagctcgtgcaaaaaagtttaagggagatg

SEQ ID NO: 103542 - DNA, 277 bp, Glycine max
gagaggagcatctggagaatggggactctactcatgagttgactgaacgaaatggagaagagcactacacagaggagcaggaggaacagaatggagaggaaggaagccaagaggaggcagttgtagtggatgcagattctacagatggtgcagtactcgttaatggtaacgaggctgacgaagagtgggtgcttgcgccacatcactaggtcccatcaagacagttggttccagcttctgggatttctatctgaggtcttctcaaggtgccacgaag

SEQ ID NO: 103543 - DNA, 250 bp, Glycine max
gtttttgatttatgaaaaaaaaataataagaaaaatcaattatgtgttaaaattaattgtgattatgaatgtgggaagtggggtctatgtttgcgcttgaactaaggacggcgtcgtttagtaagggagggtgtcacgtgacattgttgtgaggggtcggtggggaccacgtgcatggggtttgaagttaatttgaacccttcgattgtagggtcacacgaagaatttgacctctcgacaagactgttct

SEQ ID NO: 103544 - DNA, 269 bp, Glycine max
atcaaaaaatacattcagataaattcttcttcatcttcttttcagcaacaatctctctctctctctctcgcatcacaatttcatcaaaaccttttacgtcttcatagttttccttctttctttctttgtgaaaaaaaaaaagtccaaaccatggctcagaaaaccgagaaagaagaaaccgacttcaaggttcccgaaacgattacgctttgcgttaacaactgcggcgtcaccggaaaccctgctacgaataacatgtgtcagaagtg

SEQ ID NO: 103545 - DNA, 230 bp, Glycine max
gtggtaggcttgcttctcaatttgttttcatcatgtcttctgttgttgtcatcattgtcaatgaatgttaactcataatattgtttatttgttttgaaaagcttagagcctatttggtttaagaaaacattttctattttaattcatgttcttacaaatactcacaaaatgttacttttgttttcatggttttctatacaaatcttcaaacaatgacaaatggcattttg

SEQ ID NO: 103546 - DNA, 243 bp, Glycine max
tagggctagagctgcattatgcaaatatgattgtattgattgagaggatgttgtcatcacctcacctggttgatcctgcagcaagagatgatctgtacagtagttggcagcatattgtacagatcatctcttgctgaagatcaaccaggtgaggtgatctgcacaatatgcttccaactactgtgacaactgctttaagggctaagcttaagtgccatgcgaaaagtaaatcatcctccaatg

SEQ ID NO: 103547 - DNA, 266 bp, Glycine max
ggcggcgatggtgagcagaggttggagggagatgacaaggagtttgtggagagcggcggaggagttaaggattagggttccggcgtgggctcaggtgggttttgtgtcgtcaattttgcagaagtgtccggggatcgtgacatctctcttaaaatggaaagtgatgtggattccacgatactggcttgtattgcgttctcgtgccctaatttggcattcttggaaatctcggtctctgatcctgcagttaatcggatcagcggggg

SEQ ID NO: 103548 - DNA, 264 bp, Glycine max
gcccgcatctcttatgatatctcaatgccgccatgtacagtaaccggtggtagaacaagcaacagaggtgtatcaccagttcacacaacataaactcctcagatttctgccaccggttactgtacatggctgcatgagatatcataagagatgctgcaattattttgttttaagattatcttggtctacatgttttctttttccttgttttgaacgcaaaagcccataggtgttgttagatgagcactgaaaagtattcgtttg

SEQ ID NO: 103549 - DNA, 170 bp, Glycine max
tgttgcaagacaatttttgctgagattagctttattgagatcgtgttcagactaaaacatggatatcttcacctatttttattttgtgaacttttattcaagtttgttggtttaactagcattttgttttgagtatatttggcagtatcattctgttcaggctgttttct

SEQ ID NO: 103550 - DNA, 256 bp, Glycine max
cagaaacaccactgaacgaggttgcttgctccgacgtcgaaatgaaagccccttcctctcttttcctcaaaggccacgttctccccttcttccatttttctcctcagaaactccaaaggaacacccaatgtgaaatgcaccccatctggtgcttatgtaaagccattcaaactaattcatatgaactttccaatggaagctatcatcccactgtgcaacaaacaacagaccagaagacaatggaaaagctatccag

SEQ ID NO: 103551 - DNA, 234 bp, Glycine max
gaacgtggaggctcatcttgttgaggctcgttaaaatgatccctaagtggttcacgctaaataaagttgtgatgtgtgtggtgtgttgcatgtggccccttggttaatttgttaaaaatattggttctcaaccaaagttgtgtaatgtgttgttggtttattcaaaatattggccggggatcacagggagggctacatgcctttgtatgtctgtgatttgtaatcttcgaccag

SEQ ID NO: 103552 - DNA, 263 bp, Glycine max
gtgcatctgtctgtataagatttccgataaaacattttaggcaaagctgctagattaaatcattcattatgcttaatgaatagctagttatctggcagagaaatgatcaaagggcagtggataactcaaattatatactttttaaaattatctgatctccatttctaacaaataaaggagtggatgacacagagatctttcgatcctttttcatccttttattccctctccatttacctccttagccttttgcaagctttgtg

SEQ ID NO: 103553 - DNA, 261 bp, Glycine max
acaacataactataaaaagttctgggattcagcagggtcaagcgaggcaacgcaacgcaacgagattctccaagctccgaatccctcggcgacgccgtccaccacctactgtctttaggtttcaagattttattgtttttgcatttggagctgacaaccctcttctccgagtttggtcggagggaatctcttgcagtcaacttgtaatccatcctctatctgctttgcaaatattcgatactttcatggactcaattttgt

SEQ ID NO: 103554 - DNA, 249 bp, Glycine max
cgacagtcatccggctccgcagccgtacgccgccgccaacttcagcgctccggcggcgccctccgccaatgtcgtcgtgaatttcgtctccttgacccccctcacgctctcctccggcggctccgtcgagcggtgcccccgttccgcgacgcgcccgtcgcggaaggcagaacctcttcctccggaagctccacgtgtgctgctacatcctcgacttctccgacacgctgaagaacgttagggagaaag

SEQ ID NO: 103555 - DNA, 127 bp, Glycine max
gatcatggctcctccatatccctccctgctcattctcctatttttgtcgacaagccaagttacttgttatggttcagagaaggaaaagagtaaaactttcataatccaagtccagcacgaagccaag

SEQ ID NO: 103556 - DNA, 266 bp, Glycine max
gctttgatcagagcattgcaattgaatgtatctctagctgttgcttggggatatcttgggaagctgtatcgtcaagtggatgaaaagcaactggcaaggcaaatgtttgatcgtgctagaagtattgatcctggcctgcattgccatgggcaagcatgtcatttgagtcttgtctgggtagggagcttgaatcagatgaggcatttgagagctgttcacgggctgtgcagataatgcctttagctgaattccaacttgggctcact

SEQ ID NO: 103557 - DNA, 213 bp, Glycine max
  unsure (1)..(213): unsure at all n locations
ctcgagcccgtccttttttttagacaaatttgggattttgctttcattttcttgcaccccattggctttccctctgcanccagtaagctttttttgatgtcttctacttcataagttctttggctgtgtgtggtgtggcggttgtgatggttgaacactgaaggtttgcaacatgggtgttgatgtggttgtgcccattgatgcaattagagt

SEQ ID NO: 103558 - DNA, 271 bp, Glycine max
ggctcgagcgtgaatagcgaatcatgatttcagacatagtctgaggactctgcaccataacaaaatcagcaacaaatatccatacaaaagggaaaaataaagaacgagaaggagaaggagaaggagaaggagaaggagaaggagaaggagaaggagaaggagatttctgttgaatgatgaggaacctaccctcttgtgctgattgagaataagaaccagaacaggttgcagttaaaaaaatataacttgatgcaaagaggagtagcagaac

SEQ ID NO: 103559 - DNA, 156 bp, Glycine max
aaaaatcctcatgccataggttttgtcaggaacccttataatgtagggcgggcccattgcattctgttatttattgatttccctaattgatgggaagattttggaatgtgaatttagtagtgtttcatttaaaaaaaaaaaaaaaaaaaggggggc

SEQ ID NO: 103560 - DNA, 254 bp, Glycine max
gttccaaagaaaaaatagctatcatcaactgttcatctcctacgtatatatggttttctgtaactctattagggtctttctgggaaagacattggagaatgtcaaggttcatattattggtaaaagatgaaggtggaaagggtttcaatattccagtggtgggttagagtagctgtgcagctcagcttaatcttgcttggtgccttttctgatagagtctcatcaattagaagcgtttcgacgtctcctccagt

SEQ ID NO: 103561 - DNA, 258 bp, Glycine max
cactgtcaccgtccgataccgctgatcctcgcaatctccactatgtcttcccctcatccttcttctttcttcctctccgattggccggttcggcggctcgtttccgatctgattggctcgtctttagtgcgaaattcctccttctgaaaattcttcgttcatcgcgctccgaatcttcctctcttgttattccgaaaccgatttggcggcgccacttttcgcacgtgtgctcaaatcgttgcacttttttttttggat

SEQ ID NO: 103562 - DNA, 260 bp, Glycine max
caaaaaagcagaagaagtgttttgctcacagaattccataaagaataacctcacaagcctccttccttttcctttactttttcttacatacatacattcatgccaccaaagtaggcaagagattgggttttaagctgttaaaataacagtgaagtttggtacaaaatggcttcagttggtgtggcaccaacatcatcaggcttgagagaatccagtggtgttgatagattgcctgaggagatgaatgatatgagaattag

SEQ ID NO: 103563 - DNA, 259 bp, Glycine max
attcacgacagtaaagaaaataaagttgcattgaaaggggaaaatggacatagcattttctcaacagagttttacaagaaccaggctacgagaaaacccaaacattgcagtagtggggaagtgggccctctggcctatttgctgcccttgttcttgcagagcctggtgcagatgttactctgatagaaagaggtcaaccagtagaaaaaagggggcgtgatattggtgctcttgtagttcgtcgaattttagaattgga

SEQ ID NO: 103564 - DNA, 230 bp, Glycine max
ctcgagccgctcgagccgcaatgctttacaaggtttacccagaacctctaaagggatcataggcttttcagactcagaacttgcattgccatcagaactagttttgtcaaataagcttattcccaagttttctctctgcttcccttcttcaaataacttgaaaggatttggtaacatcttcattggagctggtggtggccaccctcaggttgagtccaagtttctccaaa

SEQ ID NO: 103565 - DNA, 244 bp, Glycine max
gtttttcttttgttttttagacactctcaatctcattttccccttcactcatcagatcgctctctcttacacacacaagggtctccctatacagggggatatgattgaagattttgatctgtttcttttaccctttcagtggtaaaacttatgaaatacggattgaattcttaactctggtaattggttactggggatccgaactatggggtctcaatgtggtggtgataatagtggaaaacat

SEQ ID NO: 103566 - DNA, 292 bp, Glycine max
gttggaagaagaagaagattttatttcatttgccatacaaaatacgtacaagagcatggagactcttgatggaaaaaaggccatgagaacttatggatgacttaattagtcgataattgagcttgtccatctgaaagaataagaaatattcatattggtttgttaggcatagaacaaagaccagaagatagaccaaacatgtcatcaagtaatgtggttgataataaaatgagtattttcaagaaattagataatttaaattgagtgagatagcaaattttttttaatgtaa

SEQ ID NO: 103567 - DNA, 273 bp, Glycine max
cttttgttattcttcgtgtcttgttgtgttcttcatctgagatgtgtgaagaaccggaagtctgacttggacgttgacttcgaggctgatttcagggattttaaagacgattctgatatcgacgacgacgacgacgatcaccaagtcaagccctttgctttcgccgcctcttctcgtctgtctactgcagcgaaatctgtggcattccaaggtcgggctgagatatctgcaaatagaaagaggaagaatcagtataggggaatccgtcaacgc

SEQ ID NO: 103568 - DNA, 276 bp, Glycine max
cttcactggaacactcgactatatatcattttccccttctgatcacattaaaccaattagttttcttgaacttccagactccgatgcagctgatattgttggtggactgccaaacttcatttatccaagtgatcatctaccaattggtgctgaatttgaaatcatcgaggaataaacgttcttgtatgccaggtgttattttgagtaatcagctttcatgttccacctcctctcccctttgtgatgattgaagcacggttctggaagcaagtgcac

SEQ ID NO: 103569 - DNA, 285 bp, Glycine max
ccaaactttcatgtccgtacaaccacccctgcatctccaccacccctttaacccacaagcctcaagctcaaattttgacggcgacccaccatgcaaaaccgccgcaaaaaccaaacctccgcgcaagaagctactccgggtaattctcaccgaccatgacgccaccgattctgactcctccggtgacgacgacgacccaaaaaacccaccgaaacacaaaaaggtgaaaagacaaatcacccacatcaccataaaccctccctctttctcagaagccccaactcc

SEQ ID NO: 103570 - DNA, 273 bp, Glycine max
gtttcccaagagcttcctgaagtttcagacaaaaaccttcctaaaaccaagcgagttgcatcccttgacatctttcgcggtctcactgttgcgccaaagagtcataactggtggtaaaactgctattggcctggatttacatgtctgatatcgttaatatcagcatgtctctatatctgattagttaatgatcttggttgatgatgctggagagcaatggccaatgattggtcatgcaccatggaatggctgcaaccttgctgattttgtcat

SEQ ID NO: 103571 - DNA, 278 bp, Glycine max
ggctggctttgttaaaaaagatggatcatcttctgtttcagctgcaaatgttaagcagcagtcaagtgagacaaaaagagaatgcgagggagtccagtcaattgctgcatgggagaggaatcatatgcataagaggtctgatgttccttttagtaatgccgaaaaacctatgaagaaaatgaggacagatgatatgtacaatacaaatcatatgaccatgagagatggatcaagcagtttgggccatttttatggatcaggaaaagctaatgtgggag

SEQ ID NO: 103572 - DNA, 209 bp, Glycine max
ttagagtgtcacattgtctcctcagtattacagtgagtgctctaattggttatattttattgttatttgggtatatggagtaaaacaccgtggtacatggactgtgtatatgtcttcttagataagttatatctttcttggcaatttgtgttgaactcacttagcagtctctgatgactgtaccgaaaaggggagttggttattatgag

SEQ ID NO: 103573 - DNA, 255 bp, Glycine max
cgattactgagttcagctcagtttcaatttctggggtttgtgggttacccggttttatgggttgttggcgtgtaaagttgtgatttttaggttatatttgggaatttgctatctggggttgtggtttttggaattgatggtatctgggtttctagggattgattgattggtagagatagcgatagatggggttgggtggtgagaatgctcacgtggtggagtcttgggatgtgtgtaaatcaaaaggtgggagga

SEQ ID NO: 103574 - DNA, 265 bp, Glycine max
ctcacatctagagctagttctgccttactagtggatgcatcagccatcagacataggttggcttcttcctcactgtccttgtcagataaggaatcgttcagctactctcaagtgctcatgaggcttttctttttggaattgaagaatttcttcttcttatccattggcttttcaaggtcagtacattctgacttgaagtgccctcgtttcgtgcacttatagcagatgattggacttttctctttcttgtgcaaggatcttttgt

SEQ ID NO: 103575 - DNA, 249 bp, Glycine max
gccttgagcaggaatataatgctgtttttgttccgtgtgggcatatgtgctgctgtacaacttgttcttcacacttgaccaattgtcctctatgccggcgacagatagagaaggttgtgaagactttccgtcattgagtgttgagcatacatggcatacatggtagtctaactaaaaaacagtcatatggaatgaggaattgtgctcaagaatccaggagcaacaaattggtcaattagatattttttg

SEQ ID NO: 103576 - DNA, 257 bp, Glycine max
  unsure (1)..(257): unsure at all n locations
cagttcaccacacttttgggaccccttctaggaatagaattcatcttcacaatttgattccaaggcctggttagactcagattgtgaagatgatttctatagtgtcaatggtgactttacaccatctagagggaccacaccagttcaccacacttttgggaccccttctaggaatagaattcatggctctatggctgacanctccccagcacacnnncagacattgttagagctttttcgcgaaagtgtcaaagatg

SEQ ID NO: 103577 - DNA, 104 bp, Glycine max
caaagttgttcagtgcctggtggatgtactatcgataataaacacatggctgtttaaagtagcacagcattttctgaaacagctgtctgattgggtgggggacg

SEQ ID NO: 103578 - DNA, 252 bp, Glycine max
aaggagttcatggagaggaaggataagttggtggattttgagcaccatcttagcaatgtttctcagcaggttttgtggttcactggttttggctttagtggttgttagttcaccatggtgcattttggcaatgagcttaactatgtgcatatttagtaagttcatcataagattaactatggtgcatttgggtaatcagcttaaccaagtgcttgcttattcaataagctcattaaaagtttaactgagtgc

SEQ ID NO: 103579 - DNA, 99 bp, Glycine max
gcccttatgcacattccagaagttgggccattgttgtcctcttttctggagcagtactatgatgagctcaataagtcttgtccaaaattgtcaaacact

SEQ ID NO: 103580 - DNA, 253 bp, Glycine max
aatagatcgtacaacactagtctaacagctacaaaatcatcttccatttgtaactttgattaaatttcataaagaaagaacttggtcattttttaaattacatttctcttgatgaatattctgatctttgtactgttttgacttcaataggaaattatcacataagttcgagcgcatttattctgcggtatggtatatgttcatggaaacaacaattttattgccagtgaatgaaatgctttgttatatagcc

SEQ ID NO: 103581 - DNA, 259 bp, Glycine max
ctctagtctccttcatcttcctccgccttagttacaagcacaaaccgatagctccttccaacttgtcttctttctcttcaatagttcacaacagactaagttgcagctgggtaagaatcatggaagtagagaacgcaaataccacatctactattactgcagaaccctcagtatctgcctctgatggtcaagatcctgtttcttctgtgaatgcatctctacccgatcctatgcaacctgttattccacaggttattgc

SEQ ID NO: 103582 - DNA, 126 bp, Glycine max
ccactattgagtttgatatttcttctattttctctgtattgtctctcattgactgtgcgtgcagtagattggaagttgtcatagaatttaccttcaaacgttttggtgggttcctgaaggctgata

SEQ ID NO: 103583 - DNA, 120 bp, Glycine max
cgaggctgaataagtttgagaagattcaaagcagactaatccaagcttcaaaagactcggacattgatgaagtgagggagcttctcaaagagtttgagttaagcagtgaagagagcaagc

SEQ ID NO: 103584 - DNA, 138 bp, Glycine max
ctttgtctgtaatatggccttcatattcacttggtggtgtaaatacgtttccttttgtagcatatgcgggccaaggttttggtggaatttcttgcataccgatttgaagttcttttgtccatggtatcgcttactcaa

SEQ ID NO: 103585 - DNA, 281 bp, Glycine max
ccaaaccaaacttgaagctcaaagaaggaaacaacaacttgaagatgaaggtacggaatacgtgggggcaggggcagagttatctgcatgaaaagaattttgcctgattctttttaaggaggatggtaattgaattggcgtgttgcaaaggcaataacatgtttttttgcaactaaagcttctacgcccatttctatctactggttggtgtgatatgataaccccccaccaacaaatacacataaatgcattgctcgctgaataggtgacacagtgggtga

SEQ ID NO: 103586 - DNA, 240 bp, Glycine max
ttcaaaggcaaagattctgggcaggaggttgaggaagatggtgaggggttggaagtttctgaagaaaaaagtgatgtggagggtgagaatgaagagggagataagaaggttagtgttgagtactatgagcccaaacctggggattttgtggtgggtgttgttgtttcaggtaatgaaaacaagcttgatgtcaatgtaggggcagacttgctaggtacaatgttgaccaaggaagtgctt

SEQ ID NO: 103587 - DNA, 267 bp, Glycine max
gccaaccagggatcattgaaagggcatttctgtaatttaccctccatggtcacatccactcactcgaacaccaccaacgaccctcacttcgtcgccggcggtgcgggttgttctccatggcttcggcggtcgttactccggcgctgctcttcacggccctcgccggccttgttttcgtctccgtcgtcttctgcggtgccagtaggtaaaaaacctaagacctctctcgaatgatcgaattagagagagcatcgtcgaaatcgcaat

SEQ ID NO: 103588 - DNA, 139 bp, Glycine max
cggctcgagattctccaaagtgatcaattgaacatggaagttcaatctccttctctagtgtttttcggcctatcatgtaatgaaacttgaagttgttcttggattttatgcttcatgatatattttattgtcttttgtt

SEQ ID NO: 103589 - DNA, 257 bp, Glycine max
ggcatgttctagagttaagtaattgcaagtggagttgtatgaacaatttagcctctgtaaacacgtggttgttttcaactaccacacgaatgttagattttcatgtttctcctgtatagctttcattttgatcttttcctctcttgttgattattatactattgaagtgtagcagcccaccttaggctggtaggctgcttttttagtcttttcatattctctgctttcctttgttctcttctttccttctacataca

SEQ ID NO: 103590 - DNA, 260 bp, Glycine max
gggaaatgctgaagaagcaaaccttgtgttcttgagaaggtttgatgtgtaaagagagcatcttctttttataatatatggttggatctgagtgttttctaaataatttttaggtcatcaccacgagaatgtcctgtatagagatttggtgattttggttatcaattttgtgaatatggttagctaaatttgaaagaacttttattgtgtttaatgaaattaaaccggcatttataaagagaaatgtcattttctaaaaa

SEQ ID NO: 103591 - DNA, 214 bp, Glycine max
cttctttattttgtctcttcactgtctcgatatggctatagaatcgcatagtatatacactgaactgaagctatctgtatagcagcaagtgtcgatttaagtacttactttagacaatcattatattaattacacgaatttatgagctctttatctatctatctagctaggggagattagaatgtctagcagaaggtccaggcagcaatctgca

SEQ ID NO: 103592 - DNA, 256 bp, Glycine max
attttgaatggacgtcattggtttatactgttgtacatcttctgatgttatttagttacgaaaaatgtattattgcttcaacattaaatggtaaagaaacttctgcaaattattcttgtactcagatgcttgttgctattgtatcaggatttgttcatgaccttggtctagttaattctacttatatccctggattttacgtggtttaacttgccctaattttacgtggtggacatttttgtcgcagattcaggtg

SEQ ID NO: 103593 - DNA, 259 bp, Glycine max
aacagattcagcaacgactgggtcccagctttgggttttttcaaatgggcaaaatctctaacaggttaccggcattcccccgaactctacaacttgatggttgacatcttgggaaagtgcagatcctttgattccatgtcggagttggtggaggaaatggcaagactcgaagggtatgtcacactggaaaccatgaccaaggtaatgaggaggcttgccagggcacgcaagcatgaagatgctattgaagcatttggca

SEQ ID NO: 103594 - DNA, 267 bp, Glycine max
gcattggtaagcttctaacaatggtaggggagaagatgactttcacaatctgatcgcgttggaaataaaagactgctctcagttacagaaggtttttgcttttgaatgtgaaactgatgacgatgatcaagaagggattgttatggatggagaaaaagtactactacgtaacctgctacgtataagactcagccgtttgccaaacttcaaagagattcaccatggattcaagttaaaagatgatgttgaagaacatatcataaatga

SEQ ID NO: 103595 - DNA, 167 bp, Glycine max
ggaaattgacaatgtggatgcttcagttggaaatcaaggtaattccgcaatgtacattgtgtcaatataaattatatgcaagtgccatatttgggcgacggaaggggagggaaggaaggtaaggtaagggggggggggggggaaaaaaattttttgtaccgttaaaa

SEQ ID NO: 103596 - DNA, 136 bp, Glycine max
gaaaatggcttgacctgggtatatggtgcaaaatgccgtatttcactgtattaatgtgaatgctatttttctaggtgttgaacttggaacgttagtttttggggttcttatataatatttttctccaccttccact

SEQ ID NO: 103597 - DNA, 260 bp, Glycine max
cagtagctcacaggataccaactgtgatggattgcactaaggttcttgccatcagtgatgggaaacttgtggagtatgatgagccgatgaacatgataaagagagaaggatcactgtttgggaagcttgttaaggactactggtctcattttcagtctgcagaatctcattgaggctgaacatggctctcatatctttttctctggattaataagaagccaagaaagtgtacatagtaggatgtaaagtgtattatattt

SEQ ID NO: 103598 - DNA, 265 bp, Glycine max
ctcgagccgtggattgacagattaaattaaagttttggacaatatccgattgctaggaatgcaattaacatccgacttgaaggtatggtctctaatgtaaaaacaataaatacaactataacaagctaccttttctccacaagcttgcaagtttaaaattatttaagatccttgagactagaactaaaaactctaaatatttcaccatgtcagatatttaccactgatagcagcgatggggatcgatcttaaggctgggggtaag

SEQ ID NO: 103599 - DNA, 263 bp, Glycine max
agttgtgtatatgtacatatgatggtgataaagctgatttagtgattgcagtaacaggacattagagaggaagaagtcacattcatgtattttgctttaatattctaacaatattagtagttactatatcgatagtaggaatataactgatgatattaattaggccacaaagaaagaagatagatgcaatggaatggtattgcttgtgttgatgctaccatgttctggcaggtatagtgtaggaagaagctgactcacataat

SEQ ID NO: 103600 - DNA, 274 bp, Glycine max
tgcaccaaaaccaacacaccgaaaccaaaagtaccaaaagcacaacaaatccgtataacccaaacctaagagagattccataggacaattttgtgtccgctgctaaatctcttctttctctcctttgttcctctcctcgaagaactcagatcactaccaccagcaacttccccgagtgttgttttccactttttcttctcagaatccactctcttcgccagatcttgcttccagtgctgaagagaggcagggaagacatcatagcaaacactta

SEQ ID NO: 103601 - DNA, 261 bp, Glycine max
ctcgagccgttttcacattttcatataacctcttgtaacctagggctaaagctacaccctacaacttcccctctttgtgctttcctaaaccttgtatttatataattcatcttttataattttattcgaattcaaatataataccaaaaccgatccttgtttggccattggctctctacgtactagcggtttgaaacatttgagactcaaagagtaagttatatatatatatatatagagagagagagagatagagagaag

SEQ ID NO: 103602 - DNA, 265 bp, Glycine max
caaaggcagcggttgtaataaatgtgaataaatagcgtttggattggtgatgttcataagaggtgtctcggtgaagtcaagatagaggttcatgggttgctttggcttctgcaaaggagatgatagtgttacagttgctgacagaggacctttcatgcaaagcactcctactgggaaccccagttatcatggaagacacacagcagtaactgctcctcggactataaattttcaacctattgctgtcccttccatcacagtagat

SEQ ID NO: 103603 - DNA, 257 bp, Glycine max
cgacgagttaatgttaagtccctttaagggcgacgagttaatgttaagtccttttaagggcgacgaattaatgttaagtcccttttagggcgacgagttaaaactattttgagaacaattgaggagtcgtgcgttttgtacagttcatagatagagtctgtgtgctaaaatattttttgggtttgacctgaatcaggagggagaggccctgacggactcttcggaatgtaggccttgggggtcacacggtttgagtg

SEQ ID NO: 103604 - DNA, 242 bp, Glycine max
actcgtgaacccacgcatgttcgataatcaaatcttctttctttttcttccgcagtcccaaccttcatggattctcactcacacatcattgcttggtttcttctctttctctctctctcacacacgcacacacacactatcaccattttttctctcttctttctgcactgactcactcaagtttcttcttcacttcattttcaggggctctggtgaagatggtcagctaggaatcggaagca

SEQ ID NO: 103605 - DNA, 167 bp, Glycine max
aaattgaattgtgaagatgaagagcgtaaacgacgacgcttcaacccaagatctcgaccctcagagcgaccacagctccgattacttagctcacccccaacaccaccctcagacccgacgtcctcggggtttcgcggaggcagcggcggcggccaccaccaattccg

SEQ ID NO: 103606 - DNA, 272 bp, Glycine max
cgaaccctgaacaacataccatctgaacccactcacaagtatggcgaacgccatgcaagatgcggtccgccagcaggcgttatccataggccatcaagccttcaacacctgaacaacattccttgataccatgtctcccccagctgccatctttgagtcttctgcccctgctgtcctcggcagtggcatagatctcaacaagaatcttgctgccaaggttgcttctgttggtcttgacggtcaggcgaagaccctggctgatcttgagaaga

SEQ ID NO: 103607 - DNA, 109 bp, Glycine max
cggcgaaaggcacaacgattgagtctacgttgttaaatcattttttatgaacagaagttcgtatatgttgtatattctgcatttttatagcagtctttcaatgtatttc

SEQ ID NO: 103608 - DNA, 265 bp, Glycine max
aaaagatccagtctccagtgttggcaatggaatgaacttcaataattcttcgtccacatttgtacagtcaagtatagtgaatgctgcttcctctggtcaaggtcagggtcaacaattttcaaacccttctagtaaccagctgttgcaagatcaacaacattcccaacagcttgaacctcaaaatttccaacatggtcagcagtcaatgcaacagttctctgctcccctgaatacacagcaaccgccgcagccgcagcagcatttt

SEQ ID NO: 103609 - DNA, 264 bp, Glycine max
ggccccgcgccaaaccattttgatttcgaagcggagagttcattctgttttcttcttcacaaacgaacgcaacagttctatcgtataatattctcgagaaaatcttcaatatctatctttttctctcactctaattcaaaagtttagcgaccgcaaattatctgctcctctacacatggcgtcgcctggttccttttcattcggaagattttggccaccgtttcagggacagggagggatgaggcagcaacttgatccctcggc

SEQ ID NO: 103610 - DNA, 109 bp, Glycine max
gcgattgccatgccacataaagtacaaattcaaaatgcattcttgttttaaaatttcgcaaagcagctctgatttctagaagaataaggtggaaacttaattggggtaa

SEQ ID NO: 103611 - DNA, 278 bp, Glycine max
ctcgggccagcccagtttctccattgcaatttgttccttcttcttccccttctgtaacactccatcgtcgtcgtcgtcgtctctaaatgcgaaaatccgaacccctcttcttctcccttctcctccaccgcaaacccttctcttcctcttcctcttctctcccaacccaaatcttcaccattctctcacgtccccgctggcgaaaagacccttccctcaaaaccctaatcccctccctaaccccttccctcctctgctccctcttcaagctcaacccc

SEQ ID NO: 103612 - DNA, 268 bp, Glycine max
atttagattcgatgagaatatcacgactgacgtgagaattggccgattgggttccaaaacgacgtgtcgcataatttccaacagaaaagtgacgctgaagtgcttaatgctctttcattctttcccatctcttctaattccacacacactacacagtgccaaccaaagaaagaataaaaagggaaagcgaattccgaagaagcatccatccattcatcagagaaaccgcaaaatggcttcagcgactaagcagcaacaagagggagag

SEQ ID NO: 103613 - DNA, 265 bp, Glycine max
aattggtcttctcttcattgggaagctgcttgagccagtttggggtcacagggaatttctaaagttcatctttatagttaactttctaacttctctctgcattttcatcactgctattgctttgtactgcattacagggcaggagagttacctttatatgccattctctggatttcatggagttatatttggcttcttggttggcatcaagcaaattgtaccagatcaagagcttcctttcctcaagataaaagtgaagtggttg

SEQ ID NO: 103614 - DNA, 272 bp, Glycine max
atcgccgcaatgagaacaatgcgcatcgccctcattgcaacctgagctttgcttcaccgaatttggagttgcttcacttttcagttcaaacatctgataaatactctttacccccaattttcaccactccagtcttcacaaatcttctcaggagatatccaaaccagaggatatggaaatacaaataccaagaaaagacttgcattgttattggagctaattcaagaattggctatgcaattgttgttgagggtcttgcaaagtagtttttg

SEQ ID NO: 103615 - DNA, 262 bp, Glycine max
caagagatcacccgttatgcttagttgcagatgatagtgtgtttttacctcttcttgtggcacagctttcagaagcatcacatgtaatgtcattacttccggggcttaaggaaagaggcctacaatatttgcaagcggctgcccatgcaaatggtttgtcacgtaattgcatagaagttcttgaaaaaagggtgaaacagttaaccatgcatgatatacaccagaaaaaggttgtattttcctgattccaattgcttggtgg

SEQ ID NO: 103616 - DNA, 278 bp, Glycine max
tctcgagccgaatcggctcgagggtttttgaaagtagcagttcgtcactcagttgagaattccgccttcgatcgacctgtcatgccagtgaagcgggctcgtagtaaacgtcagcgtccttcaaacttcagtcctctattttcaattcctctcatcgttaatttgccggctgtgcgaaaagatcaaaggacagcagcctctgactcagattttggaacaaatgttgctgggaatctatcaaacaaagtaaaaaagcagaggaaaaaggatttgtccct

SEQ ID NO: 103617 - DNA, 174 bp, Glycine max
cttttcttttgctgtcactgttgccgaatccctcactttctcactcctcagcaccattcaatctctttcctctactggtaacaactttttaaatatatttctgataggcctgtggcaatgtgtatactagaatgggctaataaaagggagtgggttaaaaggtgatgatgggca

SEQ ID NO: 103618 - DNA, 218 bp, Glycine max
  unsure (1)..(218): unsure at all n locations
cagagagtgtgaagatgctanagacataacaacataagcacaaaaaaggcagtgagtggagtgagagaaagagagaaatcatggcagtttctgtaaccattttagtcctcatcatcgctctgcatctcatagccttcgtcttcgccgttggcgccgaacgacgtcgtagcgaggtaaccctacccccctctcgctttggtttccgcaattgagctctc

SEQ ID NO: 103619 - DNA, 275 bp, Glycine max
gttaaaattttagagaaactgaaatgggataaaaaaaaaataaaaattggagggaccaattctagatttcatatattttagagagtccataaacatactttatcctaagtaatttatatagctcgaactaaattactatttttgttcataagttgtgtaaactgggaaaagttttcagcaagagtaagtgcataggacagaggatagtaccatccaaggagtttgattaaatttgagtaacctttgtgttttgcttaggttatttgactatattc

SEQ ID NO: 103620 - DNA, 268 bp, Glycine max
atcagattgtcgctggtcactgccactctccttcatttttccttatttcccccagcctgcaataataatgactctctttctagccactctcatttatgaccctttccactttccataatgaaattcaaccctttattattatctcactctaaaaaaccgatccttgtgacactattgaggccttgtttcttctggcaaaactccaatctctagttcgtttttttgttaccttgtgtgtgtgtgtgtgtgtgtgagtgtgttcttaact

SEQ ID NO: 103621 - DNA, 257 bp, Glycine max
actcgagccgattcggctcgaggacccatcgaaaaatcccttcttcacagaaaccattcaacaacgctgcttaaattgttgttactatgagagagcaaaacgttgagtcgttctacgctaagcttcgccaaaccgcgctatcttcttcctcttctccggttctcattttcccctcaacctccgatgtcgactctctctgcgctctgaaaatcagtttgtgcacgagagattgagtgacgagaggtaccatgatggag

SEQ ID NO: 103622 - DNA, 269 bp, Glycine max
actcgagccgtttctgttcgcagctgaagcaggctcgagaagtagcaccgccttgtccaacttcaccgtcaaagtcaaagcagcttcactctcggcggcctccttttccagcgcccttggttgcaggtttccactcccatttccattcctaaacgccgctgttttctctctctcatttccattttcattttcgcctaatctctctctctaagggcgttctcgtctccgcctccgacgccggctctctgcttctcgacgacggaaccgac

SEQ ID NO: 103623 - DNA, 137 bp, Glycine max
aaaattaaacccccatgaccaaacattattcgataaagtcactcgcactgaagcaagaatgaaaagcttgacatgtttacccacctggacattaattctgaggtatctccattaaaggtgggtcacaagtttgctct

SEQ ID NO: 103624 - DNA, 264 bp, Glycine max
gcgaggcatatttgaaggtggttttaacaatacagatcgtgatgctgatgatgaagcagaagcaggctgctgatggtgactgggttgaggagcttgacatggttgatgtagatgggttacaaaatggagatgttgctgcaatttggatggtgtagaagtggcggaagatgatgacgaagaaggtggatgggagctggaagatttagagcttccccctgaagctgacacgccaaaagtttctgtcagttcgcgatcttcagtttt

SEQ ID NO: 103625 - DNA, 266 bp, Glycine max
cttcatttgtacatgaaacaattaatgtccgtttgcatggtgatatacttttaatgctgtaaaagtttgtttaaatgcgatactgtattcctccttcgcccagtcaaagcagcaaaggttttatccaattccaaaaaccaaataagaagacaggaaattactgtaagcttttaatgaaatagcccaaatcgaatccaagtaaaaccgaaaacatccatcaacaccatgatgttgggggagaccaccgcgcaaatccaaccgtacac

SEQ ID NO: 103626 - DNA, 221 bp, Glycine max
cccgggatactagtgggaagtaccttccgccatttaagtacttgacaccggaacaggagaaaggacgtcgataggctcataactagactcgtcgcaagacatgaagcgcatatcgctctgatggagctcatgaagtggaggacggaaggctcgatccggtttacgcccaagctgttcagatgaaggagagggatccggtcactgggaagatgaggattgtc

SEQ ID NO: 103627 - DNA, 261 bp, Glycine max
ccacaacctctcacaataatgtctcactccaacaattcagagtccaagttctgtcctaaagcaacccgcggtgtccttatcatatccaatgacgatcctaaaggagttggagtcacgctcctactatgagtcctttcactatcctttaacaaagcttcatcagttcctattgaaagtggctactctgcaccattgcctaatcctagacgaatacgagtgtgtcatgatatggctgggggttatgtagatgataagtgggtt

SEQ ID NO: 103628 - DNA, 212 bp, Glycine max
gctcgagccgcacaaaccctcccctcacactctccaaaccctagcggcactacacacgttatctacctctctctctctctctctccctctctccttccccaagatgtcgagcgccgatcccgagcaccgagaagaggggaggcacccgccgtcggcgacgacgaggacaccggagcacacgtcgctcccatcgtcaagctcgaggaggttgc

SEQ ID NO: 103629 - DNA, 177 bp, Glycine max
catagtgaaggaacccaacactaatatcattattatggcttctccattctcactcttgttcctaatccctgtccttgtgtttctctgcttcctcatcctcctcggaccccgctccacgaacctacatcatccacgtggcgcatcccagaagcccagtctcttcacctcacacaaaac

SEQ ID NO: 103630 - DNA, 208 bp, Glycine max
ctcaaatattccattttctctttctctattgtcttcccttttcttttgggtggttttgcaaggttgtggttggtttagatcacactagtatattatgtttgtaaatgactagtcatgttaacaagagttttcttttcttgccagtactatagctgtatcctagaggaacatgtcatgaatgccattaacataaaaccgtttgctgata

SEQ ID NO: 103631 - DNA, 264 bp, Glycine max
ccttatctaatttaagatcaggatgttagtgataatcatattctttcaaatgaggaggctgtgacaaggagtttacgggaaaggagttccttgaatgaccaaaatagcatgatggacaatctgttgcacagaagttctgaagtaacttatttgctctaactggtaatcagcactcttgtgcgtttcatgataatgtaaatatctctgatggaacctttgatgcactcaaagttgttgatgctggttgcatggagcctcagttgg

SEQ ID NO: 103632 - DNA, 123 bp, Glycine max
cctcgtttggctttgccgattagtgtttactgaaacaacgttttttgtgatatcgagaacaaaaaaaaagcgtgatgtcgaggagcccggggaatcctactagaaggttcggtgacaatggcg

SEQ ID NO: 103633 - DNA, 146 bp, Glycine max
cccgcgaacgggcttcgtcactcgcgaatctcacattccgagctaccgattagaaccgttcgctgagtcgcgtcaccgagtccgatcttccagcatgttggacggcctgctcggtcgaggattcgccgcgaaatgcaaatcgtgat

SEQ ID NO: 103634 - DNA, 181 bp, Glycine max
cgtcgaatatgtatatcagatgtgctctgaactaatacaagctactgtatctcctattgcctctggtgccactctcatcatctgcccagctcctattttgccgcaatggcatgacgaaattatacgccatacacatcaggctccttgaaaacttgtatttatgaaggtgtgcgagacacat

SEQ ID NO: 103635 - DNA, 252 bp, Glycine max
tgaacatatcacgtgagactctatatgttgttgctaaggtctagtgtgatataaaaaggttgcagaaattgtcaaatctcaacattactccccactttaatttatgaatgcactaaattgacagactttcgtcctttcggacaaagtttgaacactagttagtgttcttcaagttgtactctataaatcttagttaatcattttcttttcttttgagaaaattgaaaaagaaaaccctccttagtggtgatt

SEQ ID NO: 103636 - DNA, 159 bp, Glycine max
cttaaaggtgcctcttctcaggtgaagttcatttaacaggtccaggcagcaatccgtggaagtgggggtggcaaagcatctatctctgagggagtagaggcatccgtgatatatgttcggttcaaggcagcagcaagtgagttaagccactacttgaag

SEQ ID NO: 103637 - DNA, 263 bp, Glycine max
ccaaaaggatcgtattgatgtcaaggctttcaattctgatggatcttactacaagctttcggcattgttgaacatgacttcagacagaacaaaggtggttcatttccagccgcacacattgttcattaatagatttggcttagtctctgcctgcagcaatgtgatactcagtcagctgtatggattcatcccacggattctccaaagccttttgcttggcagttatcagccaaagttgaacttctgaagttgcgcattgatgg

SEQ ID NO: 103638 - DNA, 238 bp, Glycine max
ctctctctctcattatctatcttatatctaaactagtatgttgttggattttggagatgagctgacgttagatagtttctggattccatggctcatatggattcaactgttattgttccttcttctccttaccattctttttgtcactccatcattactttagatccctctcaccacacaacttctccttctgcctctgccactgattctgatcttcacactcaacaaccctccaacc

SEQ ID NO: 103639 - DNA, 250 bp, Glycine max
gcagcaggcactttctttctttgcatcttaactgcgccaataagttgttcgaattaatggtttaaacagttgtacaacctttgtcctgttttcaagattgtcagcttgtgttttaacttttaacctcagatgctcttcacaacaaggcacaagctagttctcttctaataataaaatcatctcttgtcttgtgtgtgatattggcttgtgtcagctccaaatttggttagagtcctcactcacatttttc

SEQ ID NO: 103640 - DNA, 277 bp, Glycine max
tccacataccctatgactcgtccttctttgattacatcaccctctactcagataggccgttgatgtaatcaaagaagggcaagtcatagggtatttggatcagtttggcactggacttcctatcaggtctgatgtggctggagaagtgttgaagctacgcgttcgggatggagagcctgttggttatggagaccgtcttattgctgtcttgccttcttttcatgatatcaagtgagctagccttttcctgttgatgattaatcatgcggcatttttt

SEQ ID NO: 103641 - DNA, 265 bp, Glycine max
gaagaattaagaagacagtttttgtagttaatttttctccaaagggtatgacactgccacctcctcttgagtagtggaatattcataaaacgaagagcttaattgaactttctttcaacattttctaaagttttttcctaagatgtctatcatgtcactttttgtatggtacagaaggaaaaggaagcaattatcaaggaggggactacggaaatagacatggaaggcactcgtgcaaaagagggaaccctaccaccgggatttc

SEQ ID NO: 103642 - DNA, 272 bp, Glycine max
cttcagtcaggtgttccaagcacaagcaagcacgcctgcatgtatttgactattgtaagcaaatgtaatttaattttgtggtcatcaatgaatttggcattgaatcgaaagctgcgcgatgtaaggcagtggcaacggacatggaatgggtcctgcttctccacgcttccacgatcacaacatgtcaagcagctgctttgtcattgcaccaatctgagccatcttcagcagacacaaggcttcatgcttaccagaggtctcgaccaagatga

SEQ ID NO: 103643 - DNA, 202 bp, Glycine max
ctataaccagaattagaatcaatttatagcttagctggttgtaacttaaaagttctagcgagcaatctgtgaaatgattatttttgtttagaagtcgataaaattagccaacagtgggtgtaatatttttagcaaaagacggagctcaaatttttttctgaatatattcaaatcatgaactggtgcggacgtttacctatac

SEQ ID NO: 103644 - DNA, 185 bp, Glycine max
cctatatggagtacatattctgcgacaactaagccagatacttctatcttaaataggcttatagatgctggggtgtcaccaagagttgatgagtcaatgtctgttgtgaacaatgagatattacggagacacttcttggagctcatgacaaactttttggctccttttagcccatactttaggac

SEQ ID NO: 103645 - DNA, 278 bp, Glycine max
ccttatgaagctctgttgtcaaagtataaaacaaaggtgcgttattttcagaattttatcatctgggccgtgcaagtcttctcccatacgctagtcggtttgctgaaaaatgtgattttggtgggttattgagatgggtttttcggaacatgctctgatctcttcctctgtctctgttgctttgtcttggattgacttcgttttagtgtttttcttgctggaaaatgtttccttggccgttacggttgctgggggttctgtagtttgaagaatcggca

SEQ ID NO: 103646 - DNA, 209 bp, Glycine max
atctctctcattttcttcttcttcttctgaaccctaaactaaaccattatccagctcgtgtcgttttcaaaatgcagtttttgttccaatgaagaagtgaaatagtagtaagaaataagagagagaaagagcgagagagaaaggtttcgaaaatgtgagtgaaggaaatgcacccgttgtgctgcatctcgcttgagagtccggggatc

SEQ ID NO: 103647 - DNA, 263 bp, Glycine max
ctcttgggctaagacacgcttcccaacattagttgcatcgcattacgttgctgacaagttgtctcccttggacttggacttggacttgttctgttcattaagtgctcattttttctttgagggtgccttgagtttctttccattgccactgttttcatcattcttacacatttcttaacatttttgttggtttgtgtcggtgttgcacaacacaacttcttctggggttgggaagttggtgtagaagtttttggtttttgtgc

SEQ ID NO: 103648 - DNA, 276 bp, Glycine max
tcgaagtccaagtcttctagagagaaagatattaataaaccttcaagttacaaggatgttctggtggcgtcttccgaggcatcaatgtctgctccaacatccggagctaatgctactaaaggagtgctatcagaaaaggaagtagtaagcatatcatcaaatgatggtgtaaatctttcaattagagacaaacaggacaatgcacaatcacttgctaatattggttctggggaccatcatgagaaaatcaggcaaatagaagcagctataatagtt

SEQ ID NO: 103649 - DNA, 267 bp, Glycine max
tgatattaccaatgaaaaacttgcggcaaaagcaattaatggtagcactggtgagaaactcgcgggtgatcaaactactgtgggaagttgccatccagaaagaggtcatatcactgctaaagaaaatggggaagtaaacgtgtgggacaaaattaacgaggcattaaaagcaaagaaggccaagctgtcgcaggaggattgttggagtagaggaggagagagctcaagcacgaggtcatggtcccatagagccatgagatgcagtgc

SEQ ID NO: 103650 - DNA, 268 bp, Glycine max
ctgtcctgaattcctcggagatgaagtattgctgaaagggttggactctctctcggtattcaattgtgataagttcaatgtgtcggcaggttttcaacacctttggaacttgtggatttccaattgcagagatgtgggagatttgcatgctttaaaagatatgacttccctcaaggtgttaagattgaggaatcttccaaagctagaatcatttcccaactgctttggaaaccttcccttgctttgcgaattgagtatttttttttgt

SEQ ID NO: 103651 - DNA, 224 bp, Glycine max
gggagcgtgtgaaaataaaccctgttaatgcccatcaaagtttaccatgaatgacataatgatatgcttttgctcgttaattttgtggcaagccttgtggactttaaccaacaactgattgtccacaatagttgggaagagataagtgcttgattgaggattttcaaaatctatctatcttttggactcaggagcatattctggggccataatgttctccatct

SEQ ID NO: 103652 - DNA, 268 bp, Glycine max
cttgcgacaatgaagtccttctttggagctgtcgaagactcgtctgcaccaggtggctggcgtcacgtccccgagcggatttctgaacaatgggttctcgcgtgtcgagccctacaaaaacatggatgttaacaacgagattctggcccagtatctcaagtatcccaagctattcggaggtaacgtgggcacgaacaacttcgatgccttgtccacaccattcgatattcttgtcgacggcaagctacccaacgatgttacagcggcg

SEQ ID NO: 103653 - DNA, 280 bp, Glycine max
gtataatatgattaattacaatactggagaggctactgaagcctaaagggatgtaatatagactaaaaggcttgattgctctaattaaaattatcatattgtttgaataacgagtaaatgacatgacatgattttctggattccatcccttgctgacttgattgctgcagatgctagccgtattctaaaaatggaaaacaatcaaagtgctgcaggaacacaagatagttctatgatgaagtctgttgatcaaagagcacgatcaaaagggcgcaatgac

SEQ ID NO: 103654 - DNA, 283 bp, Glycine max
aaaaaagaaatatcgtgtaaacattctccgctgtgaaagcttagcttctcttgcaccagcaactgttgatcgattgtctgttcgtgattatgatgtagttgtgtccattgtgcctcttcctcattcatcagttcttcctggatccacaggtctggttcattttggtcccccctcctattcttttatgactccttggatgaaattggtattatattcaactgtagctagtgggcctctatcagttgttctgatgaaaggacagtgtctgcgcttgcttcctgct

SEQ ID NO: 103655 - DNA, 170 bp, Glycine max
aaacactggttccatgtttgcacgtaacccatgattcaaccgtataatgcacgccatggcaggtagcttcatgttcttggtgtacatgtgggtttattttcattcacctgtccaaaaggttagctgaatatgtttaactgtttatgctatgcatcacattgtataacacc

SEQ ID NO: 103656 - DNA, 120 bp, Glycine max
caaagtgctatgaaattatccaaaaaaaggaatcaagttgatatcttggatgaagggaatatgaagtttggaagaatggctgactagtacggctccaaagatttaaacagttttgtgcat

SEQ ID NO: 103657 - DNA, 101 bp, Glycine max
ctgtattcagttttgttttctccttgttatattgtatttctccacttggtaatcccttatcatttgaaaagtgcccaggtatgaaattgaagttgccaaga

SEQ ID NO: 103658 - DNA, 189 bp, Glycine max
tcgataataacttacctagcatggtgacacctctcatgtggccagaaatcccactcaatggcaaccggcagcattatcaacagcagtggcaattggatgcattccaccaacctctctgggagagggaagaagtcaaccataatttcatgactccggaaaactcacttttgagttatgactcgtcggcaa

SEQ ID NO: 103659 - DNA, 206 bp, Glycine max
tggtatatttatgttgtgttgatcaagcttgcagagaagaaacatctccggatggcaatgagcagtgactctgctaagaagaagacaaagaaaaaaagggattcttttaaggatggggaaatggattatcagatcccggcagctgttttgtttcttcaaagccacatatatcttgctgaaggtctaagcatgatgtttgctgcttt

SEQ ID NO: 103660 - DNA, 211 bp, Glycine max
tgtttagagaagaaattgtatttatatattcttctgtctttagacgttggtgaagagtatattgtgttttaaatcataattgtcacaagagtacaaaagtagcatttggatttggcagtaacttatacctggtgacctgattttgttgggttggtccgaattagagatgagaacaagtagcttttagtattttacatcaatgtcaaaggtg

SEQ ID NO: 103661 - DNA, 164 bp, Glycine max
ccaaaatttggtgctcatatcatcttacaaattaatagatgacactacaacttatgtaagatgatatgtcatctattaatttgtatcctgcacacctgattatctccattcctttcttatgttctaatctcttgtatttatagaccggacctctttattatatt

SEQ ID NO: 103662 - DNA, 249 bp, Glycine max
cacaaggatctgcggcaatcgggctagcaccaagagcagtgcaaaagtgcaagaacagaagctagaggcaaatttgtaagttccagtttcgaccacaatctcctcgatctgttgctcttgggcgtccatgggaagcattaatgctaatataggagccaagttatataatatgtcggtaccattttttggaaataattttcttgtatatggattgtgtattatatatatatatgagaaaatagctggaaa

SEQ ID NO: 103663 - DNA, 276 bp, Glycine max
ccagagcatataaccaatctttcaaacagaacaatacaaatctccatgcttttataaatcagactccaaccgatttctctcttcattcagttcattgcgttccctctcttctcttcctctcttctctatataaagtactattaactcccactagaacccatacctgcctttttcttcttcttcaggctctgcatttgcaatactctgttttcttggtttcaattcaatcaaacacctccattgccctcatggctcactttacctcctcaggtaaat

SEQ ID NO: 103664 - DNA, 123 bp, Glycine max
ctctgcaccatttgtagtggctgctatcaaggcagtggaaaaactcttttcctccaatgctaatgggtaattggggatgagctaggaaatacaggggtggatcagggacgttttagaggcgag

SEQ ID NO: 103665 - DNA, 154 bp, Glycine max
ctttctgattaatattatttcttatatttaactggagacagagagatacagagagagagttatccttctacatgttgtgatacctggattcgagacatgagatgaggccgatgcaactgacaccgccttgcggttccgggggcaaccctgcccc

SEQ ID NO: 103666 - DNA, 286 bp, Glycine max
caatgatagttcatggcagaataaacgtcactacaaacccagtaagcacattgcatttacaataatcaagaaattgttacaagcaatgtgcttactgggattgtagtaacgtttatgttgtataatgatagttcatggcagaataaaaaaaagtaattttcatagccactcattccaatttgaatcagaaattctatacgccattagatagggaaatctattagagctggcctagaagcgaggggttaggatagtttgtacaagattttgttaccattattgtata

SEQ ID NO: 103667 - DNA, 179 bp, Glycine max
cgtgaaagtcagataatttcaattgcctcgagttataatatactcactacctaccactcatggtatttcattttgtatattagcattagaatttttaagcggtttcagattaagaaaactaattttttggtgttattgtatttacaatagttaggcaaaaatgttacatattatagtca

SEQ ID NO: 103668 - DNA, 171 bp, Glycine max
ctcgagcgcgcttccaccatttcacacactcttctttacgagcaaagcaaatggcacctactaccaccgtacctattggtaccctcccctccggttccgtcaccggacgcttagcctccgtctacagtgaggtccaaaagacgcgcgtggaccacgcgctccctctcccct

SEQ ID NO: 103669 - DNA, 173 bp, Glycine max
atagatttgtcctagttgttggggggaaattactaagagttttcacgttcatatttaacctaatattggttgatgagctgaatttggagaaaccaccaggctgagagtgagaggtgcatgaagatgatggcgttgacggtgggaatgtaaggcaagtttcctaccgtgtcgca

SEQ ID NO: 103670 - DNA, 162 bp, Glycine max
ttttgtggagtctgagcgagctgataacttcacttgggcactactaaagctaagaggattgactgtcaaagaggatgacatgccccaagtgattgtgactttcggagacattgctctgatgagtgcagtgcaggtggtctttccgagctcttctaatttgtt

SEQ ID NO: 103671 - DNA, 175 bp, Glycine max
catcaattgcgttaacaactcctccgaacacactcgcggtttcgattcgcgtgcaatgcaatctgattcttgtatcactcttcccagattttactgatgtaaggcaaccatgaggggcatgctttctgtaaggacagccttggttcaacatcgtagtgagaaattgggccttggt

SEQ ID NO: 103672 - DNA, 166 bp, Glycine max
aaaagcttctgcaggttgtgttgggactgtcaaatggacatctttagtgtttttagtagtcgtattacttgtataaacaatttctgaaggtgagctacgcaaaggctagcttcacatctgagtggatacaagttgtcattaagagtgtaaatagttgattaaaaag

SEQ ID NO: 103673 - DNA, 167 bp, Glycine max
caaataggtcatgggactctttttcaaatgccatgacaaatccagttggtgttccctcaggcaaagacagtgctgcttttcagagttcaggattgcaatgtacaccacatgaagcagatgctcttccaccagctgcaagtgaaaagcatgattcagtagaattgggt

SEQ ID NO: 103674 - DNA, 165 bp, Glycine max
ctttctttctctatacaacttggaagctttctctctctaaaaacacgcaaggtcctccaccaccacctccagtctccctctttcacacagagaaatactctgtgtgagaccagttttcggttcatggattccttttctcttctacaattccaaacatctattctt

SEQ ID NO: 103675 - DNA, 170 bp, Glycine max
tctcgagccgaatcggctcgatggcggtcaagacgaagcgggcgaccaggatgccctcggacgcgtgcgcagacgacggagctctggctgcacaatgcgctgcttgccatgttgacgtacgtgaccatcttctggaacgtgtggctctcgcctacgcacggccactgttc

SEQ ID NO: 103676 - DNA, 165 bp, Glycine max
aagtaatatatatgcttagaagatttgaaggatcgtattctttattgcttatgcattcaattggtttccaaaggaaaactattacttgtaactgaacttgagttcataaagtcaagttcaatcaaattccacttcttaaaatgtaatccatacagacactaagtt

SEQ ID NO: 103677 - DNA, 164 bp, Glycine max
ctagcgtagttgtaaggctcgtgtgtacagagcctatatatagccgttatcatgtaatagaatgcatatgaataataatatcgacattccttctctcttttcttggaggctcataatcgtcgaattctaggactgttcttaggttcataggtcataacatattt

SEQ ID NO: 103678 - DNA, 161 bp, Glycine max
catgggtattagtgctatctgaaacaaaggatttcaaggctttattttcccagatcaccactcgcttgtgctttttgaatgttcttgtcatggtcgcagaatccttgtggattgaaccatatgggtattagtgctatctgacacaaaatttaattttagta

SEQ ID NO: 103679 - DNA, 278 bp, Glycine max
cttagttttgtcttgttacccttcctctcagccttttcttgagtttctctctctctctcctttttaattttaaataatttgttgtctgttgcgtgaaagacgccctgaaaacaagatttctgtagtcaagtttggagctttttgctctgtgattggtgtgtgctccaaacaatgcataattcttcatctgggtacttggttctggtttaatatgggggtggaagaccgttttccggtgggtatgcgtgtacttgccgttgacgacgacgaacgtgcct

SEQ ID NO: 103680 - DNA, 262 bp, Glycine max
cattaagacaatcaagatctctggcagaggatgccttttttcatccttcaattatgtccataagctattatgcatttgagcactggctttgccatctattcgccatgttttctgccagttactatgcatgtcctccttgctgctttacgagaatgggaaaggtacaagccagataataggcagtacttagcatcgaaggccaaagtaaaagtttcataatcctgttgagcagtgatgacaagatgaagcaactttgctggtg

SEQ ID NO: 103681 - DNA, 210 bp, Glycine max
cagaacgacgccgactctaaatactctatgtcaatggaacccgtggtgtttgtggcatcggtgctgctgtttcctttctccctccaactccaaaccaccgcactttcctcaacagatacatttcatctgattcaaccaatgtagtggcctatggtttcatggatgttaatttggatgatgatgtgagtcaccaggaaggttctttttggt

SEQ ID NO: 103682 - DNA, 293 bp, Glycine max
gattgatatggattcctggtttcgtcaggtgattaacgaattgaactcataccaatctcatgatcaatctcagcatcaggaactccctctgtgattgatcatgagattgatatggattcctggtttcgtcaggtgattaacgaattgaactcatacccaacaactgtagatcgtgcgaggaaaaccaggaaagtcttggggcatattttcagacgcgctctaacatggatttggtacaaatgcagaggcgcatatgggttgttgagacgagattatatgcctaacgggtggag

SEQ ID NO: 103683 - DNA, 247 bp, Glycine max
cagcaattaaggccacaagtgcatcaatgtttgaacagagtccatatggatatgaaactccattggattcaaagtgaagacattttgaacacttacacgtcctctgcaccttttatatatatcaaaacacttaggacttatgaatccaaaaaattcaccgacataccaaaacaataaatcgggcggagaaatataagctcgcactagaacgacatgtagacgtggaacaatcgattcgccaatcaca

SEQ ID NO: 103684 - DNA, 285 bp, Glycine max
attccgaaccggagagagaagatggcaactccccctacagcccagaacaacagcaacagcaggcagaccagaagaacgctgcaatggatttgataaacagcgttgtaggtgtcgacgaggaaggccggtcccgacagaggattcttacattcgctgccaggagatatgctactgcaattgagaggaaccctgaaggctatgatgcattgtacaattgggcattggtactccaggacagtgcagataatgttagcccagattccacttcaccctctaaagatgctt

SEQ ID NO: 103685 - DNA, 187 bp, Glycine max
cgggaacgcttgaggatcagcaccacttgaaagaccagcatgataagatgggtggtgtcaatgattgcggagctggcgcaagatgtgatacagataactctctgggtgactggtagccacttagatggacccgctctggaagtctgtcatctcgaagctcaggttttagccactcaagtagctcaag

SEQ ID NO: 103686 - DNA, 286 bp, Glycine max
cgcgcctgctttcttcgttcgtcttttgcatcagccatcaggtgcgaactcaccctatggatttctatccaccgctggctgatccttcttctctaactctaattcattattttcatgtattgttctcgcttccctgcttcatatttggctgtcatttgaaatttctttaataattctcttcttttaattctagtttggctatctgttactgtgtttatgatttcaatttcatggcggaattattattgctttcttagtgacgttgggtgtgtagtgtatgcgttga

SEQ ID NO: 103687 - DNA, 282 bp, Glycine max
cgcaggatagacgttttccaagatcaaggattggtggggtttcagacgtctatgaggatccccacaagctttcaatgagacgccattgcagacctgcttttaatgagactgaagctatgtctctgcccagtcgagagacatacagattccttaggcataacagtgagcattcaagctcaaagggcagtaaaagatttttgttcgatagctgttggaggtctgggatcttgggatgagcctctggactctggagaaatatatgattctgtgtcaaataaatgg

SEQ ID NO: 103688 - DNA, 281 bp, Glycine max
cggaggttgccacggggcggcaattgacgatggaggagtttgacatgacggtggggcattctcccatcgttcaggaactgatacggcggcagaacgttgaagaggcgagcgttgattccaatgcgggtggttctaaagtgaagaagaaggggacggggtggttgaagagtatcaagagcgtggcgagttcggtggcggggtatagggatcgccggagtagcgacgagagggacacgtcgtcggagaagggcgggaggcggtccagctccgccaccgacgac

SEQ ID NO: 103689 - DNA, 282 bp, Glycine max
gtttcttgcagtcccatcccactattgaccaataatatttagggtgcagtccattaagatgaacaaaatgtagtacatgtgtatgaaacagcaccctcaagttgtcaaacgaggaaaatgacaattttgcctcacattttgccctttttggtcaggtgaggcctatggtctgtactatagtctgcagttgtaggggacccaaaaaccttgagttttggaagtgacttcgttttcaatggccactattggcattagatttggagcaatacacaattagatatg

SEQ ID NO: 103690 - DNA, 268 bp, Glycine max
cggctcgagctcgaccgttttcagaaatgatagcagctctgaaaaagctagagagtgaacctgattacaatcaaggcttaattaaggcatcggcaaagctcaataaagcttttcccgaagcagatatccgcttgttagtggatggcttgttgcagaagaacagtgaagacatgtagttagacacagtattcctgacattctgattgttgtctcaaatatataatttgtgtgttgatttgtcttcctaaaatataattgtagggacaag

SEQ ID NO: 103691 - DNA, 198 bp, Glycine max
cgagtttgtgttcatggactcgcaggacgcgtggatgtatcagccaccgataccgtcgtaggtagtatgcaaccacggtctcggtggctgataccgtggttgcatactacctacgacggttctagatgcagatgagtttgtagtgccagagagtggggttgtgactagttttgagagttttctttgggactactgaga

SEQ ID NO: 103692 - DNA, 270 bp, Glycine max
ctcgagcgctcgagccgatgtttgggaagccaatagattttgttaggagaagaaccaccaccaagcaggagaaggcccaccagagcattaggggaaatgacattggtgggttttcaatccttgctgatgatgagctccaggaacaagaagttccacctccaccaccaccaaaattgctaggaaagtccaaggaatctgatttgtttgagccaactatcctcacaaaggaagccatagacgatataaacaagatgtttaacatgcctctgg

SEQ ID NO: 103693 - DNA, 229 bp, Glycine max
cagacttagttcgaaactcaattgcacaaagagtctttgttggtgggtctctgtgttgttcttagttcttacaactgtaatggctattacagcaatctccaactcgagtcagaatatgaacgaggttgctgccggaggcgtgaaaccgaagcgctccaattctcgcggagttcgaatagtacgaagcagaatctacgattctgcaaatgggaaaacttgtcaccagtgt

SEQ ID NO: 103694 - DNA, 272 bp, Glycine max
tggcattaaaagcaaagaaggccaacctgtcgaaggaggatggttggagtagaggaggagagagctctagcacgaggtcatggtcccatagagccatgagatgcagtgcgctgggtcccacaatggcattgttaaggtccaacaatggactttaagaaacaagcctacatctgttgtgtcacctatccgtagtattttggtatatatgaacaaattaccgaagccaccatcatccttttggttatatgaacaaattaccgaaccaccatcag

SEQ ID NO: 103695 - DNA, 135 bp, Glycine max
ttttagagggtgcccaagttgattgttcttttgtgtatcctgcagcactctatgtgtttgttcaatgttcctcgaagatttgtattgtccccaaaacaaaaacgataattcagcctttttagctcttccaacccg

SEQ ID NO: 103696 - DNA, 233 bp, Glycine max
ccaagttctgaacaagagcgtggttattattactatcattatattttttctcatatttaagttgcttgagttggttaaatattactaactagtgggttagtatttgatttgaccctgcgcaaaaggaagctccatgcgctggtacagcaatcaagtggttataatgtgaagcatttcttttgtgtgtgaactgtgaagctgtctttaccgagaaggtgcacctgtttgttttt

SEQ ID NO: 103697 - DNA, 256 bp, Glycine max
ctctagagagcagattgatctgaacttgtgtatgagtgaggatgaagcatttgtgacaagtattccagcaaccaacttagaaacgaaggcagaaatagatcttgaagtccctgctgttcctgaggcagaggaggatgccattcctgaagaaaagaagcttgaaactcctctagtatcaccacttggcccacaagacacagttgacaagctgcaggatgagcttatgaggcatgcagcagaggcaattgttgttttg

SEQ ID NO: 103698 - DNA, 226 bp, Glycine max
tagtcaaaactgatcatggtgccgcatccataccataagggacacctgcttctcttttattacagcactctcaaaacacattataggaaactccaaagaagaacccttccttattcagaaacaacaataatggaccctagaatatggagcaaactacctcctgatgttgtagaacacatacttttgttacttcctctcaaaacactcttgaatctcagacccactt

SEQ ID NO: 103699 - DNA, 158 bp, Glycine max
gagattaatgatgaaggagaaaggtcacccttggttgggagaaatgaggaggaagaaggggtgaggagggagattggggaaagaggaattaagcttggacttggtgactttgttttctacagtgttcttgttgggagagcttctatgtatgatttgat

SEQ ID NO: 103700 - DNA, 177 bp, Glycine max
ataggctttgcctgctgaatagcttatgatatgaaagaacaatggcatttttccttcaatgctgacaattgtaatatttatctttcatatgaaaagttataatgtagatgttagctttcaagaatgactattttttttatggataattgttgaatgcatgaatctgaatatcagaag

SEQ ID NO: 103701 - DNA, 269 bp, Glycine max
tcaggatggttcagctgatcctgattccatgagcggtggtgttagcggtagattgagcctcttccaggacttgaaacaatccttgaagagctgctacaggaagatggaatatatgacgtaagattcagccgtcaagggtttgacaaacagtggtctcgcaagacttgcagctttggctttctaatgcacctcccacgaaccacaggtttactcttcttgctcgggctggaagacaggtgcaggagatacacctgactacatcccttgat

SEQ ID NO: 103702 - DNA, 241 bp, Glycine max
aaaacttattagacgatgtcgtatggtgctgttgtgacacaccagtcgggatcttgcacctcgctcattcaatcaaatcagcgcgtggcactaccatctgttgacggtagaggaagaataatgagaagtggtgaggcagtcagagaaatggaaatgggttcagtggtggttgaaaaagtgggaggcagatcatctgtcacaagttgcttctcaagataccccctcaagttcatcataccca

SEQ ID NO: 103703 - DNA, 252 bp, Glycine max
cgaggggcgaactccaatttgcagttgaaaggttctttcctctccatcgccgagcacagagggaatcatccaccgcctctgatgttgctaccctcagccagtgaatcctctcatgtccccaagaacaacgtggtgttgaaccgcagagtgagattaatgacaaagaggatcgtggtacagagttatgtaatcaaaatggctgagcttgacatagaggagaaaggaaatgggatgagttgagcacgaattctg

SEQ ID NO: 103704 - DNA, 133 bp, Glycine max
ccgcgcattcattgtcgacggcaaagtggtacgcatttcgttgtgtgagaaagactatgtgctgtcgcttgagcaacagcctggtagggttgctgaacctgctctccttcctcctgtcgatacccattctggt

SEQ ID NO: 103705 - DNA, 261 bp, Glycine max
ctggcaaattcagcacacgaagttctacactgaagaactgtctagttcaagaatacattgatttcttgaataatgcaagcagagaggagctactagagttaaagggtataggagagaacatggcagaatacataatagaccttagagaagaaagtcccctaaaatcgttaaaacctttggagaagataggcctctcttccaagcaggcccataacttgttcacaaaagctgcaaaaacgctatttgaagataaagctgaag

SEQ ID NO: 103706 - DNA, 217 bp, Glycine max
  unsure (1)..(217): unsure at all n locations
atcgagccgctcgagccgttttccaataaaggtcagccaaaatctacgtcaacattctggtgaccaaccacacaagaaaagtaaacggaaaatcagaagagaatgtttctccgaggactttgacggccacactgagcaaatattccaggcaacatttggtaacnaatggtatacatggtccttcaacaattggagcagttcgtcctctgaacattcc

SEQ ID NO: 103707 - DNA, 247 bp, Glycine max
atcctgatggcctcattatgcaattccaacgctgtgctgaatgatctcattcttaattttgtttacaaagagtatgtatgaggtctgagatttaagctgatcaacaaatatggagatggagatgtgcaaactctcctttctagctgtgatgttgcttggaacatggaattgcttaaaaatttatcaagaatttctgcatagtgagcttgctaggtaacctctcattacgaggttcagagagcaattg

SEQ ID NO: 103708 - DNA, 192 bp, Glycine max
cctatcctttcatgtgtgattggtgggaagtgctttccattgtcgaagtgtgtgctcaattgggatagaaattgtgtggttgaaaataagagaaataataataaaaaaaggatggaatgagaatggattggccaccatctgcatttcatctctttgggaaaaaaagaattcattcttggctgagatgaaagt

SEQ ID NO: 103709 - DNA, 135 bp, Glycine max
gccatgaatatgactcttccttctggtcctagagcagttcctgcaattggcccctggccagtaaacatgaatgttcatcctggacctactactgtgctacccgcagttgccccaatgtgctcctctccacaccat

SEQ ID NO: 103710 - DNA, 232 bp, Glycine max
ttgaatccaccatgaaccaacatttcattacacactgggaaggaaaaaaagaagtgaaggtgtaccccttggtgaaggccttttcccttacacttggatgccaattcttcttaggaattgatggaccaaaatttgccagtgagtttgagaacttgtattttggtatctattctgttcctgtgaattttccaggctccacataccatagggcactgaaggctgcagctgctat

SEQ ID NO: 103711 - DNA, 200 bp, Glycine max
ctataaaaataaaatatgataccagagaatttataattctgttcatgtatccgaactatatccctttgtagccgtttgtagtgagaccatgggagtatgtatgccttgtggcacctagagttagaagtagcaagtgatatggtctaacttgtgtcaacctaaaagtaattttgttagcgtatcggtattgggatttttat

SEQ ID NO: 103712 - DNA, 242 bp, Glycine max
gtggcatccgcatacccgacagagacagccgagtttccacaaagcctttcaggataagccctgcagataaacttgcaccaaatgagtcctttccatgtgatacaatctccaaggaagttatcaagaatagatccgccgcaacattttccagtgttggtcatgctcttgaagtccataatggagatgatatctgccaaccatcagagttgttcagcattaaacacagtctttcctcggaacat

SEQ ID NO: 103713 - DNA, 101 bp, Glycine max
gagtataggcgaaggactttaggttgagttttgggaattaggagtgttagcgtggagaagatagttgaggtggttttgaacgatagattggggaagaaggt

SEQ ID NO: 103714 - DNA, 156 bp, Glycine max
cgcataccccaatttgtcatatcccatgggatagattcaagatcagcaaaccactaattatctccttttgtgaccgttgatcttgaatctatcccatgggatatcacaaatctgtttatgcataggatataattagtggtttgctgatgctaatgt

SEQ ID NO: 103715 - DNA, 216 bp, Glycine max
gagaattgccccctgttgctaccaagcaagcatagctatgactctccttgttaattctcctctgctgccactgccatctactcggtggttgacatcgaagcaagaatttaggttattttcacatgggccaaccataattggaggaggaatgagcagaagcatctttggcactgggaaaaggaatggaaataggaatggggttaaagcctttttctt

SEQ ID NO: 103716 - DNA, 136 bp, Glycine max
cagtcttgcggatacctcctctatctctttgacagacggctgtgatctctttatgcgatatgtcactcgcacttctgctttagagtatgaagacttcaattccgctaagtctcgcttgatcgaacgtgctgagaag

SEQ ID NO: 103717 - DNA, 127 bp, Glycine max
atcagaacttgttgataaaatcatgattgtgccattatagaaatatgttttcgtgagaatgttcgcagtttgccacatagacggtaatccctgtactcccgaagctaattgacatgttggttttgtt

SEQ ID NO: 103718 - DNA, 261 bp, Glycine max
attatgaacttagtgcataaataacatgtagtgaactgcttcatgtgtgactgctacttgattttgtatggtttttcatccacaatattgcctcttactttctaatcttgcatgtttcagtaaaaattctaaatgagccgggcatggatgccaaccgatcattcttcccttttggaaatccttttaggatgatatcaccgaaaggcccaaaaatttcttcacagctgttgtcactattacatgcttttgaagcaactttgg

SEQ ID NO: 103719 - DNA, 272 bp, Glycine max
ggcctctcaggttaagaaacactcatcatacttgatgactatagaaatgtctattgttggaagtctatgtttgcttgccagtactttgaaatctccagatggggaagctatgagacaacatgggtttttctatggttggactcccttactttgatcccagtaattttcaatgcacttggaggaattcttgtcggtttagttacaagccatgctggtggtgttcggaaggggtttgtcattgtttctgctttactcattacagcattgctaca

SEQ ID NO: 103720 - DNA, 210 bp, Glycine max
cactggtgataccacggatggatgcagtgtaattagttattaagatgaggggattcatagaatacacttgctgggagcagggcggagatgttctctatgaatcacctcatcttaatcactggtgataccacggatggatgcatgtaattagttattatattatgttccttctatcctcggtaaggtcaagctcaaatttaaaaaagcaag

SEQ ID NO: 103721 - DNA, 245 bp, Glycine max
cttttcctttaaagcttaatgcccaatgggatttgcatcataaacaatagagacagactcagtgatcatagcagtgccacaggaagttataaatctgaagggaatggatttagactggtggatgagaaaactagtcccattgatcatgaacatgaagaaacagatactattttgacattacgagaatcttttttgaaggcttgtaagattatggacaaagaactgaaacttcatcctgatattga

SEQ ID NO: 103722 - DNA, 254 bp, Glycine max
attttgctaaaaatcttctgcgtgcagcaatccttttgcagtattttcccagattattcaggtttctgcctctgctaattggtcagtctcctacaggattcatatttcattcagcctgggcaaatttcattataaatcttcttttttttatgctatctggtcatgttgttggttctggctggtacctctttggtctgcagagggttaatcaatgcttgcgaaaggcctgccaacattctaatattactggatgc

SEQ ID NO: 103723 - DNA, 240 bp, Glycine max
caattatttcttatatgataataaatttactttgaaaaatatgataatttaatatttatattttaaaaaaatgtaaattattaaaatactgtaagataagcattatttgagagtagagtgatgatgcttatagtgggagtactaaaaaaagtaaagagtggagccaacagaaaaagaaaaggcaaagttcgagtgaccaagacggcaaggccagtatcgaatattccaatctccgtgatg

SEQ ID NO: 103724 - DNA, 258 bp, Glycine max
ggcactcaattgccggagtcagatatagttaaatcttgtcgaagggttagtcattatttatttatttattcattttcacatggaaactgggttataactggtagctggtttgaagctgaacactagtctgaatctgtttcaatattttcttacagttgttggatgagaggcagagtttgaatgtgtggcgattcctggaagctattaacgagtatgcttacactttcagaatagtgattctcgtatttctttttgagg

SEQ ID NO: 103725 - DNA, 262 bp, Glycine max
ggaggagccatgacgacggtggccaagtttgccaccgccgggatcaggggcgtgccgtctgttcggagagcttcgtcgcagacagcggcggcttctgaagtgtcgccgacgcaggcagcggcgtgcggacgacgtggacgactgggaagtggcggacggcggcgagggtacgccgagggtggtgttgggcggtgtccctagctttcaggaggccacgtcagccaccactgaactgacacatgctattgataagatataccta

SEQ ID NO: 103726 - DNA, 261 bp, Glycine max
ctcaaattggaatatctttatcagatctccaccttaacaataagctgcagttggggttgcttccaactaaagtccaccagcttaatttgcacgccgggatttctaatgctaagagtaaagaaagtctatcatccttgctctccatgggaaattctaacatgactttggagaaatctgatcatgtcaagagacaccattttttgcttttcggtcaaccgatactcaccgagcaacaaatctctagatcttctagtgatgtcg

SEQ ID NO: 103727 - DNA, 114 bp, Glycine max
agataatcggttgtctctatctcttggctgcaatcatcatattgtcaagcaacattgtcctacaggcctttactctaggagattttcctgcaccgatgtctttgtgtgcaataa

SEQ ID NO: 103728 - DNA, 256 bp, Glycine max
gctgcatcctcatgaaaacggtttatacttgtcattaattaacaatatttggaaagttctcttctgtagtttctttaaacagtgaccatcataccagattttgtgcacttggtaatcaaagttgagacttaaggtgaggaaggttggactttcaatagaactaggataatatcacatgacaatgtgttatatcacagattaacgatgaaaaggaggagaaatcctatggttttaggcctaggattcggggcatgac

SEQ ID NO: 103729 - DNA, 254 bp, Glycine max
cctcgagccgattcggctcaggttttggcccatgctgaagagcaccacattgtgaaaagacccattgaatcactggcagcaaaggcgtctactgatctcaatttatttgggtggcccgggctccgcaaaggaccaccacgctccagaactggcggaagtgttttgtggaatggaataagtactggggcaagacccaaacattcgagttcagattggtggtatgaggatgtaacgaatttgagtttacctcttta

SEQ ID NO: 103730 - DNA, 265 bp, Glycine max
ccattttatatagcagctcaactcactggtgccatttctgcttcatacacattgcgagacctgttacgaccatcaaatgagattggaggaacatcacctgctggatcacacattcaagccctaatcatggaaatggtgaccacatataccatggtgttcatttccatggccgtggccactgactcaaacgcggtaagaatcacagtaatttaattgacaattttaagaaaaatttaactaaagtaataaagacctgctaaggaag

SEQ ID NO: 103731 - DNA, 127 bp, Glycine max
cttcatcgcttggccatcagaagtaaggctgtcagtgatgctggacaaagtaaggcctgccatcaagtcccctgttggcgccgctttgcaaaagacaaatgagcaaatatcattgttcacaattgat

SEQ ID NO: 103732 - DNA, 124 bp, Glycine max
taattgatagagatgctgcttttgctgatcaaagctctgttggtggcatggctaatcagcctcctttcagggagacatgggctgatgaatatgggttaaataggcattttaatggtaatccaca

SEQ ID NO: 103733 - DNA, 256 bp, Glycine max
tggttgtagaaaccgtatggtcagaagagaatctttaccctcatttcaagctatacttctctgcttataccgggcttggtttttcttggtcaattgtattttctagtaggtaatgcaaatatatataattttctcatttgtgtttattttgaccttattcctagtggtataaggtttttattgttgttgtacttattttgattggatgcaatgcattgctggagctaaccccttagcagaacttaaggaatcaaag

SEQ ID NO: 103734 - DNA, 163 bp, Glycine max
ctactagatgccttctcctttttctccgagtctttgaagaagcgtagcaagggaccttatcctacatcttgataacgaattaggatatcacgattttctagcatctgtagataagatgtgcaccctttgccattttaacttttaggctccttgtatcgtttgt

SEQ ID NO: 103735 - DNA, 108 bp, Glycine max
caaccagtttgctggaccaatacctccaaagttgttaagcatccctagcttcagaaaagatggaaacccgtttaatctcaatggcaattctactatagccccagcaca

SEQ ID NO: 103736 - DNA, 248 bp, Glycine max
catgatcagaccacttctggagaatttgtcatgttatccttattaggtctcactccaactttctcctaaaggcattcagtcccaactcccaatcttatcttcttttgtgagttcattgagatttactacatgatgggagaattgccatgtctgttttctacccgtctttttccttgtattccttcactggttgtgtcttgtaagttagaggctttagaatattttttgacttaaaataatctgtttgt

SEQ ID NO: 103737 - DNA, 254 bp, Glycine max
acaacacgaaaacgaaaacgaaaacgacgacaagtcgttcattccctgcgaaaaccgaattaccgaaaccctaatcaccactccgagaaccaaagattcgcccaatccgaagacccaaacctcaaaaaatcagaccaagatttagagtctctgcgatcagaaaatcgacgcctcaggaacttgctcgacttgaatctgaacctgctccaaaacctctccaagtcaccctgcctcgataattgccctcccgattt

SEQ ID NO: 103738 - DNA, 257 bp, Glycine max
ctcgagccgctcgagccggtggaaagtaatagcaataaaggagagagactcaacatctgtaatagggccagcgtagtcgtcgtttatgcctttaacatccactattttcgaaaatacaaccactatatcatagaacctgcccatattgatcgtccatatcatttcattgatcttctaagaatcttttggcttccaattccaattcctcctgaaagtctaaaatcaggttttatggataaacttataccaagtgcaag

SEQ ID NO: 103739 - DNA, 250 bp, Glycine max
ctcgtcttcaatcctttcgttattctcttattcatccttctcttctgaataatccagatctctttctgcccttttctccgtcacgcttttcgtgaccggatctgtatggatttgatccagatctacacgccgatggtggttttggccgggtctttcatagatctggtgcgtagaggctcagatctacggtaccgaggtgtgtgattcatgttcgtcttgcttttggaatctgtttcgtagaaagtcgttt

SEQ ID NO: 103740 - DNA, 248 bp, Glycine max
ctgctataactctagtattatgcctacgaaacaggttttggaagcaaggcctgatatgtgtctggtggctgaatatccgtcagccgaaggaagttacattgagacatttgatgctgatatgaatagtgagataagtcttccatcacaattgagcagccacacgtcagatggatcaatttttatgagtacatctgaaagcagctacaatagtgatcagggaagtggcaatgaggatggtcaagatgcca

SEQ ID NO: 103741 - DNA, 232 bp, Glycine max
gaagagaagaacgcgtttatttgcaaagaagataaggtatgaagtgaggcagttaaacgcggagaaaagacctagaatgacaggtcgatttgtgaagagtgttcctttgttggagccactgctttgccagcttaattatcaatcatcaccactgacatgattgatcatcaaagtgatcaaattaatggtctagctagtactaatggaaatgtggtagcccctctcagcattt

SEQ ID NO: 103742 - DNA, 252 bp, Glycine max
tgcatcttcttcactgactagtgaaaccccttcaaagatttttctcattaactgcttgtgtgccattcaacaacctctatctggatacgaggctgttgctgattacgtgaaaagacttggagcaatgatagataatcatttgtgtgttctcgtggaaaaagaagctgatgcaatcttaagaagatgtaatttgtcagagaagatgccgcacttccagaattcaatccacaaggaaggggacaatgaagtggg

SEQ ID NO: 103743 - DNA, 186 bp, Glycine max
gttcgtacaatttccaaagatccactaatgcttgcaaattatgtaccagtatatgtgatgctcccgtcgggagttgttacaaatgataatgtcttgcaagatagagtgggactagagaaccaactcaaagagctacaagcagcaggtgttgatggggttatggttgatgtttggtggggtatagta

SEQ ID NO: 103744 - DNA, 246 bp, Glycine max
gaacgaactaagagtagatctttgtggaatttttccattagaacacgatcaaaggagttgcagtcaaattggggagtgcgcatagccgaattggaaacccgaacttcaaggtttgaacgtcaggcgttggatttgaaagaacaaaaggtggatattagttttcagagttttgggtgtctgatgccacagccacaataataaatgtgcgagctttgaattgaaaagaaagagaggagagtgatgggt

SEQ ID NO: 103745 - DNA, 253 bp, Glycine max
aagaagaataatggtagaatcatctgcccaaggacgggtttagtttgcagctacacagaactggtcaaggcatatatttcataaatctacatacttgccttggcttcaatcttccatggctgtctgattgtaatgttttgggaaaatactttcatgggcttcccgttgttacgtccattcttttacctgtgttccggtgctaacttacttgtacatatgtaaagatgttttcaattgtcactgggatatgacg

SEQ ID NO: 103746 - DNA, 163 bp, Glycine max
gagcattcaagatggcctttaagaatattatgcagaagagtgttcctgatgacatgttgggtccaatactgtcagggcaaaggaaacttgttgtagacaaacttgcagaagaggaagcagaaagcaaggtcaagggagaggccaaaaaagaaaagaagatgtt

SEQ ID NO: 103747 - DNA, 181 bp, Glycine max
cttccttttctttccccccaaaaaaattctgcttcgaatcccatacttccagcaatagccactcaaatggttcagccgaggagaggtcgaatcaagattatggtgttcaagagcgtcgccgcggtgttgtcgtgttccggtcgtcggaaggagaaggacaaggagactctcgccgctcctc

SEQ ID NO: 103748 - DNA, 272 bp, Glycine max
gcttcatgcaggatttgttatcttaacacaaatacccggtaagctaatgattttagaatttgactatgaaaatatgttacggagtactcaaaatgattcaaagatggtgaaacaaaatgtcagtgcatcctattgcatctcttgttgctgatggtgcctacggaattgtgatattttattattcatctggaattagcttctggatacctggctcaatgctcagaattcggtaattcagtggggaattaagctgatcttgccgcttcctattg

SEQ ID NO: 103749 - DNA, 106 bp, Glycine max
gttacctcaattggggtcatcatgaacttctccggctacttcatgatatgtcttgctgtctctgggcgcatggccaaaccccaagtgtggcagatgtgtctctaca

SEQ ID NO: 103750 - DNA, 231 bp, Glycine max
accagaatttttgtctttctctgtaattgtagaatttttattttcaaaaattttgtgctattatctttttttgaagctctttccgctctctgcaatggtcgagatttgagttactgtgtcgcgtctttctcggagttcaaaattctgcttctgggttttcgtcattccagacaaaagtttctatttttgaagttttttctgtgcagttacaacttttgctgtgctcaaaca

SEQ ID NO: 103751 - DNA, 141 bp, Glycine max
ccctaatcccatccttttttacattgctgcattcttcttctcagatgcctcatgtgagatgaggaagaaaacctattccgacttgtctctcttgctcattctggttgctcagtccctctctgcctcctcattcccacacaa

SEQ ID NO: 103752 - DNA, 105 bp, Glycine max
gttccattttgattatgaatcatttaatactgagttcgttgataaaattatttggtttaggccaggctatcactgtcttccaaatgcattttaagattttccacc

SEQ ID NO: 103753 - DNA, 146 bp, Glycine max
tgaggtctctcgaaatgacatcattggaggtgacgatgaaggcaaattgcttgaagcataacgacggcggaccacggagcctcattcgccgtccacggccaaagacgcacaagctgcacttttcacggagctatggcatgcttgtg

SEQ ID NO: 103754 - DNA, 215 bp, Glycine max
cacatcctgaatcttatacactatgaggtcagaatttcagtgtgttttattgtgttctgtaaattaacatgatagtagttttatctatatttgacaatttgtatcttaaatttgtttttgacatacgttgagtcattgaggtattgaagttcattttatccggtttaccatcaaagccaaaagatgtttcattcatgtactttcacttattattt

SEQ ID NO: 103755 - DNA, 264 bp, Glycine max
cataaggaagacaaaaccttgtgaggcgcttttggagtggcattgagagtttatttgtgactaaggttcacaaacaagctgatgcagtgactcaagaagtgcacaaagatgctttcttacaagaatgaaactggatggtctctcctcagtaaagggccatcagtggtggtgagtggtcatggaacaacaatcttgaagacagtggcagagtttgagaaatggaaagaggttgtgatcaaaaagggctttgcggtaaccttcaaa

SEQ ID NO: 103756 - DNA, 263 bp, Glycine max
tgagcatatacataactattgcgagcttttgagtttgattaaactataaacaaaaacaccagtatattcaaatacccttttgttttgtgtacaaaatgtgtcccctaacacccagtgacttgaagcggattttcaataaggtggacatgaatggcgatgggttattgagccttgaggagctgaagatgctgctggagcagacagggttcagttacagcattgaggaattggagtctctagtgggaaagaagagccttgacttc

SEQ ID NO: 103757 - DNA, 209 bp, Glycine max
tttgcgtgataaccgatcaaaggcttcgcttctagtttactctaattgaaatggagggaggaatcttttatttgcatttcttgttcatattattttcttttcgctcaaccatccaatctaccctatgactcctcatgtccagaataatattatgaaacttaactaactgatctggtgactagactaaagttggggattaaaatatagtt

SEQ ID NO: 103758 - DNA, 183 bp, Glycine max
cgaaaaagcaacagccggagtcatcatcatctcttgtgaattgtgatctccgaatccgaacacaacacaaaataagcttcagaatctttactctctctcacttcccacgcccttcaaggactctgtcctgttcgatctctcactctctctctcttcgtaaatcgtgtgtcttccacacaacat

SEQ ID NO: 103759 - DNA, 261 bp, Glycine max
acacaaggctcttcaattcaatgtctaaagatgacaactcttcttcactggattcttcttcttctgaccttcaattgtctctctctttaacactctctccctatgccaccacttcttctccttcatctatttctcattcctgttctgctgctcttgccaccgctgccagtcaagttgttggatggcctccccttggagcatatagaatgaatatctataatagccaggcaaaatcaccagccacagaagtattcaattcta

SEQ ID NO: 103760 - DNA, 269 bp, Glycine max
  unsure (1)..(269): unsure at all n locations
caacaataccagcaatggccatgatcaacgccaaatgcgtcaacccaaagttccccaatcccatccaagcccgcaccacgaaaaccctcccttcagatcaaccttccaaagggcctcatagcctcacccgaaagcactaaactttcccccgcgacagcaatcgccggagcaatattcacaaccctcggaacctgcgacgccgnattncgtgttcaacaaatagccgacatagcagaaggcgacaaccgcggactggcactgttgctgcc

SEQ ID NO: 103761 - DNA, 226 bp, Glycine max
ataaaatgaagacaatatattttaatggaataacttgtcccactctgcccaaaccccaaacgaattagtagttttcttttttcgtgcatcgagtattcggtttgcagagctagctagtcaattatcttattcagtatttctgcacagcccttttttcggtgaattattctgcacctacaccccttggtgaagaattataattaagtttgcaggccttccacacaac

SEQ ID NO: 103762 - DNA, 265 bp, Glycine max
ccaaataatgtctgacatgaacagtctgatcctattagagtgtttcttccactgaataaaaaagagaagtcacgtaggaccagattttgaagataccaaaaaatatacagataacaaatttgaagtttgaaaggcctttttttggggaatattaaggtttgatcaattctgctagttaacatataaaattttgacattgtataggacactatataccgccatttctatctgaaacaatttatgttgtttacaaaacattttattt

SEQ ID NO: 103763 - DNA, 182 bp, Glycine max
caaacacaactatatttgtcgaatctccttcacattggctggccgcccctttcgactggccaccttgttgatggccagtcaaatggcacagccaaccaatctgaagcagattctaaccacacaactatatttgtcggaggactcgaccctaatgtttcagatgaagatctcaggcagccatt

SEQ ID NO: 103764 - DNA, 239 bp, Glycine max
cacaggcaacaatttctgccattcactggcaaaactgtaccgacatgcattcaagcttttgaacgtctttggccacagaagctggaaagacataccttggtttatgaccaaaagaaaccactatactaggcagatttttgaagttaagaattccttttggatctgtgctccacacttgcttcagttttgggaggttgtctacaagaatcaaccacaaatttgtgtctatcccagcagat

SEQ ID NO: 103765 - DNA, 248 bp, Glycine max
cttgtattagcaatagttatttattggcttcggactgttgttattgacagtcacactcatgttcatgtctttgaagtgaacatgtctttcgtgtagtttaggtgacattcagctgtgtctatggacaacaatagtaatgtctatgcacacatttcattttgtcacataacctctttttattattattgaaacttacctcgagtgtcaaccaatgataagggagcaaaacgtgtgcatgtgcacatgtg

SEQ ID NO: 103766 - DNA, 268 bp, Glycine max
cggcttctttccctctcttcgtcccttgctctgtgtcgccgtaacacaaaaagggaagagagagaaagaaccaccccacccaacaacagcttttgttcttcacaagacatagccccgtgtgtgtgtttcttttcttcctctccagcttggaaagactgaagtctctgtctttttcaggttttgggggtgttgttgaagatgttggtagctaatagctttgatctatggcgaaaggacggttttttctctgcggcagaagaggtgcagg

SEQ ID NO: 103767 - DNA, 271 bp, Glycine max
gagaataataaacacgtagacgttgaattgcccagaacacagacgtagctgcaaacaaagacgaagaaggagagagtcctgaaatccacacacaaacacaacagtcttctcctttctcttcacacattccatatgccagcatgattctatttaatacccaaactacgtgaaacactagacacacaaattgggtcttggaggaatcttccatcatgtctggttacagccctatgttcctcgtaatcctcagtgtcgtcgtaggtttcacgat

SEQ ID NO: 103768 - DNA, 263 bp, Glycine max
cgaaattcttgtctacaatgcttaccagccactaccttggtgcccttcctccttccaagatcttcgcatcgaatcctttgaaagatcccttgccgtttcttccgtcggcgccttccactgcgctcaacaggtgctgccgggtatggttgaaagaggaaaaggaacgattctcttcactggctgctccgcttctctaaacggcattgctggatactctgaactatgctgtgggaaattcgctttgagagcactatcgcaatgtt

SEQ ID NO: 103769 - DNA, 270 bp, Glycine max
ctcgagccgcagtttaatttcaacacacgatatgccgagattcacttgaatacaagtgacacagagtcgagaaacagaacaactgccactgccagagtacataatgtgaaaaaagctgcaataatttgcaggataattgctggaactgcagtaaatgccgttgatggtgaatatgaagggtctcactcaactgggttgggagaaatgcagtttaccttacaaaaatttgtagtaaaaaatcccagttctattcttccttgttttgtaata

SEQ ID NO: 103770 - DNA, 267 bp, Glycine max
cgagttggaagaacccagaaaaagaaacaataaataaataaaacgatgtggtggccattcagcagaataggatcttctgcgttttcatcatattctactgccgaggaagttactcatggaatcgatggaagtggtctcactgctattgttacaggccactttcttttaacaaatatgttgttggatactatgaagtaagcaacaagtgaaagtaagacacaaggcagaattattaatgtctcctcaattggttatcgattcacgtat

SEQ ID NO: 103771 - DNA, 263 bp, Glycine max
cttgtgaaaggttaagatcgagaaattagggtgaagtgaaggagaagctcttgagaagcatatgtcttttcatatttaatattaaaagagttgcattggagcatgttgggtcgggaattattgtagctgacttgaaagttgaaactgaagatgggagaagcaacagaaagatatgcagttgtgacgggtgcaaataaaggaattggattagagatagttagacagttagcttcagctggaatcaaagtgttgctcacagcaag

SEQ ID NO: 103772 - DNA, 265 bp, Glycine max
cagaaaagtgaagatgaatacgatgaagaagacatgaagaatttggaactagaagcacaagcaagacatattttatgccgtgccatgaatcaagatgcttttgaaaaattctcaaaggacaaaacagccaagcaaacgtgggacgagcttgaaagggaaatgacagttgtcgactttccaactcagcaacaacaaacgcaaatgggcaatgccgcatcagctcgtcataatcgtcctaaccttgagtttatagaggcaacagacg

SEQ ID NO: 103773 - DNA, 249 bp, Glycine max
cgataatgacgtggcggtggcggttgatgaaaatgtggtgataccagagaacactggtggtgcaaacgttgtagcggataatagtgtacctttgcgtgttcgagaacgtcctagaaattccaatgcaagacagcgtcgttccggttatgggaggaacgattacatggaacgattccacgacatagcgcgggaaaacgcgtcgcggtttgctttctttgcaccggaaggggaggaccatgaccggtcacc

SEQ ID NO: 103774 - DNA, 250 bp, Glycine max
ttcagaccaaacttggctacaacgtttgatatttaggagttcctgtgattgagaatggcgcactctctgtgttttgctcccatttgttccttgaaatcctcaaacagacctggggcagttaccggtaattcggttacccgaaaggcttttgagatgaaagaggtgtgtcagaattctgaagttccaaactttcagtccttgaaggttaaggctacagaagataacactacaaaaagcacaaaagttagga

SEQ ID NO: 103775 - DNA, 291 bp, Glycine max
ctatttatgatgatccaattgtctgtcggaaacaataagggaatctatctgtgttgattcgcaattgattttcttgaaggagatagatgtgtgtgtgggatggattttttggtagttagtatctataagggtaacattgttgctcgtcaacatgtgttgcagatcaaatccttctaggaggtgttcctaattttgcaatattttcgaaattgtgagtgtgtggtttggagcatcattgtttctatgtgatgaacaagttatgcaaaatagtacatctagtccttcaatatg

SEQ ID NO: 103776 - DNA, 283 bp, Glycine max
cggtagttctctaaaactcatccactgaagtatttcaaattgatattacacatgcccaccattcacaggagacggctcttgttgccttttttcctttccttatgccgtcgaaagaatggcctataggtggagctaagctgtctctagcaacataggaactgcttataatgcgcagaatataggataaaaagtatatgttgtgtaacatttttttttaaataaattgaattctatatgttagtccaacctctatctagaggtgttgggggctcctgaccttagc

SEQ ID NO: 103777 - DNA, 287 bp, Glycine max
cagagaagcggaaacaagaattattagctgaaatggtgtttgaggagcagcgaggcagagaactttctaagattgttaatgaattggttccttctaaggaggacaatcctatacaaaatccatcaagagccaggaagagaagtaatgacagaagccgaatgtctatgcgcttgactgaggaggctgagaaatatattgaggattttatttcaaatgttgaagatacagatatttcatcagttgatggtgaaaggagtgatgcaagctcatccattggaggactaata

SEQ ID NO: 103778 - DNA, 285 bp, Glycine max
caaacctagccaggcagcctcccttcctccctcgatatcgggtgccgctatttgcttctcctctgaaccatccaaccattcaacggccctgtgtttgttaattgagatttgagattcaacgctctaacattggtacaatggcttccaacacctcgccttctgcccttgataaagaacaggtaggtgttcttttctcttgctcatattttggaaaaacagatttggtggttgatgttgttaatttgacaccccaatgtgatttccagtttaaactttcttttttgg

SEQ ID NO: 103779 - DNA, 290 bp, Glycine max
ccacgcctatcccttatcacaaccaaacaaacccttaacctcactcccacacattcctccacttccgaatcacaaaccggacagctcttgtctctgaagaagaattttctcgcaccaggttgctcgctcagaacgtgccctggacaagcacccctgaagacattcgcaccctcttcgaaaaacatgggaaagtcctcgaagtcgagctttctatgtataagacaaacagaaaccggggtttggcctttgtcgaaatgggttccccagaagaggcactggaagctctcaat

SEQ ID NO: 103780 - DNA, 293 bp, Glycine max
gtccgcatctcttacttcgtcgacttgcaggaccgctccttcgactctcaggtcaagctctacacgctccgcgccaacgcgtggaagacactccccagcatgccctacgctctctgctgcgcgcgcaccatgggcgtcttcgtcggtaactccctccactgggtcgtcacgcgcaaactcgaacccgaccagcccgatctcatcgccgccttcgatctaacccacgagatcttcaccgagctcccccttcccgacaccggaggagtcggcggagggttcgagatcgacgtggc

SEQ ID NO: 103781 - DNA, 195 bp, Glycine max
gaaagttcaaatggatcagcccgtgttgatcatccatctagagagacccagattacagttagttacaattgggaggtagtgaatgggagtatttctagttctgtttggacaacagtaaatggatctagtgaacaggaaatgcattacatgactaatgccaatgcttccaacattgtgaaggacgattttgataat

SEQ ID NO: 103782 - DNA, 186 bp, Glycine max
cgccattggagttggaatatgcatatcttttgctattggtgcgcctgcagttgctggtctgtattccattcttagccctctaggtaaagattatcattctgagatggatgaagaagcacagattcaagaatctgttgctcagaagcaagagccactgagagtgaaatcatttcagaagaaatattc

SEQ ID NO: 103783 - DNA, 166 bp, Glycine max
atcatgcgttctcagcttgtgaaatcgaatatcaaaacccctccaaggccaaaacggcgtcgtcaaccactcaaatcatggcctgttactttctccccctttgctcgcgctctcgctctctctcgcatcacctctctctctccaccaaaccctaccccaaccctct

SEQ ID NO: 103784 - DNA, 180 bp, Glycine max
acacacacttgtctattaactcttttttgttgttgtggtgtttcatttgtgaaactaacaacaacacaaggccatcatcatggcagctgcttccccaatggcaagccaactcaagtccaccttcactaggactcttgtagctcccacgggcctctctgcctcttcaccacttcacctcgt

SEQ ID NO: 103785 - DNA, 156 bp, Glycine max
caaagctttgggtttgctggagtcactaacagctttatctacttaacattaatgtttgctggggttataagacactttaaattaaaagtagtagtagataatatagaggtttcccagtgcatccacattgaatgcccccacgcggttttgagaggc

SEQ ID NO: 103786 - DNA, 173 bp, Glycine max
cgcagatgaactttcaggataattcaagggattcaaatcacggggacagcccgaaacacttgcttcatactttggacctctcctatagactagaatgggtcgaggggcggaaagtacttcttacaagacatggtcatgaattgggcactttccagttataagcatcaattagt

SEQ ID NO: 103787 - DNA, 100 bp, Glycine max
gatcatcataagatattaagataaggacccatttcctcttctaagctatatagtgctcgtctagcctacccactacaagcaacattgttaaccattctct

SEQ ID NO: 103788 - DNA, 100 bp, Glycine max
cgaagataaaagttctttgactcgggcagctgatcatagaacaaatcaaaatgatcctcgaaatcacatgagcagaaatggagccaagaccaacatggag

SEQ ID NO: 103789 - DNA, 104 bp, Glycine max
gtggatccaaatacaaagtcccttcccacaccactgtaacatctacttacagaagcacaccacaggaactagaaaatccatacaatcttcaccaccaaaaagaa

SEQ ID NO: 103790 - DNA, 100 bp, Glycine max
cagaagtcagttcattaagtaatataattgcacaagccactaagtgaggcaaacaaatgtttcagtttcctgctcctcatatagtatgtcgaattgtcaa

SEQ ID NO: 103791 - DNA, 99 bp, Glycine max
gtatctatagatgatttctatttgatggctgaaggtcagaataaactaagagaagctaatccaggaaatgcccttcttgagttgcgtggaaatgcagga

SEQ ID NO: 103792 - DNA, 101 bp, Glycine max
aggagaatatgtgagcggatcaattaatgatgaccaaagacaaaatgttattcgcaactcatgccctggggctggagcctgtggtggaatgtatacagcca

SEQ ID NO: 103793 - DNA, 99 bp, Glycine max
atgatgtagaaagtcgtatggttgaacctaatccttgtacttcatttcagataccaggattaggttcaaccataccactttctactaaattgtgtcact

SEQ ID NO: 103794 - DNA, 100 bp, Glycine max
gtacgaacaaggattcataaacacgagcaagctcatctgggtctggctccacatcaataccaaagtgcgtttccaacaccctcaagctttggagctcctt

SEQ ID NO: 103795 - DNA, 261 bp, Glycine max
  unsure (1)..(261): unsure at all n locations
gttgaagcatgtgctttctcatggtgcaccaattgcagcactgtcaacagtcaatcctactttatatggtcctctcacaagcaatggccaccgncctgcaagttcacatttatccataccgttcaagaccaagagtgaagtgaaacctccaatttctgtctttaaaaatattgctcctgtgcattctactgcagctgcaggcccttccgccttggcccagccaccattgtctccttatgcttctaattgttgtaaacaaga

SEQ ID NO: 103796 - DNA, 202 bp, Glycine max
ttcaaaatcttgtcggactcgagactttatccctgtattattgtggaattcttttgttaccaagtcgcattgtcaagatgcctaaactgtcctcattgaacgctctcggtcgcaagcggttccaatgggtaaactcatccgatggtgatgacaaagtgggaatagtagatgacttcactgtcgatggttgcaacctgtatga

SEQ ID NO: 103797 - DNA, 199 bp, Glycine max
actagtagtatcaacaatgtggatgctagaaggtgtttttctatgggttcttttgcttatgttatggatgagagttcttcattgcaagtacctataagaactccaatcaagaagcaatcaagtaagaagaagtctggtttgcctttgacaccagggcacaggcctgcaatgtcagaatgtgactgtgaatccagaaggg

SEQ ID NO: 103798 - DNA, 99 bp, Glycine max
cgaagtccagagaaagaaaagctcctctttaggtctctccgatggatgtctcttcctcggaggaggagtctccgctctcatcctcgtctggggtttctc

SEQ ID NO: 103799 - DNA, 251 bp, Glycine max
gtcgcatttctgggatgatatccataccacttttgcaaagttaccccttcatagcgttgttgtcaggcttagcaatatacatagtgttaagtattgcttcagttttgaagaatattctgtctgcgaccattaatactggtttgttccttctacaaaacagaggagataaagaacacgaaaggggggcagctaatggcatttccatgacaggcatctctctattcaaagctattggccctgctacaggtggt

SEQ ID NO: 103800 - DNA, 153 bp, Glycine max
catgtatcacttacgtaactttatctgcccattcttgcatttgagggagcttcttaaagagcttggttacagggatacccttcttaatttggctgctgatattctattcgcagccatatttacatttgctaggatggtggtcggaccatgtat

SEQ ID NO: 103801 - DNA, 217 bp, Glycine max
cttcagtaaagaacagttcttgtcaatcggcaagcaaaggacaatctgcttcacttgccatgccatctaacaccaatgctcagagccgtgatgaattgacttagactgacgaataggaactatatgaggcagacagaccataccaataataacatcaaaccagttgcccaagagccagaagaaacaaattgcagacaggggcagggtaatgcagcag

SEQ ID NO: 103802 - DNA, 262 bp, Glycine max
gcaaattctgatggttacctcttaactcttaatttctagtcaaagtatattaatgggggtctatgcattctagtgtctgtctcgttattagtagggattttgattggttggttctcttcaccttaatatgtaagatacacccaggtatctcaaatgtagggtaattcaattttcataaatcttacttcatggtatgataaattaaaaataattgtctgaaaacttagatttctttacatcatatgttcttatgcaatatggt

SEQ ID NO: 103803 - DNA, 231 bp, Glycine max
agaaagagtgcagactgcattatctctcgacgaacagaataatggcacatgccaatgagatggtgaaacatgtcatcgacattggagaactagaagaactaaggttgtctcagcgtagcatctacaaggttcctcagaatctctcaaatataaaggaagaagcctagactcctcagtgcatctcaattggcccaattcacttcaagaaacaagaattcatgccaatgcaag

SEQ ID NO: 103804 - DNA, 255 bp, Glycine max
ctcaagagattctaagaaaagaaaacctgacaatgtcttgcttccttgtaatactatttctcagtctcacatttggtacaactcattctgagactagtcaccacaagaaacttccctctgctgttgtggttggcactgtttactgtgatacatgcttccaacaggatttctccatgggaaaccacttcatttcaggggcatcagttgctgtagaatgcaaagatggatatggggaggtcaaagccaggtttagga

SEQ ID NO: 103805 - DNA, 263 bp, Glycine max
ctcttggtttcatccattgcaaaccatgcttcctttccagctaattaggtccctccctcatccttaagcacagtacccaccaaccgttcttccccaccattgcttgtctcttctccaaaatctacccattttcactcactctctctttgcatttttgttctcttcataaaaatagtatttttgtctggcactccaatatatctttgtctatgtatttcttggtatcttagtctttttgccttgagtttatatgtgacccactt

SEQ ID NO: 103806 - DNA, 261 bp, Glycine max
agtttctgaattcatactggattgaaggtcaccttcagctgttgtgaactgtgatgaatattcttcccaggtttgcaccaagtgaccctgtataatagtggtagaatttccacccagattagcatcaaatcctacaatgacaaggacgcgaacattagtagtcagatacaatgacaaggacgcgaacattagtagtcagattgttatttacgatgtttttccttccctttcctttttctgaccgacatgtattataggcac

SEQ ID NO: 103807 - DNA, 267 bp, Glycine max
ctgatgatgagactgaacatcttcaacagcctgagcatgacccctaccaggatattgaaacagcatatgtaggtcaaatttgcttgacttgggaggcgcttcattgtcagtactctcatatgagtcagaagatatcttggcaacatgataatcctacctgttacaaccatagtgcacaagagtttcaacagttccaggttctattacaaaggtttattgaaaatgaaccttttgagcagggccgtcgagctgaaatttatgctcgca

SEQ ID NO: 103808 - DNA, 256 bp, Glycine max
ccacagcaaagccaagactctctctctcactcagactcactctctcttctatgtgtctttctctttctagcttggcaatagtagtagtagctcctggtgttgttgttgtgttgtgatctattaaaggttagatatttatgctacattttgatgtttatgcttagtacccaattcgtgaaaattggtttatagctagctaggcatttgatgctcccgtcagagacaccccccagtaaagggaactctgctagattct

SEQ ID NO: 103809 - DNA, 193 bp, Glycine max
accgaagtatcaactaatgtggttagtgatgtgtggtttggtttgttaagtgactcacttcctggcaaagctgaagccttgcttgatatattgccagaatagataatccatgctgttgagaatgtgacagattggatgttgatatctgttgcaaaggaagctaatttgaaagaggaggatgagattaattctg

SEQ ID NO: 103810 - DNA, 238 bp, Glycine max
aatatatgcagcaacttgtatttttaattaaatcaaggtcgtcatgagctaagtcaattgtgaggtatgcactatgatgtgaaccgggttaacgtaaaaatagagccaaaggaatcaaaccataactcattttcacacatacaaattaacacgatgaactgaacctttggtttgagtgccagaagaacgtttcagaagattgcaaatcaagtccagtcagcacgaaagaccatacgct

SEQ ID NO: 103811 - DNA, 255 bp, Glycine max
catacctcgatgtagtaattcaaatgatactcaacaaaggccagtcttgtcacttttcttggatgaagctaaatctcttggaattccttgggttcttgctatcacaaacaaatttgcagttagtgcacaccatcaaaagacagcaattgatgccgctttgaaagcataccaagcatctcctagctctgctgaagttataaattcttgtccatatgttatgcctggatttgttggggcttctctttccttggatgc

SEQ ID NO: 103812 - DNA, 262 bp, Glycine max
cttggggataaggttgtatgtatgtgttgggaaagttgcctttggagtgtgcaaaagtcgagccttttttctcttgtcaaactcacaaggggatatagcttacttccctgttgccatgtaacagattttcataattcattcccagtgaagggtcttttgctatagttggttggtatgcttccacgtgtgtaatgctgagtgtgtgtatgtgagtgtcgctgctgcttgctaagatagttgcacatcttctcgagagagaaaa

SEQ ID NO: 103813 - DNA, 256 bp, Glycine max
cgcacaaggaatatttacataatcaaattggttaggcttgtcccctgcatcccgacagcatcaaccaaggaggattcacagtgccaaaatcaccctcagatatagtcactaagtgtatgcgaacaaccactagggtttgacgacaaagaaagaccttgtcatgtgtacaagcttattttatggtttgaaacaagctctaagagcttggtatgaaaggctaagtccatttctagtttcaaatggattcaccagagga

SEQ ID NO: 103814 - DNA, 197 bp, Glycine max
ccacaatagagccacgtacatcaaatttgggacctgtgaatccatcaaatgctccttatagtcaagacacgaccactgatactatttccttaaacacagaaatgtttggaaatttgcccaactcattgcaagacactcctgctctaacattagagccacatgcatcgaatttggcatctgtgattccatcagatatt

SEQ ID NO: 103815 - DNA, 222 bp, Glycine max
ctaatattcaagtggtctgaagaagcttgtgttttgttttgttgtagcgttggctttataggtgacagctttttgggtaattattggccatcgtcatagggttacttatcttaaaaatctttgaaaaattgaattttggaatctacagcctaaaagaagttaatagatgaaggtatgcagaaacaagactttttcttgatttgtttcatccttattacggtc

SEQ ID NO: 103816 - DNA, 236 bp, Glycine max
caaatccagaaaaagagagaagaggaaagacactgagtaagcaatgaaatttccaaattctcaattgtttcttccattcttgttgttgttgttcttcgcgataactccctttcgcggttcagggcagcaaacgtaagctccaatttctctctgaatctatggggtttttttattatgaagggcgcatcttaagttcctgattgatgatccataaataaagttgcttcgatctagtt

SEQ ID NO: 103817 - DNA, 231 bp, Glycine max
cctgaattacacaactttttagggttctgaaataattcccctacctctttctgcttgttcctagcagctttttttccccttgtcttagaaaccatagtacatagatggcgaccgaccaaatgaagcccattgccacccttcttttggggctcaacttctgcatgtatgtcatagtgtcaggcattggtggatgggccatgaacagagccatagatcatggctttgttatag

SEQ ID NO: 103818 - DNA, 251 bp, Glycine max
ctagatttgaatgaaatccgtcctattcttcctcaactccttgatgactttttcaaacttatgaatgaagttgagaatgaggaccttgtatttacattggagactattgtggacaagtttggggaagagatggccccttatgcacttgggctttgccaaaatttggccgctgcattttggaggtgtatgaacactgcagaagctgatgaagaagctgatgatccaggtgctcttgctgcagttggttgttt

SEQ ID NO: 103819 - DNA, 201 bp, Glycine max
ccgaccagcaacagtctccagcgcgacgaacgacggcgcgagcatcggcaacgcacacgacaatcgcagatgacgctctcgagcgcaatggcagtagaccagcagacgatgcacgcgagacaccgacgaccaaggcacgagacgtgcgaccgccgcatgacgcacgacacacgtcgacggcgacgacagtgctctggtgcg

SEQ ID NO: 103820 - DNA, 269 bp, Glycine max
ctcgagccgctagaagccaagccatgacctctgtgtgtgagttcttgtatcagctttatgaccaaacaatagttctattaacctacatgctcatagaacttatcctcatcattcagtaccttaagtcagatacacgtccaatttcaaccgcccaatacctcaatttcattgaagagaagaaccccacaattcagttcactagaagattgaaggcagagaacatagattgcagggtgtgcttatctgaattccaagaaggggagaaagtg

SEQ ID NO: 103821 - DNA, 217 bp, Glycine max
caagaaggcactaccaacatacacaacatgcacaaaggggatcaaagcttacccaacacctctgctgttacaaccaacacttctgacgaccaaattcttcgttctgctggaactgaaaagcactctagtagcgttaacaatggtactgaggatgcctttataaactcaggaggcggacatcaatacttcaaggaggcggagttcaacactggtgtgc

SEQ ID NO: 103822 - DNA, 255 bp, Glycine max
cgagccgctcgagccgagaaaatccaacagtaagctctgcaagtctgtatcctgcatcacttcatgatacatctcagtccaagtccaaacatgccattgaatgaccaggataattcaagcaatattatgtcttttaaaattgcaccatcttatcttgatgactttattatcagcactggtcaaatggtgaatcagattatccctgaacactctgcctctggaatgtcaaaagttgaagataaaatttcagaacaa

SEQ ID NO: 103823 - DNA, 240 bp, Glycine max
caagaggtccaatactccaatcctaaatgcgtgttcctgattatgtattacaaattgagagaaggtggtggaggagctgatccattgccgataccgtacccataatttatcatttcaatcccatcccaagcgtccacagctaacaattcagattatcatcatggcttcttttttccctcactctccttctcactggttaatatactgatgattaacaaattagaagtgtgggatggtagg

SEQ ID NO: 103824 - DNA, 183 bp, Glycine max
tagataatggggtggcggttgaaggtggagatggtcttgctgaaggtgaagaagttcaggacttgaagaatgaaactgtaaataatgggatggaaactgagggtggaaatggcgttgctgaaggcgaagtttggaccttgaagaatggcgttataaatagtggggtggcaattgctgatggga

SEQ ID NO: 103825 - DNA, 217 bp, Glycine max
cagaaacaatactaagtgaagcagaggaagaacagagcaagcatgctttaacagtggccattgcctcaccagcagctgctgaagctgctgttactgttgctcatgctgctgcggaggttgttcgcctcactgggcaacgcaaggcaaactcagaagaatctcaacctgttaaaactaggaatggtgctcctcaatccacataccagtgccagaggga

SEQ ID NO: 103826 - DNA, 228 bp, Glycine max
gggtgttcaaagaatgacctataaagtctcattctatggcaaggaggcccatcgcggatacaattttgggtctctaacatggcataatggtgaccatcaagccatgttagagacccaaaattgtatccaccatggcttgatggtcaccattatgttcatacagtatttgctgtcaaagttgaataaatttgcacacacatacacatatttaaacaggtcacaatatgt

SEQ ID NO: 103827 - DNA, 148 bp, Glycine max
ccaagtacttgaaggccacgcaggaacttctggacgaggttgttaatgttaacagcggaattaacgtagaacaaacgaagaagctgtgcttcgagaaaactaaggttgtgggagaatcatcaaccgccgctagtggtggtgacggttc

SEQ ID NO: 103828 - DNA, 227 bp, Glycine max
gcaaagctggtggtgaaaaatggaaatcgctatctgatgatgtgagaattatgatttttagaaatattttaatgataattttttgtgtgtggttgtatatgatttaatttaacgtatcatgtctactttttctgtaacctagtttgcgttaatttaatgtttcaggaaaaggcccctttcgttgctactgctgagaagaagaaacaggagtatgagaaaactatttc

SEQ ID NO: 103829 - DNA, 171 bp, Glycine max
ttttcaagtcctctgcttcccatatgagcacaagggtatggtggcaaccatggcaatgactatgaggaaaagaggctgacagaaacttggtcggtaccacctattcttatacttaccactcttgtcgctgtctctgggttcttacgttttttggtcggctgttggatattc

SEQ ID NO: 103830 - DNA, 257 bp, Glycine max
gtaccttctagcagattgttgagttctgattcctctattgaagaccaaacggttagttaataacatatctgtctttaggaagctttcagctttccttgttatgaatataaatataaaaaaaataaaagtgcaatgtttgtgagtttctaacttttgactaaattggaaatacgtgactgactcaaattttagagtgtgatcatttgtcaattctagttttaggttgctagtggttatttattccagagccattagaa

SEQ ID NO: 103831 - DNA, 242 bp, Glycine max
caaaaacaaatcagaaaacccaaatctatcgtctcttcgctcctcttcactcacgcgcgccatcttctctgtcgcccaggctgaaaaggaatatattatgggtgataggtagtagttgaccaacagcacacgggtgatgcacaacttccatcttctcctccctcaaaagatgatatggtttcgtgtgtaatggctttggaggctgctttgcttccctgtttgccagccagagaacttcaagc

SEQ ID NO: 103832 - DNA, 225 bp, Glycine max
attttgctttgtcataatgtaatgcaggaatgcatttttttgttggtaaattattgctattgctggactttaagagtgcaggtttataatttctccacgcaagtcgggcttcctaaaattgtgtttatgaatgaacctaggttgactcacttctttgttgtaggttgagatcaagaaggctgaaccagagaaatcctcaaacccagcttctcttcctccatttgc

SEQ ID NO: 103833 - DNA, 250 bp, Glycine max
gcagtttattgggaaaccacaatcaattcattccttagtgattataagcccgtggaaggtataatgattgccccttcagggcattccgtggtaactcttttcagtttggggagatggccatgagccatactaaaacaagaatggaagaggcctggacaatcgatgaggttgcattcaatgttcaaggcctttcagtagattgcttcattcccccagctgatttgagaacagcttctgtcagtgaagcttg

SEQ ID NO: 103834 - DNA, 156 bp, Glycine max
cctcgagccgaatcggctcgagatttctatttggtgcttaaaaatacatacatgcagtgtatctcggaatccttctcctctgtacactcttcattcatgggatgtgtaaagctttccccgtaacttattatattaatatgcatccctcattcatat

SEQ ID NO: 103835 - DNA, 143 bp, Glycine max
cgagaacgaaaactgagcatgcaatcgatccgaccagtgattccttcatttgttcaatttcccatactccgaaccgacacctcatttcactgattttgcgggtgattatgattctggtctagatcttagaagcagcaatagga

SEQ ID NO: 103836 - DNA, 267 bp, Glycine max
cactcctgcacctacactgaccatgtggactatgtcggaccttgcgaagttgatcacgacgctgagcatggcaaagccgagctgcatcgagaagatcagagacgtatttgtcagtcgagtgggaggacgaaaagtcaaaaaaatattatgataaaaattccttatggtgacaatccacgttgacaatcatttcagtaacaaatttgtccctccgtgccacgtaggctattttattattggtaacgcacgaaagttaacggcagaaca

SEQ ID NO: 103837 - DNA, 269 bp, Glycine max
gtttgtatgcagcttcgagacctactaaccctgaacaagttcatgttaaaaagaatgttgagaagaagaggtacaacacatatacttcactttctgattggatttgaatagctgagaatttgcgagtaatttagagaatgaaagacctgcttacatatctctaagaattatctacaggcagagtatgagaagacaaactaacaggttcaggccagagaatccagaaccagctgaagactgctttaagacagatgatgcaaaatttaatg

SEQ ID NO: 103838 - DNA, 267 bp, Glycine max
cacgaccacactcctttcactctcactcatgacttccaaaacgcaccgtttcactacctgtcaccgtcacccttccacacccgtcaccggtcttccgtgcctcctgtctccgtgaacgcctcgccggcatcgattcctcctccgccgaatcgccggagctccgccgcaccaagtccttctctgggcgcaccaccgacgctccctcctcctccgccgccccggagccccgccgcaggtcctgcgaggtccgactgccgccgttgggag

SEQ ID NO: 103839 - DNA, 195 bp, Glycine max
ccaaattagaacttactcatatgtataagttctgtataagtttcgggtctattctcatttcttatctaagacaaccaccagattcacaatttccaatctaaataaatagaagggcagtagaggtgtgacattttgacattctgagttgtaaaaaacgctcaagaaagatataatataaaataagaatttgctaat

SEQ ID NO: 103840 - DNA, 153 bp, Glycine max
ccgcagttgaacacgaagctcgctagtgtcaactctcgctcaaatcaagttcttcaaaccctaaccgcgagtgcgatttccgtcggattttgaaagttggtgtttctgctacaatacacaagggaaacagaaatgggttcttgggctacatca

SEQ ID NO: 103841 - DNA, 214 bp, Glycine max
aacagatccaaatctaatcctttgaaattcattaacccccattcctattatctctcagttccagtttttcactttgttagtgtcatctgcaatttgctttcacagttgcttcagcaggaagaaatgacaaagaaacaccttcttgcttttccttacctgattgtaaagaatctctcttttctcatcattggggatatcactgttcactctgcat

SEQ ID NO: 103842 - DNA, 196 bp, Glycine max
caaacatcataattgtaaacatcattctaaacatgcaccagtttcagggctatttcaatcataatgtttcacatatacatttatcgtatcacgtagatgtagtgattcaagccatggcacggtcttcatctacgtgataccataaatgtatatgtgaaacatcataattgtaaacatcattctaaacatgcaccag

SEQ ID NO: 103843 - DNA, 201 bp, Glycine max
ctggatagcatgcataactctcattattgttcaagtgatgacccagtgcttaacatgaatcggcaactgctgacatcagaagtaagtgaagatcctagctgtagcagcaacagtgaaagtgaaatgatctagtttgttggcattccactgctgttgcaggttttgaaactccttttgtcagcgaaagttacttggatagtg

SEQ ID NO: 103844 - DNA, 213 bp, Glycine max
atgacaacaagaagagacaatccagataatgcactttggaggttagctgttgaagcattcaatcgtgttcttgttcactatgtcaccaaattaaccaatggaggtccagattcaacattagcaaacctgtcagaacacgaatatggaaagaaattgcagatgtttatgaaatattcctaattggatattgtggacgagctcttccttcaaatt

SEQ ID NO: 103845 - DNA, 222 bp, Glycine max
gtacagtagaaagcttaaacaccaatgtacatacatagcttagtgtaaatagttgtgctcagtagcatgttacctaggttgtaaatggagcaagtagttcttttagatatcaagtccaaaagagtaaatagtgcttttaagtggtgtgtttggagtagatgtaaacttgggtttgtacatgatgtaaagtgtacattttggtggtgtaatttggagtagatg

SEQ ID NO: 103846 - DNA, 243 bp, Glycine max
atatttatagattagttaggggttttaggattcttctttcccaggtggctgcgatgtgactgtgagtaactgaaaatggaaggtttaacgatgacgatttcggcgaactctacactctcgacattgaagttcccaatgccatccccgaagaagaagaagaagaagaagaagatgaaattgatgtaaacagtaacattgtgaatcttgataaggatatggacagccagacagtgaatgatgact

SEQ ID NO: 103847 - DNA, 212 bp, Glycine max
catattagaaaaagaatagctgcattatatatagaggtgcattcagcaaaagattttgctagcaaaaaactcaaaaggagaagtctagatgatacaaccaacccaaaaacacagttttccccacaaatccagcatcatccacaccaatcattacaccaccagatacaccaacaatcataacagttcctgccacaaatcctgtcacaatttcc

SEQ ID NO: 103848 - DNA, 168 bp, Glycine max
cttgaattttgcatcacaagagcctcagagcttcattctcagcatggtttcacttggagctatatatagtgtgatctatgtcttcctgtttggagctgttactttggtttgggtggggatatagttcaccatgatgatgttgccccaagaagacctggttgtgagaac

SEQ ID NO: 103849 - DNA, 283 bp, Glycine max
ctcaacttagacaggtttatttttttctttcatttgttctctttttttttggtgattacgttcagggaaatcaggttcaggaattggaaatgtatttgctgtataaatagttaaattagcgacatttttttttttatctagttaactaggtaacatggatttatgacatgcacgaacatgtgcagcctgaatggtaacactggtccttgcactagcattctctatgaggctcctctagtgaatcataatattttgtaacatcaaagtactcgaattagtttgg

SEQ ID NO: 103850 - DNA, 279 bp, Glycine max
cttcaacttcaagcaccatcatcacttctgatgaaaggagaacatgatcatcacttcaacttattaaacccagaaattctcatcatggttattaagctctccaacagtggtagtagaagaagaagcactccacaacagtagtcaaaccataagatccaccttagataatttctccacaataccacagtcactattcccaacagcacaacatgccaacaactaccactcctcctcattagtccaccatgatcaaaaccctaaccctagtactactacaac

SEQ ID NO: 103851 - DNA, 277 bp, Glycine max
tgaaaaagtcttcttcatagcactgctcacgttctctctttctttctctctcatatatatataaggcctttattaatgtggcggcttcatgtgtaatctagcaaactactagtagtagttagtttccttccacaatgggcaaagcctctagttcttcctcctcctctatctccagctgcagaaacccttccaattcaactgcatcctctctcacacaccaacatagtcaagaccaccttcgcacagatcttaggcttggactaagcctttccgctac

SEQ ID NO: 103852 - DNA, 99 bp, Glycine max
gcttcggagacgaaggtcgtgaatctggctgaggaagccaagctcgccagacaaggtgtaacgactccctcatatgcttttaccaccatctgcaagtcc

SEQ ID NO: 103853 - DNA, 165 bp, Glycine max
ctaagaagtcaacatacagattttgtatatggtggtccagtccagctacgatttccaaatgcgattggttccaaaacttctctttattcatgtccatttctttgcagttgtgagttgtatgtatcattcattggctttctatgctatgatgcagatatcaccacc

SEQ ID NO: 103854 - DNA, 270 bp, Glycine max
cgacaactctgaatctgagcaccaattttctgtttgttcctctgtcctgggaaaaatggaactaaccaacacctgcacagcaaacttagaaacaatttgttctcctgcttttgagcccattgaagtccattcacaacattatactgagaaagatgcagtgagcattggtgatacaaatatggtcgaaatgggagctgatgaaggaagaagcatatgtggttatgaaacatgcgatgtatcagacttctacattccggacatgatcattac

SEQ ID NO: 103855 - DNA, 184 bp, Glycine max
  unsure (1)..(184): unsure at all n locations
ctcgagccgtttttggagttcaagggttgatgtgtgtatgttgattgttttccacacaatgtcgagtcctcgntcaatcccaaaagaagcacagacactaactttattctagcaaataggtatacttgtcagtgtctcttctgctgaagctcacacactgtcacacctntttctgaaatgaatt

SEQ ID NO: 103856 - DNA, 208 bp, Glycine max
caagcttcagagcgcaggcaaacaacttcttctcagacatggcatctcaagtaagcctctttctttctctctctgtctctgcaaaatcttcatcttaaaaatcctatcttatgtgctcacaaatcgcaattcaatggccttagctaaatatgaagaactatgaaatggatgaaattttgatcttcttttctgtcgtaatggatccgta

SEQ ID NO: 103857 - DNA, 130 bp, Glycine max
cgttaaaaaagctcaaaactttacatagccatacgacgtcgtcatgaacctgccaccgcattccgaaagttaaaaccccacactaacaaccgaccaccgccttcagatacgacggtgaatctctctctct

SEQ ID NO: 103858 - DNA, 273 bp, Glycine max
cactcgagccgaatcggctcgagggcttctagcgttgtcatattcatacgttaatcatttatggacataggaaagtgataggagccagatactacatgagtggacatgaaccagaagaagggtcagacagaaaagtctctttcagatctgccagagatagctcaggtcatggtagccacacagcttccacagccgtgggacgactcgtggcaaacatgaattacaagggtctaggagctggaggagcaaggggaggtgcccctaaggccagga

SEQ ID NO: 103859 - DNA, 259 bp, Glycine max
tgttggtataggaggcgtcaatgatagggacaaagaattcaagctgaataatgagtggtcttttggagagtatggaaatgttgataaatccttgaatgacatcacaaacatctttcaaaacagcagtacaatctgttttctcgtaataggagaataaactatggttagacatgtataattctatatcacactgttcttcaactctttttcttttgttcctcttcataactttatttctatgcatccgatcagatttaga

SEQ ID NO: 103860 - DNA, 267 bp, Glycine max
cttattttcattaaaaaaagatgacttaatgttattttatgatgcctcctacatgggctaccttctttacacttgtaaccttacgagtaactcaaaactttaacattacatataactgtccaaagtcatttcttgaaccctttgagctcaactatccatccatacaaatccatagactctattacactaagactataaagaggacagtcaccaatgttggtaggggcaggagtgtttacaagtttagtgccgtgtcaccaaaggaat

SEQ ID NO: 103861 - DNA, 245 bp, Glycine max
ggatgacaaagagctacaccacaaaatgaaagatgaacaacaagaagaagcactagagcaagttgaaagagaagccatagaagatagcatttgtgagagagcaacagaaactgctgttgtagccactgaaaatgatgaagaagaacaagatgggaaagaaagctatgaaattgtatgcagagaaaatctagaaagccaagtatttactgaagtagtaaaagaggaagaaaaggttgatgaagaag

SEQ ID NO: 103862 - DNA, 254 bp, Glycine max
atttttatactcattattgtgaaacaaatgaatatttaaatgttacgcgttttaacaaaatggttcagaggaaaggtgaggaagagaagatagaaaattttgaaatttaaatttaaattgaagaccaaatagaagaaaaaattgaacttttacttttaaaggtcaaattctctctctacatctctctgcctctttttattctcttttattaaacaaaagaaagtacatcattactcatctctttttcctgattt

SEQ ID NO: 103863 - DNA, 265 bp, Glycine max
gtatgatcgagttaagactgctggtattgatagttctatctgtgggtgcatagttagaaccacacatggtctaccttgtgcatgtgaacttgctaggtacaatacgatgtgtcacccaattcccttggaggcgattcatgttcattggaggaaattaaagtttagtgaccacgtatcaaatgatgaggggactgagttatcattgcaacctgaaattggtgctttgtacaaccgatttcaggaacttgattatgctgggaaaatt

SEQ ID NO: 103864 - DNA, 159 bp, Glycine max
gtctgtagcaggtttctttttcttcttcttatttttcctttttattgcaaagaacaagtgctaaatatatttgcataaataacagtgtgaggtagcatttttcattgtttgtttaatcctttgtaattttcaatataacgatttggtttgatttgatca

SEQ ID NO: 103865 - DNA, 166 bp, Glycine max
tggaggtgatattttaaactctgcaagtcttttctattgaacttttttagtgtttttattttttcaaattaactgtgtgatcagtgatccctactaccaggcattattctgcatacactataataattaataaatatgctacacaacttatttcacaatcccatgc

SEQ ID NO: 103866 - DNA, 166 bp, Glycine max
cagtttctgaggcagctggggaagaaatattccagggaagagaacgttgaggcccaatctgggttgagtccctgctttaatatctccggcgtcaagaccatcagtttccccgagtttacttttcagttcaaaggaggcgccaaaatgtcgcagccgcttctgaatt

SEQ ID NO: 103867 - DNA, 223 bp, Glycine max
aaccggatcaaattgataaatttttaggtgcagcatatggcgaaaaaccttacaccgtggccagatgattagttaaatgaaatctcttaactccacggccaaccaagaatctcatgttattggatctactccattctttaggtttttctcttttattttttgctttgttattttatttcttcttttgaactatttaaattaataacaaataataatgatgatg

SEQ ID NO: 103868 - DNA, 169 bp, Glycine max
tcttcactcatttagctagcatcggttgaagataatttagatgataatatcaacaaagatggttatgctgaatttgatgtcttcaaaaaagctacctaacttattgtttctagagcgatgtagaaagctattttctgcattcaaatctcaacaataaaattgtcaaata

SEQ ID NO: 103869 - DNA, 154 bp, Glycine max
tatgatcgacaatgtgatgaggctgcaaaaatatttgctgaatatcataaatgtctctgttactatgtaaatcaagcgatggattctcaaagatcgggtgtggattcttctgttgaaatggccaaaagtgagaaggaagctgtttattctactg

SEQ ID NO: 103870 - DNA, 181 bp, Glycine max
ggaaggttgtcattcctaatattccgacatccaacacagtagacgttttgtactaagcgagcagagtgctcacttactacaaaacctctactgtgttggatgtccaaatattaggaaggttgtcattccattgagggaaaattgttttcatttgttatttaaaaacctttcgctctcggca

SEQ ID NO: 103871 - DNA, 184 bp, Glycine max
atctaccttgtacacgtgactcatctcttcatccaacactagttgacttcttagcttattggagacaatttgtgttgaggcaaattttgtttccttgcattatcacctcataacgggataatcacagtgtgatttttgattctagagagaagagaaggtgatggtgatgaagcagagagatgaa

SEQ ID NO: 103872 - DNA, 218 bp, Glycine max
ttctcctcttcattttacgccatttctctgtgtgtatcgatgctactcctagccaaaacaaagttagtagtagacatgagttcttcactacaatcactactacgcgtgtctgagtctgatcctactaccactgttgaccatcttgtgtttggaattgcctcaactgggactgcatggaataggaggaaggtatacacaaaactctggtggaacagaaa

SEQ ID NO: 103873 - DNA, 260 bp, Glycine max
gaaacagatgatgaaggaatttgtgaggatatcacttggttagaggagcattgccaaggacagatctccaacaggaaatgcttgctagatcggttattgaaatcggcttcagtgccaaaagaacttcaagaacaggattttgaacacaatgctcttcacaaacttgtgatgatggcttatgagaaatacatggttgcatggctgagtcaattgacaataactgattggcaggctagccggggtcctagctcatcaggtgg

SEQ ID NO: 103874 - DNA, 262 bp, Glycine max
tttcaaatgaaaaatcagaagcaagacactctcagtctatggtgccttcaccagtgaaatccacatctgtttatcctcctgaggagtaacgagtggagatatgaccagaagcagtactgggagacaaatggctttgctcaatcagatttttatccttgatatggatggacatatagatttatgatgcggaatgtgaaacagctaattatatacgttgatatgttgcatcccgcggaaattcatgtatgtcaggtcacatcaa

SEQ ID NO: 103875 - DNA, 250 bp, Glycine max
caaagattgacaaccactcagatcgatttaccattcaaaacaactcaaatctcctataaaggtgacaaacatcttgactctaaagtaggcatgacatgacacatgccccatgcatgagcgtgaaccaaaacacaaggaaacccatctcaacaaatggcataatttggacaagaactttgaacatgttttctaaattgacgagactcacaagacagggttggtaacttggacagaattgacaccatttgtt

SEQ ID NO: 103876 - DNA, 187 bp, Glycine max
ggaaggcttcagcttccattcacaagatctttgctcttggttctcttttcactcgccaccaattaaaatctcacaactactactatgatcaagatgatgcctctcccagcccagaagattcattcatctcaatcaagtttgaagaaaatggagtgcgctcatgggagaagagcaacaccagcgatat

SEQ ID NO: 103877 - DNA, 268 bp, Glycine max
tccatatctccctccttatacactaggacttctgtctgaggtggcagtgctggaagaagaaatcgttagcgttgaagagcaggttgtacattttaggccggacttgtaccaggaagctgtctacatgtcatcctctaagatgaaactcgagcaatcagcaagagtgaacaatgcaagcccaaatagtagtcccaaactgggtaaattgaagtccctatcccagacaatggatgatgctgcaacatctgaaactaggcctacaacaacg

SEQ ID NO: 103878 - DNA, 244 bp, Glycine max
tgctaaaacaacctggggttgagtcttagcacatgcattttgaatctcttattttcatttgaaaattttgggtttgatcatgaaattgcaacatgtaatctcctattttctaggggtatgggtggaagcagtttctactcgtttctcaagtatttaaactcgacacattggcacattggattttacagggaaacaaaatgaagaaaaaacagaaaattgactccaaagtaatagaattgccgtt

SEQ ID NO: 103879 - DNA, 147 bp, Glycine max
atccgggccctaaatactacaaagaatacaaactacaagcttacgatatgtattttcaataggtagttacgaagctataatttattgtcaatatatttttttaatccagactaaaagcttaccatatgtatttcgtagaaaattttc

SEQ ID NO: 103880 - DNA, 263 bp, Glycine max
caacttataacacttgaagttcaagatgcttaggaattttgttgggaggatacaaaagggtctttcactgtttgtagcaagaaggcctgctgcattcagctacttcagtgaagatcgtgccacaaccgcggcaccggatgatgttaaggaaggctattttgctgttcatgcaattaagggtgaggcaaccaagaggtttattgttgggttagattacttgaatgatcctgcattcttgggcattctggaccaagctcaagaag

SEQ ID NO: 103881 - DNA, 275 bp, Glycine max
caaacacagcagttacgccctctttctctctcccacccatatccccaaaacctgcctctgtcatctgtgagagtggctcataccatatcatatcacatcttatccagacaaaacaactgttatggataggtatcagagggtagagaagcccaaggcagagagccctataaacgagaacgagatacgcgttacttctcaaggaaggacgaggaattacatcacctccaccacgtggccgtggccgtggaaggggaagaggccgaggccgtggccgg

SEQ ID NO: 103882 - DNA, 261 bp, Glycine max
tagagaagagattaagtagagaaatacaacacatgaagagagagtgtgtaagaagatagattgtgaaacaaagtcattttgttgagaaaaaacgtctttgtgtgagagtgttataatttcttgtaatcattaagtagggtactcgggtttgtagagtgatccgctatttggggtggattataatattgtaatcatttttgtgatagtaaactactttttgagtcggttccttggatgtagataagaagtgtcgaattacgt

SEQ ID NO: 103883 - DNA, 200 bp, Glycine max
tctggccaagaaacttggacatactacaaggtacttatttatccaaaataccttatcaaagcttagttcatttttgcagagaaaaagaggggaatagtaaattaaatgaagggtaaaacgtgttttagttccctcaagatttgatcaaaataggttttagttcatatgttttaaaaattgtggttttggtcctcatattt

SEQ ID NO: 103884 - DNA, 155 bp, Glycine max
attatggccagtgcttaaaaacggtatcagaagaaaagaacaaagacatgtggaaggtgaagttattgccagcggtgtggttaaccaaatgctacaatgaaaactttctcctgcacccttttaatgactctatacatattctctgcacactttgc

SEQ ID NO: 103885 - DNA, 163 bp, Glycine max
tattaattaattaattaccattagcaatatagacacaacatttttctcatggggaggaggatgatgcaatggaacaccatcaccaaagcttcaattctcatcaccatcaccctacacttgattctccccgtggccgttaacagcatgaggctcgaactggtgc

SEQ ID NO: 103886 - DNA, 151 bp, Glycine max
caaaacaacataacatcctcaagcctttgaacatcgttttgcagccatggaaacaggcatagcatgctacactcgcgggcctttcctgcctagtgtttcttccaagcactctccaccctccatctctccatctttgggcttgaggagtctg

SEQ ID NO: 103887 - DNA, 152 bp, Glycine max
atgtataaagcctgctggctggaataattgggggaaaattgagaatgaaaaaactgcttgcttctctgaatacaggtgttttggacctggttggtgtccatcccaacgagtaaaatgggctagagaattacaagctgaagcagcagagcagt

SEQ ID NO: 103888 - DNA, 257 bp, Glycine max
gcaattctgaaaactcttccttttcccaattcttcccttcaaaacttaaagaaacttcaattcctctccttatgagagttgtatttttcttgagaaaaaaaaggaccaaaaaaaatgccacagagaatggcagttacacatgcagaccttgaaccaagcagaagtaaaacagatttgagcagcaaaactggtgcctttcttatggttctcacaatcctaataggcctcttctgcttcatcctatgtctcatagcaga

SEQ ID NO: 103889 - DNA, 190 bp, Glycine max
ggcaaaatgacacaggacatgttggatgaatgtgacttgacatcaagtcacatattatttgttctcttttatcttggtattttattggggaggggtaggatactctatgaataacatgatcaaaattttcttcataagatttttattgagttaatatttttgttttcttaaggttgagcagcaaaagtgg

SEQ ID NO: 103890 - DNA, 262 bp, Glycine max
  unsure (1)..(262): unsure at all n locations
cggaattcggtcgagctggattggctgaatctgtcccaaagcaaaactctannacgattgcaccgattggcaaggaaactggaagggntgcaattcagatgttttctaactctggatcaacacaaggagcagcttttcagcattctatatcctttcctgagcaaaatgtaaaggcaagtcctaggcctatatctacttttggtgaatcaagttctagtgcatcaagtattggaacactgtccggtcctcaatttctttgggg

SEQ ID NO: 103891 - DNA, 261 bp, Glycine max
ctcatcttcttcatacgtcttttcggtaatgcgattggctgttggttggcgtcacacggcgaaacgttgatggtggtggtctgtcgcggtggcgcgtgttgcccgcttcgtcctattcttccttccattgtcctccctccactgccccctttgttgtcgtccggtgcctctccgaccgtgccggagactggacgtactcgccattgaccacgggaaggccctcatctaccgtgtcgtcgttcacgaagcaccctccggcgg

SEQ ID NO: 103892 - DNA, 260 bp, Glycine max
cccattgcgaccagacttgttcacggaaggcgtcaagcctgattaacccattgcgaccagacttgttcacggaaggggttaatcacgcttaccccaatgattgacgtgagcactcagtctcagtgaaaaagagcaaaatcatgttgaaaatggggctaaaaattcgagaaaaggattgggattttctataacttctgcagccaatacaatgctcacggtagttggcgtggtatcaatattaagtttgtctggttttgtgc

SEQ ID NO: 103893 - DNA, 127 bp, Glycine max
tatatgtatatctagctcttcattgtttcttgcccagagatctaagcctctctctctggtgttttgttcatcagacacgcttttgtctggcatagtcgtgaaagtgaaagagtgagagaagatgatg

SEQ ID NO: 103894 - DNA, 185 bp, Glycine max
tgacaagtcaaaagaaaaaacagggataccaaagagacagtatgacaatgataaagtgaaggagaaacctgagacagtgtcaagttatgttgctgttcatgccccagtttcagtagatatggaaacctccagagcaaatcacatgtgcaacccttatcatccaaggttaaaacaaatgatacagg

SEQ ID NO: 103895 - DNA, 259 bp, Glycine max
cacaatcccatggaattccagattctcacttcgtcacattttcggcttcacgatggctgggttgttgaggaaaggccccgtgcctctaacccttctcacgttgacaggaattttattgaatctgggtctggaagcagtggaattccttgagagctgttgagaatttcttatcaggagaaaatgcttgtacagcaacacccaagtcagcagtgaaatcaggcactggagagaaaagagcttgtggtgtgagaagtgtccg

SEQ ID NO: 103896 - DNA, 195 bp, Glycine max
ctcaaagggggtctcatcatctcagaaacaaggtcttggggcaggtcgggcagggatgcccgaagtagaggggcagttaggggagagcatcaaagacataatcaatgaggagtttggtgatgggatctgtcagcaatagattgctactgatcggtggataaaattaaaggagtagatgggaaggatcgtgtggta

SEQ ID NO: 103897 - DNA, 113 bp, Glycine max
caatcttgtctcaggcgcattagccaacatggggatagatcatacaggaggcaacttctcaaggtagcaaacgctgcaatacacccaaaatccaaggggatgttaaccaaggg

SEQ ID NO: 103898 - DNA, 231 bp, Glycine max
cttatcctaacactctcatctggtctctatgtctcgaatcttctccgcatggaacaagaagaagctgcaccttcatctcaacttaatccccactattttttcttctttccacactcactacgatgggctcgctgccgccaatagtgggcttctccggcccagtttgaggctctacagtagtagtagtagcagcagcaatggggagccaccagaggattggcctcacgatca

SEQ ID NO: 103899 - DNA, 266 bp, Glycine max
caaacttacttttcaaattccttacttgctcctttacactttaccctgttgtccccgtttggtcctctaataaattatcttgctctgaggtgattagagttgacacatttgttaatggagaataaagatcctaaatcatggagttctgctcatatctaccagtctcagtggcttcaaaccaccatatcagatttggatgagaaattggatgctatgaaaaccattttaaaggtgacaattctccaaaccaagaaagcatggattgc

SEQ ID NO: 103900 - DNA, 246 bp, Glycine max
cgatgaccaatcaaaaattatgttaaaaatgacttttaaggtaattatcataaaagttgataaaattatcatataagataatttctgattgattgataaattctttgcagtgtcggtgattgattgataaattctttgcagtgtcggtccatgtgcatgaattatttagttagatgccatgtcggtttcatttacattattattgttcagatattgaaaagtattatttggtctgacaggtgtatc

SEQ ID NO: 103901 - DNA, 279 bp, Glycine max
gagagatgttttcattggcaatggaagcaaagagaaggggaatgggtgtagtaggctccacaaagaatattttggatttcataaaggacagggttcaggaagctttggatagaaatatagatgatcatctccaatttgttttaggaacagaatctgggatggtgacttcaattgtggcaacagttcgtagtttgttggagcctgtgaagtcttcttctgaaagagcaaaagtatgttgaaatagtctttccagtttcatcagactcaatctcaacgacc

SEQ ID NO: 103902 - DNA, 272 bp, Glycine max
catttggtgacaatgagactcgaaaagcagatatgccttcatattcatatccattgcaaaaacagaacagcagggcatctgttgatgatgataataaagaaaattgtggacacacttataaatcggaacaattaatgaattgttccccaattaaatctgcaactttggatgaaaagaactctcaaagagatactgttgacggcaattctcagcataatgtcaagcaagacctcttgattctaaaatgaagactactgagattgagcaacaac

SEQ ID NO: 103903 - DNA, 145 bp, Glycine max
gtgaaagttactgtgagttaaaagtgaactatttaacagatattctttactctgttgtaacagatatttatgctatttgtcatttacagaaatggtgattttgtccaccattatttcgcttgtttttgttaaacgatagtgaaaa

SEQ ID NO: 103904 - DNA, 288 bp, Glycine max
atttcgttttgcggtgtgctcgtctatctggatatttatacattcgaactagatgggcaacactaccaggagaacctccacctttagatgatactgaagtagatgattggcttcctcgttttgtcgttctccatggagcatgtatatttttattttgttgtgtacagacctaagcccccaggactcaacccttctatctgatattgttgaagttggaagattaccatgttttaagcgagaacatggtgaaattcaatatgccttttatattttaactcgtcatggatt

SEQ ID NO: 103905 - DNA, 135 bp, Glycine max
ctttgatcttatcatgccagagaagcaagtgtggaaattttccacacaatttagatgctgcagttacaaaggctttcaaagctaaatactttcccaatggaggattcttggaggctcccttaggccacaatccaa

SEQ ID NO: 103906 - DNA, 135 bp, Glycine max
atcaaccaaaagaccaaccaagcaaccaaaattggcacggctgaacgccaaagctttggtttcagacacaaccgggtttttggtaccgctaggaacacaaacattatcccaggaaaacccgtgtgggacaagtca

SEQ ID NO: 103907 - DNA, 107 bp, Glycine max
ttcaattgatatatggagcatgggcagtttgtggacaattgcagttgttattcttgtaaatgtacaccttgctatggacatcaaccgttgggtattaattactcatg

SEQ ID NO: 103908 - DNA, 168 bp, Glycine max
gatttttatcttttggatgaggtgattaacaaattaaaatcaacagatctattgactatagaagcaatacaattattgtccccctaacttatacagcaacgggtgtttctcacttagacatagaggctcatattctacgtaacatccatactgtatattaattatctt

SEQ ID NO: 103909 - DNA, 261 bp, Glycine max
ggacacaggtcaccttgacatggtttttagtgaggcaactgctgggatttttgacataaaatggagtccagctggagggcatgcaagtccttttctagctcaagcagatgctgatggatacttgaggattaaaatactggggggttgctgtaatggagtggaaggggctaatctaaaggagatcacaaatggaaaaatcagtaactctatgtgcctgtacctggattggcatccttcagctacatccatcacagtagggct

SEQ ID NO: 103910 - DNA, 257 bp, Glycine max
gttgtacagtacctttattatcaatcatgcatgcttttgtattttgtttcttactcctatgttcacattctattgcatccctcgctgaagcctccaaaactctaagtggcttcagcatccatcttattcaccgtgaatcaccattgtcacccttttacaacccttcactcactccatcagagcgcatcaagaacactgtcttgcgctcctttgctcgctccaaacgtcgtcttcgcctatctcaaaacgatgataga

SEQ ID NO: 103911 - DNA, 259 bp, Glycine max
ctttcctatgagtgcccaattcgacttatgtgttcaagcccaccctttcaagtcaatgatgaaaatatcaccatgggttcaataaagaatcttcatttcttgttaagcttaatttcatttcaagtacttttctttttattattcgtataaatagaatgaatgaggcttaaaattttaaattaattctggaaatatcaaagcttcaatctcttgtaaactaggagaagttgttagattctgagtttcattatcagtttgg

SEQ ID NO: 103912 - DNA, 255 bp, Glycine max
cgccatcattgttggacttgttcttgtggttttggtgtctggagtcttcttatggcaaaaatatcattccagaaagaaaactgggcaggaagtgttgctaaaaattgttcacgataactccacaactggggttccatctgagatccttgcaaatgctagatttatttctcaaacagtgaagctagggacacaaactacttcaacctgtcgacatttttcgatagaggaattgaaggaagccacaaaaaactttga

SEQ ID NO: 103913 - DNA, 256 bp, Glycine max
caacccatcgccaccgttgcgtacacccttttttcttcacatcatttcccgcacctcttgtttttccccctctttctttgttctccttcggttgaatcaatgggtgcagaggttaagatctggaaccccgttgaagtcgcagagcaagctcgccatgactatgcttcgcagattcattcctcgcatctcaccattgacccctccctcgagcttcctctaatggcacctctcgtccttacttaaggtttcagttaag

SEQ ID NO: 103914 - DNA, 270 bp, Glycine max
ccaagctaggtttcggtgactccgccagattgaacgccttgaagtcctccgtcgacgccacaattccagccatatgccagaaggccaaaagggagagagccaaaaagaatgccgccaagaagcttcacaatagcactgaccccaaacgcggccagagtgagaagccctcctcctcgtcctcgccgtcgccgtcgccgtcgccgtcgccgtcgatttttaacgataattgggcgaaccagttgttttctccggccgtttcggaggatgggt

SEQ ID NO: 103915 - DNA, 138 bp, Glycine max
gaagccttgagtcatctgagagggaatggagaaggagaacggaagagctttgaaagaatatacgattatgatatatacaatgacattggagatcctgataaaagccttgaacttcaaagacctcctttaggaggtaaa

SEQ ID NO: 103916 - DNA, 110 bp, Glycine max
agagcatcgagaagatcattcaatttacgatgctctggactttaaccaagtcgttatttttgtcaaaagtgtaagcagagctgctgagttgaacaagttgcttgtggagt

SEQ ID NO: 103917 - DNA, 259 bp, Glycine max
ccctcgagccgattcggctcgagcccccacttgcataggagtgaaccactgggggattctcagaactggttggtgctggctcttactgccaacataggtctgctgatatggctaacacagggtatccaatacattataatccgatcaaggaggctccaattaatggtgaacaatctcaggttgaggactcaattcctgaagaggaagcaccaggatctgcacctagtgggaatagaagaaagagagggcttgatcataa

SEQ ID NO: 103918 - DNA, 241 bp, Glycine max
cctcgacccgaatcggctcgagtggagttagactgttgaataacagacggagggacaatgacgtcctgaatcaacgcatctccaacgtccacgtctcataatcagtttcagttccggtccctcttgcaaaccaacgatctgccactgtgatgtaactcggaaagttaacgctgaaccattcggtggaaatcggcgacgaacgaagatcatcatcaacaacctcacaccctcatcaattcaa

SEQ ID NO: 103919 - DNA, 187 bp, Glycine max
atgccaatgttttattttattgtcaatcattcggatcataagcaagcgcaactatcactgtagaatccatatataattgaaacagagacgaatcccattgatagaactgtggctcatttactttttcataggcctatggagttgacccaaaactattctgacaagctggagtcacctatttctacca

SEQ ID NO: 103920 - DNA, 178 bp, Glycine max
atgtaatgaagacctaagttaatccgtctttattacatttatagttcttgttcttggataagcaccaaagtgtgttctgcttgaacaagaacaacaaaaccaatgaagacctaagttaatccgtctttagattaggatgaaggtccttttgtcagtcaaaatctgaatggtttactct

SEQ ID NO: 103921 - DNA, 177 bp, Glycine max
cacagacttacgagaagtgagcactgcttccaaccatttgagtgctactcatcatggtgcttggtggtggtgcttgttgttgcacttgatctgagtgcacatgattttggtgcctggcatggttatggagccttgaagaagaagatgaaggggcttcccccaactacagtttggtgt

SEQ ID NO: 103922 - DNA, 174 bp, Glycine max
ccgtgtcttgtttcttctctgcaccctttgggatctcttgcatagaccaaccccagaagaaggaaaaaaatataaaataaataaaaatcaacccttttttattttgtggcttgttggtgattctgttgtacagaagtgttcgttagtcatacatttgttcaagattgttgtata

SEQ ID NO: 103923 - DNA, 244 bp, Glycine max
gtggggacatctatttcaggttgggagttgatcgagaaaaaagtacacagaaaacaacccgtcatttttcattttcagtgattaccaaacgatattttgatgagtttggaacttcatgtgatactaaaaaattgcgtacatttatgccaacaagcaggagaatgaatgaaacttgcttgagttggaattgcaagatgtcgatacatgaattgttctccaaaaaaaaaaaaaaagggcggccgcc

SEQ ID NO: 103924 - DNA, 255 bp, Glycine max
caaatccccacttatttctactacacttccggcgcctccaccctcgccgttttccttcagcaaatcatcattcacgaaaacaacaccaagtccatcaaggaactcatcataccagggttaccgaaaattcacaccgatgatttgccagagcaagggaaggaccaggtttttattgacattgccacgtgcatgagggacagttacggggttatagtaaacacctttgatgctatcgaaagtagggttatagaagcg

SEQ ID NO: 103925 - DNA, 255 bp, Glycine max
gttttgagattccacatacaacctgcgacatacgaagtcatcaaggttttggtggcacttaactcctttcatctcggcatgtacacatcttcatctgtgtccaataagaccataacattggaagaatggaacggttcatcccccacaaaactctccaagaccttcaccatcacaagatctggtgctcgtttcacccatgtttggagaaggttacttcaggcatttgtccctgagggttttccaagcagtgtcact

SEQ ID NO: 103926 - DNA, 255 bp, Glycine max
gtgatagtgctaagttgctaacttaaccacaccacaagctacaaacacaaaaggggaactggtcagaaccaaaaaaaagctctctcataaactctggcaaagaatcagagagagagagaaggaaaagaagaatgggatgggaaacttaaattagagaggcagcacagcacagcacagaaggtcatggcggcgtttgcagtgctgaaaatcgcgcttttgtgattgagggttttattaatgcaccttgccttggtg

SEQ ID NO: 103927 - DNA, 264 bp, Glycine max
cattatttcagttcttcccttttttttcttacttccattattcccggtcctcacattcacgaccagcataattgtacatttttccattgccctcgcaacgttggtgacgagtgacgaccctttgagtagcttgggcaaatattttggtcaacaaatatttttctgcaatatcagtgttttccattccatatcaaatttcaatcctttaggagtttccttccagtacaaaccaaattcacttgctttttctacttttatgcttat

SEQ ID NO: 103928 - DNA, 261 bp, Glycine max
gtttattggtacaaataaactcttagatttatatatccgggttagaatgacagctctccaatgtcgttccaccgtcttcacgcgtcagtgttgttaacagaaatccaatcaggctggtagaatttaatcttcaattgtatatttttcttatcattggtttgtttatgtttttgcatcgagtcaagtttcttttgtgttctttttggctttctttgaacaacagtgtgtgcatgtattatgttttgtttgtttatgcgatat

SEQ ID NO: 103929 - DNA, 255 bp, Glycine max
ctaaagttcctgaattgcctaagccagagttaccaaaaatacctgcacttcagggaccttagggatttcctaagccagagttgcctaaagttcctgaagtgcctaagccagagttgtcaaaagtaccatagctacctaagtctgagttacctaaagtacctgagattcctgaattgcctaagtccgagttgcctaaaataccggagattcctcaggtccctgaattcccaaaagttcctaaagcattttcaacca

SEQ ID NO: 103930 - DNA, 251 bp, Glycine max
ctcaacaatagaagggtcaagaccttatagcagatttgaagctattgctgcacatatatggagatgtgcctctaaggctcgtaaactagataagaatcaaccaactctacttcggttcaatgccgatattcgcaatagactaattccacctctccctaagaatctattttgggaatgctttgtccttaacaacagcatcatgtcacgttggagatgtcatattcaattctttgagttatgctgctcagaag

SEQ ID NO: 103931 - DNA, 141 bp, Glycine max
cttgtcttccgttttcaaacatctgaacgccaactagacaaaggtgcacagcaactgcaatttctaaccttgtcaaggcacttcatgaatcacaaaattaaacatttcgaacaaaaatagattcttctgcctccacacaac

SEQ ID NO: 103932 - DNA, 227 bp, Glycine max
catcatctctacaagagcttccggaaactgttgtattcattagaggctgttcctttccctataatagtcgagtcttgacaccttttcacccttttttcattttttttaaatgtgtacagtttcaaaccatttttttccccttgtgatatctgcaccatctctcatctggtgccttaacctcaaaaaaaaaaaaaaaaaaaaaaaaaaaaaaaaaaaaggggggcccc

SEQ ID NO: 103933 - DNA, 211 bp, Glycine max
agccaaaggactaacacttgatgagggcagagccattaatctttccctttcagctttagctgatgttgttgcagctttgaagaggaagaggtgtcatgtgccttacaggaatagcaagctgactcaaatactgaaagattctcttggtatgatactatttcttctttagatagcatacactacccacttttgcccatgagatgtagtgata

SEQ ID NO: 103934 - DNA, 262 bp, Glycine max
tcgactcgagcgattcggctcacggctcgaggtttggcagtggctgcttctgttctcaatccttacaacagaactagcgcttttaggaccaaaattttccgtctttatttgttaattctccgcacgatgtctcccgggcttctccgattaatccgtgacgtgaaagccccaatacacgtgccaaaatggcgcagttggtgttgcagattagccccaattgtatccacggctgatctgtgtcaaagcaacggcgaaatttctt

SEQ ID NO: 103935 - DNA, 258 bp, Glycine max
ttatcagcttggtagacccagaagttagtcttcacaccttcccttgaattctatatatattgtattgcatgattaacatgctataatgccatccgtgcattctagtccgtgttactcgatggaaaacccggctttagcatcgctactagggcagacgagaggggaaaacaagcgtagaagttgtcgagcggaggaggccttttgaaaatgttgaagctgtttcccatgttgagttcgggatgcaagatggtggcactg

SEQ ID NO: 103936 - DNA, 256 bp, Glycine max
gcttgtgaatcagcaccacattcacctgagctttttgtgaggattccaaagcatggcttcccttgcagcatccactgctgctgcttcccttggcatgtcagaaatgcttggaaaccccatcaacctcagtggtgccacaaggccagctccatctgcctctagccctgcctccttcaagactgtggctcttttctccaaaaagaaggctgcacctccaaaaaacgctgcagctgctgctcctgccaatgataagctt

SEQ ID NO: 103937 - DNA, 245 bp, Glycine max
ctcttcaacccggatcaatatcaggaaggatcttgtagcgactggaaatccaagcatttgcaaagtgatgaagaggcccagaagattgttccttctagtggattatccgaaaaggatgaaaacaaaagtgatctcaagctgagggtttggaagaaagaagataagtgtgaaaattttcaaggtgaagataattcaaccaagtggatgcctttaaagatgagaatgatgcggaggctgatggtgtc

SEQ ID NO: 103938 - DNA, 253 bp, Glycine max
attctcttcctcttcctccttcttaacttcctcaatttagcaactactgaggcacaggatgaaagctccacccctgtcgagttatcccatgcctgctacgttggcaagtctatcgctagcagtgccttccaaataaacgtcagggccctcctctcttccttatcatcaaacgcccccggcgacaacggattctacaacaccacagtccctgcactaaacccttctgactctgtctttggactcttcatgtgca

SEQ ID NO: 103939 - DNA, 210 bp, Glycine max
  unsure (1)..(210): unsure at all n locations
aatggagagagaaactganaaggagagaattcgcattggcaaggagttgctggaagcaaagcggattgaagaagagaatgagaggagacgtttgttggccttgaaaaaagtagagagagaggaagagaaaagggctatggagaaaatcaagaaaaagttggaagaagactgggcagacagaaggcggagacttggattgcctccagagga

SEQ ID NO: 103940 - DNA, 225 bp, Glycine max
agacatgtctctccgtctcttgaagccattggacggaaaatcagaaacggcttgtcgcataccgtaattttgacaaacaagaaaaatccaaaactccgattaacggcgacaccacatttaccgttttgccagtatcagtgtgagacaccactctagggttcgttaaatcgtatccaatttaaaagatctccttcgaattttgcactattttcattttcgcaccag

SEQ ID NO: 103941 - DNA, 276 bp, Glycine max
aagggctcggcttgctaaagttcggtcataatcaagtttctaaccttgccgcctcttccttgtaccccggtatgttataagacagatgttgacaggtttgtagcctatttgttatatctatattgaaaatgacaattgataacactaatgggaaagataatataggaatgtgcagtttgtatgtaagttacccgaagttcttgaaagcgtgtcaagctattgtctttctttttaattttgataataagataataacacagaataacttcatccatg

SEQ ID NO: 103942 - DNA, 194 bp, Glycine max
gcagatttgtaggttatagttcatactttagtttctcactgtgaggagtttctgagacattagtaatagtgttacatacttacatgtttctacatgctagttttatttgtatgcttgtctattagacgttggtttcagtattgtaaattttgagaatattatttccgggagtattatttataatattttgtgct

SEQ ID NO: 103943 - DNA, 276 bp, Glycine max
gaagaaacttaaggacaaggtggttcaattcgcttccagtttccatataaacactcaaacccaatgctgattgaacatatggctccagccaagttaggtcagcattgggtttgagggcttatatggaaagagcaaaccaattgaagaaacttaaggacaaggtggttgctttggagattaacatgaagaggctcagaggggaacttgctgctgctgaaggagagttaggagttccaaggagtggcttttctgaagtgagaaaggcttcaatgagat

SEQ ID NO: 103944 - DNA, 267 bp, Glycine max
gtcatctgtaatatcaaagatgggatttctattcctagagcaaggctttcccaagctgttggttcctatgtgcatcatgatcagcgtgtgttgtagtggcacaggcatttactatcagacacgtggtctaaagcatgggagggctattgtagtttccacatgtgcagctgtggcctcagttttgactggtgttcttgctgggatgcatgctttgggtgcacgacttccttcggagccaaaagctcgcttggcacttctcttggatgg

SEQ ID NO: 103945 - DNA, 209 bp, Glycine max
tgcacagtagactcaaattcactgaaggttccgcaagcccctttttccagaacttgaggatggcacaaaacgcatcatttcagcagcagaaattcataatacctaacaagtatggctatacaatcagtggggatattacatgaatctggaaccaaagagattgttgtcctatgccatgggggtcgagcttccaaggaaaactttatcat

SEQ ID NO: 103946 - DNA, 151 bp, Glycine max
cataatgtaacctcagtgaatagtaatgatattaactcattgtatcattgtaactggtgagatgtaatgtttagtttgactataaatgtaatgtttacacaagttccctcaaaaaaaaaaaaaaaaaaaaaaaaaaaaaggggggcccccc

SEQ ID NO: 103947 - DNA, 150 bp, Glycine max
caggtacgctgagcatggaacacagaaccgtagaagtcaacgtgggttcagcaaaggatgtcaaagagttgaatatattgtcaaagatggatgtatatggtgtggtttcagtctgcggcgatgaaaagaccaagagtcccgtgcacacaa

SEQ ID NO: 103948 - DNA, 242 bp, Glycine max
gagcaacaccaacaacaaccaacaacaaccctaccaaggtggtggtggtggtcgtgccatgaattttgcttactcagcagcagcaagctatggtttgaactccaatgttgagttggtgcgttcttggtccaaagttcctcagtttctgagagcttcaccgccaaaacaacaacccaataatcagttgcatttcaccaacaacgcaccgcgttggaacgcgaattctgagcctgctattaagg

SEQ ID NO: 103949 - DNA, 166 bp, Glycine max
tttacttgatgatgcaatatcagatctcccacctgttacaaatgatgagaaccaggatgaaaggaactatggagctcctgctcgaactgagtttcacagatatattagattgaagacaaacgagatggtgggtagcatggctactgctcaaagcacaccacgtaga

SEQ ID NO: 103950 - DNA, 278 bp, Glycine max
gctcttttcttctcttcttcttcttcttctacccttcaatattaatattccgtgcaaaaaccaccaacaacaacatcaccaccaacaagaagaacaagattggcgttatgggtctcttcctttctaggaatttggcttgcaaattcatatacccttttcttttctccaagaaggtttccaaggatttgtttcccaagcagttggagaacatgatgtctctgatctctcctcgtactggcaggcatttgcagcgctatgacaatggctgtcgccaagtt

SEQ ID NO: 103951 - DNA, 139 bp, Glycine max
gcacctactgaagagaaacctgaaactccagttaatttctccaacgaacagcaacaacggcacattctaacaacagttgttcactatctgaaaccgaatatgagatggtgaaacacatcatcgacattccacacaacat

SEQ ID NO: 103952 - DNA, 277 bp, Glycine max
cgataacaagcggcgtaatttgtctacaacagtttcaaactaaacgcaaccattgtgtctctctcatatctctgtgttagggtttcaatccaatcgattctgtgttagggtttcaatccaatcgattcttgttctgttctattttatttttgttaagggtctggagtttggctcttaggctttataaacccagtgccttagagatgaatgcagcacccaataccaagccctatcaaccttttcactaacattcgctactctgttttttcaatgggtc

SEQ ID NO: 103953 - DNA, 162 bp, Glycine max
ctcgagccgcttttgttgaaccatacacaagtctctgcaaaaattataacacttagagggatttatggacctaagaaatgtaagttgatttggttcaaaaactacacaacagtttaccctgaagattgtgttttttatttggggattttttccccccaacaa

SEQ ID NO: 103954 - DNA, 248 bp, Glycine max
attattgaagagttgaagagaaacctgaaactacaatttcacccaaccaacaggtctacaacaatgatggcttagtttgatttaggtctctatgtactaaagttatgtgtttgctgaattagagaaagttgaagttgggttgctgcaacaatggcacatgctactaataacaatccttctgctgatgcttccttacctgaaaccaaatatattgatatggtgaaacatgtgatcaacattagagtcct

SEQ ID NO: 103955 - DNA, 242 bp, Glycine max
catctccccctgttgacacagaaaccccaatagaccaaggtcagcagatgaccaagaaaaagaggaagaagaaaaagaggattgtgatcataattgaagggacagaaaccaatgacctacgctttcacgcggcttgacaccgtgttcattggtttctgtcccttcaattatgatcacggtgtcaagccacctgaaaccctagttcaaaaatttgcatatcctacagtaacaacctcaataga

SEQ ID NO: 103956 - DNA, 254 bp, Glycine max
ggtcaatgcttcttcttctagttctattcatcaccatgaaatagaaatgggtcacctagatcatgatccgccacaaaatatcaatgagcccaactcaacccttgtgagttcaggttcgaatcaacacgagattgatattgaacacaagaaagaattttcttttgagaaaagatgactataagttttataagaagaaaatagtatatacacagatgatttaaagttttttttatactatcattcaattagaaatc

SEQ ID NO: 103957 - DNA, 247 bp, Glycine max
ggatctcagagagggtcaaactcaaccaatcttggatcctaaccaaccatctcatgtgtatcatctggctttggatattggagaaaatatgaattgatgattggtaccttgctgtccaactatcaatatcattaatgatattgtcaaacttctgcccggttttggtgaattgtgaagagaaattctgcttccacatcagcttgctctggcctaaaatagtattgcccacctgttgacaggatctctc

SEQ ID NO: 103958 - DNA, 178 bp, Glycine max
aaagtgtgctgtgaaatttgtaaggttgagtgcaatagtccagaaatcttgaagcaacacaaggttgggaggaaacatcagaagaatatgagggtgcatgaagaatcgcaaaggcgcaatgctataaatggacaacaaagtgggaaaattcctacctctcaattgaatttaacagacc

SEQ ID NO: 103959 - DNA, 276 bp, Glycine max
gctgacaatatttttaatgaacaagtcagcaagtttgaagatgatgatgtttcaaacgatcataatcaagccaaagaatcttgtaaccaagagagcactcccatgcctgaaagttcgtttcaaaggggaaaatgtcctggtgaaaatactttgaagaaggagttatggaccaagtttgaggtagcatccacttggggatgtcaacctaaggtacccacagttcaaaagagtgctcacaaagggtttcttgacctactggaagaagcttcctgtgat

SEQ ID NO: 103960 - DNA, 243 bp, Glycine max
gcatgatgaggctaactcttccaatgaagattttgttttcgtatacaagactcaaccagagaccctacttagagaaaatcaagcatgtactacttaaatcaatcaccggttggtcagtgcaatttttagtgcaaagttgactgatcacgatcatgttttggactctggtaatagagcatactgctgtatcgaatactggttttgggcatagcctcacttgtagtcacagtaagagggtgtaaa

SEQ ID NO: 103961 - DNA, 248 bp, Glycine max
ctccttccttctatttaccacctttacacttctccatccaaccttcttcctcctattttccttttcttttaaattctgcattttctttcacaattttcccaccccccccatcagaatagcatccgaatttcccagatcccagacacccagtaggaaagattaaaactttggcgtcttcatcgatcgccggtgaacgatgtgctgcggggggagagtttgcatgctttgcacgtgtttggttctggtgg

SEQ ID NO: 103962 - DNA, 247 bp, Glycine max
gggaaggcaaggagcaaaaggaagaggctttcagcaccaagaaccaacaaagaccctctaagcatatggtcacaccatttgaaccctcaaaatgaggccttgtgttctgaccctcctctaccaaacaggcttattggttggcagacagtgaactcatcatgccaaagccaaaggataaggaggagcaacaagaagaggttgtgatcatggccaaagaggatgaagaaaaagtgattattaatgtgag

SEQ ID NO: 103963 - DNA, 247 bp, Glycine max
ttcaacccaatccatctttttatatccacaccaccaaatccatcttccaatgcttcttcttccttcttcttatttcaatttcaatcactactacttcacgcttttgtttctccattttaaaccctaaatctatctatctaatagagataagatagggcaaaaacaaaaccctagccaaagaaaaaccttgttgagcagcaacagcagcagcagcagagagagaggactatggaaggagtaccgcacc

SEQ ID NO: 103964 - DNA, 161 bp, Glycine max
  unsure (1)..(161): unsure at all n locations
ttcagattgagaagaatggccaatacaacaactaaattactacaacacaacacaatctcttcactctttctataaaaccctgttcttgacaacacatcttcttcataacattcaacataanatcattactcctaattcccatcactttgaatcctctctct

SEQ ID NO: 103965 - DNA, 237 bp, Glycine max
gtgtaagacaacaaacctgggaaaatggtgttgaaagaagtcaaagcttatgggttcacctttcggatggtgttaacaacaatgataggagtccagggcaagaagcctgaaaggtaaggtaccatcatttgtctgttaggcttaaatggtagattaaaaggtactacttatttgtgttcatggatagttttttattattttgctcaatttattattattccttgtgtttgtttcaat

SEQ ID NO: 103966 - DNA, 251 bp, Glycine max
ctcgagccgtgcaaagtcttgcaatgtaataagctgtttgtcagaaacttctgacacccctttctctctctacccttctctctctcccactcttgcaacttacaatagaagtaaatggggcaactgcagaagcacttccgtgccgagcttacccttttcaaataccctttaacattatttttcatattcacactgaaaaaaggtaataacaaaagaagctttttttccttgagcatcacaatcggacacag

SEQ ID NO: 103967 - DNA, 272 bp, Glycine max
gcggagtgataaagcagcagaggttcgaacaagtgacaagaattcaacaatggactgcaatccagatgctggtgcagaggcaggcaatgtaaaaatctctggggtgaatgatttcctaaggcctttcttcaggatcttagctcaacctagttgtaaactgaaattgagcagaagtatctgtaagcaggtgttggaagaaagaaatgggacgctggatatgcaggctgcatcgactttgggtacatctgtgcgctgtgcagtgtttaaagcag

SEQ ID NO: 103968 - DNA, 277 bp, Glycine max
cgatgatgagcttgttcagattcatcaaccgacccaacaggtaaggtcccagccccagtccgaacaattgcaatcacaacccctgccacaatccccacgtgtattgcaacaacctcaaaatcctcaatatagccctcctcaacaacaatcacaacctcaatatagccctcctcaacaacatatgcaacctcataatgaaccgcaaccactacagtatcagccccagcaccaaacgctgcaatctcagcctcagccccaacccggacacattcaacaa

SEQ ID NO: 103969 - DNA, 153 bp, Glycine max
atcacactaaagtgtaatacgtcctaacctttaatcaccaagacaaagtctactatgtgttgattattaaaggttaggacttatcacactaaagtgtaatatttatacaggcatttttctgcttggaatatatcatataagtttcttgctttc

SEQ ID NO: 103970 - DNA, 267 bp, Glycine max
cttgaaaaaccaattttggctctctctatttctctttcttctctctcttctctttcatttcccctctcttgttggttcaaattactctctctctctctctctctctctctctaagttttaacccttatgaacatggatatgtgccaaaatgtatcagtttccggtgagtgccaacaagtgcaggtttttgccccttcttgctcaagcagccttgatgacctcttctctgctcagaacacggaagtggatgttgagttggagtggctt

SEQ ID NO: 103971 - DNA, 262 bp, Glycine max
cgacagacaggttgagcttctgaggcagttagtgagtggtataaaatttcacatagaggaagtcatcaatgtaaagaacactgatggaagaactgcatctcacattgccacaatagggaaaattcacactgatcttgttaagctcctgatgactgctccatcaataaatgtgaatgtgagtcatgctaattgcatgaccccacttgattaccttaagcaaagtcccaattcagcagcatcaaatgtgctaattagaaaattg

SEQ ID NO: 103972 - DNA, 257 bp, Glycine max
atcagtccagacagagaactgagagaagaccctcacttcctgtttggctcgacgaagacctcacttcgcccaacctccgtctccggcggcgtctcttatcctaacggctccttccctcaccgtcactgaaacggcgtccctgaactcgcaacactgccctccctctgactctgatttcgttcgaacttcgaactcattcccacttcgcagtcctcgccatgcttcgttgtcggcgactcctcgcagtggcaaacctc

SEQ ID NO: 103973 - DNA, 262 bp, Glycine max
caaaagcagaaagacaacaccagtatcggtgtactaagcctaataccaacaggggaaaaggctcacaatttcttcccttctgagagttacgaaaacaaagaaaagcagaaagacaacaccagtatcaatgtactaagcctaacaccaacaaaggagtctgacaaggatcctgctaatcatgatcagcccaaggatttgatgcacaaagatgaggatgcaactgaaaaagtttccagtaatgtcaacaaagagacgcctttac

SEQ ID NO: 103974 - DNA, 105 bp, Glycine max
aagtgagcaacaacaatgcttctagtttgtgttctgaactcccagaacatgctgtgaaactgctgctagagtcaatattcaataatacacggggagaggttgtgg

SEQ ID NO: 103975 - DNA, 271 bp, Glycine max
caaacccagaaagaatagaaccacctccaggaaaaaaattaaagatgttcagcgttaaggaattagttgattcgaatagtctgaggtctgttccatccaattacatttgcctaaataatcccgaagattccatattgtataatgacacagagaatattccaaccattgatttttcccaattcacctcttccaatcccaatgaacgatccaaggcaatccaacaactaggcaatgcttgccgcgattggggtttctttatgctaatcaatca

SEQ ID NO: 103976 - DNA, 269 bp, Glycine max
cgagcatttattgtggtgttactgcatcattaaatggattaattattaacatattaaatgcattgacagtttaattttttaaaacattaacaactcattataattaaatcaatttatatttgagattgttaagtggtcttctttatttggggattctgaatttggaattaagccttttgattatttctcattttaacaactaattcataattaagaatggaggaatgctgttgtactctctctctcgaaaattctatatttgattagaa

SEQ ID NO: 103977 - DNA, 261 bp, Glycine max
aataaaccttgttggcaggttgaagaagcctattgcaaaacagagacaaaaaaaaccatgtctctcaaggttctaacagtggtgtttttcctggcaacaatagtagtagccagtgattacactagtttcacctataatgggttccaatcttctcatttgtaccttgatggcagtgcctgagttcagccccaatggcatggttaagctcaccaatcacaccaagcaacaaaccggtcatgctttcttcccaagtccaatagt

SEQ ID NO: 103978 - DNA, 266 bp, Glycine max
cgtgagagagttcaaagagttaaacacggagaatctgaaaacactgtgcaatgctttggagaaaaaagtgccgtggcagaaagacataatacccgaaattgcgagcacccttttgcaatgccgttctggcatggtgagaagaaaagggacagtgatgagaaacagtgaagaagtgaaagaagagacgtggttgttcttccaaggtgttgatgttgaagccaaggagaaaatagcaagagaactagctagacttgtttttgggtccc

SEQ ID NO: 103979 - DNA, 263 bp, Glycine max
ctcttctcccatcttcttcactctcagcatgaaataataggcgtgcgttttcacccttcaaacaatgacgacaatggtggctcaacgcatcatcatcgtcactttcttcacgcttcttcttcttcaacacctaaccttcgccaccgctattgcactttgccaattctcttttctcgacggaaacacgctctacaattacaccctctcttctcccattcgcaacttccctcacggcatcctcagcgaagatggatttaacaaag

SEQ ID NO: 103980 - DNA, 272 bp, Glycine max
ttttcatgataatacaagtaaattacactattcttcgatgtacgttgacaaaaatctgataactattggaatttgtctattataaccgtttttcagaagtaaaaagggctgtttgaaaaaataataatattttggggcacttgctatatccatcccatcccttccctttcttctttttaaacttaaatcacttaaataatcttcttattctcatatcttcttctttcccacacgatcacacactcaataatgcactccttccatgtcaacaa

SEQ ID NO: 103981 - DNA, 118 bp, Glycine max
catctctcatggaggtggacgccgttgtcagtaccaagaatgtaataagggtgcacaagggagcactatgtattgcaaagcacatggtggtgggaaacgatgctcatttgcagggtgt

SEQ ID NO: 103982 - DNA, 146 bp, Glycine max
  unsure (1)..(146): unsure at all n locations
catcagcatgccttgtagggaatggattatctccacgcggtaacagactaantctcaagacggacttcaatcgaagctatccctactcaccttggagactttcatcattgaaccataaggcctcagcagcatcttccataaagtct

SEQ ID NO: 103983 - DNA, 199 bp, Glycine max
cggcgaatcatagggacactgctttcgtcctccgctccctgctctatgtcactatggcgaccctcatttccagggtttcggggccactctccaatgggtttctaaggttggccttgatggacgtgattgtgaatcccgtcgtgagattcaattacttcaacaacctcgttgacatggagcgatgcatgaatgggacgag

SEQ ID NO: 103984 - DNA, 138 bp, Glycine max
aataaccttgctcaaggccccttttgatagaatgtttgtgctaagtaagtagagatctgataagtttttcttagttgtattagagcatctttagttgaagatctttaggtgaagatccggtcttgtccacacaacata

SEQ ID NO: 103985 - DNA, 177 bp, Glycine max
gtttgaattgagatttaggagtttatttgagggagagggaaatggctaacaatgcagcagcctgtgctgagagagcaactagtgacatgctgattggtcctgactgggcaattaacatagagatatgctttatttatctattaagaaatgaccaggaaactagctgcttgattggcc

SEQ ID NO: 103986 - DNA, 171 bp, Glycine max
aattagtaaaataaaaaaaagttgggcccaaatcttgcgggttttttttatttgtttcccctttcagtttgagcagttatattgtgatgcagtgaaggtatttgtatttgttccccaaccgagtaacagaaaaggctgtgtccgttactcgggattggaagatggcgacgg

SEQ ID NO: 103987 - DNA, 252 bp, Glycine max
gtgagcctcactcatctcaacttgtctggtacgtactctgaaggggatattcctccccacatttctcacctttccaaattagtctcacttcatctctcatataatgggttaaagtggaaggaacacacttggaagagattgctccaaaatgcaacagttttaagggtgcttgtcttggatggaaatgatatgtcttccatttcaatcaggacactcaatatgtcttcctcttgggttactcttagtctagga

SEQ ID NO: 103988 - DNA, 215 bp, Glycine max
atgaaaattcatgtattcttagctcggaggttctagacttctcgcttcttttatgaggagtttttgtcaggaaagcatggtcagattgataggtggctgtcattatctctgggaaatagggataaagcactgatggaagatccaatgtatgaggaattctggcaaagggatgtggaagaatcaatcagacaaagaaatgtgaaacccctcatgga

SEQ ID NO: 103989 - DNA, 206 bp, Glycine max
tgagatagcatttgcactgaggtatcaaacagctggcatgttggagacagtattaaggcaaggtgttcttggagaagatgacactggtgaagaatcaccaagaaatctcaagctgtcctctcggcgaccttctgttgtatgtgagaattgcctgtactctctagagagagatatgcgagccagagcctttcacattttggagccaa

SEQ ID NO: 103990 - DNA, 218 bp, Glycine max
gtatcagaaaagacttacaaagaacatcctagaaaatttgctggaacgttttaaggtgacctttagtctagctgagaaggagcttttaccaaaataacaaaggaatcttcctggatttgacttaataaatattggagctagctgaaattctgttagcaaaaatgttatgtccattcacaggcttggactggagtttatgatgcatatcatatcataag

SEQ ID NO: 103991 - DNA, 222 bp, Glycine max
atgatgataagtatgtgcgcacttctcgaatatactctttggctaatgatcagcttcaacattggatgactgaattggcccgatataaaacatcggtagaatctctgcaggctggcagtgttcatgttgcaaaatgggagaatgaactaaatttgaaattggagtctgctgatagtgcaaggcagatccttggcaattctgaccataggattgatgacctag

SEQ ID NO: 103992 - DNA, 259 bp, Glycine max
tataaggactggttgtttcaatgcaaatttccgcatgggctggttgaagaaatcattgcatcttttgcatctatgccccatacatcatctgcccttgctctgtggttagtgaagctagatgccataattgctccctacctggacagagtccatcttcagaagaaacagggaaccagtcagcatggtccttggcgatagtgtacttacggtttgttgaagtgtatgcgtatattggaactgaaatgaaagaactacctat

SEQ ID NO: 103993 - DNA, 141 bp, Glycine max
aaacttgtggatcaattgcatattaaggctaatcattctgatcctgacgataatttaaatgccctcctgaaggaagaggaagatctcgtaactgctcaccggagacaggtggaggaaacaatagacattgttagggagaag

SEQ ID NO: 103994 - DNA, 104 bp, Glycine max
atggtaattcatcgccacggcagattaccagcagtctcagtcatcacagatggaactaagcttgtttaacaaggaccagccaggatcgataatcagatattctg

SEQ ID NO: 103995 - DNA, 126 bp, Glycine max
gtccgtagcattacgattctcattcgtcagtaatttcatgacaagtcataatgtaatatacaattagtgttttacattttgtctttcattattttgaaaacaagaaatgtccaaagatacctgttg

SEQ ID NO: 103996 - DNA, 256 bp, Glycine max
gtctcctagtgatgttggttcgcatttcaacagtaatgcgaatgagccatttgctgttaatcatgctggccttcctggtgctgataaatccgagagagaaactcaaagtgatgaaacacctgcactgaagccctgctacagtaatgtcattccacctccatatgttaaacatcccaattctaagcagcagagcagcacacgtggagccaatatcatatcttcacttactgacagtggcggcatctctacatatcat

SEQ ID NO: 103997 - DNA, 245 bp, Glycine max
ctcaagtgtgctacaattctgcaacaactggcagcaatttgcactttaactgaaagaacaacgtggaaggctatactttgctggcaaactctccatggctggctgcatgcagcggttcaggctcttccttctgagtaccttacacatggagaagcagaggccatagtgccactttggtccaaggctctagctgatgcagcctctgattatcttgagagcaagaactctgatggattaaagagtga

SEQ ID NO: 103998 - DNA, 268 bp, Glycine max
ggaaaaacaagagaagatattgagaacttcataaatgaaggtgtttatcaagtagacaagctgaaagaagagggactcatatcaaatataaactatgatgatgaggatgtgaatacatctcaagcaaagacggttaaaaggataagaaacattaaatgttttgcagattactgccatgttgaaggagagacttggagtgaaatcagataaagatctgcgtatggtggattacaggaaatactctagagttaggaaatggactgttgga

SEQ ID NO: 103999 - DNA, 269 bp, Glycine max
ataggcatctatctccatactctgacagacacacaaaatttgagagataaaaaaccatcatcacaagagagtcacatgagaattgaaatggccacaaaacaagttacttctatggttcatgtagatgatgactacattgacatggaactatgttcctccccaaacttcttctcttattcccttagctctccaccatccaacagagagtttgaattccaaatgagtgaaaaagagtcatcaacttctccagctgatgatctcttctacaa

SEQ ID NO: 104000 - DNA, 254 bp, Glycine max
gtcaaggatccaggaggggaagagagaaatgcccctgccaataagcttgacaataatgtaccgccaaacagcaaagaactctgtgaccctgcaatggaatttgctgctgtttcttcaccattgaaagagaatcacaacccagataagggaagcagtcatgatactgatcttaataaaacaccacaacaaaaaccaaggagaagaaagcaccgtcccaaggtcatcaaagaaggcaaacccaaaagaactcggaa

SEQ ID NO: 104001 - DNA, 156 bp, Glycine max
ccccttcacctcccaattcccatgacaggtgtctgtttgccttgttcctgatttaagccataatagccacagagagagagagagagagagagagaaggcatgagaaaatgaatgatcttcatcatcattcccttccccatgtgatgtgccacccct

SEQ ID NO: 104002 - DNA, 171 bp, Glycine max
cgatgacacacaatacgtgagttctggtccctcttcttcctctagctagatagcgcgtggaacaaaacaaaaacctcatcatccatataaactcacactcctatcaccacctctatcacaatctctctgatcactactctctgttctcaagaacaaaacaaaagaagaaag

SEQ ID NO: 104003 - DNA, 156 bp, Glycine max
gttttcagtctgagccagagacatggaaattccagaatctcttagattcaatggacacgtggtggccatgccattcccaagtcgaggacacgtgaactgcatgatgaacctctgcaaactactcgcggcagcatcttcatcttctcccttcatcat

SEQ ID NO: 104004 - DNA, 199 bp, Glycine max
tcgagcctcttctctcctctcctctctttttttaactttgtatcacttcttctctcatccatccaacccttcttctccattctaagaaagctggtttcgttatctatacgtttggattccggcaaattgtgcctttgaccaagtaccaaagaagaccccagttttcaacttcaaggtgtagattgtctaaaactttctt

SEQ ID NO: 104005 - DNA, 190 bp, Glycine max
tttttcgttgcagaggttcgtgaatttgacaagtttaattttggacgagtgtgatagtttaagagagataccacatgtatcttgtctcccaaatttgaaaaaattgtcatttgacgagtgtcggaatttatttacaattgagcattcagttggtttattggaaaagcttaaaatcttgaatgctaaaggt

SEQ ID NO: 104006 - DNA, 134 bp, Glycine max
attcgtcattgccgcaaatgaattccgtcgcttctcatgcatgatcgcaccttcaactctcttcttcttcaccatgcgtttacctccaggttttggcgctgtggagttcgttttgtagcatcaccttatcatca

SEQ ID NO: 104007 - DNA, 203 bp, Glycine max
ggctcgagtgatatagagattcgggtttggaattgaatttcgtttcaggtttcggatatactttggattcatggattccttaagaagattgtgatttggtgttaggttagaattgtgcaaagattcttctgatttcgatgtactcaaaggaggagagaatagggggcattatataagctatgccgacatttactgcaatagca

SEQ ID NO: 104008 - DNA, 146 bp, Glycine max
atttgtacctatataatctcactcttctctctgccatagaataagtgtgtggttggtttcacggctaaaagtatcagaattgattttctattccatcatttcttttttgggtaagcctattccgtcatatgtaatcttaaacttca

SEQ ID NO: 104009 - DNA, 152 bp, Glycine max
tagccaagactctgaagctcggtattaaacttgagtagtaactcccaggcagagccatatctgtctcatctagcacaatggcttcttggtgttaaaaatgaaaaaactggtttatgatgggttttaacttggatttaagcaattgtgtacaa

SEQ ID NO: 104010 - DNA, 108 bp, Glycine max
cgggcatgtccattgggaatgagatattgggaggaggagatatggagctttgggaagttttggtgcctgcagctaaaaatgtgtatgctgcccttcaaaggcttaact

SEQ ID NO: 104011 - DNA, 141 bp, Glycine max
gtcttattttgtgaattatatgtctcctgccttagcaaaatgattatgacttatgagatgaatgaccagaatcctgtgctgttttgatttaaggtattctacaaactcatcctgcattggcatatattcaagactgctcag

SEQ ID NO: 104012 - DNA, 146 bp, Glycine max
ctccatttacatcagacagatctaatttgtcgcagcctgctgcaagcaaaggatcttactcgcaggttgggctttcttatgatgggaatggaaaagaagaaacccatatttcagatgatgacgataatgataacgaggaggaagaa

SEQ ID NO: 104013 - DNA, 250 bp, Glycine max
tattaacaacattactaaataatattaatataattagtataaaaaaatactaatatttacgtgttatcctaaaatcatattcttcttcttgaacgtcaatccgatcagattctcaagtcaatggttttcttgatttagggtttcttcaaagtacacaaagtaagcttctttggaatcctagtttttttcgttctctcagcctatgttgatatgctcgagaaaaggaattttctttgtgtgatgggtacat

SEQ ID NO: 104014 - DNA, 263 bp, Glycine max
tttttaattctactagtctagcgattgtttgatgtttctagtttatttcttaaaataaattcttgacgttgtgtacgtttggttttctaagatgtggggtctagggtttttactttcttaagggtagtaccatttgcgactttacatccctttaggcataaagggagttgaataattttctaattttgatagccaagggcaagtctttcatggctaggatctccagtttcttgcagaaatgaatacttattttaggatggatg

SEQ ID NO: 104015 - DNA, 255 bp, Glycine max
ggagaagaatcagttccattaaccccaatgaatccagtggttacaatcctgtatttataaactgatcagttagaacaactaactaactctaactgacttagtaactaactcttaactaaataagctaacctaactcaggttataaactacccaggactgcagtagaataactgcatgtcctttacagtactcaataattccaaaatgcccatagtagtgtttctatttttagaccttattggagcataggacagc

SEQ ID NO: 104016 - DNA, 138 bp, Glycine max
tctcttatgcatatctgtctctggattctgctgattggaaaggcctttctttcactctggccgctatactaaactcaaactattctcgtacctctatgagggtgtggggtgacaaagagcgtgtgatttggctttgtg

SEQ ID NO: 104017 - DNA, 268 bp, Glycine max
ctcgagccgcaaatcacacatacacacactcaaatacatacactagtagtgtggtgtgtgcccttcctttatccttttgctttttgtgtgcaattaacacacactcacacaaaaatgacggcatgccaagattggccagagccagtgattcgagtccaagccttggctgcaagtggcttagccacaatccccgaacgtttcataaagcctaagtcccaaagacccactaatagtaacaattatgctccaccgaccaattcctctcaaa

SEQ ID NO: 104018 - DNA, 223 bp, Glycine max
  unsure (1)..(223): unsure at all n locations
tttctttctcttccaactgctgaactttgcctcttccttcttcttcttcccatggcttcaacaccgcattccctatcancctagagcatactcttcaccgctcaatttctgattctttgttactctctccgtttccgttgccacaccatgaacgtcacccttgttgattccgcgctcttcgcgtttctcttcccctcgctgtgggagatcgaagtcgccgtcg

SEQ ID NO: 104019 - DNA, 258 bp, Glycine max
atctttttcttcaaattcccgtgaagagacactcagaaagatgaggttatcgttgaggcatgctttggtgtttgtgctaatcggggcgttgtggaacttgcaaagggcagagggtatccgatttgtgatagacagagacgagtgtttctcccatgatgtgaagtacgagggtgacactgttcatgtctctttcgttgttattaaggctgattctccctggcattacggcgacgaaggtgtcgatctcgtggtaaaggg

SEQ ID NO: 104020 - DNA, 268 bp, Glycine max
ctcgagccgtcacggtctccatcaagcagtaataacatgtcaaaatcaaacagaaaaaccaacacatcagatttggttgcacgtagaccctgataagatgtgcacaagaaaatccaaggaggagaaaaaccaaaagaacgcaagacaaaaagaccttcagtagctgccagaaaggctaaagcaaacttggtcaagcagagtgatctaccaaaacaagcagggatgaaacgcaaggttgatagtcgtactccagacagcaccctacgta

SEQ ID NO: 104021 - DNA, 206 bp, Glycine max
gcagccccagagcctgaaatgatacaaatatataatgatagtgacaaagtgacaatagaatggcttgtaacatgaaatctgcatcctaggattcttgttgttgttgttctactcgtccaagactgagttaggagtggaagcattttgatcttgtgaattttgagcttttctgagagcctctctgagacccaagacaatgaacaagt

SEQ ID NO: 104022 - DNA, 208 bp, Glycine max
ctcgaccgttttgtgggtatctgaacctgagatttctgcccctaatggagtagaaactgcaaatgtggcaatcaaagaaagagtctctgggtttctgagcgaaagtcaatcaagggtgatgtttaccaaatttctagatcagatttcaaaacttttggtggattctccattatatgaacaattcaatgaggtaaggggaaagctttca

SEQ ID NO: 104023 - DNA, 196 bp, Glycine max
gtgaattgtgaactagaaatgaatcaaaattcgttccccaattagcttctgggtttttaatgtcacttttgtaactgaagagcactcggtggctcattgaagagtagaaggatttttcttaacaaggcctttctgaaggcatcaactagcatgcttgggttctgtcacctttaattgccaatagcggagaccagag

SEQ ID NO: 104024 - DNA, 212 bp, Glycine max
acggctcggttatcttacgccgggagggagtgtagtggtccttgctcattcggttttgagttggccgcaagcaccaacatgtatgtctttacttaatatcatgccatgcatgatatgatctttttttttttgttttttatgagaggggtgggtattttcttttgtaactcactcaatgtgatgcatgcctttttgtacagaagtatttatta

SEQ ID NO: 104025 - DNA, 115 bp, Glycine max
cgatcagataaattttacgacaaggaaatttattagcattgtcttggtcagaactgtgaagacactacacctgctgtggcttgtggtagaagagatccagcggtgatgaagtgac

SEQ ID NO: 104026 - DNA, 185 bp, Glycine max
gcaaggagttgggttcacagcaaatgttgcacccgaatcaggtgccattaaactcgatcatctccaatcaaagcaagaaagcttcaaacaccaaaacacttctccaaccgagatctcaacaaactcttcaatgtctccaatgggagggtcccttcaatccccctcgggtttccatcttgcaggat

SEQ ID NO: 104027 - DNA, 106 bp, Glycine max
atggtttgtcatcacacgttttcttgagtaacctcaacacttctcagagaaaaaaccgtccactctctgacgacaacagtgataagtgtctcccactaccatccat

SEQ ID NO: 104028 - DNA, 192 bp, Glycine max
taaaaacaagtctgattttttctaattccataaacaaatcctacgaccttgtattttgatttgcagtgtaaaaaccccttcgggataaagaagtgtataactggaaattatatgcacacttttctgcacatccatcatggaaagtgaatatgctgtctttgttcaaaaaaaaaaaaaaaagggcggccgccg

SEQ ID NO: 104029 - DNA, 128 bp, Glycine max
aaatcataatgctaatttaatgggaacattaccatctcccgataaggtaaatcataatgctcttgtaatgtccattaacaatatagacattgttatccaaacaaggaaaggaaattcgctctacgatc

SEQ ID NO: 104030 - DNA, 273 bp, Glycine max
ataaattaagcttatatatatttacactatatattgccactttacgtttgtgtgatattaattatacagtcaagtatttatatagctctttaaccataattccctggatacaacatgtatactagtgtatacaccatattcaaagatagctcatgaatacttgaatatggtgtatacactagtatacatgttgtatccagggaattatggttaaagagctatataaattgagaaataatgatgttctagagtgacaaaaaaaaaaaagggggg

SEQ ID NO: 104031 - DNA, 261 bp, Glycine max
gtgcttgccaattttgacattgatcttggaattccttttggttctgtgctcaacgatgctgttcgttttagctatgccgcacatcttgtgcttgtatttccagttgtcttctatgcagtgcggatcaaccttgatggtctcatatttccatcatctaggcctttggttctagataacttcagatttgcatcaattactatggtccttattgttgcttcctttttgggagcaaatttcatacccagcatctgggatatattc

SEQ ID NO: 104032 - DNA, 255 bp, Glycine max
tcatgatcggcatttaaaaaaaaaaagcagtgttatttcatggacatgcttatttcattgtctgtgtacccacagagaatatgtgcaagtactacagtgcaataatcacttccagaaaggatgctaaaaactaagaatccatacttcaatatgacttggcaaatgagcgaatcatatcatatgaggaattggaggggacttgaaattgtgtgatacacggatgaattggtgtgattgcatataactgacatgaac

SEQ ID NO: 104033 - DNA, 244 bp, Glycine max
gtgactggaactgaagaccagccatccaatgaagatgatctccccaaccacattcccgtgatgccaattgagattcaaaatcaagttgtgcaacatgcctcaaattcagaccggcaggaaggagtgtgtagaacatgacagaaaacagtttgtccctagagactccagtatctagaccagttgatgatctcatgttgcctctagaacaagtgcagccattatcatctgtagagtctcctcctga

SEQ ID NO: 104034 - DNA, 248 bp, Glycine max
gtaagctgcaacgaaggaagagcagagaaatggcggttgggcaacttgttcctccgaatttcttcctcaatcattctgctgctacaacactcatacccacttccactccccccagacaccgacaccttctctgtatttcttctgccaatcacacaaccgcaaccgctaacgattctccattctcaagtttcggaagagtgaagactctcctggtccacagaagaagaaaggaccaaagccatagacgc

SEQ ID NO: 104035 - DNA, 232 bp, Glycine max
ttggattctaaccatatccattcttccaaatcccatccaagtttccatcacttaaccgacacagtcaatgaactcaatgatacacaagttttgcttcagcactcaacctagatcagaatctagagttgaggatagtaactactaaccagtgtctagttaatctctctctcttgattggatataacttaatcaagctattgtatttattgaattcttcttcctgcaatgccag

SEQ ID NO: 104036 - DNA, 239 bp, Glycine max
ctttttacttattcctgtcacttcatttatctctttgttcactgacgtatgtcaactgtatgttgtctgacggttattaggttggttgtttagaatgacaatgtataccttgagctaggcaagacgtatattgtatttaatatatgccctttaggttacccgtgcattttattttatcagttctcaatgtctaacctcaactggctgatcgaattagtgatacttttgtacattgagat

SEQ ID NO: 104037 - DNA, 239 bp, Glycine max
tgtgaatcagcaccacattcacctgagctttttgtgaggattccaaagcatggcttcccttgcagcatccactgctgctgcttcccttggcatgtcagacatgcttggaaaccccatcaacctcagtggtgccacaaggccagctccatctgcctctagccctgcctccttcaagactgtggctcttttctccaaaaagaaggctgcacctccaaaaacagctgcagctgctgctcctg

SEQ ID NO: 104038 - DNA, 236 bp, Glycine max
agaaccaaccgttgaaacaaaacgtgtgactgttgttgttgttgcacgaattgtccaagttaagaagattgccaaatcctcaaaaatggagatgttgcctttggaaatctgtatgaagatattctgtctcttggactaccagcatcttgctgttgctcaacaagtatgtagaaagtggaagctcgtagcgtcagacaatactctatggtctaacctttttaaggaaagatggggag

SEQ ID NO: 104039 - DNA, 195 bp, Glycine max
agaatatgcagctcagccattcatccaaaagagtgagcttttgaagtacataaatgatacatgtttggcaaagatgggtggacaatactctggattttcttctgtacctacgtcatcaaacttttctgaccaaaagaattacttgtacttgagtgctggggccttaaagagctcctattcttcataagcatcatc

SEQ ID NO: 104040 - DNA, 194 bp, Glycine max
agaagaacaaaattccttgagacgagcattgaaacaatacacccctcgcattgaagtagacctaataaactatctgcaaaacaagaaagagcaacaacgttctaagtcttcctatgatccatctgatgttgtgggaacatcctctgaagatggatatgttggttactctaggaaagctcataactttggtaaga

SEQ ID NO: 104041 - DNA, 228 bp, Glycine max
acaaaatgtctttcactgcaactaagtttgcaccttctcctctccctctcaattccaccacccccagatccaatgacaagcctctctctttctccttcgatcactccaagcccaacccttcttcctctttccttggatccactcgcaagcttcttcgcttcaatgctctcgctaaacctcatgctcacacacgtgcttcttcttcccctgttgctgctgttcttctcg

SEQ ID NO: 104042 - DNA, 177 bp, Glycine max
atctaaccaaacttgaggttcttgatttgtctcagaatccatacttggtgagtgagattcctgaggacattggtgagcttggaaatctaaagcaacttctgttgcaaagctcttcttttcaaggtgtaattccagaatctctggtgggccttgtcagcttgacccatttggatctct

SEQ ID NO: 104043 - DNA, 239 bp, Glycine max
tatatcttttgtttcattgaagcggctgaagtagacaataaaatgattgttggtggttcagttaacccttaaaacagtacaaaattgtcagctgctttattacgaggtacgcattctagttgccattccaatatgttcttagatcttaccctcaccaattccattatgctcttttccttcttcacacggatgcgccctttattatttgatttaggtgatacaacacatatagatttttt

SEQ ID NO: 104044 - DNA, 126 bp, Glycine max
cttccacttgaatgtggttagatcctgaagcttctcccagtcatttcaactctactgtccggctatccgtaagatactggacacagaagaaatgaaatgactgggagaagcttcaggatcttacgg

SEQ ID NO: 104045 - DNA, 275 bp, Glycine max
ccatttcttagtttcaaaaaattttctttttctctccacagacccctctcatggcatcttcttctggtagtttagacacctctgcaagtgcaaactccttcaccaacttcaccttctccacacaccctttcatgaccacttctttctctgacctccttgcttctcccttggacaacaacaagccaccacagggtggtttgtctgagagaactggctctggtgttcccaaaagtgtaaatcaggaggggatgaatatgatgaagatgaacctgatg

SEQ ID NO: 104046 - DNA, 268 bp, Glycine max
agagaccaagagacagagagaaagagagaacaaacaaggagcttctgtttctagcttctagcaaccttcttagttcaacaacacaaagtcagcaaaatctataagcctttgtacttagctcagacaactgatttggttagccatgaacaacagtgttcctgattggacttttgggattgcttcctgtgtcaccaccaccaatcaaaagacgcccatgataggggtggaccaagagcttgtagagcttcagtggcaaaatggccaggta

SEQ ID NO: 104047 - DNA, 129 bp, Glycine max
agagacttaaacaaatattccattcaaatcccgtcgtctttatttcgttgctcatcagatctcatataaaacactaaactgtcaaacacacgctctctctttcgcctgaaattttcttcttccttttcg

SEQ ID NO: 104048 - DNA, 149 bp, Glycine max
ctagttgtaacacggatagtgtgatactatggcatgagatgagagcaacctagttacaagggaaaaaggggtccaaaatcctaagacaagtcgcactcatctcatggctttgtatcaaactatcctagtctgtaacaaggatttggttt

SEQ ID NO: 104049 - DNA, 261 bp, Glycine max
cttcactactagttttcccacatgctttaactagcgcttttttttctttctattttcattatccaatggcttcttctattcctctttatcaaccaaccaacaccttattctccaacacccagttcaaaggttcgcgccgtggcttcttgtggcgacccagttactcgtttggctctcgtgctgaaaacagagcacgacccatcaaagcttcggttggtgcaccaccatttcccctgtttaagcctccccaagttgaagaaa

SEQ ID NO: 104050 - DNA, 260 bp, Glycine max
ctcttcttcttcccaggaactctatattgcctacacaaactacccttctcttatttcttttttcctttcaatctcattattattctttttgattcatttagctgatatggagttaaagaaaatgaaagttacaggtggctaaggcttggcaagttctatggcctactctggtgtgactttacattttttgctaatgaatattattggtaaatttctattttcaactttgaaatataataaattttttcctctaattcata

SEQ ID NO: 104051 - DNA, 187 bp, Glycine max
gttttccttcatttatagtcatagccaatgcttattatcttgcttggacctgttcttaaatctctactacattctgttcattaatttttgcagtttgcacaaccacctctgtttaaaacaattcagatggtcaaaagacatttaagctcatacgaggtcttccattggattctttatatgaacaagt

SEQ ID NO: 104052 - DNA, 179 bp, Glycine max
cctcgagccgaatcggctcgacgtcctgcatgtttctttttgggaccttggaaatgtagcactttgtatacgtggaaggacagactatgtctgtgtctgtggtactatttcactagattctgccagacatcgcgtttcacgcataagatcgtaacttatcgtgctgtaatacatgcaag

SEQ ID NO: 104053 - DNA, 186 bp, Glycine max
ctagtaccgtagaatagaaaatgtaggctactcgttaatattacatacaaatgacatgtaaaatcacaagggcaattacatgtcatttgtttaccatattaaccagtaccgtagaatagaaaatgtaggctacttgagcactttttgtttagaacttagtattgcaagtgctgttaagaatcctgc

SEQ ID NO: 104054 - DNA, 279 bp, Glycine max
cgtttgctgctactagagggcttcttcccatgtgatcttcttgtattagcaaacttcagagacttgttgatgttaaagctagtttctttgacttcactgtggattttaatcatgacgatatagggcctcccacaccttgttccccatgtctaagtgaaggctgtagtgaaatctcctctagcaagttagattaggatttaggagtagaagtgtagaacagtgcatgctttgtttattttcctcaatttatgagatagatcaagaagcctctaaagcaca

SEQ ID NO: 104055 - DNA, 177 bp, Glycine max
cattacaattacaatgaaatataagtggttgggtccgcaactatttaattttcttgtctggtatgcgccagtatttttttccctcaacacgatagaatattttttcttacctctctctatatatagatgtataaacaaaagctacagaacatttataaaaaatcacttttatgtttc

SEQ ID NO: 104056 - DNA, 260 bp, Glycine max
atcgcatcgcatctgcaacaagcacaacatcgattgccgacgatgagacttcattttctagttgattgaattttattggaagccatggattgttcatcatggattaacacttccttggatctcaacattaatccccgcagagttcatgaagaagttcacatggcggtagatcgcaaccgattcctgggcatgggcatggacagatatcagattaacctctcctcagctctgcagacaagccctctacaaactcgcttcaa

SEQ ID NO: 104057 - DNA, 189 bp, Glycine max
aaaaaaaacacaaacaaaacaaaaccatatatacaatcaaacgagttgctagcttcttcgatcgattgacctcgtttgcgttcagtttcttattagatccttattacctgaaataataattactattcacaagttggacttgtggaataaatttctccacataaataatttttctgggatattattgtg

SEQ ID NO: 104058 - DNA, 243 bp, Glycine max
taggaagcaattaagatactgcgcggcaattggcttcgtgcaattgaacaacaccatatacagtattcggaatcatttgtgatcaatgacattctagatattggatgctctattggtataagcacaagatatcttgcggacaagtaccccacagccaaagtcaccgggctagattgtcaccatattttctagctgtggctcagcataaggaaaagagtgcaccacctagaaaatttcctataa

SEQ ID NO: 104059 - DNA, 238 bp, Glycine max
gttactattttttttaaaaaaacttaaaaagtttcaatttttattttaattttctctattattattggtgctgttactattaattaatttctggggctaaattgagagaactgtgtgtgtgtgtgagaaaaagagagagcgtaagagagaaaaagaggaatcaagatagctctttgaattttctatcagaatctgaggacccaaaatctagggttttctgttcttctctggggatctg

SEQ ID NO: 104060 - DNA, 237 bp, Glycine max
tacaaaattggctttcctgcagctatccttaatttgttttggggagtcctagtttggaaaaggaaggcagaagaagcactgctggccagtggacttccatacacaatagtgagtcctggaggtatggaacggcctactgatgcttttaaggaaactcataatataaccctatcaacggaagatactttatttgggggtctggtgtcaaaccttcagattgctgaactcttggcagtc

SEQ ID NO: 104061 - DNA, 236 bp, Glycine max
gcagttctatgaaagttatcagatggattgattgttagactaactttgatcacacatcagaattggtcttatttttttagtcaataccgatttaccataactagtcttgaatgttgaatgccctatctaatcatttctggtagagggtatataatttcctttattaacgggccccttaatattaatggaaaagagtatctgattattcaatactccccatcatgcatctttgcaga

SEQ ID NO: 104062 - DNA, 250 bp, Glycine max
gtgattgcggaaagcaaaaacatttggcgtctgaggcgcaccaacggaggccactcgaggggttctcggggtgcccttctgtgactgagttgttaacaattctgggtctcagtgaaaaatctctgctttcaaatgagggaacttcccagattgatgatgacctttcggatttgcacgtgtggagtgctccttctattaatggtcttgaagatttgatcactaccacagcttcttctcaaaaggtgtgtgt

SEQ ID NO: 104063 - DNA, 249 bp, Glycine max
ttcaaattgattcttaagtttcctgtacttggactgaagggagctccctttttcttttgaatcttctcttttcctttcttctattttgcacatgacaagcattatatcatttctcatctctatttaaagtagtatatcacataactcatttttgtatcttctctcttcctttcttctattttgcacatgacaaactttatatcatttttcatctctatttaaggtagtatatcacataactcataactc

SEQ ID NO: 104064 - DNA, 235 bp, Glycine max
cctcctttagcagagtggatgagtgggtgaaagatctcgaaattcagcagccacctcctgaggatgattttgatgatgacaatattggaaccattgccttcccaccttctcctgatgctatcccacaattcatagcatcctcaagcacagctcagtctgttcgacatccagatgccaatctttcaaaagagatattgaatgccaatagtgtggttcagtccctgaacccagcctc

SEQ ID NO: 104065 - DNA, 253 bp, Glycine max
ttaatttactatattcatttttgaaaaacgatgttattatcttcattttctatcatatgcacactcaatcacaagtctgcatgccttttatatagaaactaattctatcagttaacttacattcccatgttaaatacaatattttcaaggtccaaatgaaggaggtagaaaagagaaattctctcataatcatgaacacggagcagtgattagtgcatgctccaagaattagttagtagcctaaaattgatgt

SEQ ID NO: 104066 - DNA, 137 bp, Glycine max
gaggttgggccagaagaagagacaactatggttgagaaccgggaaaacaacaacagcgactcaagaagatcactcactcttcatttcatttcagtaatggctacccaaacccaaacacacacacatccaaacaccac

SEQ ID NO: 104067 - DNA, 104 bp, Glycine max
ataactttgaactgtgtggcagtgtgggaattcattatagcattttgttcgttcttgtgtagaagtttaagtcatttgcaatatcatacgtcttgaaaaatttg

SEQ ID NO: 104068 - DNA, 241 bp, Glycine max
gtcagatgaaggcagcaggtacagtaatgacaagaagcaagattgcgatctttaagtggttgtcaaatgtgcagagaaattgaggttcttcgtagtcatgggagatgatgtgggtttcaaatagggttggatttgatcactcttggactatcatttgagtgaatcaaaactgaaccagaatttagtcaactcacacgtgttgtctcttaatcctctgcgtgaaccgcggttcaatattttt

SEQ ID NO: 104069 - DNA, 248 bp, Glycine max
tcatcacttttgtctgcattacacctgagcctcagatctcatctcttatccacaaaacaaacgatacaaaggtgaccatcatgaaactcaaggttgatcttgagtgctgaatatgctacaagaaggctgagcgacttctcgacaagtatcctcaaatcggagatcagaagcacgatgcgaaggattctcgtctgcgcacaacatcagtgcgcaattccgcttctctgctcagcactcagttgattttc

SEQ ID NO: 104070 - DNA, 246 bp, Glycine max
gtaaaggatagaagtggagagattgttccttaccatcctccatttaatttgggtcctgaaaagggttccacttcagtgcgccgttggagggatggtagcttggagaatgatttacctatgatgcagttgaaagagttgttcaacgtcaatcactttatagttagtcaggccaatcctcatattgcaccattattgagattgaaagaatttgtacgagcttatggaggtaattttgcagcaaagctt

SEQ ID NO: 104071 - DNA, 204 bp, Glycine max
cctaaactggaccccaccgatcttgcgccaccacaacaaccacttgacactgaatctcgcgctcccatttccgaagatgctgccactactatgcccatagactccaatccctatgtcactcctgctcccgtcactgcttcttctactaagactactttagattcggtgaacgacgttctcgggtaatgggggaagaaagccgcc

SEQ ID NO: 104072 - DNA, 246 bp, Glycine max
gtgcttacttatactaattcgttttgcttggcgccgtttttattctctcaacaaagacgcgacaacggttacgaggatctagaaacaaaaaagaccggataacgagagcggcggctggaggcaccgtgcgacgccgttatctccgtcgagcatcagcacctgttttccatcaaccgctgaattctcgtctgcgttcaccttcacttctcaattccgcttctctgctcagcactcatttgattttcg

SEQ ID NO: 104073 - DNA, 251 bp, Glycine max
ctctgctattctggagtggtcatggcaaattggcgaggcagatgacgttgttgatggcgttttgtgattatattgggaactgcacaaaggatgtggtttcagctccaagacctgcttctccacctgtcaagagagtaatgccacaaaagatgaagaggataatgcgttagaatatggattgccttcttctcacacacttaacacagtttgcttatctggctaccttttgcgctatgtcctgactcatactc

SEQ ID NO: 104074 - DNA, 253 bp, Glycine max
gtgaatgggaagaaggatagaatggtaaaaacagaattatgttttataaatggcaaatgcttgattacaatttgatttgaattatgcctaagttgatacattttttccctctattcttttccttttttattgcttgtaaagttctagtctagctttttaactgtagcattatagttgttgggctctgttgaactgtttggtaattgtaagctgcctttaatatttccccccctaaaagaacagctttaataat

SEQ ID NO: 104075 - DNA, 252 bp, Glycine max
gagagggctaagaagaagaagtaggaggaagaaaaggggaaaacgcaaagaaaaaaagaggaagatagatcaagatctcccttgcgtttgtctcagttgaagaaattcaagagcagaacgagactaactcaacggttcagacgtttcagggtttcagcacttccattttttttttttccggatttgagttggaagaagatcaaagaggttcctagttgcttggattgttcctctgggtggtggagatttgtg

SEQ ID NO: 104076 - DNA, 178 bp, Glycine max
catttttcttcagcatttatatataaagtgaataatctcccatcccttttagccacgcccacttgaatttcctcatcgcatcagcatcgaacacagcacatccttcaacgactcaaataacagcctctcttcacacgaagcctcccttcagttccttccctcaactcacactctcaat

SEQ ID NO: 104077 - DNA, 241 bp, Glycine max
ctcattttaattctcaaatccaagcttgggagacagagacagtgaaagtgcattgacgccattgattctgagctcgatccgctgagagtattcgcaaagggcagcgtgtgggccgtgaagtgctgttactaccctatcgtaaggatgtcttcaaggctgctgtgtggactgctattggctccgtcgatatgggcatcgtcggttcctccgtcgaggtcatcatcataccctataataacat

SEQ ID NO: 104078 - DNA, 238 bp, Glycine max
gtgcaatatatgctagatttgaacacttacagagatcaacttgtcaggtatatggagcagtcacagatggctgtgattactgaggatgcggttgggtcctcatctttcccgtattataactagtcaaaccatttccattctcgaacgcgtcatgatttctctgaggctgaaaagatctctttagggttgatggagttactgtgagtgcaggactatagtccactgcttgagttacctc

SEQ ID NO: 104079 - DNA, 247 bp, Glycine max
gtcagattgtttcaaaatcttctagaagatctgtctgaagttgtttcaaaatcccaaaaataaccttactgagtggtggtagtggggccattttgggaattttaatattgtatcaagtatcaacatcaagaacaaaaaacccctcgacccttcattctcctcacttgtgcatgacagcctcttgctttcactgaggtacagtcccttaattttttggaattttcacttttagtcttcaataattttt

SEQ ID NO: 104080 - DNA, 233 bp, Glycine max
ggcaagttgcttctcaaagggctgttgggggtcttacacatggcaagccaaagggtctgctgggatctatgtctcttcattagcattctcgatggattaaactctgggatgatcgcacattgtaatagcccaagctgaggaatctctgcttgttgagtcagtcatgagatggaatcttgctcttgagtctggcaattattggtgcactgttgacgtctataaccgtgagaatg

SEQ ID NO: 104081 - DNA, 248 bp, Glycine max
tgcagataagcaagctgcttgggatacaggtgctacgaaagtcaagaatcgtaaggtgccagcacatcgtaggaccaaagtaagaggggccctcttacatgatagtgatgaatgagttttaactcagtctctttcaaaccagttgctcagtagaaagtgaaaggataagcaatgaaagtagcattccattgaatttcagatatttttgctgggcttggtagatagggacatgtgatgggagactgagg

SEQ ID NO: 104082 - DNA, 246 bp, Glycine max
gttggatacgattaagggttccattcttaatccgtgcatatggaagaacatctgccaatggcttaaattgatgtcagtatttcaagaaattaatctctgattctgaatcaaggatacctttaacttttaaatcattttctgtaccatgtaagtttatatattattgtgttttcaaaaggttagttgcaaagttgactttgccttttttcaggttaatggtggatatgattcctataagagtttata

SEQ ID NO: 104083 - DNA, 232 bp, Glycine max
tttgtatgttcttgatttagagttaagggggaatgctagaggcccttgtatactaaaattggactttgtatataacaatgttgatagcatgcaggttattaattcaattaaagtcaaaaaaaaaaaaaaaaaaaaaaaaaaaaaaaaaaaaaaaaaaaaaaaaaaaaaaaaaaaaaaagaagtaaataaaaaaaataaaaaagcaaagataagagggttgcactgtaagtgc

SEQ ID NO: 104084 - DNA, 192 bp, Glycine max
cctgtttccccttctgaaatcgacgatatcaagtacacccgcgccaccaacatcaccagcagcttaagtcttaatttcagaaccaccgcgaccgccgccgcgcctgatgcgggaagacggtgggaggtggctcaaggacaggaaggagaagaagaaagaggagaccagggcgcacaatgctcagctccacac

SEQ ID NO: 104085 - DNA, 219 bp, Glycine max
tttggaagatatgctgaaaaagcatgtagacttaacaacagctgtgaagaaattttagggcttttaggtgatatcatcctaaaaggatttccaaaagggaagaatgattggtttgcaacctgtgccgactcatttggaatttgtactcgaagtgttcagatcggaaaagttgacttaaggttagttgggttggatgttgtgtctagttctagatcgcga

SEQ ID NO: 104086 - DNA, 249 bp, Glycine max
gatttctgggtgtggcggctaaagtttgtgagtgatctctgccaccaagcccgcactgtgtctgtgttggatcttcaacttgaatggcacgttccttatgcctatcccttccaaatacttccggaaccttgtctgatttcaacaaactatactcttcctctcattctcaccatttaccaaaaccgaacctgcaatttaactctagctggggcccagaggtgcggcccgtgacggcggcccatttgggta

SEQ ID NO: 104087 - DNA, 235 bp, Glycine max
ataggcgagacaaaacatagttttgtaagtaattttagttcaattttaatcaatgaacggtactaaacatgcttataaaactgaatttaagttttgtgtttattataattattgttgttaagcaggtggcaagtgatggttagttgaagacgattgttgacaccttctcatcctcctcttaagaagaagcaaaagaagaagaatagtctttcttgtgcctgagtcatctagttat

SEQ ID NO: 104088 - DNA, 232 bp, Glycine max
ctcgttgatagacgagatgctggttattacaaatgtgctccctcactacatgtaaaagttggggtctgagtgcatgttagctattgcaacattgcaggttcaacgtcacaaaacccactaatgctaaattgtcgcgattcttgtgaatacattatcatgaatgcttctgggtcacctatccaccattatgcatctttttttccactcacgtctctccagtctccactatgag

SEQ ID NO: 104089 - DNA, 244 bp, Glycine max
gagacccaagttttgttttaacccatagaagaagaagggaagggttagcgagtaactactactactgtcacttgactcaatggaaggtgaagaggtgttggatgtggacattcaggaggagaagctttctggctttattttcatgtgtaatagaattacaaaaccggagtgctactgttaccgagttttcgggcttcctgctgggagaaaggatgttgttgagaagatcaatcctgggacatac

SEQ ID NO: 104090 - DNA, 247 bp, Glycine max
ctttacgatggtaactctttgcaatattggatatgtagatatcgttcctgactccacgtttaccaagatatttacatgtgctttcattttggtgggttttggatttcttggttttctgctcaatggattggttgcatacatttgtgatatacaagaggccttcttgttgagcatggtggatgagaatagatataagaaaattctcaggacttatatggttgatgaagagaaaggaagaatgaggata

SEQ ID NO: 104091 - DNA, 247 bp, Glycine max
ctcggtgaagtcaaggttggtctcttctggtctgttctgttcttctacgcagacacataaaggaaacacaacgcacctcttcttcttcttctttcccttcaaatttcaacttcttcatccaacttgtcctccaaacagcacaaacactgcaatcacaccgtcttcgctttctactcatctaaaagatcctcatgggttgctttggcttctgcaaaggagatgatagtgttacagttgctgacagagg

SEQ ID NO: 104092 - DNA, 224 bp, Glycine max
agagactgcaaagaagaatgaactggggagaagattcggtttataataaccaagatgcagttgagttatcgggtggaagatgagaagatacataaatttagaccattacagttgatactgtatcacattatcccttcttaagaggtgaattcgattaaaaacaaacataggtgttattgtactccaagtgtaaaaatataggtaataatcttcatattctgatt

SEQ ID NO: 104093 - DNA, 242 bp, Glycine max
atgcaaactcatgtgcagagcacttgtgcatccccaatttttgaagccgagagtacatttgtggaaaatatgcaggatgtgccccagctggaaagttctaaactgaacaaaattgatatggtggaccatgaaaagtttgccaaatttgaaaggaaatcagctaagcataaggatgaaacagaggatttaatgctagaacaagactgtggtgttgctgaacctgaaactgaaaacgaggatga

SEQ ID NO: 104094 - DNA, 255 bp, Glycine max
gaaacacctatagttaaggacagatcagtaaaagtaccaccacctgcaccctcttccaaccctcttcttccttcacaaaaaactgagaaaggaatgaaagtgcagccattggcattgccaagaacagcaccaccacctcctccaacaccaccaaaatcactagttggattgaaatcagtgcgtcgtgtgccagaagtaatagaactgtatcgttctctcacaagaaaggatgccaacaatgataacaaaataagt

SEQ ID NO: 104095 - DNA, 250 bp, Glycine max
tgtgattcttgctttgaagaaaagcaacattactactatagtactattcttccataagaaaccggaatattaagaagctggtgacttcaagagaaagaaacggctttctatccaaggggcagtattgtttggacagggggaaaggaagtggcaaaaaattcgaaagaagatggtattctgataaagagcttcttttcctttgttttttgttttttgttttttgagggattaaatgatgctttttctttat

SEQ ID NO: 104096 - DNA, 246 bp, Glycine max
gtgatccttgctatgttgaaggttatcatttggctgatgcaagtgatgggaggatcactctgcatttgaaggtcttaaacttaactgagcttgaattaaatcgggtggatgtacgcgtgggattatcaggtgcattatattatatggatggctcttctcaagctgtgcggcaattgcgtggtcttgtttcacaggatccagtgttgtgcagtgtgacagttggtgtttcccactttgaaagatgtg

SEQ ID NO: 104097 - DNA, 246 bp, Glycine max
ctctcttctctctctgcgtttcactgcagaaccaaaacaagctccggagaaaccgcaacaaaaaaagaaaaaaacacacaaacttaacccaaaactgtaaccccagtatgccatgcttcacaccacaccattctcttctcctcctccttctctctattttcttcttctctctctccgtcaccgctgcaagaacctcttctttccattccttacgtattcaagatggaattgagggtggtggcgagg

SEQ ID NO: 104098 - DNA, 104 bp, Glycine max
ataccccttgttaacattacccgtggcatctatgggcatgcctcctcaaggtttcattgttgctcctgagggagaagtaatacagaattcaaacccatgcgcac

SEQ ID NO: 104099 - DNA, 247 bp, Glycine max
gtggttagcagcgaaacccatccaagaaatatgagtatggttcccagtcccaaacaaaaacaagttgtgcaattgcagcatatccagaacaccaagaagctctcttactcattctcacattcctactcccaagcctaagaggtaccggagagaccaccggcatcatccaagggatgaacattccgacgcgtggcaggccaactcgtcgacagccacctcatcttcgccactctccaacgcatcgtcg

SEQ ID NO: 104100 - DNA, 243 bp, Glycine max
attaaatgttacagcagtggtggagtgaatcacataaaaaattgagaagttaagacagaaagccgtccttgtttcttggctgatatttaggaacccaatttcgtatttaaattctgttggatgtaccgtgactcttgtgggatgtacattctatggttatgtgaggcacaagctctcccaacagccacaagtcccaggaactcctcggacacccaggactcccaggacccctcgtagtaagat

SEQ ID NO: 104101 - DNA, 263 bp, Glycine max
ggctcgagccgaatcggctcgagcgcacttctttcgcttggcgtggtcgtctctcccgcgaaccctatctccacgcgctccagtctcacgcgcttcttccacctcagcaaaaatacaatagtcttcacagtaacttcagtcgttgagaaaacacaagactttcatgttagaaccgtactcctcgactcgcccgagttcgactcgctcacgaagactcggattcagatacatcctccgagtccactcgtttcccccgtgactca

SEQ ID NO: 104102 - DNA, 254 bp, Glycine max
gcctattccaaagccagttcccgtgtataagcctataccaaagccagttcccatttttaagccaataccgaaaccagttcccatttataagcgaattcccatttttaagccagtaccaataccaattcctttttttaagcctataccaaggcgagtggcaatgcctagaccgaagccagtgtgtaagcgtattccaaagcctgtaccagtgtctaagcctattcctatgccagttcctgtggatatgcctattg

SEQ ID NO: 104103 - DNA, 250 bp, Glycine max
gacgaatcccgacttccgtcacaaggtcctctgtactatacaatggagcatttagatgctggaaaagaatcatcaaatagtgtcaatgaaatagaagccactaattccctacttatctgtggccttccagatgatctttctcttatgtgcctagcaagagttcctagaaaatatcattctgttctgaagtgtgtctcaaagagatggagggacttaatttgcagtgaagagtggtatcattatcgccgaa

SEQ ID NO: 104104 - DNA, 249 bp, Glycine max
gactcatgcttggtactattttcttttgacctttcgtctcgaggatgagatgtttggtgaggttatgctgcctgggagcttggctcatgtatcctcggttgcagttgtggttaaggttgtcggaggtgggaacgggaagactctcactgtgtaccatgtgagcgcctgttatccatgctcttgtgaaatctgggtgatgaaagagtatggtgtggtggagtcttggaataaggtcttttcttttagtat

SEQ ID NO: 104105 - DNA, 248 bp, Glycine max
cttgattcttactcgcagtttgaggagagcatgcttgctttcaagatggaggagatgaggctgagtgatgaagaggatggtgaggaggagggtgaagagaacggtgttgaggaaggggatcaagaggatattcgttttaaaggaagattggtggaggaggattttgagaggaagattttacatgggttttggttgaatgacaagaatgacatagacttgaggttggcccggtttgattaccttatgga

SEQ ID NO: 104106 - DNA, 131 bp, Glycine max
ctagactttgaacagtagagaaaagagaatacaaaggtgatagagattggaactttacatacgtcaacggaaccatgtcgagatcagttcctggaacacatagtctgtgcgttcgacatagatgcggtggg

SEQ ID NO: 104107 - DNA, 186 bp, Glycine max
aattatttcaaggactagaaaaaggactttgctcctaattatcctgcatattacccatctggtgtagatgttttcttgtatccacggaaagttgaccatatagctcgtttgtggaacttcctgttatgagttcctccgcgaaatttcctcccatactagttgtaaacgttcaggttccactctatc

SEQ ID NO: 104108 - DNA, 188 bp, Glycine max
gagatcgagaaagagggtgtttagagacgaacatatgaattacgtaaagaagcagctgcagcaacttttcttgtgcaatacccgtcagatgcaaatgcaaagacactcagcattataattactactgagtatatgttcctttcatccttctgtgtcctgaccatgccagtcggactccttcaaaggga

SEQ ID NO: 104109 - DNA, 195 bp, Glycine max
tcggctcgagtaataggtgagcacacgagatctggttgccggtagcatcaagcaaagtaagagtttagagtttgaactctgtttatccagtgcacaaagcgtagatcactgtgttagtaatggaatagagtaaaatcaaaaccgagggatgacggagttgacgccgccggaagatcatttttgctgtcagtccca

SEQ ID NO: 104110 - DNA, 183 bp, Glycine max
gttcaagtttacataccatagtcacaattgaaccctccggaattcctaggggtggatctatgcatgaccaattgtcaacactatataaacacccctgcagattccgaggtgtcaagtttacataccatagtcccaattgaagttccaccgtagatcgctgtattattatttgtgccgagaact

SEQ ID NO: 104111 - DNA, 183 bp, Glycine max
ccattctttaattcttaaaatatagtgttaaaatcattttcaagtgatccttaggcagaaatcattatgttatttatgccacggttgagaaagatatggatacacggtctgcacaaatttgacgggatccttttgtatgtcaacatagtaatagagattggatgatttagtaatagagattga

SEQ ID NO: 104112 - DNA, 182 bp, Glycine max
gcataaactactacgaggagactactccatacgaatccaaagctgacagagagtgagagagagagaggagccacacacgcaaaggaaacggacatagcaagaagatgacaaaagacgtctgcgccacctcttaatatgtatagcaaatttccgaaacactaaagaaacataaaagtaaaaag

SEQ ID NO: 104113 - DNA, 183 bp, Glycine max
gaatctgcaaattttgcggtgtgaattttcgtttgcagagaagaaaaagatgcctttgaaggtgttagatgcgacagtgtcgagctttgatggggtttttgacaagttccgatcacaggctccaacaaacaaagccaatctcctcctctgacccagctggtgccctgattgtgtgagagctga

SEQ ID NO: 104114 - DNA, 185 bp, Glycine max
caagtttatatgtagttctaaaataataactttgtaaaagttttcattctactatctgcatatagaccacattatctctttagtagtggaacagtgattatagaacgacagcattaagatcataggctgcatgatgtcttcgttgcactgaacgggtctctaggaattatgaatattcaacccat

SEQ ID NO: 104115 - DNA, 177 bp, Glycine max
atgcaacatctagcatttccaagggaattctttaagatagatttaggctggttgcatttcattaagcatgttatccaattgtgtaaagaaacaaaaatggacatttttttcactggatttggaaatgttcctccgacacactctcaatagcacaaaggtatcttcagttattgtagc

SEQ ID NO: 104116 - DNA, 182 bp, Glycine max
ttgctatatatccacgttataagattgaaaacgcttgcattcaaatatcaagctagttccttctggagacttgcacaaaggtgctctcctgactggcatgatcattaattggctctatagggtctgtagtatctggaccccttagtgcattcattgcttatgttctaagtgctgtcctcagt

SEQ ID NO: 104117 - DNA, 121 bp, Glycine max
gtccaatcctgcagctgactagctggaaatttaattgagatacctcacagactacttaatggacacaatttggcttcaaaggttctctcaacatggctgagcgatgaaggaccaagatatt

SEQ ID NO: 104118 - DNA, 177 bp, Glycine max
caatttatttttattctcctctctcccttttgttttggctatgtgtgggcaggtggccagggggtcaagtcaatgttctaattcttactgacttcctctcatgtcatcttggtttttggtttccttgatgtcaatcagtgctgatgctcaataacagcaacaacttcaactgcaaca

SEQ ID NO: 104119 - DNA, 176 bp, Glycine max
catatagcactgattgtcacgcacaactcagcttcagttcgtgcttcattaacatgggtgctggtgactactccaaaatactcaaggtgaagcatgacgccactgatgaagaagtgaacaaggcttataagaaattggcaatgaaatggcacccagataagaaccttgaagaccct

SEQ ID NO: 104120 - DNA, 177 bp, Glycine max
aatttggtatgcccatttccttaacctcacttcattcatcttttgaaacagggtcatggcttccgaaatgactctcttttcaaatggtggcacatatgaaaccaaaatttctcagatgtccaggagggtgttatgtagaaggacatgatctcggaaaccgatttcaatggaaagata

SEQ ID NO: 104121 - DNA, 174 bp, Glycine max
  unsure (1)..(174): unsure at all n locations
gcaaaacatacagcatagattctctcctanctgcattgctacgatcactagatgaacaaaggtcaccaaaggcaaaattggctgttattgagtttcgcataagttcgtttaataagcatgcaatagatccagaaggtgctgctaatattggcatcctaaaattatggcttgcca

SEQ ID NO: 104122 - DNA, 244 bp, Glycine max
caccttgcgaactccgccttctacaactctctcttctgctgcatcttccattcacagaacaagatccaccaccttctccttctcctcttgttccccaccaactcttcgcttcaatctccacagctccctctctcttacttccgcttccgcttcctctcccactaccgcttcgaccactgagctggacgcctgtcctccttcagcccgatcgttcccgacctctcgttttcgctcttttcgaaaa

SEQ ID NO: 104123 - DNA, 229 bp, Glycine max
ttcctcctttagccgcaacccatattctaagcttcctttctcctactgttctgtgtcgggccagcaaaactgttgcgtgtatctttgcctctgaaggaaagttgtgcctattattatggcttattgctctagtggcgtagatcccctcaacagttatgcttgcactgccttttgtcttcgagactaacaaacttgattgtatgtcttcttgttgctaatcttttgattt

SEQ ID NO: 104124 - DNA, 238 bp, Glycine max
aattaaagcaaatccagtaccaagtttctactatgaagcgcctccccctaagactgaactaaagaagctgccactgactttgccaaaatcaccaaagctaagtcggagaatgagccttggggatgctctgaactcatctcctgaagtttgttgtcgagggcgtcacatcactggaggtgtaggttacaccaagggtggttccaatgcctctttccctcacaaaaacattattcgacgc

SEQ ID NO: 104125 - DNA, 232 bp, Glycine max
cgagtcgtggaaagtcatgtgagagagaaaaaaatattgagaatttgagatgagatagattcgctgaaaattttcttttggctttttccctttttgcccctctcgttggttaatgaatctggacggggttagttagctagctaggcttatttatgtaaattctggaagggaaaatggttatgaaactagtatcttttttttttttctctttatgtaattttctttacatagt

SEQ ID NO: 104126 - DNA, 231 bp, Glycine max
cttcacacccaccataataataatatcttcattgttcttttcatctttgttaccattaaaaacacacacacacctccaacaacactctcaaactaacaacaacaacaaaagaccatgtcggtgaaggcatgcgagcaccacaagggcaagaagaggaagatcctccggcaagtgttcccgtgcttagtggtgctcctttcatcgtgctggtcacaattcccctgatatggg

SEQ ID NO: 104127 - DNA, 225 bp, Glycine max
actcgagccgaatcggctcgagctagaatcactcagcactggataagaaattaatggttaattcacagggagttatgaacttttggtacctcaagcttaccgttgaggatcagacctttctgctttctgtggtgacagttcatcaaagatgataacaatttcattacacgaaaggttttcaaatccgtttccttggtttatttcactgctgatattatgcaatgg

SEQ ID NO: 104128 - DNA, 226 bp, Glycine max
actcgagcgctcgagccgctcgagccgatcaggctctgcagagacagctcttacagaagcatgcaagagagtttgagagcacgcggatgggagaggaatgggttgacagcctacaatcaaaagatcaaatcgaagccaagtctcttagcaagtatgaatctacaacgagaagataaagagcgctggcttatgcattcactcatcagcaaaattggcagaactcatc

SEQ ID NO: 104129 - DNA, 237 bp, Glycine max
tttttagcaagactggtaaagaaggttgggtttctcttggagggatacttctttgtatcactggtatgctagttcttgatctacataacagttacccgaaattcagtataaatttattgtgatgttatgctggatattccacacttctgttttaactttacaaatttagtggagctttaatttactagatgctgagacttttagaattcagatgctagagttctctaactgcttatt

SEQ ID NO: 104130 - DNA, 221 bp, Glycine max
aaaccagaaaaagagcaaccgagcacggttgttgcggtatctgagccggtggctacagaagtagaggaaaaaacagaagaaccagaaaaagaattgcaagaagctgagaaaccaagcatagttgcagtgtcctgaggcgctgtggtgtacattgagttggagggaaaataacaggaagataccagagaaaagcaatgcgccaaggatggctgcaagaaagc

SEQ ID NO: 104131 - DNA, 243 bp, Glycine max
aaatgagcaaattttgaagagaaaaacaaacacctttgctcaatttaaactcttcagccttttgctcccaccaccttgaccttgtgtacataatcagatcagcagctacctgtgcagcaaatcaatcaaaatatgctccaagcttctaattctaaagcttgctggcaaaatacttgggaaaatagctatgatacaaaatctacatccttctgttatccttcctaaatatatgcaagcagcccc

SEQ ID NO: 104132 - DNA, 232 bp, Glycine max
atttgagaaatataaggttctctgacaagaatgaagaggagagacattgggtctcagaaacaacaagaggttgttctgaggttgaaggattgggcctgtccaagaaaaagacacgtagccatgagcctgggatttttgttgtcactgctgcactgggcctcttgacaaacttcgaagatatctacagattatgggctcttctttctaggttcctggatgctgactttgtgga

SEQ ID NO: 104133 - DNA, 242 bp, Glycine max
caagaactagcagagcatataattccatttctctgctcactctcacaacagtgactgaacctgttagccaaagtttcatttgaaaatggtacttccctgccctgcccaaatactagttggcctctccttagacccagatgacagcaaggagcttctgtcatgggcaataagagttctagccaatccaaatgacaccattgtggctgtgcatgttcttgttgctgcggataagaagaagcgtg

SEQ ID NO: 104134 - DNA, 259 bp, Glycine max
ttataagaagcatattggatgttgtgtgcaagatactacaataacagaaatgcagaaaataacagaaaaggtataacagaaaggaaaatggcaaacaataggtagacgtcatcttctagctagccaatgctatcaagccagctcagcaaccaataattgaatctgttaaatgaaatcctttagatgccttggtggattgatcttccttttaggtctctcattcgtgcctatgcatgtagtatcttgttgagccattatt

SEQ ID NO: 104135 - DNA, 261 bp, Glycine max
ataccattcttcattggttccgaaaaggaacaaactccaagggcaggcatgaattctttttagacacttgtcctagtgtcctactcacaataaaactccaattgatagtttcctccttttggtgtctgtaatttttgctgtcactatacatgttatgctacttactgctgcttatttggaaccggtacaggcaaacctttgtgaaggcgctggaaccctttgttaattggctggaggaggctgaagaggatgagtaagtgt

SEQ ID NO: 104136 - DNA, 267 bp, Glycine max
gatgcaacgaaatcattcatgaaccttaaactccagcttttggaagaactagtttttgacgtgatatcaaggtctctatgacgaagtggtccagatttttctatccttggctcccccgttctcctaagttgaatttcagacatgtattctgagaaaatatttattccccggacaaagaaaaaccatcctgtcttttcacgggcacaactggtgcaggaaagcatctgtggcaatgataagaaagcagtgtaccagcatattgtcaag

SEQ ID NO: 104137 - DNA, 176 bp, Glycine max
gtcgtttttggagcgatttgcatgggtttgtaagtgtaaatctttagaaatagattccatatatgaaaacaatttgcgcaaaacaaaattatcctgtagtgtttgtttccccattttggtgaattctgagtccactttcatgaatatacttcttctaatcaaaatccttcaagccc

SEQ ID NO: 104138 - DNA, 263 bp, Glycine max
gaggaacggttcttggtctgataggtttcgcggaggtgccgtggatgttagggatggtgaggatgatgattatgagagtggtggattcagtgttagacaccaggatgaggaggatcagcaccagtaccagcagcagcagcatcagaatagtgttgatgatgcttccatgaaatcaaattcgaatttgaatgaatttgcgccgaggagtgaggatggtggtgatttgaatgataaggatggggataaggagagggtgaatgctg

SEQ ID NO: 104139 - DNA, 262 bp, Glycine max
gcggaattacaacagctctgttgtgcgtggcccatataggccaaacattgtagagaacaatatgattttccgtgatgcttttcctgatgcctacaggagtcgcatgaatgaaccctctccaatagcaagtgcaaggtcaatgtctttcgattatagcactcataacgaaccttatcctgatgcctacaggagtggcatgaatgaatcctctccaatagcaagggcaagggcaactcgtaatgaaccttatcctaaagaggat

SEQ ID NO: 104140 - DNA, 259 bp, Glycine max
gtggaactctggcttccttcatcaattgtacaatctgatttgagtagccacgcccaagaggtatagcatgagtttgaagttccattgaagataaatagattccttctcatacaattctacattgtagcacttggccagtatataagattgtgaaattaaggagtggtaaatattactagttctttcttcggagttgctaaagataagtatccggttctgtatatagctcgtaaaaatttctttggttgagttaatatat

SEQ ID NO: 104141 - DNA, 231 bp, Glycine max
cttttggaagagggaatccaaccagaacaaacggacaaactgaacagtcaagtaccttggtagggcattaatgcgtgattccttcaagtgtatagcactacggcccaatacaagtgaagccttttcagtttgtccgtttcttttggaagagggaatccaaccagaaggctaagattttgcggaaagtagattatcctctggagttggatgtttatgatttttgttctgacg

SEQ ID NO: 104142 - DNA, 235 bp, Glycine max
gggcaagctgggaagtgtcttccaggcgttggcgcggagcgtgtagagcttgacctgggagtcgaaggagcggtcatgaaggtcgacgaaataagagatgcggacgagcttgtagtcgcgagttttatggtcgaagccgaagccgcagacgcgggcggcaaagagcgtcgtgtcggggtgacggcggcgggggacagggaggtaaggaagaatacggtgttggcggagggagggg

SEQ ID NO: 104143 - DNA, 237 bp, Glycine max
gctcctctgccattgtaccttcgtattcaagcacaaaaacaaacaaaccctaaccctaaccctaatcgaaacccccttatccgatcatggccaccgatgcccgtgactcgcgtcgcaagcatcaccgatcttcctctccagaggacgtggacagatcctcgaagcgtcacaagcaccgccataacagccatcgccaccgccacgggagcaaaaagcgcgacgaagaggttgaattcg

SEQ ID NO: 104144 - DNA, 191 bp, Glycine max
gccgttcgcgttttgttcttccctactctaaaaccgaaacgaaacttctctctgtctaaaaagcgcagtttcaactctctctctcatcgcttcgccggaatctcgccacctccgtcgccggaaagaaagaattgaagaaagatcccctttcccagtcatggcttcaagatcatatgctaatctctttgact

SEQ ID NO: 104145 - DNA, 228 bp, Glycine max
ctccttggcttttgatttgtcaacaggtgtcctccttctgaggttcttaaagaacagcccttcatttcttccatcctccatttgaacttcaaattcacctagttctttttcatgctcctgaatctcttgtctattaagttctgcagattcctcaaactccaccatctggctctctatgtttgctgttatctgccaaacacaaatgaacacaataagcggtcattacta

SEQ ID NO: 104146 - DNA, 272 bp, Glycine max
atgaaaagggtgaatctggaaagattggtggccacataaggagatgttgtggtcacgcataatggcgtcgtggttgtcgacagcgaggaaggcaaaacaggaatgaagaaggtcgacaagggggcgaactataagaacaaggagtaaccacaacgatgacaaaactccggtgcagtgacttagggtttttgatcgtgttgggtggctttgatctgttaaagattgatgatttgaggatttttgggtgatcttatgttgttggcgacgatgcc

SEQ ID NO: 104147 - DNA, 272 bp, Glycine max
cacaaatgatggaacttcagtttcaagacaagatattgaaggaaaaagtatgtttggttctcttgctcaaggtataaacagtggactaaacatggagaacttgcagcaagttaattctgaacaaagagacatacctattgaagattttaatgggaggcaagaacttgctggatcttctgacacttcacaggacaaggtgttagcacaggttcctccttcacagaatgtggctaccctagatccaacagaagagaagattttatttggttcag

SEQ ID NO: 104148 - DNA, 271 bp, Glycine max
caaaaaagagagagagatggaataagatgaatgaggaaaaatgcaaaaaggaggttgacaagtcatcctccaaaattgatatttccatagcattcttttgttgcttctcttgttgatcgatttccttatgttgtaatatactgtctaatgcattttaaaacactatattcaaattatacatggaatgtagtgtagaaaatttaatatggagatttgtaactttttttggttatttgtttatttcccaatttgtataaggaaaagcataaaa

SEQ ID NO: 104149 - DNA, 272 bp, Glycine max
atcaaattcaaaacttgaggctaaatgttgctctgtcactcccaactcttcacaaatggatgccgatgaagccaaaatcttgctcggttaccctcccaattctcgtccaactccatcccaggtaaaatcagcttacaaaaagaaggtgtgggaatctcaccctgatctatttccttctcatgaaaagcctctcgctgagtctaagtttaaactgatttcagaagcttacacatgcctggaatctggtgggagaggaggagcttcaagttcag

SEQ ID NO: 104150 - DNA, 249 bp, Glycine max
ctcgagccgaatcggctcgagttcaagctagtttttcatctccttacgttgatcaagatccacattgctgaattgaatattagtgatgggcttgccacagattcccccaaatgaaactgctgaaaaagttgcacttgtgggtgcagctttaactagctcaccgcagttttctgatgcaagtccctctgccataggcagcatgaacagtgtaaacactggtgggttggccgggtgtgatctgggatcttc

SEQ ID NO: 104151 - DNA, 263 bp, Glycine max
ttagacatgaagaacaagagctttttgaagacccctgttatatccctgatccggtatccttgcttggtcctgtttctgagtcacttgataattttcaattggacttgggaagtggctttgtgacagacacaaagatggcaatgcctcactctttaaaaagcacatctgccggttctgacatcagcaaaccatctccaattgagtccccattgtcccgagaaaagaatagctgttctaatcggtttccaagtatctcccaggcc

SEQ ID NO: 104152 - DNA, 256 bp, Glycine max
tgagtgatcttccaagtccggctgattgagtttccttttaatggctaagtatacagtggcgttttttgtatcttctttgggagctggtttcagattagatttgcaagttgtaatgttattaattttgtgtccagatgaaaatgatttaagttactattccttttctagggattttgaagaaagtcttgatttttttaaaaatataacaatgaaaaatggaaatcaagattctagtagcaatcgatgcgagcgaata

SEQ ID NO: 104153 - DNA, 267 bp, Glycine max
aagacaactgcaacaagaatgagaagttgacagtgattgtgcttgctgacaggaacaaaaacaccaaccaaacaacaaccactaatgcttccccaccatcaccacaatcatcatcatcatcgccttcaccagcacctactggccaatatcagggtcaatctccaacttcagacacaaaccaaacaccaagccctatcagtgaacctccccctcctccaaatgctgctgcttcagcctttgtctccctagctggctctgttggagcat

SEQ ID NO: 104154 - DNA, 245 bp, Glycine max
tgcagaagcaaagccccctggagtcttctaggcagccttcattgctgcagttgatactgtttcagtgcccagttactgcagcaatgaaggctgcctagaagaaagcagaagcaaagccccctggatcgggagctctgataccaacttgaaagataataatctgaatattcctgtaaagctctattttcgaagagtgaatacaaaacttatttataagctggcagcaacctaattaaagaaataaa

SEQ ID NO: 104155 - DNA, 242 bp, Glycine max
agttaggtcagatgtcacaaactcaggcctcacttggctatatacctccttcaaccccgataatgggtccttttggcaccacaggattaaatcagacatctagtgagggtgtttacctacagtggcctagtgctgcaatgatgtatgcacattcatacgaccaatttagacatgctgttttccaggtaaatcacatttagtttacttaattttattaccctgcagaattcgacaagtgatat

SEQ ID NO: 104156 - DNA, 244 bp, Glycine max
gctttcttgtgtagtacatgaagtaaaagtgtctggagaaaaaaatctcttttcaatcaaatcaatgaattttccacttgggagaatgggatttttgattttgtttattgtgagttgaactttgctttttctagcttgggttgtttgcgatgaattgctttgtttcagggatttatggtgccatggcagttgcggggagttttatatgttcaatcacgggaattgactctctggggggtttcca

SEQ ID NO: 104157 - DNA, 249 bp, Glycine max
cccccctccttttccaataccttcttacctccttcaacaaactcttccactaattcaacttcccttaattaccaacaacaacaacaacaactatctgaacatttcggctttgtgaaacagcctctcaactttaacaacacaaccccagacaatagtactctcgaagcatatcatcagctcacgcaccatcttggcaactcttcttctgttctcgtctccagaacacaacaacaccactccttggaaatt

SEQ ID NO: 104158 - DNA, 240 bp, Glycine max
tggtgagtggtgagtggtgattttgtatgtctgcttccgttgcgttgcgtgtcgtttacatgaatcacaaattaacagatggcttgttcccacctgcgaatccattgcccattccgagttctgagtgccttcaaatattatcatacatcagacatatggccacgccacccttcattcacgcgcgctgtgcctactcgcctagaatttccaatcgcaacagcaagggagcctcacaacaac

SEQ ID NO: 104159 - DNA, 236 bp, Glycine max
gttaaggttccggataaggcggagagtgttaaccaggtgtggcaggtggggccctcggttaccgcggggaggattgacaggcatgactttgctccccccaatataaatgccaagggcgtccttagcttcaacgggtcgcagagtggtggtggtggtggtggtgccgtcgaccccgttaccatgaagaaaaatattcatggaattctaaatactgtgagttggggagttctgtttcc

SEQ ID NO: 104160 - DNA, 239 bp, Glycine max
gtgccatgaagccctgataattgccagagcgacgagaaactatttgcagcaattagcatatgggtgaagaagcatctgactgaagtgtgaagtttgagtgtatatatattgtgccatgccgatcaatatacatccaagaaatgggtttttgaagcctgctgaggacatgggatttggtttggagttcagaaagagcagcacaaaacagcatagcagttcaaagacagtgaaagacagtt

SEQ ID NO: 104161 - DNA, 243 bp, Glycine max
gagagagttcacttctctcactctaaaagtctaaatcaccttgttttcaactgtctctctctccttttctagtcgagtacttttctttcacttttcacttagctgataggtttcaacttgcaccatcttttcattagcattctgtatcagtcctcatcccactgtatgcattgctagctctcatattaccccaactccttgattttctttttgtttgagtcgtagaagatgttacttagaagc

SEQ ID NO: 104162 - DNA, 244 bp, Glycine max
gtgggtttttgagtctacattcaaaagaggacaaataaatgctgttgaaggcatggaaactttgccaaaaggagttgacatttgttgcatctgccaccacaagcatggtgtatgcatgacgtgttgctatggccattgtcagaccacattccatccatcctgtgctagaagtgctggtttgtacatgactgtgaggactactggtggcaaggctcaacacaaagcttactgtgaaaaacatagt

SEQ ID NO: 104163 - DNA, 237 bp, Glycine max
gcgcgcataaagtgcgagagcggggaagcgtctagctagcgagtcgtccctactatctaatactacgggccatcgctgtagccatggggtctatcagagttgcgagggttatgacccaaactctgaactcgatgttcaagtttcttcagagtaaagagcgcatgcagattcggatttctaagcacacggatttgaggagtgacggcgtacgcatcgatgctgacgaatacatgaacg

SEQ ID NO: 104164 - DNA, 235 bp, Glycine max
gcaaggtcttggccagaagtttagacaagcagctggaactggtattgatttttcagtgtttgaggagtctgagttattgacagtgggtgacatgaatgtctaccctctagcagtaaaggcagatgcatcagtgaaggcagatgctccccctggtaattatgacgagtcagatagatctccaacctctggtaacacaaactctcagattacgcaagtggtgtttgagaaggagaaa

SEQ ID NO: 104165 - DNA, 241 bp, Glycine max
tgcatctgcgacgggattgggagcgcggagtttctaaaccacttcgccgagttagccaacgagaaacgcgagttgttattattagctcagaggcccaaacataaacctatttgggagcgtcaccttctgaagccaacgcgtgggaagcagacgcgggtagactcggagagtcaccccgagttcaaccgagtcccggatttatgcaacttcatgaacaaagtctcgacggggcttaaaccga

SEQ ID NO: 104166 - DNA, 234 bp, Glycine max
gtttgatctttcatcaagtgatcgttcaaacacccctggtgctatcaacccacaattgtacctacagttccttacaagttaccaggccccaagtggtcaatcagtgcttcgtgtcacaacagtaactagaagatgggtagatagttctgttagctctgaggtagtttcagccttttttatatctatggcagtggatgcctgtttatttgtcattgacattgtcaaagaaatatt

SEQ ID NO: 104167 - DNA, 261 bp, Glycine max
gtttgaagtctgaaagcatcaactgagattccaccaacgatcggcagtgcgacggttttttacgagttgggttatgctaaactacgattcacaccgtacgcgtaccagtttcgttcttccaatgctctgcacgtctcttgctgccaatgcccatttcgagtgcgaaaatgttgccttgtgataggaatcaacgtaagtacttgtatgtggattttggtggtattgattttcaatatccgctttatggtttgagcttctatt

SEQ ID NO: 104168 - DNA, 237 bp, Glycine max
gaggcataccggaaacaggtgtggaggtgaacaaacagcaatacaatggagaaatggtttctgaccattgtgttgtggggggttgaggcttattgaattatttaaattggaaggtaagattcaagcaatggcagtcatttattagtgttaggaaccttgaggcttccaactgtttttctttgttgggtgtcactcaattaggaaagtaaaatacaggatgtgatgattctcatagca

SEQ ID NO: 104169 - DNA, 239 bp, Glycine max
aacttttcctgaattagttaaagtcactggtactttggcagatatgactaacttcgtagtagaccttaaagtgaaaagagaaaaggatatgcagctcagtaatgtcctttcaaagagacatatagatcaggtcactgctcaagcctggttgttaaaaagtaaagagctggaggcgaaggtcactaaaatgagcattcaaaataaagtcccgtcagagtatacctgcatgaacattgttc

SEQ ID NO: 104170 - DNA, 252 bp, Glycine max
ctgatctagatcccggccagctctccgccctccgcgccgccaacgtcagcaccgagaagctcgcccgtgtcgctgtccgcattggcctccaccgctttgtccgccacagcgcccctccccttgtcgacaaggtcgagcgcttcgtcgacgccgtcaagctcgagattaaccccgttgctcacggcggatccgtcaaggcgcccaaggtcctcgccgacgtcgtcgagtccgtcgccgccgcgatttacgtgg

SEQ ID NO: 104171 - DNA, 237 bp, Glycine max
gcatgcttggtttgggttgggtttgtgtgcatctgagtactctgttttcaaattttgcaagaggaatgcatgccaattttaatccttgaagtttactactatacttttgttaggctagtgattttgatgactcaggagctgttgtgtttgtgcttttgtactcttgtattggtagatacttaatactctcaacattccgcgcttagttctcaattccaaatagcggggcggagtgac

SEQ ID NO: 104172 - DNA, 245 bp, Glycine max
ctttcaaacactcatgaacaccataagaagcatctctctcttcacctcaaaatcaccctccgtgctttctctaccgaggagcctctcacgcaagctatcatcttcaaggagaaaaacaagaacaagaagaagaaggagccatgtgtgcagcagcgatgtcaacatcacaacggtggtgaagatcaaggacatcatacggtggaagtcattcagggatatcgtggtggaacttctcttccaccacc

SEQ ID NO: 104173 - DNA, 244 bp, Glycine max
gttccgtgctcacaagtccacattccctaaggccttcccaagaaaaccaactataatgtcttccttgttgcaatccgtgtttcgttcacccaagaaatctaagcacgctgacacattgcaaggactcaggagtccctccaatgtgcatgaaactccgttctttccttcgccacttaccccggtttgtgtgatggctcacggggcagagaagatggaggcttcgaggcaggaggtagaagatgca

SEQ ID NO: 104174 - DNA, 157 bp, Glycine max
aggagatcgggtgtatctgtaatgtgtatcatatgctggactgtttggtcttgtcaaacaatacagttgcaatttgctcctcttttcttccttaatttaaatatagaaaaatgttattaacttggcctctcgtttaaacaattgacttgatcccccc

SEQ ID NO: 104175 - DNA, 247 bp, Glycine max
tgacaaaccgcccttctttgataattttgattacgccataaaattgaagctccttttcagcccatgttaaaccttttctagttttctcttggcttatacacacgcaaacacacgacacaacacatgtcacatgttgttggcttaatacgcagagggagtgtgagacgtttgaaagatcagaatcggacaggctagcttagctccatgtctgactcactcctaactttccattctctttcaaccattc

SEQ ID NO: 104176 - DNA, 238 bp, Glycine max
gaagataagacagaacatataataataaataataataattataataaaaaaaagacaagtttgtttgttgttcctgttctaatctctgaaccatgtcatacaactgaatctgatagcaaagcttttgaatttcgtacctctcctctttgtttaccctaccagatattgcaaatacagcaagatcatcatgagtgggatttcggaaaagaaactcatcagaatcgatgctagtgctgat

SEQ ID NO: 104177 - DNA, 242 bp, Glycine max
gcaaaagacaaattaggttcagtagtcttaaaaactgataggtttcccccaaaaaaaacaataggtaggtttctcatcatgactaaaagcttaatgaatccaggtgatctcgcaagatcatatttttgggcatggttcattgcagggtgtgttaaaacttgttatcctacgaatataatcatgattgagtttatgactaacttgaaccaaactgcatgttcctgatataaaatgtataacat

SEQ ID NO: 104178 - DNA, 233 bp, Glycine max
taatactattattataactttggtggtaggatcaattcaagaactattttccaattaggactaaaatatgttttttcacatagggactaaagaaaaatgatatcaggtgctatggaccaaattttttaattaaacgttaaagttattttatatatgatccaaatatcaaaagggaatagcaaaccctagaacttttatgtaagcacaaatctatcataccttatgctgaaatt

SEQ ID NO: 104179 - DNA, 238 bp, Glycine max
ggatgagtctgcagagtggaggctgagcgtatgatcaggacgtagataggacaaaaaaatgtttacaggagcttcaagtgtttcaggagtcctctcagaaggggcaggatgcttctgatattaaccataaattggcaatactgcaaaaggagaatgcagtcttactcgaaaggttggaaacattgaaaagagagcttgaagcggaaaggttgaagtgcagttcatgatacatgaacta

SEQ ID NO: 104180 - DNA, 228 bp, Glycine max
ctcccaacaacacaacacgccactcactcagtgtgcctctcacgccgacttcctatggcaagggacagttgcctcgctcgtgttacctccggcgccgttattggcggcgctgttcggcagctcagtcagtgccgtgtttggtacctatgaagctattatgtataaagtgccttgactattgaaaattaagcatattggatgaactactcttagaagtgctgctatttt

SEQ ID NO: 104181 - DNA, 253 bp, Glycine max
atcagggtttgcatggttcttagtttttggtgaaaggctttcgtttctttaccctttcactgtatgagggatctttactgacttgttgaagttttagtttcccgtgtgttccttttctgcactgtgcagggtgttgcccttcatcaagtttggttaaattggtttctgcttagctctggatttttctgtggcattctatttgacatcatgatttagttttacaagttttgtaaattgttccattcatgacatt

SEQ ID NO: 104182 - DNA, 252 bp, Glycine max
tgaactcacaaactgccacagctcaagaggcaagagttaaacacagttccacccaccatacttaataattaatggctgagatgaacaagaaagaagagctgatcttcttttccatacctgggagtggccacttaccttcatctctcgaattagcacaactcctaatcaagcaccacaaccatctttcaatcacaatcctctgcatgaagctcccttatgctccttattcagatgcatacatcagatcagtta

SEQ ID NO: 104183 - DNA, 255 bp, Glycine max
agcaacaacaagccctaatccttttttcttcttcttgcacttcccaaagcaatagcttccattgtactattcatccactgattgcaattagaaacgtcctcttcacactctcaattcaaattcaaggtttcgcattctcaccgctcacttcgttttccttttcttttctttttttcccgctttagtgttattgggtgctctgagagagttttcgattcttgatcaacaatttcgcgcattcagctgaaataactt

SEQ ID NO: 104184 - DNA, 242 bp, Glycine max
cacaccttcaacttgttttgtttgttatgtattaccgatttcctgctgtttctgaggttttctcttgatatctctattttagttgagaaacataaaccgaatattgaagtattcattcacttgttatgtgtttaattttttacttcaatcttattttgtctttcttgtaaacgttcctcaagcctttagactttgtgatgcctgtaatgtgctctagagtctagaggcattaaatattagat

SEQ ID NO: 104185 - DNA, 252 bp, Glycine max
gtggtgggccaggttcgggtttctaaagagaagctacaaagaaccaacattatcggcttagtttcggttcaaccgtatttcggaggagaagagagaaccaaatccgaaatccaattaaaccgggcacccattatttcggtggacagaaccgattggcactggaaggtgttcttgccaaatggatcggaccgggatcatgaagcggttaacgtgagtgggcccaatgccgtggatatttcgggtttggattat

SEQ ID NO: 104186 - DNA, 252 bp, Glycine max
ctcgacggcgcttaaaccaacatcggtgaccttcgacaagaggagactcaacgagctgaagcgactcgcgcgttgcacgagtcaaccaggcgagtcggtgtgttacacgtcgttcgaggtgctagcggcgcacgtgtggagaagctgggcgagagcaatagggtttccgccgaaccagaagctgaagctggtgttcagtgtaaacgtgcggaaccgggttaaaccgggtttgccggaggggtattatgggaa

SEQ ID NO: 104187 - DNA, 251 bp, Glycine max
agactcttcaagaggatggacgggtaacattcgtggatggttcttccattttggcagactccattttgtactgtacagggtactcctatgcattcccctttcttgatactaaagaaatggtggttgtagatgatgacatagtggggccattgtatgagcacacttttttcccatcacttgctccatccctttctctgataggcattcctatatagatcataggggtccctttctttgagtcacaagtaata

SEQ ID NO: 104188 - DNA, 245 bp, Glycine max
cagatctgagtctctgtaaagatatttattgcagggaaaaggatcttctttctggataatctgtgctgtccatttattccattgagtgcagcactcatgattgccaaacatccaatagctgctaagtttgatttagctttatgagaacttccatcaatgtggtctaattgggatagagtggatggatgtatgtgagtcagagcaagcattaaggaaacacagaactagaacaagacaaccttggt

SEQ ID NO: 104189 - DNA, 247 bp, Glycine max
gtattccactactttttgagcaaggtgctgatgttgtcaccagaactgcacataaaagaatcaactggagtagttacaaaatcaaccagatgcaagataagattggtgtctttgtaagcattgtgagcacaaaaattccattcaaaggaactgggaaagaatacattggagatgacataactgagattgcttctgctgtcaagtatgctattcagcagtgttgtgtccaattaaaatccaagattgt

SEQ ID NO: 104190 - DNA, 251 bp, Glycine max
  unsure (1)..(251): unsure at all n locations
tcttaaccaaactcaaccgacttttgacgtagcttccttctccctccttccctctctctccgtttttttttttactcatttttatattttatctatttcgtcttaacgaccacagtccacagaccaaaaacaccacgccttctcacacatatgataatcaaancatataactatctctctgtactgacaaaacctctcgttgctaccttctacattatctcacggtcatggcttggcaccgatggctctgt

SEQ ID NO: 104191 - DNA, 248 bp, Glycine max
ttcacttatgtgtgggcttttaaaatcaaggcataactatattagatggggatttttatttgttcttgaaaggctgcttatgagatgcaaatttttgttagatgaatatgaaatgcaacaatcaaggagcagtgatcttgggagtgggctgaaagattggcatcttgagaaagcccatgcattgattgacataatgagcagtgctatgttgtttcagataaatgaaaaagattgcaccaataagtatg

SEQ ID NO: 104192 - DNA, 239 bp, Glycine max
actacaaactagtcctctccacgctgaaacaagttctcgtcgcggtcacatggtgtaggagccactaccaaccaaggactcaccataaccttcaacgacgaggaccctccacttttcagactcaacaccaattcacgcttcttcagaaagaaaaaaggctccaaaatcctcgaatcttctgactcatcatcatccaaggtagaaatcttatgggatctactcagcgccaagtacgaatc

SEQ ID NO: 104193 - DNA, 253 bp, Glycine max
cgaacccattcaagcaaaattacgactctctcgtcgttcccatcccttcctcttcgcccccaaaattctgtttcacaatcctaactccaaatccaaaatggaacaaccccctaagcccgaaacagtgactgaatcgcacgtcccgaacggcttctccaccaccaccaccaccgtcccgaacggatcgggatcggaatcccaggcccccaaggaacacaccgcatcgtcgtccagtagcaccaaaaaatcggtg

SEQ ID NO: 104194 - DNA, 230 bp, Glycine max
tactcgttcttcttcttttgttgttctgtgtttgtgtttgattattctctctcctgaaaatgacttgatgcggtggtaactgtggttgcggaactcctgaaagtgcaacaacggctgcagagggtaagattttcgttgtaacattgtattattcttgggaaaatagagtttttccaggaaaattttctatatggattttaaattgatattatggttacccttttggtaca

SEQ ID NO: 104195 - DNA, 211 bp, Glycine max
atcccaaattggtgaacaggatgcagaattcccagtcagagatgagaaaaactttgcctctgagaaacctcaatgtcaacagatgcagatatgtcaattggagcaagaaagtactcatgctacgtctgaatgtgcatcagaaatccatgcagatgagccatcatcattttattcctttccacagtcatctagattcgtaaacaatgctgca

SEQ ID NO: 104196 - DNA, 213 bp, Glycine max
ggattctgtcaccctggtctcacaaagtgagatgcttctttgaagtcagtctagcatctcttacactgaccaagagcacttctggttatgtataagattagctgggttctcagtgataataaataactgtgaaatattgtttgaatcatccaatacatcagcaaacacattttagagaccgccaattgattatgactcattttcttggattta

SEQ ID NO: 104197 - DNA, 224 bp, Glycine max
aatgtttattcacatgaaaatgttcttttaaatgtatgaattatggtgtccaaatcaatcaaaaataattttttagttagacgcctatttaattagaagtgtaaaaaaaacataaaacactgacgttatattagaaacgtctatagctgacacttcaaacaaaagagagatatcagtaattcatagtttaagacatattattttcaactaaattaatttctctc

SEQ ID NO: 104198 - DNA, 235 bp, Glycine max
aggtaaatattaagtatgcttcagtaactaaatcatataactcaagaatcttggcccatcaaaagaaaatgaaaactcacatgcacacacgtgcacacagagtctcatcctgaaattaattgggatatgatgagccaacaattcaaaagcagaatgagtatgtagccaaaacatgtagtctatctaattgtgtgtggggccttatattcatatttttgttatatagtctacctaa

SEQ ID NO: 104199 - DNA, 231 bp, Glycine max
agaagctgaaaaagttaacttaaggcatcaagacatggaagaaagaaaaggcaccgaagaatggatgcttgattatgcacttcgacaggttgtttccaaattaacccctgctaggaaaagaaaatggagctgctagtggaagcttttgaaacagtcatgccaaccataaaaaattgaaactgggcaaactggcaaagagtggaatagctttgtatgcaaaataaattcaag

SEQ ID NO: 104200 - DNA, 226 bp, Glycine max
  unsure (1)..(226): unsure at all n locations
tgcaggttggattcagaatgcagcttccaaagtatattgccgcatcattcttctgcctaatctgctcatccattatttactatggtaatttatggcacaatcttccttaacacttgatactctcaaactttctgtttcctatgacatctacgaataaaaaaatatntatgtttgaattattttaagataattatttaaaaaattaataaatttattatatatgatg

SEQ ID NO: 104201 - DNA, 234 bp, Glycine max
ctcgagcgctcgagccgcacaaaagcaaaatggtgcaccaacaccaagtgagggcctcactcacaacgctttattcttttcctccttgtcttggccaccacctccttcacatcagttcactcgagaacacactactgatccatgaggatcaagctcatgaactgcacaagacttggccaaggaagacaaggatgaaccatggaagccaccgtggcgccaagaaacacctcgtga

SEQ ID NO: 104202 - DNA, 104 bp, Glycine max
tttcttttaaagaaaaagctaatattccacacagctttatacagaacagcgacatacgctagtccctatggtttcgatacataggagctcttcttttccaaaac

SEQ ID NO: 104203 - DNA, 227 bp, Glycine max
gttctttctttctatcgggtttcgaaaaatacgattttgatgccaacccatgtaccctttacagaccccgataagtattcttcattgcccattttgtggctccctaatttgaacattgggtatgctctgccttggttataggggatattgataataataagatagcgagtgagatcaaattcaaaggatctgaaaagttaggatccgaggccatttctttggagggt

SEQ ID NO: 104204 - DNA, 227 bp, Glycine max
aaaagaagataaaggaaaggatggtgggaaggaagtgaaagagaagaagaaaaaagaagacaaagacaagaaggagaagaagaaaaaagttactggaaaggacaagaccaaggatcttacactctgaagcagaagcttgaaaaaattaacggaaaaatacaaccactccttgaaaagaaggctgatatagaaaggcagattaaagaagttgaagctgaaggtcatgt

SEQ ID NO: 104205 - DNA, 226 bp, Glycine max
ccgactgcccaatctccctatcctccaccatccctctgtccatcacaaacaccattgtatcactgatggaaccattgcttttccatggccttcaagaaaacaacaaacaatgaaggaccaacatagaacaaataatccaatacagatatagagctttcaagataatattcaatttttttcagatctgagaaattgatacaaaacccaaaaacagaaattcacaatt

SEQ ID NO: 104206 - DNA, 212 bp, Glycine max
tttacactgtgacttaaatagaaattatgctaagaatgacttttaaagataattattataaacgttaataaaattactgtatatggtaatttctaattggttggtggtataaaacttctaccttattggtacatatattttttaactaataaaacatataggtactaactaataatattaatttagagttcattggctattttgggctttga

SEQ ID NO: 104207 - DNA, 223 bp, Glycine max
cccgcagtcgacctctggaacttggttatcttttccgccaacagtgttgagaatcagaattcagaacccatacatcttctatcccttatttacatggctgtatcggcgcgtgccatgcttgaaccaaagtgctgctccgaatccacctttcttcgcgcgtagattctcacgcgcagtctccgccacacactcttctctccgttcggtagcgattggctttaga

SEQ ID NO: 104208 - DNA, 224 bp, Glycine max
ccccattgttgaggatacaaatgcaaaggcgcatcgtgatgccatggcattgtgttctaagaatgatatctctgttagcagtgttagagattgtattaagagcgagagtgctgttgtaccgctgctcctcaaaagaggattgaggtctgcatgggtaccaagtgcaaaagatcaggggctgctgcactgatgcaagagtttgagagagtggtgggtgtcgaagg

SEQ ID NO: 104209 - DNA, 230 bp, Glycine max
ggctacctgcctgaaaatcagaaattgttggttggggccaataatcaagtacagttgccttctgaattgcactctagggcaccagaatcaattgaaagacaaggtaatgttgttgagcaacaaactgactctgcctctgggaaacttggtaaagtttttaaagatttggacaatgtgtctggatcatcaaatgaattgaaatctgaaaaagttgaagcagatttgcaacc

SEQ ID NO: 104210 - DNA, 166 bp, Glycine max
gtcggaatttcgctcgagcaacacaaccacaaagtctcccatctgacaggtttgaggtttgaatccacattgtcttcttggggtgagataaatgtaaatatctatataagtgttcttttagctccaatgtttttcctgccttaggttgagacatcatttcctcctc

SEQ ID NO: 104211 - DNA, 237 bp, Glycine max
gttttgtgtatattttacaaacatagaatcaacataatgtttcgtacatctttaaggacgaaaaacaggaagggatagggtcggatccaagcgcgtaaacaggggtcttggccccctcccttgagaccctttatatatatgagcagaaaagaaaaagataaaaaaaacattaatggtggaaaataaataagaaaaaatgaggtgtggagttaaaattggttaaatttcctttgggaa

SEQ ID NO: 104212 - DNA, 225 bp, Glycine max
acttcaggagcagtatttcctcagtggatgccagtttggaccttatgatacaattatgcaaatgccgtccatgcaaaatcaatgaactatatagaatgcagggattaaagttaaggtactaaaatgctaaaccttattcattgatgttggattgatttttagatgcttaagggtggttttatgtaaatatttcaaggattcacgagtttccttatcactcaatct

SEQ ID NO: 104213 - DNA, 236 bp, Glycine max
aaaaataattatctaactcatcaacactaataaaagtggttagattaattattttattataaattttaatttcattccaagatcgcctaagcattaaatggtttaaaagatggttattttttaaattcaactaatgagtatatattgttttactgatagtttaataaatatactcacttctagaaaaaataaacacaattaattatggacaaaaaagaagatttaataataaatca

SEQ ID NO: 104214 - DNA, 235 bp, Glycine max
cccaaagaaacaatatgataatgatgaagtgatggaaaaaacagagacagcatctaattatgttgctattcgtgctcctgtttcaccgttaagcatggatataatagataaagaaacctcagagagacaatcacacctgcaacccatatctactgaggtcaaaattgataatatagagaaagaaacttcaaaatcatccagtctttgtattgctgcggaaacatatcatgcccca

SEQ ID NO: 104215 - DNA, 227 bp, Glycine max
gaagtggttcctgactcacacagtatcagtgacattgaaccagttcataaggcaccatccacagaacccgctgcggaggaaacaccaccactggaactagaaaaggaaccaagcaacacagatgagactagtcctctgacagaatcagaaggaggggtgctgaaagaagctcaagttttggaaacatgtgcccaagtggaagagaagcctgagcctgtgtctacacc

SEQ ID NO: 104216 - DNA, 227 bp, Glycine max
aaaggatccagtaaccggaaagatgaaagttgctaatccgttaagtagtagacttgtctgggaaacatgtttgagtgaatttaaatccctgggaaagattgctgttaggctcatttttctgcatgcaacttcaagtgggtttaagagtaactcgtctttcactaggaaagtttcagctaataaacactcaagagttaccttggagagggctcagaaaataatatata

SEQ ID NO: 104217 - DNA, 227 bp, Glycine max
ggctgctttaatcaaaacatttcttctaatgtttactcttaggaagcagtgtttcttaggtcttgtatgtgcatatgcaccacttttgtgagggagttgttcattttgccatgtttataaatggatgttctagactatgaatcgttgccatgttttagatattagattcgatgcatgtggaggtaggcttgaatatgatctttaaagtattacaaggtattatgcaa

SEQ ID NO: 104218 - DNA, 233 bp, Glycine max
ggagcttctttttcccaccttgaattttataaagagggtcatttactatgtatgttgcagctgaggatattgaagctggacctaggacgaagtttcaaacggaaccaactctaccaatatatctaaagttcacggatgtgacctacaagatagtgatcaaggggatgacaacaactgaggagaaggatatcttgaatgggatcactggttctgtaaatccaggggaagttttg

SEQ ID NO: 104219 - DNA, 240 bp, Glycine max
  unsure (1)..(240): unsure at all n locations
cacacacaaagtgccctttcgaaaccctaaaattcctcctcacactcctagacttcccttccaccaccttcgcatccatccacatctatgatcatgaacctttcagagaacttggcaattcctacctcctcgccggctgcatntaaggcatcgttgcttcccaagccaattccatccacgacgatggtcgttcctacatccggtatacttcaaagctgcagatcctttcaatgagcgcca

SEQ ID NO: 104220 - DNA, 239 bp, Glycine max
gaggatatcaagggattggattttatagtttttgaggagccggaaatgacaattataagttgccacgttgaaggaaatggtacagatgaactacataaacacctgatggtagaaatcaggtcagctagtgacctaaacaagatagagtcagtcttccccctgccaatttcaaacttcttccaagtgaagggcttatcaaaaggcagacaccttctaaagcttcaatctggtctcccatc

SEQ ID NO: 104221 - DNA, 119 bp, Glycine max
ggcaagtgcatggctccaaagggccatgcacttgcacaggcaaaagcatggccctttggagccactaaatgtcaagcgaatggagccatcaaaggtagaaagcttgagatggctctgtc

SEQ ID NO: 104222 - DNA, 237 bp, Glycine max
tgatgaaattgttttttaattttttaaacttcgcaatttggaattcttgttattaagccttcacttatgttataagtataaatgctttggctttaaccaagttcattagttgaaaaaggaaaaagaatgtagcttgctgagttttgcaacaattaaccaattgtgtcaagctaaagttatattgttcctaacttccaagcttcgatgatttttcttggttggttgacttggtaaaca

SEQ ID NO: 104223 - DNA, 235 bp, Glycine max
atcatgccaaccacgtcttaatctcaccgtatccaaaaacaatagcaataatcattcctcatcaaacctctattttgttattattgcagactgcaacattcccatccatctttggacctctaaacctttcaagccaagcagcaccactattactaataaaacccacaataataataagttaatagatgatgaagaaaccatttccaatctctttgttaatttcattcaagccatc

SEQ ID NO: 104224 - DNA, 233 bp, Glycine max
gtccctttattccttccttcctttcttcttcttccttacctctttccctggctgatttagggttttctggcaataatctcctttcggtactttttacctctgaatcctcatcatcgctattgctgattacactcctcacaatgctcactcaacgcctcgttcgaaaaacgtgaaatcttctcttctgcaatttctagggtttcgaattgcggaaccgattcattcaactcaac

SEQ ID NO: 104225 - DNA, 232 bp, Glycine max
cagctccatttttcgccttatagtttcgtcgtgtcttctttttactttcctgctggaagctgttcatggcagcataaaggcaagcttgttgttgctcatttagctataacagtttctaccatgaaattatgatgttttttttgtttgtgatgttgctgaatttcccagcatttgcattaatgcttggctgcatgtttgcagtgttacattgtatacttgggagctcattctc

SEQ ID NO: 104226 - DNA, 232 bp, Glycine max
atccacccacaccactcaaacaggtacagggtgtcagttttccaagagatgtgattgctgaagaatgtatacctgcttctgtaaacaacagaaaaactgggatttctaatatgattgacatggagaggaggaaagagactggcactgtgggttgttcatttggagaaaacagagaatcaaatcatgctgatagtattacatgctcagttggtagttgtagtatcactagcag

SEQ ID NO: 104227 - DNA, 230 bp, Glycine max
ctctattgtgtatgctttggtttttagttgaaactcttttactgagggaaaattttaagtttgatcactattgcagattcggattcggggagttcctcagggagtgattctgaagcagacaacgggcaatcataacagtcagggggtttgtgactaatgatcaaacatgatcatgttggtaggcggatgaagaaaatgtttgcttcattggcttcctttgagggcgctgc

SEQ ID NO: 104228 - DNA, 230 bp, Glycine max
caccattgctgcaagggaaacgatagagcaggttatggcagatgccctttcaaagtgtggttccaaacgatctttagtccaagctgtttgtttggctgtatctggtgttaaccatcacacagatcaacaaagaattctcggttggcttaggttgctaagctttacataaatgtatgctccgttttttttgggataaaaagtatatcatgctatttttactcttttgctat

SEQ ID NO: 104229 - DNA, 252 bp, Glycine max
gtaatcactacgtcgtcgttggaatatctgtgtacgtctcgaacatgtgaacgtgactctgcgcaactccggacacgagtaagacgattgtgttcatggaagaagcatctggagctcctcatttctgtctagtctcgagattatgctgtatgaatgctgaaagtcacagttccagacagaagctagactcgaagatctgcgagttataccatggccggtgcagttggggagttgaagatcctcgcaagacca

SEQ ID NO: 104230 - DNA, 254 bp, Glycine max
gatttctattgtagttacacattatcattcataccagttcatgattacataacaatgtaaaagtcttttacaatcactgcatatactttttactcgacatatttaacattttccaaattgtgctttgaatgccttgcttatgttactgttggaactaaaactaattgtcacatggactacttgccaacttcaattctaacaataggaaacaggggagcaggaagaagcccactagactgggactccagagtgaa

SEQ ID NO: 104231 - DNA, 247 bp, Glycine max
gaatattatgttactaatttttaaaatatgaataaatgttatcttatttcaatatctttggatttgattatgcatattttctttttaagttattttttggatttgattgcacatattttcttctatcatgtgtactatttttattcttcaaatttaattgaactattgtcttgattgacctttactttgtatttttggttcttcaattcattgttttcttgcaaggatcttttcatagatgtgttga

SEQ ID NO: 104232 - DNA, 242 bp, Glycine max
agaatcactacgtcgtcgttggaatatctgtgcagaagccgagcatgtgaacgtgactctcggcaactccggacacagtatatcgatgtcgccatggaatatgcatatggagctcctcatttctgtctagtctcagagattatgctcgtagaattctgaaagtcacagttccagccagatgctagactcgaagatctgcgcgttgaaccatggcacggtgcagcttgggagttgaacatcct

SEQ ID NO: 104233 - DNA, 234 bp, Glycine max
gtcatggattcgtcaagagattttgcagatattgtgtgcagaaatggggaaagagagaaagtatactgggctgacaaagttgaaaattatagaaaatcttctaaaaattgtttctgaaaagaaatcaggcgggaatgaaactgcggcagaccctgaaccacaatcttctcctgcacctggtcataaggctgccaaaaggcagaggaagtctgagaatccttcacacatcgctgt

SEQ ID NO: 104234 - DNA, 232 bp, Glycine max
aaagcagcatcctgatagctatcataccttgatcatggattgaactttcagactttgaggtcgtctatggcaaggagttaagggacaagcccttttaggttttgttgccgaactaacatgtaatacaaaccatgtcaatcacaagacatcgatggcttttaaagtgtcatcggaagtacagctatgatcgtcttagagtttaacataagtctatatcctatattttagctct

SEQ ID NO: 104235 - DNA, 237 bp, Glycine max
gtgaaacatgacagggttgaggaagcacaaagtgcaacaccacccccaacagaaggagatgatcacaaggttgagcctgctgttgcagtagaaaagattgaagattctgtgccatcagatgaatctgtcgttgcagttgaagacagtgtaaaggaggagaaggaagtggttcctgactcacacactatcagtgacattgaaccagttcatcaggcaccatccacagaacaagctgtg

SEQ ID NO: 104236 - DNA, 246 bp, Glycine max
tggctcgagcggctcgagctcgagccgaagtcggctcgaggttcgttttgttagagtattcctattttcctcgtgtcactttaccaagatttaacatggtggtgattgctttgaattctcatagttgatccataagggagcttgaaagttagtctcttttttattgtatttttttggtctttctatttttgagctgaggatggagtgtaggagaaagaaggagaatcaaaaatcaaactccacttt

SEQ ID NO: 104237 - DNA, 230 bp, Glycine max
agcaacttctttaacaatctttaatcattttgtttatttttctgtccacatgcagttaatttaatcaattgatttatttattcctaggattttgtgttattattatatgatatgattaccaccaatgcattggcatgtaacttgttacttggaagcaagactaatttatggttgttctttttgataatgacccctttgccatggaaataatttctagatgcttttgatgg

SEQ ID NO: 104238 - DNA, 228 bp, Glycine max
caaggaggccgtgaactccaagcccaagaagaagaagggaaccaccatcacgctttccgagttcaaccgtggcggtttcgaccagggccttacgcgcgacgagatgctcacccttccgaccgggcccaaggagcgttccgccgaggaaatgcagttcaaccgcctcggcggcggtttctcctcctacgaccgctccggcagtcgctcgcgcgaccggaacggtggcaa

SEQ ID NO: 104239 - DNA, 223 bp, Glycine max
ggttcattgtcaagttagagaggctaagagatcattgctaaaccacggccttgggcatggtattcttaagtgtatcgcaaaccataccgctatgggggtcctatacccggggccgaggttcattgtcaagctagtggcgctaagggatcattgctacaccacttctatggacgtgatgggctccaggacatggagatattgggtgctctgtgggacgaagacc

SEQ ID NO: 104240 - DNA, 249 bp, Glycine max
aaccttatctccttatgtagtcccgtgtttgtgtctgtatttgtctctcacatgaaaatgtctcgctgcggtggtaactgtggccacctctcatctttccttctctgactcccaaactctctcttcacaactctccacttccttcgcttctctctcagcctctgcaacctccactctttcgccaaccccttctgtgtactgtggcagaggggacggaaaatgccagggaaagcgcttcgccattcattt

SEQ ID NO: 104241 - DNA, 259 bp, Glycine max
gctaggtcaaatagtgttattaatactttatatttatataaaaacaagttcacactagacaatctactcaagttgagtcagctagataaaagtattctaaacgaaaagtcttgtttacgagtattttaatatagatgataaatcgaagacagataataaagaatttatataacttacacattcggttagcctaattaaatacgttggtggttaaattagaataagtttgcatgagtcgatatatgcagtgagtgatatc

SEQ ID NO: 104242 - DNA, 185 bp, Glycine max
catctttccaccttctttaaaaaatggtgttagagagtggcatactttgtggtttcctcttttagcttctaaaagaggaaacaaaaaagtatgccaatttctaacacgatctttccaccttctttaaaaaatgcatgtgttccattctaaattaaagcctcaccatatttgagaacccactttga

SEQ ID NO: 104243 - DNA, 253 bp, Glycine max
cacgaggaaaaaatgtttagtgccagtgtttattactgattttccagaaactacacttttgctggctggttatgtttgtgttgtcgtgtggtttcatattttcttgattaggttctattcccattcagttattcccaatttctaagcgcaatgccatgcaattgaagttgtattttactttacattgctcattcctttcagttagcatggtctttagaacctgctattgatatctttttcttcttctcaaatg

SEQ ID NO: 104244 - DNA, 258 bp, Glycine max
gtttgataaacccaaaccgccattggtggtttaattaggtttggaggtgggctccttcaactctcccaaggcctttcaaatcccgatctgccgtgacttttgacggtgacacggttgaaggaggagcagtcacttcacgtcgttgttggatttctgccgcatcacaccatacgaatccaaatctggcctgactttcacttgccaccgcggaggacgatagcgtgattgaaggagaagcgctcaccgccgtgccgctgt

SEQ ID NO: 104245 - DNA, 252 bp, Glycine max
tataagcctcaccaacctctcctacatcagaatctccattggatgaggatgatggcatttcttccaaagatggtggtcttgagttgtaagttataagcctcacttcgtcctctatggagaaattttttggtacacaacttcatttctacatttttgagtcttggacaatcatatatcccttggctcaattaataagttgctttatctaaaagaatgacccaaacagcttcagagaagcaaatgcattgcatt

SEQ ID NO: 104246 - DNA, 239 bp, Glycine max
gttagcagtgagagtgttgctcccctatactatttgctttgtgattcaaatcaatcttgctttgttctctcgatttatggtgtacgtactgatgtgattaaagaaggagatcagctaacatgcttgacccttattttcgtgatgtttatttgtcctggaaggagaagcattaccagttcaaatctatacgcctggatttctatgaacaagtgcttgtaaatggaaaagctttgactcct

SEQ ID NO: 104247 - DNA, 251 bp, Glycine max
gtagaaggtccaaagaagattgaggaggtacacagggatgccgctcaggagaggcaggcccaagctggtaggtcaggtcgtggtcttggcaacaatcaatcagctagacggaatcccatggattttggtccagaggatcttctatgctgtcttctcccaattctcaaatgggtggactgcgtggtcttcctactcaagttcgtgggtatggtgcttttcaggatgctcgatttgaggaacgacaatcttat

SEQ ID NO: 104248 - DNA, 253 bp, Glycine max
agatcatccctgtaaatactgagctagtggagtgaggttcatggccaaaacaaggcaaaataataaatgtattcttttgtcagtgtctggtaattagggatgtatacgcactgatatagctagttccttcttaccttttatataaggtacttctatcatctggactagtttggtcaactctgtactatgcagatatcatttagtggtctacttatcttgtggcataattttaattcatctctttcctttgttt

SEQ ID NO: 104249 - DNA, 252 bp, Glycine max
aacgaaaatcctcgaaacctgcatgcgcgaaatgttggagctagacgcaacagttcgcgcatgctacggggaggaaatcaagctcaacaggtatgatctggccacaattatggtgtatgacggctgttttctcttgaagtcgccatttcaaaagaaaaagactggagcgcggtgttcccgcaacagtctgtttctgtctcagtgagcgatctagggactaaagtcggggaaatggaagcagtattgactgac

SEQ ID NO: 104250 - DNA, 247 bp, Glycine max
ccttgacattacacagttagcgttctgctgagagcttaaccaaatccacgacgaggtagtagggttcttgccggcaagtggcaaccatggccactaccagcttgcagatgagccctcaggtggagcagtcctcggcgaaatctgcgatcacttttgagctctcgcgtatgtccatatctctctcagatccagcgcgtagatttttcttaattccagattctctgtttcatgttagatgatgaatttc

SEQ ID NO: 104251 - DNA, 248 bp, Glycine max
gcaacgtggttgaatgtagcaccagtctagtcagttgcaggcttcctgcacgctactgaaaaagaaagaaaatccgtttggatgaatgcgcgaggggaagagagactctctctcctcttccttctacagttttaaagagtaaagtgtgtctcatttttcaatcttgcccgcatctttttgcgatttctcatttttctcctgttcctttcctttccgtttctctgctactattcccaactccttccatt

SEQ ID NO: 104252 - DNA, 246 bp, Glycine max
ctcgagtgaaattttctctatccttaccattaattggtagttttttaagtagagacgttcatgtgtctctcccgtgttggctagacttttagcacttattattttaccaccaaaaaaaatctcctttgaatattgtataattgagatattttcatgcttgaatggcggtatccggatttctacaaaaaaaaaaaaataaaataattataaaaaaaagggggggccccctttttgttacctgttccc

SEQ ID NO: 104253 - DNA, 248 bp, Glycine max
cagatgtgaagttactgaatctggttcacctggccagttgaattttgatagtcaagctgctccagcttttcatccccattcccttccagaatttcatgatggtttagctaacagtgttcatcatattctcccgaggtggcagcaaacatcaatctcaaaacacaggaaagaatagataacatgcagttctgtcaagtaaactccaatgggcgcttcatggaattcaatgaatgtgtttttaaatcctc

SEQ ID NO: 104254 - DNA, 244 bp, Glycine max
gacttactttttcccatttttttagcccataactccaactcaccaaaaatgaagagagagggtagacaacatggtatggtgaggtcttatagaatcctaccaaattcacttaaccctcgacccatactcgattcatcacccaatttgatgcccctcccactgctggattcttcgtaaaagtgtcctctaagccaaccaatcactccaagttcactggcaagtgtggcacaccacgttgcaccgg

SEQ ID NO: 104255 - DNA, 243 bp, Glycine max
cattaattttgtaatttctaaaaattagaaacactccaaataattattatatttttattaagagatttaatttaattagttaaatcgtataggcacgtgaattattataaatctctcttgaattaattaacttcaattccaaaagttagtttaaaaaagttgtctctcacttattgttagtagacatgagacttggatttatttgttagtttacctacaaaggcaatgcttctgtttccattc

SEQ ID NO: 104256 - DNA, 245 bp, Glycine max
gtttggatttgctcagcctttggacccttttgggggtttcaggaagggttttggaaatggttcagtggggtgatggacaatgctctctacccagttctcttcctggattacatgaagcaatcctccctatctttgatcgtttggctgctcgaatccctgctcttctggggatcaccctttcactcacttacttgaattaccgtggccttcacatcgtcggcttttctgctgttttcctcgccctt

SEQ ID NO: 104257 - DNA, 244 bp, Glycine max
ggggtttaggattggagggattgacgctgcgtctcttcctcttctctttcgatccatccctcattcctaatcctccaatccaaccacctcagcctcacactcacatatacacatatctgaacgcgtatcgtccctcctatggcttcaaagcgcatcctcgaagagctcaaggatcttcagaaagacccaccaacgtcattcagcgcctggtcagcagcctaggacactctccacttgcaagcaa

SEQ ID NO: 104258 - DNA, 236 bp, Glycine max
tttttattatgatttctcttccttcatcttattataactatgcttttgtcaatagtcccacatgatttcaatgaattcttaacttctttccttgtgcattgtcatggaagaggtgttcaatttcatttgtatgaaacagtgctctgaacctaagggtttaccataatcttttttcatgtaatagtcttggttatgtagtattaaattattgttagagcttattttgctatctattt

SEQ ID NO: 104259 - DNA, 241 bp, Glycine max
cgtcaccatgacgattaattttatgtcaactatgtgtctttcggcttagtgttagcatgctgtggatgggttattttctgatggatgagtaaattttggctcttctgttacgtctaccattgctaattgaagaatgtttctttttcacatgatggagattttggcattgtagttgactaagtgaccatttcagaaatgtcaaagaggtcaagctacatgcatggcttcaaaatttccatca

SEQ ID NO: 104260 - DNA, 161 bp, Glycine max
ctcggcgaatggatagtcattattgctatataatttatggattttggtgtgttttttggtctttgtatgatcctgaattctcatatgaatgtttccagctaattgtctaataagttatcatatcattctaaagtcaactgcactagaagcgcttcgaccaa

SEQ ID NO: 104261 - DNA, 154 bp, Glycine max
tgattattgtgttattaaggaatgatttctaacattacccagcaaaccccaaacagtttcttctgtgaactcaaaggttaatcaagaaatagatgagagtaatactatcttgcctcaagtgactgagaaacaaatttctactacccctccacct

SEQ ID NO: 104262 - DNA, 129 bp, Glycine max
acaatttgggcatgaataatatctgtccacctcaatccacctttggacttgaagtttcccagtcccaaaagtagccatcaagtggattccagttttcacctattggttctagccagcttggtagtgctc

SEQ ID NO: 104263 - DNA, 163 bp, Glycine max
gcaagttcaaccatgttgcatgaagttaacagtcaaagaagcaaatcaactgagaacttagtgagatacatgtgatcagtctatagacatgaagcatgacaacctggcagaaaacttggaaaaatcggatgttactcaaggcgtcgcagaagcatccatcacc

SEQ ID NO: 104264 - DNA, 131 bp, Glycine max
tttgaatggtgaatggttatggggatttaacttccaaagattaacacttctcaaattatctacagcaagagatagaattcaagagaagtgttaatctttgaatggtgaatggttatggggatttaacttcc

SEQ ID NO: 104265 - DNA, 146 bp, Glycine max
gaaaaatccactaacagcagcaagcttatctctgcagcattgaacaccaattgaacaccaatctgcagcattgaacaccaattcaacgccaatgggtcaggaagaggaaaaatcccaagaaaacaaagtggaggagaaaaaagtag

SEQ ID NO: 104266 - DNA, 258 bp, Glycine max
ctttgataatctgcttaataaaggtttgagttaaaggattacgatgatttatgcagattacccaggtgaaactccaattcttattggaacctatggaactatatctaagcgtcacacttgaagttttgtgctatttacaaagaaatctcccaatatttgttgggtgttgttagttattggtacttttaatactcttattggaagctgagaagattgggaagtggaggaattggggaagggggctcgtgcttatatttg

SEQ ID NO: 104267 - DNA, 242 bp, Glycine max
gtagtgctaggtcttgaacccgctaaagggtcgtcgaggctggagtgagttgaagtgggagcgtggaaaacagaaaaggggtggtcgtcgcattaaatttgtcaaaaagagaggggttttatcttcttattactttgtgtgtttttatgttttttgtggggcttctgtgaacagtggttgctttttggaagcttattttggaagcaatttactcttccccttttgaacgtgattgtatttag

SEQ ID NO: 104268 - DNA, 250 bp, Glycine max
gatttgtgaaaattttggctggcaactagtagcaaccttctttaaacaaagcagaaggaagaagaatcgcgtttcgattctcacgacggaagaaagcacggcgcagctcaaaaaaccaaatggaagcacaaagctctcagcatacacaagttattgagatcagtggtgattttcctgatggtggaaggaagatttgtggggaagcaccgtgtgggtttgcagatgctggatccatctctaaggattctga

SEQ ID NO: 104269 - DNA, 207 bp, Glycine max
aacaaaaatgtgaaattcttttgatgtgttaagggaaaacgaataagttgtgactcttgtcacttggggtttgtaatggtaaaaaacggtttggttaatagtcttaatgttgttgtcatgtttggttggttggtttggaatgagcagtcacgggttttgccgtctgagagaatattcaaagcaatatatagctggtaattaatattt

SEQ ID NO: 104270 - DNA, 256 bp, Glycine max
gtgtacttcctccggtggtaagttcccagatccataggagcacaacaataggggatgacatggctcagtctgctgtcacgatctcgggtgcaagtaccctagaaaccatgtcatctaatgcaaacattgtccagccgaagtatgaagtaaaggcttctttaaatatttcaaaaaatcagaatcaagggaatgttgcccctcagacatacttgaatggtgttgttcagacagactatttggattcatcatcttctac

SEQ ID NO: 104271 - DNA, 249 bp, Glycine max
ctgattattatccttttttttctcatgttccgtattcctctttccagaggacaaggagagtaatagcaagaaatcaatgtttcaccaagttatgtagcatgtatatctatcattaattgataatttcttttggactccaatttcaggaaatccctgtacttgccttacagtgcagccaacacttgacaatcaatattcccagtcaaagccaagcttcagctccacaaatcaacccagtttctcaaagcc

SEQ ID NO: 104272 - DNA, 241 bp, Glycine max
caaccaacctcaattgtcttcctgtttggaatgctcaaggatacatccttagatattctcagacatctcaaaacatatggagcttcattctctcagcaccaaacccaaattcatacatagcaattgggttctctcccaatggaggcatggtgggttcaagtgccatagtggggtggatctcatcaaatggggcaagtggaggcatgaaacagtactatctaacaggtctcacaccaaacca

SEQ ID NO: 104273 - DNA, 245 bp, Glycine max
ctgagcgtgtcagatctcctggagtttattagtcccgacccaaaaggaaacgatgctcggagcaaacagaggcgtgcaaagatactctcaacaagtgatgacaacagtcaagaacatgacgatgcaatagccaatgagagcattctttttgataactcaaaagatgctccaagtatgacagaagtcaagatagaagaaacaaatggcaaacttgattctcaagtacagaaagaaaatggtgattt

SEQ ID NO: 104274 - DNA, 246 bp, Glycine max
gcttcaaatacagtttcttagtagatagtagtaagaagttgaagctatagattaatttattgtagtaacaattctagcaatttttgagccgataaaaaatttgcccttttgtatttagtatggtaaataatgtccacatatcccggacccattgagctgtatgaaatttatttgaaattgtgatataattcaaaaacaaatggattaggtgcatctagttccatcattgttggaactgaactattg

SEQ ID NO: 104275 - DNA, 246 bp, Glycine max
ctaacacttctctagatcgtagaactgctacacctttcactctctaattacacaatgaccaatttgaagcttgtgttcacgatcagttccattcttctagccttggtgtttatcaatggaatttcttcagttatggggaggccactgaaaaaggagcacatcataacaacaacctacgaaaacagtgtcaaagaaatgggcacagtggaagacaacaatattctcctgtggcgccgaagcatcata

SEQ ID NO: 104276 - DNA, 244 bp, Glycine max
gaggcttctgcctcaccttaattgtctacttgtcatattctgcagctttgtgataaatttgcaaccaggccttttatgttgtacccggcttgatttgttcctcatgtcttttctttttctcttgacaggggagcttatataattgttactatgtgtggctggtagggacatagtagttgttagcatgtacaggtttaggacatatttggttcccatgtttccttattatatatagaaggatggg

SEQ ID NO: 104277 - DNA, 241 bp, Glycine max
gcttcagttgcaaataatattataataccacatcctgaattccggataccttcctttaaagaacatcacaaaaatgttcctcaactcgcgatgattgtcatggcatgcatggttggcgtcatcatgtttctctgcgccgtgtccgtactcataaggtacttctactcaagaagatatagccgcaataaccaaaacagaagagtcgacgcccccatattgttcgatttgaacggagattctc

SEQ ID NO: 104278 - DNA, 239 bp, Glycine max
gaggagaaggggtggagcgaggaggatgtggaggtgctgaagaagcagatggtgaagaatccggtggggaagccagggaggtgggaggcgatacggcggcgttcggggggaggcacggagtggacagtgtgataaagaaagcgaaggaattgggggagaagagagtggatgattcggagtcgtatgcgttgtttttgaagaagaggaaagcgttggataagagggttgtggaggagaat

SEQ ID NO: 104279 - DNA, 236 bp, Glycine max
tttcttcttttttagctatccctctcttgaaaaatctagatctcgttcttccttgatctacgttacgcttttagtgaccggatctgtatggatctgaaccagatctacacgccgatggtggttttggcctggtctttcatagatctgatgcatggaggctcagatctactgtacagaggtgtgcgattcatgttcgtctctcttttggaatctgtttcgtagaaagtcgtttggtc

SEQ ID NO: 104280 - DNA, 237 bp, Glycine max
aggcaggctaatacagtaatatgacttcatttgtatgacgatttctggtttatgaagcttgttgtaaaaaaattgcggtccatgaagtgaagttcatttgtcctatttttgtgaccatggaagtttaaagcataactatgacttaaatatcattttcttcatctgtgaatctctatcctttttttccccttttctcatgggaggtcaagaagataatattgcggagtactatcagca

SEQ ID NO: 104281 - DNA, 243 bp, Glycine max
gttattcatcataattcattttaccatcaaaaatcaaattccattcagattcaattaaagcgaaaagtgtcagaaaaacgaacccttttttatttgatatgacacattaataattgttatagttaggctatagaaatagagaataataataaaagaaaaagaaaagaagagaaagatcatatgatggactcagaaatggtggaagcagaggcatcatcatcgcagcctcagccgcagcatcga

SEQ ID NO: 104282 - DNA, 234 bp, Glycine max
gccggaactcattctccgcctccggaagtccaaccattccgagtcttacctcttcgccaggaaattcaccccggattgcttggagcccttgatgcgcattgccaaatcggtcatcttcagggattgacattgaaaacatgcaggtggaaaaggcctgtgaagagcttgctgttgctgtggctgtagcttgatggtggtgtatagtttgaagaggcaggaacagcccacatccta

SEQ ID NO: 104283 - DNA, 225 bp, Glycine max
cataagttataccgacttctgattatatgctgaagaatttctggggggatttattttcccagtatttttagatgccatattctgaagatagaatgtagatgtataaatgacaaaggtccttgcactaagatcctgtagcggcttcttttttcctctacagttgaatgtaaaggaggatgcattggtaaaattcaaaagtgaacttgctgtcatggaacttgaaat

SEQ ID NO: 104284 - DNA, 224 bp, Glycine max
tgtaggacaaagtctatcatacatttacctatggattttgtatttatagtgacagtttttgtccgtaggtataggtcatttttcttgtagtgtgagctgataatttttttattagttaactgaatattatatgacagcacttgttcatgagacgtcaagagagtagattctttccttatcttttaaccatgatcccaacctaattgatatggtgactccatagt

SEQ ID NO: 104285 - DNA, 216 bp, Glycine max
atccttttacggctcatgacattgataactgatctagcaaaaactattctctaactcatacggtacatccagaactcaatcttgctggatctgggaacctgtcacatgaattgaatgcacacatgattaaagatgttcatgctgttagtaagacaagctcagttttggacacagacagcaatggcaccaatacttctgcaattgccaaggaatact

SEQ ID NO: 104286 - DNA, 135 bp, Glycine max
ctgaagacgttcatggagattgcatgcaccaattgcacacaaatcaaacagtcctattggattctcatttttggtggcatccatttctttctttcccagcttcccaatttcaattctgttggccggggttgtctc

SEQ ID NO: 104287 - DNA, 239 bp, Glycine max
gtaatattagctgtgtatgtattggccagtatatgaactcttcatcaactcaactagtcctcacgaaaaggatgggtatatatgatccattccatcaagtgaacatgtggggggacagctttaaaattgatggaagcttgaactcaattgctccccaaatgttgatgattaagcctagcatgcggaacaagtctgaatgtactcctcacgaatcaagggaaccttctggagatgatcaa

SEQ ID NO: 104288 - DNA, 224 bp, Glycine max
cgttttcatttcccaatttatagtaaggaatggctgtgatctagttaaagctctgttaatttatgttgaacaacttattgggttttatagttatgatcgggaaaagtgatgagagcatgataggcgcatgttgactttgttgctgttgatgctgtttctatgtcattgatgattggtcgcgaatttgatgctggttgcaagagtatgctggttttaggactgtg

SEQ ID NO: 104289 - DNA, 224 bp, Glycine max
ctcgagccgattcggctcagttagaattacattggttaaacagctcatttggtcctgattggtaacactcatttatgattcagttactgtatgagaaaaattgaagttatagtccatatatgctcttattactaattagtacacattggcccctgcttttactatgtctcttaagctgtagtccttatatgcccttatagccttatagagactaaaacttaagc

SEQ ID NO: 104290 - DNA, 146 bp, Glycine max
aaaagatgaaggaagagatcctggtagcaatggttctgtctataatgctccttcctataatgggttcttgctgccccttgctgacaactgtcacaatccactgtgcacgatttgatcactttccacagtcactgggcatactccgg

SEQ ID NO: 104291 - DNA, 208 bp, Glycine max
ggaagtatatggtgtaagtgtcattttcacgtaaagaaatttgtcggtgtttttatactttcagaaactgggatagaagtagtattgttatctgttctatccctaaaatgcatgaaaagtaactgtttctatgttattgtttcatattctgttctttattttggttattcatcaatatatggtgaccattatcagacagacatttcct

SEQ ID NO: 104292 - DNA, 169 bp, Glycine max
gccctgataatatcccaaatgtatatcacggctgcgagagatttgggattgatagccaacttctcagtgacttgcccttaagttggctatcaatcccaaatttctggcagccctgataagctcccaaatgtatatcacgataggtttatcaggcaagaccctttcaggt

SEQ ID NO: 104293 - DNA, 239 bp, Glycine max
ggtcgccggagatgggtgggtgcgcgacggactcgtgtggatgcgctctgaactcatcgtggtttggtaggtgcttgacgagattgtccgagttaggtgggggcgtttcggattcgtcggagttcgatagatgcgctacgaactcgttgtgatttagtgggtgtgcgacaatgtgaatgtgaaaaagaataaaaaggaaaaatgaaatgccgccgccaggattcgccttcggccgcggc

SEQ ID NO: 104294 - DNA, 105 bp, Glycine max
atcgcttggatataaccttgaggcacatgtgttctcgacccctggtgcttgtgctgcattcattgcaaattatgacacctaatcttatgcaaaagctacatttgg

SEQ ID NO: 104295 - DNA, 126 bp, Glycine max
gtacttaatgattcatgtgagattaaagctaatcggaagaaggtgaaagtaagctgaattatgactattagttcttcttatcatatacacaactatatgatgtaaacctctttccctgagttgcaa

SEQ ID NO: 104296 - DNA, 238 bp, Glycine max
gccaccacttcaatccccgccaccaaatgtcaaccaaacccaccaaaacctttccttaccctcacacccaacccaacctcacgcacccactccaataatattaacaacaaccacaaccctttgtttttgttccttacacaccacacaccttcctcatcaatcaatggcgacccccccaaactacgccgcatcgacaaagaagccccagcccataccatggacccatcaggagaccgtg

SEQ ID NO: 104297 - DNA, 251 bp, Glycine max
acttactgcactgtaagtagggcaaacccttatattagtacattaaaagttaaaacatccacccttgatatgaaaactattcacattaagtatttttataaagtagtttcattatgctcattgttcatacaatactaaaaaagttatttttagaattagcgtagttttcactggtggcttcttttaaaggtggaagcaatggcacatcctttctttgaggagcttcgcgagcccaatgcccggctacctaa

SEQ ID NO: 104298 - DNA, 100 bp, Glycine max
tgtctcacgcaggtctgcttttacttgcaaatgcccagaggaatgctatatatgctgtgcatttagagtatggtcctaatccagactcaacacgcatgga

SEQ ID NO: 104299 - DNA, 237 bp, Glycine max
catttgtcttgttagcgctttaaggggcatggttcgaggcggactttgtctgtaccctgtttggaacctgctgcctacctcatgggaggtaggtcatgagatgacagctttgaagtctgccaacaaggagttgaagggaatgatgaaaactgtgaagatccaagacattgataacttgcaagatgagatgatggacctcatggatgtaagtcatgagatccaagagactttgggtag

SEQ ID NO: 104300 - DNA, 235 bp, Glycine max
cgtattggtgctgataaattgtattatatatggaatcaagggcactggcttagaggactgcccttcaataactttctatctctgctagctgcctttgtatacaaaatcggtatattctattctatatcatcatatatgcattaatctggagtattatatatcaaaaaaaaaaaaaaaaaaaaaaaaaaaaaaaaaaagggggcccgccctattattaactccggcaaccgggaat

SEQ ID NO: 104301 - DNA, 230 bp, Glycine max
caatgacactgtacacctccctgagctgcgccgcttctgatttctcccccagtttctgatttattcgttattcctattcctgtttcattcattcattcattcattcattcattactcttcttcatttcaataacacatatccattcacaacaaccaaagacagaaccagaaaagaaaaaagaaataacttttccgattcaaatatcggaaaccctgagaatctccctcgc

SEQ ID NO: 104302 - DNA, 231 bp, Glycine max
gtgtagaacagcctgataaagactcatcattgaaggttcagaaggatgtggcaatgaagcacccagccccacctccatgtagttctgtaagtaatctgcccaaagatagcgatttgttcttggccaaaagaaatggagcctatcgtaaatatgagattctactggagttggagaagctacttaccccagtattcaagaagcaacctagcgtaaatcagtgagtgttggaaa

SEQ ID NO: 104303 - DNA, 255 bp, Glycine max
aaacaagtagtaaattgctttatgtatttggatcaaatgagttgagttattaaatcttaaaataaagaaatgttttttgatatatttgtttggggttcatcttcttgttgtttaatggaggatccattaggagagagataaacacaaacatggggtatcggagacccaatatttttccatttgtttggtggtgattaactataattatgcagattgtggaggattgtgcaagacaaggtgcagtgcccattcaag

SEQ ID NO: 104304 - DNA, 263 bp, Glycine max
gaataaagttggtttggtaaggtattctggttgtttattcggggtcagcaaaccgagtgcagtgcagtgcaaccatcggacaataatggcagaggcagattcgtcctcctcctcttcagatggagaaccctcgccatcgctggcgtcgattgcggagaatcttcagcgttccgccattcaatctgctcgaactgtgcaacatagcactataaatcatttccgtgcctttcagaattttttaccagaagcagtaccacagtata

SEQ ID NO: 104305 - DNA, 169 bp, Glycine max
attttttggattgaatccctttgaaaaatagtctgtgagaactatcagatcaatgtttatgtaccccgaaatgatgatctgatagttctcacagactattttttggattgaatccctttgaaaaaccagatcataatcaatggatcaggaactggttttgaataaggag

SEQ ID NO: 104306 - DNA, 270 bp, Glycine max
aattctttctatgcagaagccattgctgattgcttggagttcatcaaacgaacatctatttcttccatggaccaaattcaagacccagtttgtcatattcaagatagaaactcgtgactccttttgttttctttttggtagaggaaatcaatattagatttatctgtttttttttccttttaattttttggaagcattgagaagatatgatatagttactccttaatctgtgtatatatattaatttcttctaaatttttgcatcggtta

SEQ ID NO: 104307 - DNA, 265 bp, Glycine max
acccttctccgtgaggatctccaactactcatctgaggatgaagaaaatgaagaacaagaggaagagccccctcctctcatcatcatcacccttctccgtgaggatctccaactactcatctgaggatgaagaaaatgaagaacaagagggtggaaatggaaatggccatgttgatgatcaggctgaggatttcatcagaaggttctatgaacagctgagaatgcaagccgcatgcagttgctggagtatcaagagatgtgattg

SEQ ID NO: 104308 - DNA, 259 bp, Glycine max
gtttcttcgaggcttaagaaacctcgcagaagtcaaagagaactcactctcagacactttggttcacagtaacctttcacttctattttgaatctgtctagttccttctcccatattatagtgccctcttatgcgaagttacttacgtttcaagcctagattactgctcagacttgtgttactgctttgtgaagttgtaagaaaaatggaggctgatggaccagttatagcgaataagctacgggatgtgctgaggctc

SEQ ID NO: 104309 - DNA, 264 bp, Glycine max
aaaattgatgtggataagatcactcacagggagcgatcatcgtatgtgggaaggcgcactgaaaccttcacttttctggacagtactgatcctgacattttcacaccacgctctgcctctgactcttatggaactgcaacatactatcgtcatgttagagatccttcctctgatggttttgctgaggttgcctctaatatacatataatgatgcttcaagggagtctactaatgggtggacaactaaattcacatgatcatttc

SEQ ID NO: 104310 - DNA, 269 bp, Glycine max
tatcaatattcgctaaattaataaaatgattttcatcaaaatcattttattaatttacccaatattgataatcatacataattaacaaaaccacttaaaaaaagtgggggaaaattaataaaatgattttgctcaaagaaacaatgagtgaatatgaaactgacaaataaggaataaaaaaagtaaaaagaggaagtacactgtgaaagcttgcggctattgcactgaggttcctgtgggtccattttgtcaccatgctaagctttgtg

SEQ ID NO: 104311 - DNA, 255 bp, Glycine max
cgcttctctccgaccatggccggaatcaccaaaacctctcacttttccgtcgttttgatcgccgtcgtcgccctctgcgtcttcccggcagcgacatccgataacgtggcctcggcggtcctcgggttgccgtcccatgtcgctggcgaaggaaagaacttgtgcagcgcggcagcgccgtcgtcgtgtcccgtgaagtgtttccgaaccgacccggtttgcagcgtggacggcgtgacgtactggtgcgggtgc

SEQ ID NO: 104312 - DNA, 259 bp, Glycine max
tcgtaatcttttttaatattttttatgttttagaatattttaatttttaatttaataattccttttatgaacatccacatccacaacaaattaaataatcaagtaattaagtatatttttcccctaaaattgtgctcacttcgtataacccgtctctgttgttgttgttgttgttttttttttggtgaatacccatctctgttgttgcactcaccggctatggaatttgagtctctccaacgacgtcgttcaagcagtg

SEQ ID NO: 104313 - DNA, 260 bp, Glycine max
gttgatgtagtaattgttaattcgtgagttattcatagtactgctgtagaagggagttaaacttctatccttattgccttagcttttgcagattcaactttatcagaggagacaatggaaaaaatatggtctggtattttcctatctaacggtgcttattatttgttgcaacttgcatgtgttgtctgattgctctgcctgtaccagtaacactcgtgttatgtccatctcatctcagctggtgatggtgagttgatttt

SEQ ID NO: 104314 - DNA, 227 bp, Glycine max
caatgtacactttatggtcttacaacgctcgtcctcctattcatatcgttcggcaactgtgcatcgttccaccgttagtcttgtcatatcactccagctgcccacggatacgtgatacgatgacaactcctacggcattcggtgagtcgtccatctcgaacgttcgaacttgtacctgcattacatctgtcacgttgaagctcggcatgtcgatctggtgcgtacta

SEQ ID NO: 104315 - DNA, 269 bp, Glycine max
caatagcaagacgctgtctagtgatgcaggagcaagcatttcaaagttgttccgtcacgatgtcggctatgcgatgggattggctttctcgctcgaggatgctcgtgtagggtatgtgcaatgcgcaccccgcgtggctcaatgccatgggtcatgcaccacctgcaacatatcctcgagtcttagcgacagttccgaccattagtcttcccgaggatgtttgtgtgcagaggttttatgagaaatatccggagtccaaatcccatgac
